(19) United States
(12) Patent Application Publication
(10) Pub. No.: US 2022/0127612 A1
(43) Pub. Date: Apr. 28, 2022

(54) METHODS AND COMPOSITIONS FOR MODULATING SPLICING AND TRANSLATION

(71) Applicant: Stoke Therapeutics, Inc., Bedford, MA (US)

(72) Inventors: Isabel Aznarez, Boston, MA (US); Juergen Scharner, Arlington, MA (US)

(21) Appl. No.: 17/518,209

(22) Filed: Nov. 3, 2021

Related U.S. Application Data
(63) Continuation of application No. PCT/US2020/029897, filed on Apr. 24, 2020.
(60) Provisional application No. 62/838,010, filed on Apr. 24, 2019.

(51) Int. Cl. C12N 15/113; A61P 25/00

(52) U.S. Cl. CPC C12N 15/113; C12N 2310/11; C12N 2320/33; A61P 25/00

(57) ABSTRACT

Alternative splicing events in genes can lead to non-productive or less productive mRNA transcripts, and therapeutic agents which can target the alternative splicing events in genes can modulate the expression level of functional proteins in patients and/or inhibit aberrant protein expression. Provided herein are compositions and methods for modulating expression level of a target peptide sequence by modulating splicing of a pre-mRNA. Also provided herein are compositions and methods for treating a disease or condition caused by a deficient amount or activity of a functional target protein by modulating splicing of a pre-mRNA.

### CROSS-REFERENCE

[0001] This application is a continuation of International Application No. PCT/US2020/029897, filed Apr. 24, 2020, which claims the benefit of U.S. Provisional Application No. 62/838,010, filed Apr. 24, 2019, each of which is incorporated herein by reference in its entirety.

### REFERENCE TO SEQUENCE LISTING

[0002] The instant application contains a Sequence Listing which has been submitted electronically in ASCII format and is hereby incorporated by reference in its entirety. Said ASCII copy, created on Nov. 3, 2021, is named 47991_725_301_SL.txt and is 4,882,078 bytes in size.

### BACKGROUND

[0003] Alternative splicing events in genes can lead to non-productive or less productive mRNA transcripts. Therapeutic agents that can target the alternative splicing events in genes can modulate the expression level of functional proteins in patients and/or inhibit aberrant protein expression. Such therapeutic agents can be used to treat a condition or disease caused by protein deficiency.

### SUMMARY

[0004] Disclosed herein, in some aspects, is a method of modulating expression of a target peptide sequence by a cell having a pre-mRNA that encodes the target peptide sequence and comprises an inefficient translation region, the method comprising contacting the cell with a therapeutic agent that binds to a targeted region of the pre-mRNA encoding the target peptide sequence, whereby splicing of the inefficient translation region from the pre-mRNA encoding the target peptide sequence is modulated, thereby modulating a level of a first processed mRNA that is devoid of the inefficient translation region and encodes a first protein comprising the target peptide sequence, and thereby modulating the expression of the target peptide sequence in the cell, wherein the first processed mRNA has a higher translation efficiency for producing the first protein comprising the target peptide sequence in the cell as compared to translation efficiency of a second processed mRNA for producing a second protein comprising the target peptide sequence, and wherein the second processed mRNA comprises the inefficient translation region.

[0005] Disclosed herein, in some aspects, is a method of treating a disease or a condition in a subject in need thereof by modulating expression of a target peptide sequence in a cell of the subject, the cell having a pre-mRNA that encodes the target peptide sequence and comprises an inefficient translation region, the method comprising: contacting the cell of the subject with a therapeutic agent that modulates splicing of the inefficient translation region from the pre-mRNA encoding the target peptide sequence, wherein the therapeutic agent binds to a targeted region of the pre-mRNA, whereby splicing of the inefficient translation region from the pre-mRNA is modulated, thereby modulating a level of a first processed mRNA that is devoid of the inefficient translation region and encodes a first protein comprising the target peptide sequence, and thereby modulating expression of the target peptide sequence in the cell of the subject, wherein the first processed mRNA has a higher translation efficiency for producing the first protein comprising the target peptide sequence in the cell as compared to translation efficiency of a second processed mRNA for producing a second protein comprising the target peptide sequence, and wherein the second processed mRNA comprises the inefficient translation region.

[0006] In some cases, the second processed mRNA is otherwise identical to the first processed mRNA but comprises the inefficient translation region. In some cases, the pre-mRNA encoding the target peptide sequence comprises a first start codon, a second start codon, and a premature termination codon (PTC) located downstream of the first start codon and upstream of the second start codon, and wherein the inefficient translation region comprises the premature termination codon (PTC) and the second start codon. In some cases, the inefficient translation region comprises a region that encodes a proline-rich peptide sequence.

[0007] Disclosed herein, in some aspects, is a method of modulating expression of a target peptide sequence by a cell having a pre-mRNA that encodes the target peptide sequence and comprises a first start codon, a second start codon, and a premature termination codon (PTC) located downstream of the first start codon and upstream of the second start codon, the method comprising contacting the cell with a therapeutic agent that binds to a targeted portion of the pre-mRNA encoding the target peptide sequence, whereby splicing of the PTC and the second start codon from the pre-mRNA is modulated, thereby modulating a level of a first processed mRNA that is devoid of the PTC and the second start codon and encodes a first protein comprising the target peptide sequence, and thereby modulating the expression of the target peptide sequence in the cell.

[0008] Disclosed herein, in some aspects, is a method of treating a disease or a condition in a subject in need thereof by modulating expression of a target peptide sequence in a cell of the subject, the cell having a pre-mRNA that encodes the target peptide sequence and comprises a first start codon, a second start codon, and a premature termination codon (PTC) located downstream of the first start codon and upstream of the second start codon, the method comprising: contacting the cell of the subject with a therapeutic agent that modulates splicing of the PTC and the second start codon from the pre-mRNA encoding the target peptide sequence, wherein the therapeutic agent binds to a targeted region of the pre-mRNA, whereby splicing of the PTC and the second start codon from the pre-mRNA is modulated, thereby modulating a level of first processed mRNA that is devoid of the PTC and the second start codon and encodes a first protein comprising the target peptide sequence, and thereby modulating the expression of the target peptide sequence in the cell of the subject.

[0009] In some cases, the target peptide sequence has at least 10, 20, 30, 40, 50, 60, 70, 80, 90, 100, 200, 300, 400, 500, 750, or 1000 amino acids. In some cases, the therapeutic agent is a small molecule. In some cases, the therapeutic agent is an antisense oligomer (ASO) complementary to the targeted region of the pre-mRNA. In some cases, the therapeutic agent is an ASO that is at least 75%, at least 80%, at least 85%, at least 90%, at least 95%, at least 98%, at least 99%, or 100%, complementary to the targeted region of the pre-mRNA encoding the target peptide sequence. In some cases, at least a portion of the targeted region of the pre-mRNA is upstream of the inefficient translation region or an exon comprising the PTC and the second start codon. In some cases, at least a portion of the targeted region of the pre-mRNA is downstream of the inefficient translation region or an exon comprising the PTC and the second start codon. In some cases, at least a portion of the targeted region of the pre-mRNA is within the inefficient translation region or an exon comprising the PTC and the second start codon. In some cases, the cell has a second processed mRNA that comprises sequence of the first processed mRNA, the PTC, and the second start codon and encodes a second protein comprising the target peptide sequence. In some cases, the first processed mRNA and the second processed mRNA are both splicing products of the pre-mRNA in the cell. In some cases, the second processed mRNA comprises sequence of the first processed mRNA, the PTC, and the second start codon. In some cases, the PTC and the second start codon have a distance of at least 2 nt on the pre-mRNA. In some cases, the PTC and the second start codon have a distance of at most 75 nt on the pre-mRNA. In some cases, the PTC and the second start codon have a distance of 2 nt to 75 nt, 5 nt to 70 nt, 10 nt to 65 nt, 15 nt to 60 nt, 20 nt to 55 nt, 25 nt to 50 nt, 30 nt to 45 nt, 40 nt to 50 nt, 45 nt to 55 nt, 50 nt to 60 nt, 55 nt to 70 nt, or 60 nt to 75 nt to on the pre-mRNA. In some cases, the PTC and the second start codon have a distance of 2 nt to 75 nt on the pre-mRNA.

[0010] In some cases, the first protein comprising the target peptide sequence is translated starting from the first start codon on the first processed mRNA, and the second protein is translated starting from the second start codon on the second processed mRNA. In some cases, the first processed mRNA has a higher translation efficiency for producing the first protein as compared to translation efficiency of the second processed mRNA for producing the second protein.

[0011] In some cases, exclusion of the inefficient translation region or exclusion of the PTC and the second start codon from the pre-mRNA encoding the target peptide sequence is increased. In some cases, the therapeutic agent increases the level of the first processed mRNA encoding the target peptide sequence in the cell. In some cases, the therapeutic agent increases the level of the target peptide sequence in the cell.

[0012] In some cases, the target peptide sequence is a portion of a full length protein. In some cases, the target peptide sequence produced is a fully functional protein. In some cases, the target peptide sequence is an N-terminal portion of a full length protein. In some cases, the target peptide sequence is coded by a portion of the pre-mRNA upstream of the inefficient translation region. In some cases, the inefficient translation region is in a 3′ untranslated region (3′ UTR) of the second processed mRNA.

[0013] In some cases, the target peptide sequence is a C-terminal portion of a full length protein. In some cases, the target peptide sequence is coded by a portion of the pre-mRNA downstream of the inefficient translation region or the PTC.

[0014] In some cases, the target peptide sequence is a portion of an MeCP2 protein isoform. In some cases, the target peptide sequence is translated from a sequence selected from the group consisting of SEQ ID NOs: 32-34. In some cases, the therapeutic agent decreases level of e2 isoform of MeCP2 mRNA and increases level of e1 isoform of MeCP2 mRNA in the cell. In some cases, the therapeutic agent decreases level of e2 isoform of MeCP2 protein and increases level of e1 isoform of MeCP2 protein in the cell. In some cases, the pre-mRNA comprises a sequence with at least about 80%, 85%, 90%, 95%, 96%, 97%, 98%, 99% or 100% sequence identity to any one selected from the group consisting of SEQ ID NOs: 2-27. In some cases, the therapeutic agent binds to a targeted region of a MeCP2 pre-mRNA, wherein the targeted region is within a sequence selected from the group consisting of SEQ ID NOs: 28-31. In some cases, the therapeutic agent binds to a targeted region of a MeCP2 pre-mRNA, wherein the targeted region is within a sequence SEQ ID NO: 28. In some cases, the therapeutic agent is an antisense oligomer complementary to a sequence with at least about 80%, 85%, 90%, 95%, 96%, 97%, 98%, 99% or 100% sequence identity to a sequence selected from the group consisting of SEQ ID NOs: 28-31. In some cases, the therapeutic agent is an antisense oligomer complementary to a sequence with 100% sequence identity to a sequence selected from the group consisting of SEQ ID NOs: 28-31. In some cases, the therapeutic agent is an antisense oligomer complementary to a sequence with 100% sequence identity to SEQ ID NO: 28. In some cases, the therapeutic agent is an antisense oligomer that has a sequence with at least about 80%, 85%, 90%, 95%, 96%, 97%, 98%, 99% or 100% sequence identity to a sequence selected from the group consisting of SEQ ID NOs: 35-129. In some cases, the therapeutic agent is an antisense oligomer that has a sequence with 100% sequence identity to a sequence selected from the group consisting of SEQ ID NOs: 35-129. In some cases, the disease or the condition is Rett syndrome.

[0015] In some cases, the target peptide sequence is a portion of a protein selected from the group consisting of: ACIN1, ACTN1, ACTN2, ADH4, AKR1C3, ALDH1A2, ALG8, AMPD2, AMT, ANKRD11, ANKS3, APOL4, APPL1, ARCN1, ARMC8, ARNTL, BOC, BRCA1, C8B, CALM1, CALM3, CASP5, CAST, CEP19, CEP57, CHEK1, CIB2, COX4I1, DCLRE1C, DECR1, DHFR, DKK2, DLG2, DOK2, DPF3, DTNA, DYRK1A, FOLH1, FUZ, GANAB, GEMIN4, GGA3, GOSR2, GPM6A, GRB10, GSN, HDAC8, HIVEP1, HK1, IFNGR1, IKBKB, ISCU, KARS, KIAA0319, KIAA0586, KIZ, KLK6, LMNA, LMNTD1, LRRC7, LRTOMT, LZTFL1, MAGI2, MECP2, MERTK, MFSD2A, MLF1, MOB1B, MSRB3, NR1I3, NT5C3A, NUTM1, OTOF, PDCD4, PDPK1, PHKB, PIGA, PLOD2, POLR2F, PPP6C, PRKN, PRUNE1, PSMA6, PSMC3IP, PTPN1, RAB11B, RBPJ, RNPS1, RPL5, RPS20, SECISBP2, SELENBP1, SEPT11, SIRT2, SLC25A26, SMARCE1, SMC1A, SMG1, SPACA7, SPRED1, SRP54, SRPK2, STK36, STRADA, SUMO1, TBL1XR1, TLR8, TXNRD2, UBE3A, UFM1, WAC, WDR81, YME1L1, and ZMYND10. In some cases, the therapeutic agent increases level of the first processed mRNA encoding the first protein having a sequence selected from the group consisting of: SEQ ID NOs: 8096-8297, and decreases level of the second processed mRNA encoding the second protein having a sequence selected from the group consisting of: SEQ ID NOs: 332-533.

[0016] In some cases, the targeted region of the pre-mRNA is at most about 1500 nucleotides, about 1000 nucleotides, about 800 nucleotides, about 700 nucleotides, about 600 nucleotides, about 500 nucleotides, about 400 nucleotides, about 300 nucleotides, about 200 nucleotides, about 100 nucleotides, about 80 nucleotides, about 70 nucleotides, about 60 nucleotides, about 50 nucleotides upstream of a sequence selected from the group consisting of SEQ ID NOs: 130-331. In some cases, the targeted region of the pre-mRNA is at least about 1500 nucleotides, about 1000 nucleotides, about 800 nucleotides, about 700 nucleotides, about 600 nucleotides, about 500 nucleotides, about 400 nucleotides, about 300 nucleotides, about 200 nucleotides, about 100 nucleotides, about 80 nucleotides, about 70 nucleotides, about 60 nucleotides, about 50 nucleotides upstream of a sequence selected from the group consisting of SEQ ID NOs: 130-331.

[0017] In some cases, the targeted region of the pre-mRNA is at most about 1500 nucleotides, about 1000 nucleotides, about 800 nucleotides, about 700 nucleotides, about 600 nucleotides, about 500 nucleotides, about 400 nucleotides, about 300 nucleotides, about 200 nucleotides, about 100 nucleotides, about 80 nucleotides, about 70 nucleotides, about 60 nucleotides, about 50 nucleotides upstream of a genomic site selected from the group consisting of: GRCh38/hg38: chr14 23071186, GRCh38/hg38: chr14 68925672, GRCh38/hg38: chr1 236735635, GRCh38/hg38: chr4 99143305, GRCh38/hg38: chr4 99143305, GRCh38/hg38: chr6 32182698, GRCh38/hg38: chr10 5077900, GRCh38/hg38: chr15 58058108, GRCh38/hg38: chr11 78138767, GRCh38/hg38: chr1 109620914, GRCh38/hg38: chr3 49422257, GRCh38/hg38: chr3 49422257, GRCh38/hg38: chr3 49422257, GRCh38/hg38: chr16 89317078, GRCh38/hg38: chr16 89317078, GRCh38/hg38: chr16 89317078, GRCh38/hg38: chr16 89317075, GRCh38/hg38: chr16 89317078, GRCh38/hg38: chr16 89317078, GRCh38/hg38: chr16 89317075, GRCh38/hg38: chr16 89317078, GRCh38/hg38: chr16 89317078, GRCh38/hg38: chr16 89317075, GRCh38/hg38: chr16 89317078, GRCh38/hg38: chr16 89317075, GRCh38/hg38: chr16 89317078, GRCh38/hg38: chr16 89317078, GRCh38/hg38: chr16 4726780, GRCh38/hg38: chr22 36201796, GRCh38/hg38: chr3 57230714, GRCh38/hg38: chr11 118573620, GRCh38/hg38: chr3 138188455, GRCh38/hg38: chr3 138188455, GRCh38/hg38: chr11 13355226, GRCh38/hg38: chr11 13355226, GRCh38/hg38: chr3 113249722, GRCh38/hg38: chr3 113249722, GRCh38/hg38: chr3 113249722, GRCh38/hg38: chr3 113249722, GRCh38/hg38: chr17 43106533, GRCh38/hg38: chr17 43106533, GRCh38/hg38: chr1 56959657, GRCh38/hg38: chr1 56959657, GRCh38/hg38: chr14 90398991, GRCh38/hg38: chr19 46608205, GRCh38/hg38: chr11 105009053, GRCh38/hg38: chr5 96726754, GRCh38/hg38: chr3 196708727, GRCh38/hg38: chr11 95795516, GRCh38/hg38: chr11 125627607, GRCh38/hg38: chr15 78111276, GRCh38/hg38: chr15 78111276, GRCh38/hg38: chr16 85804941, GRCh38/hg38: chr10 14939869, GRCh38/hg38: chr8 90005292, GRCh38/hg38: chr8 90015541, GRCh38/hg38: chr5 80649494, GRCh38/hg38: chr4 106925949, GRCh38/hg38: chr11 83651930, GRCh38/hg38: chr8 21910857, GRCh38/hg38: chr14 72879947, GRCh38/hg38: chr14 72879947, GRCh38/hg38: chr18 34757158, GRCh38/hg38: chr18 34757158, GRCh38/hg38: chr21 37456130, GRCh38/hg38: chr11 49206874, GRCh38/hg38: chr19 49812335, GRCh38/hg38: chr11 62639110, GRCh38/hg38: chr17 749909, GRCh38/hg38: chr17 75243570, GRCh38/hg38: chr17 46924261, GRCh38/hg38: chr4 175812249, GRCh38/hg38: chr7 50710990, GRCh38/hg38: chr9 121300056, GRCh38/hg38: chrX 72572109, GRCh38/hg38: chr6 12020248, GRCh38/hg38: chr10 69300769, GRCh38/hg38: chr10 69300769, GRCh38/hg38: chr6 137215377, GRCh38/hg38: chr8 42272083, GRCh38/hg38: chr8 42272083, GRCh38/hg38: chr8 42272083, GRCh38/hg38: chr8 42272083, GRCh38/hg38: chr12 108564060, GRCh38/hg38: chr16 75644462, GRCh38/hg38: chr16 75644462, GRCh38/hg38: chr6 24600709, GRCh38/hg38: chr14 58429363, GRCh38/hg38: chr14 58429363, GRCh38/hg38: chr20 21132097, GRCh38/hg38: chr19 50963549, GRCh38/hg38: chr1 156126736, GRCh38/hg38: chr12 25552989, GRCh38/hg38: chr12 25552989, GRCh38/hg38: chr1 69716142, GRCh38/hg38: chr11 72089029, GRCh38/hg38: chr11 72089029, GRCh38/hg38: chr11 72089029, GRCh38/hg38: chr11 72089029, GRCh38/hg38: chr11 72089029, GRCh38/hg38: chr11 72089029, GRCh38/hg38: chr11 72089029, GRCh38/hg38: chr11 72089029, GRCh38/hg38: chr11 72089029, GRCh38/hg38: chr11 72089029, GRCh38/hg38: chr11 72089029, GRCh38/hg38: chr3 45838051, GRCh38/hg38: chr7 78554671, GRCh38/hg38: chrX 154092307, GRCh38/hg38: chrX 154092307, GRCh38/hg38: chr2 111944960, GRCh38/hg38: chr1 39965211, GRCh38/hg38: chr3 158592434, GRCh38/hg38: chr3 158592434, GRCh38/hg38: chr3 158592434, GRCh38/hg38: chr3 158592434, GRCh38/hg38: chr3 158592434, GRCh38/hg38: chr4 70950700, GRCh38/hg38: chr12 65308529, GRCh38/hg38: chr1 161236598, GRCh38/hg38: chr1 161236598, GRCh38/hg38: chr1 161236598, GRCh38/hg38: chr1 161236598, GRCh38/hg38: chr1 161236598, GRCh38/hg38: chr1 161236598, GRCh38/hg38: chr1 161236598, GRCh38/hg38: chr1 161236598, GRCh38/hg38: chr1 161236598, GRCh38/hg38: chr1 161236598, GRCh38/hg38: chr1 161236598, GRCh38/hg38: chr1 161236598, GRCh38/hg38: chr1 161236598, GRCh38/hg38: chr7 33035988, GRCh38/hg38: chr7 33035988, GRCh38/hg38: chr15 34345857, GRCh38/hg38: chr2 26477749, GRCh38/hg38: chr2 26477749, GRCh38/hg38: chr10 110876670, GRCh38/hg38: chr16 2566356, GRCh38/hg38: chr16 47463899, GRCh38/hg38: chr16 47463882, GRCh38/hg38: chrX 15331992, GRCh38/hg38: chrX 15331992, GRCh38/hg38: chr3 146124229, GRCh38/hg38: chr22 37958374, GRCh38/hg38: chr9 125172001, GRCh38/hg38: chr6 162262765, GRCh38/hg38: chr1 151027233, GRCh38/hg38: chr14 35308914, GRCh38/hg38: chr17 42573623, GRCh38/hg38: chr20 50564969, GRCh38/hg38: chr19 8402086, GRCh38/hg38: chr4 26320700, GRCh38/hg38: chr4 26320700, GRCh38/hg38: chr16 2264760, GRCh38/hg38: chr16 2264760, GRCh38/hg38: chr16 2264760, GRCh38/hg38: chr16 2264760, GRCh38/hg38: chr1 92833545, GRCh38/hg38: chr8 56073768, GRCh38/hg38: chr9 89325427, GRCh38/hg38: chr1 151369978, GRCh38/hg38: chr1 151369978, GRCh38/hg38: chr4 76995781, GRCh38/hg38: chr19 38893867, GRCh38/hg38: chr19 38893867, GRCh38/hg38: chr19 38893867, GRCh38/hg38: chr19 38893867, GRCh38/hg38: chr19 38893867, GRCh38/hg38: chr3 66243203, GRCh38/hg38: chr3 66243203, GRCh38/hg38: chr17 40644459, GRCh38/hg38: chrX 53422040, GRCh38/hg38: chr16 18900044, GRCh38/hg38: chr13 112382278, GRCh38/hg38: chr15 38299373, GRCh38/hg38: chr14 35000936, GRCh38/hg38: chr7 105268869, GRCh38/hg38: chr2 218673665, GRCh38/hg38: chr17 63714108, GRCh38/hg38: chr17 63714108, GRCh38/hg38: chr17 63714108, GRCh38/hg38: chr17 63714108, GRCh38/hg38: chr17 63714108, GRCh38/hg38: chr17 63714108, GRCh38/hg38: chr17 63714108, GRCh38/hg38: chr17 63714108, GRCh38/hg38: chr17 63714108, GRCh38/hg38: chr2 202214429, GRCh38/hg38: chr3 177065022, GRCh38/hg38: chr3 177065022, GRCh38/hg38: chr3 177065022, GRCh38/hg38: chr3 177065022, GRCh38/hg38: chrX 12910306, GRCh38/hg38: chr22 19880945, GRCh38/hg38: chr15 25408684, GRCh38/hg38: chr15 25408684, GRCh38/hg38: chr13 38349999, GRCh38/hg38: chr10 28535562, GRCh38/hg38: chr17 1727990, GRCh38/hg38: chr10 27153281, and GRCh38/hg38: chr3 50345232.

[0018] In some cases, the targeted region of the pre-mRNA is at least about 1500 nucleotides, about 1000 nucleotides, about 800 nucleotides, about 700 nucleotides, about 600 nucleotides, about 500 nucleotides, about 400 nucleotides, about 300 nucleotides, about 200 nucleotides, about 100 nucleotides, about 80 nucleotides, about 70 nucleotides, about 60 nucleotides, about 50 nucleotides upstream of a genomic site selected from the group consisting of: GRCh38/hg38: chr14 23071186, GRCh38/hg38: chr14 68925672, GRCh38/hg38: chr1 236735635, GRCh38/hg38: chr4 99143305, GRCh38/hg38: chr4 99143305, GRCh38/hg38: chr6 32182698, GRCh38/hg38: chr10 5077900, GRCh38/hg38: chr15 58058108, GRCh38/hg38: chr11 78138767, GRCh38/hg38: chr1 109620914, GRCh38/hg38: chr3 49422257, GRCh38/hg38: chr3 49422257, GRCh38/hg38: chr3 49422257, GRCh38/hg38: chr16 89317078, GRCh38/hg38: chr16 89317078, GRCh38/hg38: chr16 89317078, GRCh38/hg38: chr16 89317075, GRCh38/hg38: chr16 89317078, GRCh38/hg38: chr16 89317078, GRCh38/hg38: chr16 89317075, GRCh38/hg38: chr16 89317078, GRCh38/hg38: chr16 89317078, GRCh38/hg38: chr16 89317075, GRCh38/hg38: chr16 89317078, GRCh38/hg38: chr16 89317075, GRCh38/hg38: chr16 89317078, GRCh38/hg38: chr16 89317078, GRCh38/hg38: chr16 4726780, GRCh38/hg38: chr22 36201796, GRCh38/hg38: chr3 57230714, GRCh38/hg38: chr11 118573620, GRCh38/hg38: chr3 138188455, GRCh38/hg38: chr3 138188455, GRCh38/hg38: chr11 13355226, GRCh38/hg38: chr11 13355226, GRCh38/hg38: chr3 113249722, GRCh38/hg38: chr3 113249722, GRCh38/hg38: chr3 113249722, GRCh38/hg38: chr3 113249722, GRCh38/hg38: chr17 43106533, GRCh38/hg38: chr17 43106533, GRCh38/hg38: chr1 56959657, GRCh38/hg38: chr1 56959657, GRCh38/hg38: chr14 90398991, GRCh38/hg38: chr19 46608205, GRCh38/hg38: chr11 105009053, GRCh38/hg38: chr5 96726754, GRCh38/hg38: chr3 196708727, GRCh38/hg38: chr11 95795516, GRCh38/hg38: chr11 125627607, GRCh38/hg38: chr15 78111276, GRCh38/hg38: chr15 78111276, GRCh38/hg38: chr16 85804941, GRCh38/hg38: chr10 14939869, GRCh38/hg38: chr8 90005292, GRCh38/hg38: chr8 90015541, GRCh38/hg38: chr5 80649494, GRCh38/hg38: chr4 106925949, GRCh38/hg38: chr11 83651930, GRCh38/hg38: chr8 21910857, GRCh38/hg38: chr14 72879947, GRCh38/hg38: chr14 72879947, GRCh38/hg38: chr18 34757158, GRCh38/hg38: chr18 34757158, GRCh38/hg38: chr21 37456130, GRCh38/hg38: chr11 49206874, GRCh38/hg38: chr19 49812335, GRCh38/hg38: chr11 62639110, GRCh38/hg38: chr17 749909, GRCh38/hg38: chr17 75243570, GRCh38/hg38: chr17 46924261, GRCh38/hg38: chr4 175812249, GRCh38/hg38: chr7 50710990, GRCh38/hg38: chr9 121300056, GRCh38/hg38: chrX 72572109, GRCh38/hg38: chr6 12020248, GRCh38/hg38: chr10 69300769, GRCh38/hg38: chr10 69300769, GRCh38/hg38: chr6 137215377, GRCh38/hg38: chr8 42272083, GRCh38/hg38: chr8 42272083, GRCh38/hg38: chr8 42272083, GRCh38/hg38: chr8 42272083, GRCh38/hg38: chr12 108564060, GRCh38/hg38: chr16 75644462, GRCh38/hg38: chr16 75644462, GRCh38/hg38: chr6 24600709, GRCh38/hg38: chr14 58429363, GRCh38/hg38: chr14 58429363, GRCh38/hg38: chr20 21132097, GRCh38/hg38: chr19 50963549, GRCh38/hg38: chr1 156126736, GRCh38/hg38: chr12 25552989, GRCh38/hg38: chr12 25552989, GRCh38/hg38: chr1 69716142, GRCh38/hg38: chr11 72089029, GRCh38/hg38: chr11 72089029, GRCh38/hg38: chr11 72089029, GRCh38/hg38: chr11 72089029, GRCh38/hg38: chr11 72089029, GRCh38/hg38: chr11 72089029, GRCh38/hg38: chr11 72089029, GRCh38/hg38: chr11 72089029, GRCh38/hg38: chr11 72089029, GRCh38/hg38: chr11 72089029, GRCh38/hg38: chr11 72089029, GRCh38/hg38: chr3 45838051, GRCh38/hg38: chr7 78554671, GRCh38/hg38: chrX 154092307, GRCh38/hg38: chrX 154092307, GRCh38/hg38: chr2 111944960, GRCh38/hg38: chr1 39965211, GRCh38/hg38: chr3 158592434, GRCh38/hg38: chr3 158592434, GRCh38/hg38: chr3 158592434, GRCh38/hg38: chr3 158592434, GRCh38/hg38: chr3 158592434, GRCh38/hg38: chr4 70950700, GRCh38/hg38: chr12 65308529, GRCh38/hg38: chr1 161236598, GRCh38/hg38: chr1 161236598, GRCh38/hg38: chr1 161236598, GRCh38/hg38: chr1 161236598, GRCh38/hg38: chr1 161236598, GRCh38/hg38: chr1 161236598, GRCh38/hg38: chr1 161236598, GRCh38/hg38: chr1 161236598, GRCh38/hg38: chr1 161236598, GRCh38/hg38: chr1 161236598, GRCh38/hg38: chr1 161236598, GRCh38/hg38: chr1 161236598, GRCh38/hg38: chr1 161236598, GRCh38/hg38: chr7 33035988, GRCh38/hg38: chr7 33035988, GRCh38/hg38: chr15 34345857, GRCh38/hg38: chr2 26477749, GRCh38/hg38: chr2 26477749, GRCh38/hg38: chr10 110876670, GRCh38/hg38: chr16 2566356, GRCh38/hg38: chr16 47463899, GRCh38/hg38: chr16 47463882, GRCh38/hg38: chrX 15331992, GRCh38/hg38: chrX 15331992, GRCh38/hg38: chr3 146124229, GRCh38/hg38: chr22 37958374, GRCh38/hg38: chr9 125172001, GRCh38/hg38: chr6 162262765, GRCh38/hg38: chr1 151027233, GRCh38/hg38: chr14 35308914, GRCh38/hg38: chr17 42573623, GRCh38/hg38: chr20 50564969, GRCh38/hg38: chr19 8402086, GRCh38/hg38: chr4 26320700, GRCh38/hg38: chr4 26320700, GRCh38/hg38: chr16 2264760, GRCh38/hg38: chr16 2264760, GRCh38/hg38: chr16 2264760, GRCh38/hg38: chr16 2264760, GRCh38/hg38: chr1 92833545, GRCh38/hg38: chr8 56073768, GRCh38/hg38: chr9 89325427, GRCh38/hg38: chr1 151369978, GRCh38/hg38: chr1 151369978, GRCh38/hg38: chr4 76995781, GRCh38/hg38: chr19 38893867, GRCh38/hg38: chr19 38893867, GRCh38/hg38: chr19 38893867, GRCh38/hg38: chr19 38893867, GRCh38/hg38: chr19 38893867, GRCh38/hg38: chr3 66243203, GRCh38/hg38: chr3 66243203, GRCh38/hg38: chr17 40644459, GRCh38/hg38: chrX 53422040, GRCh38/hg38: chr16 18900044, GRCh38/hg38: chr13 112382278, GRCh38/hg38: chr15 38299373, GRCh38/hg38: chr14 35000936, GRCh38/hg38: chr7 105268869, GRCh38/hg38: chr2 218673665, GRCh38/hg38: chr17 63714108, GRCh38/hg38: chr17 63714108, GRCh38/hg38: chr17 63714108, GRCh38/hg38: chr17 63714108, GRCh38/hg38: chr17 63714108, GRCh38/hg38: chr17 63714108, GRCh38/hg38: chr17 63714108, GRCh38/hg38: chr17 63714108, GRCh38/hg38: chr17 63714108, GRCh38/hg38: chr2 202214429, GRCh38/hg38: chr3 177065022, GRCh38/hg38: chr3 177065022, GRCh38/hg38: chr3 177065022, GRCh38/hg38: chr3 177065022, GRCh38/hg38: chrX 12910306, GRCh38/hg38: chr22 19880945, GRCh38/hg38: chr15 25408684, GRCh38/hg38: chr15 25408684, GRCh38/hg38: chr13 38349999, GRCh38/hg38: chr10 28535562, GRCh38/hg38: chr17 1727990, GRCh38/hg38: chr10 27153281, and GRCh38/hg38: chr3 50345232.

[0019] In some cases, the targeted region of the pre-mRNA is at most about 1500 nucleotides, about 1000 nucleotides, about 800 nucleotides, about 700 nucleotides, about 600 nucleotides, about 500 nucleotides, about 400 nucleotides, about 300 nucleotides, about 200 nucleotides, about 100 nucleotides, about 80 nucleotides, about 70 nucleotides, about 60 nucleotides, about 50 nucleotides downstream of a sequence selected from the group consisting of: SEQ ID NOs: 130-331. In some cases, the targeted region of the pre-mRNA is at least about 1500 nucleotides, about 1000 nucleotides, about 800 nucleotides, about 700 nucleotides, about 600 nucleotides, about 500 nucleotides, about 400 nucleotides, about 300 nucleotides, about 200 nucleotides, about 100 nucleotides, about 80 nucleotides, about 70 nucleotides, about 60 nucleotides, about 50 nucleotides downstream of a sequence selected from the group consisting of: SEQ ID NOs: 130-331.

[0020] In some cases, the targeted region of the pre-mRNA is at most about 1500 nucleotides, about 1000 nucleotides, about 800 nucleotides, about 700 nucleotides, about 600 nucleotides, about 500 nucleotides, about 400 nucleotides, about 300 nucleotides, about 200 nucleotides, about 100 nucleotides, about 80 nucleotides, about 70 nucleotides, about 60 nucleotides, about 50 nucleotides downstream of a genomic site selected from the group consisting of: GRCh38/hg38: chr14 23071125, GRCh38/hg38: chr14 68925558, GRCh38/hg38: chr1 236735720, GRCh38/hg38: chr4 99143166, GRCh38/hg38: chr4 99143166, GRCh38/hg38: chr6 32182568, GRCh38/hg38: chr10 5077977, GRCh38/hg38: chr15 58058012, GRCh38/hg38: chr11 78138710, GRCh38/hg38: chr1 109621266, GRCh38/hg38: chr3 49422104, GRCh38/hg38: chr3 49422104, GRCh38/hg38: chr3 49422104, GRCh38/hg38: chr16 89316933, GRCh38/hg38: chr16 89316933, GRCh38/hg38: chr16 89316933, GRCh38/hg38: chr16 89316933, GRCh38/hg38: chr16 89316933, GRCh38/hg38: chr16 89316933, GRCh38/hg38: chr16 89316933, GRCh38/hg38: chr16 89316933, GRCh38/hg38: chr16 89316933, GRCh38/hg38: chr16 89316933, GRCh38/hg38: chr16 89316933, GRCh38/hg38: chr16 89316933, GRCh38/hg38: chr16 89316933, GRCh38/hg38: chr16 89316933, GRCh38/hg38: chr16 4726659, GRCh38/hg38: chr22 36201700, GRCh38/hg38: chr3 57230767, GRCh38/hg38: chr11 118573783, GRCh38/hg38: chr3 138188530, GRCh38/hg38: chr3 138188530, GRCh38/hg38: chr11 13355296, GRCh38/hg38: chr11 13355296, GRCh38/hg38: chr3 113249899, GRCh38/hg38: chr3 113249899, GRCh38/hg38: chr3 113249899, GRCh38/hg38: chr3 113249899, GRCh38/hg38: chr17 43106456, GRCh38/hg38: chr17 43106456, GRCh38/hg38: chr1 56959529, GRCh38/hg38: chr1 56959529, GRCh38/hg38: chr14 90399087, GRCh38/hg38: chr19 46608340, GRCh38/hg38: chr11 105008807, GRCh38/hg38: chr5 96726859, GRCh38/hg38: chr3 196708528, GRCh38/hg38: chr11 95795559, GRCh38/hg38: chr11 125627830, GRCh38/hg38: chr15 78111165, GRCh38/hg38: chr15 78111165, GRCh38/hg38: chr16 85805104, GRCh38/hg38: chr10 14939810, GRCh38/hg38: chr8 90005369, GRCh38/hg38: chr8 90015666, GRCh38/hg38: chr5 80649389, GRCh38/hg38: chr4 106925799, GRCh38/hg38: chr11 83651839, GRCh38/hg38: chr8 21910673, GRCh38/hg38: chr14 72879804, GRCh38/hg38: chr14 72879804, GRCh38/hg38: chr18 34757288, GRCh38/hg38: chr18 34757288, GRCh38/hg38: chr21 37456308, GRCh38/hg38: chr11 49206778, GRCh38/hg38: chr19 49812251, GRCh38/hg38: chr11 62638983, GRCh38/hg38: chr17 749814, GRCh38/hg38: chr17 75243447, GRCh38/hg38: chr17 46924468, GRCh38/hg38: chr4 175812191, GRCh38/hg38: chr7 50710875, GRCh38/hg38: chr9 121300126, GRCh38/hg38: chrX 72572057, GRCh38/hg38: chr6 12020418, GRCh38/hg38: chr10 69300861, GRCh38/hg38: chr10 69300861, GRCh38/hg38: chr6 137215267, GRCh38/hg38: chr8 42272205, GRCh38/hg38: chr8 42272205, GRCh38/hg38: chr8 42272205, GRCh38/hg38: chr8 42272205, GRCh38/hg38: chr12 108564155, GRCh38/hg38: chr16 75644283, GRCh38/hg38: chr16 75644283, GRCh38/hg38: chr6 24600619, GRCh38/hg38: chr14 58429433, GRCh38/hg38: chr14 58429433, GRCh38/hg38: chr20 21132159, GRCh38/hg38: chr19 50963302, GRCh38/hg38: chr1 156126915, GRCh38/hg38: chr12 25552871, GRCh38/hg38: chr12 25552871, GRCh38/hg38: chr1 69716218, GRCh38/hg38: chr11 72089165, GRCh38/hg38: chr11 72089165, GRCh38/hg38: chr11 72089165, GRCh38/hg38: chr11 72089165, GRCh38/hg38: chr11 72089165, GRCh38/hg38: chr11 72089165, GRCh38/hg38: chr11 72089165, GRCh38/hg38: chr11 72089165, GRCh38/hg38: chr11 72089165, GRCh38/hg38: chr11 72089165, GRCh38/hg38: chr11 72089165, GRCh38/hg38: chr3 45837927, GRCh38/hg38: chr7 78554567, GRCh38/hg38: chrX 154092184, GRCh38/hg38: chrX 154092184, GRCh38/hg38: chr2 111945060, GRCh38/hg38: chr1 39965334, GRCh38/hg38: chr3 158592581, GRCh38/hg38: chr3 158592581, GRCh38/hg38: chr3 158592581, GRCh38/hg38: chr3 158592581, GRCh38/hg38: chr3 158592581, GRCh38/hg38: chr4 70950811, GRCh38/hg38: chr12 65308655, GRCh38/hg38: chr1 161236459, GRCh38/hg38: chr1 161236459, GRCh38/hg38: chr1 161236459, GRCh38/hg38: chr1 161236459, GRCh38/hg38: chr1 161236459, GRCh38/hg38: chr1 161236459, GRCh38/hg38: chr1 161236459, GRCh38/hg38: chr1 161236459, GRCh38/hg38: chr1 161236459, GRCh38/hg38: chr1 161236459, GRCh38/hg38: chr1 161236459, GRCh38/hg38: chr1 161236459, GRCh38/hg38: chr1 161236459, GRCh38/hg38: chr7 33035934, GRCh38/hg38: chr7 33035934, GRCh38/hg38: chr15 34346035, GRCh38/hg38: chr2 26477649, GRCh38/hg38: chr2 26477649, GRCh38/hg38: chr10 110876753, GRCh38/hg38: chr16 2566453, GRCh38/hg38: chr16 47463993, GRCh38/hg38: chr16 47463993, GRCh38/hg38: chrX 15331216, GRCh38/hg38: chrX 15331216, GRCh38/hg38: chr3 146124138, GRCh38/hg38: chr22 37958471, GRCh38/hg38: chr9 125171909, GRCh38/hg38: chr6 162262525, GRCh38/hg38: chr1 151027327, GRCh38/hg38: chr14 35308995, GRCh38/hg38: chr17 42573478, GRCh38/hg38: chr20 50565069, GRCh38/hg38: chr19 8402279, GRCh38/hg38: chr4 26320815, GRCh38/hg38: chr4 26320815, GRCh38/hg38: chr16 2264573, GRCh38/hg38: chr16 2264573, GRCh38/hg38: chr16 2264573, GRCh38/hg38: chr16 2264573, GRCh38/hg38: chr1 92833660, GRCh38/hg38: chr8 56073695, GRCh38/hg38: chr9 89325676, GRCh38/hg38: chr1 151369713, GRCh38/hg38: chr1 151369713, GRCh38/hg38: chr4 76995938, GRCh38/hg38: chr19 38893819, GRCh38/hg38: chr19 38893819, GRCh38/hg38: chr19 38893819, GRCh38/hg38: chr19 38893819, GRCh38/hg38: chr19 38893819, GRCh38/hg38: chr3 66243312, GRCh38/hg38: chr3 66243312, GRCh38/hg38: chr17 40644385, GRCh38/hg38: chrX 53421895, GRCh38/hg38: chr16 18899987, GRCh38/hg38: chr13 112382507, GRCh38/hg38: chr15 38299547, GRCh38/hg38: chr14 35001020, GRCh38/hg38: chr7 105268806, GRCh38/hg38: chr2 218673765, GRCh38/hg38: chr17 63714006, GRCh38/hg38: chr17 63714006, GRCh38/hg38: chr17 63714006, GRCh38/hg38: chr17 63714006, GRCh38/hg38: chr17 63714006, GRCh38/hg38: chr17 63714006, GRCh38/hg38: chr17 63714006, GRCh38/hg38: chr17 63714006, GRCh38/hg38: chr17 63714006, GRCh38/hg38: chr2 202214357, GRCh38/hg38: chr3 177064920, GRCh38/hg38: chr3 177064920, GRCh38/hg38: chr3 177064920, GRCh38/hg38: chr3 177064920, GRCh38/hg38: chrX 12910442, GRCh38/hg38: chr22 19880856, GRCh38/hg38: chr15 25408620, GRCh38/hg38: chr15 25408620, GRCh38/hg38: chr13 38350227, GRCh38/hg38: chr10 28535757, GRCh38/hg38: chr17 1728626, GRCh38/hg38: chr10 27153227, and GRCh38/hg38: chr3 50345124.

[0021] In some cases, the targeted region of the pre-mRNA is at least about 1500 nucleotides, about 1000 nucleotides, about 800 nucleotides, about 700 nucleotides, about 600 nucleotides, about 500 nucleotides, about 400 nucleotides, about 300 nucleotides, about 200 nucleotides, about 100 nucleotides, about 80 nucleotides, about 70 nucleotides, about 60 nucleotides, about 50 nucleotides downstream of a genomic site selected from the group consisting of: GRCh38/hg38: chr14 23071125, GRCh38/hg38: chr14 68925558, GRCh38/hg38: chr1 236735720, GRCh38/hg38: chr4 99143166, GRCh38/hg38: chr4 99143166, GRCh38/hg38: chr6 32182568, GRCh38/hg38: chr10 5077977, GRCh38/hg38: chr15 58058012, GRCh38/hg38: chr11 78138710, GRCh38/hg38: chr1 109621266, GRCh38/hg38: chr3 49422104, GRCh38/hg38: chr3 49422104, GRCh38/hg38: chr3 49422104, GRCh38/hg38: chr16 89316933, GRCh38/hg38: chr16 89316933, GRCh38/hg38: chr16 89316933, GRCh38/hg38: chr16 89316933, GRCh38/hg38: chr16 89316933, GRCh38/hg38: chr16 89316933, GRCh38/hg38: chr16 89316933, GRCh38/hg38: chr16 89316933, GRCh38/hg38: chr16 89316933, GRCh38/hg38: chr16 89316933, GRCh38/hg38: chr16 89316933, GRCh38/hg38: chr16 89316933, GRCh38/hg38: chr16 89316933, GRCh38/hg38: chr16 89316933, GRCh38/hg38: chr16 4726659, GRCh38/hg38: chr22 36201700, GRCh38/hg38: chr3 57230767, GRCh38/hg38: chr11 118573783, GRCh38/hg38: chr3 138188530, GRCh38/hg38: chr3 138188530, GRCh38/hg38: chr11 13355296, GRCh38/hg38: chr11 13355296, GRCh38/hg38: chr3 113249899, GRCh38/hg38: chr3 113249899, GRCh38/hg38: chr3 113249899, GRCh38/hg38: chr3 113249899, GRCh38/hg38: chr17 43106456, GRCh38/hg38: chr17 43106456, GRCh38/hg38: chr1 56959529, GRCh38/hg38: chr1 56959529, GRCh38/hg38: chr14 90399087, GRCh38/hg38: chr19 46608340, GRCh38/hg38: chr11 105008807, GRCh38/hg38: chr5 96726859, GRCh38/hg38: chr3 196708528, GRCh38/hg38: chr11 95795559, GRCh38/hg38: chr11 125627830, GRCh38/hg38: chr15 78111165, GRCh38/hg38: chr15 78111165, GRCh38/hg38: chr16 85805104, GRCh38/hg38: chr10 14939810, GRCh38/hg38: chr8 90005369, GRCh38/hg38: chr8 90015666, GRCh38/hg38: chr5 80649389, GRCh38/hg38: chr4 106925799, GRCh38/hg38: chr11 83651839, GRCh38/hg38: chr8 21910673, GRCh38/hg38: chr14 72879804, GRCh38/hg38: chr14 72879804, GRCh38/hg38: chr18 34757288, GRCh38/hg38: chr18 34757288, GRCh38/hg38: chr21 37456308, GRCh38/hg38: chr11 49206778, GRCh38/hg38: chr19 49812251, GRCh38/hg38: chr11 62638983, GRCh38/hg38: chr17 749814, GRCh38/hg38: chr17 75243447, GRCh38/hg38: chr17 46924468, GRCh38/hg38: chr4 175812191, GRCh38/hg38: chr7 50710875, GRCh38/hg38: chr9 121300126, GRCh38/hg38: chrX 72572057, GRCh38/hg38: chr6 12020418, GRCh38/hg38: chr10 69300861, GRCh38/hg38: chr10 69300861, GRCh38/hg38: chr6 137215267, GRCh38/hg38: chr8 42272205, GRCh38/hg38: chr8 42272205, GRCh38/hg38: chr8 42272205, GRCh38/hg38: chr8 42272205, GRCh38/hg38: chr12 108564155, GRCh38/hg38: chr16 75644283, GRCh38/hg38: chr16 75644283, GRCh38/hg38: chr6 24600619, GRCh38/hg38: chr14 58429433, GRCh38/hg38: chr14 58429433, GRCh38/hg38: chr20 21132159, GRCh38/hg38: chr19 50963302, GRCh38/hg38: chr1 156126915, GRCh38/hg38: chr12 25552871, GRCh38/hg38: chr12 25552871, GRCh38/hg38: chr1 69716218, GRCh38/hg38: chr11 72089165, GRCh38/hg38: chr11 72089165, GRCh38/hg38: chr11 72089165, GRCh38/hg38: chr11 72089165, GRCh38/hg38: chr11 72089165, GRCh38/hg38: chr11 72089165, GRCh38/hg38: chr11 72089165, GRCh38/hg38: chr11 72089165, GRCh38/hg38: chr11 72089165, GRCh38/hg38: chr11 72089165, GRCh38/hg38: chr11 72089165, GRCh38/hg38: chr3 45837927, GRCh38/hg38: chr7 78554567, GRCh38/hg38: chrX 154092184, GRCh38/hg38: chrX 154092184, GRCh38/hg38: chr2 111945060, GRCh38/hg38: chr1 39965334, GRCh38/hg38: chr3 158592581, GRCh38/hg38: chr3 158592581, GRCh38/hg38: chr3 158592581, GRCh38/hg38: chr3 158592581, GRCh38/hg38: chr3 158592581, GRCh38/hg38: chr4 70950811, GRCh38/hg38: chr12 65308655, GRCh38/hg38: chr1 161236459, GRCh38/hg38: chr1 161236459, GRCh38/hg38: chr1 161236459, GRCh38/hg38: chr1 161236459, GRCh38/hg38: chr1 161236459, GRCh38/hg38: chr1 161236459, GRCh38/hg38: chr1 161236459, GRCh38/hg38: chr1 161236459, GRCh38/hg38: chr1 161236459, GRCh38/hg38: chr1 161236459, GRCh38/hg38: chr1 161236459, GRCh38/hg38: chr1 161236459, GRCh38/hg38: chr1 161236459, GRCh38/hg38: chr7 33035934, GRCh38/hg38: chr7 33035934, GRCh38/hg38: chr15 34346035, GRCh38/hg38: chr2 26477649, GRCh38/hg38: chr2 26477649, GRCh38/hg38: chr10 110876753, GRCh38/hg38: chr16 2566453, GRCh38/hg38: chr16 47463993, GRCh38/hg38: chr16 47463993, GRCh38/hg38: chrX 15331216, GRCh38/hg38: chrX 15331216, GRCh38/hg38: chr3 146124138, GRCh38/hg38: chr22 37958471, GRCh38/hg38: chr9 125171909, GRCh38/hg38: chr6 162262525, GRCh38/hg38: chr1 151027327, GRCh38/hg38: chr14 35308995, GRCh38/hg38: chr17 42573478, GRCh38/hg38: chr20 50565069, GRCh38/hg38: chr19 8402279, GRCh38/hg38: chr4 26320815, GRCh38/hg38: chr4 26320815, GRCh38/hg38: chr16 2264573, GRCh38/hg38: chr16 2264573, GRCh38/hg38: chr16 2264573, GRCh38/hg38: chr16 2264573, GRCh38/hg38: chr1 92833660, GRCh38/hg38: chr8 56073695, GRCh38/hg38: chr9 89325676, GRCh38/hg38: chr1 151369713, GRCh38/hg38: chr1 151369713, GRCh38/hg38: chr4 76995938, GRCh38/hg38: chr19 38893819, GRCh38/hg38: chr19 38893819, GRCh38/hg38: chr19 38893819, GRCh38/hg38: chr19 38893819, GRCh38/hg38: chr19 38893819, GRCh38/hg38: chr3 66243312, GRCh38/hg38: chr3 66243312, GRCh38/hg38: chr17 40644385, GRCh38/hg38: chrX 53421895, GRCh38/hg38: chr16 18899987, GRCh38/hg38: chr13 112382507, GRCh38/hg38: chr15 38299547, GRCh38/hg38: chr14 35001020, GRCh38/hg38: chr7 105268806, GRCh38/hg38: chr2 218673765, GRCh38/hg38: chr17 63714006, GRCh38/hg38: chr17 63714006, GRCh38/hg38: chr17 63714006, GRCh38/hg38: chr17 63714006, GRCh38/hg38: chr17 63714006, GRCh38/hg38: chr17 63714006, GRCh38/hg38: chr17 63714006, GRCh38/hg38: chr17 63714006, GRCh38/hg38: chr17 63714006, GRCh38/hg38: chr2 202214357, GRCh38/hg38: chr3 177064920, GRCh38/hg38: chr3 177064920, GRCh38/hg38: chr3 177064920, GRCh38/hg38: chr3 177064920, GRCh38/hg38: chrX 12910442, GRCh38/hg38: chr22 19880856, GRCh38/hg38: chr15 25408620, GRCh38/hg38: chr15 25408620, GRCh38/hg38: chr13 38350227, GRCh38/hg38: chr10 28535757, GRCh38/hg38: chr17 1728626, GRCh38/hg38: chr10 27153227, and GRCh38/hg38: chr3 50345124.

[0022] In some cases, the targeted region of the pre-mRNA is within a sequence selected from the group consisting of: SEQ ID NOs: 130-331. In some cases, the targeted region of the pre-mRNA is within a sequence between a pair of genomic sites selected from the group consisting of: GRCh38/hg38: chr14 23071186, and GRCh38/hg38: chr14 23071125; GRCh38/hg38: chr14 68925672, and GRCh38/hg38: chr14 68925558; GRCh38/hg38: chr1 236735635, and GRCh38/hg38: chr1 236735720; GRCh38/hg38: chr4 99143305, and GRCh38/hg38: chr4 99143166; GRCh38/hg38: chr4 99143305, and GRCh38/hg38: chr4 99143166; GRCh38/hg38: chr6 32182698, and GRCh38/hg38: chr6 32182568; GRCh38/hg38: chr10 5077900, and GRCh38/hg38: chr10 5077977; GRCh38/hg38: chr15 58058108, and GRCh38/hg38: chr15 58058012; GRCh38/hg38: chr11 78138767, and GRCh38/hg38: chr11 78138710; GRCh38/hg38: chr1 109620914, and GRCh38/hg38: chr1 109621266; GRCh38/hg38: chr3 49422257, and GRCh38/hg38: chr3 49422104; GRCh38/hg38: chr3 49422257, and GRCh38/hg38: chr3 49422104; GRCh38/hg38: chr3 49422257, and GRCh38/hg38: chr3 49422104; GRCh38/hg38: chr16 89317078, and GRCh38/hg38: chr16 89316933; GRCh38/hg38: chr16 89317078, and GRCh38/hg38: chr16 89316933; GRCh38/hg38: chr16 89317078, and GRCh38/hg38: chr16 89316933; GRCh38/hg38: chr16 89317075, and GRCh38/hg38: chr16 89316933; GRCh38/hg38: chr16 89317078, and GRCh38/hg38: chr16 89316933; GRCh38/hg38: chr16 89317078, and GRCh38/hg38: chr16 89316933; GRCh38/hg38: chr16 89317075, and GRCh38/hg38: chr16 89316933; GRCh38/hg38: chr16 89317078, and GRCh38/hg38: chr16 89316933; GRCh38/hg38: chr16 89317078, and GRCh38/hg38: chr16 89316933; GRCh38/hg38: chr16 89317075, and GRCh38/hg38: chr16 89316933; GRCh38/hg38: chr16 89317078, and GRCh38/hg38: chr16 89316933; GRCh38/hg38: chr16 89317075, and GRCh38/hg38: chr16 89316933; GRCh38/hg38: chr16 89317078, and GRCh38/hg38: chr16 89316933; GRCh38/hg38: chr16 89317078, and GRCh38/hg38: chr16 89316933; GRCh38/hg38: chr16 4726780, and GRCh38/hg38: chr16 4726659; GRCh38/hg38: chr22 36201796, and GRCh38/hg38: chr22 36201700; GRCh38/hg38: chr3 57230714, and GRCh38/hg38: chr3 57230767; GRCh38/hg38: chr11 118573620, and GRCh38/hg38: chr11 118573783; GRCh38/hg38: chr3 138188455, and GRCh38/hg38: chr3 138188530; GRCh38/hg38: chr3 138188455, and GRCh38/hg38: chr3 138188530; GRCh38/hg38: chr11 13355226, and GRCh38/hg38: chr11 13355296; GRCh38/hg38: chr11 13355226, and GRCh38/hg38: chr11 13355296; GRCh38/hg38: chr3 113249722, and GRCh38/hg38: chr3 113249899; GRCh38/hg38: chr3 113249722, and GRCh38/hg38: chr3 113249899; GRCh38/hg38: chr3 113249722, and GRCh38/hg38: chr3 113249899; GRCh38/hg38: chr3 113249722, and GRCh38/hg38: chr3 113249899; GRCh38/hg38: chr17 43106533, and GRCh38/hg38: chr17 43106456; GRCh38/hg38: chr17 43106533, and GRCh38/hg38: chr17 43106456; GRCh38/hg38: chr1 56959657, and GRCh38/hg38: chr1 56959529; GRCh38/hg38: chr1 56959657, and GRCh38/hg38: chr1 56959529; GRCh38/hg38: chr14 90398991, and GRCh38/hg38: chr14 90399087; GRCh38/hg38: chr19 46608205, and GRCh38/hg38: chr19 46608340; GRCh38/hg38: chr11 105009053, and GRCh38/hg38: chr11 105008807; GRCh38/hg38: chr5 96726754, and GRCh38/hg38: chr5 96726859; GRCh38/hg38: chr3 196708727, and GRCh38/hg38: chr3 196708528; GRCh38/hg38: chr11 95795516, and GRCh38/hg38: chr11 95795559; GRCh38/hg38: chr11 125627607, and GRCh38/hg38: chr11 125627830; GRCh38/hg38: chr15 78111276, and GRCh38/hg38: chr15 78111165; GRCh38/hg38: chr15 78111276, and GRCh38/hg38: chr15 78111165; GRCh38/hg38: chr16 85804941, and GRCh38/hg38: chr16 85805104; GRCh38/hg38: chr10 14939869, and GRCh38/hg38: chr10 14939810; GRCh38/hg38: chr8 90005292, and GRCh38/hg38: chr8 90005369; GRCh38/hg38: chr8 90015541, and GRCh38/hg38: chr8 90015666; GRCh38/hg38: chr5 80649494, and GRCh38/hg38: chr5 80649389; GRCh38/hg38: chr4 106925949, and GRCh38/hg38: chr4 106925799; GRCh38/hg38: chr11 83651930, and GRCh38/hg38: chr11 83651839; GRCh38/hg38: chr8 21910857, and GRCh38/hg38: chr8 21910673; GRCh38/hg38: chr14 72879947, and GRCh38/hg38: chr14 72879804; GRCh38/hg38: chr14 72879947, and GRCh38/hg38: chr14 72879804; GRCh38/hg38: chr18 34757158, and GRCh38/hg38: chr18 34757288; GRCh38/hg38: chr18 34757158, and GRCh38/hg38: chr18 34757288; GRCh38/hg38: chr21 37456130, and GRCh38/hg38: chr21 37456308; GRCh38/hg38: chr11 49206874, and GRCh38/hg38: chr11 49206778; GRCh38/hg38: chr19 49812335, and GRCh38/hg38: chr19 49812251; GRCh38/hg38: chr11 62639110, and GRCh38/hg38: chr11 62638983; GRCh38/hg38: chr17 749909, and GRCh38/hg38: chr17 749814; GRCh38/hg38: chr17 75243570, and GRCh38/hg38: chr17 75243447; GRCh38/hg38: chr17 46924261, and GRCh38/hg38: chr17 46924468; GRCh38/hg38: chr4 175812249, and GRCh38/hg38: chr4 175812191; GRCh38/hg38: chr7 50710990, and GRCh38/hg38: chr7 50710875; GRCh38/hg38: chr9 121300056, and GRCh38/hg38: chr9 121300126; GRCh38/hg38: chrX 72572109, and GRCh38/hg38: chrX 72572057; GRCh38/hg38: chr6 12020248, and GRCh38/hg38: chr6 12020418; GRCh38/hg38: chr10 69300769, and GRCh38/hg38: chr10 69300861; GRCh38/hg38: chr10 69300769, and GRCh38/hg38: chr10 69300861; GRCh38/hg38: chr6 137215377, and GRCh38/hg38: chr6 137215267; GRCh38/hg38: chr8 42272083, and GRCh38/hg38: chr8 42272205; GRCh38/hg38: chr8 42272083, and GRCh38/hg38: chr8 42272205; GRCh38/hg38: chr8 42272083, and GRCh38/hg38: chr8 42272205; GRCh38/hg38: chr8 42272083, and GRCh38/hg38: chr8 42272205; GRCh38/hg38: chr12 108564060, and GRCh38/hg38: chr12 108564155; GRCh38/hg38: chr16 75644462, and GRCh38/hg38: chr16 75644283; GRCh38/hg38: chr16 75644462, and GRCh38/hg38: chr16 75644283; GRCh38/hg38: chr6 24600709, and GRCh38/hg38: chr6 24600619; GRCh38/hg38: chr14 58429363, and GRCh38/hg38: chr14 58429433; GRCh38/hg38: chr14 58429363, and GRCh38/hg38: chr14 58429433; GRCh38/hg38: chr20 21132097, and GRCh38/hg38: chr20 21132159; GRCh38/hg38: chr19 50963549, and GRCh38/hg38: chr19 50963302; GRCh38/hg38: chr1 156126736, and GRCh38/hg38: chr1 156126915; GRCh38/hg38: chr12 25552989, and GRCh38/hg38: chr12 25552871; GRCh38/hg38: chr12 25552989, and GRCh38/hg38: chr12 25552871; GRCh38/hg38: chr1 69716142, and GRCh38/hg38: chr1 69716218; GRCh38/hg38: chr11 72089029, and GRCh38/hg38: chr11 72089165; GRCh38/hg38: chr11 72089029, and GRCh38/hg38: chr11 72089165; GRCh38/hg38: chr11 72089029, and GRCh38/hg38: chr11 72089165; GRCh38/hg38: chr11 72089029, and GRCh38/hg38: chr11 72089165; GRCh38/hg38: chr11 72089029, and GRCh38/hg38: chr11 72089165; GRCh38/hg38: chr11 72089029, and GRCh38/hg38: chr11 72089165; GRCh38/hg38: chr11 72089029, and GRCh38/hg38: chr11 72089165; GRCh38/hg38: chr11 72089029, and GRCh38/hg38: chr11 72089165; GRCh38/hg38: chr11 72089029, and GRCh38/hg38: chr11 72089165; GRCh38/hg38: chr11 72089029, and GRCh38/hg38: chr11 72089165; GRCh38/hg38: chr11 72089029, and GRCh38/hg38: chr11 72089165; GRCh38/hg38: chr3 45838051, and GRCh38/hg38: chr3 45837927; GRCh38/hg38: chr7 78554671, and GRCh38/hg38: chr7 78554567; GRCh38/hg38: chrX 154092307, and GRCh38/hg38: chrX 154092184; GRCh38/hg38: chrX 154092307, and GRCh38/hg38: chrX 154092184; GRCh38/hg38: chr2 111944960, and GRCh38/hg38: chr2 111945060; GRCh38/hg38: chr1 39965211, and GRCh38/hg38: chr1 39965334; GRCh38/hg38: chr3 158592434, and GRCh38/hg38: chr3 158592581; GRCh38/hg38: chr3 158592434, and GRCh38/hg38: chr3 158592581; GRCh38/hg38: chr3 158592434, and GRCh38/hg38: chr3 158592581; GRCh38/hg38: chr3 158592434, and GRCh38/hg38: chr3 158592581; GRCh38/hg38: chr3 158592434, and GRCh38/hg38: chr3 158592581; GRCh38/hg38: chr4 70950700, and GRCh38/hg38: chr4 70950811; GRCh38/hg38: chr12 65308529, and GRCh38/hg38: chr12 65308655; GRCh38/hg38: chr1 161236598, and GRCh38/hg38: chr1 161236459; GRCh38/hg38: chr1 161236598, and GRCh38/hg38: chr1 161236459; GRCh38/hg38: chr1 161236598, and GRCh38/hg38: chr1 161236459; GRCh38/hg38: chr1 161236598, and GRCh38/hg38: chr1 161236459; GRCh38/hg38: chr1 161236598, and GRCh38/hg38: chr1 161236459; GRCh38/hg38: chr1 161236598, and GRCh38/hg38: chr1 161236459; GRCh38/hg38: chr1 161236598, and GRCh38/hg38: chr1 161236459; GRCh38/hg38: chr1 161236598, and GRCh38/hg38: chr1 161236459; GRCh38/hg38: chr1 161236598, and GRCh38/hg38: chr1 161236459; GRCh38/hg38: chr1 161236598, and GRCh38/hg38: chr1 161236459; GRCh38/hg38: chr1 161236598, and GRCh38/hg38: chr1 161236459; GRCh38/hg38: chr1 161236598, and GRCh38/hg38: chr1 161236459; GRCh38/hg38: chr1 161236598, and GRCh38/hg38: chr1 161236459; GRCh38/hg38: chr7 33035988, and GRCh38/hg38: chr7 33035934; GRCh38/hg38: chr7 33035988, and GRCh38/hg38: chr7 33035934; GRCh38/hg38: chr15 34345857, and GRCh38/hg38: chr15 34346035; GRCh38/hg38: chr2 26477749, and GRCh38/hg38: chr2 26477649; GRCh38/hg38: chr2 26477749, and GRCh38/hg38: chr2 26477649; GRCh38/hg38: chr10 110876670, and GRCh38/hg38: chr10 110876753; GRCh38/hg38: chr16 2566356, and GRCh38/hg38: chr16 2566453; GRCh38/hg38: chr16 47463899, and GRCh38/hg38: chr16 47463993; GRCh38/hg38: chr16 47463882, and GRCh38/hg38: chr16 47463993; GRCh38/hg38: chrX 15331992, and GRCh38/hg38: chrX 15331216; GRCh38/hg38: chrX 15331992, and GRCh38/hg38: chrX 15331216; GRCh38/hg38: chr3 146124229, and GRCh38/hg38: chr3 146124138; GRCh38/hg38: chr22 37958374, and GRCh38/hg38: chr22 37958471; GRCh38/hg38: chr9 125172001, and GRCh38/hg38: chr9 125171909; GRCh38/hg38: chr6 162262765, and GRCh38/hg38: chr6 162262525; GRCh38/hg38: chr1 151027233, and GRCh38/hg38: chr1 151027327; GRCh38/hg38: chr14 35308914, and GRCh38/hg38: chr14 35308995; GRCh38/hg38: chr17 42573623, and GRCh38/hg38: chr17 42573478; GRCh38/hg38: chr20 50564969, and GRCh38/hg38: chr20 50565069; GRCh38/hg38: chr19 8402086, and GRCh38/hg38: chr19 8402279; GRCh38/hg38: chr4 26320700, and GRCh38/hg38: chr4 26320815; GRCh38/hg38: chr4 26320700, and GRCh38/hg38: chr4 26320815; GRCh38/hg38: chr16 2264760, and GRCh38/hg38: chr16 2264573; GRCh38/hg38: chr16 2264760, and GRCh38/hg38: chr16 2264573; GRCh38/hg38: chr16 2264760, and GRCh38/hg38: chr16 2264573; GRCh38/hg38: chr16 2264760, and GRCh38/hg38: chr16 2264573; GRCh38/hg38: chr1 92833545, and GRCh38/hg38: chr1 92833660; GRCh38/hg38: chr8 56073768, and GRCh38/hg38: chr8 56073695; GRCh38/hg38: chr9 89325427, and GRCh38/hg38: chr9 89325676; GRCh38/hg38: chr1 151369978, and GRCh38/hg38: chr1 151369713; GRCh38/hg38: chr1 151369978, and GRCh38/hg38: chr1 151369713; GRCh38/hg38: chr4 76995781, and GRCh38/hg38: chr4 76995938; GRCh38/hg38: chr19 38893867, and GRCh38/hg38: chr19 38893819; GRCh38/hg38: chr19 38893867, and GRCh38/hg38: chr19 38893819; GRCh38/hg38: chr19 38893867, and GRCh38/hg38: chr19 38893819; GRCh38/hg38: chr19 38893867, and GRCh38/hg38: chr19 38893819; GRCh38/hg38: chr19 38893867, and GRCh38/hg38: chr19 38893819; GRCh38/hg38: chr3 66243203, and GRCh38/hg38: chr3 66243312; GRCh38/hg38: chr3 66243203, and GRCh38/hg38: chr3 66243312; GRCh38/hg38: chr17 40644459, and GRCh38/hg38: chr17 40644385; GRCh38/hg38: chrX 53422040, and GRCh38/hg38: chrX 53421895; GRCh38/hg38: chr16 18900044, and GRCh38/hg38: chr16 18899987; GRCh38/hg38: chr13 112382278, and GRCh38/hg38: chr13 112382507; GRCh38/hg38: chr15 38299373, and GRCh38/hg38: chr15 38299547; GRCh38/hg38: chr14 35000936, and GRCh38/hg38: chr14 35001020; GRCh38/hg38: chr7 105268869, and GRCh38/hg38: chr7 105268806; GRCh38/hg38: chr2 218673665, and GRCh38/hg38: chr2 218673765; GRCh38/hg38: chr17 63714108, and GRCh38/hg38: chr17 63714006; GRCh38/hg38: chr17 63714108, and GRCh38/hg38: chr17 63714006; GRCh38/hg38: chr17 63714108, and GRCh38/hg38: chr17 63714006; GRCh38/hg38: chr17 63714108, and GRCh38/hg38: chr17 63714006; GRCh38/hg38: chr17 63714108, and GRCh38/hg38: chr17 63714006; GRCh38/hg38: chr17 63714108, and GRCh38/hg38: chr17 63714006; GRCh38/hg38: chr17 63714108, and GRCh38/hg38: chr17 63714006; GRCh38/hg38: chr17 63714108, and GRCh38/hg38: chr17 63714006; GRCh38/hg38: chr17 63714108, and GRCh38/hg38: chr17 63714006; GRCh38/hg38: chr2 202214429, and GRCh38/hg38: chr2 202214357; GRCh38/hg38: chr3 177065022, and GRCh38/hg38: chr3 177064920; GRCh38/hg38: chr3 177065022, and GRCh38/hg38: chr3 177064920; GRCh38/hg38: chr3 177065022, and GRCh38/hg38: chr3 177064920; GRCh38/hg38: chr3 177065022, and GRCh38/hg38: chr3 177064920; GRCh38/hg38: chrX 12910306, and GRCh38/hg38: chrX 12910442; GRCh38/hg38: chr22 19880945, and GRCh38/hg38: chr22 19880856; GRCh38/hg38: chr15 25408684, and GRCh38/hg38: chr15 25408620; GRCh38/hg38: chr15 25408684, and GRCh38/hg38: chr15 25408620; GRCh38/hg38: chr13 38349999, and GRCh38/hg38: chr13 38350227; GRCh38/hg38: chr10 28535562, and GRCh38/hg38: chr10 28535757; GRCh38/hg38: chr17 1727990, and GRCh38/hg38: chr17 1728626; GRCh38/hg38: chr10 27153281, and GRCh38/hg38: chr10 27153227; GRCh38/hg38: chr3 50345232, and GRCh38/hg38: chr3 50345124.

[0023] In some cases, the therapeutic agent is an antisense oligomer complementary to a sequence with at least about 80%, 85%, 90%, 95%, 96%, 97%, 98%, 99% or 100% sequence identity to a sequence selected from the group consisting of SEQ ID NOs: 130-331. In some cases, the therapeutic agent is an antisense oligomer complementary to a sequence with 100% sequence identity to a sequence selected from the group consisting of SEQ ID NOs: 130-331. In some cases, the therapeutic agent is an antisense oligomer that has a sequence with at least about 80%, 85%, 90%, 95%, 96%, 97%, 98%, 99% or 100% sequence identity to a sequence selected from the group consisting of SEQ ID NOs: 534-8095. In some cases, the therapeutic agent is an antisense oligomer that has a sequence with 100% sequence identity to a sequence selected from the group consisting of SEQ ID NOs: 534-8095.

[0024] In some cases, the disease or the condition is selected from the group consisting of: Intellectual Disability; Colorectal Cancer; Bleeding Disorder, Platelet-Type, 15; Autosomal dominant macrothrombocytopenia; Hypertrophic Cardiomyopathy; Cardiomyopathy, Dilated, 1AA; cardiomyopathy, familial hypertrophic, 23, with or without ventricular noncompaction; Familial dilated cardiomyopathy; Charcot-Marie-Tooth Disease; Conduction disorder of the heart; Cardiomyopathy, Dilated; Alcohol Use Disorder; Alcohol abuse; Alcoholic Intoxication, Chronic; Alcohol Use Disorder; Alcohol abuse; Alcoholic Intoxication, Chronic; Schizophrenia; Bipolar Disorder; Alcoholic Intoxication, Chronic; Congenital Disorders of Glycosylation; Epileptic encephalopathy; Depressive disorder; Congenital disorder of glycosylation type 1H; pontocerebellar hypoplasia, type 9; epileptic encephalopathy; ataxias, hereditary; spastic paraplegia 63, autosomal recessive; Cerebellar Hypoplasia; Spastic Paraplegia, Hereditary; Nonketotic Hyperglycinemia; Hyperglycinemia, Transient Neonatal; Glycine encephalopathy; KBG syndrome; 16q24.3 microdeletion syndrome; Situs Inversus; Malignant neoplasm of breast; Maturity onset diabetes mellitus in young; Maturity-Onset Diabetes Of The Young, Type 14; Microcephaly; Polydactyly; Ciliopathies; Mental Depression; Seasonal Affective Disorder; Bipolar Disorder; Mood Disorders; Depressive disorder; Malignant neoplasm of breast; Cytopenia; Gastrointestinal Neoplasms; Depressive disorder; Prostate cancer, familial; Primary peritoneal carcinoma; ovarian cancer, familial, susceptibility to, 1; Breast Cancer, Familial Male; Malignant Neoplasms; Pancreatic Neoplasm; Breast Cancer, Familial; Neoplasm of uncertain or unknown behavior of breast; Ovarian Carcinoma; Adenocarcinoma of prostate; Neoplasm of uncertain or unknown behavior of ovary; Malignant neoplasm of pancreas; Pancreatic carcinoma; Malignant neoplasm of ovary; Congenital anemia; Hematologic Neoplasms; Breast adenocarcinoma; breast-ovarian cancer, familial, susceptibility to, 1; Pancreatic carcinoma, familial; Benign tumor of pancreas; Breast Carcinoma; breast cancer, familial, susceptibility to, 1; ovarian neoplasm; Hereditary Breast and Ovarian Cancer Syndrome; Mental Depression; Epithelial ovarian cancer; Malignant neoplasm of breast; Sporadic Breast Carcinoma; Breast-ovarian cancer, familial, 1; Pancreatic cancer, susceptibility to, 4; C8 deficiency, type II; ventricular tachycardia, catecholaminergic polymorphic, 4; ventricular tachycardia, catecholaminergic polymorphic, 1; Long QT Syndrome; Romano-Ward Syndrome; Long Qt Syndrome 14; peeling skin syndrome; peeling skin with leukonychia, acral punctate keratoses, cheilitis, and knuckle pads; erythrokeratoderma; palmoplantar keratosis; morbid obesity and spermatogenic failure; warburton anyane yeboa syndrome; mosaic variegated aneuploidy syndrome; Breast Cancer, Familial; Malignant neoplasm of ovary; Mitochondrial Diseases; Severe combined immunodeficiency with sensitivity to ionizing radiation; severe combined immunodeficiency, partial; Reticuloendotheliosis, familial, with eosinophilia; Omenn Syndrome; Athabaskan severe combined immunodeficiency; Severe Combined Immunodeficiency, Athabaskan-Type; Cocaine Abuse; Congenital anemia; Cytopenia; Neurodegeneration Due To Cerebral Folate Transport Deficiency; Megaloblastic Anemia due to Dihydrofolate Reductase Deficiency; Alcoholic Intoxication, Chronic; Bipolar Disorder; Unipolar Depression; Major Depressive Disorder; Schizophrenia and related disorders; Left ventricular noncompaction cardiomyopathy; Left ventricular noncompaction; Familial Meniere's disease; Charcot-Marie-Tooth Disease; noncompaction of left ventricular myocardium, familial isolated, autosomal dominant 1; Primary microcephaly; Microcephaly; Epileptic encephalopathy; Mental retardation, autosomal dominant 7; Colorectal Cancer; Depressive disorder; Mental Depression; Caudal Regression Syndrome; Arnold Chiari Malformation; Caudal dysplasia syndrome; Chiari malformation type II; Sacral Agenesis Syndrome; Sacral agenesis; Currarino triad; Spina bifida aperta of cervical spine; Neural tube defects; Polycystic Kidney, Autosomal Dominant; polycystic kidney disease 3, autosomal dominant; alcoholic intoxication, chronic; malignant neoplasm of breast; ataxias, hereditary; epilepsy, progressive myoclonic, 6; Epileptic encephalopathy; Lattice corneal dystrophy Type II; Meretoja syndrome; Malignant neoplasm of breast; Periodic Fever Syndrome; Familial Amyloid Polyneuropathy, Type IV; Cerebral Amyloid Angiopathy, Gsn-Related; Abnormality of the cornea; Amyloidosis, Finnish type; Primary microcephaly; cornelia de lange syndrome 5; radial club hand; cornelia de lange syndrome; wilson-turner x-linked mental retardation syndrome; congenital anemia; retinitis pigmentosa 79; charcot-marie-tooth disease; cytopenia; hemolytic anemia, nonspherocytic, due to hexokinase deficiency; neuropathy, hereditary motor and sensory, russe type; interferon gamma, receptor 1, deficiency; immunodeficiency 27a; immunodeficiency 27b; H. pylori infection, susceptibility to; Tuberculosis infection, protection against; Immunodeficiency 27A, mycobacteriosis, AR; Immunodeficiency 27B, mycobacteriosis, AD; Hepatitis B virus infection, susceptibility to; Tuberculosis, susceptibility to; Malignant neoplasm of breast; Lymphoma, Non-Hodgkin; immunodeficiency 15; Congenital myopathy; Arthrogryposis; Rhabdomyolysis; myopathy with exercise intolerance, Swedish type; Myopathy with lactic acidosis, hereditary; Charcot-Marie-Tooth disease, recessive intermediate B; Charcot-Marie-Tooth Disease; Deafness, Autosomal Recessive 89; Deafness, autosomal recessive 89; Dyslexia, susceptibility to, 2; Joubert Syndrome 23; Polydactyly; Familial aplasia of the vermis; Joubert syndrome with Jeune asphyxiating thoracic dystrophy; Hydrocephalus; Ciliopathies; Short-rib thoracic dysplasia 14 with polydactyly; Retinitis Pigmentosa; Retinitis pigmentosa 69; Muscular Dystrophy, Limb-Girdle, Type 1B; Hypertrophic Cardiomyopathy; Left ventricular noncompaction; Osteogenesis Imperfecta; Charcot-Marie-Tooth Disease; Cardiomyopathy, Familial Idiopathic; Familial Partial Lipodystrophy, Type 1; Left ventricular noncompaction cardiomyopathy; Mandibuloacral dysostosis; Muscular Dystrophy, Congenital, Lmna-Related; Congenital myopathy; Arthrogryposis; Arrhythmogenic Right Ventricular Dysplasia; Muscular Dystrophies, Limb-Girdle; Malouf syndrome; Najjar syndrome; Charcot-Marie-Tooth disease, Type 2B1; Emery-Dreifuss Muscular Dystrophy 3; Lethal tight skin contracture syndrome; Familial Partial Lipodystrophy, Type 2; Conduction disorder of the heart; Cardiomyopathy, Dilated; Progeria Syndrome, Childhood-Onset; Atypical Werner syndrome; Congenital muscular dystrophy; Autosomal Recessive Emery-Dreifuss Muscular Dystrophy; Heart-hand syndrome, Slovenian type; Progeria; Autosomal Dominant Emery-Dreifuss Muscular Dystrophy; Cardiomyopathy, dilated, 1A; Mandibuloacral dysplasia; Muscular dystrophy, limb-girdle, type 1B; Emery-Dreifuss muscular dystrophy 2, AD; Malouf syndrome; Restrictive dermopathy, lethal; Emery-Dreifuss muscular dystrophy 3, AR; Heart-hand syndrome, Slovenian type; Charcot-Marie-Tooth disease, type 2B1; Hutchinson-Gilford progeria; Lipodystrophy, familial partial, type 2; Muscular dystrophy, congenital; Malignant neoplasm of breast; Deafness, Autosomal Recessive 63; Bardet-Biedl Syndrome; Polydactyly; Ciliopathies; Bardet-Biedl Syndrome 17; Major Affective Disorder 2; Bipolar Disorder; Epileptic encephalopathy; Rett Syndrome, Preserved Speech Variant; Lubs X-linked mental retardation syndrome; Encephalopathy, Neonatal Severe, Due To Mecp2 Mutations; Mental Retardation with Psychosis, Pyramidal Signs, and Macroorchidism; Mental Retardation, X-Linked, With Spasticity; Trisomy Xq28; Mental Retardation, X-Linked 16; Epileptic encephalopathy; Mental Retardation, X-Linked, Syndromic 13; Mental Retardation, X-Linked 1; Rett Syndrome, Atypical; Mental Retardation, X-Linked 79; Microcephaly; Ppm-X Syndrome; Rett Syndrome, Zappella Variant; Rett Syndrome; Autism susceptibility, X-linked 3; Benign neoplasm of adrenal gland; Retinitis Pigmentosa; Conventional (Clear Cell) Renal Cell Carcinoma; Squamous cell carcinoma of the head and neck; Malignant neoplasm of aortic body and other paraganglia; Retinitis Pigmentosa 38; Malignant Adrenal Medulla Neoplasm; Benign neoplasm of aortic body and other paraganglia; Primary microcephaly; Microcephaly 15, Primary, Autosomal Recessive; Autosomal Recessive Primary Microcephaly; Microcephaly; Leukemia, acute myeloid; Deafness, Autosomal Recessive 74; Cytopenia; Uridine 5-Prime Monophosphate Hydrolase Deficiency, Hemolytic Anemia due to; Congenital anemia; NUT midline carcinoma; Malignant neoplasm of breast; Deafness, Autosomal Recessive; Deafness, Autosomal Recessive 9; Auditory Neuropathy, Nonsyndromic Recessive; Auditory neuropathy, autosomal recessive, 1; Malignant neoplasm of breast; Breast Carcinoma; Neoplasm of uncertain or unknown behavior of breast; Breast adenocarcinoma; Ketotic hypoglycemia; Rhabdomyolysis; Glycogen Storage Disease IXB; Phosphorylase kinase deficiency of liver and muscle, autosomal recessive; Congenital anemia; Congenital Disorders of Glycosylation; Cytopenia; Epileptic encephalopathy; Paroxysmal nocturnal hemoglobinuria; Paroxysmal Nocturnal Hemoglobinuria 1; West Syndrome; Multiple Congenital Anomalies-Hypotonia-Seizures Syndrome 2; Congenital anemia; Congenital Disorders of Glycosylation; Cytopenia; Epileptic encephalopathy; Paroxysmal nocturnal hemoglobinuria; Paroxysmal Nocturnal Hemoglobinuria 1; West Syndrome; Multiple Congenital Anomalies-Hypotonia-Seizures Syndrome 2; Bruck Syndrome 2; Osteogenesis Imperfecta; Bruck Syndrome 1; Arthrogryposis; Bruck Syndrome; Cutaneous Melanoma; Melanoma; Parkinson Disease 2, Autosomal Recessive Juvenile; Parkinson Disease; Young Onset Parkinson Disease; Parkinson Disease, Late-Onset; Leprosy, Susceptibility To; Adenocarcinoma, Ovarian, Somatic; Adenocarcinoma Of Lung, Somatic; Primary Microcephaly; Neurodevelopmental Disorder With Microcephaly, Hypotonia, And Variable Brain Anomalies; Myocardial infarcation, susceptibility to; Pure Gonadal Dysgenesis, 46, XX; Ovarian dysgenesis 3; Insulin resistance, susceptibility to; Leukodystrophy; Epileptic encephalopathy; Adams-Oliver Syndrome 3; Adams Oliver syndrome; Mood Disorders; Congenital anemia; Hematologic Neoplasms; Anemia, Diamond-Blackfan; Cytopenia; Aase Smith syndrome 2; Radial club hand; Precursor T-Cell Lymphoblastic Leukemia-Lymphoma; Diamond-Blackfan anemia 6; Hereditary non-polyposis colorectal cancer syndrome; Familial Colorectal Cancer Type X; Hereditary Nonpolyposis Colorectal Cancer; Hereditary Nonpolyposis Colorectal Neoplasms; Thyroid Hormone Metabolism, Abnormal; Thyroid Hormone Resistance Syndrome; Bipolar Disorder; Disturbance in mood; Combined Oxidative Phosphorylation Deficiency 28; Coffin-Siris Syndrome 5; Coffin-Siris syndrome; Meningioma; Meningiomas, Multiple; Meningioma, familial, susceptibility to; Primary microcephaly; Congenital anemia; Osteogenesis Imperfecta; Cytopenia; Epileptic encephalopathy; Radial club hand; Cornelia De Lange Syndrome; Growth Deficiency and Mental Retardation with Facial Dysmorphism; Congenital muscular hypertrophy-cerebral syndrome; Cornelia de Lange syndrome 2; Infiltrating duct carcinoma of female breast; Colorectal Cancer; Neurofibromatosis 1; Neurofibromatosis, Type 1-Like Syndrome; Legius syndrome; Shwachman syndrome; Glioblastoma Multiforme; Ovarian Serous Adenocarcinoma; Polynesian Bronchiectasis; Kartagener Syndrome; Polyhydramnios, Megalencephaly, And Symptomatic Epilepsy; Hydrocephalus; Epileptic encephalopathy; Oligodontia; Hypodontia; Orofacial cleft 10; Malignant neoplasm of urinary bladder; Acute Promyelocytic Leukemia; Adenocarcinoma of large intestine; Bladder Neoplasm; Epileptic encephalopathy; Neoplasm of uncertain or unknown behavior of bladder; Mental Retardation, Autosomal Dominant 41; Benign neoplasm of bladder; Lymphoma, Non-Hodgkin; Carcinoma in situ of bladder; Central nervous system lymphoma; Carcinoma of bladder; Plantar Lipomatosis, Unusual Facies, and Developmental Delay; Pierpont syndrome; X-linked Adrenal Hypoplasia; Depressive Symptoms; Familial dilated cardiomyopathy; Familial Glucocorticoid Deficiency Type 1; Conduction disorder of the heart; Cardiomyopathy, Dilated; Angelman Syndrome; Epileptic encephalopathy; Microcephaly; Duplication 15q11-q13 Syndrome; Leukodystrophy, Hypomyelinating, 6; Chromosome 10p12-p11 Deletion Syndrome; Colorectal Cancer; Desanto-Shinawi Syndrome; Ataxias, Hereditary; Cerebellar Ataxia, Mental Retardation, And Dysequilibrium Syndrome 2; Hydrocephalus; Cerebellar Hypoplasia; Dysequilibrium Syndrome; OPTIC ATROPHY 11; Polynesian Bronchiectasis; Ciliary Dyskinesia, Primary, 22; Kartagener Syndrome; and Ciliopathies.

[0025] In some cases, the disease or the condition is caused by a deficient amount or activity of a functional target protein, and wherein the first protein comprising the target peptide sequence is at least partially functionally equivalent to the functional target protein. In some cases, the disease or the condition is caused by a deficient amount or activity of the target peptide sequence. In some cases, the therapeutic agent increases the level of the first processed mRNA in the cell. In some cases, the level of the first processed mRNA in the cell contacted with the therapeutic agent is increased about 1.1 to about 10-fold, about 1.5 to about 10-fold, about 2 to about 10-fold, about 3 to about 10-fold, about 4 to about 10-fold, about 1.1 to about 5-fold, about 1.1 to about 6-fold, about 1.1 to about 7-fold, about 1.1 to about 8-fold, about 1.1 to about 9-fold, about 2 to about 5-fold, about 2 to about 6-fold, about 2 to about 7-fold, about 2 to about 8-fold, about 2 to about 9-fold, about 3 to about 6-fold, about 3 to about 7-fold, about 3 to about 8-fold, about 3 to about 9-fold, about 4 to about 7-fold, about 4 to about 8-fold, about 4 to about 9-fold, at least about 1.1-fold, at least about 1.5-fold, at least about 2-fold, at least about 2.5-fold, at least about 3-fold, at least about 3.5-fold, at least about 4-fold, at least about 5-fold, or at least about 10-fold, compared to the level of the first processed mRNA in a control cell.

[0026] In some cases, the therapeutic agent increases the expression of the target peptide sequence in the cell. In some cases, the level of the target peptide sequence in the cell contacted with the therapeutic agent is increased about 1.1 to about 10-fold, about 1.5 to about 10-fold, about 2 to about 10-fold, about 3 to about 10-fold, about 4 to about 10-fold, about 1.1 to about 5-fold, about 1.1 to about 6-fold, about 1.1 to about 7-fold, about 1.1 to about 8-fold, about 1.1 to about 9-fold, about 2 to about 5-fold, about 2 to about 6-fold, about 2 to about 7-fold, about 2 to about 8-fold, about 2 to about 9-fold, about 3 to about 6-fold, about 3 to about 7-fold, about 3 to about 8-fold, about 3 to about 9-fold, about 4 to about 7-fold, about 4 to about 8-fold, about 4 to about 9-fold, at least about 1.1-fold, at least about 1.5-fold, at least about 2-fold, at least about 2.5-fold, at least about 3-fold, at least about 3.5-fold, at least about 4-fold, at least about 5-fold, or at least about 10-fold, compared to the level of the target peptide sequence in a control cell.

[0027] In some cases, the therapeutic agent is an antisense oligonucleotide, and wherein the therapeutic agent comprises a backbone modification comprising a phosphorothioate linkage or a phosphorodiamidate linkage. In some cases, the therapeutic agent is an antisense oligonucleotide, and wherein the therapeutic agent comprises a phosphorodiamidate morpholino, a locked nucleic acid, a peptide nucleic acid, a 2′-O-methyl, a 2′-Fluoro, or a 2′-O-methoxyethyl moiety. In some cases, the therapeutic agent is an antisense oligonucleotide, and wherein the therapeutic agent comprises at least one modified sugar moiety. In some cases, each sugar moiety is a modified sugar moiety. In some cases, the therapeutic agent is an antisense oligonucleotide, and wherein the therapeutic agent consists of from 8 to 50 nucleobases, 8 to 40 nucleobases, 8 to 35 nucleobases, 8 to 30 nucleobases, 8 to 25 nucleobases, 8 to 20 nucleobases, 8 to 15 nucleobases, 9 to 50 nucleobases, 9 to 40 nucleobases, 9 to 35 nucleobases, 9 to 30 nucleobases, 9 to 25 nucleobases, 9 to 20 nucleobases, 9 to 15 nucleobases, 10 to 50 nucleobases, 10 to 40 nucleobases, 10 to 35 nucleobases, 10 to 30 nucleobases, 10 to 25 nucleobases, 10 to 20 nucleobases, 10 to 15 nucleobases, 11 to 50 nucleobases, 11 to 40 nucleobases, 11 to 35 nucleobases, 11 to 30 nucleobases, 11 to 25 nucleobases, 11 to 20 nucleobases, 11 to 15 nucleobases, 12 to 50 nucleobases, 12 to 40 nucleobases, 12 to 35 nucleobases, 12 to 30 nucleobases, 12 to 25 nucleobases, 12 to 20 nucleobases, or 12 to 15 nucleobases.

[0028] In some cases, the method further comprises assessing mRNA level encoding the target peptide sequence or expression level of the target peptide sequence.

[0029] In some cases, the subject is a human. In some cases, the subject is a non-human animal. In some cases, the subject is a fetus, an embryo, or a child. In some cases, the cell or the cells is ex vivo, or in a tissue, or organ ex vivo.

[0030] In some cases, the therapeutic agent is administered to the subject by intracerebroventricular injection, intraperitoneal injection, intramuscular injection, intrathecal injection, subcutaneous injection, oral administration, synovial injection, intravitreal administration, subretinal injection, topical application, implantation, or intravenous injection.

[0031] Disclosed herein, in some aspects, is a therapeutic agent for use in the method disclosed herein.

[0032] Disclosed herein, in some aspects, is a pharmaceutical composition comprising the therapeutic agent described herein and a pharmaceutically acceptable excipient.

[0033] Disclosed herein, in some aspects, is a method of treating a subject in need thereof, comprising administering the pharmaceutical composition described herein by intracerebroventricular injection, intraperitoneal injection, intramuscular injection, intrathecal injection, subcutaneous injection, oral administration, synovial injection, intravitreal administration, subretinal injection, topical application, implantation, or intravenous injection to the subject.

### INCORPORATION BY REFERENCE

[0034] All publications, patents, and patent applications mentioned in this specification are herein incorporated by reference to the same extent as if each individual publication, patent, or patent application was specifically and individually indicated to be incorporated by reference.

### BRIEF DESCRIPTION OF THE DRAWINGS

[0035] The novel features of the disclosure are set forth with particularity in the appended claims. A better understanding of the features and advantages of the present disclosure will be obtained by reference to the following detailed description that sets forth illustrative embodiments, in which the principles of the disclosure are utilized, and the accompanying drawings of which:

[0036] FIGS. 1A-1B depict a schematic representation of MECP2 pre-mRNA splicing isoforms (FIG. 1A) and protein domains (FIG. 1B).

[0037] FIG. 2 is a schematic depicting the targeting strategy for modulating the alternative splicing of MECP2 pre-mRNA.

[0038] FIGS. 3A-3B show RT-PCR analysis performed to confirm exon 2 inclusion event during MECP2 mRNA processing.

[0039] FIG. 4 depicts an ASO walk for MECP2 exon 2 region.

[0040] FIG. 5 shows RT-PCR analysis performed to evaluate the ASO walk over MECP2 exon 2 region.

[0041] FIGS. 6A-6B show effects of select ASOs on MECP2 exon 2 inclusion (FIG. 6A) and MECP2 protein expression (FIG. 6B).

[0042] FIG. 7 shows the quantification of total MECP2 mRNA (e1+e2).

[0043] FIG. 8 shows a dose-dependent effect of selected ASOs Mecp2 exon 2 inclusion in mouse embryonic fibroblast (MEF) cells

[0044] FIG. 9 shows RT-PCR analysis performed to evaluate the ASO microwalk in the region of ASOs 31-33 and 37-38.

### DETAILED DESCRIPTION

[0045] Alternative splicing in certain genes can lead to non-productive or less productive mRNA transcripts which in turn can downregulate protein expression. Therapeutic agents that can target the alternative splicing events in these genes can modulate the expression level of proteins. Such therapeutic agents can be used to treat a condition caused by protein deficiency.

[0046] One of the alternative splicing events that can lead to non-productive or less productive mRNA transcripts can be the inclusion of an exon containing an inefficient translation region, which can result in inefficient translation of the mRNA transcript. In some cases, the mRNA transcript with the inefficient translation region has significantly lower translation efficiency as compared to a corresponding mRNA transcript that is otherwise identical but without the inefficient region.

[0047] In one aspect, the present disclosure provides compositions and methods for modulating alternative splicing of genes that can have a pre-mRNA that has an exon having an inefficient translation region to increase the production of mRNAs that is efficiently translated and codes for a target peptide sequence, and thus the translated target peptide sequence. The compositions and methods include antisense oligomers (ASOs) that can cause exon skipping and promote the generation of mRNA that can be efficiently translated. In various examples, the target peptide sequence can be increased using the methods of the disclosure to treat a condition caused by deficiency of the target peptide sequence or a relevant protein.

[0048] Described herein, in some embodiments, is a method of modulating expression of a target peptide sequence by cells having a pre-mRNA that encodes the target peptide sequence and comprises an inefficient translation region, the method comprising contacting the cells with a therapeutic agent that binds to a targeted region of the pre-mRNA encoding the target peptide sequence, whereby splicing of the inefficient translation region from the pre-mRNA encoding the target peptide sequence is modulated, thereby modulating a level of a first processed mRNA that is devoid of the inefficient translation region and encodes the target peptide sequence, and thereby modulating the expression of the target peptide sequence in the cells, wherein the processed mRNA has a higher translation efficiency for producing the target peptide sequence in the cells as compared to a second processed mRNA that comprises the inefficient translation region. In some cases, the second processed mRNA is otherwise identical to the first processed mRNA but comprises the inefficient translation region. In some cases, the first processed mRNA and the second processed mRNA are both splicing products of the same pre-mRNA. In some cases, the subject therapeutic agent modulates the splicing of the pre-mRNA, thereby modulating the balance between the first processed mRNA and the second processed mRNA in the cell.

[0049] In some embodiments, one of the alternative splicing events that can lead to non-productive or less productive mRNA transcript is the inclusion of an exon that contains a premature termination codon (PTC) followed by an alternative start codon. In these cases, the pre-mRNA has a first start codon, a second start codon (alternative start codon), and a PTC located downstream of the first start codon and upstream of the second start codon. Without wishing to be bound by a certain theory, the motif or the exon containing the PTC and the alternative start codon can contribute to the low productivity of the mRNA transcript. In some embodiments, the motif or the exon containing the PTC and the alternative start codon leads to inefficient translation of the downstream exon sequences. In some embodiments, the motif or the exon containing the PTC and the alternative start codon leads to less stable protein product expressed by the downstream exon sequences or deficient post-translational modification, or some other processes at the molecular or cellular level, which can result in deficient protein expression or function. Without wishing to be bound by a certain theory, the presence of the alternative start codon can contribute to the lack of nonsense-mediated decay (NMD) of the mRNA transcript, as the translating ribosome can reinitiate translation at the alternative start codon right after encountering the PTC rather than triggering the recruitment of the NMD machinery, which ultimately can lead to the degradation of the mRNA transcript.

[0050] In one aspect, the present disclosure provides compositions and methods for modulating alternative splicing of genes that can have a pre-mRNA that has an exon containing a PTC followed by an alternative start codon to increase the production of mature mRNAs that codes for a target peptide sequence, and thus the translated target peptide sequence. In some cases, the compositions include ASOs that can cause exon skipping and promote the generation of an mRNA that can be efficiently translated. In various examples, the target peptide sequence can be increased using the methods of the disclosure to treat a condition caused by deficiency of the target peptide sequence or a relevant protein.

[0051] Described herein, in some embodiments, is a method of modulating expression of a target peptide sequence by cells having a pre-mRNA that encodes the target peptide sequence and comprises a first start codon, a second start codon, and a premature termination codon (PTC) located downstream of the first start codon and upstream of the second start codon, the method comprising contacting the cells with a therapeutic agent that binds to a targeted portion of the pre-mRNA encoding the target peptide sequence, whereby splicing of the PTC and the second start codon from the pre-mRNA is modulated, thereby modulating a level of a first processed mRNA that that is devoid of the PTC and the second start codon and encodes the target peptide sequence, and thereby modulating the expression of the target peptide sequence in the cells.

### RNA Splicing

[0052] Intervening sequences or introns are removed by a large and highly dynamic RNA-protein complex termed the spliceosome, which orchestrates complex interactions between primary transcripts, small nuclear RNAs (snRNAs) and a large number of proteins. Spliceosomes assemble ad hoc on each intron in an ordered manner, starting with recognition of the 5′ splice site (5′ss) by U1 snRNA or the 3′splice site (3′ss) by the U2 pathway, which involves binding of the U2 auxiliary factor (U2AF) to the 3′ss region to facilitate U2 binding to the branch point sequence (BPS). U2AF is a stable heterodimer composed of a U2AF2-encoded 65-kD subunit (U2AF65), which binds the polypyrimidine tract (PPT), and a U2AF1-encoded 35-kD subunit (U2AF35), which interacts with highly conserved AG dinucleotides at 3′ss and stabilizes U2AF65 binding. In addition to the BPS/PPT unit and 3′ss/5′ss, accurate splicing requires auxiliary sequences or structures that activate or repress splice site recognition, known as intronic or exonic splicing enhancers or silencers. These elements allow genuine splice sites to be recognized among a vast excess of cryptic or pseudo-sites in the genome of higher eukaryotes, which have the same sequences but outnumber authentic sites by an order of magnitude. Although they often have a regulatory function, the exact mechanisms of their activation or repression are poorly understood.

[0053] The decision of whether to splice or not can be typically modeled as a stochastic rather than deterministic process, such that even the most defined splicing signals can sometimes splice incorrectly. However, under normal conditions, pre-mRNA splicing can proceed at surprisingly high fidelity. This can be attributed in part to the activity of adjacent cis-acting auxiliary exonic and intronic splicing regulatory elements (ESRs or ISRs). Typically, these functional elements are classified as either exonic or intronic splicing enhancers (ESEs or ISEs) or silencers (ESSs or ISSs) based on their ability to stimulate or inhibit splicing, respectively. Although there is now evidence that some auxiliary cis-acting elements may act by influencing the kinetics of spliceosome assembly, such as the arrangement of the complex between U1 snRNP and the 5′ss, it seems very likely that many elements function in concert with trans-acting RNA-binding proteins (RBPs). For example, the serine- and arginine-rich family of RBPs (SR proteins) is a conserved family of proteins that have a key role in defining exons. SR proteins promote exon recognition by recruiting components of the pre-spliceosome to adjacent splice sites or by antagonizing the effects of ESSs in the vicinity. The repressive effects of ESSs can be mediated by members of the heterogeneous nuclear ribonucleoprotein (hnRNP) family and can alter recruitment of core splicing factors to adjacent splice sites. In addition to their roles in splicing regulation, silencer elements are suggested to have a role in repression of pseudo-exons, sets of decoy intronic splice sites with the typical spacing of an exon but without a functional open reading frame. ESEs and ESSs, in cooperation with their cognate trans-acting RBPs, represent important components in a set of splicing controls that specify how, where and when mRNAs are assembled from their precursors.

[0054] The sequences marking the exon-intron boundaries are degenerate signals of varying strengths that can occur at high frequency within human genes. In multi-exon genes, different pairs of splice sites can be linked together in many different combinations, creating a diverse array of transcripts from a single gene. This is commonly referred to as alternative pre-mRNA splicing. Although most mRNA isoforms produced by alternative splicing can be exported from the nucleus and translated into functional polypeptides, different mRNA isoforms from a single gene can vary greatly in their translation efficiency. Those mRNA isoforms with premature termination codons (PTCs) at least 50 bp upstream of an exon junction complex are likely to be targeted for degradation by the nonsense-mediated mRNA decay (NMD) pathway. In some embodiments, however, an alternative start codon that follows the PTC can prevent the induction of NMD event, as exemplified in the case of MECP2 e2 mRNA isoform (discussed below). Mutations in traditional (BPS/PPT/3′ss/5′ss) and auxiliary splicing motifs can cause aberrant splicing, such as exon skipping or cryptic (or pseudo-) exon inclusion or splice-site activation, and contribute significantly to human morbidity and mortality. Both aberrant and alternative splicing patterns can be influenced by natural DNA variants in exons and introns.

[0055] In some embodiments, the compositions and methods make use of cryptic splice sites to modulate alternative splicing in order to produce desirable splicing isoform, in order to modulate the expression level of target peptide sequence. Cryptic (or pseudo-) splice sites can have the same splicing recognition sequences as genuine splice sites but are not used in splicing reactions. They outnumber genuine splice sites in the human genome by an order of a magnitude and are normally repressed by thus far poorly understood molecular mechanisms. Cryptic 5′ splice sites have the consensus NNN/GUNNNN or NNN/GCNNNN where N is any nucleotide and/is the exon-intron boundary. Cryptic 3′ splice sites have the consensus NAG/N. Their activation is positively influenced by surrounding nucleotides that make them more similar to the optimal consensus of authentic splice sites, namely MAG/GURAGU and YAG/G, respectively, where M is C or A, R is G or A, and Y is C or U.

[0056] Splice sites and their regulatory sequences can be readily identified by a skilled person using suitable algorithms publicly available, listed for example in Kralovicova, J. and Vorechovsky, I. (2007) Global control of aberrant splice site activation by auxiliary splicing sequences: evidence for a gradient in exon and intron definition. Nucleic Acids Res., 35, 6399-6413, (available at www.ncbi.nlm.nih.gov/pmc/articles/PMC2095810/pdf/gkm680.pdf)

[0057] The cryptic splice sites or splicing regulatory sequences may compete for RNA-binding proteins, such as U2AF. In some embodiments, an agent may bind to a cryptic splice site or splicing regulatory sequence to prevent binding of RNA-binding proteins and thereby favor binding of RNA-binding proteins to the desirable splice sites.

MECP2 mRNA Splicing

[0058] In some embodiments, the methods of the present disclosure exploit the alternative splicing of the pre-mRNA transcribed from MECP2 gene. MECP2 pre-mRNA can have 4 exons and be alternatively spliced (FIG. 1). Exemplary MECP2 pre-mRNA sequences include SEQ ID NOs: 2-27. In some embodiments, MECP2 pre-mRNA can be spliced into two isoforms, which can result in production of MeCP2a or e1 protein isoform, and MeCP20 or e2 isoform, respectively. Skipping of exon 2 can result in the production of the major MeCP2a or e1 isoform, whereas inclusion of exon 2 can give rise to MeCP20 or e2-isoform. The MeCP2-e1 and e2 isoforms can have a unique N-terminal sequence of 21aa and 9aa respectively. The relative expression level of these isoforms can vary among tissues, with MeCP2-e1 being more dominant in adult brain. MeCP2-e2 is expressed more abundantly in placenta, liver, and skeletal muscle. Furthermore, in some cases, deletion of MeCP2-e2 by disrupting exon 2 does not result in RTT-associated phenotypes in mice. Exon 2 is an out-of-frame exon. It has both a PTC as well as an alternative start codon. Translation from a downstream start codon can be very inefficient. Mutagenesis studies have shown that the presence of two start codons in the full-length (e2) transcript dramatically reduces translation efficiency of the downstream open-reading-frame. When the upstream ATG in exon 1 is eliminated, translation of MeCP2-e2 can increase significantly. In some embodiments, skipping (splicing out) of exon 2 from full length (e2) MECP2 transcripts can reduce the nonproductive transcript pool, leading to increased translation of MeCP2-e1 protein. In adult human brain, approximately 50% of the transcripts can contain exon 2 as determined by RNA-seq (Lister PMID 23828890). In some cases, the isoform containing exon 2 can be dispensable in adult brain, as a result, exon 2 skipping induced by a therapeutic agent (e.g., ASO) can be a viable therapeutic strategy to increase MeCP2 expression in patients suffering from MeCP2 protein deficiency, e.g., Rett syndrome patients.

[0059] In some embodiments, the therapeutic agent targets a sequence about 4 to about 300 nucleotides upstream (or 5′) from the 5′ end of the inefficient translation region, e.g., exon 2 region of MECP2 pre-mRNA. In some embodiments, the therapeutic agent targets a sequence about 1 to about 20 nucleotides, about 20 to about 50 nucleotides, about 50 to about 100 nucleotides, about 100 to about 150 nucleotides, about 150 to about 200 nucleotides, about 200 to about 250 nucleotides, or about 250 to about 300 nucleotides upstream (or 5′) from the 5′ end of the inefficient translation region. In some embodiments, the therapeutic agent may target a sequence more than 300 nucleotides upstream from the 5′ end of the inefficient translation region. In some embodiments, the therapeutic agent targets a sequence about 4 to about 300 nucleotides downstream (or 3′) from the 3′ end of the inefficient translation region. In some embodiments, the therapeutic agent targets a sequence about 1 to about 20 nucleotides, about 20 to about 50 nucleotides, about 50 to about 100 nucleotides, about 100 to about 150 nucleotides, about 150 to about 200 nucleotides, about 200 to about 250 nucleotides, or about 250 to about 300 nucleotides downstream from the 3′ end of the inefficient translation region. In some embodiments, the therapeutic agent targets a sequence more than 300 nucleotides downstream from the 3′ end of the inefficient translation region.

[0060] In some embodiments, the therapeutic agent targets a sequence about 4 to about 300 nucleotides upstream (or 5′) from the 5′ end of the exon containing the PTC and the second start codon (alternative start codon), e.g., exon 2 region of MECP2 pre-mRNA. In some embodiments, the therapeutic agent targets a sequence about 1 to about 20 nucleotides, about 20 to about 50 nucleotides, about 50 to about 100 nucleotides, about 100 to about 150 nucleotides, about 150 to about 200 nucleotides, about 200 to about 250 nucleotides, or about 250 to about 300 nucleotides upstream (or 5′) from the 5′ end of the exon containing the PTC and the alternative start codon. In some embodiments, the therapeutic agent may target a sequence more than 300 nucleotides upstream from the 5′ end of the exon containing the PTC and the alternative start codon. In some embodiments, the therapeutic agent targets a sequence about 4 to about 300 nucleotides downstream (or 3′) from the 3′ end of the exon containing the PTC and the alternative start codon. In some embodiments, the therapeutic agent targets a sequence about 1 to about 20 nucleotides, about 20 to about 50 nucleotides, about 50 to about 100 nucleotides, about 100 to about 150 nucleotides, about 150 to about 200 nucleotides, about 200 to about 250 nucleotides, or about 250 to about 300 nucleotides downstream from the 3′ end of the exon containing the PTC and the alternative start codon. In some embodiments, the therapeutic agent targets a sequence more than 300 nucleotides downstream from the 3′ end of the exon containing the PTC and the alternative start codon.

[0061] In some embodiments, the pre-mRNA transcript that can be targeted by a method or composition provided herein is encoded by a genetic sequence with at least about 80%, 85%, 90%, 95%, 96%, 97%, 98%, 99% or 100% sequence identity to SEQ ID NO: 1. In some embodiments, the pre-mRNA transcript that can be targeted by a method or composition provided herein comprises a sequence with at least about 80%, 85%, 90%, 95%, 96%, 97%, 98%, 99% or 100% sequence identity to any one of SEQ ID NOs: 2-27.

[0062] In some embodiments, the therapeutic agent targets intron 1, exon 2, or intron 2 of MECP2 pre-mRNA. In some embodiments, the therapeutic agent targets an exon sequence that has at least about 80%, 85%, 90%, 95%, 96%, 97%, 98%, 99% or 100% sequence identity to any selected from the group consisting of SEQ ID NOs: 28-31. In some embodiments, the therapeutic agent targets exon 2 of MECP2 pre-mRNA. In some embodiments, the therapeutic agent targets an exon sequence that has at least about 80%, 85%, 90%, 95%, 96%, 97%, 98%, 99% or 100% sequence identity to SEQ ID NO: 28.

[0063] In some embodiments, the therapeutic agent targets a sequence about 1500 nucleotides, about 1000 nucleotides, about 800 nucleotides, about 700 nucleotides, about 600 nucleotides, about 500 nucleotides, about 400 nucleotides, about 300 nucleotides, about 200 nucleotides, about 100 nucleotides, about 80 nucleotides, about 70 nucleotides, about 60 nucleotides, about 50 nucleotides upstream (or 5′) from the 5′ end of exon 2 of MECP2 pre-mRNA. In some embodiments, the therapeutic agent targets a sequence at most about 1500 nucleotides, about 1000 nucleotides, about 800 nucleotides, about 700 nucleotides, about 600 nucleotides, about 500 nucleotides, about 400 nucleotides, about 300 nucleotides, about 200 nucleotides, about 100 nucleotides, about 80 nucleotides, about 70 nucleotides, about 60 nucleotides, about 50 nucleotides upstream (or 5′) from the 5′ end of exon 2 of MECP2 pre-mRNA.

[0064] In some embodiments, the therapeutic agent targets a sequence about 1500 nucleotides, about 1000 nucleotides, about 800 nucleotides, about 700 nucleotides, about 600 nucleotides, about 500 nucleotides, about 400 nucleotides, about 300 nucleotides, about 200 nucleotides, about 100 nucleotides, about 80 nucleotides, about 70 nucleotides, about 60 nucleotides, about 50 nucleotides downstream (or 3′) from the 3′ end of exon 2 of MECP2 pre-mRNA. In some embodiments, the therapeutic agent targets a sequence at most about 1500 nucleotides, about 1000 nucleotides, about 800 nucleotides, about 700 nucleotides, about 600 nucleotides, about 500 nucleotides, about 400 nucleotides, about 300 nucleotides, about 200 nucleotides, about 100 nucleotides, about 80 nucleotides, about 70 nucleotides, about 60 nucleotides, about 50 nucleotides downstream (or 3′) from the 3′ end of exon 2 of MECP2 pre-mRNA.

[0065] In some embodiments, the therapeutic agent is an ASO and the ASO has a sequence complementary to the targeted portion of the pre-mRNA according to SEQ ID NOs: 2-27. In some embodiments, the ASO has a sequence complementary to a sequence with at least about 80%, 85%, 90%, 95%, 96%, 97%, 98%, 99% or 100% sequence identity to any one selected from the group consisting of SEQ ID NOs: 28-31. In some embodiments, the ASO has a sequence complementary to a sequence with 100% sequence identity to any one selected from the group consisting of SEQ ID NOs: 28-31. In some embodiments, the ASO has a sequence complementary to a sequence with 100% sequence identity to SEQ ID NO: 28.

[0066] In some embodiments, the ASOs target a sequence containing an exon-intron boundary (or junction).

[0067] In some embodiments, the methods and compositions of the present disclosure are used to increase the expression of MeCP2 by inducing exon skipping of exon 2 of a MECP2 pre-mRNA.

[0068] In some cases, the target peptide sequence is a portion of MECP2 protein. In some cases, the therapeutic agent increases level of a first processed mRNA encoding a protein having a sequence SEQ ID NO: 8204, and decreases level of a second processed mRNA encoding a protein having a sequence SEQ ID NO: 440. In some cases, the targeted region of the pre-mRNA is at most about 1500 nucleotides, about 1000 nucleotides, about 800 nucleotides, about 700 nucleotides, about 600 nucleotides, about 500 nucleotides, about 400 nucleotides, about 300 nucleotides, about 200 nucleotides, about 100 nucleotides, about 80 nucleotides, about 70 nucleotides, about 60 nucleotides, about 50 nucleotides upstream of SEQ ID NO: 238. In some cases, the targeted region of the pre-mRNA is at least about 1500 nucleotides, about 1000 nucleotides, about 800 nucleotides, about 700 nucleotides, about 600 nucleotides, about 500 nucleotides, about 400 nucleotides, about 300 nucleotides, about 200 nucleotides, about 100 nucleotides, about 80 nucleotides, about 70 nucleotides, about 60 nucleotides, about 50 nucleotides upstream of SEQ ID NO: 238. In some cases, the targeted region of the pre-mRNA is at most about 1500 nucleotides, about 1000 nucleotides, about 800 nucleotides, about 700 nucleotides, about 600 nucleotides, about 500 nucleotides, about 400 nucleotides, about 300 nucleotides, about 200 nucleotides, about 100 nucleotides, about 80 nucleotides, about 70 nucleotides, about 60 nucleotides, about 50 nucleotides upstream of genomic site GRCh38/hg38: chrX 154092307. In some cases, the targeted region of the pre-mRNA is at least about 1500 nucleotides, about 1000 nucleotides, about 800 nucleotides, about 700 nucleotides, about 600 nucleotides, about 500 nucleotides, about 400 nucleotides, about 300 nucleotides, about 200 nucleotides, about 100 nucleotides, about 80 nucleotides, about 70 nucleotides, about 60 nucleotides, about 50 nucleotides upstream of genomic site GRCh38/hg38: chrX 154092307. In some cases, the targeted region of the pre-mRNA is at most about 1500 nucleotides, about 1000 nucleotides, about 800 nucleotides, about 700 nucleotides, about 600 nucleotides, about 500 nucleotides, about 400 nucleotides, about 300 nucleotides, about 200 nucleotides, about 100 nucleotides, about 80 nucleotides, about 70 nucleotides, about 60 nucleotides, about 50 nucleotides downstream of SEQ ID NO: 238. In some cases, the targeted region of the pre-mRNA is at least about 1500 nucleotides, about 1000 nucleotides, about 800 nucleotides, about some cases, the targeted region of the pre-mRNA is at most about 1500 nucleotides, about 1000 nucleotides, about 800 nucleotides, about 700 nucleotides, about 600 nucleotides, about 500 nucleotides, about 400 nucleotides, about 300 nucleotides, about 200 nucleotides, about 100 nucleotides, about 80 nucleotides, about 70 nucleotides, about 60 nucleotides, about 50 nucleotides downstream of genomic site GRCh38/hg38: chrX 154092184. In some cases. the targeted region of the pre-mRNA is at least about 1500 nucleotides, about 1000 nucleotides, about 800 nucleotides, about 700 nucleotides, about 600 nucleotides, about 500 nucleotides, about 400 nucleotides, about 300 nucleotides, about 200 nucleotides, about 100 nucleotides, about 80 nucleotides, about 70 nucleotides, about 60 nucleotides, about 50 nucleotides downstream of genomic site GRCh38/hg38: chrX 154092184. In some cases, the targeted region of the pre-mRNA is within a sequence SEQ ID NO: 238. In some cases, the targeted region of the pre-mRNA is within a sequence between a pair of genomic sites GRCh38/hg38: chrX 154092307, and GRCh38/hg38: chrX 154092184. In some cases, the therapeutic agent is an antisense oligomer complementary to a sequence with at least about 80%, 85%, 90%, 95%, 96%, 97%, 98%, 99% or 100% sequence identity to SEQ ID NO:238. In some cases, the therapeutic agent is an antisense oligomer complementary to a sequence with 100% sequence identity to SEQ ID NO:238. In some cases, the therapeutic agent increases level of a first processed mRNA encoding a protein having a sequence SEQ ID NO: 8205, and decreases level of a second processed mRNA encoding a protein having a sequence SEQ ID NO: 441. In some cases, the targeted region of the pre-mRNA is at most about 1500 nucleotides, about 1000 nucleotides, about 800 nucleotides, about 700 nucleotides, about 600 nucleotides, about 500 nucleotides, about 400 nucleotides, about 300 nucleotides, about 200 nucleotides, about 100 nucleotides, about 80 nucleotides, about 70 nucleotides, about 60 nucleotides, about 50 nucleotides upstream of SEQ ID NO: 239. In some cases, the targeted region of the pre-mRNA is at least about 1500 nucleotides, about 1000 nucleotides, about 800 nucleotides, about 700 nucleotides, about 600 nucleotides, about 500 nucleotides, about 400 nucleotides, about 300 nucleotides, about 200 nucleotides, about 100 nucleotides, about 80 nucleotides, about 70 nucleotides, about 60 nucleotides, about 50 nucleotides upstream of SEQ ID NO: 239. In some cases, the targeted region of the pre-mRNA is at most about 1500 nucleotides, about 1000 nucleotides, about 800 nucleotides, about 700 nucleotides, about 600 nucleotides, about 500 nucleotides, about 400 nucleotides, about 300 nucleotides, about 200 nucleotides, about 100 nucleotides, about 80 nucleotides, about 70 nucleotides, about 60 nucleotides, about 50 nucleotides upstream of genomic site GRCh38/hg38: chrX 154092307. In some cases, the targeted region of the pre-mRNA is at least about 1500 nucleotides, about 1000 nucleotides, about 800 nucleotides, about 700 nucleotides, about 600 nucleotides, about 500 nucleotides, about 400 nucleotides, about 300 nucleotides, about 200 nucleotides, about 100 nucleotides, about 80 nucleotides, about 70 nucleotides, about 60 nucleotides, about 50 nucleotides upstream of genomic site GRCh38/hg38: chrX 154092307. In some cases, the targeted region of the pre-mRNA is at most about 1500 nucleotides, about 1000 nucleotides, about 800 nucleotides, about 700 nucleotides, about 600 nucleotides, about 500 nucleotides, about 400 nucleotides, about 300 nucleotides, about 200 nucleotides, about 100 nucleotides, about 80 nucleotides, about 70 nucleotides, about 60 nucleotides, about 50 nucleotides downstream of SEQ ID NO: 239. In some cases, the targeted region of the pre-mRNA is at least about 1500 nucleotides, about 1000 nucleotides, about 800 nucleotides, about 700 nucleotides, about 600 nucleotides, about 500 nucleotides, about 400 nucleotides, about 300 nucleotides, about 200 nucleotides, about 100 nucleotides, about 80 nucleotides, about 70 nucleotides, about 60 nucleotides, about 50 nucleotides downstream of SEQ ID NO: 239. In some cases, the targeted region of the pre-mRNA is at most about 1500 nucleotides, about 1000 nucleotides, about 800 nucleotides, about 700 nucleotides, about 600 nucleotides, about 500 nucleotides, about 400 nucleotides, about 300 nucleotides, about 200 nucleotides, about 100 nucleotides, about 80 nucleotides, about 70 nucleotides, about 60 nucleotides, about 50 nucleotides downstream of genomic site GRCh38/hg38: chrX 154092184. In some cases. the targeted region of the pre-mRNA is at least about 1500 nucleotides, about 1000 nucleotides, about 800 nucleotides, about 700 nucleotides, about 600 nucleotides, about 500 nucleotides, about 400 nucleotides, about 300 nucleotides, about 200 nucleotides, about 100 nucleotides, about 80 nucleotides, about 70 nucleotides, about 60 nucleotides, about 50 nucleotides downstream of genomic site GRCh38/hg38: chrX 154092184. In some cases, the targeted region of the pre-mRNA is within a sequence SEQ ID NO: 239. In some cases, the targeted region of the pre-mRNA is within a sequence between a pair of genomic sites GRCh38/hg38: chrX 154092307, and GRCh38/hg38: chrX 154092184. In some cases, the therapeutic agent is an antisense oligomer complementary to a sequence with at least about 80%, 85%, 90%, 95%, 96%, 97%, 98%, 99% or 100% sequence identity to SEQ ID NO:239. In some cases, the therapeutic agent is an antisense oligomer complementary to a sequence with 100% sequence identity to SEQ ID NO:239. In some cases, the therapeutic agent is an antisense oligomer that has a sequence with at least about 80%, 85%, 90%, 95%, 96%, 97%, 98%, 99% or 100% sequence identity to a sequence selected from the group consisting of SEQ ID NOs: 4548-4611. In some cases, the therapeutic agent is an antisense oligomer that has a sequence selected from the group consisting of SEQ ID NOs: 4548-4611. In some cases, the target peptide sequence is a portion of MECP2 protein, and the method treats a disease or the condition that comprises Intellectual Disability; Rett Syndrome, Preserved Speech Variant; Lubs X-linked mental retardation syndrome; Encephalopathy, Neonatal Severe, due to MeCP2 Mutations; Mental Retardation with Psychosis, Pyramidal Signs, and Macroorchidism; Mental Retardation, X-Linked, With Spasticity; Trisomy Xq28; Mental Retardation, X-Linked 16; Epileptic encephalopathy; Mental Retardation, X-Linked, Syndromic 13; Mental Retardation, X-Linked 1; Rett Syndrome, Atypical; Mental Retardation, X-Linked 79; Microcephaly; Ppm-X Syndrome; Rett Syndrome, Zappella Variant; Rett Syndrome; or Autism susceptibility, X-linked 3.

### Protein Expression

[0069] In some embodiments, the methods described herein are used to increase the production of a functional protein, e.g., having a target peptide sequence, e.g., a MeCP2 protein. As used herein, the term “functional” refers to the amount of activity or function of a protein that is necessary to eliminate any one or more symptoms of a treated condition or disease, e.g., Rett syndrome. In some embodiments, the methods are used to increase the production of a partially functional MeCP2 protein. As used herein, the term “partially functional” refers to any amount of activity or function of the protein that is less than the amount of activity or function that is necessary to eliminate or prevent any one or more symptoms of a disease or condition, e.g., Rett syndrome. In some embodiments, a partially functional protein will have at least 10%, at least 20%, at least 30%, at least 40%, at least 50%, at least 60%, at least 70%, at least 75%, at least 80%, at least 85%, at least 90%, or at least 95% less activity relative to the fully functional protein.

[0070] In some embodiments, the method is a method of increasing the expression of a target peptide sequence by cells of a subject having a pre-mRNA encoding the target peptide sequence, wherein the subject has a disease or condition caused by a deficient amount of activity of a functional target protein that the target peptide sequence is at least functionally equivalent to. In such an embodiment, the subject has a first allele encoding a functional target protein is not produced. In another such embodiment, the subject has a first allele encoding a functional target protein, and a second allele encoding a nonfunctional target protein. In another such embodiment, the subject has a first allele encoding a functional target protein, and a second allele encoding a partially functional target protein. In some of these embodiments, the antisense oligomer binds to a targeted portion of the pre-mRNA transcribed from the second allele that codes for a target peptide sequence and comprises an exon containing an inefficient translation region, thereby inducing skipping of the inefficient translation region from the pre-mRNA, and causing an increase in the level of mature mRNA encoding the target peptide sequence, and an increase in the expression of the target peptide sequence in the cells of the subject. In some of these embodiments, the antisense oligomer binds to a targeted portion of the pre-mRNA transcribed from the second allele that codes for a target peptide sequence and comprises an exon containing a PTC followed by an alternative start codon, thereby inducing skipping of the PTC and the start codon from the pre-mRNA, and causing an increase in the level of mature mRNA encoding the target peptide sequence, and an increase in the expression of the target peptide sequence in the cells of the subject.

[0071] In some embodiments, the target peptide sequence as described herein can be a fully functional protein. In some embodiments, the target peptide sequence is a portion of a full-length protein, for instance, an N-terminal portion of a full-length protein, or a C-terminal portion of a full-length protein. In the case of MeCP2, the target peptide sequence can be a C-terminal portion of MeCP2. In some embodiments, the target peptide sequence is translated from a sequence selected from the group consisting of SEQ ID NOs: 32-34. In some embodiments, the target peptide sequence is translated from a sequence having SEQ ID NOs: 32 or 33 and 34. In some embodiments, the target peptide sequence is encoded by a portion of the pre-mRNA downstream of the inefficient translation region or the alternative start codon. In some embodiments, the target peptide sequence is encoded by a portion of the pre-mRNA upstream of the inefficient translation region or the alternative start codon. The target peptide sequence can comprise at least about 10 amino acids (aa), 20 aa, 30 aa, 40 aa, 50 aa, 60 aa, 70 aa, 80 aa, 90 aa, 100 aa, 120 aa, 150 aa, 200 aa, 300 aa, 400 aa, 500 aa, 600 aa, 700 aa, 800 aa, 100 aa, 1500 aa, or 2000 aa. The target peptide sequence can comprise about 10 amino acids (aa), 20 aa, 30 aa, 40 aa, 50 aa, 60 aa, 70 aa, 80 aa, 90 aa, 100 aa, 120 aa, 150 aa, 200 aa, 300 aa, 400 aa, 500 aa, 600 aa, 700 aa, 800 aa, 100 aa, 1500 aa, or 2000 aa.

[0072] In some embodiments, the method is a method of increasing the expression of a functional target protein having a target peptide sequence, e.g., MeCP2-e1 isoform encoded by exon 1, 3 and 4 of MECP2 gene, by cells of a subject having a pre-mRNA encoding the target peptide sequence, wherein the subject has a disease or condition caused by a deficient amount of activity of MeCP2 protein. In such an embodiment, the subject has an allele encoding a partially functional MeCP2, e.g., a hypomorphic allele. In such embodiment, the subject has a first allele encoding a functional MeCP2 protein, and a second allele encoding a partially functional MeCP2 protein. In some of these embodiments, the antisense oligomer binds to a targeted portion of the pre-mRNA transcribed from the second allele that codes for MeCP2 and comprises exon 2 of MECP2, thereby inducing skipping of at least part of MECP2 exon 2 from the pre-mRNA, and causing an increase in the level of mature mRNA encoding MeCP2-e1 isoform, and an increase in the expression of MeCP2-e1 isoform in the cells of the subject. Without wishing to be bound by a certain theory, due to X inactivation, in a subject having cells having a WT allele and a mutant allele encoding a partially functional MeCP2, e.g., a hypomorphic allele, there can be about 50% cells having the mutant allele that express the WT allele but not the mutant allele, and another about 50% cells having the mutant allele that express the mutant allele but not the WT allele. In some cases, the methods and compositions provided herein can increase expression of a functional target protein having a target peptide sequence, e.g., MeCP2-e1 isoform encoded by exon 1, 3, and 4 of MECP2 gene, from the mutant hypomorphic allele in cells having pre-mRNA transcripts from the hypomorphic allele. In some cases, the methods and compositions provided herein can increase expression of MeCP2-e1 isoform in about 50% of cells having a hypomorphic mutant allele in a subject. In some cases, the methods and compositions restore the functional of MeCP2, e.g., equivalent to the functional level as having a normal amount of WT MeCP2 protein, in about 50% of cells having a hypomorphic mutant allele in a subject.

[0073] In some embodiments, the method is a method of increasing the expression of the target protein by cells of a subject having a pre-mRNA encoding the target protein and comprising an exon that contains an inefficient translation region or a PTC followed by an alternative start codon, wherein the subject has a disease or condition caused by a deficient amount or activity of target protein is caused by autosomal recessive inheritance. In some embodiments, the method is a method of increasing the expression of the target protein by cells of a subject having a pre-mRNA encoding the target protein and comprising an exon that contains an inefficient translation region or a PTC followed by an alternative start codon, wherein the subject has a disease or condition caused by a deficient amount or activity of target protein that is caused by autosomal dominant inheritance. In some embodiments, the disease or condition is caused by or associated with haploinsufficiency of the target gene encoding the target protein. In some embodiments, the method is a method of increasing the expression of the target protein by cells of a subject having a pre-mRNA encoding the target protein and comprising an exon that contains an inefficient translation region or a PTC followed by an alternative start codon, wherein the subject has a disease or condition caused by a deficient amount or activity of target protein is caused by X-linked dominant mutation. For instance, the method can be a method of increasing the expression of MeCP2-e1 isoform by cells (e.g., brain cells, e.g., neurons or glial cells) of a subject having a pre-mRNA encoding MeCP2 and comprising exon2, wherein the subject has Rett syndrome caused by a deficient amount or activity of MeCP2 that is caused by X-linked dominant mutation.

[0074] In some embodiments, the pre-mRNA transcript that encodes the protein that is causative of the disease or condition is targeted by the ASOs described herein. In some embodiments, a pre-mRNA transcript that encodes a protein that is not causative of the disease is targeted by the ASOs. For example, a disease that is the result of a mutation or deficiency of a first protein in a particular pathway may be ameliorated by targeting a pre-mRNA that encodes a second protein (e.g., containing a target peptide sequence), thereby increasing production of the second protein. In some embodiments, the function of the second protein is able to compensate for the mutation or deficiency of the first protein (which is causative of the disease or condition).

[0075] In some embodiments, the methods and compositions are applicable to treat a subject that has:

[0076] (a) a first mutant allele from which
[0077] (i) the target protein is produced at a reduced level compared to production from a wild-type allele,
[0078] (ii) the target protein is produced in a form having reduced function compared to an equivalent wild-type protein, or
[0079] (iii) the target protein is not produced; and

[0080] (b) a second mutant allele from which
[0081] (i) the target protein is produced at a reduced level compared to production from a wild-type allele,
[0082] (ii) the target protein is produced in a form having reduced function compared to an equivalent wild-type protein, or
[0083] (iii) the target protein is not produced.

[0084] In some embodiments, the level of the first processed mRNA encoding the first protein that comprises the target peptide sequence in the cell contacted with the therapeutic agent provided herein is increased as compared to the level of the first processed mRNA in a control cell that is otherwise identical but not contacted with the therapeutic agent. In some embodiments, the level of the first processed mRNA encoding the first protein that comprises the target peptide sequence in the cell contacted with the therapeutic agent provided herein is increased about 1.1 to about 10-fold, about 1.5 to about 10-fold, about 2 to about 10-fold, about 3 to about 10-fold, about 4 to about 10-fold, about 1.1 to about 5-fold, about 1.1 to about 6-fold, about 1.1 to about 7-fold, about 1.1 to about 8-fold, about 1.1 to about 9-fold, about 2 to about 5-fold, about 2 to about 6-fold, about 2 to about 7-fold, about 2 to about 8-fold, about 2 to about 9-fold, about 3 to about 6-fold, about 3 to about 7-fold, about 3 to about 8-fold, about 3 to about 9-fold, about 4 to about 7-fold, about 4 to about 8-fold, about 4 to about 9-fold, at least about 1.1-fold, at least about 1.5-fold, at least about 2-fold, at least about 2.5-fold, at least about 3-fold, at least about 3.5-fold, at least about 4-fold, at least about 5-fold, or at least about 10-fold, compared to the level of first processed mRNA in a control cell. In some embodiments, the level of the second processed mRNA that comprises the inefficient translation region and encodes the second protein comprising the target peptide sequence in the cell contacted with the therapeutic agent provided herein is decreased as compared to the level of the second processed mRNA in a control cell that is otherwise identical but not contacted with the therapeutic agent. In some embodiments, the level of the second processed mRNA that comprises the inefficient translation region and encodes the second protein comprising the target peptide sequence in the cell contacted with the therapeutic agent provided herein is decreased about 1.1 to about 10-fold, about 1.5 to about 10-fold, about 2 to about 10-fold, about 3 to about 10-fold, about 4 to about 10-fold, about 1.1 to about 5-fold, about 1.1 to about 6-fold, about 1.1 to about 7-fold, about 1.1 to about 8-fold, about 1.1 to about 9-fold, about 2 to about 5-fold, about 2 to about 6-fold, about 2 to about 7-fold, about 2 to about 8-fold, about 2 to about 9-fold, about 3 to about 6-fold, about 3 to about 7-fold, about 3 to about 8-fold, about 3 to about 9-fold, about 4 to about 7-fold, about 4 to about 8-fold, about 4 to about 9-fold, at least about 1.1-fold, at least about 1.5-fold, at least about 2-fold, at least about 2.5-fold, at least about 3-fold, at least about 3.5-fold, at least about 4-fold, at least about 5-fold, or at least about 10-fold, compared to the level of second processed mRNA in a control cell.

[0085] In some embodiments, the therapeutic agent provided herein increases the expression of the target peptide sequence in the cell. In some embodiments, the level of the target peptide sequence in the cell contacted with the therapeutic agent is increased compared to the level of the target peptide sequence in a control cell that is otherwise identical but not contacted with the therapeutic agent. In some embodiments, the level of the target peptide sequence in the cell contacted with the therapeutic agent is increased about 1.1 to about 10-fold, about 1.5 to about 10-fold, about 2 to about 10-fold, about 3 to about 10-fold, about 4 to about 10-fold, about 1.1 to about 5-fold, about 1.1 to about 6-fold, about 1.1 to about 7-fold, about 1.1 to about 8-fold, about 1.1 to about 9-fold, about 2 to about 5-fold, about 2 to about 6-fold, about 2 to about 7-fold, about 2 to about 8-fold, about 2 to about 9-fold, about 3 to about 6-fold, about 3 to about 7-fold, about 3 to about 8-fold, about 3 to about 9-fold, about 4 to about 7-fold, about 4 to about 8-fold, about 4 to about 9-fold, at least about 1.1-fold, at least about 1.5-fold, at least about 2-fold, at least about 2.5-fold, at least about 3-fold, at least about 3.5-fold, at least about 4-fold, at least about 5-fold, or at least about 10-fold, compared to the level of the target peptide sequence in a control cell.

### Inefficient Translation Region

[0086] As described herein, an inefficient translation region can refer to any region in an mRNA transcript that contributes to inefficient translation of a target peptide sequence encoded by the mRNA transcript, in a manner that a corresponding mRNA transcript without the inefficient translation region would have a higher translation efficiency for producing the target peptide sequence as compared to the mRNA transcript with the inefficient translation region. The inefficient translation region can decrease the translation efficiency of the mRNA transcript for the target peptide sequence at the stage of translation initiation, elongation, termination, or any combination thereof. In some embodiments, an mRNA transcript having the inefficient translation region has a translation efficiency about 10%, 20%, 30%, 40%, 50%, 60%, 70%, 80%, 90%, or 100% lower than a corresponding mRNA transcript without the inefficient translation region. In some embodiments, an mRNA transcript having the inefficient translation region has a translation efficiency about 1.2, 1.5, 1.8, 2, 2.5, 3, 3.5, 4, 4.5, 5, 5.5, 6, 6.5, 7, 7.5, 8, 9, 10, 11, 12, 15, 18, 20, 22, 25, 28, 30, 35, 40, 50, 60, 70, 80, 90, 100, 120, 150, 200, 300, 400, 500, 600, 700, 800, 900, 1000, 2000, 5000, 10⁴, 10⁵, or even greater times lower than a corresponding mRNA transcript without the inefficient translation region. In some embodiments, an mRNA transcript having the inefficient translation region has a translation efficiency at least about 10%, 20%, 30%, 40%, 50%, 60%, 70%, 80%, 90%, or 100% lower than a corresponding mRNA transcript without the inefficient translation region. In some embodiments, an mRNA transcript having the inefficient translation region has a translation efficiency at least about 1.2, 1.5, 1.8, 2, 2.5, 3, 3.5, 4, 4.5, 5, 5.5, 6, 6.5, 7, 7.5, 8, 9, 10, 11, 12, 15, 18, 20, 22, 25, 28, 30, 35, 40, 50, 60, 70, 80, 90, 100, 120, 150, 200, 300, 400, 500, 600, 700, 800, 900, 1000, 2000, 5000, 10⁴, or 10⁵ times lower than a corresponding mRNA transcript without the inefficient translation region.

[0087] In some embodiments, the inefficient translation region comprises a PTC followed by an alternative start codon. Without wishing to be bound by a certain theory, the motif or the exon containing the PTC and the alternative start codon can contribute to the inefficient translation of the downstream sequences because while the PTC induces premature termination of translation of the upstream open reading frame in the mRNA, the close proximity of the alternative start codon to the PTC can prevent the induction of nonsense-mediated decay, rather re-initiation of translation of the downstream open reading frame. In this regards, the efficiency of the translation initiation of the downstream open reading frame can be relatively much lower than the canonical open reading frame starting from the canonical start codon (e.g., upstream of the downstream open reading frame). As exemplified in the case of MECP2 mRNA processing, the removal of exon 2 that contains a PTC and an alternative start codon can lead to increased production of MeCP2-e1 isoform, however, the relative mature mRNA level can remain stable, suggesting the MECP2 e1 mRNA isoform, which is devoid of exon 2 containing the PTC and alternative start codon, has a higher translation efficiency as compared to MECP2 e2 mRNA isoform with exon 2. In some embodiments, the distance between PTC and the downstream start codon in the inefficient translation region is short, for instance, at most 75 nucleotides (nt), 70 nt, 60 nt, 55 nt, 50 nt, 45 nt, 40 nt, 35 nt, 30 nt, 27 nt, 24 nt, 21 nt, 18 nt, 15 nt, 12 nt, 10 nt, 9 nt, 6 nt, 3 nt, or 2 nt. In some embodiments, the distance between PTC and the downstream start codon in the inefficient translation region is about 3 nt, 6 nt, 9 nt, 10 nt, 12 nt, 15 nt, 18 nt, 21 nt, 24 nt, 27 nt, 30 nt, 35 nt, 40 nt, 45 nt, 50 nt, 55 nt, 60 nt, 70 nt, or 75 nt. In some cases, the distance between PTC and the downstream start codon in the inefficient translation region is at least 2 nt, 3 nt, 6 nt, 9 nt, 10 nt, 12 nt, 15 nt, 18 nt, 21 nt, 24 nt, 27 nt, 30 nt, 35 nt, 40 nt, 45 nt, 50 nt, or 55 nt. In some cases, distance between PTC and the downstream start codon in the inefficient translation region is 2 nt to 75 nt, 5 nt to 70 nt, 10 nt to 65 nt, 15 nt to 60 nt, 20 nt to 55 nt, 25 nt to 50 nt, 30 nt to 45 nt, 40 nt to 50 nt, 45 nt to 55 nt, 50 nt to 60 nt, 55 nt to 70 nt, or 60 nt to 75 nt.

[0088] In some embodiments, the inefficient translation region comprises a region that codes for proline-rich peptide sequence. Without wishing to be bound by a certain theory, mRNA sequence coding for proline-rich peptide sequence can contribute to inefficient translation, for instance, inefficient translation elongation, of the mRNA transcript that contains it. In some embodiments, the inefficient translation region encodes peptide sequence having at least about 5, 8, 10, 12, 15, 16, 18, 20, 22, 24, 26, 28, 30, 35, 40, 45, 50, 55, 60, 65, 70, 75, 80, 95, or 100 prolines. In some embodiments, the inefficient translation region encodes peptide sequence having contiguous peptide sequences consisting of at least about 5, 8, 10, 12, 15, 16, 18, 20, 22, 24, 26, 28, 30, 35, 40, 45, 50, 55, 60, 65, 70, 75, 80, 95, or 100 prolines. In some embodiments, the inefficient translation region encodes peptide sequence having at least about 5%, 10%, 20%, 30%, 40%, 50%, 60%, 70%, 80%, 90%, or 100% proline.

[0089] The inefficient translation region can be in any length. In some embodiments, the inefficient translation region can be from 5 nucleotides to 10 nucleotides in length, from 10 nucleotides to 15 nucleotides in length, from 15 nucleotides to 20 nucleotides in length, from 20 nucleotides to 25 nucleotides in length, from 25 nucleotides to 30 nucleotides in length, from 30 nucleotides to 35 nucleotides in length, from 35 nucleotides to 40 nucleotides in length, from 40 nucleotides to 45 nucleotides in length, from 45 nucleotides to 50 nucleotides in length, from 50 nucleotides to 55 nucleotides in length, from 55 nucleotides to 60 nucleotides in length, from 60 nucleotides to 65 nucleotides in length, from 65 nucleotides to 70 nucleotides in length, from 70 nucleotides to 75 nucleotides in length, from 75 nucleotides to 80 nucleotides in length, from 80 nucleotides to 85 nucleotides in length, from 85 nucleotides to 90 nucleotides in length, from 90 nucleotides to 95 nucleotides in length, or from 95 nucleotides to 100 nucleotides in length. In some embodiments, the inefficient translation region can be at least 10 nucleotides, at least 20 nucleotides, at least 30 nucleotides, at least 40 nucleotides, at least 50 nucleotides, at least 60 nucleoids, at least 70 nucleotides, at least 80 nucleotides in length, at least 90 nucleotides, or at least 100 nucleotides in length. In some embodiments, the inefficient translation region can be from 100 to 200 nucleotides in length, from 200 to 300 nucleotides in length, from 300 to 400 nucleotides in length, from 400 to 500 nucleotides in length, from 500 to 600 nucleotides in length, from 600 to 700 nucleotides in length, from 700 to 800 nucleotides in length, from 800 to 900 nucleotides in length, from 900 to 1,000 nucleotides in length. In some embodiments, the inefficient translation region may be longer than 1,000 nucleotides in length.

### Modulation of Translation of Various Targets

[0090] In aspects, the methods, compositions, and kits are applicable to modulation of translation of various targets, for instance, for target peptide sequences whose translation is modulated by an inefficient translation region present in a processed mRNA transcript encoding the target peptide sequence. In some cases, the inefficient translation region comprises at least a portion of an exon that comprises a PTC followed by an alternative start codon. Table 1 below lists exemplary target genes and their corresponding pre-mRNA transcript that can be processed into mRNA transcript having an exon that comprises a PTC followed by an alternative start codon. The sequences of the exons (and SEQ ID NOs) and their corresponding genomic coordinates are listed in the table. In some cases, the subject methods, compositions, and kits are applicable to modulation of translation of the target peptide sequences encoded by the target genes that are listed Table 1.

TABLE 1
Exemplary Genes and Exons Containing PTC and Alternative Start Codon

| | | SEQ | Sequence of Exon containing | Corresponding |
|---|---|---|---|---|
| | Pre-mRNA | ID | PTC and alternative start | Genomic |
| Gene | transcript | NO: | codon | Coordinates |
| ACIN1 | ENST000003 | 130 | AAAGGGATAAACAGCACTTCCAGGGGG | GRCh38/hg38: |
| | 57481.6 | | AGAAAAAAAATCATGTTATCAGAAAGC | chr14:23071125: |
| | | | AAAGAAGG | 23071186:− |
| ACTN1 | ENST000005 | 131 | ACATTCACGGCATGGTGTAACTCCCAC | GRCh38/hg38: |
| | 55616.5 | | CTCCGGAAGGCGGGGACACAGATCGAG | chr14:68925558: |
| | | | AACATCGAAGAGGACTTCCGGGATGGC | 68925672:− |
| | | | CTGAAGCTCATGCTGCTGCTGGAGGTC | |
| | | | ATCTCAG | |
| ACTN2 | ENST000005 | 132 | ACATCGTGAACACCCCTAAACCCGATG | GRCh38/hg38: |
| | 46208.5 | | AAAGAGCCATCATGACGTACGTCTCTT | chr1:236735635: |
| | | | GCTTCTACCACGCTTTTGCGGGCGCGG | 236735720:+ |
| | | | AGCAG | |
| ADH4 | ENST000005 | 133 | attttgatttagtggatttgaggcagg | GRCh38/hg38: |
| | 06705.5 | | gctttcatctctaacaaattcccaagt | chr4:99143166: |
| | | | gatgtgaataaatgcttgtccgaggac | 99143305:− |
| | | | cacacttcgagttgcaGAGATGTAAAA | |
| | | | CACATCTATTCTCCAGCAATTATCTGA | |
| | | | CTCAG | |
| ADH4 | ENST000005 | 134 | attttgatttagtggatttgaggcagg | GRCh38/hg38: |
| | 05590.5 | | gctttcatctctaacaaattcccaagt | chr4:99143166: |
| | | | gatgtgaataaatgcttgtccgaggac | 99143305:− |
| | | | cacacttcgagttgcaGAGATGTAAAA | |
| | | | CACATCTATTCTCCAGCAATTATCTGA | |
| | | | CTCAG | |
| AGER | ENST000003 | 135 | AGCCTGTGCCTCTGGAGGAGGTCCAAT | GRCh38/hg38: |
| | 75065.6 | | TGGTGGTGGAGCCAGAAGGTGGAGCAG | chr6:32182568: |
| | | | TAGCTCCTGGTGGAACCGTAACCCTGA | 32182698:− |
| | | | CCTGTGAAGTCCCTGCCCAGCCCTCTC | |
| | | | CTCAAATCCACTGGATGAAGGAT | |
| AKR1C3 | ENST000006 | 136 | aatcatctcttttgaaaaatcgattca | GRCh38/hg38: |
| | 02997.5 | | tcaaatgaatcttcagccaacaactgt | chr10:5077900: |
| | | | tcaagaaggatgcaaatatcacag | 5077977:+ |
| ALDH1A | ENST000005 | 137 | GTGTGAAAATTGGACTTGCTGGCAGAA | GRCh38/hg38: |
| 2 | 37372.5 | | TCCTTTTTGGGAGAAGATGAAGAATCA | chr15:58058012: |
| | | | GTGTGAGACTGTTTGGTTAAAATCCCC | 58058108:− |
| | | | AATAAAACTGAAACTG | |
| ALG8 | ENST000005 | 138 | GGCCAAGACTGAAAGCGTGGAAACCAA | GRCh38/hg38: |
| | 25761.2 | | GAAGCAACCATGAAATGGTGGTGTGTA | chr11:78138710: |
| | | | TACA | 78138767:− |
| AMPD2 | ENST000005 | 139 | GCCCAGCCACCATCAGTCACGTCACTC | GRCh38/hg38: |
| | 28667.5 | | CTGGGACTGAGGAGGCAGGGGAGGGAT | chr1:109620914: |
| | | | AAGGGGCAGAGATGGAGGCCCCACTCC | 109621266:+ |
| | | | CCGAGGTTGCCTAGACAACATGAGAAA | |
| | | | TCGTGGCCAGGGCCTCTTCCGCCTGCG | |
| | | | GAGCCGCTGCTTCCTGCATCAGTCACT | |
| | | | CCCGCTGGGGGCGGGGCGGAGGAAGGG | |
| | | | GTTGGATGTGGCAGAGCCAGGCCCCAG | |
| | | | CCGGTGCCGCTCAGACTCCCCCGCTGT | |
| | | | CGCCGCCGTGGTCCCAGCCATGGCATC | |
| | | | CTATCCATCTGGCTCTGGCAAGCCCAA | |
| | | | GGCCAAATATCCCTTTAAGAAGCGGGC | |
| | | | CAGCCTGCAGGCCTCCACTGCAGCTCC | |
| | | | AG | |
| AMT | ENST000005 | 140 | GACACCGCTCTATGACTTCCACCTGGC | GRCh38/hg38: |
| | 38581.6 | | CCACGGCGGGAAAATGGTGGCGTTTGC | chr3:49422104: |
| | | | GGGTTGGAGTCTGCCAGTGCAGTACCG | 49422257:− |
| | | | GGACAGTCACACTGACTCGCACCTGCA | |
| | | | CACACGCCAGCACTGCTCGCTCTTTGA | |
| | | | CGTGTCTCATATGCTGCAG | |
| AMT | ENST000004 | 141 | GACACCGCTCTATGACTTCCACCTGGC | GRCh38/hg38: |
| | 27987.6 | | CCACGGCGGGAAAATGGTGGCGTTTGC | chr3:49422104: |
| | | | GGGTTGGAGTCTGCCAGTGCAGTACCG | 49422257:− |
| | | | GGACAGTCACACTGACTCGCACCTGCA | |
| | | | CACACGCCAGCACTGCTCGCTCTTTGA | |
| | | | CGTGTCTCATATGCTGCAG | |
| AMT | ENST000006 | 142 | GACACCGCTCTATGACTTCCACCTGGC | GRCh38/hg38: |
| | 36865.1 | | CCACGGCGGGAAAATGGTGGCGTTTGC | chr3:49422104: |
| | | | GGGTTGGAGTCTGCCAGTGCAGTACCG | 49422257:− |
| | | | GGACAGTCACACTGACTCGCACCTGCA | |
| | | | CACACGCCAGCACTGCTCGCTCTTTGA | |
| | | | CGTGTCTCATATGCTGCAG | |
| ANKRD1 | ENST000006 | 143 | CAGACGGTTGATGATGAAGCGCCGGCC | GRCh38/hg38: |
| 1 | 42443.1 | | GTGTAAATGAAGATCGGGTGAGGAGCA | chr16:89316933: |
| | | | GGACGATGCCCAAGGGTGGGTGCCCTA | 89317078:− |
| | | | AAGCACCACAGCAGGAAGAGCTTCCCC | |
| | | | TCAGCAGCGACATGGTGGAGAAGCAGA | |
| | | | CTGGGAAAAAG | |
| ANKRD1 | ENST000003 | 144 | CAGACGGTTGATGATGAAGCGCCGGCC | GRCh38/hg38: |
| 1 | 78330.7 | | GTGTAAATGAAGATCGGGTGAGGAGCA | chr16:89316933: |
| | | | GGACGATGCCCAAGGGTGGGTGCCCTA | 89317078:− |
| | | | AAGCACCACAGCAGGAAGAGCTTCCCC | |
| | | | TCAGCAGCGACATGGTGGAGAAGCAGA | |
| | | | CTGGGAAAAAG | |
| ANKRD1 | ENST000006 | 145 | CAGACGGTTGATGATGAAGCGCCGGCC | GRCh38/hg38: |
| 1 | 45278.1 | | GTGTAAATGAAGATCGGGTGAGGAGCA | chr16:89316933: |
| | | | GGACGATGCCCAAGGGTGGGTGCCCTA | 89317078:− |
| | | | AAGCACCACAGCAGGAAGAGCTTCCCC | |
| | | | TCAGCAGCGACATGGTGGAGAAGCAGA | |
| | | | CTGGGAAAAAG | |
| ANKRD1 | ENST000003 | 146 | ACGGTTGATGATGAAGCGCCGGCCGTG | GRCh38/hg38: |
| 1 | 30736.10 | | TAAATGAAGATCGGGTGAGGAGCAGGA | chr16:89316933: |
| | | | CGATGCCCAAGGGTGGGTGCCCTAAAG | 89317075:− |
| | | | CACCACAGCAGGAAGAGCTTCCCCTCA | |
| | | | GCAGCGACATGGTGGAGAAGCAGACTG | |
| | | | GGAAAAAG | |
| ANKRD1 | ENST000006 | 147 | CAGACGGTTGATGATGAAGCGCCGGCC | GRCh38/hg38: |
| 1 | 13312.4 | | GTGTAAATGAAGATCGGGTGAGGAGCA | chr16:89316933: |
| | | | GGACGATGCCCAAGGGTGGGTGCCCTA | 89317078:− |
| | | | AAGCACCACAGCAGGAAGAGCTTCCCC | |
| | | | TCAGCAGCGACATGGTGGAGAAGCAGA | |
| | | | CTGGGAAAAAG | |
| ANKRD1 | ENST000006 | 148 | CAGACGGTTGATGATGAAGCGCCGGCC | GRCh38/hg38: |
| 1 | 46975.1 | | GTGTAAATGAAGATCGGGTGAGGAGCA | chr16:89316933: |
| | | | GGACGATGCCCAAGGGTGGGTGCCCTA | 89317078:− |
| | | | AAGCACCACAGCAGGAAGAGCTTCCCC | |
| | | | TCAGCAGCGACATGGTGGAGAAGCAGA | |
| | | | CTGGGAAAAAG | |
| ANKRD1 | ENST000006 | 149 | ACGGTTGATGATGAAGCGCCGGCCGTG | GRCh38/hg38: |
| 1 | 42600.1 | | TAAATGAAGATCGGGTGAGGAGCAGGA | chr16:89316933: |
| | | | CGATGCCCAAGGGTGGGTGCCCTAAAG | 89317075:− |
| | | | CACCACAGCAGGAAGAGCTTCCCCTCA | |
| | | | GCAGCGACATGGTGGAGAAGCAGACTG | |
| | | | GGAAAAAG | |
| ANKRD1 | ENST000006 | 150 | CAGACGGTTGATGATGAAGCGCCGGCC | GRCh38/hg38: |
| 1 | 43964.1 | | GTGTAAATGAAGATCGGGTGAGGAGCA | chr16:89316933: |
| | | | GGACGATGCCCAAGGGTGGGTGCCCTA | 89317078:− |
| | | | AAGCACCACAGCAGGAAGAGCTTCCCC | |
| | | | TCAGCAGCGACATGGTGGAGAAGCAGA | |
| | | | CTGGGAAAAAG | |
| ANKRD1 | ENST000006 | 151 | CAGACGGTTGATGATGAAGCGCCGGCC | GRCh38/hg38: |
| 1 | 44045.1 | | GTGTAAATGAAGATCGGGTGAGGAGCA | chr16:89316933: |
| | | | GGACGATGCCCAAGGGTGGGTGCCCTA | 89317078:− |
| | | | AAGCACCACAGCAGGAAGAGCTTCCCC | |
| | | | TCAGCAGCGACATGGTGGAGAAGCAGA | |
| | | | CTGGGAAAAAG | |
| ANKRD1 | ENST000006 | 152 | ACGGTTGATGATGAAGCGCCGGCCGTG | GRCh38/hg38: |
| 1 | 44784.1 | | TAAATGAAGATCGGGTGAGGAGCAGGA | chr16:89316933: |
| | | | CGATGCCCAAGGGTGGGTGCCCTAAAG | 89317075:− |
| | | | CACCACAGCAGGAAGAGCTTCCCCTCA | |
| | | | GCAGCGACATGGTGGAGAAGCAGACTG | |
| | | | GGAAAAAG | |
| ANKRD1 | ENST000006 | 153 | CAGACGGTTGATGATGAAGCGCCGGCC | GRCh38/hg38: |
| 1 | 42695.1 | | GTGTAAATGAAGATCGGGTGAGGAGCA | chr16:89316933: |
| | | | GGACGATGCCCAAGGGTGGGTGCCCTA | 89317078:− |
| | | | AAGCACCACAGCAGGAAGAGCTTCCCC | |
| | | | TCAGCAGCGACATGGTGGAGAAGCAGA | |
| | | | CTGGGAAAAAG | |
| ANKRD1 | ENST000005 | 154 | ACGGTTGATGATGAAGCGCCGGCCGTG | GRCh38/hg38: |
| 1 | 62275.6 | | TAAATGAAGATCGGGTGAGGAGCAGGA | chr16:89316933: |
| | | | CGATGCCCAAGGGTGGGTGCCCTAAAG | 89317075:− |
| | | | CACCACAGCAGGAAGAGCTTCCCCTCA | |
| | | | GCAGCGACATGGTGGAGAAGCAGACTG | |
| | | | GGAAAAAG | |
| ANKRD1 | ENST000006 | 155 | CAGACGGTTGATGATGAAGCGCCGGCC | GRCh38/hg38: |
| 1 | 47238.1 | | GTGTAAATGAAGATCGGGTGAGGAGCA | chr16:89316933: |
| | | | GGACGATGCCCAAGGGTGGGTGCCCTA | 89317078:− |
| | | | AAGCACCACAGCAGGAAGAGCTTCCCC | |
| | | | TCAGCAGCGACATGGTGGAGAAGCAGA | |
| | | | CTGGGAAAAAG | |
| ANKRD1 | ENST000003 | 156 | CAGACGGTTGATGATGAAGCGCCGGCC | GRCh38/hg38: |
| 1 | 01030.9 | | GTGTAAATGAAGATCGGGTGAGGAGCA | chr16:89316933: |
| | | | GGACGATGCCCAAGGGTGGGTGCCCTA | 89317078:− |
| | | | AAGCACCACAGCAGGAAGAGCTTCCCC | |
| | | | TCAGCAGCGACATGGTGGAGAAGCAGA | |
| | | | CTGGGAAAAAG | |
| ANKS3 | ENST000004 | 157 | CAAGGTGCAGAGCTAGAAATGAAAGAC | GRCh38/hg38: |
| | 46014.6 | | ATCCAGGGCTGGACAGCCCTCTTCCAC | chr16:4726659: |
| | | | TGTACCAGCGCCGGGCACCAGCACATG | 4726780:− |
| | | | GTCAGGTTCCTCTTGGACAGTGGAGCC | |
| | | | AATGCCAACGTGAG | |
| APOL4 | ENST000004 | 158 | CCTCAACATTCAGCAGAGGCCCCAGAT | GRCh38/hg38: |
| | 57630.6 | | CAGCGTCTGAGCCAGGCCAACAATGAC | chr22:36201700: |
| | | | CAAGGAGGATGGGATCCTGGGTGCAGC | 36201796:− |
| | | | TCATCACAAGCGTCGG | |
| APPL1 | ENST000004 | 159 | aatagagtccaagaagcagaGCAGCAA | GRCh38/hg38: |
| | 44459.1 | | AGAATATGAAGACTTTTAAAGCTCATG | chr3:57230714: |
| | | | | 57230767:+ |
| ARCN1 | ENST000003 | 160 | ATAACTTGATTTAAAACATCGTCCAGT | GRCh38/hg38: |
| | 59415.8 | | GTACCTGAGAGATGGCAGAATGTAATT | chr11:118573620: |
| | | | TGGTGGCAATCCTAATAAGTTCTATTG | 118573783:+ |
| | | | ACAACCCTTTAGATAAGAACTTGGATA | |
| | | | ATGGGGGGAATTCATGCTTGGACTTTA | |
| | | | GGCCACTGAACAGCTTTTCTCAGCCTC | |
| | | | AG | |
| ARMC8 | ENST000004 | 161 | gaccaggaatgaaagttactgggagat | GRCh38/hg38: |
| | 81646.5 | | aacttcgaaggattttgcaacaaattc | chr3:138188455: |
| | | | gagctgtccgactctgagaatg | 138188530:+ |
| ARMC8 | ENST000004 | 162 | gaccaggaatgaaagttactgggagat | GRCh38/hg38: |
| | 71453.5 | | aacttcgaaggattttgcaacaaattc | chr3:138188455: |
| | | | gagctgtccgactctgagaatg | 138188530:+ |
| ARNTL | ENST000004 | 163 | TTCACAGGTCGAATTTGGGGAGCACAA | GRCh38/hg38: |
| | 03510.7 | | TGGCTGGAGGTCAGATGCCCACTAGGA | chr11:13355226: |
| | | | GATGCTATGATTAATAT | 13355296:+ |
| ARNTL | ENST000005 | 164 | TTCACAGGTCGAATTTGGGGAGCACAA | GRCh38/hg38: |
| | 30357.5 | | TGGCTGGAGGTCAGATGCCCACTAGGA | chr11:13355226: |
| | | | GATGCTATGATTAATAT | 13355296:+ |
| BOC | ENST000004 | 165 | AGTGTTGCCAGGGACGGCAGTATCTCT | GRCh38/hg38: |
| | 64546.5 | | TTGTGTGACCCTGGCGGCTTATGGGAC | chr3:113249722: |
| | | | GTTGGCTTCAGACCTTTGTGATACACC | 113249899:+ |
| | | | ATGCTGCGTGGGACGATGACGGCGTGG | |
| | | | AGAGGAATGAGGCCTGAGGTCACACTG | |
| | | | GCTTGCCTCCTCCTAGCCACAGCAGGC | |
| | | | TGCTTTGCTGACTTGA | |
| BOC | ENST000002 | 166 | AGTGTTGCCAGGGACGGCAGTATCTCT | GRCh38/hg38: |
| | 73395.8 | | TTGTGTGACCCTGGCGGCTTATGGGAC | chr3:113249722: |
| | | | GTTGGCTTCAGACCTTTGTGATACACC | 113249899:+ |
| | | | ATGCTGCGTGGGACGATGACGGCGTGG | |
| | | | AGAGGAATGAGGCCTGAGGTCACACTG | |
| | | | GCTTGCCTCCTCCTAGCCACAGCAGGC | |
| | | | TGCTTTGCTGACTTGA | |
| BOC | ENST000004 | 167 | AGTGTTGCCAGGGACGGCAGTATCTCT | GRCh38/hg38: |
| | 85230.5 | | TTGTGTGACCCTGGCGGCTTATGGGAC | chr3:113249722: |
| | | | GTTGGCTTCAGACCTTTGTGATACACC | 113249899:+ |
| | | | ATGCTGCGTGGGACGATGACGGCGTGG | |
| | | | AGAGGAATGAGGCCTGAGGTCACACTG | |
| | | | GCTTGCCTCCTCCTAGCCACAGCAGGC | |
| | | | TGCTTTGCTGACTTGA | |
| BOC | ENST000003 | 168 | AGTGTTGCCAGGGACGGCAGTATCTCT | GRCh38/hg38: |
| | 55385.7 | | TTGTGTGACCCTGGCGGCTTATGGGAC | chr3:113249722: |
| | | | GTTGGCTTCAGACCTTTGTGATACACC | 113249899:+ |
| | | | ATGCTGCGTGGGACGATGACGGCGTGG | |
| | | | AGAGGAATGAGGCCTGAGGTCACACTG | |
| | | | GCTTGCCTCCTCCTAGCCACAGCAGGC | |
| | | | TGCTTTGCTGACTTGA | |
| BRCA1 | ENST000004 | 169 | ATTTTGCATGCTGAAACTTCTCAACCA | GRCh38/hg38: |
| | 93795.5 | | GAAGAAAGGGCCTTCACAGTGTCCTTT | chr17:43106456: |
| | | | ATGTAAGAATGATATAACCAAAAG | 43106533:− |
| BRCA1 | ENST000004 | 170 | ATTTTGCATGCTGAAACTTCTCAACCA | GRCh38/hg38: |
| | 93919.5 | | GAAGAAAGGGCCTTCACAGTGTCCTTT | chr17:43106456: |
| | | | ATGTAAGAATGATATAACCAAAAG | 43106533:− |
| C8B | ENST000005 | 171 | GATCAAGTCCAGGATCATGGTTTTCGA | GRCh38/hg38: |
| | 35057.5 | | GGATCCCTGTGACCGAATCTAGCCTAC | chr1:56959529: |
| | | | ATTTCCAGCACAATGGACACTTGTATG | 56959657:− |
| | | | ACTCTGGCcttcactctctctgggcgt | |
| | | | ttcttcatgctgctttctcag | |
| C8B | ENST000005 | 172 | GATCAAGTCCAGGATCATGGTTTTCGA | GRCh38/hg38: |
| | 35057.5 | | GGATCCCTGTGACCGAATCTAGCCTAC | chr1:56959529: |
| | | | ATTTCCAGCACAATGGACACTTGTATG | 56959657:− |
| | | | ACTCTGGCcttcactctctctgggcgt | |
| | | | ttcttcatgctgctttctcag | |
| CALM1 | ENST000004 | 173 | GCATCCTTCTTTAAAAGAGAAATCCAC | GRCh38/hg38: |
| | 47653.7 | | GTTAGCTCTCCTTGAGGTCTCGAGTTC | chr14:90398991: |
| | | | CCTCGGCTGGAGGCACAGGTTCAGTGG | 90399087:+ |
| | | | AGACCAAATAATGCAG | |
| CALM3 | ENST000005 | 174 | GAGGCCTTCTCCCTCTTTGACAAGGAT | GRCh38/hg38: |
| | 94523.5 | | GGAGATGGCACTATCACCACCAAGGAG | chr19:46608205: |
| | | | TTGGGGACAGTGATGAGATCCCTGGGA | 46608340:+ |
| | | | CAGAACCCCACTGAAGCAGAGCTGCAG | |
| | | | GATATGATCAATGAGGTGGATGCAGAT | |
| | | | G | |
| CASP5 | ENST000004 | 175 | AGCTTTGTCTAAAGCAAGGGCAAAACT | GRCh38/hg38: |
| | 56094.1 | | CTTTAAGCTGTGCCCAGAGTTGAAGGA | chr11:105008807: |
| | | | GTCTTTATATTTCTGATAGAAGACAGT | 105009053:− |
| | | | GGCAAAAAAAAAAGGCGTAAGAATTTT | |
| | | | GAAGCTATGTTCAAAGGTATCCTTCAG | |
| | | | AGTGGATTGGATAACTTCGTGATAAAC | |
| | | | CACATGCTAAAGAACAACGTGGCTGGA | |
| | | | CAAACATCTATCCAGACCCTAGTACCT | |
| | | | AATACGGATCAAAAGTCGACCAGTGTA | |
| | | | AAAA | |
| CAST | ENST000005 | 176 | ATAAAATAAAATTATACCTGGGGCTGT | GRCh38/hg38: |
| | 11049.5 | | GCTCTTATATTAGGCCATTCCAGTCAG | chr5:96726754: |
| | | | CCAACAGATGGAAGGACCACATCTTCC | 96726859:+ |
| | | | TAACAAGAAAAAACACAAAAAACAG | |
| CEP19 | ENST000004 | 177 | CAGGAAGTCATTATGCAACTTACACAT | GRCh38/hg38: |
| | 09690.3 | | ATTCATCAGATTTCCTCTGACTTACCC | chr3:196708528: |
| | | | GGACATGTACATGGGAATGATGTGCAC | 196708727:− |
| | | | TGCCAAGAAATGTGGGATTAGGTTTCA | |
| | | | GCCTCCAGCTATTATCTTAATCTATGA | |
| | | | GAGTGAAATCAAGGGGAAAATTCGCCA | |
| | | | GCGCATTATGCCAGTTCGAAACTTTTC | |
| | | | AAAGTTTTCAG | |
| CEP57 | ENST000005 | 178 | tgtgcagactagggaaatgaagtacaa | GRCh38/hg38: |
| | 44522.5 | | tgttgaccagaattgat | chr11:95795516: |
| | | | | 95795559:+ |
| CHEK1 | ENST000005 | 179 | AGTTCAACTTGCTGTGAATAGAGTAAC | GRCh38/hg38: |
| | 31607.5 | | TGAAGAAGCAGTCGCAGTGAAGATTGT | chr11:125627607: |
| | | | AGATATGAAGCGTGCCGTAGACTGTCC | 125627830:+ |
| | | | AGAAAATATTAAGAAAGAGATCTGTAT | |
| | | | CAATAAAATGCTAAATCATGAAAATGT | |
| | | | AGTAAAATTCTATGGTCACAGGAGAGA | |
| | | | AGGCAATATCCAATATTTATTTCTGGA | |
| | | | GTACTGTAGTGGAGGAGAGCTTTTTGA | |
| | | | CAGAATAG | |
| CIB2 | ENST000005 | 180 | GCTGCATTCGCGATTCTATGAGCTGGC | GRCh38/hg38: |
| | 39011.5 | | CCCCAACCTCGTCCCAATGGACTACAG | chr15:78111165: |
| | | | GAAGAGCCCCATCGTCCACGTGCCCAT | 78111276:− |
| | | | GAGCCTCATCATCCAGATGCCAGAGCT | |
| | | | CCGG | |
| CIB2 | ENST000005 | 181 | GCTGCATTCGCGATTCTATGAGCTGGC | GRCh38/hg38: |
| | 60618.5 | | CCCCAACCTCGTCCCAATGGACTACAG | chr15:78111165: |
| | | | GAAGAGCCCCATCGTCCACGTGCCCAT | 78111276:− |
| | | | GAGCCTCATCATCCAGATGCCAGAGCT | |
| | | | CCGG | |
| COX4I1 | ENST000005 | 182 | TGTTGTGAAGAGCGAAGACTTTTCGCT | GRCh38/hg38: |
| | 66405.5 | | CCCAGCTTATATGGATCGGCGTGACCA | chr16:85804941: |
| | | | CCCCTTGCCGGAGGTGGCCCATGTCAA | 85805104:+ |
| | | | GCACCTGTCTGCCAGCCAGAAGGCATT | |
| | | | GAAGGAGAAGGAGAAGGCCTCCTGGAG | |
| | | | CAGCCTCTCCATGGATGAGAAAGTCGA | |
| | | | GT | |
| DCLRE1 | ENST000003 | 183 | ATATCTATTGAAATCGAGACTCCTACC | GRCh38/hg38: |
| C | 57717.6 | | CAGATATCTTTAGTGGATGAAGCATCA | chr10:14939810: |
| | | | GGAGAG | 14939869:− |
| DECR1 | ENST000005 | 184 | gcaccttactagggatatgaaggtgag | GRCh38/hg38: |
| | 19410.5 | | aagaagagctgattcctgctgtcaaga | chr8:90005292: |
| | | | agcatagagtccaatggCATTATG | 90005369:+ |
| DECR1 | ENST000005 | 185 | gtgatgaacagcctccttctaaatcat | GRCh38/hg38: |
| | 17761.5 | | tgaccacatttcttattctttcctgag | chr8:90015541: |
| | | | gataaatttcaagaTATCCTGAACCAA | 90015666:+ |
| | | | CTGATGACAGCCTATTTAGCTACAGGA | |
| | | | ATACTCTGGAAGGAAATG | |
| DHFR | ENST000005 | 186 | GTAAACAGAATCTGGTGATTATGGGTA | GRCh38/hg38: |
| | 04396.1 | | AGAAGACCTGGTTCTCCATTCCTGAGA | chr5:80649389: |
| | | | AGAATCGACCTTTAAAGGGTAGAATTA | 80649494:− |
| | | | ATTTAGTTCTCAGCAGAGAACTCAA | |
| DKK2 | ENST000005 | 187 | GCCTACCCTTGTAGCAGTGATAAGGAG | GRCh38/hg38: |
| | 13208.5 | | TGTGAAGTTGGGAGGTATTGCCACAGT | chr4:106925799: |
| | | | CCCCACCAAGGATCATCGGCCTGCATG | 106925949:− |
| | | | GTGTGTCGGAGAAAAAAGAAGCGCTGC | |
| | | | CACCGAGATGGCATGTGCTGCCCCAGT | |
| | | | ACCCGCTGCAATAATG | |
| DLG2 | ENST000004 | 188 | GTGCCGATATCACATAAGATTTCACCA | GRCh38/hg38: |
| | 34967.1 | | GGGCTTCTTCTAGCCAGAAGACATGTC | chr11:83651839: |
| | | | CTTTGACAGCCAATGTGACCTTCGTAG | 83651930:− |
| | | | CTCTGAGCCAG | |
| DOK2 | ENST000005 | 189 | TCGGCCCCCACAAGGAATTTGCTGTGA | GRCh38/hg38: |
| | 18197.1 | | CCATGAGACCTACAGAAGCCAGTGAGA | chr8:21910673: |
| | | | GGTGCCACCTGCGGGGGTCCTATACCC | 21910857:− |
| | | | TCCGGGCTGGGGAGAGTGCCCTGGAGC | |
| | | | TGTGGGGTGGGCCCGAGCCAGGGACCC | |
| | | | AGCTGTACGACTGGCCCTACAGGTTTC | |
| | | | TGCGGCGCTTTGGGCGGGACAAG | |
| DPF3 | ENST000005 | 190 | gccctttcaagaatcctatgaaagttg | GRCh38/hg38: |
| | 46183.1 | | tggatcatctccccggaaaacacgcat | chr14:72879804: |
| | | | atagatgtgaacatctgcctatggttt | 72879947:− |
| | | | tatggggttcacagacctggaagagcc | |
| | | | catctctggatgccCTGGAGGCCCATG | |
| | | | GGCTCTAGG | |
| DPF3 | ENST000006 | 191 | gccctttcaagaatcctatgaaagttg | GRCh38/hg38: |
| | 14862.4 | | tggatcatctccccggaaaacacgcat | chr14:72879804: |
| | | | atagatgtgaacatctgcctatggttt | 72879947:− |
| | | | tatggggttcacagacctggaagagcc | |
| | | | catctctggatgccCTGGAGGCCCATG | |
| | | | GGCTCTAGG | |
| DTNA | ENST000005 | 192 | AGATGTGCTTAGAGTGTTTGGGAGAGT | GRCh38/hg38: |
| | 88949.5 | | TTCAGCCAGGCCTTCCAATTTCCTAGA | chr18:34757158: |
| | | | CCCCATGTGTGGTACTGTGTCTTCACC | 34757288:+ |
| | | | TGGAATTGTGACCTTTGTGCAGTTACA | |
| | | | AATCCAACAGAGCAAGGAGCCTA | |
| DTNA | ENST000005 | 193 | AGATGTGCTTAGAGTGTTTGGGAGAGT | GRCh38/hg38: |
| | 88949.5 | | TTCAGCCAGGCCTTCCAATTTCCTAGA | chr18:34757158: |
| | | | CCCCATGTGTGGTACTGTGTCTTCACC | 34757288:+ |
| | | | TGGAATTGTGACCTTTGTGCAGTTACA | |
| | | | AATCCAACAGAGCAAGGAGCCTA | |
| DYRK1A | ENST000006 | 194 | CCAAATATGAGGTGACGTTTAAGCTGC | GRCh38/hg38: |
| | 45774.1 | | TACTTGAAAGAGAAGTGGGAGTTAGGC | chr21:37456130: |
| | | | AGAGCAGTAGGGGAATCATGTTTGGGG | 37456308:+ |
| | | | AAGAGTGAAGAGTGTACTTGAGAGAGT | |
| | | | GTGGAGGTGCCTTGGAGGAGCTGGAGC | |
| | | | CCAGAGGTGCCCCATGAGAACAACACA | |
| | | | GGAGGCTGCAGGTGGAG | |
| FOLH1 | ENST000003 | 195 | gttaaaagccaactgcaaggtctaatg | GRCh38/hg38: |
| | 40334.11 | | actgcaggatctagctatccattgttt | chr11:49206778: |
| | | | ctggccGCCTATGCGTGCACTGGGTGT | 49206874:− |
| | | | CTGGCAGAGAGGCTGG | |
| FUZ | ENST000005 | 196 | CATCACCCTCATTGTTCTGTCATCTGA | GRCh38/hg38: |
| | 29302.1 | | GGTGGGCATCTCTGAGCTGAGGCTGGA | chr19:49812251: |
| | | | GAGACTACTCCAAATGGTGTTTGGAGC | 49812335:− |
| | | | CATG | |
| GANAB | ENST000005 | 197 | GTGTTGCTGGTGCTAGAGCTTCAGGGG | GRCh38/hg38: |
| | 40933.5 | | CTTCAAAAGAACATGACTCGGTTCAGG | chr11:62638983: |
| | | | ATTGATGAGCTGGAGCCTCGGCGACCC | 62639110:− |
| | | | CGATACCGTGTACCAGATGTTTTGGTG | |
| | | | GCTGATCCACCAATAGCCCG | |
| GEMIN4 | ENST000005 | 198 | AGCTAGGGCCATGAGTACCTTGTTTTT | GRCh38/hg38: |
| | 73482.5 | | GACTGGAAGGAGCTGTGGGGTGGACCG | chr17:749814: |
| | | | TTTCCCTGAAAGCTAGAAGAATGTTTG | 749909:− |
| | | | AAGCCTGTTCCCAAG | |
| GGA3 | ENST000005 | 199 | TACCTGGGGGACAGGGTGTCTGAGAAA | GRCh38/hg38: |
| | 80799.2 | | GTGAAGACCAAGGTTATTGAGCTGCTG | chr17:75243447: |
| | | | TACAGCTGGACCATGGCCCTGCCAGAA | 75243570:− |
| | | | GAAGCAAAGATCAAAGACGCCTACCAC | |
| | | | ATGCTGAAGAGACAGG | |
| GOSR2 | ENST000005 | 200 | ggttcatctatattgtagcctgttacc | GRCh38/hg38: |
| | 70879.2 | | agaatttcattctgttttatgacggaa | chr17:46924261: |
| | | | taatattccgttttatgtgtctaccac | 46924468:+ |
| | | | attttgttatccattcatctgttgatg | |
| | | | gacacttgagttgtttccaccattggg | |
| | | | ctgttgagaataatactgctatgaact | |
| | | | ctggtgtagaagtatctgttttagttt | |
| | | | ctcttctcaattttttgag | |
| GPM6A | ENST000002 | 201 | ATTCTACTGAAGAAAGGTAGCCATGGA | GRCh38/hg38: |
| | 80187.11 | | AGAGAATATGGAAGAGGGACAGACACA | chr4:175812191: |
| | | | AAAAG | 175812249:− |
| GRB10 | ENST000006 | 202 | gttctgaaaatattgtgcacagggcag | GRCh38/hg38: |
| | 45075.1 | | gctgaggacacagccacgtgataccca | chr7:50710875: |
| | | | ctgtagagaGAGGGAGAGAGAGACCTC | 50710990:− |
| | | | CTATGCAAGCTGCCGGCCCTCTGTTCC | |
| | | | GTAGTAAG | |
| GSN | ENST000004 | 203 | TTCTTGCAGATACAGCGCTAGGAAAAG | GRCh38/hg38: |
| | 77104.2 | | GGGAGTAATTCAGGTCTAGAATGGAAA | chr9:121300056: |
| | | | AACTGTTTTGTTGCTTT | 121300126:+ |
| HDAC8 | ENST000004 | 204 | GCCAGTATGGTGCATTCTTTGATTGAA | GRCh38/hg38: |
| | 21523.6 | | GCATATGCACTGCATAAGCAGATGAG | chrX:72572057: |
| | | | | 72572109:− |
| HIVEP1 | ENST000004 | 205 | GAAACGTGGTGGGTGCCGTTTTGACAC | GRCh38/hg38: |
| | 42081.6 | | CGACCTATCCTTTGTGAGGTTGAAGAA | chr6:12020248: |
| | | | TTTTGGAAGAGCATGAGAGCAGCACTT | 12020418:+ |
| | | | GGTGTTCAGAAGAAAGGCTTAGCATGT | |
| | | | TGTCCTGGGTTCCGTGGAGAAGGGTCA | |
| | | | CTGGACTGCACGGGGTGGCTCTTCCGC | |
| | | | ATGGTCTTG | |
| HK1 | ENST000004 | 206 | CATTGTTGATGCTCTTGAGAGCATCAG | GRCh38/hg38: |
| | 21088.5 | | CCAGGACATTAATGTGCACCACTGTGG | chr10:69300769: |
| | | | TGGCGTGGAAAGATGGCAAAAAGAGCC | 69300861:+ |
| | | | CTGcatgatttt | |
| HK1 | ENST000003 | 207 | CATTGTTGATGCTCTTGAGAGCATCAG | GRCh38/hg38: |
| | 60289.6 | | CCAGGACATTAATGTGCACCACTGTGG | chr10:69300769: |
| | | | TGGCGTGGAAAGATGGCAAAAAGAGCC | 69300861:+ |
| | | | CTGcatgatttt | |
| IFNGR1 | ENST000004 | 208 | TGGCCATAATATAATTGTGATAATGTA | GRCh38/hg38: |
| | 14770.5 | | ATAAAATCAGGAAACATTACCTGAAGC | chr6:137215267: |
| | | | AGATGCTTTTGAAGTCACCAGAAAATA | 137215377:− |
| | | | GTCTTCTCCAATTCCAATTTAAATATG | |
| | | | GAG | |
| IKBKB | ENST000003 | 209 | AGTTAGCACGACATCAGTATGAGCTGG | GRCh38/hg38: |
| | 42222.6 | | TCACCTTCCCTGACAACGCAGACATGT | chr8:42272083: |
| | | | GGGGCCTGGGAAATGAAAGAGCGCCTT | 42272205:+ |
| | | | GGGACAGGGGGATTTGGAAATGTCATC | |
| | | | CGATGGCACAATCAG | |
| IKBKB | ENST000006 | 210 | AGTTAGCACGACATCAGTATGAGCTGG | GRCh38/hg38: |
| | 49612.1 | | TCACCTTCCCTGACAACGCAGACATGT | chr8:42272083: |
| | | | GGGGCCTGGGAAATGAAAGAGCGCCTT | 42272205:+ |
| | | | GGGACAGGGGGATTTGGAAATGTCATC | |
| | | | CGATGGCACAATCAG | |
| IKBKB | ENST000005 | 211 | AGTTAGCACGACATCAGTATGAGCTGG | GRCh38/hg38: |
| | 20810.6 | | TCACCTTCCCTGACAACGCAGACATGT | chr8:42272083: |
| | | | GGGGCCTGGGAAATGAAAGAGCGCCTT | 42272205:+ |
| | | | GGGACAGGGGGATTTGGAAATGTCATC | |
| | | | CGATGGCACAATCAG | |
| IKBKB | ENST000006 | 212 | AGTTAGCACGACATCAGTATGAGCTGG | GRCh38/hg38: |
| | 29753.1 | | TCACCTTCCCTGACAACGCAGACATGT | chr8:42272083: |
| | | | GGGGCCTGGGAAATGAAAGAGCGCCTT | 42272205:+ |
| | | | GGGACAGGGGGATTTGGAAATGTCATC | |
| | | | CGATGGCACAATCAG | |
| ISCU | ENST000003 | 213 | GTATCTCAAATCTGTGAAGTATTGTAG | GRCh38/hg38: |
| | 92807.8 | | AGGAGACACAAAAGGAATTGGGGGTCA | chr12:108564060: |
| | | | CAAATGGTTCTCATTGACATGAGTGTA | 108564155:+ |
| | | | GACCTTTCTACTCAG | |
| KARS | ENST000005 | 214 | GTGGTGGTAATCATTAGTTCCAGGGTG | GRCh38/hg38: |
| | 64578.5 | | CTCTGCCATGTTGACGCAAGCTGCTGT | chr16:75644283: |
| | | | AAGGCTTGTTAGGGGGTCCCTGCGCAA | 75644462:− |
| | | | AACCTCCTGGGCAGAGTGGGGTCACAG | |
| | | | GGAACTGCGACTGGGTCAACTTGCTCC | |
| | | | TTTCACAGCGCCTCACAAGGACAAGTC | |
| | | | ATTTTCTGATCAAAGAAG | |
| KARS | ENST000003 | 215 | GTGGTGGTAATCATTAGTTCCAGGGTG | GRCh38/hg38: |
| | 19410.9 | | CTCTGCCATGTTGACGCAAGCTGCTGT | chr16:75644283: |
| | | | AAGGCTTGTTAGGGGGTCCCTGCGCAA | 75644462:− |
| | | | AACCTCCTGGGCAGAGTGGGGTCACAG | |
| | | | GGAACTGCGACTGGGTCAACTTGCTCC | |
| | | | TTTCACAGCGCCTCACAAGGACAAGTC | |
| | | | ATTTTCTGATCAAAGAAG | |
| KIAA03 | ENST000005 | 216 | TTTGCTTATGGTGGATGCACTCATGGC | GRCh38/hg38: |
| 19 | 35378.5 | | AAAAAAATCACTGGTGAGCATCATTTA | chr6:24600619: |
| | | | AGAAGACCCATGACTAGACTGGGCTGG | 24600709:− |
| | | | CCGAGCCCAT | |
| KIAA05 | ENST000006 | 217 | GTTCATCAGACTTAACTTCTGCTAGAA | GRCh38/hg38: |
| 86 | 19722.4 | | ATTGTTACCAGCCTCTATTAGAAAATC | chr14:58429363: |
| | | | CCATGGTGTCAGAAAGT | 58429433:+ |
| KIAA05 | ENST000004 | 218 | GTTCATCAGACTTAACTTCTGCTAGAA | GRCh38/hg38: |
| 86 | 23743.7 | | ATTGTTACCAGCCTCTATTAGAAAATC | chr14:58429363: |
| | | | CCATGGTGTCAGAAAGT | 58429433:+ |
| KIZ | ENST000006 | 219 | TGAAAAGAAGAGATTGGACCTGGAAAA | GRCh38/hg38: |
| | 20891.4 | | GAAACTTTATGAATATAATCAGTCTGA | chr20:21132097: |
| | | | TACATGCAG | 21132159:+ |
| KLK6 | ENST000003 | 220 | GAATCTTCAGGTCTTCCTGGGGAAGCA | GRCh38/hg38: |
| | 91808.5 | | TAACCTTCGGCAAAGGGAGAGTTCCCA | chr19:50963302: |
| | | | GGAGCAGAGTTCTGTTGTCCGGGCTGT | 50963549:− |
| | | | GATCCACCCTGACTATGATGCCGCCAG | |
| | | | CCATGACCAGGACATCATGCTGTTGCG | |
| | | | CCTGGCACGCCCAGCCAAACTCTCTGA | |
| | | | ACTCATCCAGCCCCTTCCCCTGGAGAG | |
| | | | GGACTGCTCAGCCAACACCACCAGCTG | |
| | | | CCACATCCTGGGCTGGGGCAAGACAGC | |
| | | | AGATG | |
| LMNA | ENST000003 | 221 | ATTTGCCAGTGATGGGAAGAGTTAGAA | GRCh38/hg38: |
| | 68297.5 | | ACAGGATGCCCAGCCCTTCTCGCCTCA | chr1:156126736: |
| | | | AGAGGCCACTGGGATGCAGCCACTCCT | 156126915:+ |
| | | | GTGCTTGGGGAACCTGGAGGATGCAAG | |
| | | | GGAAAGGACTGGCACTCTGCTGGCACA | |
| | | | GCACCCGGCCTGGGGCAGGACACGGGC | |
| | | | GAAGCCAGGGTCTCCCCT | |
| LMNTD1 | ENST000004 | 222 | GAAAGAAAAGAGACTTCTTTTCTAGCC | GRCh38/hg38: |
| | 58174.6 | | AAGATGAAAGATACACAAGACATTCAG | chr12:25552871: |
| | | | GAAGCTTCGAAGGCAATGCAGAATAAA | 25552989:− |
| | | | GTCCATGAGCAGGAAGATAAGAATGAG | |
| | | | AAACAAAAACA | |
| LMNTD1 | ENST000004 | 223 | GAAAGAAAAGAGACTTCTTTTCTAGCC | GRCh38/hg38: |
| | 13632.6 | | AAGATGAAAGATACACAAGACATTCAG | chr12:25552871: |
| | | | GAAGCTTCGAAGGCAATGCAGAATAAA | 25552989:− |
| | | | GTCCATGAGCAGGAAGATAAGAATGAG | |
| | | | AAACAAAAACA | |
| LRRC7 | ENST000003 | 224 | GAGCCCGCTACATGAAAAAAAATGCAA | GRCh38/hg38: |
| | 10961.9 | | GTCAAAGTGGTCACAACCTAGAAGTCT | chr1:69716142: |
| | | | GCAGAGACAGGAATAACTAGCAA | 69716218:+ |
| LRTOMT | ENST000005 | 225 | GCTGAACCCAGACTCCCAGGGCACCTG | GRCh38/hg38: |
| | 41614.5 | | CTTGCACCTTTGAATGATGGCCTGAAC | chr11:72089029: |
| | | | TATGAACAAACGGGACTATATGAACAC | 72089165:+ |
| | | | TTCGGTACAGGAGCCCCCTCTTGACTA | |
| | | | CTCCTTCAGAAGCATCCACGTCATTCA | |
| | | | AG | |
| LRTOMT | ENST000006 | 226 | GCTGAACCCAGACTCCCAGGGCACCTG | GRCh38/hg38: |
| | 47530.1 | | CTTGCACCTTTGAATGATGGCCTGAAC | chr11:72089029: |
| | | | TATGAACAAACGGGACTATATGAACAC | 72089165:+ |
| | | | TTCGGTACAGGAGCCCCCTCTTGACTA | |
| | | | CTCCTTCAGAAGCATCCACGTCATTCA | |
| | | | AG | |
| LRTOMT | ENST000005 | 227 | GCTGAACCCAGACTCCCAGGGCACCTG | GRCh38/hg38: |
| | 42846.5 | | CTTGCACCTTTGAATGATGGCCTGAAC | chr11:72089029: |
| | | | TATGAACAAACGGGACTATATGAACAC | 72089165:+ |
| | | | TTCGGTACAGGAGCCCCCTCTTGACTA | |
| | | | CTCCTTCAGAAGCATCCACGTCATTCA | |
| | | | AG | |
| LRTOMT | ENST000005 | 228 | GCTGAACCCAGACTCCCAGGGCACCTG | GRCh38/hg38: |
| | 35883.6 | | CTTGCACCTTTGAATGATGGCCTGAAC | chr11:72089029: |
| | | | TATGAACAAACGGGACTATATGAACAC | 72089165:+ |
| | | | TTCGGTACAGGAGCCCCCTCTTGACTA | |
| | | | CTCCTTCAGAAGCATCCACGTCATTCA | |
| | | | AG | |
| LRTOMT | ENST000005 | 229 | GCTGAACCCAGACTCCCAGGGCACCTG | GRCh38/hg38: |
| | 36917.2 | | CTTGCACCTTTGAATGATGGCCTGAAC | chr11:72089029: |
| | | | TATGAACAAACGGGACTATATGAACAC | 72089165:+ |
| | | | TTCGGTACAGGAGCCCCCTCTTGACTA | |
| | | | CTCCTTCAGAAGCATCCACGTCATTCA | |
| | | | AG | |
| LRTOMT | ENST000002 | 230 | GCTGAACCCAGACTCCCAGGGCACCTG | GRCh38/hg38: |
| | 89488.7 | | CTTGCACCTTTGAATGATGGCCTGAAC | chr11:72089029: |
| | | | TATGAACAAACGGGACTATATGAACAC | 72089165:+ |
| | | | TTCGGTACAGGAGCCCCCTCTTGACTA | |
| | | | CTCCTTCAGAAGCATCCACGTCATTCA | |
| | | | AG | |
| LRTOMT | ENST000006 | 231 | GCTGAACCCAGACTCCCAGGGCACCTG | GRCh38/hg38: |
| | 42648.1 | | CTTGCACCTTTGAATGATGGCCTGAAC | chr11:72089029: |
| | | | TATGAACAAACGGGACTATATGAACAC | 72089165:+ |
| | | | TTCGGTACAGGAGCCCCCTCTTGACTA | |
| | | | CTCCTTCAGAAGCATCCACGTCATTCA | |
| | | | AG | |
| LRTOMT | ENST000006 | 232 | GCTGAACCCAGACTCCCAGGGCACCTG | GRCh38/hg38: |
| | 42478.1 | | CTTGCACCTTTGAATGATGGCCTGAAC | chr11:72089029: |
| | | | TATGAACAAACGGGACTATATGAACAC | 72089165:+ |
| | | | TTCGGTACAGGAGCCCCCTCTTGACTA | |
| | | | CTCCTTCAGAAGCATCCACGTCATTCA | |
| | | | AG | |
| LRTOMT | ENST000003 | 233 | GCTGAACCCAGACTCCCAGGGCACCTG | GRCh38/hg38: |
| | 24866.11 | | CTTGCACCTTTGAATGATGGCCTGAAC | chr11:72089029: |
| | | | TATGAACAAACGGGACTATATGAACAC | 72089165:+ |
| | | | TTCGGTACAGGAGCCCCCTCTTGACTA | |
| | | | CTCCTTCAGAAGCATCCACGTCATTCA | |
| | | | AG | |
| LRTOMT | ENST000006 | 234 | GCTGAACCCAGACTCCCAGGGCACCTG | GRCh38/hg38: |
| | 45358.1 | | CTTGCACCTTTGAATGATGGCCTGAAC | chr11:72089029: |
| | | | TATGAACAAACGGGACTATATGAACAC | 72089165:+ |
| | | | TTCGGTACAGGAGCCCCCTCTTGACTA | |
| | | | CTCCTTCAGAAGCATCCACGTCATTCA | |
| | | | AG | |
| LRTOMT | ENST000005 | 235 | GCTGAACCCAGACTCCCAGGGCACCTG | GRCh38/hg38: |
| | 38478.5 | | CTTGCACCTTTGAATGATGGCCTGAAC | chr11:72089029: |
| | | | TATGAACAAACGGGACTATATGAACAC | 72089165:+ |
| | | | TTCGGTACAGGAGCCCCCTCTTGACTA | |
| | | | CTCCTTCAGAAGCATCCACGTCATTCA | |
| | | | AG | |
| LZTFL1 | ENST000005 | 236 | GCAGAGTTGGGCCTAAATGAGCACCAT | GRCh38/hg38: |
| | 36047.5 | | CAAAATGAAGTTATTAATTATATGCGT | chr3:45837927: |
| | | | TTTGCTCGTTCAAAGAGAGGCTTGAGA | 45838051:− |
| | | | CTCAAAACTGTAGATTCCTGCTTCCAA | |
| | | | GACCTCAAGGAGAGCAG | |
| MAGI2 | ENST000006 | 237 | ggagggtacctcttgaatgagggtcct | GRCh38/hg38: |
| | 36717.1 | | atgacctgcttcaggggaaggttagaa | chr7:78554567: |
| | | | aattcttcctgggatttatggccgcct | 78554671:− |
| | | | tccggggagatgggcgagaagaag | |
| MECP2 | ENST000006 | 238 | GCTCCATAAAAATACAGACTCACCAGT | GRCh38/hg38: |
| | 28176.2 | | TCCTGCTTTGATGTGACATGTGACTCC | chrX:154092184: |
| | | | CCAGAATACACCTTGCTTCTGTAGACC | 154092307:− |
| | | | AGCTCCAACAGGATTCCATGGTAGCTG | |
| | | | GGATGTTAGGGCTCAG | |
| MECP2 | ENST000003 | 239 | GCTCCATAAAAATACAGACTCACCAGT | GRCh38/hg38: |
| | 03391.10 | | TCCTGCTTTGATGTGACATGTGACTCC | chrX:154092184: |
| | | | CCAGAATACACCTTGCTTCTGTAGACC | 154092307:− |
| | | | AGCTCCAACAGGATTCCATGGTAGCTG | |
| | | | GGATGTTAGGGCTCAG | |
| MERTK | ENST000004 | 240 | CATAACCAGTGTGCAGCGTTCAGACAA | GRCh38/hg38: |
| | 09780.5 | | TGGGTCGTATATCTGTAAGATGAAAAT | chr2:111944960: |
| | | | AAACAATGAAGAGATCGTGTCTGATCC | 111945060:+ |
| | | | CATCTACATCGAAGTACAAG | |
| MFSD2A | ENST000004 | 241 | GATCATCTTCTCCACGCCCCTGGCCGT | GRCh38/hg38: |
| | 20632.6 | | CATTGCCTACTTCCTCATCTGGTTCGT | chr1:39965211: |
| | | | GCCCGACTTCCCACACGGCCAGACCTA | 39965334:+ |
| | | | TTGGTACCTGCTTTTCTATTGCCTCTT | |
| | | | TGAAACAATGGTCACG | |
| MLF1 | ENST000004 | 242 | TGAGTCCATTCTTGCACACCGAGAAAA | GRCh38/hg38: |
| | 82628.5 | | TATGCGACAGATGATAAGAAGTTTTTC | chr3:158592434: |
| | | | TGAACCCTTTGGAAGAGACTTGCTCAG | 158592581:+ |
| | | | TATCTCTGATGGTAGAGGGAGAGCTCA | |
| | | | TAATCGTAGAGGACATAATGATGGTGA | |
| | | | AGATTCTTTGACT | |
| MLF1 | ENST000006 | 243 | TGAGTCCATTCTTGCACACCGAGAAAA | GRCh38/hg38: |
| | 19577.4 | | TATGCGACAGATGATAAGAAGTTTTTC | chr3:158592434: |
| | | | TGAACCCTTTGGAAGAGACTTGCTCAG | 158592581:+ |
| | | | TATCTCTGATGGTAGAGGGAGAGCTCA | |
| | | | TAATCGTAGAGGACATAATGATGGTGA | |
| | | | AGATTCTTTGACT | |
| MLF1 | ENST000003 | 244 | TGAGTCCATTCTTGCACACCGAGAAAA | GRCh38/hg38: |
| | 59117.9 | | TATGCGACAGATGATAAGAAGTTTTTC | chr3:158592434: |
| | | | TGAACCCTTTGGAAGAGACTTGCTCAG | 158592581:+ |
| | | | TATCTCTGATGGTAGAGGGAGAGCTCA | |
| | | | TAATCGTAGAGGACATAATGATGGTGA | |
| | | | AGATTCTTTGACT | |
| MLF1 | ENST000006 | 245 | TGAGTCCATTCTTGCACACCGAGAAAA | GRCh38/hg38: |
| | 18075.4 | | TATGCGACAGATGATAAGAAGTTTTTC | chr3:158592434: |
| | | | TGAACCCTTTGGAAGAGACTTGCTCAG | 158592581:+ |
| | | | TATCTCTGATGGTAGAGGGAGAGCTCA | |
| | | | TAATCGTAGAGGACATAATGATGGTGA | |
| | | | AGATTCTTTGACT | |
| MLF1 | ENST000004 | 246 | TGAGTCCATTCTTGCACACCGAGAAAA | GRCh38/hg38: |
| | 77042.5 | | TATGCGACAGATGATAAGAAGTTTTTC | chr3:158592434: |
| | | | TGAACCCTTTGGAAGAGACTTGCTCAG | 158592581:+ |
| | | | TATCTCTGATGGTAGAGGGAGAGCTCA | |
| | | | TAATCGTAGAGGACATAATGATGGTGA | |
| | | | AGATTCTTTGACT | |
| MOB1B | ENST000003 | 247 | GAGTTCTCAGCCTGAAGTTGACTGGAA | GRCh38/hg38: |
| | 96051.2 | | CTTTCAGTTAACAAGTATTTATCGAAT | chr4:70950700: |
| | | | ACCTGATCTGTAGTGTTGGACTTAGAC | 70950811:+ |
| | | | CTATGGAAGGAGCTACTGATGTGAATG | |
| | | | AAAG | |
| MSRB3 | ENST000003 | 248 | CTCTTGCCCCTGTTCTTTGCTTCTCGT | GRCh38/hg38: |
| | 08259.9 | | TTTGTTGGTGAAGATATCACAGTGATG | chr12:65308529: |
| | | | TCTGCATTCAACCTGCTGCATTTGGTG | 65308655:+ |
| | | | ACAAAGAGCCAGCCAGTAGCCCTTCGA | |
| | | | GCCTGTGGGCTTCCCTCAG | |
| NR1I3 | ENST000005 | 249 | GAGTCTGTGACAGCCACCCCAACACGT | GRCh38/hg38: |
| | 02848.5 | | GACGTCATGGCCAGTAGGGAAGATGAG | chr1:161236459: |
| | | | CTGAGGAACTGTGTGGTATGTGGGGAC | 161236598:− |
| | | | CAAGCCACAGGCTACCACTTTAATGCG | |
| | | | CTGACTTGTGAGGGCTGCAAGGGTTTC | |
| | | | TTCAG | |
| NR1I3 | ENST000005 | 250 | GAGTCTGTGACAGCCACCCCAACACGT | GRCh38/hg38: |
| | 15452.1 | | GACGTCATGGCCAGTAGGGAAGATGAG | chr1:161236459: |
| | | | CTGAGGAACTGTGTGGTATGTGGGGAC | 161236598:− |
| | | | CAAGCCACAGGCTACCACTTTAATGCG | |
| | | | CTGACTTGTGAGGGCTGCAAGGGTTTC | |
| | | | TTCAG | |
| NR1I3 | ENST000003 | 251 | GAGTCTGTGACAGCCACCCCAACACGT | GRCh38/hg38: |
| | 67983.8 | | GACGTCATGGCCAGTAGGGAAGATGAG | chr1:161236459: |
| | | | CTGAGGAACTGTGTGGTATGTGGGGAC | 161236598:− |
| | | | CAAGCCACAGGCTACCACTTTAATGCG | |
| | | | CTGACTTGTGAGGGCTGCAAGGGTTTC | |
| | | | TTCAG | |
| NR1I3 | ENST000003 | 252 | GAGTCTGTGACAGCCACCCCAACACGT | GRCh38/hg38: |
| | 67982.8 | | GACGTCATGGCCAGTAGGGAAGATGAG | chr1:161236459: |
| | | | CTGAGGAACTGTGTGGTATGTGGGGAC | 161236598:− |
| | | | CAAGCCACAGGCTACCACTTTAATGCG | |
| | | | CTGACTTGTGAGGGCTGCAAGGGTTTC | |
| | | | TTCAG | |
| NR1I3 | ENST000005 | 253 | GAGTCTGTGACAGCCACCCCAACACGT | GRCh38/hg38: |
| | 11944.5 | | GACGTCATGGCCAGTAGGGAAGATGAG | chr1:161236459: |
| | | | CTGAGGAACTGTGTGGTATGTGGGGAC | 161236598:− |
| | | | CAAGCCACAGGCTACCACTTTAATGCG | |
| | | | CTGACTTGTGAGGGCTGCAAGGGTTTC | |
| | | | TTCAG | |
| NR1I3 | ENST000003 | 254 | GAGTCTGTGACAGCCACCCCAACACGT | GRCh38/hg38: |
| | 67980.6 | | GACGTCATGGCCAGTAGGGAAGATGAG | chr1:161236459: |
| | | | CTGAGGAACTGTGTGGTATGTGGGGAC | 161236598:− |
| | | | CAAGCCACAGGCTACCACTTTAATGCG | |
| | | | CTGACTTGTGAGGGCTGCAAGGGTTTC | |
| | | | TTCAG | |
| NR1I3 | ENST000003 | 255 | GAGTCTGTGACAGCCACCCCAACACGT | GRCh38/hg38: |
| | 67984.8 | | GACGTCATGGCCAGTAGGGAAGATGAG | chr1:161236459: |
| | | | CTGAGGAACTGTGTGGTATGTGGGGAC | 161236598:− |
| | | | CAAGCCACAGGCTACCACTTTAATGCG | |
| | | | CTGACTTGTGAGGGCTGCAAGGGTTTC | |
| | | | TTCAG | |
| NR1I3 | ENST000005 | 256 | GAGTCTGTGACAGCCACCCCAACACGT | GRCh38/hg38: |
| | 05005.5 | | GACGTCATGGCCAGTAGGGAAGATGAG | chr1:161236459: |
| | | | CTGAGGAACTGTGTGGTATGTGGGGAC | 161236598:− |
| | | | CAAGCCACAGGCTACCACTTTAATGCG | |
| | | | CTGACTTGTGAGGGCTGCAAGGGTTTC | |
| | | | TTCAG | |
| NR1I3 | ENST000005 | 257 | GAGTCTGTGACAGCCACCCCAACACGT | GRCh38/hg38: |
| | 02985.5 | | GACGTCATGGCCAGTAGGGAAGATGAG | chr1:161236459: |
| | | | CTGAGGAACTGTGTGGTATGTGGGGAC | 161236598:− |
| | | | CAAGCCACAGGCTACCACTTTAATGCG | |
| | | | CTGACTTGTGAGGGCTGCAAGGGTTTC | |
| | | | TTCAG | |
| NR1I3 | ENST000004 | 258 | GAGTCTGTGACAGCCACCCCAACACGT | GRCh38/hg38: |
| | 28574.6 | | GACGTCATGGCCAGTAGGGAAGATGAG | chr1:161236459: |
| | | | CTGAGGAACTGTGTGGTATGTGGGGAC | 161236598:− |
| | | | CAAGCCACAGGCTACCACTTTAATGCG | |
| | | | CTGACTTGTGAGGGCTGCAAGGGTTTC | |
| | | | TTCAG | |
| NR1I3 | ENST000003 | 259 | GAGTCTGTGACAGCCACCCCAACACGT | GRCh38/hg38: |
| | 67985.7 | | GACGTCATGGCCAGTAGGGAAGATGAG | chr1:161236459: |
| | | | CTGAGGAACTGTGTGGTATGTGGGGAC | 161236598:− |
| | | | CAAGCCACAGGCTACCACTTTAATGCG | |
| | | | CTGACTTGTGAGGGCTGCAAGGGTTTC | |
| | | | TTCAG | |
| NR1I3 | ENST000006 | 260 | GAGTCTGTGACAGCCACCCCAACACGT | GRCh38/hg38: |
| | 28566.2 | | GACGTCATGGCCAGTAGGGAAGATGAG | chr1:161236459: |
| | | | CTGAGGAACTGTGTGGTATGTGGGGAC | 161236598:− |
| | | | CAAGCCACAGGCTACCACTTTAATGCG | |
| | | | CTGACTTGTGAGGGCTGCAAGGGTTTC | |
| | | | TTCAG | |
| NR1I3 | ENST000004 | 261 | GAGTCTGTGACAGCCACCCCAACACGT | GRCh38/hg38: |
| | 42691.6 | | GACGTCATGGCCAGTAGGGAAGATGAG | chr1:161236459: |
| | | | CTGAGGAACTGTGTGGTATGTGGGGAC | 161236598:− |
| | | | CAAGCCACAGGCTACCACTTTAATGCG | |
| | | | CTGACTTGTGAGGGCTGCAAGGGTTTC | |
| | | | TTCAG | |
| NT5C3A | ENST000004 | 262 | AAGATTGGATAACCAAGAAATGACTAA | GRCh38/hg38: |
| | 05342.5 | | TCAAGAGTCTGCCGTACATGTGAAAAT | chr7:33035934: |
| | | | G | 33035988:− |
| NT5C3A | ENST000004 | 263 | AAGATTGGATAACCAAGAAATGACTAA | GRCh38/hg38: |
| | 05342.5 | | TCAAGAGTCTGCCGTACATGTGAAAAT | chr7:33035934: |
| | | | G | 33035988:− |
| NUTM1 | ENST000006 | 264 | AATGCCTTGAGTTCCGTATTCTAGTTC | GRCh38/hg38: |
| | 14490.4 | | TGTGTGATCTGATCTTTACCTTCCCTT | chr15:34345857: |
| | | | CCTTGGATCCCTGTGCACCTACTGGAG | 34346035:+ |
| | | | CCAGGTTACTCTGGGTCCTGGACCTGA | |
| | | | CTGCCTCATTCTGGAGGCTTCCAGACA | |
| | | | GCCACAGTTAGTGCCCAAACCTGAGAG | |
| | | | GATGGCTTCAGATGGAG | |
| OTOF | ENST000003 | 265 | GAAGAAGGCCTGAACGACATACAGGAG | GRCh38/hg38: |
| | 38581.10 | | ATGATCAAAACGGAGAAGTCCTACCCT | chr2:26477649: |
| | | | GAGCGTCGCCTGCGGGGCGTCCTGGAG | 26477749:− |
| | | | GAGCTGAGCTGTGGCTGCTG | |
| OTOF | ENST000003 | 266 | GAAGAAGGCCTGAACGACATACAGGAG | GRCh38/hg38: |
| | 39598.7 | | ATGATCAAAACGGAGAAGTCCTACCCT | chr2:26477649: |
| | | | GAGCGTCGCCTGCGGGGCGTCCTGGAG | 26477749:− |
| | | | GAGCTGAGCTGTGGCTGCTG | |
| PDCD4 | ENST000003 | 267 | GGTATTTTCCCTAATTCTCCATGGTGC | GRCh38/hg38: |
| | 93104.6 | | TTCAATAGCATGTTATTATCATAAAAA | chr10:110876670: |
| | | | TGAACAGTTTTGTGGAATAGATGACCA | 110876753:+ |
| | | | AAT | |
| PDPK1 | ENST000005 | 268 | GGACCTTAAACCGGAAAACATTTTGTT | GRCh38/hg38: |
| | 66659.1 | | AAATGAAGATATGCACATCCAGATCAC | chr16:2566356: |
| | | | AGATTTTGGAACAGCAAAAGTCTTATC | 2566453:+ |
| | | | CCCAGAGAGCAAACAAG | |
| PHKB | ENST000005 | 269 | CTTAGCCTGCGACGCTTATGATTAGAG | GRCh38/hg38: |
| | 66037.6 | | CCAACAATTTGAAATGGCCTGCTCACC | chr16:47463899: |
| | | | TGATGCAGTCGTCTCTCCGTCTTCCGC | 47463993:+ |
| | | | TTTCTTAAGGTCTG | |
| PHKB | ENST000005 | 270 | TTTTAAAATTGCTATAGCTTAGCCTGC | GRCh38/hg38: |
| | 66044.5 | | GACGCTTATGATTAGAGCCAACAATTT | chr16:47463882: |
| | | | GAAATGGCCTGCTCACCTGATGCAGTC | 47463993:+ |
| | | | GTCTCTCCGTCTTCCGCTTTCTTAAGG | |
| | | | TCTG | |
| PIGA | ENST000003 | 271 | GTAATAGAGGACACATCTCTTAACTGG | GRCh38/hg38: |
| | 33590.5 | | GTTGCTCTAAGAACTGATGTCTAAACC | chrX:15331216: |
| | | | GTCTCAGCATGGCCTGTAGAGGAGGAG | 15331992:− |
| | | | CTGGGAATGGCCACCGTGCCTCAGCTA | |
| | | | CACTCTCTCGGGTTAGCCCTGGAAGTC | |
| | | | TTTACACATGTAGAACCCGTACCCATA | |
| | | | ATATATGCATGGTATCTGACTTTTTCT | |
| | | | ACCCAAATATGGGAGGCGTGGAAAGCC | |
| | | | ACATTTACCAGCTCTCTCAGTGCCTGA | |
| | | | TTGAAAGAGGGCATAAGGTTATAATTG | |
| | | | TCACCCATGCTTATGGAAATCGAAAAG | |
| | | | GCATCCGTTACCTCACCAGTGGCCTCA | |
| | | | AAGTCTATTACTTGCCTCTGAAAGTCA | |
| | | | TGTACAACCAGTCTACAGCCACGACCC | |
| | | | TCTTTCACAGTCTGCCATTGCTCAGGT | |
| | | | ACATATTTGTTCGGGAGAGAGTCACGA | |
| | | | TAATCCATTCACATAGTTCTTTTTCTG | |
| | | | CTATGGCCCATGATGCTCTCTTCCACG | |
| | | | CCAAGACAATGGGGCTTCAGACAGTCT | |
| | | | TCACGGACCATTCCCTTTTTGGATTTG | |
| | | | CTGATGTCAGCTCGGTGCTTACAAACA | |
| | | | AGCTTCTAACCGTGTCTCTTTGTGATA | |
| | | | CAAACCACATCATTTGTGTGTCTTATA | |
| | | | CTAGTAAGGAAAATACTGTACTAAGAG | |
| | | | CAGCACTGAATCCTGAAATAGTGTCCG | |
| | | | TCATTCCTAATGCTGTAGATCCTACTG | |
| | | | ACTTCACTCCAGACCCATTTAGAAGGC | |
| | | | ATGATAGTATAACTATTGTTGTTGTCA | |
| | | | GCAGACTTGTTTACAGAAAAG | |
| PIGA | ENST000006 | 272 | GTAATAGAGGACACATCTCTTAACTGG | GRCh38/hg38: |
| | 37626.1 | | GTTGCTCTAAGAACTGATGTCTAAACC | chrX:15331216: |
| | | | GTCTCAGCATGGCCTGTAGAGGAGGAG | 15331992:− |
| | | | CTGGGAATGGCCACCGTGCCTCAGCTA | |
| | | | CACTCTCTCGGGTTAGCCCTGGAAGTC | |
| | | | TTTACACATGTAGAACCCGTACCCATA | |
| | | | ATATATGCATGGTATCTGACTTTTTCT | |
| | | | ACCCAAATATGGGAGGCGTGGAAAGCC | |
| | | | ACATTTACCAGCTCTCTCAGTGCCTGA | |
| | | | TTGAAAGAGGGCATAAGGTTATAATTG | |
| | | | TCACCCATGCTTATGGAAATCGAAAAG | |
| | | | GCATCCGTTACCTCACCAGTGGCCTCA | |
| | | | AAGTCTATTACTTGCCTCTGAAAGTCA | |
| | | | TGTACAACCAGTCTACAGCCACGACCC | |
| | | | TCTTTCACAGTCTGCCATTGCTCAGGT | |
| | | | ACATATTTGTTCGGGAGAGAGTCACGA | |
| | | | TAATCCATTCACATAGTTCTTTTTCTG | |
| | | | CTATGGCCCATGATGCTCTCTTCCACG | |
| | | | CCAAGACAATGGGGCTTCAGACAGTCT | |
| | | | TCACGGACCATTCCCTTTTTGGATTTG | |
| | | | CTGATGTCAGCTCGGTGCTTACAAACA | |
| | | | AGCTTCTAACCGTGTCTCTTTGTGATA | |
| | | | CAAACCACATCATTTGTGTGTCTTATA | |
| | | | CTAGTAAGGAAAATACTGTACTAAGAG | |
| | | | CAGCACTGAATCCTGAAATAGTGTCCG | |
| | | | TCATTCCTAATGCTGTAGATCCTACTG | |
| | | | ACTTCACTCCAGACCCATTTAGAAGGC | |
| | | | ATGATAGTATAACTATTGTTGTTGTCA | |
| | | | GCAGACTTGTTTACAGAAAAG | |
| PLOD2 | ENST000004 | 273 | ATAAATTATTAGTCATAACTGTAGCAA | GRCh38/hg38: |
| | 94950.5 | | CAAAAGAAAGTGATGGATTCCATCGAT | chr3:146124138: |
| | | | TTATGCAGTCAGCCAAATATTTCAATT | 146124229:− |
| | | | ATACTGTGAAG | |
| POLR2F | ENST000004 | 274 | ttttagtagtgacggggttcaccgtgt | GRCh38/hg38: |
| | 92213.5 | | tagccaggatggtctcgatctcctgcc | chr22:37958374: |
| | | | ttgtgatccgcccgcctcggcctccca | 37958471:+ |
| | | | aagtgctgggattacag | |
| PPP6C | ENST000004 | 275 | ttttgggctatgatgcattaggcttct | GRCh38/hg38: |
| | 56642.1 | | gcgagtatttatatacagattttgaac | chr9:125171909: |
| | | | atgtttttattgccaagactacagttg | 125172001:− |
| | | | ctgggtcaaatg | |
| PRKN | ENST000004 | 276 | AATTGTGACCTGGATCAGCAGAGCATT | GRCh38/hg38: |
| | 79615.5 | | GTTCACATTGTGCAGAGACCGTGGAGA | chr6:162262525: |
| | | | AAAGGTCAAGAAATGAATGCAACTGGA | 162262765:− |
| | | | GGCGACGACCCCAGAAACGCGGCGGGA | |
| | | | GGCTGTGAGCGGGAGCCCCAGAGCTTG | |
| | | | ACTCGGGTGGACCTCAGCAGCTCAGTC | |
| | | | CTCCCAGGAGACTCTGTGGGGCTGGCT | |
| | | | GTCATTCTGCACACTGACAGCAGGAAG | |
| | | | GACTCACCACCAGCTGGAAGTCCAG | |
| PRUNE1 | ENST000003 | 277 | GACTGACCACTGAGCAGATGCTGAGAA | GRCh38/hg38: |
| | 68935.1 | | AAGACCAGAAGACTATCTATAGACAAG | chr1:151027233: |
| | | | GCGTCAAGGTGGCCATTAGTGCAATAT | 151027327:+ |
| | | | ATATGGATTTGGAG | |
| PSMA6 | ENST000006 | 278 | GACAAATTATTGGATTCCAGCACAGTG | GRCh38/hg38: |
| | 22405.4 | | ACTCACTTATTCAAGATAACTGAAAAC | chr14:35308914: |
| | | | ATTGGTTGTGTGATGACCGGAATGACA | 35308995:+ |
| | | | G | |
| PSMC3I | ENST000005 | 279 | AGCTCAAGGAATTATCTAGTGCCCTGA | GRCh38/hg38: |
| P | 90760.5 | | CCACACCAGAGATGCAGAAAGAAATCC | chr17:42573478: |
| | | | AGGAGTTAAAGAAGGAATGCGCTGGCT | 42573623:− |
| | | | ACAGAGAGAGATTGAAGAACATTAAAG | |
| | | | CAGCTACCAATCATGTGACTCCAGAAG | |
| | | | AGAAAGAGCAG | |
| PTPN1 | ENST000005 | 280 | TTGACCATAGTCGGATTAAACTACATC | GRCh38/hg38: |
| | 41713.5 | | AAGAAGATAATGACTATATCAACGCTA | chr20:50564969: |
| | | | GTTTGATAAAAATGGAAGAAGCCCAAA | 50565069:+ |
| | | | GGAGTTACATTCTTACCCAG | |
| RAB11B | ENST000006 | 281 | GTACTACCGTGGTGCAGTGGGCGCCCT | GRCh38/hg38: |
| | 01897.1 | | GCTGGTGTACGACATCGCCAAGCACCT | chr19:8402086: |
| | | | GACCTATGAGAACGTGGAGCGCTGGCT | 8402279:+ |
| | | | GAAGGAGCTGCGGGACCACGCAGACAG | |
| | | | CAACATCGTCATCATGCTGGTGGGCAA | |
| | | | CAAGAGTGACCTGCGCCACCTGCGGGC | |
| | | | TGTGCCCACTGACGAGGCCCGCGCCTT | |
| | | | CGCAG | |
| RBPJ | ENST000005 | 282 | TCTCCACGTACGTCCCTCAAAGCGCGT | GRCh38/hg38: |
| | 12671.5 | | CCTAAAACCCGGATAACCGGAGCGCTC | chr4:26320700: |
| | | | CCCATGGACCACACGGAGGGCTCGCCC | 26320815:+ |
| | | | GCGGAGGAGCCGCCTGCGCATGCTCCA | |
| | | | TCGCCTGG | |
| RBPJ | ENST000003 | 283 | TCTCCACGTACGTCCCTCAAAGCGCGT | GRCh38/hg38: |
| | 42295.5 | | CCTAAAACCCGGATAACCGGAGCGCTC | chr4:26320700: |
| | | | CCCATGGACCACACGGAGGGCTCGCCC | 26320815:+ |
| | | | GCGGAGGAGCCGCCTGCGCATGCTCCA | |
| | | | TCGCCTGG | |
| RNPS1 | ENST000003 | 284 | GCTGCTCTTTGGCGTAAATTGCAATCG | GRCh38/hg38: |
| | 01730.12 | | ATTAGGGATCGTTTCTCAGAATCAAGT | chr16:2264573: |
| | | | TAGAAGTGAGAGTTCAGATAAGTGAGG | 2264760:− |
| | | | CCGCCATTGCTGCTTTGAACACCTCAG | |
| | | | AAGGGGAGAATGGATTTATCAGGAGTG | |
| | | | AAAAAGAAGAGCTTGCTAGGAGTCAAA | |
| | | | GAAAATAATAAAAAGTCCAGCACTAG | |
| RNPS1 | ENST000003 | 285 | GCTGCTCTTTGGCGTAAATTGCAATCG | GRCh38/hg38: |
| | 20225.9 | | ATTAGGGATCGTTTCTCAGAATCAAGT | chr16:2264573: |
| | | | TAGAAGTGAGAGTTCAGATAAGTGAGG | 2264760:− |
| | | | CCGCCATTGCTGCTTTGAACACCTCAG | |
| | | | AAGGGGAGAATGGATTTATCAGGAGTG | |
| | | | AAAAAGAAGAGCTTGCTAGGAGTCAAA | |
| | | | GAAAATAATAAAAAGTCCAGCACTAG | |
| RNPS1 | ENST000005 | 286 | GCTGCTCTTTGGCGTAAATTGCAATCG | GRCh38/hg38: |
| | 64311.5 | | ATTAGGGATCGTTTCTCAGAATCAAGT | chr16:2264573: |
| | | | TAGAAGTGAGAGTTCAGATAAGTGAGG | 2264760:− |
| | | | CCGCCATTGCTGCTTTGAACACCTCAG | |
| | | | AAGGGGAGAATGGATTTATCAGGAGTG | |
| | | | AAAAAGAAGAGCTTGCTAGGAGTCAAA | |
| | | | GAAAATAATAAAAAGTCCAGCACTAG | |
| RNPS1 | ENST000005 | 287 | GCTGCTCTTTGGCGTAAATTGCAATCG | GRCh38/hg38: |
| | 69598.6 | | ATTAGGGATCGTTTCTCAGAATCAAGT | chr16:2264573: |
| | | | TAGAAGTGAGAGTTCAGATAAGTGAGG | 2264760:− |
| | | | CCGCCATTGCTGCTTTGAACACCTCAG | |
| | | | AAGGGGAGAATGGATTTATCAGGAGTG | |
| | | | AAAAAGAAGAGCTTGCTAGGAGTCAAA | |
| | | | GAAAATAATAAAAAGTCCAGCACTAG | |
| RPL5 | ENST000006 | 288 | AGGGTAAAACTGATTATTATGCTCGGA | GRCh38/hg38: |
| | 45300.1 | | AACGCTTGGTGATACAAGATAAAAATA | chr1:92833545: |
| | | | AATACAACACACCCAAATACAGGATGA | 92833660:+ |
| | | | TAGTTCGTGTGACAAACAGAGATATCA | |
| | | | TTTGTCAG | |
| RPS20 | ENST000005 | 289 | TGTGTGCTGACTTGATAAGAGGCGCAA | GRCh38/hg38: |
| | 20627.1 | | AAGAAAAGAATCTCAAAGTGAAAGGAC | chr8:56073695: |
| | | | CAGTTCGAATGCCTACCAAG | 56073768:− |
| SECISB | ENST000005 | 290 | GCAGAAAATATATACTGAAGACATGGC | GRCh38/hg38: |
| P2 | 34113.6 | | CTTTGGAGCTTCAACTTTTCCACCTCA | chr9:89325427: |
| | | | GTATTTATCTTCTGAGATAACTCTTCA | 89325676:+ |
| | | | TCCATATGCCTATTCTCCTTATACCCT | |
| | | | TGACTCCACACAGAATGTTTACTCAGT | |
| | | | GCCTGGCTCCCAGTATCTTTATAACCA | |
| | | | ACCCAGTTGTTACCGAGGTTTTCAAAC | |
| | | | AGTGAAGCATCGAAATGAGAACACATG | |
| | | | CCCTCTCCCACAAGAAATGAAAGCTCT | |
| | | | GTTTAAG | |
| SELENB | ENST000004 | 291 | GTCATGTGTCTCCAGCTCTTCCCAGCA | GRCh38/hg38: |
| P1 | 26705.6 | | CAACCTCACCCTCCTCAGGGCTCTGAG | chr1:151369713: |
| | | | GGGGCGGAGAGGACAGGCCAGAGCGAT | 151369978:− |
| | | | GAGGCTGGAGTGGGGACCTAGGCCAGC | |
| | | | CGCACTGCCGTGGCCCGCTGGGATGTG | |
| | | | TGCTGCAGAACGTGCGGAGGGAGCCTT | |
| | | | CACCCTCCAGAGCGTGGCCCAGCCAAT | |
| | | | GCGCCCCATTGCTTCCACAGCTACGAA | |
| | | | ATGTGGGAATTGTGGACCCGGCTACTC | |
| | | | CACCCCTCTGGAGGCCATGAAAG | |
| SELENB | ENST000004 | 292 | GTCATGTGTCTCCAGCTCTTCCCAGCA | GRCh38/hg38: |
| P1 | 23070.5 | | CAACCTCACCCTCCTCAGGGCTCTGAG | chr1:151369713: |
| | | | GGGGCGGAGAGGACAGGCCAGAGCGAT | 151369978:− |
| | | | GAGGCTGGAGTGGGGACCTAGGCCAGC | |
| | | | CGCACTGCCGTGGCCCGCTGGGATGTG | |
| | | | TGCTGCAGAACGTGCGGAGGGAGCCTT | |
| | | | CACCCTCCAGAGCGTGGCCCAGCCAAT | |
| | | | GCGCCCCATTGCTTCCACAGCTACGAA | |
| | | | ATGTGGGAATTGTGGACCCGGCTACTC | |
| | | | CACCCCTCTGGAGGCCATGAAAG | |
| SEPT11 | ENST000005 | 293 | TCTACATCGGTAAACTCTGCAAAACTC | GRCh38/hg38: |
| | 04637.5 | | CAGCAGTTACAGAGCCTGTGCTAGGAG | chr4:76995781: |
| | | | CTACAGGGTGAAGAGGGGGAAGAAGAC | 76995938:+ |
| | | | TCAAGAAACCTGTAAAACTAATGGAGG | |
| | | | AGAGGAAACCAGCTCATGTGCTGAGAA | |
| | | | GTTTTAAATATGCTGCATTTATG | |
| SIRT2 | ENST000004 | 294 | GACTCAGATTCAGACTCTGAGGGAGGA | GRCh38/hg38: |
| | 23526.5 | | GCCGCTGGTGGAGAAGCAGACA | chr19:38893819: |
| | | | | 38893867:− |
| SIRT2 | ENST000003 | 295 | GACTCAGATTCAGACTCTGAGGGAGGA | GRCh38/hg38: |
| | 92081.6 | | GCCGCTGGTGGAGAAGCAGACA | chr19:38893819: |
| | | | | 38893867:− |
| SIRT2 | ENST000003 | 296 | GACTCAGATTCAGACTCTGAGGGAGGA | GRCh38/hg38: |
| | 58931.9 | | GCCGCTGGTGGAGAAGCAGACA | chr19:38893819: |
| | | | | 38893867:− |
| SIRT2 | ENST000004 | 297 | GACTCAGATTCAGACTCTGAGGGAGGA | GRCh38/hg38: |
| | 51193.5 | | GCCGCTGGTGGAGAAGCAGACA | chr19:38893819: |
| | | | | 38893867:− |
| SIRT2 | ENST000004 | 298 | GACTCAGATTCAGACTCTGAGGGAGGA | GRCh38/hg38: |
| | 20440.5 | | GCCGCTGGTGGAGAAGCAGACA | chr19:38893819: |
| | | | | 38893867:− |
| SLC25A | ENST000004 | 299 | CTGCTGCATTTTTTATCACCTATGAAT | GRCh38/hg38: |
| 26 | 64350.6 | | ATGTGAAGTGGTTTTTGCATGCTGATT | chr3:66243203: |
| | | | CATCTTCATATTTGACACCTATGAAAC | 66243312:+ |
| | | | ATATGTTGGCTGCCTCTGCTGGAGAAG | |
| | | | TG | |
| SLC25A | ENST000003 | 300 | CTGCTGCATTTTTTATCACCTATGAAT | GRCh38/hg38: |
| 26 | 36733.10 | | ATGTGAAGTGGTTTTTGCATGCTGATT | chr3:66243203: |
| | | | CATCTTCATATTTGACACCTATGAAAC | 66243312:+ |
| | | | ATATGTTGGCTGCCTCTGCTGGAGAAG | |
| | | | TG | |
| SMARCE | ENST000004 | 301 | TGGCTATACAGGTGGAGCTGAACAATT | GRCh38/hg38: |
| 1 | 78349.7 | | GAGATTCTGACCTCAAAGAGCTAACCA | chr17:40644385: |
| | | | TGTACTTCAGCTTTGGAAATG | 40644459:− |
| SMC1A | ENST000003 | 302 | CCCAGCGTCCTCTCTCGCCTCGCATTG | GRCh38/hg38: |
| | 75340.10 | | GTACACTCCAACTCCTTTCTACTCTTC | chrX:53421895: |
| | | | TCTGGAGGCGGCACTTTTGAATTTCAG | 53422040:− |
| | | | ACCCAGCGCTCCAGTCTTTAGAATGCT | |
| | | | TGAGGTGTCGATCCCCACCCCCCACCG | |
| | | | CTATGTCAGAG | |
| SMG1 | ENST000005 | 303 | ATTGACTTGATGCAAAACATCACAAAG | GRCh38/hg38: |
| | 32700.6 | | GCTCCATATTATACAGTATGCGATTTT | chr16:18899987: |
| | | | TGAG | 18900044:− |
| SPACA7 | ENST000004 | 304 | agtctcactctgttgccagactggagt | GRCh38/hg38: |
| | 14180.5 | | gcagaggcgcctctcgatttcttgacc | chr13:112382278: |
| | | | tcatggtccgcccgcctcagcctccca | 112382507:+ |
| | | | aagtgctgggactacaggcatgagcca | |
| | | | ccgtgcctggccaataacaccttaatc | |
| | | | ttcaggtgcaggctgtgaagatgggaa | |
| | | | aaggctgtcaatgctctggcttcttcc | |
| | | | cactgacaggggacgtagtgggaatgg | |
| | | | gaatgaaccccaag | |
| SPRED1 | ENST000005 | 305 | TAATAGTTATGCACGAGTGCGAGCTGT | GRCh38/hg38: |
| | 61317.1 | | GGTGATGACCCGAGATGACTCAAGTGG | chr15:38299373: |
| | | | TGGATGGTTACCACTTGGAGGGAGTGG | 38299547:+ |
| | | | ACTAAGCAGCGTCACTGTCTTCAAAGT | |
| | | | CCCTCATCAGGAAGAGAATGGCTGTGC | |
| | | | TGACTTTTTTATCCGTGGAGAGCGACT | |
| | | | CAGGGACAAAATG | |
| SRP54 | ENST000005 | 306 | GTCTGCTATTGATCTTGAAGAGATGGC | GRCh38/hg38: |
| | 55557.5 | | ATCTGGTCTTAACAAAAGAAAAATGAT | chr14:35000936: |
| | | | TCAGCATGCTGTATTTAAAGAACTTGT | 35001020:+ |
| | | | GAAG | |
| SRPK2 | ENST000004 | 307 | AAATCAAGCAGAAGATTGAGCTGCTGA | GRCh38/hg38: |
| | 60391.5 | | TGTCAGTTAACTCTGAGAAGTCGTCCT | chr7:105268806: |
| | | | CTTCAGAAAG | 105268869:− |
| STK36 | ENST000004 | 308 | AGAAGGAGCTGAGGAATTTGCAACGAG | GRCh38/hg38: |
| | 55724.5 | | AGATTGAAATAATGCGGGGTCTGCGGC | chr2:218673665: |
| | | | ATCCCAACATTGTGCATATGCTTGACA | 218673765:+ |
| | | | GCTTTGAAACTGATAAAGAG | |
| STRADA | ENST000006 | 309 | ACCAATGATGCGAGCTCAGAGTCAATA | GRCh38/hg38: |
| | 38718.1 | | GCATCCTTCTCTAAACAGGAGGTCATG | chr17:63714006: |
| | | | AGTAGCTTTCTGCCAGAGGGAGGGTGT | 63714108:− |
| | | | TACGAGCTGCTCACTGTGATAG | |
| STRADA | ENST000005 | 310 | ACCAATGATGCGAGCTCAGAGTCAATA | GRCh38/hg38: |
| | 80338.5 | | GCATCCTTCTCTAAACAGGAGGTCATG | chr17:63714006: |
| | | | AGTAGCTTTCTGCCAGAGGGAGGGTGT | 63714108:− |
| | | | TACGAGCTGCTCACTGTGATAG | |
| STRADA | ENST000005 | 311 | ACCAATGATGCGAGCTCAGAGTCAATA | GRCh38/hg38: |
| | 79340.5 | | GCATCCTTCTCTAAACAGGAGGTCATG | chr17:63714006: |
| | | | AGTAGCTTTCTGCCAGAGGGAGGGTGT | 63714108:− |
| | | | TACGAGCTGCTCACTGTGATAG | |
| STRADA | ENST000006 | 312 | ACCAATGATGCGAGCTCAGAGTCAATA | GRCh38/hg38: |
| | 40979.1 | | GCATCCTTCTCTAAACAGGAGGTCATG | chr17:63714006: |
| | | | AGTAGCTTTCTGCCAGAGGGAGGGTGT | 63714108:− |
| | | | TACGAGCTGCTCACTGTGATAG | |
| STRADA | ENST000005 | 313 | ACCAATGATGCGAGCTCAGAGTCAATA | GRCh38/hg38: |
| | 82030.5 | | GCATCCTTCTCTAAACAGGAGGTCATG | chr17:63714006: |
| | | | AGTAGCTTTCTGCCAGAGGGAGGGTGT | 63714108:− |
| | | | TACGAGCTGCTCACTGTGATAG | |
| STRADA | ENST000006 | 314 | ACCAATGATGCGAGCTCAGAGTCAATA | GRCh38/hg38: |
| | 38276.1 | | GCATCCTTCTCTAAACAGGAGGTCATG | chr17:63714006: |
| | | | AGTAGCTTTCTGCCAGAGGGAGGGTGT | 63714108:− |
| | | | TACGAGCTGCTCACTGTGATAG | |
| STRADA | ENST000003 | 315 | ACCAATGATGCGAGCTCAGAGTCAATA | GRCh38/hg38: |
| | 75840.9 | | GCATCCTTCTCTAAACAGGAGGTCATG | chr17:63714006: |
| | | | AGTAGCTTTCTGCCAGAGGGAGGGTGT | 63714108:− |
| | | | TACGAGCTGCTCACTGTGATAG | |
| STRADA | ENST000006 | 316 | ACCAATGATGCGAGCTCAGAGTCAATA | GRCh38/hg38: |
| | 38702.1 | | GCATCCTTCTCTAAACAGGAGGTCATG | chr17:63714006: |
| | | | AGTAGCTTTCTGCCAGAGGGAGGGTGT | 63714108:− |
| | | | TACGAGCTGCTCACTGTGATAG | |
| STRADA | ENST000002 | 317 | ACCAATGATGCGAGCTCAGAGTCAATA | GRCh38/hg38: |
| | 45865.10 | | GCATCCTTCTCTAAACAGGAGGTCATG | chr17:63714006: |
| | | | AGTAGCTTTCTGCCAGAGGGAGGGTGT | 63714108:− |
| | | | TACGAGCTGCTCACTGTGATAG | |
| SUMO1 | ENST000004 | 318 | CAGTGAGATTCACTTCAAAGTGAAAAT | GRCh38/hg38: |
| | 09205.5 | | GACAACACATCTCAAGAAACTCAAAGA | chr2:202214357: |
| | | | ATCATACTGTCAAAGACAG | 202214429:− |
| TBL1XR | ENST000004 | 319 | GGTTATATCCTGTGTTGTGACCTCATG | GRCh38/hg38: |
| 1 | 22442.5 | | GTTTAAGTGGGAATAAAGATGAGTATA | chr3:177064920: |
| | | | AGCAGTGATGAGGTCAACTTCTTGGTA | 177065022:− |
| | | | TATAGATACTTGCAAGAGTCAG | |
| TBL1XR | ENST000004 | 320 | GGTTATATCCTGTGTTGTGACCTCATG | GRCh38/hg38: |
| 1 | 50267.5 | | GTTTAAGTGGGAATAAAGATGAGTATA | chr3:177064920: |
| | | | AGCAGTGATGAGGTCAACTTCTTGGTA | 177065022:− |
| | | | TATAGATACTTGCAAGAGTCAG | |
| TBL1XR | ENST000006 | 321 | GGTTATATCCTGTGTTGTGACCTCATG | GRCh38/hg38: |
| 1 | 35794.1 | | GTTTAAGTGGGAATAAAGATGAGTATA | chr3:177064920: |
| | | | AGCAGTGATGAGGTCAACTTCTTGGTA | 177065022:− |
| | | | TATAGATACTTGCAAGAGTCAG | |
| TBL1XR | ENST000004 | 322 | GGTTATATCCTGTGTTGTGACCTCATG | GRCh38/hg38: |
| 1 | 43315.5 | | GTTTAAGTGGGAATAAAGATGAGTATA | chr3:177064920: |
| | | | AGCAGTGATGAGGTCAACTTCTTGGTA | 177065022:− |
| | | | TATAGATACTTGCAAGAGTCAG | |
| TLR8 | ENST000003 | 323 | GTTCTCTTGACACTTCAGTGTTAGGGA | GRCh38/hg38: |
| | 11912.5 | | ACATCAGCAAGACCCATCCCAGGAGAC | chrX:12910306: |
| | | | CTTGAAGGAAGCCTTTGAAAGGGAGAA | 12910442:+ |
| | | | TGAAGGAGTCATCTTTGCAAAATAGCT | |
| | | | CCTGCAGCCTGGGAAAGGAGACTAAAA | |
| | | | AG | |
| TXNRD2 | ENST000004 | 324 | GGCAGAGTGGAGGGCAGCAAACAGGAG | GRCh38/hg38: |
| | 62843.2 | | AATGAGCAACCTACCTAGGTCCTTGGG | chr22:19880856: |
| | | | ATGCCCCTCAGGAGGACGAGCTCTAGG | 19880945:− |
| | | | GGGAATGCT | |
| UBE3A | ENST000006 | 325 | AGAGTTACAGTGGAGGTAAAAGGAGTG | GRCh38/hg38: |
| | 50110.1 | | GCTTGCAGGATGGAGAAGCTGCACCAG | chr15:25408620: |
| | | | TGTTATTGGAA | 25408684:− |
| UBE3A | ENST000003 | 326 | AGAGTTACAGTGGAGGTAAAAGGAGTG | GRCh38/hg38: |
| | 97954.6 | | GCTTGCAGGATGGAGAAGCTGCACCAG | chr15:25408620: |
| | | | TGTTATTGGAA | 25408684:− |
| UFM1 | ENST000003 | 327 | GTCGAAGGTTTCCTTTAAGATCACGCT | GRCh38/hg38: |
| | 79649.5 | | GACGTCGGACCCACGGCTGCCGTACAA | chr13:38349999: |
| | | | AGTGTGAGTAGCTCGGCCGAGATGGGC | 38350227:+ |
| | | | CTTTTGGGGCCGGACAAGACGGGGCTG | |
| | | | GGTTGGGGATGATCCGAGCTTTTCCAA | |
| | | | CAACTACCCCACGCAGTCTTCATCTCT | |
| | | | TCACTTCATCTACTTTCCTGGCTCGCG | |
| | | | CCCTTCCAGGAGCCTTTCCCACCGGAG | |
| | | | CCTGCGAGGAGAG | |
| WAC | ENST000004 | 328 | GCACTTAAGTATTCATCGAAGAGTCAC | GRCh38/hg38: |
| | 20266.5 | | CCCAGTAGCGGTGATCACAGACATGAA | chr10:28535562: |
| | | | AAGATGCGAGACGCCGGAGATCCTTCA | 28535757:+ |
| | | | CCACCAAATAAAATGTTGCGGAGATCT | |
| | | | GATAGTCCTGAAAACAAATACAGTGAC | |
| | | | AGCACAGGTCACAGTAAGGCCAAAAAT | |
| | | | GTGCATACTCACAGAGTTAGAGAGAGG | |
| | | | GATGGTG | |
| WDR81 | ENST000003 | 329 | GTGCTGGCGGGCGCAGAGGCCTCCCAG | GRCh38/hg38: |
| | 09182.9 | | GAGGAGAGCAAGGACCTGGCAGGGGCT | chr17:1727990: |
| | | | GCTGAGGAGGAGGAGAGCGGGCTGCCC | 1728626:+ |
| | | | GGGGCCGGGCCTGGCTCCTGTGCTTTT | |
| | | | GGGGAGGAGATTCCCATGGATGGGGAG | |
| | | | CCTCCTGCCTCCTCGGGCCTGGGGCTC | |
| | | | CCAGACTACACGTCTGGCGTCAGCTTC | |
| | | | CACGACCAGGCTGACCTCCCTGAGACA | |
| | | | GAGGACTTCCAAGCCGGGCTCTATGTG | |
| | | | ACTGAGTCTCCCCAGCCCCAGGAGGCT | |
| | | | GAGGCTGTGAGCCTGGGCCGGCTGAGT | |
| | | | GACAAGAGCAGCACCAGCGAGACCTCC | |
| | | | CTGGGTGAGGAGCGGGCTCCAGACGAG | |
| | | | GGGGGTGCCCCCGTGGACAAGAGCAGC | |
| | | | CTTCGATCAGGTGACAGCAGCCAGGAC | |
| | | | TTGAAGCAAAGCGAGGGCTCCgaggag | |
| | | | gaagaggaggaggaggacagctgcgtg | |
| | | | gtgctagaggaggaggagggggagcag | |
| | | | gaggaggTCACCGGGGCATCTGAGCTC | |
| | | | ACTCTGTCTGACACGGTGCTGTCCATG | |
| | | | GAGACGGTTGTGGCCGGCGGCAGTGGG | |
| | | | GGAGATGGAGAAGAAGAGGAGGAGGCA | |
| | | | CTGCCTGAGCAGTCAGAAGGCAAAGAA | |
| | | | CAGAAGATCCTCCTTG | |
| YME1L1 | ENST000003 | 330 | TACTGGCTAACAAACTGAAGCAGCTGC | GRCh38/hg38: |
| | 96296.7 | | TTGTTATTGGGCATCAGTTATGTACCA | chr10:27153227: |
| | | | G | 27153281:− |
| ZMYND1 | ENST000004 | 331 | GTGGAACCAGCAGCATGAGAACCTGGA | GRCh38/hg38: |
| 0 | 42887.1 | | GAAGCTGAACATGCAAGCCATCCTCGA | chr3:50345124: |
| | | | TGCCACAGTCAGCCAGGGCGAGCCCAT | 50345232:− |
| | | | TCAGGAGCTGCTGGTCACCCATGGGAA | |
| | | | G | |

[0091] ACIN1

[0092] In some cases, the target peptide sequence is a portion of ACIN1 (apoptotic chromatin condensation inducer 1) protein. In some cases, the therapeutic agent increases level of a first processed mRNA encoding a protein having a sequence SEQ ID NO: 8096, and decreases level of a second processed mRNA encoding a protein having a sequence SEQ ID NO: 332. In some cases, the targeted region of the pre-mRNA is at most about 1500 nucleotides, about 1000 nucleotides, about 800 nucleotides, about 700 nucleotides, about 600 nucleotides, about 500 nucleotides, about 400 nucleotides, about 300 nucleotides, about 200 nucleotides, about 100 nucleotides, about 80 nucleotides, about 70 nucleotides, about 60 nucleotides, about 50 nucleotides upstream of SEQ ID NO: 130. In some cases, the targeted region of the pre-mRNA is at least about 1500 nucleotides, about 1000 nucleotides, about 800 nucleotides, about 700 nucleotides, about 600 nucleotides, about 500 nucleotides, about 400 nucleotides, about 300 nucleotides, about 200 nucleotides, about 100 nucleotides, about 80 nucleotides, about 70 nucleotides, about 60 nucleotides, about 50 nucleotides upstream of SEQ ID NO: 130. In some cases, the targeted region of the pre-mRNA is at most about 1500 nucleotides, about 1000 nucleotides, about 800 nucleotides, about 700 nucleotides, about 600 nucleotides, about 500 nucleotides, about 400 nucleotides, about 300 nucleotides, about 200 nucleotides, about 100 nucleotides, about 80 nucleotides, about 70 nucleotides, about 60 nucleotides, about 50 nucleotides upstream of genomic site GRCh38/hg38: chr14 23071186. In some cases, the targeted region of the pre-mRNA is at least about 1500 nucleotides, about 1000 nucleotides, about 800 nucleotides, about 700 nucleotides, about 600 nucleotides, about 500 nucleotides, about 400 nucleotides, about 300 nucleotides, about 200 nucleotides, about 100 nucleotides, about 80 nucleotides, about 70 nucleotides, about 60 nucleotides, about 50 nucleotides upstream of genomic site GRCh38/hg38: chr14 23071186. In some cases, the targeted region of the pre-mRNA is at most about 1500 nucleotides, about 1000 nucleotides, about 800 nucleotides, about 700 nucleotides, about 600 nucleotides, about 500 nucleotides, about 400 nucleotides, about 300 nucleotides, about 200 nucleotides, about 100 nucleotides, about 80 nucleotides, about 70 nucleotides, about 60 nucleotides, about 50 nucleotides downstream of SEQ ID NO: 130. In some cases, the targeted region of the pre-mRNA is at least about 1500 nucleotides, about 1000 nucleotides, about 800 nucleotides, about 700 nucleotides, about 600 nucleotides, about 500 nucleotides, about 400 nucleotides, about 300 nucleotides, about 200 nucleotides, about 100 nucleotides, about 80 nucleotides, about 70 nucleotides, about 60 nucleotides, about 50 nucleotides downstream of SEQ ID NO: 130. In some cases, the targeted region of the pre-mRNA is at most about 1500 nucleotides, about 1000 nucleotides, about 800 nucleotides, about 700 nucleotides, about 600 nucleotides, about 500 nucleotides, about 400 nucleotides, about 300 nucleotides, about 200 nucleotides, about 100 nucleotides, about 80 nucleotides, about 70 nucleotides, about 60 nucleotides, about 50 nucleotides downstream of genomic site GRCh38/hg38: chr14 23071125. In some cases. the targeted region of the pre-mRNA is at least about 1500 nucleotides, about 1000 nucleotides, about 800 nucleotides, about 700 nucleotides, about 600 nucleotides, about 500 nucleotides, about 400 nucleotides, about 300 nucleotides, about 200 nucleotides, about 100 nucleotides, about 80 nucleotides, about 70 nucleotides, about 60 nucleotides, about 50 nucleotides downstream of genomic site GRCh38/hg38: chr14 23071125. In some cases, the targeted region of the pre-mRNA is within a sequence SEQ ID NO: 130. In some cases, the targeted region of the pre-mRNA is within a sequence between a pair of genomic sites GRCh38/hg38: chr14 23071186, and GRCh38/hg38: chr14 23071125. In some cases, the therapeutic agent is an antisense oligomer complementary to a sequence with at least about 80%, 85%, 90%, 95%, 96%, 97%, 98%, 99% or 100% sequence identity to SEQ ID NO:130. In some cases, the therapeutic agent is an antisense oligomer complementary to a sequence with 100% sequence identity to SEQ ID NO:130. In some cases, the therapeutic agent is an antisense oligomer that has a sequence with at least about 80%, 85%, 90%, 95%, 96%, 97%, 98%, 99% or 100% sequence identity to a sequence selected from the group consisting of SEQ ID NOs: 534-584. In some cases, the therapeutic agent is an antisense oligomer that has a sequence selected from the group consisting of SEQ ID NOs: 534-584. In some cases, the target peptide sequence is a portion of ACIN1 protein, and the method treats a disease or the condition that comprises Intellectual Disability; or Colorectal Cancer.

[0093] ACTN1

[0094] In some cases, the target peptide sequence is a portion of ACTN1 protein. In some cases, the therapeutic agent increases level of a first processed mRNA encoding a protein having a sequence SEQ ID NO: 8097, and decreases level of a second processed mRNA encoding a protein having a sequence SEQ ID NO: 333. In some cases, the targeted region of the pre-mRNA is at most about 1500 nucleotides, about 1000 nucleotides, about 800 nucleotides, about 700 nucleotides, about 600 nucleotides, about 500 nucleotides, about 400 nucleotides, about 300 nucleotides, about 200 nucleotides, about 100 nucleotides, about 80 nucleotides, about 70 nucleotides, about 60 nucleotides, about 50 nucleotides upstream of SEQ ID NO: 131. In some cases, the targeted region of the pre-mRNA is at least about 1500 nucleotides, about 1000 nucleotides, about 800 nucleotides, about 700 nucleotides, about 600 nucleotides, about 500 nucleotides, about 400 nucleotides, about 300 nucleotides, about 200 nucleotides, about 100 nucleotides, about 80 nucleotides, about 70 nucleotides, about 60 nucleotides, about 50 nucleotides upstream of SEQ ID NO: 131. In some cases, the targeted region of the pre-mRNA is at most about 1500 nucleotides, about 1000 nucleotides, about 800 nucleotides, about 700 nucleotides, about 600 nucleotides, about 500 nucleotides, about 400 nucleotides, about 300 nucleotides, about 200 nucleotides, about 100 nucleotides, about 80 nucleotides, about 70 nucleotides, about 60 nucleotides, about 50 nucleotides upstream of genomic site GRCh38/hg38: chr14 68925672. In some cases, the targeted region of the pre-mRNA is at least about 1500 nucleotides, about 1000 nucleotides, about 800 nucleotides, about 700 nucleotides, about 600 nucleotides, about 500 nucleotides, about 400 nucleotides, about 300 nucleotides, about 200 nucleotides, about 100 nucleotides, about 80 nucleotides, about 70 nucleotides, about 60 nucleotides, about 50 nucleotides upstream of genomic site GRCh38/hg38: chr14 68925672. In some cases, the targeted region of the pre-mRNA is at most about 1500 nucleotides, about 1000 nucleotides, about 800 nucleotides, about 700 nucleotides, about 600 nucleotides, about 500 nucleotides, about 400 nucleotides, about 300 nucleotides, about 200 nucleotides, about 100 nucleotides, about 80 nucleotides, about 70 nucleotides, about 60 nucleotides, about 50 nucleotides downstream of SEQ ID NO: 131. In some cases, the targeted region of the pre-mRNA is at least about 1500 nucleotides, about 1000 nucleotides, about 800 nucleotides, about 700 nucleotides, about 600 nucleotides, about 500 nucleotides, about 400 nucleotides, about 300 nucleotides, about 200 nucleotides, about 100 nucleotides, about 80 nucleotides, about 70 nucleotides, about 60 nucleotides, about 50 nucleotides downstream of SEQ ID NO: 131. In some cases, the targeted region of the pre-mRNA is at most about 1500 nucleotides, about 1000 nucleotides, about 800 nucleotides, about 700 nucleotides, about 600 nucleotides, about 500 nucleotides, about 400 nucleotides, about 300 nucleotides, about 200 nucleotides, about 100 nucleotides, about 80 nucleotides, about 70 nucleotides, about 60 nucleotides, about 50 nucleotides downstream of genomic site GRCh38/hg38: chr14 68925558. In some cases. the targeted region of the pre-mRNA is at least about 1500 nucleotides, about 1000 nucleotides, about 800 nucleotides, about 700 nucleotides, about 600 nucleotides, about 500 nucleotides, about 400 nucleotides, about 300 nucleotides, about 200 nucleotides, about 100 nucleotides, about 80 nucleotides, about 70 nucleotides, about 60 nucleotides, about 50 nucleotides downstream of genomic site GRCh38/hg38: chr14 68925558. In some cases, the targeted region of the pre-mRNA is within a sequence SEQ ID NO: 131. In some cases, the targeted region of the pre-mRNA is within a sequence between a pair of genomic sites GRCh38/hg38: chr14 68925672, and GRCh38/hg38: chr14 68925558. In some cases, the therapeutic agent is an antisense oligomer complementary to a sequence with at least about 80%, 85%, 90%, 95%, 96%, 97%, 98%, 99% or 100% sequence identity to SEQ ID NO:131. In some cases, the therapeutic agent is an antisense oligomer complementary to a sequence with 100% sequence identity to SEQ ID NO:131. In some cases, the therapeutic agent is an antisense oligomer that has a sequence with at least about 80%, 85%, 90%, 95%, 96%, 97%, 98%, 99% or 100% sequence identity to a sequence selected from the group consisting of SEQ ID NOs: 585-646. In some cases, the therapeutic agent is an antisense oligomer that has a sequence selected from the group consisting of SEQ ID NOs: 585-646. In some cases, the target peptide sequence is a portion of ACTN1 protein, and the method treats a disease or the condition that comprises Bleeding Disorder, Platelet-Type, 15; or Autosomal dominant macrothrombocytopenia.

[0095] ACTN2

[0096] In some cases, the target peptide sequence is a portion of ACTN2 protein. In some cases, the therapeutic agent increases level of a first processed mRNA encoding a protein having a sequence SEQ ID NO: 8098, and decreases level of a second processed mRNA encoding a protein having a sequence SEQ ID NO: 334. In some cases, the targeted region of the pre-mRNA is at most about 1500 nucleotides, about 1000 nucleotides, about 800 nucleotides, about 700 nucleotides, about 600 nucleotides, about 500 nucleotides, about 400 nucleotides, about 300 nucleotides, about 200 nucleotides, about 100 nucleotides, about 80 nucleotides, about 70 nucleotides, about 60 nucleotides, about 50 nucleotides upstream of SEQ ID NO: 132. In some cases, the targeted region of the pre-mRNA is at least about 1500 nucleotides, about 1000 nucleotides, about 800 nucleotides, about 700 nucleotides, about 600 nucleotides, about 500 nucleotides, about 400 nucleotides, about 300 nucleotides, about 200 nucleotides, about 100 nucleotides, about 80 nucleotides, about 70 nucleotides, about 60 nucleotides, about 50 nucleotides upstream of SEQ ID NO: 132. In some cases, the targeted region of the pre-mRNA is at most about 1500 nucleotides, about 1000 nucleotides, about 800 nucleotides, about 700 nucleotides, about 600 nucleotides, about 500 nucleotides, about 400 nucleotides, about 300 nucleotides, about 200 nucleotides, about 100 nucleotides, about 80 nucleotides, about 70 nucleotides, about 60 nucleotides, about 50 nucleotides upstream of genomic site GRCh38/hg38: chr1 236735635. In some cases, the targeted region of the pre-mRNA is at least about 1500 nucleotides, about 1000 nucleotides, about 800 nucleotides, about 700 nucleotides, about 600 nucleotides, about 500 nucleotides, about 400 nucleotides, about 300 nucleotides, about 200 nucleotides, about 100 nucleotides, about 80 nucleotides, about 70 nucleotides, about 60 nucleotides, about 50 nucleotides upstream of genomic site GRCh38/hg38: chr1 236735635. In some cases, the targeted region of the pre-mRNA is at most about 1500 nucleotides, about 1000 nucleotides, about 800 nucleotides, about 700 nucleotides, about 600 nucleotides, about 500 nucleotides, about 400 nucleotides, about 300 nucleotides, about 200 nucleotides, about 100 nucleotides, about 80 nucleotides, about 70 nucleotides, about 60 nucleotides, about 50 nucleotides downstream of SEQ ID NO: 132. In some cases, the targeted region of the pre-mRNA is at least about 1500 nucleotides, about 1000 nucleotides, about 800 nucleotides, about 700 nucleotides, about 600 nucleotides, about 500 nucleotides, about 400 nucleotides, about 300 nucleotides, about 200 nucleotides, about 100 nucleotides, about 80 nucleotides, about 70 nucleotides, about 60 nucleotides, about 50 nucleotides downstream of SEQ ID NO: 132. In some cases, the targeted region of the pre-mRNA is at most about 1500 nucleotides, about 1000 nucleotides, about 800 nucleotides, about 700 nucleotides, about 600 nucleotides, about 500 nucleotides, about 400 nucleotides, about 300 nucleotides, about 200 nucleotides, about 100 nucleotides, about 80 nucleotides, about 70 nucleotides, about 60 nucleotides, about 50 nucleotides downstream of genomic site GRCh38/hg38: chr1 236735720. In some cases. the targeted region of the pre-mRNA is at least about 1500 nucleotides, about 1000 nucleotides, about 800 nucleotides, about 700 nucleotides, about 600 nucleotides, about 500 nucleotides, about 400 nucleotides, about 300 nucleotides, about 200 nucleotides, about 100 nucleotides, about 80 nucleotides, about 70 nucleotides, about 60 nucleotides, about 50 nucleotides downstream of genomic site GRCh38/hg38: chr1 236735720. In some cases, the targeted region of the pre-mRNA is within a sequence SEQ ID NO: 132. In some cases, the targeted region of the pre-mRNA is within a sequence between a pair of genomic sites GRCh38/hg38: chr1 236735635, and GRCh38/hg38: chr1 236735720. In some cases, the therapeutic agent is an antisense oligomer complementary to a sequence with at least about 80%, 85%, 90%, 95%, 96%, 97%, 98%, 99% or 100% sequence identity to SEQ ID NO:132. In some cases, the therapeutic agent is an antisense oligomer complementary to a sequence with 100% sequence identity to SEQ ID NO:132. In some cases, the therapeutic agent is an antisense oligomer that has a sequence with at least about 80%, 85%, 90%, 95%, 96%, 97%, 98%, 99% or 100% sequence identity to a sequence selected from the group consisting of SEQ ID NOs: 647-702. In some cases, the therapeutic agent is an antisense oligomer that has a sequence selected from the group consisting of SEQ ID NOs: 647-702. In some cases, the target peptide sequence is a portion of ACTN2 protein, and the method treats a disease or the condition that comprises Hypertrophic Cardiomyopathy; Cardiomyopathy, Dilated, 1AA; Cardiomyopathy, Familial Hypertrophic, 23, with or without Ventricular Noncompaction; Familial dilated cardiomyopathy; Charcot-Marie-Tooth Disease; Conduction disorder of the heart; or Cardiomyopathy, Dilated.

[0097] ADH4

[0098] In some cases, the target peptide sequence is a portion of ADH4 protein. In some cases, the therapeutic agent increases level of a first processed mRNA encoding a protein having a sequence SEQ ID NO: 8099, and decreases level of a second processed mRNA encoding a protein having a sequence SEQ ID NO: 335. In some cases, the targeted region of the pre-mRNA is at most about 1500 nucleotides, about 1000 nucleotides, about 800 nucleotides, about 700 nucleotides, about 600 nucleotides, about 500 nucleotides, about 400 nucleotides, about 300 nucleotides, about 200 nucleotides, about 100 nucleotides, about 80 nucleotides, about 70 nucleotides, about 60 nucleotides, about 50 nucleotides upstream of SEQ ID NO: 133. In some cases, the targeted region of the pre-mRNA is at least about 1500 nucleotides, about 1000 nucleotides, about 800 nucleotides, about 700 nucleotides, about 600 nucleotides, about 500 nucleotides, about 400 nucleotides, about 300 nucleotides, about 200 nucleotides, about 100 nucleotides, about 80 nucleotides, about 70 nucleotides, about 60 nucleotides, about 50 nucleotides upstream of SEQ ID NO: 133. In some cases, the targeted region of the pre-mRNA is at most about 1500 nucleotides, about 1000 nucleotides, about 800 nucleotides, about 700 nucleotides, about 600 nucleotides, about 500 nucleotides, about 400 nucleotides, about 300 nucleotides, about 200 nucleotides, about 100 nucleotides, about 80 nucleotides, about 70 nucleotides, about 60 nucleotides, about 50 nucleotides upstream of genomic site GRCh38/hg38: chr4 99143305. In some cases, the targeted region of the pre-mRNA is at least about 1500 nucleotides, about 1000 nucleotides, about 800 nucleotides, about 700 nucleotides, about 600 nucleotides, about 500 nucleotides, about 400 nucleotides, about 300 nucleotides, about 200 nucleotides, about 100 nucleotides, about 80 nucleotides, about 70 nucleotides, about 60 nucleotides, about 50 nucleotides upstream of genomic site GRCh38/hg38: chr4 99143305. In some cases, the targeted region of the pre-mRNA is at most about 1500 nucleotides, about 1000 nucleotides, about 800 nucleotides, about 700 nucleotides, about 600 nucleotides, about 500 nucleotides, about 400 nucleotides, about 300 nucleotides, about 200 nucleotides, about 100 nucleotides, about 80 nucleotides, about 70 nucleotides, about 60 nucleotides, about 50 nucleotides downstream of SEQ ID NO: 133. In some cases, the targeted region of the pre-mRNA is at least about 1500 nucleotides, about 1000 nucleotides, about 800 nucleotides, about 700 nucleotides, about 600 nucleotides, about 500 nucleotides, about 400 nucleotides, about 300 nucleotides, about 200 nucleotides, about 100 nucleotides, about 80 nucleotides, about 70 nucleotides, about 60 nucleotides, about 50 nucleotides downstream of SEQ ID NO: 133. In some cases, the targeted region of the pre-mRNA is at most about 1500 nucleotides, about 1000 nucleotides, about 800 nucleotides, about 700 nucleotides, about 600 nucleotides, about 500 nucleotides, about 400 nucleotides, about 300 nucleotides, about 200 nucleotides, about 100 nucleotides, about 80 nucleotides, about 70 nucleotides, about 60 nucleotides, about 50 nucleotides downstream of genomic site GRCh38/hg38: chr4 99143166. In some cases. the targeted region of the pre-mRNA is at least about 1500 nucleotides, about 1000 nucleotides, about 800 nucleotides, about 700 nucleotides, about 600 nucleotides, about 500 nucleotides, about 400 nucleotides, about 300 nucleotides, about 200 nucleotides, about 100 nucleotides, about 80 nucleotides, about 70 nucleotides, about 60 nucleotides, about 50 nucleotides downstream of genomic site GRCh38/hg38: chr4 99143166. In some cases, the targeted region of the pre-mRNA is within a sequence SEQ ID NO: 133. In some cases, the targeted region of the pre-mRNA is within a sequence between a pair of genomic sites GRCh38/hg38: chr4 99143305, and GRCh38/hg38: chr4 99143166. In some cases, the therapeutic agent is an antisense oligomer complementary to a sequence with at least about 80%, 85%, 90%, 95%, 96%, 97%, 98%, 99% or 100% sequence identity to SEQ ID NO:133. In some cases, the therapeutic agent is an antisense oligomer complementary to a sequence with 100% sequence identity to SEQ ID NO:133. In some cases, the therapeutic agent increases level of a first processed mRNA encoding a protein having a sequence SEQ ID NO: 8100, and decreases level of a second processed mRNA encoding a protein having a sequence SEQ ID NO: 336. In some cases, the targeted region of the pre-mRNA is at most about 1500 nucleotides, about 1000 nucleotides, about 800 nucleotides, about 700 nucleotides, about 600 nucleotides, about 500 nucleotides, about 400 nucleotides, about 300 nucleotides, about 200 nucleotides, about 100 nucleotides, about 80 nucleotides, about 70 nucleotides, about 60 nucleotides, about 50 nucleotides upstream of SEQ ID NO: 134. In some cases, the targeted region of the pre-mRNA is at least about 1500 nucleotides, about 1000 nucleotides, about 800 nucleotides, about 700 nucleotides, about 600 nucleotides, about 500 nucleotides, about 400 nucleotides, about 300 nucleotides, about 200 nucleotides, about 100 nucleotides, about 80 nucleotides, about 70 nucleotides, about 60 nucleotides, about 50 nucleotides upstream of SEQ ID NO: 134. In some cases, the targeted region of the pre-mRNA is at most about 1500 nucleotides, about 1000 nucleotides, about 800 nucleotides, about 700 nucleotides, about 600 nucleotides, about 500 nucleotides, about 400 nucleotides, about 300 nucleotides, about 200 nucleotides, about 100 nucleotides, about 80 nucleotides, about 70 nucleotides, about 60 nucleotides, about 50 nucleotides upstream of genomic site GRCh38/hg38: chr4 99143305. In some cases, the targeted region of the pre-mRNA is at least about 1500 nucleotides, about 1000 nucleotides, about 800 nucleotides, about 700 nucleotides, about 600 nucleotides, about 500 nucleotides, about 400 nucleotides, about 300 nucleotides, about 200 nucleotides, about 100 nucleotides, about 80 nucleotides, about 70 nucleotides, about 60 nucleotides, about 50 nucleotides upstream of genomic site GRCh38/hg38: chr4 99143305. In some cases, the targeted region of the pre-mRNA is at most about 1500 nucleotides, about 1000 nucleotides, about 800 nucleotides, about 700 nucleotides, about 600 nucleotides, about 500 nucleotides, about 400 nucleotides, about 300 nucleotides, about 200 nucleotides, about 100 nucleotides, about 80 nucleotides, about 70 nucleotides, about 60 nucleotides, about 50 nucleotides downstream of SEQ ID NO: 134. In some cases, the targeted region of the pre-mRNA is at least about 1500 nucleotides, about 1000 nucleotides, about 800 nucleotides, about 700 nucleotides, about 600 nucleotides, about 500 nucleotides, about 400 nucleotides, about 300 nucleotides, about 200 nucleotides, about 100 nucleotides, about 80 nucleotides, about 70 nucleotides, about 60 nucleotides, about 50 nucleotides downstream of SEQ ID NO: 134. In some cases, the targeted region of the pre-mRNA is at most about 1500 nucleotides, about 1000 nucleotides, about 800 nucleotides, about 700 nucleotides, about 600 nucleotides, about 500 nucleotides, about 400 nucleotides, about 300 nucleotides, about 200 nucleotides, about 100 nucleotides, about 80 nucleotides, about 70 nucleotides, about 60 nucleotides, about 50 nucleotides downstream of genomic site GRCh38/hg38: chr4 99143166. In some cases. the targeted region of the pre-mRNA is at least about 1500 nucleotides, about 1000 nucleotides, about 800 nucleotides, about 700 nucleotides, about 600 nucleotides, about 500 nucleotides, about 400 nucleotides, about 300 nucleotides, about 200 nucleotides, about 100 nucleotides, about 80 nucleotides, about 70 nucleotides, about 60 nucleotides, about 50 nucleotides downstream of genomic site GRCh38/hg38: chr4 99143166. In some cases, the targeted region of the pre-mRNA is within a sequence SEQ ID NO: 134. In some cases, the targeted region of the pre-mRNA is within a sequence between a pair of genomic sites GRCh38/hg38: chr4 99143305, and GRCh38/hg38: chr4 99143166. In some cases, the therapeutic agent is an antisense oligomer complementary to a sequence with at least about 80%, 85%, 90%, 95%, 96%, 97%, 98%, 99% or 100% sequence identity to SEQ ID NO:134. In some cases, the therapeutic agent is an antisense oligomer complementary to a sequence with 100% sequence identity to SEQ ID NO:134. In some cases, the therapeutic agent is an antisense oligomer that has a sequence with at least about 80%, 85%, 90%, 95%, 96%, 97%, 98%, 99% or 100% sequence identity to a sequence selected from the group consisting of SEQ ID NOs: 703-769. In some cases, the therapeutic agent is an antisense oligomer that has a sequence selected from the group consisting of SEQ ID NOs: 703-769. In some cases, the target peptide sequence is a portion of ADH4 protein, and the method treats a disease or the condition that comprises Alcohol Use Disorder; Alcohol abuse; or Alcoholic Intoxication, Chronic.

[0099] AGER

[0100] In some cases, the target peptide sequence is a portion of AGER protein. In some cases, the therapeutic agent increases level of a first processed mRNA encoding a protein having a sequence SEQ ID NO: 8101, and decreases level of a second processed mRNA encoding a protein having a sequence SEQ ID NO: 337. In some cases, the targeted region of the pre-mRNA is at most about 1500 nucleotides, about 1000 nucleotides, about 800 nucleotides, about 700 nucleotides, about 600 nucleotides, about 500 nucleotides, about 400 nucleotides, about 300 nucleotides, about 200 nucleotides, about 100 nucleotides, about 80 nucleotides, about 70 nucleotides, about 60 nucleotides, about 50 nucleotides upstream of SEQ ID NO: 135. In some cases, the targeted region of the pre-mRNA is at least about 1500 nucleotides, about 1000 nucleotides, about 800 nucleotides, about 700 nucleotides, about 600 nucleotides, about 500 nucleotides, about 400 nucleotides, about 300 nucleotides, about 200 nucleotides, about 100 nucleotides, about 80 nucleotides, about 70 nucleotides, about 60 nucleotides, about 50 nucleotides upstream of SEQ ID NO: 135. In some cases, the targeted region of the pre-mRNA is at most about 1500 nucleotides, about 1000 nucleotides, about 800 nucleotides, about 700 nucleotides, about 600 nucleotides, about 500 nucleotides, about 400 nucleotides, about 300 nucleotides, about 200 nucleotides, about 100 nucleotides, about 80 nucleotides, about 70 nucleotides, about 60 nucleotides, about 50 nucleotides upstream of genomic site GRCh38/hg38: chr6 32182698. In some cases, the targeted region of the pre-mRNA is at least about 1500 nucleotides, about 1000 nucleotides, about 800 nucleotides, about 700 nucleotides, about 600 nucleotides, about 500 nucleotides, about 400 nucleotides, about 300 nucleotides, about 200 nucleotides, about 100 nucleotides, about 80 nucleotides, about 70 nucleotides, about 60 nucleotides, about 50 nucleotides upstream of genomic site GRCh38/hg38: chr6 32182698. In some cases, the targeted region of the pre-mRNA is at most about 1500 nucleotides, about 1000 nucleotides, about 800 nucleotides, about 700 nucleotides, about 600 nucleotides, about 500 nucleotides, about 400 nucleotides, about 300 nucleotides, about 200 nucleotides, about 100 nucleotides, about 80 nucleotides, about 70 nucleotides, about 60 nucleotides, about 50 nucleotides downstream of SEQ ID NO: 135. In some cases, the targeted region of the pre-mRNA is at least about 1500 nucleotides, about 1000 nucleotides, about 800 nucleotides, about 700 nucleotides, about 600 nucleotides, about 500 nucleotides, about 400 nucleotides, about 300 nucleotides, about 200 nucleotides, about 100 nucleotides, about 80 nucleotides, about 70 nucleotides, about 60 nucleotides, about 50 nucleotides downstream of SEQ ID NO: 135. In some cases, the targeted region of the pre-mRNA is at most about 1500 nucleotides, about 1000 nucleotides, about 800 nucleotides, about 700 nucleotides, about 600 nucleotides, about 500 nucleotides, about 400 nucleotides, about 300 nucleotides, about 200 nucleotides, about 100 nucleotides, about 80 nucleotides, about 70 nucleotides, about 60 nucleotides, about 50 nucleotides downstream of genomic site GRCh38/hg38: chr6 32182568. In some cases. the targeted region of the pre-mRNA is at least about 1500 nucleotides, about 1000 nucleotides, about 800 nucleotides, about 700 nucleotides, about 600 nucleotides, about 500 nucleotides, about 400 nucleotides, about 300 nucleotides, about 200 nucleotides, about 100 nucleotides, about 80 nucleotides, about 70 nucleotides, about 60 nucleotides, about 50 nucleotides downstream of genomic site GRCh38/hg38: chr6 32182568. In some cases, the targeted region of the pre-mRNA is within a sequence SEQ ID NO: 135. In some cases, the targeted region of the pre-mRNA is within a sequence between a pair of genomic sites GRCh38/hg38: chr6 32182698, and GRCh38/hg38: chr6 32182568. In some cases, the therapeutic agent is an antisense oligomer complementary to a sequence with at least about 80%, 85%, 90%, 95%, 96%, 97%, 98%, 99% or 100% sequence identity to SEQ ID NO:135. In some cases, the therapeutic agent is an antisense oligomer complementary to a sequence with 100% sequence identity to SEQ ID NO:135. In some cases, the therapeutic agent is an antisense oligomer that has a sequence with at least about 80%, 85%, 90%, 95%, 96%, 97%, 98%, 99% or 100% sequence identity to a sequence selected from the group consisting of SEQ ID NOs: 8031-8095. In some cases, the therapeutic agent is an antisense oligomer that has a sequence selected from the group consisting of SEQ ID NOs: 8031-8095. In some cases, the target peptide sequence is a portion of AGER protein, and the method treats a disease or the condition that comprises Schizophrenia.

[0101] AKR1C3

[0102] In some cases, the target peptide sequence is a portion of AKR1C3 protein. In some cases, the therapeutic agent increases level of a first processed mRNA encoding a protein having a sequence SEQ ID NO: 8102, and decreases level of a second processed mRNA encoding a protein having a sequence SEQ ID NO: 338. In some cases, the targeted region of the pre-mRNA is at most about 1500 nucleotides, about 1000 nucleotides, about 800 nucleotides, about 700 nucleotides, about 600 nucleotides, about 500 nucleotides, about 400 nucleotides, about 300 nucleotides, about 200 nucleotides, about 100 nucleotides, about 80 nucleotides, about 70 nucleotides, about 60 nucleotides, about 50 nucleotides upstream of SEQ ID NO: 136. In some cases, the targeted region of the pre-mRNA is at least about 1500 nucleotides, about 1000 nucleotides, about 800 nucleotides, about 700 nucleotides, about 600 nucleotides, about 500 nucleotides, about 400 nucleotides, about 300 nucleotides, about 200 nucleotides, about 100 nucleotides, about 80 nucleotides, about 70 nucleotides, about 60 nucleotides, about 50 nucleotides upstream of SEQ ID NO: 136. In some cases, the targeted region of the pre-mRNA is at most about 1500 nucleotides, about 1000 nucleotides, about 800 nucleotides, about 700 nucleotides, about 600 nucleotides, about 500 nucleotides, about 400 nucleotides, about 300 nucleotides, about 200 nucleotides, about 100 nucleotides, about 80 nucleotides, about 70 nucleotides, about 60 nucleotides, about 50 nucleotides upstream of genomic site GRCh38/hg38: chr10 5077900. In some cases, the targeted region of the pre-mRNA is at least about 1500 nucleotides, about 1000 nucleotides, about 800 nucleotides, about 700 nucleotides, about 600 nucleotides, about 500 nucleotides, about 400 nucleotides, about 300 nucleotides, about 200 nucleotides, about 100 nucleotides, about 80 nucleotides, about 70 nucleotides, about 60 nucleotides, about 50 nucleotides upstream of genomic site GRCh38/hg38: chr10 5077900. In some cases, the targeted region of the pre-mRNA is at most about 1500 nucleotides, about 1000 nucleotides, about 800 nucleotides, about 700 nucleotides, about 600 nucleotides, about 500 nucleotides, about 400 nucleotides, about 300 nucleotides, about 200 nucleotides, about 100 nucleotides, about 80 nucleotides, about 70 nucleotides, about 60 nucleotides, about 50 nucleotides downstream of SEQ ID NO: 136. In some cases, the targeted region of the pre-mRNA is at least about 1500 nucleotides, about 1000 nucleotides, about 800 nucleotides, about 700 nucleotides, about 600 nucleotides, about 500 nucleotides, about 400 nucleotides, about 300 nucleotides, about 200 nucleotides, about 100 nucleotides, about 80 nucleotides, about 70 nucleotides, about 60 nucleotides, about 50 nucleotides downstream of SEQ ID NO: 136. In some cases, the targeted region of the pre-mRNA is at most about 1500 nucleotides, about 1000 nucleotides, about 800 nucleotides, about 700 nucleotides, about 600 nucleotides, about 500 nucleotides, about 400 nucleotides, about 300 nucleotides, about 200 nucleotides, about 100 nucleotides, about 80 nucleotides, about 70 nucleotides, about 60 nucleotides, about 50 nucleotides downstream of genomic site GRCh38/hg38: chr10 5077977. In some cases. the targeted region of the pre-mRNA is at least about 1500 nucleotides, about 1000 nucleotides, about 800 nucleotides, about 700 nucleotides, about 600 nucleotides, about 500 nucleotides, about 400 nucleotides, about 300 nucleotides, about 200 nucleotides, about 100 nucleotides, about 80 nucleotides, about 70 nucleotides, about 60 nucleotides, about 50 nucleotides downstream of genomic site GRCh38/hg38: chr10 5077977. In some cases, the targeted region of the pre-mRNA is within a sequence SEQ ID NO: 136. In some cases, the targeted region of the pre-mRNA is within a sequence between a pair of genomic sites GRCh38/hg38: chr10 5077900, and GRCh38/hg38: chr10 5077977. In some cases, the therapeutic agent is an antisense oligomer complementary to a sequence with at least about 80%, 85%, 90%, 95%, 96%, 97%, 98%, 99% or 100% sequence identity to SEQ ID NO:136. In some cases, the therapeutic agent is an antisense oligomer complementary to a sequence with 100% sequence identity to SEQ ID NO:136. In some cases, the therapeutic agent is an antisense oligomer that has a sequence with at least about 80%, 85%, 90%, 95%, 96%, 97%, 98%, 99% or 100% sequence identity to a sequence selected from the group consisting of SEQ ID NOs: 770-824. In some cases, the therapeutic agent is an antisense oligomer that has a sequence selected from the group consisting of SEQ ID NOs: 770-824. In some cases, the target peptide sequence is a portion of AKR1C3 protein, and the method treats a disease or the condition that comprises Bipolar Disorder; or Alcoholic Intoxication, Chronic.

[0103] ALDH1A2

[0104] In some cases, the target peptide sequence is a portion of ALDH1A2 protein. In some cases, the therapeutic agent increases level of a first processed mRNA encoding a protein having a sequence SEQ ID NO: 8103, and decreases level of a second processed mRNA encoding a protein having a sequence SEQ ID NO: 339. In some cases, the targeted region of the pre-mRNA is at most about 1500 nucleotides, about 1000 nucleotides, about 800 nucleotides, about 700 nucleotides, about 600 nucleotides, about 500 nucleotides, about 400 nucleotides, about 300 nucleotides, about 200 nucleotides, about 100 nucleotides, about 80 nucleotides, about 70 nucleotides, about 60 nucleotides, about 50 nucleotides upstream of SEQ ID NO: 137. In some cases, the targeted region of the pre-mRNA is at least about 1500 nucleotides, about 1000 nucleotides, about 800 nucleotides, about 700 nucleotides, about 600 nucleotides, about 500 nucleotides, about 400 nucleotides, about 300 nucleotides, about 200 nucleotides, about 100 nucleotides, about 80 nucleotides, about 70 nucleotides, about 60 nucleotides, about 50 nucleotides upstream of SEQ ID NO: 137. In some cases, the targeted region of the pre-mRNA is at most about 1500 nucleotides, about 1000 nucleotides, about 800 nucleotides, about 700 nucleotides, about 600 nucleotides, about 500 nucleotides, about 400 nucleotides, about 300 nucleotides, about 200 nucleotides, about 100 nucleotides, about 80 nucleotides, about 70 nucleotides, about 60 nucleotides, about 50 nucleotides upstream of genomic site GRCh38/hg38: chr15 58058108. In some cases, the targeted region of the pre-mRNA is at least about 1500 nucleotides, about 1000 nucleotides, about 800 nucleotides, about 700 nucleotides, about 600 nucleotides, about 500 nucleotides, about 400 nucleotides, about 300 nucleotides, about 200 nucleotides, about 100 nucleotides, about 80 nucleotides, about 70 nucleotides, about 60 nucleotides, about 50 nucleotides upstream of genomic site GRCh38/hg38: chr15 58058108. In some cases, the targeted region of the pre-mRNA is at most about 1500 nucleotides, about 1000 nucleotides, about 800 nucleotides, about 700 nucleotides, about 600 nucleotides, about 500 nucleotides, about 400 nucleotides, about 300 nucleotides, about 200 nucleotides, about 100 nucleotides, about 80 nucleotides, about 70 nucleotides, about 60 nucleotides, about 50 nucleotides downstream of SEQ ID NO: 137. In some cases, the targeted region of the pre-mRNA is at least about 1500 nucleotides, about 1000 nucleotides, about 800 nucleotides, about 700 nucleotides, about 600 nucleotides, about 500 nucleotides, about 400 nucleotides, about 300 nucleotides, about 200 nucleotides, about 100 nucleotides, about 80 nucleotides, about 70 nucleotides, about 60 nucleotides, about 50 nucleotides downstream of SEQ ID NO: 137. In some cases, the targeted region of the pre-mRNA is at most about 1500 nucleotides, about 1000 nucleotides, about 800 nucleotides, about 700 nucleotides, about 600 nucleotides, about 500 nucleotides, about 400 nucleotides, about 300 nucleotides, about 200 nucleotides, about 100 nucleotides, about 80 nucleotides, about 70 nucleotides, about 60 nucleotides, about 50 nucleotides downstream of genomic site GRCh38/hg38: chr15 58058012. In some cases. the targeted region of the pre-mRNA is at least about 1500 nucleotides, about 1000 nucleotides, about 800 nucleotides, about 700 nucleotides, about 600 nucleotides, about 500 nucleotides, about 400 nucleotides, about 300 nucleotides, about 200 nucleotides, about 100 nucleotides, about 80 nucleotides, about 70 nucleotides, about 60 nucleotides, about 50 nucleotides downstream of genomic site GRCh38/hg38: chr15 58058012. In some cases, the targeted region of the pre-mRNA is within a sequence SEQ ID NO: 137. In some cases, the targeted region of the pre-mRNA is within a sequence between a pair of genomic sites GRCh38/hg38: chr15 58058108, and GRCh38/hg38: chr15 58058012. In some cases, the therapeutic agent is an antisense oligomer complementary to a sequence with at least about 80%, 85%, 90%, 95%, 96%, 97%, 98%, 99% or 100% sequence identity to SEQ ID NO:137. In some cases, the therapeutic agent is an antisense oligomer complementary to a sequence with 100% sequence identity to SEQ ID NO:137. In some cases, the therapeutic agent is an antisense oligomer that has a sequence with at least about 80%, 85%, 90%, 95%, 96%, 97%, 98%, 99% or 100% sequence identity to a sequence selected from the group consisting of SEQ ID NOs: 825-882. In some cases, the therapeutic agent is an antisense oligomer that has a sequence selected from the group consisting of SEQ ID NOs: 825-882. In some cases, the target peptide sequence is a portion of ALDH1A2 protein, and the method treats a disease or the condition that comprises Schizophrenia.

[0105] ALG8

[0106] In some cases, the target peptide sequence is a portion of ALG8 protein. In some cases, the therapeutic agent increases level of a first processed mRNA encoding a protein having a sequence SEQ ID NO: 8104, and decreases level of a second processed mRNA encoding a protein having a sequence SEQ ID NO: 340. In some cases, the targeted region of the pre-mRNA is at most about 1500 nucleotides, about 1000 nucleotides, about 800 nucleotides, about 700 nucleotides, about 600 nucleotides, about 500 nucleotides, about 400 nucleotides, about 300 nucleotides, about 200 nucleotides, about 100 nucleotides, about 80 nucleotides, about 70 nucleotides, about 60 nucleotides, about 50 nucleotides upstream of SEQ ID NO: 138. In some cases, the targeted region of the pre-mRNA is at least about 1500 nucleotides, about 1000 nucleotides, about 800 nucleotides, about 700 nucleotides, about 600 nucleotides, about 500 nucleotides, about 400 nucleotides, about 300 nucleotides, about 200 nucleotides, about 100 nucleotides, about 80 nucleotides, about 70 nucleotides, about 60 nucleotides, about 50 nucleotides upstream of SEQ ID NO: 138. In some cases, the targeted region of the pre-mRNA is at most about 1500 nucleotides, about 1000 nucleotides, about 800 nucleotides, about 700 nucleotides, about 600 nucleotides, about 500 nucleotides, about 400 nucleotides, about 300 nucleotides, about 200 nucleotides, about 100 nucleotides, about 80 nucleotides, about 70 nucleotides, about 60 nucleotides, about 50 nucleotides upstream of genomic site GRCh38/hg38: chr11 78138767. In some cases, the targeted region of the pre-mRNA is at least about 1500 nucleotides, about 1000 nucleotides, about 800 nucleotides, about 700 nucleotides, about 600 nucleotides, about 500 nucleotides, about 400 nucleotides, about 300 nucleotides, about 200 nucleotides, about 100 nucleotides, about 80 nucleotides, about 70 nucleotides, about 60 nucleotides, about 50 nucleotides upstream of genomic site GRCh38/hg38: chr11 78138767. In some cases, the targeted region of the pre-mRNA is at most about 1500 nucleotides, about 1000 nucleotides, about 800 nucleotides, about 700 nucleotides, about 600 nucleotides, about 500 nucleotides, about 400 nucleotides, about 300 nucleotides, about 200 nucleotides, about 100 nucleotides, about 80 nucleotides, about 70 nucleotides, about 60 nucleotides, about 50 nucleotides downstream of SEQ ID NO: 138. In some cases, the targeted region of the pre-mRNA is at least about 1500 nucleotides, about 1000 nucleotides, about 800 nucleotides, about 700 nucleotides, about 600 nucleotides, about 500 nucleotides, about 400 nucleotides, about 300 nucleotides, about 200 nucleotides, about 100 nucleotides, about 80 nucleotides, about 70 nucleotides, about 60 nucleotides, about 50 nucleotides downstream of SEQ ID NO: 138. In some cases, the targeted region of the pre-mRNA is at most about 1500 nucleotides, about 1000 nucleotides, about 800 nucleotides, about 700 nucleotides, about 600 nucleotides, about 500 nucleotides, about 400 nucleotides, about 300 nucleotides, about 200 nucleotides, about 100 nucleotides, about 80 nucleotides, about 70 nucleotides, about 60 nucleotides, about 50 nucleotides downstream of genomic site GRCh38/hg38: chr11 78138710. In some cases. the targeted region of the pre-mRNA is at least about 1500 nucleotides, about 1000 nucleotides, about 800 nucleotides, about 700 nucleotides, about 600 nucleotides, about 500 nucleotides, about 400 nucleotides, about 300 nucleotides, about 200 nucleotides, about 100 nucleotides, about 80 nucleotides, about 70 nucleotides, about 60 nucleotides, about 50 nucleotides downstream of genomic site GRCh38/hg38: chr11 78138710. In some cases, the targeted region of the pre-mRNA is within a sequence SEQ ID NO: 138. In some cases, the targeted region of the pre-mRNA is within a sequence between a pair of genomic sites GRCh38/hg38: chr11 78138767, and GRCh38/hg38: chr11 78138710. In some cases, the therapeutic agent is an antisense oligomer complementary to a sequence with at least about 80%, 85%, 90%, 95%, 96%, 97%, 98%, 99% or 100% sequence identity to SEQ ID NO:138. In some cases, the therapeutic agent is an antisense oligomer complementary to a sequence with 100% sequence identity to SEQ ID NO:138. In some cases, the therapeutic agent is an antisense oligomer that has a sequence with at least about 80%, 85%, 90%, 95%, 96%, 97%, 98%, 99% or 100% sequence identity to a sequence selected from the group consisting of SEQ ID NOs: 883-933. In some cases, the therapeutic agent is an antisense oligomer that has a sequence selected from the group consisting of SEQ ID NOs: 883-933. In some cases, the target peptide sequence is a portion of ALG8 protein, and the method treats a disease or the condition that comprises Intellectual Disability; Congenital Disorders of Glycosylation; Epileptic encephalopathy; Depressive disorder; or Congenital disorder of glycosylation type 1H.

[0107] AMPD2

[0108] In some cases, the target peptide sequence is a portion of AMPD2 protein. In some cases, the therapeutic agent increases level of a first processed mRNA encoding a protein having a sequence SEQ ID NO: 8105, and decreases level of a second processed mRNA encoding a protein having a sequence SEQ ID NO: 341. In some cases, the targeted region of the pre-mRNA is at most about 1500 nucleotides, about 1000 nucleotides, about 800 nucleotides, about 700 nucleotides, about 600 nucleotides, about 500 nucleotides, about 400 nucleotides, about 300 nucleotides, about 200 nucleotides, about 100 nucleotides, about 80 nucleotides, about 70 nucleotides, about 60 nucleotides, about 50 nucleotides upstream of SEQ ID NO: 139. In some cases, the targeted region of the pre-mRNA is at least about 1500 nucleotides, about 1000 nucleotides, about 800 nucleotides, about 700 nucleotides, about 600 nucleotides, about 500 nucleotides, about 400 nucleotides, about 300 nucleotides, about 200 nucleotides, about 100 nucleotides, about 80 nucleotides, about 70 nucleotides, about 60 nucleotides, about 50 nucleotides upstream of SEQ ID NO: 139. In some cases, the targeted region of the pre-mRNA is at most about 1500 nucleotides, about 1000 nucleotides, about 800 nucleotides, about 700 nucleotides, about 600 nucleotides, about 500 nucleotides, about 400 nucleotides, about 300 nucleotides, about 200 nucleotides, about 100 nucleotides, about 80 nucleotides, about 70 nucleotides, about 60 nucleotides, about 50 nucleotides upstream of genomic site GRCh38/hg38: chr1 109620914. In some cases, the targeted region of the pre-mRNA is at least about 1500 nucleotides, about 1000 nucleotides, about 800 nucleotides, about 700 nucleotides, about 600 nucleotides, about 500 nucleotides, about 400 nucleotides, about 300 nucleotides, about 200 nucleotides, about 100 nucleotides, about 80 nucleotides, about 70 nucleotides, about 60 nucleotides, about 50 nucleotides upstream of genomic site GRCh38/hg38: chr1 109620914. In some cases, the targeted region of the pre-mRNA is at most about 1500 nucleotides, about 1000 nucleotides, about 800 nucleotides, about 700 nucleotides, about 600 nucleotides, about 500 nucleotides, about 400 nucleotides, about 300 nucleotides, about 200 nucleotides, about 100 nucleotides, about 80 nucleotides, about 70 nucleotides, about 60 nucleotides, about 50 nucleotides downstream of SEQ ID NO: 139. In some cases, the targeted region of the pre-mRNA is at least about 1500 nucleotides, about 1000 nucleotides, about 800 nucleotides, about 700 nucleotides, about 600 nucleotides, about 500 nucleotides, about 400 nucleotides, about 300 nucleotides, about 200 nucleotides, about 100 nucleotides, about 80 nucleotides, about 70 nucleotides, about 60 nucleotides, about 50 nucleotides downstream of SEQ ID NO: 139. In some cases, the targeted region of the pre-mRNA is at most about 1500 nucleotides, about 1000 nucleotides, about 800 nucleotides, about 700 nucleotides, about 600 nucleotides, about 500 nucleotides, about 400 nucleotides, about 300 nucleotides, about 200 nucleotides, about 100 nucleotides, about 80 nucleotides, about 70 nucleotides, about 60 nucleotides, about 50 nucleotides downstream of genomic site GRCh38/hg38: chr1 109621266. In some cases. the targeted region of the pre-mRNA is at least about 1500 nucleotides, about 1000 nucleotides, about 800 nucleotides, about 700 nucleotides, about 600 nucleotides, about 500 nucleotides, about 400 nucleotides, about 300 nucleotides, about 200 nucleotides, about 100 nucleotides, about 80 nucleotides, about 70 nucleotides, about 60 nucleotides, about 50 nucleotides downstream of genomic site GRCh38/hg38: chr1 109621266. In some cases, the targeted region of the pre-mRNA is within a sequence SEQ ID NO: 139. In some cases, the targeted region of the pre-mRNA is within a sequence between a pair of genomic sites GRCh38/hg38: chr1 109620914, and GRCh38/hg38: chr1 109621266. In some cases, the therapeutic agent is an antisense oligomer complementary to a sequence with at least about 80%, 85%, 90%, 95%, 96%, 97%, 98%, 99% or 100% sequence identity to SEQ ID NO:139. In some cases, the therapeutic agent is an antisense oligomer complementary to a sequence with 100% sequence identity to SEQ ID NO:139. In some cases, the therapeutic agent is an antisense oligomer that has a sequence with at least about 80%, 85%, 90%, 95%, 96%, 97%, 98%, 99% or 100% sequence identity to a sequence selected from the group consisting of SEQ ID NOs: 934-1043. In some cases, the therapeutic agent is an antisense oligomer that has a sequence selected from the group consisting of SEQ ID NOs: 934-1043. In some cases, the target peptide sequence is a portion of AMPD2 protein, and the method treats a disease or the condition that comprises Intellectual Disability; Pontocerebellar Hypoplasia, Type 9; Epileptic encephalopathy; Ataxias, Hereditary; Spastic Paraplegia 63, Autosomal Recessive; Cerebellar Hypoplasia; or Spastic Paraplegia, Hereditary.

[0109] AMT

[0110] In some cases, the target peptide sequence is a portion of AMT protein. In some cases, the therapeutic agent increases level of a first processed mRNA encoding a protein having a sequence SEQ ID NO: 8106, and decreases level of a second processed mRNA encoding a protein having a sequence SEQ ID NO: 342. In some cases, the targeted region of the pre-mRNA is at most about 1500 nucleotides, about 1000 nucleotides, about 800 nucleotides, about 700 nucleotides, about 600 nucleotides, about 500 nucleotides, about 400 nucleotides, about 300 nucleotides, about 200 nucleotides, about 100 nucleotides, about 80 nucleotides, about 70 nucleotides, about 60 nucleotides, about 50 nucleotides upstream of SEQ ID NO: 140. In some cases, the targeted region of the pre-mRNA is at least about 1500 nucleotides, about 1000 nucleotides, about 800 nucleotides, about 700 nucleotides, about 600 nucleotides, about 500 nucleotides, about 400 nucleotides, about 300 nucleotides, about 200 nucleotides, about 100 nucleotides, about 80 nucleotides, about 70 nucleotides, about 60 nucleotides, about 50 nucleotides upstream of SEQ ID NO: 140. In some cases, the targeted region of the pre-mRNA is at most about 1500 nucleotides, about 1000 nucleotides, about 800 nucleotides, about 700 nucleotides, about 600 nucleotides, about 500 nucleotides, about 400 nucleotides, about 300 nucleotides, about 200 nucleotides, about 100 nucleotides, about 80 nucleotides, about 70 nucleotides, about 60 nucleotides, about 50 nucleotides upstream of genomic site GRCh38/hg38: chr3 49422257. In some cases, the targeted region of the pre-mRNA is at least about 1500 nucleotides, about 1000 nucleotides, about 800 nucleotides, about 700 nucleotides, about 600 nucleotides, about 500 nucleotides, about 400 nucleotides, about 300 nucleotides, about 200 nucleotides, about 100 nucleotides, about 80 nucleotides, about 70 nucleotides, about 60 nucleotides, about 50 nucleotides upstream of genomic site GRCh38/hg38: chr3 49422257. In some cases, the targeted region of the pre-mRNA is at most about 1500 nucleotides, about 1000 nucleotides, about 800 nucleotides, about 700 nucleotides, about 600 nucleotides, about 500 nucleotides, about 400 nucleotides, about 300 nucleotides, about 200 nucleotides, about 100 nucleotides, about 80 nucleotides, about 70 nucleotides, about 60 nucleotides, about 50 nucleotides downstream of SEQ ID NO: 140. In some cases, the targeted region of the pre-mRNA is at least about 1500 nucleotides, about 1000 nucleotides, about 800 nucleotides, about 700 nucleotides, about 600 nucleotides, about 500 nucleotides, about 400 nucleotides, about 300 nucleotides, about 200 nucleotides, about 100 nucleotides, about 80 nucleotides, about 70 nucleotides, about 60 nucleotides, about 50 nucleotides downstream of SEQ ID NO: 140. In some cases, the targeted region of the pre-mRNA is at most about 1500 nucleotides, about 1000 nucleotides, about 800 nucleotides, about 700 nucleotides, about 600 nucleotides, about 500 nucleotides, about 400 nucleotides, about 300 nucleotides, about 200 nucleotides, about 100 nucleotides, about 80 nucleotides, about 70 nucleotides, about 60 nucleotides, about 50 nucleotides downstream of genomic site GRCh38/hg38: chr3 49422104. In some cases. the targeted region of the pre-mRNA is at least about 1500 nucleotides, about 1000 nucleotides, about 800 nucleotides, about 700 nucleotides, about 600 nucleotides, about 500 nucleotides, about 400 nucleotides, about 300 nucleotides, about 200 nucleotides, about 100 nucleotides, about 80 nucleotides, about 70 nucleotides, about 60 nucleotides, about 50 nucleotides downstream of genomic site GRCh38/hg38: chr3 49422104. In some cases, the targeted region of the pre-mRNA is within a sequence SEQ ID NO: 140. In some cases, the targeted region of the pre-mRNA is within a sequence between a pair of genomic sites GRCh38/hg38: chr3 49422257, and GRCh38/hg38: chr3 49422104. In some cases, the therapeutic agent is an antisense oligomer complementary to a sequence with at least about 80%, 85%, 90%, 95%, 96%, 97%, 98%, 99% or 100% sequence identity to SEQ ID NO:140. In some cases, the therapeutic agent is an antisense oligomer complementary to a sequence with 100% sequence identity to SEQ ID NO:140. In some cases, the therapeutic agent increases level of a first processed mRNA encoding a protein having a sequence SEQ ID NO: 8107, and decreases level of a second processed mRNA encoding a protein having a sequence SEQ ID NO: 343. In some cases, the targeted region of the pre-mRNA is at most about 1500 nucleotides, about 1000 nucleotides, about 800 nucleotides, about 700 nucleotides, about 600 nucleotides, about 500 nucleotides, about 400 nucleotides, about 300 nucleotides, about 200 nucleotides, about 100 nucleotides, about 80 nucleotides, about 70 nucleotides, about 60 nucleotides, about 50 nucleotides upstream of SEQ ID NO: 141. In some cases, the targeted region of the pre-mRNA is at least about 1500 nucleotides, about 1000 nucleotides, about 800 nucleotides, about 700 nucleotides, about 600 nucleotides, about 500 nucleotides, about 400 nucleotides, about 300 nucleotides, about 200 nucleotides, about 100 nucleotides, about 80 nucleotides, about 70 nucleotides, about 60 nucleotides, about 50 nucleotides upstream of SEQ ID NO: 141. In some cases, the targeted region of the pre-mRNA is at most about 1500 nucleotides, about 1000 nucleotides, about 800 nucleotides, about 700 nucleotides, about 600 nucleotides, about 500 nucleotides, about 400 nucleotides, about 300 nucleotides, about 200 nucleotides, about 100 nucleotides, about 80 nucleotides, about 70 nucleotides, about 60 nucleotides, about 50 nucleotides upstream of genomic site GRCh38/hg38: chr3 49422257. In some cases, the targeted region of the pre-mRNA is at least about 1500 nucleotides, about 1000 nucleotides, about 800 nucleotides, about 700 nucleotides, about 600 nucleotides, about 500 nucleotides, about 400 nucleotides, about 300 nucleotides, about 200 nucleotides, about 100 nucleotides, about 80 nucleotides, about 70 nucleotides, about 60 nucleotides, about 50 nucleotides upstream of genomic site GRCh38/hg38: chr3 49422257. In some cases, the targeted region of the pre-mRNA is at most about 1500 nucleotides, about 1000 nucleotides, about 800 nucleotides, about 700 nucleotides, about 600 nucleotides, about 500 nucleotides, about 400 nucleotides, about 300 nucleotides, about 200 nucleotides, about 100 nucleotides, about 80 nucleotides, about 70 nucleotides, about 60 nucleotides, about 50 nucleotides downstream of SEQ ID NO: 141. In some cases, the targeted region of the pre-mRNA is at least about 1500 nucleotides, about 1000 nucleotides, about 800 nucleotides, about 700 nucleotides, about 600 nucleotides, about 500 nucleotides, about 400 nucleotides, about 300 nucleotides, about 200 nucleotides, about 100 nucleotides, about 80 nucleotides, about 70 nucleotides, about 60 nucleotides, about 50 nucleotides downstream of SEQ ID NO: 141. In some cases, the targeted region of the pre-mRNA is at most about 1500 nucleotides, about 1000 nucleotides, about 800 nucleotides, about 700 nucleotides, about 600 nucleotides, about 500 nucleotides, about 400 nucleotides, about 300 nucleotides, about 200 nucleotides, about 100 nucleotides, about 80 nucleotides, about 70 nucleotides, about 60 nucleotides, about 50 nucleotides downstream of genomic site GRCh38/hg38: chr3 49422104. In some cases. the targeted region of the pre-mRNA is at least about 1500 nucleotides, about 1000 nucleotides, about 800 nucleotides, about 700 nucleotides, about 600 nucleotides, about 500 nucleotides, about 400 nucleotides, about 300 nucleotides, about 200 nucleotides, about 100 nucleotides, about 80 nucleotides, about 70 nucleotides, about 60 nucleotides, about 50 nucleotides downstream of genomic site GRCh38/hg38: chr3 49422104. In some cases, the targeted region of the pre-mRNA is within a sequence SEQ ID NO: 141. In some cases, the targeted region of the pre-mRNA is within a sequence between a pair of genomic sites GRCh38/hg38: chr3 49422257, and GRCh38/hg38: chr3 49422104. In some cases, the therapeutic agent is an antisense oligomer complementary to a sequence with at least about 80%, 85%, 90%, 95%, 96%, 97%, 98%, 99% or 100% sequence identity to SEQ ID NO:141. In some cases, the therapeutic agent is an antisense oligomer complementary to a sequence with 100% sequence identity to SEQ ID NO:141. In some cases, the therapeutic agent increases level of a first processed mRNA encoding a protein having a sequence SEQ ID NO: 8108, and decreases level of a second processed mRNA encoding a protein having a sequence SEQ ID NO: 344. In some cases, the targeted region of the pre-mRNA is at most about 1500 nucleotides, about 1000 nucleotides, about 800 nucleotides, about 700 nucleotides, about 600 nucleotides, about 500 nucleotides, about 400 nucleotides, about 300 nucleotides, about 200 nucleotides, about 100 nucleotides, about 80 nucleotides, about 70 nucleotides, about 60 nucleotides, about 50 nucleotides upstream of SEQ ID NO: 142. In some cases, the targeted region of the pre-mRNA is at least about 1500 nucleotides, about 1000 nucleotides, about 800 nucleotides, about 700 nucleotides, about 600 nucleotides, about 500 nucleotides, about 400 nucleotides, about 300 nucleotides, about 200 nucleotides, about 100 nucleotides, about 80 nucleotides, about 70 nucleotides, about 60 nucleotides, about 50 nucleotides upstream of SEQ ID NO: 142. In some cases, the targeted region of the pre-mRNA is at most about 1500 nucleotides, about 1000 nucleotides, about 800 nucleotides, about 700 nucleotides, about 600 nucleotides, about 500 nucleotides, about 400 nucleotides, about 300 nucleotides, about 200 nucleotides, about 100 nucleotides, about 80 nucleotides, about 70 nucleotides, about 60 nucleotides, about 50 nucleotides upstream of genomic site GRCh38/hg38: chr3 49422257. In some cases, the targeted region of the pre-mRNA is at least about 1500 nucleotides, about 1000 nucleotides, about 800 nucleotides, about 700 nucleotides, about 600 nucleotides, about 500 nucleotides, about 400 nucleotides, about 300 nucleotides, about 200 nucleotides, about 100 nucleotides, about 80 nucleotides, about 70 nucleotides, about 60 nucleotides, about 50 nucleotides upstream of genomic site GRCh38/hg38: chr3 49422257. In some cases, the targeted region of the pre-mRNA is at most about 1500 nucleotides, about 1000 nucleotides, about 800 nucleotides, about 700 nucleotides, about 600 nucleotides, about 500 nucleotides, about 400 nucleotides, about 300 nucleotides, about 200 nucleotides, about 100 nucleotides, about 80 nucleotides, about 70 nucleotides, about 60 nucleotides, about 50 nucleotides downstream of SEQ ID NO: 142. In some cases, the targeted region of the pre-mRNA is at least about 1500 nucleotides, about 1000 nucleotides, about 800 nucleotides, about 700 nucleotides, about 600 nucleotides, about 500 nucleotides, about 400 nucleotides, about 300 nucleotides, about 200 nucleotides, about 100 nucleotides, about 80 nucleotides, about 70 nucleotides, about 60 nucleotides, about 50 nucleotides downstream of SEQ ID NO: 142. In some cases, the targeted region of the pre-mRNA is at most about 1500 nucleotides, about 1000 nucleotides, about 800 nucleotides, about 700 nucleotides, about 600 nucleotides, about 500 nucleotides, about 400 nucleotides, about 300 nucleotides, about 200 nucleotides, about 100 nucleotides, about 80 nucleotides, about 70 nucleotides, about 60 nucleotides, about 50 nucleotides downstream of genomic site GRCh38/hg38: chr3 49422104. In some cases. the targeted region of the pre-mRNA is at least about 1500 nucleotides, about 1000 nucleotides, about 800 nucleotides, about 700 nucleotides, about 600 nucleotides, about 500 nucleotides, about 400 nucleotides, about 300 nucleotides, about 200 nucleotides, about 100 nucleotides, about 80 nucleotides, about 70 nucleotides, about 60 nucleotides, about 50 nucleotides downstream of genomic site GRCh38/hg38: chr3 49422104. In some cases, the targeted region of the pre-mRNA is within a sequence SEQ ID NO: 142. In some cases, the targeted region of the pre-mRNA is within a sequence between a pair of genomic sites GRCh38/hg38: chr3 49422257, and GRCh38/hg38: chr3 49422104. In some cases, the therapeutic agent is an antisense oligomer complementary to a sequence with at least about 80%, 85%, 90%, 95%, 96%, 97%, 98%, 99% or 100% sequence identity to SEQ ID NO:142. In some cases, the therapeutic agent is an antisense oligomer complementary to a sequence with 100% sequence identity to SEQ ID NO:142. In some cases, the therapeutic agent is an antisense oligomer that has a sequence with at least about 80%, 85%, 90%, 95%, 96%, 97%, 98%, 99% or 100% sequence identity to a sequence selected from the group consisting of SEQ ID NOs: 1044-1113. In some cases, the therapeutic agent is an antisense oligomer that has a sequence selected from the group consisting of SEQ ID NOs: 1044-1113. In some cases, the target peptide sequence is a portion of AMT protein, and the method treats a disease or the condition that comprises Nonketotic Hyperglycinemia; Hyperglycinemia, Transient Neonatal; or Glycine encephalopathy.

[0111] ANKRD11

[0112] In some cases, the target peptide sequence is a portion of ANKRD1 1 protein. In some cases, the therapeutic agent increases level of a first processed mRNA encoding a protein having a sequence SEQ ID NO: 8109, and decreases level of a second processed mRNA encoding a protein having a sequence SEQ ID NO: 345. In some cases, the targeted region of the pre-mRNA is at most about 1500 nucleotides, about 1000 nucleotides, about 800 nucleotides, about 700 nucleotides, about 600 nucleotides, about 500 nucleotides, about 400 nucleotides, about 300 nucleotides, about 200 nucleotides, about 100 nucleotides, about 80 nucleotides, about 70 nucleotides, about 60 nucleotides, about 50 nucleotides upstream of SEQ ID NO: 143. In some cases, the targeted region of the pre-mRNA is at least about 1500 nucleotides, about 1000 nucleotides, about 800 nucleotides, about 700 nucleotides, about 600 nucleotides, about 500 nucleotides, about 400 nucleotides, about 300 nucleotides, about 200 nucleotides, about 100 nucleotides, about 80 nucleotides, about 70 nucleotides, about 60 nucleotides, about 50 nucleotides upstream of SEQ ID NO: 143. In some cases, the targeted region of the pre-mRNA is at most about 1500 nucleotides, about 1000 nucleotides, about 800 nucleotides, about 700 nucleotides, about 600 nucleotides, about 500 nucleotides, about 400 nucleotides, about 300 nucleotides, about 200 nucleotides, about 100 nucleotides, about 80 nucleotides, about 70 nucleotides, about 60 nucleotides, about 50 nucleotides upstream of genomic site GRCh38/hg38: chr16 89317078. In some cases, the targeted region of the pre-mRNA is at least about 1500 nucleotides, about 1000 nucleotides, about 800 nucleotides, about 700 nucleotides, about 600 nucleotides, about 500 nucleotides, about 400 nucleotides, about 300 nucleotides, about 200 nucleotides, about 100 nucleotides, about 80 nucleotides, about 70 nucleotides, about 60 nucleotides, about 50 nucleotides upstream of genomic site GRCh38/hg38: chr16 89317078. In some cases, the targeted region of the pre-mRNA is at most about 1500 nucleotides, about 1000 nucleotides, about 800 nucleotides, about 700 nucleotides, about 600 nucleotides, about 500 nucleotides, about 400 nucleotides, about 300 nucleotides, about 200 nucleotides, about 100 nucleotides, about 80 nucleotides, about 70 nucleotides, about 60 nucleotides, about 50 nucleotides downstream of SEQ ID NO: 143. In some cases, the targeted region of the pre-mRNA is at least about 1500 nucleotides, about 1000 nucleotides, about 800 nucleotides, about 700 nucleotides, about 600 nucleotides, about 500 nucleotides, about 400 nucleotides, about 300 nucleotides, about 200 nucleotides, about 100 nucleotides, about 80 nucleotides, about 70 nucleotides, about 60 nucleotides, about 50 nucleotides downstream of SEQ ID NO: 143. In some cases, the targeted region of the pre-mRNA is at most about 1500 nucleotides, about 1000 nucleotides, about 800 nucleotides, about 700 nucleotides, about 600 nucleotides, about 500 nucleotides, about 400 nucleotides, about 300 nucleotides, about 200 nucleotides, about 100 nucleotides, about 80 nucleotides, about 70 nucleotides, about 60 nucleotides, about 50 nucleotides downstream of genomic site GRCh38/hg38: chr16 89316933. In some cases. the targeted region of the pre-mRNA is at least about 1500 nucleotides, about 1000 nucleotides, about 800 nucleotides, about 700 nucleotides, about 600 nucleotides, about 500 nucleotides, about 400 nucleotides, about 300 nucleotides, about 200 nucleotides, about 100 nucleotides, about 80 nucleotides, about 70 nucleotides, about 60 nucleotides, about 50 nucleotides downstream of genomic site GRCh38/hg38: chr16 89316933. In some cases, the targeted region of the pre-mRNA is within a sequence SEQ ID NO: 143. In some cases, the targeted region of the pre-mRNA is within a sequence between a pair of genomic sites GRCh38/hg38: chr16 89317078, and GRCh38/hg38: chr16 89316933. In some cases, the therapeutic agent is an antisense oligomer complementary to a sequence with at least about 80%, 85%, 90%, 95%, 96%, 97%, 98%, 99% or 100% sequence identity to SEQ ID NO:143. In some cases, the therapeutic agent is an antisense oligomer complementary to a sequence with 100% sequence identity to SEQ ID NO:143. In some cases, the therapeutic agent increases level of a first processed mRNA encoding a protein having a sequence SEQ ID NO: 8110, and decreases level of a second processed mRNA encoding a protein having a sequence SEQ ID NO: 346. In some cases, the targeted region of the pre-mRNA is at most about 1500 nucleotides, about 1000 nucleotides, about 800 nucleotides, about 700 nucleotides, about 600 nucleotides, about 500 nucleotides, about 400 nucleotides, about 300 nucleotides, about 200 nucleotides, about 100 nucleotides, about 80 nucleotides, about 70 nucleotides, about 60 nucleotides, about 50 nucleotides upstream of SEQ ID NO: 144. In some cases, the targeted region of the pre-mRNA is at least about 1500 nucleotides, about 1000 nucleotides, about 800 nucleotides, about 700 nucleotides, about 600 nucleotides, about 500 nucleotides, about 400 nucleotides, about 300 nucleotides, about 200 nucleotides, about 100 nucleotides, about 80 nucleotides, about 70 nucleotides, about 60 nucleotides, about 50 nucleotides upstream of SEQ ID NO: 144. In some cases, the targeted region of the pre-mRNA is at most about 1500 nucleotides, about 1000 nucleotides, about 800 nucleotides, about 700 nucleotides, about 600 nucleotides, about 500 nucleotides, about 400 nucleotides, about 300 nucleotides, about 200 nucleotides, about 100 nucleotides, about 80 nucleotides, about 70 nucleotides, about 60 nucleotides, about 50 nucleotides upstream of genomic site GRCh38/hg38: chr16 89317078. In some cases, the targeted region of the pre-mRNA is at least about 1500 nucleotides, about 1000 nucleotides, about 800 nucleotides, about 700 nucleotides, about 600 nucleotides, about 500 nucleotides, about 400 nucleotides, about 300 nucleotides, about 200 nucleotides, about 100 nucleotides, about 80 nucleotides, about 70 nucleotides, about 60 nucleotides, about 50 nucleotides upstream of genomic site GRCh38/hg38: chr16 89317078. In some cases, the targeted region of the pre-mRNA is at most about 1500 nucleotides, about 1000 nucleotides, about 800 nucleotides, about 700 nucleotides, about 600 nucleotides, about 500 nucleotides, about 400 nucleotides, about 300 nucleotides, about 200 nucleotides, about 100 nucleotides, about 80 nucleotides, about 70 nucleotides, about 60 nucleotides, about 50 nucleotides downstream of SEQ ID NO: 144. In some cases, the targeted region of the pre-mRNA is at least about 1500 nucleotides, about 1000 nucleotides, about 800 nucleotides, about 700 nucleotides, about 600 nucleotides, about 500 nucleotides, about 400 nucleotides, about 300 nucleotides, about 200 nucleotides, about 100 nucleotides, about 80 nucleotides, about 70 nucleotides, about 60 nucleotides, about 50 nucleotides downstream of SEQ ID NO: 144. In some cases, the targeted region of the pre-mRNA is at most about 1500 nucleotides, about 1000 nucleotides, about 800 nucleotides, about 700 nucleotides, about 600 nucleotides, about 500 nucleotides, about 400 nucleotides, about 300 nucleotides, about 200 nucleotides, about 100 nucleotides, about 80 nucleotides, about 70 nucleotides, about 60 nucleotides, about 50 nucleotides downstream of genomic site GRCh38/hg38: chr16 89316933. In some cases. the targeted region of the pre-mRNA is at least about 1500 nucleotides, about 1000 nucleotides, about 800 nucleotides, about 700 nucleotides, about 600 nucleotides, about 500 nucleotides, about 400 nucleotides, about 300 nucleotides, about 200 nucleotides, about 100 nucleotides, about 80 nucleotides, about 70 nucleotides, about 60 nucleotides, about 50 nucleotides downstream of genomic site GRCh38/hg38: chr16 89316933. In some cases, the targeted region of the pre-mRNA is within a sequence SEQ ID NO: 144. In some cases, the targeted region of the pre-mRNA is within a sequence between a pair of genomic sites GRCh38/hg38: chr16 89317078, and GRCh38/hg38: chr16 89316933. In some cases, the therapeutic agent is an antisense oligomer complementary to a sequence with at least about 80%, 85%, 90%, 95%, 96%, 97%, 98%, 99% or 100% sequence identity to SEQ ID NO:144. In some cases, the therapeutic agent is an antisense oligomer complementary to a sequence with 100% sequence identity to SEQ ID NO:144. In some cases, the therapeutic agent increases level of a first processed mRNA encoding a protein having a sequence SEQ ID NO: 8111, and decreases level of a second processed mRNA encoding a protein having a sequence SEQ ID NO: 347. In some cases, the targeted region of the pre-mRNA is at most about 1500 nucleotides, about 1000 nucleotides, about 800 nucleotides, about 700 nucleotides, about 600 nucleotides, about 500 nucleotides, about 400 nucleotides, about 300 nucleotides, about 200 nucleotides, about 100 nucleotides, about 80 nucleotides, about 70 nucleotides, about 60 nucleotides, about 50 nucleotides upstream of SEQ ID NO: 145. In some cases, the targeted region of the pre-mRNA is at least about 1500 nucleotides, about 1000 nucleotides, about 800 nucleotides, about 700 nucleotides, about 600 nucleotides, about 500 nucleotides, about 400 nucleotides, about 300 nucleotides, about 200 nucleotides, about 100 nucleotides, about 80 nucleotides, about 70 nucleotides, about 60 nucleotides, about 50 nucleotides upstream of SEQ ID NO: 145. In some cases, the targeted region of the pre-mRNA is at most about 1500 nucleotides, about 1000 nucleotides, about 800 nucleotides, about 700 nucleotides, about 600 nucleotides, about 500 nucleotides, about 400 nucleotides, about 300 nucleotides, about 200 nucleotides, about 100 nucleotides, about 80 nucleotides, about 70 nucleotides, about 60 nucleotides, about 50 nucleotides upstream of genomic site GRCh38/hg38: chr16 89317078. In some cases, the targeted region of the pre-mRNA is at least about 1500 nucleotides, about 1000 nucleotides, about 800 nucleotides, about 700 nucleotides, about 600 nucleotides, about 500 nucleotides, about 400 nucleotides, about 300 nucleotides, about 200 nucleotides, about 100 nucleotides, about 80 nucleotides, about 70 nucleotides, about 60 nucleotides, about 50 nucleotides upstream of genomic site GRCh38/hg38: chr16 89317078. In some cases, the targeted region of the pre-mRNA is at most about 1500 nucleotides, about 1000 nucleotides, about 800 nucleotides, about 700 nucleotides, about 600 nucleotides, about 500 nucleotides, about 400 nucleotides, about 300 nucleotides, about 200 nucleotides, about 100 nucleotides, about 80 nucleotides, about 70 nucleotides, about 60 nucleotides, about 50 nucleotides downstream of SEQ ID NO: 145. In some cases, the targeted region of the pre-mRNA is at least about 1500 nucleotides, about 1000 nucleotides, about 800 nucleotides, about 700 nucleotides, about 600 nucleotides, about 500 nucleotides, about 400 nucleotides, about 300 nucleotides, about 200 nucleotides, about 100 nucleotides, about 80 nucleotides, about 70 nucleotides, about 60 nucleotides, about 50 nucleotides downstream of SEQ ID NO: 145. In some cases, the targeted region of the pre-mRNA is at most about 1500 nucleotides, about 1000 nucleotides, about 800 nucleotides, about 700 nucleotides, about 600 nucleotides, about 500 nucleotides, about 400 nucleotides, about 300 nucleotides, about 200 nucleotides, about 100 nucleotides, about 80 nucleotides, about 70 nucleotides, about 60 nucleotides, about 50 nucleotides downstream of genomic site GRCh38/hg38: chr16 89316933. In some cases. the targeted region of the pre-mRNA is at least about 1500 nucleotides, about 1000 nucleotides, about 800 nucleotides, about 700 nucleotides, about 600 nucleotides, about 500 nucleotides, about 400 nucleotides, about 300 nucleotides, about 200 nucleotides, about 100 nucleotides, about 80 nucleotides, about 70 nucleotides, about 60 nucleotides, about 50 nucleotides downstream of genomic site GRCh38/hg38: chr16 89316933. In some cases, the targeted region of the pre-mRNA is within a sequence SEQ ID NO: 145. In some cases, the targeted region of the pre-mRNA is within a sequence between a pair of genomic sites GRCh38/hg38: chr16 89317078, and GRCh38/hg38: chr16 89316933. In some cases, the therapeutic agent is an antisense oligomer complementary to a sequence with at least about 80%, 85%, 90%, 95%, 96%, 97%, 98%, 99% or 100% sequence identity to SEQ ID NO:145. In some cases, the therapeutic agent is an antisense oligomer complementary to a sequence with 100% sequence identity to SEQ ID NO:145. In some cases, the therapeutic agent increases level of a first processed mRNA encoding a protein having a sequence SEQ ID NO: 8112, and decreases level of a second processed mRNA encoding a protein having a sequence SEQ ID NO: 348. In some cases, the targeted region of the pre-mRNA is at most about 1500 nucleotides, about 1000 nucleotides, about 800 nucleotides, about 700 nucleotides, about 600 nucleotides, about 500 nucleotides, about 400 nucleotides, about 300 nucleotides, about 200 nucleotides, about 100 nucleotides, about 80 nucleotides, about 70 nucleotides, about 60 nucleotides, about 50 nucleotides upstream of SEQ ID NO: 146. In some cases, the targeted region of the pre-mRNA is at least about 1500 nucleotides, about 1000 nucleotides, about 800 nucleotides, about 700 nucleotides, about 600 nucleotides, about 500 nucleotides, about 400 nucleotides, about 300 nucleotides, about 200 nucleotides, about 100 nucleotides, about 80 nucleotides, about 70 nucleotides, about 60 nucleotides, about 50 nucleotides upstream of SEQ ID NO: 146. In some cases, the targeted region of the pre-mRNA is at most about 1500 nucleotides, about 1000 nucleotides, about 800 nucleotides, about 700 nucleotides, about 600 nucleotides, about 500 nucleotides, about 400 nucleotides, about 300 nucleotides, about 200 nucleotides, about 100 nucleotides, about 80 nucleotides, about 70 nucleotides, about 60 nucleotides, about 50 nucleotides upstream of genomic site GRCh38/hg38: chr16 89317075. In some cases, the targeted region of the pre-mRNA is at least about 1500 nucleotides, about 1000 nucleotides, about 800 nucleotides, about 700 nucleotides, about 600 nucleotides, about 500 nucleotides, about 400 nucleotides, about 300 nucleotides, about 200 nucleotides, about 100 nucleotides, about 80 nucleotides, about 70 nucleotides, about 60 nucleotides, about 50 nucleotides upstream of genomic site GRCh38/hg38: chr16 89317075. In some cases, the targeted region of the pre-mRNA is at most about 1500 nucleotides, about 1000 nucleotides, about 800 nucleotides, about 700 nucleotides, about 600 nucleotides, about 500 nucleotides, about 400 nucleotides, about 300 nucleotides, about 200 nucleotides, about 100 nucleotides, about 80 nucleotides, about 70 nucleotides, about 60 nucleotides, about 50 nucleotides downstream of SEQ ID NO: 146. In some cases, the targeted region of the pre-mRNA is at least about 1500 nucleotides, about 1000 nucleotides, about 800 nucleotides, about 700 nucleotides, about 600 nucleotides, about 500 nucleotides, about 400 nucleotides, about 300 nucleotides, about 200 nucleotides, about 100 nucleotides, about 80 nucleotides, about 70 nucleotides, about 60 nucleotides, about 50 nucleotides downstream of SEQ ID NO: 146. In some cases, the targeted region of the pre-mRNA is at most about 1500 nucleotides, about 1000 nucleotides, about 800 nucleotides, about 700 nucleotides, about 600 nucleotides, about 500 nucleotides, about 400 nucleotides, about 300 nucleotides, about 200 nucleotides, about 100 nucleotides, about 80 nucleotides, about 70 nucleotides, about 60 nucleotides, about 50 nucleotides downstream of genomic site GRCh38/hg38: chr16 89316933. In some cases. the targeted region of the pre-mRNA is at least about 1500 nucleotides, about 1000 nucleotides, about 800 nucleotides, about 700 nucleotides, about 600 nucleotides, about 500 nucleotides, about 400 nucleotides, about 300 nucleotides, about 200 nucleotides, about 100 nucleotides, about 80 nucleotides, about 70 nucleotides, about 60 nucleotides, about 50 nucleotides downstream of genomic site GRCh38/hg38: chr16 89316933. In some cases, the targeted region of the pre-mRNA is within a sequence SEQ ID NO: 146. In some cases, the targeted region of the pre-mRNA is within a sequence between a pair of genomic sites GRCh38/hg38: chr16 89317075, and GRCh38/hg38: chr16 89316933. In some cases, the therapeutic agent is an antisense oligomer complementary to a sequence with at least about 80%, 85%, 90%, 95%, 96%, 97%, 98%, 99% or 100% sequence identity to SEQ ID NO:146. In some cases, the therapeutic agent is an antisense oligomer complementary to a sequence with 100% sequence identity to SEQ ID NO:146. In some cases, the therapeutic agent increases level of a first processed mRNA encoding a protein having a sequence SEQ ID NO: 8113, and decreases level of a second processed mRNA encoding a protein having a sequence SEQ ID NO: 349. In some cases, the targeted region of the pre-mRNA is at most about 1500 nucleotides, about 1000 nucleotides, about 800 nucleotides, about 700 nucleotides, about 600 nucleotides, about 500 nucleotides, about 400 nucleotides, about 300 nucleotides, about 200 nucleotides, about 100 nucleotides, about 80 nucleotides, about 70 nucleotides, about 60 nucleotides, about 50 nucleotides upstream of SEQ ID NO: 147. In some cases, the targeted region of the pre-mRNA is at least about 1500 nucleotides, about 1000 nucleotides, about 800 nucleotides, about 700 nucleotides, about 600 nucleotides, about 500 nucleotides, about 400 nucleotides, about 300 nucleotides, about 200 nucleotides, about 100 nucleotides, about 80 nucleotides, about 70 nucleotides, about 60 nucleotides, about 50 nucleotides upstream of SEQ ID NO: 147. In some cases, the targeted region of the pre-mRNA is at most about 1500 nucleotides, about 1000 nucleotides, about 800 nucleotides, about 700 nucleotides, about 600 nucleotides, about 500 nucleotides, about 400 nucleotides, about 300 nucleotides, about 200 nucleotides, about 100 nucleotides, about 80 nucleotides, about 70 nucleotides, about 60 nucleotides, about 50 nucleotides upstream of genomic site GRCh38/hg38: chr16 89317078. In some cases, the targeted region of the pre-mRNA is at least about 1500 nucleotides, about 1000 nucleotides, about 800 nucleotides, about 700 nucleotides, about 600 nucleotides, about 500 nucleotides, about 400 nucleotides, about 300 nucleotides, about 200 nucleotides, about 100 nucleotides, about 80 nucleotides, about 70 nucleotides, about 60 nucleotides, about 50 nucleotides upstream of genomic site GRCh38/hg38: chr16 89317078. In some cases, the targeted region of the pre-mRNA is at most about 1500 nucleotides, about 1000 nucleotides, about 800 nucleotides, about 700 nucleotides, about 600 nucleotides, about 500 nucleotides, about 400 nucleotides, about 300 nucleotides, about 200 nucleotides, about 100 nucleotides, about 80 nucleotides, about 70 nucleotides, about 60 nucleotides, about 50 nucleotides downstream of SEQ ID NO: 147. In some cases, the targeted region of the pre-mRNA is at least about 1500 nucleotides, about 1000 nucleotides, about 800 nucleotides, about 700 nucleotides, about 600 nucleotides, about 500 nucleotides, about 400 nucleotides, about 300 nucleotides, about 200 nucleotides, about 100 nucleotides, about 80 nucleotides, about 70 nucleotides, about 60 nucleotides, about 50 nucleotides downstream of SEQ ID NO: 147. In some cases, the targeted region of the pre-mRNA is at most about 1500 nucleotides, about 1000 nucleotides, about 800 nucleotides, about 700 nucleotides, about 600 nucleotides, about 500 nucleotides, about 400 nucleotides, about 300 nucleotides, about 200 nucleotides, about 100 nucleotides, about 80 nucleotides, about 70 nucleotides, about 60 nucleotides, about 50 nucleotides downstream of genomic site GRCh38/hg38: chr16 89316933. In some cases. the targeted region of the pre-mRNA is at least about 1500 nucleotides, about 1000 nucleotides, about 800 nucleotides, about 700 nucleotides, about 600 nucleotides, about 500 nucleotides, about 400 nucleotides, about 300 nucleotides, about 200 nucleotides, about 100 nucleotides, about 80 nucleotides, about 70 nucleotides, about 60 nucleotides, about 50 nucleotides downstream of genomic site GRCh38/hg38: chr16 89316933. In some cases, the targeted region of the pre-mRNA is within a sequence SEQ ID NO: 147. In some cases, the targeted region of the pre-mRNA is within a sequence between a pair of genomic sites GRCh38/hg38: chr16 89317078, and GRCh38/hg38: chr16 89316933. In some cases, the therapeutic agent is an antisense oligomer complementary to a sequence with at least about 80%, 85%, 90%, 95%, 96%, 97%, 98%, 99% or 100% sequence identity to SEQ ID NO:147. In some cases, the therapeutic agent is an antisense oligomer complementary to a sequence with 100% sequence identity to SEQ ID NO:147. In some cases, the therapeutic agent increases level of a first processed mRNA encoding a protein having a sequence SEQ ID NO: 8114, and decreases level of a second processed mRNA encoding a protein having a sequence SEQ ID NO: 350. In some cases, the targeted region of the pre-mRNA is at most about 1500 nucleotides, about 1000 nucleotides, about 800 nucleotides, about 700 nucleotides, about 600 nucleotides, about 500 nucleotides, about 400 nucleotides, about 300 nucleotides, about 200 nucleotides, about 100 nucleotides, about 80 nucleotides, about 70 nucleotides, about 60 nucleotides, about 50 nucleotides upstream of SEQ ID NO: 148. In some cases, the targeted region of the pre-mRNA is at least about 1500 nucleotides, about 1000 nucleotides, about 800 nucleotides, about 700 nucleotides, about 600 nucleotides, about 500 nucleotides, about 400 nucleotides, about 300 nucleotides, about 200 nucleotides, about 100 nucleotides, about 80 nucleotides, about 70 nucleotides, about 60 nucleotides, about 50 nucleotides upstream of SEQ ID NO: 148. In some cases, the targeted region of the pre-mRNA is at most about 1500 nucleotides, about 1000 nucleotides, about 800 nucleotides, about 700 nucleotides, about 600 nucleotides, about 500 nucleotides, about 400 nucleotides, about 300 nucleotides, about 200 nucleotides, about 100 nucleotides, about 80 nucleotides, about 70 nucleotides, about 60 nucleotides, about 50 nucleotides upstream of genomic site GRCh38/hg38: chr16 89317078. In some cases, the targeted region of the pre-mRNA is at least about 1500 nucleotides, about 1000 nucleotides, about 800 nucleotides, about 700 nucleotides, about 600 nucleotides, about 500 nucleotides, about 400 nucleotides, about 300 nucleotides, about 200 nucleotides, about 100 nucleotides, about 80 nucleotides, about 70 nucleotides, about 60 nucleotides, about 50 nucleotides upstream of genomic site GRCh38/hg38: chr16 89317078. In some cases, the targeted region of the pre-mRNA is at most about 1500 nucleotides, about 1000 nucleotides, about 800 nucleotides, about 700 nucleotides, about 600 nucleotides, about 500 nucleotides, about 400 nucleotides, about 300 nucleotides, about 200 nucleotides, about 100 nucleotides, about 80 nucleotides, about 70 nucleotides, about 60 nucleotides, about 50 nucleotides downstream of SEQ ID NO: 148. In some cases, the targeted region of the pre-mRNA is at least about 1500 nucleotides, about 1000 nucleotides, about 800 nucleotides, about 700 nucleotides, about 600 nucleotides, about 500 nucleotides, about 400 nucleotides, about 300 nucleotides, about 200 nucleotides, about 100 nucleotides, about 80 nucleotides, about 70 nucleotides, about 60 nucleotides, about 50 nucleotides downstream of SEQ ID NO: 148. In some cases, the targeted region of the pre-mRNA is at most about 1500 nucleotides, about 1000 nucleotides, about 800 nucleotides, about 700 nucleotides, about 600 nucleotides, about 500 nucleotides, about 400 nucleotides, about 300 nucleotides, about 200 nucleotides, about 100 nucleotides, about 80 nucleotides, about 70 nucleotides, about 60 nucleotides, about 50 nucleotides downstream of genomic site GRCh38/hg38: chr16 89316933. In some cases. the targeted region of the pre-mRNA is at least about 1500 nucleotides, about 1000 nucleotides, about 800 nucleotides, about 700 nucleotides, about 600 nucleotides, about 500 nucleotides, about 400 nucleotides, about 300 nucleotides, about 200 nucleotides, about 100 nucleotides, about 80 nucleotides, about 70 nucleotides, about 60 nucleotides, about 50 nucleotides downstream of genomic site GRCh38/hg38: chr16 89316933. In some cases, the targeted region of the pre-mRNA is within a sequence SEQ ID NO: 148. In some cases, the targeted region of the pre-mRNA is within a sequence between a pair of genomic sites GRCh38/hg38: chr16 89317078, and GRCh38/hg38: chr16 89316933. In some cases, the therapeutic agent is an antisense oligomer complementary to a sequence with at least about 80%, 85%, 90%, 95%, 96%, 97%, 98%, 99% or 100% sequence identity to SEQ ID NO:148. In some cases, the therapeutic agent is an antisense oligomer complementary to a sequence with 100% sequence identity to SEQ ID NO:148. In some cases, the therapeutic agent increases level of a first processed mRNA encoding a protein having a sequence SEQ ID NO: 8115, and decreases level of a second processed mRNA encoding a protein having a sequence SEQ ID NO: 351. In some cases, the targeted region of the pre-mRNA is at most about 1500 nucleotides, about 1000 nucleotides, about 800 nucleotides, about 700 nucleotides, about 600 nucleotides, about 500 nucleotides, about 400 nucleotides, about 300 nucleotides, about 200 nucleotides, about 100 nucleotides, about 80 nucleotides, about 70 nucleotides, about 60 nucleotides, about 50 nucleotides upstream of SEQ ID NO: 149. In some cases, the targeted region of the pre-mRNA is at least about 1500 nucleotides, about 1000 nucleotides, about 800 nucleotides, about 700 nucleotides, about 600 nucleotides, about 500 nucleotides, about 400 nucleotides, about 300 nucleotides, about 200 nucleotides, about 100 nucleotides, about 80 nucleotides, about 70 nucleotides, about 60 nucleotides, about 50 nucleotides upstream of SEQ ID NO: 149. In some cases, the targeted region of the pre-mRNA is at most about 1500 nucleotides, about 1000 nucleotides, about 800 nucleotides, about 700 nucleotides, about 600 nucleotides, about 500 nucleotides, about 400 nucleotides, about 300 nucleotides, about 200 nucleotides, about 100 nucleotides, about 80 nucleotides, about 70 nucleotides, about 60 nucleotides, about 50 nucleotides upstream of genomic site GRCh38/hg38: chr16 89317075. In some cases, the targeted region of the pre-mRNA is at least about 1500 nucleotides, about 1000 nucleotides, about 800 nucleotides, about 700 nucleotides, about 600 nucleotides, about 500 nucleotides, about 400 nucleotides, about 300 nucleotides, about 200 nucleotides, about 100 nucleotides, about 80 nucleotides, about 70 nucleotides, about 60 nucleotides, about 50 nucleotides upstream of genomic site GRCh38/hg38: chr16 89317075. In some cases, the targeted region of the pre-mRNA is at most about 1500 nucleotides, about 1000 nucleotides, about 800 nucleotides, about 700 nucleotides, about 600 nucleotides, about 500 nucleotides, about 400 nucleotides, about 300 nucleotides, about 200 nucleotides, about 100 nucleotides, about 80 nucleotides, about 70 nucleotides, about 60 nucleotides, about 50 nucleotides downstream of SEQ ID NO: 149. In some cases, the targeted region of the pre-mRNA is at least about 1500 nucleotides, about 1000 nucleotides, about 800 nucleotides, about 700 nucleotides, about 600 nucleotides, about 500 nucleotides, about 400 nucleotides, about 300 nucleotides, about 200 nucleotides, about 100 nucleotides, about 80 nucleotides, about 70 nucleotides, about 60 nucleotides, about 50 nucleotides downstream of SEQ ID NO: 149. In some cases, the targeted region of the pre-mRNA is at most about 1500 nucleotides, about 1000 nucleotides, about 800 nucleotides, about 700 nucleotides, about 600 nucleotides, about 500 nucleotides, about 400 nucleotides, about 300 nucleotides, about 200 nucleotides, about 100 nucleotides, about 80 nucleotides, about 70 nucleotides, about 60 nucleotides, about 50 nucleotides downstream of genomic site GRCh38/hg38: chr16 89316933. In some cases. the targeted region of the pre-mRNA is at least about 1500 nucleotides, about 1000 nucleotides, about 800 nucleotides, about 700 nucleotides, about 600 nucleotides, about 500 nucleotides, about 400 nucleotides, about 300 nucleotides, about 200 nucleotides, about 100 nucleotides, about 80 nucleotides, about 70 nucleotides, about 60 nucleotides, about 50 nucleotides downstream of genomic site GRCh38/hg38: chr16 89316933. In some cases, the targeted region of the pre-mRNA is within a sequence SEQ ID NO: 149. In some cases, the targeted region of the pre-mRNA is within a sequence between a pair of genomic sites GRCh38/hg38: chr16 89317075, and GRCh38/hg38: chr16 89316933. In some cases, the therapeutic agent is an antisense oligomer complementary to a sequence with at least about 80%, 85%, 90%, 95%, 96%, 97%, 98%, 99% or 100% sequence identity to SEQ ID NO:149. In some cases, the therapeutic agent is an antisense oligomer complementary to a sequence with 100% sequence identity to SEQ ID NO:149. In some cases, the therapeutic agent increases level of a first processed mRNA encoding a protein having a sequence SEQ ID NO: 8116, and decreases level of a second processed mRNA encoding a protein having a sequence SEQ ID NO: 352. In some cases, the targeted region of the pre-mRNA is at most about 1500 nucleotides, about 1000 nucleotides, about 800 nucleotides, about 700 nucleotides, about 600 nucleotides, about 500 nucleotides, about 400 nucleotides, about 300 nucleotides, about 200 nucleotides, about 100 nucleotides, about 80 nucleotides, about 70 nucleotides, about 60 nucleotides, about 50 nucleotides upstream of SEQ ID NO: 150. In some cases, the targeted region of the pre-mRNA is at least about 1500 nucleotides, about 1000 nucleotides, about 800 nucleotides, about 700 nucleotides, about 600 nucleotides, about 500 nucleotides, about 400 nucleotides, about 300 nucleotides, about 200 nucleotides, about 100 nucleotides, about 80 nucleotides, about 70 nucleotides, about 60 nucleotides, about 50 nucleotides upstream of SEQ ID NO: 150. In some cases, the targeted region of the pre-mRNA is at most about 1500 nucleotides, about 1000 nucleotides, about 800 nucleotides, about 700 nucleotides, about 600 nucleotides, about 500 nucleotides, about 400 nucleotides, about 300 nucleotides, about 200 nucleotides, about 100 nucleotides, about 80 nucleotides, about 70 nucleotides, about 60 nucleotides, about 50 nucleotides upstream of genomic site GRCh38/hg38: chr16 89317078. In some cases, the targeted region of the pre-mRNA is at least about 1500 nucleotides, about 1000 nucleotides, about 800 nucleotides, about 700 nucleotides, about 600 nucleotides, about 500 nucleotides, about 400 nucleotides, about 300 nucleotides, about 200 nucleotides, about 100 nucleotides, about 80 nucleotides, about 70 nucleotides, about 60 nucleotides, about 50 nucleotides upstream of genomic site GRCh38/hg38: chr16 89317078. In some cases, the targeted region of the pre-mRNA is at most about 1500 nucleotides, about 1000 nucleotides, about 800 nucleotides, about 700 nucleotides, about 600 nucleotides, about 500 nucleotides, about 400 nucleotides, about 300 nucleotides, about 200 nucleotides, about 100 nucleotides, about 80 nucleotides, about 70 nucleotides, about 60 nucleotides, about 50 nucleotides downstream of SEQ ID NO: 150. In some cases, the targeted region of the pre-mRNA is at least about 1500 nucleotides, about 1000 nucleotides, about 800 nucleotides, about 700 nucleotides, about 600 nucleotides, about 500 nucleotides, about 400 nucleotides, about 300 nucleotides, about 200 nucleotides, about 100 nucleotides, about 80 nucleotides, about 70 nucleotides, about 60 nucleotides, about 50 nucleotides downstream of SEQ ID NO: 150. In some cases, the targeted region of the pre-mRNA is at most about 1500 nucleotides, about 1000 nucleotides, about 800 nucleotides, about 700 nucleotides, about 600 nucleotides, about 500 nucleotides, about 400 nucleotides, about 300 nucleotides, about 200 nucleotides, about 100 nucleotides, about 80 nucleotides, about 70 nucleotides, about 60 nucleotides, about 50 nucleotides downstream of genomic site GRCh38/hg38: chr16 89316933. In some cases. the targeted region of the pre-mRNA is at least about 1500 nucleotides, about 1000 nucleotides, about 800 nucleotides, about 700 nucleotides, about 600 nucleotides, about 500 nucleotides, about 400 nucleotides, about 300 nucleotides, about 200 nucleotides, about 100 nucleotides, about 80 nucleotides, about 70 nucleotides, about 60 nucleotides, about 50 nucleotides downstream of genomic site GRCh38/hg38: chr16 89316933. In some cases, the targeted region of the pre-mRNA is within a sequence SEQ ID NO: 150. In some cases, the targeted region of the pre-mRNA is within a sequence between a pair of genomic sites GRCh38/hg38: chr16 89317078, and GRCh38/hg38: chr16 89316933. In some cases, the therapeutic agent is an antisense oligomer complementary to a sequence with at least about 80%, 85%, 90%, 95%, 96%, 97%, 98%, 99% or 100% sequence identity to SEQ ID NO:150. In some cases, the therapeutic agent is an antisense oligomer complementary to a sequence with 100% sequence identity to SEQ ID NO:150. In some cases, the therapeutic agent increases level of a first processed mRNA encoding a protein having a sequence SEQ ID NO: 8117, and decreases level of a second processed mRNA encoding a protein having a sequence SEQ ID NO: 353. In some cases, the targeted region of the pre-mRNA is at most about 1500 nucleotides, about 1000 nucleotides, about 800 nucleotides, about 700 nucleotides, about 600 nucleotides, about 500 nucleotides, about 400 nucleotides, about 300 nucleotides, about 200 nucleotides, about 100 nucleotides, about 80 nucleotides, about 70 nucleotides, about 60 nucleotides, about 50 nucleotides upstream of SEQ ID NO: 151. In some cases, the targeted region of the pre-mRNA is at least about 1500 nucleotides, about 1000 nucleotides, about 800 nucleotides, about 700 nucleotides, about 600 nucleotides, about 500 nucleotides, about 400 nucleotides, about 300 nucleotides, about 200 nucleotides, about 100 nucleotides, about 80 nucleotides, about 70 nucleotides, about 60 nucleotides, about 50 nucleotides upstream of SEQ ID NO: 151. In some cases, the targeted region of the pre-mRNA is at most about 1500 nucleotides, about 1000 nucleotides, about 800 nucleotides, about 700 nucleotides, about 600 nucleotides, about 500 nucleotides, about 400 nucleotides, about 300 nucleotides, about 200 nucleotides, about 100 nucleotides, about 80 nucleotides, about 70 nucleotides, about 60 nucleotides, about 50 nucleotides upstream of genomic site GRCh38/hg38: chr16 89317078. In some cases, the targeted region of the pre-mRNA is at least about 1500 nucleotides, about 1000 nucleotides, about 800 nucleotides, about 700 nucleotides, about 600 nucleotides, about 500 nucleotides, about 400 nucleotides, about 300 nucleotides, about 200 nucleotides, about 100 nucleotides, about 80 nucleotides, about 70 nucleotides, about 60 nucleotides, about 50 nucleotides upstream of genomic site GRCh38/hg38: chr16 89317078. In some cases, the targeted region of the pre-mRNA is at most about 1500 nucleotides, about 1000 nucleotides, about 800 nucleotides, about 700 nucleotides, about 600 nucleotides, about 500 nucleotides, about 400 nucleotides, about 300 nucleotides, about 200 nucleotides, about 100 nucleotides, about 80 nucleotides, about 70 nucleotides, about 60 nucleotides, about 50 nucleotides downstream of SEQ ID NO: 151. In some cases, the targeted region of the pre-mRNA is at least about 1500 nucleotides, about 1000 nucleotides, about 800 nucleotides, about 700 nucleotides, about 600 nucleotides, about 500 nucleotides, about 400 nucleotides, about 300 nucleotides, about 200 nucleotides, about 100 nucleotides, about 80 nucleotides, about 70 nucleotides, about 60 nucleotides, about 50 nucleotides downstream of SEQ ID NO: 151. In some cases, the targeted region of the pre-mRNA is at most about 1500 nucleotides, about 1000 nucleotides, about 800 nucleotides, about 700 nucleotides, about 600 nucleotides, about 500 nucleotides, about 400 nucleotides, about 300 nucleotides, about 200 nucleotides, about 100 nucleotides, about 80 nucleotides, about 70 nucleotides, about 60 nucleotides, about 50 nucleotides downstream of genomic site GRCh38/hg38: chr16 89316933. In some cases. the targeted region of the pre-mRNA is at least about 1500 nucleotides, about 1000 nucleotides, about 800 nucleotides, about 700 nucleotides, about 600 nucleotides, about 500 nucleotides, about 400 nucleotides, about 300 nucleotides, about 200 nucleotides, about 100 nucleotides, about 80 nucleotides, about 70 nucleotides, about 60 nucleotides, about 50 nucleotides downstream of genomic site GRCh38/hg38: chr16 89316933. In some cases, the targeted region of the pre-mRNA is within a sequence SEQ ID NO: 151. In some cases, the targeted region of the pre-mRNA is within a sequence between a pair of genomic sites GRCh38/hg38: chr16 89317078, and GRCh38/hg38: chr16 89316933. In some cases, the therapeutic agent is an antisense oligomer complementary to a sequence with at least about 80%, 85%, 90%, 95%, 96%, 97%, 98%, 99% or 100% sequence identity to SEQ ID NO:151. In some cases, the therapeutic agent is an antisense oligomer complementary to a sequence with 100% sequence identity to SEQ ID NO:151. In some cases, the therapeutic agent increases level of a first processed mRNA encoding a protein having a sequence SEQ ID NO: 8118, and decreases level of a second processed mRNA encoding a protein having a sequence SEQ ID NO: 354. In some cases, the targeted region of the pre-mRNA is at most about 1500 nucleotides, about 1000 nucleotides, about 800 nucleotides, about 700 nucleotides, about 600 nucleotides, about 500 nucleotides, about 400 nucleotides, about 300 nucleotides, about 200 nucleotides, about 100 nucleotides, about 80 nucleotides, about 70 nucleotides, about 60 nucleotides, about 50 nucleotides upstream of SEQ ID NO: 152. In some cases, the targeted region of the pre-mRNA is at least about 1500 nucleotides, about 1000 nucleotides, about 800 nucleotides, about 700 nucleotides, about 600 nucleotides, about 500 nucleotides, about 400 nucleotides, about 300 nucleotides, about 200 nucleotides, about 100 nucleotides, about 80 nucleotides, about 70 nucleotides, about 60 nucleotides, about 50 nucleotides upstream of SEQ ID NO: 152. In some cases, the targeted region of the pre-mRNA is at most about 1500 nucleotides, about 1000 nucleotides, about 800 nucleotides, about 700 nucleotides, about 600 nucleotides, about 500 nucleotides, about 400 nucleotides, about 300 nucleotides, about 200 nucleotides, about 100 nucleotides, about 80 nucleotides, about 70 nucleotides, about 60 nucleotides, about 50 nucleotides upstream of genomic site GRCh38/hg38: chr16 89317075. In some cases, the targeted region of the pre-mRNA is at least about 1500 nucleotides, about 1000 nucleotides, about 800 nucleotides, about 700 nucleotides, about 600 nucleotides, about 500 nucleotides, about 400 nucleotides, about 300 nucleotides, about 200 nucleotides, about 100 nucleotides, about 80 nucleotides, about 70 nucleotides, about 60 nucleotides, about 50 nucleotides upstream of genomic site GRCh38/hg38: chr16 89317075. In some cases, the targeted region of the pre-mRNA is at most about 1500 nucleotides, about 1000 nucleotides, about 800 nucleotides, about 700 nucleotides, about 600 nucleotides, about 500 nucleotides, about 400 nucleotides, about 300 nucleotides, about 200 nucleotides, about 100 nucleotides, about 80 nucleotides, about 70 nucleotides, about 60 nucleotides, about 50 nucleotides downstream of SEQ ID NO: 152. In some cases, the targeted region of the pre-mRNA is at least about 1500 nucleotides, about 1000 nucleotides, about 800 nucleotides, about 700 nucleotides, about 600 nucleotides, about 500 nucleotides, about 400 nucleotides, about 300 nucleotides, about 200 nucleotides, about 100 nucleotides, about 80 nucleotides, about 70 nucleotides, about 60 nucleotides, about 50 nucleotides downstream of SEQ ID NO: 152. In some cases, the targeted region of the pre-mRNA is at most about 1500 nucleotides, about 1000 nucleotides, about 800 nucleotides, about 700 nucleotides, about 600 nucleotides, about 500 nucleotides, about 400 nucleotides, about 300 nucleotides, about 200 nucleotides, about 100 nucleotides, about 80 nucleotides, about 70 nucleotides, about 60 nucleotides, about 50 nucleotides downstream of genomic site GRCh38/hg38: chr16 89316933. In some cases. the targeted region of the pre-mRNA is at least about 1500 nucleotides, about 1000 nucleotides, about 800 nucleotides, about 700 nucleotides, about 600 nucleotides, about 500 nucleotides, about 400 nucleotides, about 300 nucleotides, about 200 nucleotides, about 100 nucleotides, about 80 nucleotides, about 70 nucleotides, about 60 nucleotides, about 50 nucleotides downstream of genomic site GRCh38/hg38: chr16 89316933. In some cases, the targeted region of the pre-mRNA is within a sequence SEQ ID NO: 152. In some cases, the targeted region of the pre-mRNA is within a sequence between a pair of genomic sites GRCh38/hg38: chr16 89317075, and GRCh38/hg38: chr16 89316933. In some cases, the therapeutic agent is an antisense oligomer complementary to a sequence with at least about 80%, 85%, 90%, 95%, 96%, 97%, 98%, 99% or 100% sequence identity to SEQ ID NO:152. In some cases, the therapeutic agent is an antisense oligomer complementary to a sequence with 100% sequence identity to SEQ ID NO:152. In some cases, the therapeutic agent increases level of a first processed mRNA encoding a protein having a sequence SEQ ID NO: 8119, and decreases level of a second processed mRNA encoding a protein having a sequence SEQ ID NO: 355. In some cases, the targeted region of the pre-mRNA is at most about 1500 nucleotides, about 1000 nucleotides, about 800 nucleotides, about 700 nucleotides, about 600 nucleotides, about 500 nucleotides, about 400 nucleotides, about 300 nucleotides, about 200 nucleotides, about 100 nucleotides, about 80 nucleotides, about 70 nucleotides, about 60 nucleotides, about 50 nucleotides upstream of SEQ ID NO: 153. In some cases, the targeted region of the pre-mRNA is at least about 1500 nucleotides, about 1000 nucleotides, about 800 nucleotides, about 700 nucleotides, about 600 nucleotides, about 500 nucleotides, about 400 nucleotides, about 300 nucleotides, about 200 nucleotides, about 100 nucleotides, about 80 nucleotides, about 70 nucleotides, about 60 nucleotides, about 50 nucleotides upstream of SEQ ID NO: 153. In some cases, the targeted region of the pre-mRNA is at most about 1500 nucleotides, about 1000 nucleotides, about 800 nucleotides, about 700 nucleotides, about 600 nucleotides, about 500 nucleotides, about 400 nucleotides, about 300 nucleotides, about 200 nucleotides, about 100 nucleotides, about 80 nucleotides, about 70 nucleotides, about 60 nucleotides, about 50 nucleotides upstream of genomic site GRCh38/hg38: chr16 89317078. In some cases, the targeted region of the pre-mRNA is at least about 1500 nucleotides, about 1000 nucleotides, about 800 nucleotides, about 700 nucleotides, about 600 nucleotides, about 500 nucleotides, about 400 nucleotides, about 300 nucleotides, about 200 nucleotides, about 100 nucleotides, about 80 nucleotides, about 70 nucleotides, about 60 nucleotides, about 50 nucleotides upstream of genomic site GRCh38/hg38: chr16 89317078. In some cases, the targeted region of the pre-mRNA is at most about 1500 nucleotides, about 1000 nucleotides, about 800 nucleotides, about 700 nucleotides, about 600 nucleotides, about 500 nucleotides, about 400 nucleotides, about 300 nucleotides, about 200 nucleotides, about 100 nucleotides, about 80 nucleotides, about 70 nucleotides, about 60 nucleotides, about 50 nucleotides downstream of SEQ ID NO: 153. In some cases, the targeted region of the pre-mRNA is at least about 1500 nucleotides, about 1000 nucleotides, about 800 nucleotides, about 700 nucleotides, about 600 nucleotides, about 500 nucleotides, about 400 nucleotides, about 300 nucleotides, about 200 nucleotides, about 100 nucleotides, about 80 nucleotides, about 70 nucleotides, about 60 nucleotides, about 50 nucleotides downstream of SEQ ID NO: 153. In some cases, the targeted region of the pre-mRNA is at most about 1500 nucleotides, about 1000 nucleotides, about 800 nucleotides, about 700 nucleotides, about 600 nucleotides, about 500 nucleotides, about 400 nucleotides, about 300 nucleotides, about 200 nucleotides, about 100 nucleotides, about 80 nucleotides, about 70 nucleotides, about 60 nucleotides, about 50 nucleotides downstream of genomic site GRCh38/hg38: chr16 89316933. In some cases. the targeted region of the pre-mRNA is at least about 1500 nucleotides, about 1000 nucleotides, about 800 nucleotides, about 700 nucleotides, about 600 nucleotides, about 500 nucleotides, about 400 nucleotides, about 300 nucleotides, about 200 nucleotides, about 100 nucleotides, about 80 nucleotides, about 70 nucleotides, about 60 nucleotides, about 50 nucleotides downstream of genomic site GRCh38/hg38: chr16 89316933. In some cases, the targeted region of the pre-mRNA is within a sequence SEQ ID NO: 153. In some cases, the targeted region of the pre-mRNA is within a sequence between a pair of genomic sites GRCh38/hg38: chr16 89317078, and GRCh38/hg38: chr16 89316933. In some cases, the therapeutic agent is an antisense oligomer complementary to a sequence with at least about 80%, 85%, 90%, 95%, 96%, 97%, 98%, 99% or 100% sequence identity to SEQ ID NO:153. In some cases, the therapeutic agent is an antisense oligomer complementary to a sequence with 100% sequence identity to SEQ ID NO:153. In some cases, the therapeutic agent increases level of a first processed mRNA encoding a protein having a sequence SEQ ID NO: 8120, and decreases level of a second processed mRNA encoding a protein having a sequence SEQ ID NO: 356. In some cases, the targeted region of the pre-mRNA is at most about 1500 nucleotides, about 1000 nucleotides, about 800 nucleotides, about 700 nucleotides, about 600 nucleotides, about 500 nucleotides, about 400 nucleotides, about 300 nucleotides, about 200 nucleotides, about 100 nucleotides, about 80 nucleotides, about 70 nucleotides, about 60 nucleotides, about 50 nucleotides upstream of SEQ ID NO: 154. In some cases, the targeted region of the pre-mRNA is at least about 1500 nucleotides, about 1000 nucleotides, about 800 nucleotides, about 700 nucleotides, about 600 nucleotides, about 500 nucleotides, about 400 nucleotides, about 300 nucleotides, about 200 nucleotides, about 100 nucleotides, about 80 nucleotides, about 70 nucleotides, about 60 nucleotides, about 50 nucleotides upstream of SEQ ID NO: 154. In some cases, the targeted region of the pre-mRNA is at most about 1500 nucleotides, about 1000 nucleotides, about 800 nucleotides, about 700 nucleotides, about 600 nucleotides, about 500 nucleotides, about 400 nucleotides, about 300 nucleotides, about 200 nucleotides, about 100 nucleotides, about 80 nucleotides, about 70 nucleotides, about 60 nucleotides, about 50 nucleotides upstream of genomic site GRCh38/hg38: chr16 89317075. In some cases, the targeted region of the pre-mRNA is at least about 1500 nucleotides, about 1000 nucleotides, about 800 nucleotides, about 700 nucleotides, about 600 nucleotides, about 500 nucleotides, about 400 nucleotides, about 300 nucleotides, about 200 nucleotides, about 100 nucleotides, about 80 nucleotides, about 70 nucleotides, about 60 nucleotides, about 50 nucleotides upstream of genomic site GRCh38/hg38: chr16 89317075. In some cases, the targeted region of the pre-mRNA is at most about 1500 nucleotides, about 1000 nucleotides, about 800 nucleotides, about 700 nucleotides, about 600 nucleotides, about 500 nucleotides, about 400 nucleotides, about 300 nucleotides, about 200 nucleotides, about 100 nucleotides, about 80 nucleotides, about 70 nucleotides, about 60 nucleotides, about 50 nucleotides downstream of SEQ ID NO: 154. In some cases, the targeted region of the pre-mRNA is at least about 1500 nucleotides, about 1000 nucleotides, about 800 nucleotides, about 700 nucleotides, about 600 nucleotides, about 500 nucleotides, about 400 nucleotides, about 300 nucleotides, about 200 nucleotides, about 100 nucleotides, about 80 nucleotides, about 70 nucleotides, about 60 nucleotides, about 50 nucleotides downstream of SEQ ID NO: 154. In some cases, the targeted region of the pre-mRNA is at most about 1500 nucleotides, about 1000 nucleotides, about 800 nucleotides, about 700 nucleotides, about 600 nucleotides, about 500 nucleotides, about 400 nucleotides, about 300 nucleotides, about 200 nucleotides, about 100 nucleotides, about 80 nucleotides, about 70 nucleotides, about 60 nucleotides, about 50 nucleotides downstream of genomic site GRCh38/hg38: chr16 89316933. In some cases. the targeted region of the pre-mRNA is at least about 1500 nucleotides, about 1000 nucleotides, about 800 nucleotides, about 700 nucleotides, about 600 nucleotides, about 500 nucleotides, about 400 nucleotides, about 300 nucleotides, about 200 nucleotides, about 100 nucleotides, about 80 nucleotides, about 70 nucleotides, about 60 nucleotides, about 50 nucleotides downstream of genomic site GRCh38/hg38: chr16 89316933. In some cases, the targeted region of the pre-mRNA is within a sequence SEQ ID NO: 154. In some cases, the targeted region of the pre-mRNA is within a sequence between a pair of genomic sites GRCh38/hg38: chr16 89317075, and GRCh38/hg38: chr16 89316933. In some cases, the therapeutic agent is an antisense oligomer complementary to a sequence with at least about 80%, 85%, 90%, 95%, 96%, 97%, 98%, 99% or 100% sequence identity to SEQ ID NO:154. In some cases, the therapeutic agent is an antisense oligomer complementary to a sequence with 100% sequence identity to SEQ ID NO:154. In some cases, the therapeutic agent increases level of a first processed mRNA encoding a protein having a sequence SEQ ID NO: 8121, and decreases level of a second processed mRNA encoding a protein having a sequence SEQ ID NO: 357. In some cases, the targeted region of the pre-mRNA is at most about 1500 nucleotides, about 1000 nucleotides, about 800 nucleotides, about 700 nucleotides, about 600 nucleotides, about 500 nucleotides, about 400 nucleotides, about 300 nucleotides, about 200 nucleotides, about 100 nucleotides, about 80 nucleotides, about 70 nucleotides, about 60 nucleotides, about 50 nucleotides upstream of SEQ ID NO: 155. In some cases, the targeted region of the pre-mRNA is at least about 1500 nucleotides, about 1000 nucleotides, about 800 nucleotides, about 700 nucleotides, about 600 nucleotides, about 500 nucleotides, about 400 nucleotides, about 300 nucleotides, about 200 nucleotides, about 100 nucleotides, about 80 nucleotides, about 70 nucleotides, about 60 nucleotides, about 50 nucleotides upstream of SEQ ID NO: 155. In some cases, the targeted region of the pre-mRNA is at most about 1500 nucleotides, about 1000 nucleotides, about 800 nucleotides, about 700 nucleotides, about 600 nucleotides, about 500 nucleotides, about 400 nucleotides, about 300 nucleotides, about 200 nucleotides, about 100 nucleotides, about 80 nucleotides, about 70 nucleotides, about 60 nucleotides, about 50 nucleotides upstream of genomic site GRCh38/hg38: chr16 89317078. In some cases, the targeted region of the pre-mRNA is at least about 1500 nucleotides, about 1000 nucleotides, about 800 nucleotides, about 700 nucleotides, about 600 nucleotides, about 500 nucleotides, about 400 nucleotides, about 300 nucleotides, about 200 nucleotides, about 100 nucleotides, about 80 nucleotides, about 70 nucleotides, about 60 nucleotides, about 50 nucleotides upstream of genomic site GRCh38/hg38: chr16 89317078. In some cases, the targeted region of the pre-mRNA is at most about 1500 nucleotides, about 1000 nucleotides, about 800 nucleotides, about 700 nucleotides, about 600 nucleotides, about 500 nucleotides, about 400 nucleotides, about 300 nucleotides, about 200 nucleotides, about 100 nucleotides, about 80 nucleotides, about 70 nucleotides, about 60 nucleotides, about 50 nucleotides downstream of SEQ ID NO: 155. In some cases, the targeted region of the pre-mRNA is at least about 1500 nucleotides, about 1000 nucleotides, about 800 nucleotides, about 700 nucleotides, about 600 nucleotides, about 500 nucleotides, about 400 nucleotides, about 300 nucleotides, about 200 nucleotides, about 100 nucleotides, about 80 nucleotides, about 70 nucleotides, about 60 nucleotides, about 50 nucleotides downstream of SEQ ID NO: 155. In some cases, the targeted region of the pre-mRNA is at most about 1500 nucleotides, about 1000 nucleotides, about 800 nucleotides, about 700 nucleotides, about 600 nucleotides, about 500 nucleotides, about 400 nucleotides, about 300 nucleotides, about 200 nucleotides, about 100 nucleotides, about 80 nucleotides, about 70 nucleotides, about 60 nucleotides, about 50 nucleotides downstream of genomic site GRCh38/hg38: chr16 89316933. In some cases. the targeted region of the pre-mRNA is at least about 1500 nucleotides, about 1000 nucleotides, about 800 nucleotides, about 700 nucleotides, about 600 nucleotides, about 500 nucleotides, about 400 nucleotides, about 300 nucleotides, about 200 nucleotides, about 100 nucleotides, about 80 nucleotides, about 70 nucleotides, about 60 nucleotides, about 50 nucleotides downstream of genomic site GRCh38/hg38: chr16 89316933. In some cases, the targeted region of the pre-mRNA is within a sequence SEQ ID NO: 155. In some cases, the targeted region of the pre-mRNA is within a sequence between a pair of genomic sites GRCh38/hg38: chr16 89317078, and GRCh38/hg38: chr16 89316933. In some cases, the therapeutic agent is an antisense oligomer complementary to a sequence with at least about 80%, 85%, 90%, 95%, 96%, 97%, 98%, 99% or 100% sequence identity to SEQ ID NO:155. In some cases, the therapeutic agent is an antisense oligomer complementary to a sequence with 100% sequence identity to SEQ ID NO:155. In some cases, the therapeutic agent increases level of a first processed mRNA encoding a protein having a sequence SEQ ID NO: 8122, and decreases level of a second processed mRNA encoding a protein having a sequence SEQ ID NO: 358. In some cases, the targeted region of the pre-mRNA is at most about 1500 nucleotides, about 1000 nucleotides, about 800 nucleotides, about 700 nucleotides, about 600 nucleotides, about 500 nucleotides, about 400 nucleotides, about 300 nucleotides, about 200 nucleotides, about 100 nucleotides, about 80 nucleotides, about 70 nucleotides, about 60 nucleotides, about 50 nucleotides upstream of SEQ ID NO: 156. In some cases, the targeted region of the pre-mRNA is at least about 1500 nucleotides, about 1000 nucleotides, about 800 nucleotides, about 700 nucleotides, about 600 nucleotides, about 500 nucleotides, about 400 nucleotides, about 300 nucleotides, about 200 nucleotides, about 100 nucleotides, about 80 nucleotides, about 70 nucleotides, about 60 nucleotides, about 50 nucleotides upstream of SEQ ID NO: 156. In some cases, the targeted region of the pre-mRNA is at most about 1500 nucleotides, about 1000 nucleotides, about 800 nucleotides, about 700 nucleotides, about 600 nucleotides, about 500 nucleotides, about 400 nucleotides, about 300 nucleotides, about 200 nucleotides, about 100 nucleotides, about 80 nucleotides, about 70 nucleotides, about 60 nucleotides, about 50 nucleotides upstream of genomic site GRCh38/hg38: chr16 89317078. In some cases, the targeted region of the pre-mRNA is at least about 1500 nucleotides, about 1000 nucleotides, about 800 nucleotides, about 700 nucleotides, about 600 nucleotides, about 500 nucleotides, about 400 nucleotides, about 300 nucleotides, about 200 nucleotides, about 100 nucleotides, about 80 nucleotides, about 70 nucleotides, about 60 nucleotides, about 50 nucleotides upstream of genomic site GRCh38/hg38: chr16 89317078. In some cases, the targeted region of the pre-mRNA is at most about 1500 nucleotides, about 1000 nucleotides, about 800 nucleotides, about 700 nucleotides, about 600 nucleotides, about 500 nucleotides, about 400 nucleotides, about 300 nucleotides, about 200 nucleotides, about 100 nucleotides, about 80 nucleotides, about 70 nucleotides, about 60 nucleotides, about 50 nucleotides downstream of SEQ ID NO: 156. In some cases, the targeted region of the pre-mRNA is at least about 1500 nucleotides, about 1000 nucleotides, about 800 nucleotides, about 700 nucleotides, about 600 nucleotides, about 500 nucleotides, about 400 nucleotides, about 300 nucleotides, about 200 nucleotides, about 100 nucleotides, about 80 nucleotides, about 70 nucleotides, about 60 nucleotides, about 50 nucleotides downstream of SEQ ID NO: 156. In some cases, the targeted region of the pre-mRNA is at most about 1500 nucleotides, about 1000 nucleotides, about 800 nucleotides, about 700 nucleotides, about 600 nucleotides, about 500 nucleotides, about 400 nucleotides, about 300 nucleotides, about 200 nucleotides, about 100 nucleotides, about 80 nucleotides, about 70 nucleotides, about 60 nucleotides, about 50 nucleotides downstream of genomic site GRCh38/hg38: chr16 89316933. In some cases. the targeted region of the pre-mRNA is at least about 1500 nucleotides, about 1000 nucleotides, about 800 nucleotides, about 700 nucleotides, about 600 nucleotides, about 500 nucleotides, about 400 nucleotides, about 300 nucleotides, about 200 nucleotides, about 100 nucleotides, about 80 nucleotides, about 70 nucleotides, about 60 nucleotides, about 50 nucleotides downstream of genomic site GRCh38/hg38: chr16 89316933. In some cases, the targeted region of the pre-mRNA is within a sequence SEQ ID NO: 156. In some cases, the targeted region of the pre-mRNA is within a sequence between a pair of genomic sites GRCh38/hg38: chr16 89317078, and GRCh38/hg38: chr16 89316933. In some cases, the therapeutic agent is an antisense oligomer complementary to a sequence with at least about 80%, 85%, 90%, 95%, 96%, 97%, 98%, 99% or 100% sequence identity to SEQ ID NO:156. In some cases, the therapeutic agent is an antisense oligomer complementary to a sequence with 100% sequence identity to SEQ ID NO:156. In some cases, the therapeutic agent is an antisense oligomer that has a sequence with at least about 80%, 85%, 90%, 95%, 96%, 97%, 98%, 99% or 100% sequence identity to a sequence selected from the group consisting of SEQ ID NOs: 1114-1181. In some cases, the therapeutic agent is an antisense oligomer that has a sequence selected from the group consisting of SEQ ID NOs: 1114-1181. In some cases, the target peptide sequence is a portion of ANKRD1 1 protein, and the method treats a disease or the condition that comprises Intellectual Disability; KBG syndrome; or 16924.3 microdeletion syndrome.

[0113] ANKS3

[0114] In some cases, the target peptide sequence is a portion of ANKS3 protein. In some cases, the therapeutic agent increases level of a first processed mRNA encoding a protein having a sequence SEQ ID NO: 8123, and decreases level of a second processed mRNA encoding a protein having a sequence SEQ ID NO: 359. In some cases, the targeted region of the pre-mRNA is at most about 1500 nucleotides, about 1000 nucleotides, about 800 nucleotides, about 700 nucleotides, about 600 nucleotides, about 500 nucleotides, about 400 nucleotides, about 300 nucleotides, about 200 nucleotides, about 100 nucleotides, about 80 nucleotides, about 70 nucleotides, about 60 nucleotides, about 50 nucleotides upstream of SEQ ID NO: 157. In some cases, the targeted region of the pre-mRNA is at least about 1500 nucleotides, about 1000 nucleotides, about 800 nucleotides, about 700 nucleotides, about 600 nucleotides, about 500 nucleotides, about 400 nucleotides, about 300 nucleotides, about 200 nucleotides, about 100 nucleotides, about 80 nucleotides, about 70 nucleotides, about 60 nucleotides, about 50 nucleotides upstream of SEQ ID NO: 157. In some cases, the targeted region of the pre-mRNA is at most about 1500 nucleotides, about 1000 nucleotides, about 800 nucleotides, about 700 nucleotides, about 600 nucleotides, about 500 nucleotides, about 400 nucleotides, about 300 nucleotides, about 200 nucleotides, about 100 nucleotides, about 80 nucleotides, about 70 nucleotides, about 60 nucleotides, about 50 nucleotides upstream of genomic site GRCh38/hg38: chr16 4726780. In some cases, the targeted region of the pre-mRNA is at least about 1500 nucleotides, about 1000 nucleotides, about 800 nucleotides, about 700 nucleotides, about 600 nucleotides, about 500 nucleotides, about 400 nucleotides, about 300 nucleotides, about 200 nucleotides, about 100 nucleotides, about 80 nucleotides, about 70 nucleotides, about 60 nucleotides, about 50 nucleotides upstream of genomic site GRCh38/hg38: chr16 4726780. In some cases, the targeted region of the pre-mRNA is at most about 1500 nucleotides, about 1000 nucleotides, about 800 nucleotides, about 700 nucleotides, about 600 nucleotides, about 500 nucleotides, about 400 nucleotides, about 300 nucleotides, about 200 nucleotides, about 100 nucleotides, about 80 nucleotides, about 70 nucleotides, about 60 nucleotides, about 50 nucleotides downstream of SEQ ID NO: 157. In some cases, the targeted region of the pre-mRNA is at least about 1500 nucleotides, about 1000 nucleotides, about 800 nucleotides, about 700 nucleotides, about 600 nucleotides, about 500 nucleotides, about 400 nucleotides, about 300 nucleotides, about 200 nucleotides, about 100 nucleotides, about 80 nucleotides, about 70 nucleotides, about 60 nucleotides, about 50 nucleotides downstream of SEQ ID NO: 157. In some cases, the targeted region of the pre-mRNA is at most about 1500 nucleotides, about 1000 nucleotides, about 800 nucleotides, about 700 nucleotides, about 600 nucleotides, about 500 nucleotides, about 400 nucleotides, about 300 nucleotides, about 200 nucleotides, about 100 nucleotides, about 80 nucleotides, about 70 nucleotides, about 60 nucleotides, about 50 nucleotides downstream of genomic site GRCh38/hg38: chr16 4726659. In some cases. the targeted region of the pre-mRNA is at least about 1500 nucleotides, about 1000 nucleotides, about 800 nucleotides, about 700 nucleotides, about 600 nucleotides, about 500 nucleotides, about 400 nucleotides, about 300 nucleotides, about 200 nucleotides, about 100 nucleotides, about 80 nucleotides, about 70 nucleotides, about 60 nucleotides, about 50 nucleotides downstream of genomic site GRCh38/hg38: chr16 4726659. In some cases, the targeted region of the pre-mRNA is within a sequence SEQ ID NO: 157. In some cases, the targeted region of the pre-mRNA is within a sequence between a pair of genomic sites GRCh38/hg38: chr16 4726780, and GRCh38/hg38: chr16 4726659. In some cases, the therapeutic agent is an antisense oligomer complementary to a sequence with at least about 80%, 85%, 90%, 95%, 96%, 97%, 98%, 99% or 100% sequence identity to SEQ ID NO:157. In some cases, the therapeutic agent is an antisense oligomer complementary to a sequence with 100% sequence identity to SEQ ID NO:157. In some cases, the therapeutic agent is an antisense oligomer that has a sequence with at least about 80%, 85%, 90%, 95%, 96%, 97%, 98%, 99% or 100% sequence identity to a sequence selected from the group consisting of SEQ ID NOs: 1182-1244. In some cases, the therapeutic agent is an antisense oligomer that has a sequence selected from the group consisting of SEQ ID NOs: 1182-1244. In some cases, the target peptide sequence is a portion of ANKS3 protein, and the method treats a disease or the condition that comprises Situs Inversus.

[0115] APOL4

[0116] In some cases, the target peptide sequence is a portion of APOL4 protein. In some cases, the therapeutic agent increases level of a first processed mRNA encoding a protein having a sequence SEQ ID NO: 8124, and decreases level of a second processed mRNA encoding a protein having a sequence SEQ ID NO: 360. In some cases, the targeted region of the pre-mRNA is at most about 1500 nucleotides, about 1000 nucleotides, about 800 nucleotides, about 700 nucleotides, about 600 nucleotides, about 500 nucleotides, about 400 nucleotides, about 300 nucleotides, about 200 nucleotides, about 100 nucleotides, about 80 nucleotides, about 70 nucleotides, about 60 nucleotides, about 50 nucleotides upstream of SEQ ID NO: 158. In some cases, the targeted region of the pre-mRNA is at least about 1500 nucleotides, about 1000 nucleotides, about 800 nucleotides, about 700 nucleotides, about 600 nucleotides, about 500 nucleotides, about 400 nucleotides, about 300 nucleotides, about 200 nucleotides, about 100 nucleotides, about 80 nucleotides, about 70 nucleotides, about 60 nucleotides, about 50 nucleotides upstream of SEQ ID NO: 158. In some cases, the targeted region of the pre-mRNA is at most about 1500 nucleotides, about 1000 nucleotides, about 800 nucleotides, about 700 nucleotides, about 600 nucleotides, about 500 nucleotides, about 400 nucleotides, about 300 nucleotides, about 200 nucleotides, about 100 nucleotides, about 80 nucleotides, about 70 nucleotides, about 60 nucleotides, about 50 nucleotides upstream of genomic site GRCh38/hg38: chr22 36201796. In some cases, the targeted region of the pre-mRNA is at least about 1500 nucleotides, about 1000 nucleotides, about 800 nucleotides, about 700 nucleotides, about 600 nucleotides, about 500 nucleotides, about 400 nucleotides, about 300 nucleotides, about 200 nucleotides, about 100 nucleotides, about 80 nucleotides, about 70 nucleotides, about 60 nucleotides, about 50 nucleotides upstream of genomic site GRCh38/hg38: chr22 36201796. In some cases, the targeted region of the pre-mRNA is at most about 1500 nucleotides, about 1000 nucleotides, about 800 nucleotides, about 700 nucleotides, about 600 nucleotides, about 500 nucleotides, about 400 nucleotides, about 300 nucleotides, about 200 nucleotides, about 100 nucleotides, about 80 nucleotides, about 70 nucleotides, about 60 nucleotides, about 50 nucleotides downstream of SEQ ID NO: 158. In some cases, the targeted region of the pre-mRNA is at least about 1500 nucleotides, about 1000 nucleotides, about 800 nucleotides, about 700 nucleotides, about 600 nucleotides, about 500 nucleotides, about 400 nucleotides, about 300 nucleotides, about 200 nucleotides, about 100 nucleotides, about 80 nucleotides, about 70 nucleotides, about 60 nucleotides, about 50 nucleotides downstream of SEQ ID NO: 158. In some cases, the targeted region of the pre-mRNA is at most about 1500 nucleotides, about 1000 nucleotides, about 800 nucleotides, about 700 nucleotides, about 600 nucleotides, about 500 nucleotides, about 400 nucleotides, about 300 nucleotides, about 200 nucleotides, about 100 nucleotides, about 80 nucleotides, about 70 nucleotides, about 60 nucleotides, about 50 nucleotides downstream of genomic site GRCh38/hg38: chr22 36201700. In some cases. the targeted region of the pre-mRNA is at least about 1500 nucleotides, about 1000 nucleotides, about 800 nucleotides, about 700 nucleotides, about 600 nucleotides, about 500 nucleotides, about 400 nucleotides, about 300 nucleotides, about 200 nucleotides, about 100 nucleotides, about 80 nucleotides, about 70 nucleotides, about 60 nucleotides, about 50 nucleotides downstream of genomic site GRCh38/hg38: chr22 36201700. In some cases, the targeted region of the pre-mRNA is within a sequence SEQ ID NO: 158. In some cases, the targeted region of the pre-mRNA is within a sequence between a pair of genomic sites GRCh38/hg38: chr22 36201796, and GRCh38/hg38: chr22 36201700. In some cases, the therapeutic agent is an antisense oligomer complementary to a sequence with at least about 80%, 85%, 90%, 95%, 96%, 97%, 98%, 99% or 100% sequence identity to SEQ ID NO:158. In some cases, the therapeutic agent is an antisense oligomer complementary to a sequence with 100% sequence identity to SEQ ID NO:158. In some cases, the therapeutic agent is an antisense oligomer that has a sequence with at least about 80%, 85%, 90%, 95%, 96%, 97%, 98%, 99% or 100% sequence identity to a sequence selected from the group consisting of SEQ ID NOs: 1245-1302. In some cases, the therapeutic agent is an antisense oligomer that has a sequence selected from the group consisting of SEQ ID NOs: 1245-1302. In some cases, the target peptide sequence is a portion of APOL4 protein, and the method treats a disease or the condition that comprises Schizophrenia.

[0117] APPL1

[0118] In some cases, the target peptide sequence is a portion of APPL1 protein. In some cases, the therapeutic agent increases level of a first processed mRNA encoding a protein having a sequence SEQ ID NO: 8125, and decreases level of a second processed mRNA encoding a protein having a sequence SEQ ID NO: 361. In some cases, the targeted region of the pre-mRNA is at most about 1500 nucleotides, about 1000 nucleotides, about 800 nucleotides, about 700 nucleotides, about 600 nucleotides, about 500 nucleotides, about 400 nucleotides, about 300 nucleotides, about 200 nucleotides, about 100 nucleotides, about 80 nucleotides, about 70 nucleotides, about 60 nucleotides, about 50 nucleotides upstream of SEQ ID NO: 159. In some cases, the targeted region of the pre-mRNA is at least about 1500 nucleotides, about 1000 nucleotides, about 800 nucleotides, about 700 nucleotides, about 600 nucleotides, about 500 nucleotides, about 400 nucleotides, about 300 nucleotides, about 200 nucleotides, about 100 nucleotides, about 80 nucleotides, about 70 nucleotides, about 60 nucleotides, about 50 nucleotides upstream of SEQ ID NO: 159. In some cases, the targeted region of the pre-mRNA is at most about 1500 nucleotides, about 1000 nucleotides, about 800 nucleotides, about 700 nucleotides, about 600 nucleotides, about 500 nucleotides, about 400 nucleotides, about 300 nucleotides, about 200 nucleotides, about 100 nucleotides, about 80 nucleotides, about 70 nucleotides, about 60 nucleotides, about 50 nucleotides upstream of genomic site GRCh38/hg38: chr3 57230714. In some cases, the targeted region of the pre-mRNA is at least about 1500 nucleotides, about 1000 nucleotides, about 800 nucleotides, about 700 nucleotides, about 600 nucleotides, about 500 nucleotides, about 400 nucleotides, about 300 nucleotides, about 200 nucleotides, about 100 nucleotides, about 80 nucleotides, about 70 nucleotides, about 60 nucleotides, about 50 nucleotides upstream of genomic site GRCh38/hg38: chr3 57230714. In some cases, the targeted region of the pre-mRNA is at most about 1500 nucleotides, about 1000 nucleotides, about 800 nucleotides, about 700 nucleotides, about 600 nucleotides, about 500 nucleotides, about 400 nucleotides, about 300 nucleotides, about 200 nucleotides, about 100 nucleotides, about 80 nucleotides, about 70 nucleotides, about 60 nucleotides, about 50 nucleotides downstream of SEQ ID NO: 159. In some cases, the targeted region of the pre-mRNA is at least about 1500 nucleotides, about 1000 nucleotides, about 800 nucleotides, about 700 nucleotides, about 600 nucleotides, about 500 nucleotides, about 400 nucleotides, about 300 nucleotides, about 200 nucleotides, about 100 nucleotides, about 80 nucleotides, about 70 nucleotides, about 60 nucleotides, about 50 nucleotides downstream of SEQ ID NO: 159. In some cases, the targeted region of the pre-mRNA is at most about 1500 nucleotides, about 1000 nucleotides, about 800 nucleotides, about 700 nucleotides, about 600 nucleotides, about 500 nucleotides, about 400 nucleotides, about 300 nucleotides, about 200 nucleotides, about 100 nucleotides, about 80 nucleotides, about 70 nucleotides, about 60 nucleotides, about 50 nucleotides downstream of genomic site GRCh38/hg38: chr3 57230767. In some cases. the targeted region of the pre-mRNA is at least about 1500 nucleotides, about 1000 nucleotides, about 800 nucleotides, about 700 nucleotides, about 600 nucleotides, about 500 nucleotides, about 400 nucleotides, about 300 nucleotides, about 200 nucleotides, about 100 nucleotides, about 80 nucleotides, about 70 nucleotides, about 60 nucleotides, about 50 nucleotides downstream of genomic site GRCh38/hg38: chr3 57230767. In some cases, the targeted region of the pre-mRNA is within a sequence SEQ ID NO: 159. In some cases, the targeted region of the pre-mRNA is within a sequence between a pair of genomic sites GRCh38/hg38: chr3 57230714, and GRCh38/hg38: chr3 57230767. In some cases, the therapeutic agent is an antisense oligomer complementary to a sequence with at least about 80%, 85%, 90%, 95%, 96%, 97%, 98%, 99% or 100% sequence identity to SEQ ID NO:159. In some cases, the therapeutic agent is an antisense oligomer complementary to a sequence with 100% sequence identity to SEQ ID NO:159. In some cases, the therapeutic agent is an antisense oligomer that has a sequence with at least about 80%, 85%, 90%, 95%, 96%, 97%, 98%, 99% or 100% sequence identity to a sequence selected from the group consisting of SEQ ID NOs: 1303-1352. In some cases, the therapeutic agent is an antisense oligomer that has a sequence selected from the group consisting of SEQ ID NOs: 1303-1352. In some cases, the target peptide sequence is a portion of APPL1 protein, and the method treats a disease or the condition that comprises Malignant neoplasm of breast; Maturity onset diabetes mellitus in young; or Maturity onset diabetes mellitus of the young, Type 14.

[0119] ARCN1

[0120] In some cases, the target peptide sequence is a portion of ARCN1 protein. In some cases, the therapeutic agent increases level of a first processed mRNA encoding a protein having a sequence SEQ ID NO: 8126, and decreases level of a second processed mRNA encoding a protein having a sequence SEQ ID NO: 362. In some cases, the targeted region of the pre-mRNA is at most about 1500 nucleotides, about 1000 nucleotides, about 800 nucleotides, about 700 nucleotides, about 600 nucleotides, about 500 nucleotides, about 400 nucleotides, about 300 nucleotides, about 200 nucleotides, about 100 nucleotides, about 80 nucleotides, about 70 nucleotides, about 60 nucleotides, about 50 nucleotides upstream of SEQ ID NO: 160. In some cases, the targeted region of the pre-mRNA is at least about 1500 nucleotides, about 1000 nucleotides, about 800 nucleotides, about 700 nucleotides, about 600 nucleotides, about 500 nucleotides, about 400 nucleotides, about 300 nucleotides, about 200 nucleotides, about 100 nucleotides, about 80 nucleotides, about 70 nucleotides, about 60 nucleotides, about 50 nucleotides upstream of SEQ ID NO: 160. In some cases, the targeted region of the pre-mRNA is at most about 1500 nucleotides, about 1000 nucleotides, about 800 nucleotides, about 700 nucleotides, about 600 nucleotides, about 500 nucleotides, about 400 nucleotides, about 300 nucleotides, about 200 nucleotides, about 100 nucleotides, about 80 nucleotides, about 70 nucleotides, about 60 nucleotides, about 50 nucleotides upstream of genomic site GRCh38/hg38: chr11 118573620. In some cases, the targeted region of the pre-mRNA is at least about 1500 nucleotides, about 1000 nucleotides, about 800 nucleotides, about 700 nucleotides, about 600 nucleotides, about 500 nucleotides, about 400 nucleotides, about 300 nucleotides, about 200 nucleotides, about 100 nucleotides, about 80 nucleotides, about 70 nucleotides, about 60 nucleotides, about 50 nucleotides upstream of genomic site GRCh38/hg38: chr11 118573620. In some cases, the targeted region of the pre-mRNA is at most about 1500 nucleotides, about 1000 nucleotides, about 800 nucleotides, about 700 nucleotides, about 600 nucleotides, about 500 nucleotides, about 400 nucleotides, about 300 nucleotides, about 200 nucleotides, about 100 nucleotides, about 80 nucleotides, about 70 nucleotides, about 60 nucleotides, about 50 nucleotides downstream of SEQ ID NO: 160. In some cases, the targeted region of the pre-mRNA is at least about 1500 nucleotides, about 1000 nucleotides, about 800 nucleotides, about 700 nucleotides, about 600 nucleotides, about 500 nucleotides, about 400 nucleotides, about 300 nucleotides, about 200 nucleotides, about 100 nucleotides, about 80 nucleotides, about 70 nucleotides, about 60 nucleotides, about 50 nucleotides downstream of SEQ ID NO: 160. In some cases, the targeted region of the pre-mRNA is at most about 1500 nucleotides, about 1000 nucleotides, about 800 nucleotides, about 700 nucleotides, about 600 nucleotides, about 500 nucleotides, about 400 nucleotides, about 300 nucleotides, about 200 nucleotides, about 100 nucleotides, about 80 nucleotides, about 70 nucleotides, about 60 nucleotides, about 50 nucleotides downstream of genomic site GRCh38/hg38: chr11 118573783. In some cases. the targeted region of the pre-mRNA is at least about 1500 nucleotides, about 1000 nucleotides, about 800 nucleotides, about 700 nucleotides, about 600 nucleotides, about 500 nucleotides, about 400 nucleotides, about 300 nucleotides, about 200 nucleotides, about 100 nucleotides, about 80 nucleotides, about 70 nucleotides, about 60 nucleotides, about 50 nucleotides downstream of genomic site GRCh38/hg38: chr11 118573783. In some cases, the targeted region of the pre-mRNA is within a sequence SEQ ID NO: 160. In some cases, the targeted region of the pre-mRNA is within a sequence between a pair of genomic sites GRCh38/hg38: chr11 118573620, and GRCh38/hg38: chr11 118573783. In some cases, the therapeutic agent is an antisense oligomer complementary to a sequence with at least about 80%, 85%, 90%, 95%, 96%, 97%, 98%, 99% or 100% sequence identity to SEQ ID NO:160. In some cases, the therapeutic agent is an antisense oligomer complementary to a sequence with 100% sequence identity to SEQ ID NO:160. In some cases, the therapeutic agent is an antisense oligomer that has a sequence with at least about 80%, 85%, 90%, 95%, 96%, 97%, 98%, 99% or 100% sequence identity to a sequence selected from the group consisting of SEQ ID NOs: 1353-1424. In some cases, the therapeutic agent is an antisense oligomer that has a sequence selected from the group consisting of SEQ ID NOs: 1353-1424. In some cases, the target peptide sequence is a portion of ARCN1 protein, and the method treats a disease or the condition that comprises Intellectual Disability; or Microcephaly.

[0121] ARMC8

[0122] In some cases, the target peptide sequence is a portion of ARMC8 protein. In some cases, the therapeutic agent increases level of a first processed mRNA encoding a protein having a sequence SEQ ID NO: 8127, and decreases level of a second processed mRNA encoding a protein having a sequence SEQ ID NO: 363. In some cases, the targeted region of the pre-mRNA is at most about 1500 nucleotides, about 1000 nucleotides, about 800 nucleotides, about 700 nucleotides, about 600 nucleotides, about 500 nucleotides, about 400 nucleotides, about 300 nucleotides, about 200 nucleotides, about 100 nucleotides, about 80 nucleotides, about 70 nucleotides, about 60 nucleotides, about 50 nucleotides upstream of SEQ ID NO: 161. In some cases, the targeted region of the pre-mRNA is at least about 1500 nucleotides, about 1000 nucleotides, about 800 nucleotides, about 700 nucleotides, about 600 nucleotides, about 500 nucleotides, about 400 nucleotides, about 300 nucleotides, about 200 nucleotides, about 100 nucleotides, about 80 nucleotides, about 70 nucleotides, about 60 nucleotides, about 50 nucleotides upstream of SEQ ID NO: 161. In some cases, the targeted region of the pre-mRNA is at most about 1500 nucleotides, about 1000 nucleotides, about 800 nucleotides, about 700 nucleotides, about 600 nucleotides, about 500 nucleotides, about 400 nucleotides, about 300 nucleotides, about 200 nucleotides, about 100 nucleotides, about 80 nucleotides, about 70 nucleotides, about 60 nucleotides, about 50 nucleotides upstream of genomic site GRCh38/hg38: chr3 138188455. In some cases, the targeted region of the pre-mRNA is at least about 1500 nucleotides, about 1000 nucleotides, about 800 nucleotides, about 700 nucleotides, about 600 nucleotides, about 500 nucleotides, about 400 nucleotides, about 300 nucleotides, about 200 nucleotides, about 100 nucleotides, about 80 nucleotides, about 70 nucleotides, about 60 nucleotides, about 50 nucleotides upstream of genomic site GRCh38/hg38: chr3 138188455. In some cases, the targeted region of the pre-mRNA is at most about 1500 nucleotides, about 1000 nucleotides, about 800 nucleotides, about 700 nucleotides, about 600 nucleotides, about 500 nucleotides, about 400 nucleotides, about 300 nucleotides, about 200 nucleotides, about 100 nucleotides, about 80 nucleotides, about 70 nucleotides, about 60 nucleotides, about 50 nucleotides downstream of SEQ ID NO: 161. In some cases, the targeted region of the pre-mRNA is at least about 1500 nucleotides, about 1000 nucleotides, about 800 nucleotides, about 700 nucleotides, about 600 nucleotides, about 500 nucleotides, about 400 nucleotides, about 300 nucleotides, about 200 nucleotides, about 100 nucleotides, about 80 nucleotides, about 70 nucleotides, about 60 nucleotides, about 50 nucleotides downstream of SEQ ID NO: 161. In some cases, the targeted region of the pre-mRNA is at most about 1500 nucleotides, about 1000 nucleotides, about 800 nucleotides, about 700 nucleotides, about 600 nucleotides, about 500 nucleotides, about 400 nucleotides, about 300 nucleotides, about 200 nucleotides, about 100 nucleotides, about 80 nucleotides, about 70 nucleotides, about 60 nucleotides, about 50 nucleotides downstream of genomic site GRCh38/hg38: chr3 138188530. In some cases. the targeted region of the pre-mRNA is at least about 1500 nucleotides, about 1000 nucleotides, about 800 nucleotides, about 700 nucleotides, about 600 nucleotides, about 500 nucleotides, about 400 nucleotides, about 300 nucleotides, about 200 nucleotides, about 100 nucleotides, about 80 nucleotides, about 70 nucleotides, about 60 nucleotides, about 50 nucleotides downstream of genomic site GRCh38/hg38: chr3 138188530. In some cases, the targeted region of the pre-mRNA is within a sequence SEQ ID NO: 161. In some cases, the targeted region of the pre-mRNA is within a sequence between a pair of genomic sites GRCh38/hg38: chr3 138188455, and GRCh38/hg38: chr3 138188530. In some cases, the therapeutic agent is an antisense oligomer complementary to a sequence with at least about 80%, 85%, 90%, 95%, 96%, 97%, 98%, 99% or 100% sequence identity to SEQ ID NO:161. In some cases, the therapeutic agent is an antisense oligomer complementary to a sequence with 100% sequence identity to SEQ ID NO:161. In some cases, the therapeutic agent increases level of a first processed mRNA encoding a protein having a sequence SEQ ID NO: 8128, and decreases level of a second processed mRNA encoding a protein having a sequence SEQ ID NO: 364. In some cases, the targeted region of the pre-mRNA is at most about 1500 nucleotides, about 1000 nucleotides, about 800 nucleotides, about 700 nucleotides, about 600 nucleotides, about 500 nucleotides, about 400 nucleotides, about 300 nucleotides, about 200 nucleotides, about 100 nucleotides, about 80 nucleotides, about 70 nucleotides, about 60 nucleotides, about 50 nucleotides upstream of SEQ ID NO: 162. In some cases, the targeted region of the pre-mRNA is at least about 1500 nucleotides, about 1000 nucleotides, about 800 nucleotides, about 700 nucleotides, about 600 nucleotides, about 500 nucleotides, about 400 nucleotides, about 300 nucleotides, about 200 nucleotides, about 100 nucleotides, about 80 nucleotides, about 70 nucleotides, about 60 nucleotides, about 50 nucleotides upstream of SEQ ID NO: 162. In some cases, the targeted region of the pre-mRNA is at most about 1500 nucleotides, about 1000 nucleotides, about 800 nucleotides, about 700 nucleotides, about 600 nucleotides, about 500 nucleotides, about 400 nucleotides, about 300 nucleotides, about 200 nucleotides, about 100 nucleotides, about 80 nucleotides, about 70 nucleotides, about 60 nucleotides, about 50 nucleotides upstream of genomic site GRCh38/hg38: chr3 138188455. In some cases, the targeted region of the pre-mRNA is at least about 1500 nucleotides, about 1000 nucleotides, about 800 nucleotides, about 700 nucleotides, about 600 nucleotides, about 500 nucleotides, about 400 nucleotides, about 300 nucleotides, about 200 nucleotides, about 100 nucleotides, about 80 nucleotides, about 70 nucleotides, about 60 nucleotides, about 50 nucleotides upstream of genomic site GRCh38/hg38: chr3 138188455. In some cases, the targeted region of the pre-mRNA is at most about 1500 nucleotides, about 1000 nucleotides, about 800 nucleotides, about 700 nucleotides, about 600 nucleotides, about 500 nucleotides, about 400 nucleotides, about 300 nucleotides, about 200 nucleotides, about 100 nucleotides, about 80 nucleotides, about 70 nucleotides, about 60 nucleotides, about 50 nucleotides downstream of SEQ ID NO: 162. In some cases, the targeted region of the pre-mRNA is at least about 1500 nucleotides, about 1000 nucleotides, about 800 nucleotides, about 700 nucleotides, about 600 nucleotides, about 500 nucleotides, about 400 nucleotides, about 300 nucleotides, about 200 nucleotides, about 100 nucleotides, about 80 nucleotides, about 70 nucleotides, about 60 nucleotides, about 50 nucleotides downstream of SEQ ID NO: 162. In some cases, the targeted region of the pre-mRNA is at most about 1500 nucleotides, about 1000 nucleotides, about 800 nucleotides, about 700 nucleotides, about 600 nucleotides, about 500 nucleotides, about 400 nucleotides, about 300 nucleotides, about 200 nucleotides, about 100 nucleotides, about 80 nucleotides, about 70 nucleotides, about 60 nucleotides, about 50 nucleotides downstream of genomic site GRCh38/hg38: chr3 138188530. In some cases. the targeted region of the pre-mRNA is at least about 1500 nucleotides, about 1000 nucleotides, about 800 nucleotides, about 700 nucleotides, about 600 nucleotides, about 500 nucleotides, about 400 nucleotides, about 300 nucleotides, about 200 nucleotides, about 100 nucleotides, about 80 nucleotides, about 70 nucleotides, about 60 nucleotides, about 50 nucleotides downstream of genomic site GRCh38/hg38: chr3 138188530. In some cases, the targeted region of the pre-mRNA is within a sequence SEQ ID NO: 162. In some cases, the targeted region of the pre-mRNA is within a sequence between a pair of genomic sites GRCh38/hg38: chr3 138188455, and GRCh38/hg38: chr3 138188530. In some cases, the therapeutic agent is an antisense oligomer complementary to a sequence with at least about 80%, 85%, 90%, 95%, 96%, 97%, 98%, 99% or 100% sequence identity to SEQ ID NO:162. In some cases, the therapeutic agent is an antisense oligomer complementary to a sequence with 100% sequence identity to SEQ ID NO:162. In some cases, the therapeutic agent is an antisense oligomer that has a sequence with at least about 80%, 85%, 90%, 95%, 96%, 97%, 98%, 99% or 100% sequence identity to a sequence selected from the group consisting of SEQ ID NOs: 1425-1478. In some cases, the therapeutic agent is an antisense oligomer that has a sequence selected from the group consisting of SEQ ID NOs: 1425-1478. In some cases, the target peptide sequence is a portion of ARMC8 protein, and the method treats a disease or the condition that comprises Polydactyly; or Ciliopathies.

[0123] ARNTL

[0124] In some cases, the target peptide sequence is a portion of ARNTL protein. In some cases, the therapeutic agent increases level of a first processed mRNA encoding a protein having a sequence SEQ ID NO: 8129, and decreases level of a second processed mRNA encoding a protein having a sequence SEQ ID NO: 365. In some cases, the targeted region of the pre-mRNA is at most about 1500 nucleotides, about 1000 nucleotides, about 800 nucleotides, about 700 nucleotides, about 600 nucleotides, about 500 nucleotides, about 400 nucleotides, about 300 nucleotides, about 200 nucleotides, about 100 nucleotides, about 80 nucleotides, about 70 nucleotides, about 60 nucleotides, about 50 nucleotides upstream of SEQ ID NO: 163. In some cases, the targeted region of the pre-mRNA is at least about 1500 nucleotides, about 1000 nucleotides, about 800 nucleotides, about 700 nucleotides, about 600 nucleotides, about 500 nucleotides, about 400 nucleotides, about 300 nucleotides, about 200 nucleotides, about 100 nucleotides, about 80 nucleotides, about 70 nucleotides, about 60 nucleotides, about 50 nucleotides upstream of SEQ ID NO: 163. In some cases, the targeted region of the pre-mRNA is at most about 1500 nucleotides, about 1000 nucleotides, about 800 nucleotides, about 700 nucleotides, about 600 nucleotides, about 500 nucleotides, about 400 nucleotides, about 300 nucleotides, about 200 nucleotides, about 100 nucleotides, about 80 nucleotides, about 70 nucleotides, about 60 nucleotides, about 50 nucleotides upstream of genomic site GRCh38/hg38: chr11 13355226. In some cases, the targeted region of the pre-mRNA is at least about 1500 nucleotides, about 1000 nucleotides, about 800 nucleotides, about 700 nucleotides, about 600 nucleotides, about 500 nucleotides, about 400 nucleotides, about 300 nucleotides, about 200 nucleotides, about 100 nucleotides, about 80 nucleotides, about 70 nucleotides, about 60 nucleotides, about 50 nucleotides upstream of genomic site GRCh38/hg38: chr11 13355226. In some cases, the targeted region of the pre-mRNA is at most about 1500 nucleotides, about 1000 nucleotides, about 800 nucleotides, about 700 nucleotides, about 600 nucleotides, about 500 nucleotides, about 400 nucleotides, about 300 nucleotides, about 200 nucleotides, about 100 nucleotides, about 80 nucleotides, about 70 nucleotides, about 60 nucleotides, about 50 nucleotides downstream of SEQ ID NO: 163. In some cases, the targeted region of the pre-mRNA is at least about 1500 nucleotides, about 1000 nucleotides, about 800 nucleotides, about 700 nucleotides, about 600 nucleotides, about 500 nucleotides, about 400 nucleotides, about 300 nucleotides, about 200 nucleotides, about 100 nucleotides, about 80 nucleotides, about 70 nucleotides, about 60 nucleotides, about 50 nucleotides downstream of SEQ ID NO: 163. In some cases, the targeted region of the pre-mRNA is at most about 1500 nucleotides, about 1000 nucleotides, about 800 nucleotides, about 700 nucleotides, about 600 nucleotides, about 500 nucleotides, about 400 nucleotides, about 300 nucleotides, about 200 nucleotides, about 100 nucleotides, about 80 nucleotides, about 70 nucleotides, about 60 nucleotides, about 50 nucleotides downstream of genomic site GRCh38/hg38: chr11 13355296. In some cases. the targeted region of the pre-mRNA is at least about 1500 nucleotides, about 1000 nucleotides, about 800 nucleotides, about 700 nucleotides, about 600 nucleotides, about 500 nucleotides, about 400 nucleotides, about 300 nucleotides, about 200 nucleotides, about 100 nucleotides, about 80 nucleotides, about 70 nucleotides, about 60 nucleotides, about 50 nucleotides downstream of genomic site GRCh38/hg38: chr11 13355296. In some cases, the targeted region of the pre-mRNA is within a sequence SEQ ID NO: 163. In some cases, the targeted region of the pre-mRNA is within a sequence between a pair of genomic sites GRCh38/hg38: chr11 13355226, and GRCh38/hg38: chr11 13355296. In some cases, the therapeutic agent is an antisense oligomer complementary to a sequence with at least about 80%, 85%, 90%, 95%, 96%, 97%, 98%, 99% or 100% sequence identity to SEQ ID NO:163. In some cases, the therapeutic agent is an antisense oligomer complementary to a sequence with 100% sequence identity to SEQ ID NO:163. In some cases, the therapeutic agent increases level of a first processed mRNA encoding a protein having a sequence SEQ ID NO: 8130, and decreases level of a second processed mRNA encoding a protein having a sequence SEQ ID NO: 366. In some cases, the targeted region of the pre-mRNA is at most about 1500 nucleotides, about 1000 nucleotides, about 800 nucleotides, about 700 nucleotides, about 600 nucleotides, about 500 nucleotides, about 400 nucleotides, about 300 nucleotides, about 200 nucleotides, about 100 nucleotides, about 80 nucleotides, about 70 nucleotides, about 60 nucleotides, about 50 nucleotides upstream of SEQ ID NO: 164. In some cases, the targeted region of the pre-mRNA is at least about 1500 nucleotides, about 1000 nucleotides, about 800 nucleotides, about 700 nucleotides, about 600 nucleotides, about 500 nucleotides, about 400 nucleotides, about 300 nucleotides, about 200 nucleotides, about 100 nucleotides, about 80 nucleotides, about 70 nucleotides, about 60 nucleotides, about 50 nucleotides upstream of SEQ ID NO: 164. In some cases, the targeted region of the pre-mRNA is at most about 1500 nucleotides, about 1000 nucleotides, about 800 nucleotides, about 700 nucleotides, about 600 nucleotides, about 500 nucleotides, about 400 nucleotides, about 300 nucleotides, about 200 nucleotides, about 100 nucleotides, about 80 nucleotides, about 70 nucleotides, about 60 nucleotides, about 50 nucleotides upstream of genomic site GRCh38/hg38: chr11 13355226. In some cases, the targeted region of the pre-mRNA is at least about 1500 nucleotides, about 1000 nucleotides, about 800 nucleotides, about 700 nucleotides, about 600 nucleotides, about 500 nucleotides, about 400 nucleotides, about 300 nucleotides, about 200 nucleotides, about 100 nucleotides, about 80 nucleotides, about 70 nucleotides, about 60 nucleotides, about 50 nucleotides upstream of genomic site GRCh38/hg38: chr11 13355226. In some cases, the targeted region of the pre-mRNA is at most about 1500 nucleotides, about 1000 nucleotides, about 800 nucleotides, about 700 nucleotides, about 600 nucleotides, about 500 nucleotides, about 400 nucleotides, about 300 nucleotides, about 200 nucleotides, about 100 nucleotides, about 80 nucleotides, about 70 nucleotides, about 60 nucleotides, about 50 nucleotides downstream of SEQ ID NO: 164. In some cases, the targeted region of the pre-mRNA is at least about 1500 nucleotides, about 1000 nucleotides, about 800 nucleotides, about 700 nucleotides, about 600 nucleotides, about 500 nucleotides, about 400 nucleotides, about 300 nucleotides, about 200 nucleotides, about 100 nucleotides, about 80 nucleotides, about 70 nucleotides, about 60 nucleotides, about 50 nucleotides downstream of SEQ ID NO: 164. In some cases, the targeted region of the pre-mRNA is at most about 1500 nucleotides, about 1000 nucleotides, about 800 nucleotides, about 700 nucleotides, about 600 nucleotides, about 500 nucleotides, about 400 nucleotides, about 300 nucleotides, about 200 nucleotides, about 100 nucleotides, about 80 nucleotides, about 70 nucleotides, about 60 nucleotides, about 50 nucleotides downstream of genomic site GRCh38/hg38: chr11 13355296. In some cases. the targeted region of the pre-mRNA is at least about 1500 nucleotides, about 1000 nucleotides, about 800 nucleotides, about 700 nucleotides, about 600 nucleotides, about 500 nucleotides, about 400 nucleotides, about 300 nucleotides, about 200 nucleotides, about 100 nucleotides, about 80 nucleotides, about 70 nucleotides, about 60 nucleotides, about 50 nucleotides downstream of genomic site GRCh38/hg38: chr11 13355296. In some cases, the targeted region of the pre-mRNA is within a sequence SEQ ID NO: 164. In some cases, the targeted region of the pre-mRNA is within a sequence between a pair of genomic sites GRCh38/hg38: chr11 13355226, and GRCh38/hg38: chr11 13355296. In some cases, the therapeutic agent is an antisense oligomer complementary to a sequence with at least about 80%, 85%, 90%, 95%, 96%, 97%, 98%, 99% or 100% sequence identity to SEQ ID NO:164. In some cases, the therapeutic agent is an antisense oligomer complementary to a sequence with 100% sequence identity to SEQ ID NO:164. In some cases, the therapeutic agent is an antisense oligomer that has a sequence with at least about 80%, 85%, 90%, 95%, 96%, 97%, 98%, 99% or 100% sequence identity to a sequence selected from the group consisting of SEQ ID NOs: 1479-1531. In some cases, the therapeutic agent is an antisense oligomer that has a sequence selected from the group consisting of SEQ ID NOs: 1479-1531. In some cases, the target peptide sequence is a portion of ARNTL protein, and the method treats a disease or the condition that comprises Mental Depression; Seasonal Affective Disorder; Bipolar Disorder; Mood Disorders; or Depressive disorder. In some cases, the method treats a cancer that is associated with ARNTL protein.

[0125] BOC

[0126] In some cases, the target peptide sequence is a portion of BOC protein. In some cases, the therapeutic agent increases level of a first processed mRNA encoding a protein having a sequence SEQ ID NO: 8131, and decreases level of a second processed mRNA encoding a protein having a sequence SEQ ID NO: 367. In some cases, the targeted region of the pre-mRNA is at most about 1500 nucleotides, about 1000 nucleotides, about 800 nucleotides, about 700 nucleotides, about 600 nucleotides, about 500 nucleotides, about 400 nucleotides, about 300 nucleotides, about 200 nucleotides, about 100 nucleotides, about 80 nucleotides, about 70 nucleotides, about 60 nucleotides, about 50 nucleotides upstream of SEQ ID NO: 165. In some cases, the targeted region of the pre-mRNA is at least about 1500 nucleotides, about 1000 nucleotides, about 800 nucleotides, about 700 nucleotides, about 600 nucleotides, about 500 nucleotides, about 400 nucleotides, about 300 nucleotides, about 200 nucleotides, about 100 nucleotides, about 80 nucleotides, about 70 nucleotides, about 60 nucleotides, about 50 nucleotides upstream of SEQ ID NO: 165. In some cases, the targeted region of the pre-mRNA is at most about 1500 nucleotides, about 1000 nucleotides, about 800 nucleotides, about 700 nucleotides, about 600 nucleotides, about 500 nucleotides, about 400 nucleotides, about 300 nucleotides, about 200 nucleotides, about 100 nucleotides, about 80 nucleotides, about 70 nucleotides, about 60 nucleotides, about 50 nucleotides upstream of genomic site GRCh38/hg38: chr3 113249722. In some cases, the targeted region of the pre-mRNA is at least about 1500 nucleotides, about 1000 nucleotides, about 800 nucleotides, about 700 nucleotides, about 600 nucleotides, about 500 nucleotides, about 400 nucleotides, about 300 nucleotides, about 200 nucleotides, about 100 nucleotides, about 80 nucleotides, about 70 nucleotides, about 60 nucleotides, about 50 nucleotides upstream of genomic site GRCh38/hg38: chr3 113249722. In some cases, the targeted region of the pre-mRNA is at most about 1500 nucleotides, about 1000 nucleotides, about 800 nucleotides, about 700 nucleotides, about 600 nucleotides, about 500 nucleotides, about 400 nucleotides, about 300 nucleotides, about 200 nucleotides, about 100 nucleotides, about 80 nucleotides, about 70 nucleotides, about 60 nucleotides, about 50 nucleotides downstream of SEQ ID NO: 165. In some cases, the targeted region of the pre-mRNA is at least about 1500 nucleotides, about 1000 nucleotides, about 800 nucleotides, about 700 nucleotides, about 600 nucleotides, about 500 nucleotides, about 400 nucleotides, about 300 nucleotides, about 200 nucleotides, about 100 nucleotides, about 80 nucleotides, about 70 nucleotides, about 60 nucleotides, about 50 nucleotides downstream of SEQ ID NO: 165. In some cases, the targeted region of the pre-mRNA is at most about 1500 nucleotides, about 1000 nucleotides, about 800 nucleotides, about 700 nucleotides, about 600 nucleotides, about 500 nucleotides, about 400 nucleotides, about 300 nucleotides, about 200 nucleotides, about 100 nucleotides, about 80 nucleotides, about 70 nucleotides, about 60 nucleotides, about 50 nucleotides downstream of genomic site GRCh38/hg38: chr3 113249899. In some cases. the targeted region of the pre-mRNA is at least about 1500 nucleotides, about 1000 nucleotides, about 800 nucleotides, about 700 nucleotides, about 600 nucleotides, about 500 nucleotides, about 400 nucleotides, about 300 nucleotides, about 200 nucleotides, about 100 nucleotides, about 80 nucleotides, about 70 nucleotides, about 60 nucleotides, about 50 nucleotides downstream of genomic site GRCh38/hg38: chr3 113249899. In some cases, the targeted region of the pre-mRNA is within a sequence SEQ ID NO: 165. In some cases, the targeted region of the pre-mRNA is within a sequence between a pair of genomic sites GRCh38/hg38: chr3 113249722, and GRCh38/hg38: chr3 113249899. In some cases, the therapeutic agent is an antisense oligomer complementary to a sequence with at least about 80%, 85%, 90%, 95%, 96%, 97%, 98%, 99% or 100% sequence identity to SEQ ID NO:165. In some cases, the therapeutic agent is an antisense oligomer complementary to a sequence with 100% sequence identity to SEQ ID NO:165. In some cases, the therapeutic agent increases level of a first processed mRNA encoding a protein having a sequence SEQ ID NO: 8132, and decreases level of a second processed mRNA encoding a protein having a sequence SEQ ID NO: 368. In some cases, the targeted region of the pre-mRNA is at most about 1500 nucleotides, about 1000 nucleotides, about 800 nucleotides, about 700 nucleotides, about 600 nucleotides, about 500 nucleotides, about 400 nucleotides, about 300 nucleotides, about 200 nucleotides, about 100 nucleotides, about 80 nucleotides, about 70 nucleotides, about 60 nucleotides, about 50 nucleotides upstream of SEQ ID NO: 166. In some cases, the targeted region of the pre-mRNA is at least about 1500 nucleotides, about 1000 nucleotides, about 800 nucleotides, about 700 nucleotides, about 600 nucleotides, about 500 nucleotides, about 400 nucleotides, about 300 nucleotides, about 200 nucleotides, about 100 nucleotides, about 80 nucleotides, about 70 nucleotides, about 60 nucleotides, about 50 nucleotides upstream of SEQ ID NO: 166. In some cases, the targeted region of the pre-mRNA is at most about 1500 nucleotides, about 1000 nucleotides, about 800 nucleotides, about 700 nucleotides, about 600 nucleotides, about 500 nucleotides, about 400 nucleotides, about 300 nucleotides, about 200 nucleotides, about 100 nucleotides, about 80 nucleotides, about 70 nucleotides, about 60 nucleotides, about 50 nucleotides upstream of genomic site GRCh38/hg38: chr3 113249722. In some cases, the targeted region of the pre-mRNA is at least about 1500 nucleotides, about 1000 nucleotides, about 800 nucleotides, about 700 nucleotides, about 600 nucleotides, about 500 nucleotides, about 400 nucleotides, about 300 nucleotides, about 200 nucleotides, about 100 nucleotides, about 80 nucleotides, about 70 nucleotides, about 60 nucleotides, about 50 nucleotides upstream of genomic site GRCh38/hg38: chr3 113249722. In some cases, the targeted region of the pre-mRNA is at most about 1500 nucleotides, about 1000 nucleotides, about 800 nucleotides, about 700 nucleotides, about 600 nucleotides, about 500 nucleotides, about 400 nucleotides, about 300 nucleotides, about 200 nucleotides, about 100 nucleotides, about 80 nucleotides, about 70 nucleotides, about 60 nucleotides, about 50 nucleotides downstream of SEQ ID NO: 166. In some cases, the targeted region of the pre-mRNA is at least about 1500 nucleotides, about 1000 nucleotides, about 800 nucleotides, about 700 nucleotides, about 600 nucleotides, about 500 nucleotides, about 400 nucleotides, about 300 nucleotides, about 200 nucleotides, about 100 nucleotides, about 80 nucleotides, about 70 nucleotides, about 60 nucleotides, about 50 nucleotides downstream of SEQ ID NO: 166. In some cases, the targeted region of the pre-mRNA is at most about 1500 nucleotides, about 1000 nucleotides, about 800 nucleotides, about 700 nucleotides, about 600 nucleotides, about 500 nucleotides, about 400 nucleotides, about 300 nucleotides, about 200 nucleotides, about 100 nucleotides, about 80 nucleotides, about 70 nucleotides, about 60 nucleotides, about 50 nucleotides downstream of genomic site GRCh38/hg38: chr3 113249899. In some cases. the targeted region of the pre-mRNA is at least about 1500 nucleotides, about 1000 nucleotides, about 800 nucleotides, about 700 nucleotides, about 600 nucleotides, about 500 nucleotides, about 400 nucleotides, about 300 nucleotides, about 200 nucleotides, about 100 nucleotides, about 80 nucleotides, about 70 nucleotides, about 60 nucleotides, about 50 nucleotides downstream of genomic site GRCh38/hg38: chr3 113249899. In some cases, the targeted region of the pre-mRNA is within a sequence SEQ ID NO: 166. In some cases, the targeted region of the pre-mRNA is within a sequence between a pair of genomic sites GRCh38/hg38: chr3 113249722, and GRCh38/hg38: chr3 113249899. In some cases, the therapeutic agent is an antisense oligomer complementary to a sequence with at least about 80%, 85%, 90%, 95%, 96%, 97%, 98%, 99% or 100% sequence identity to SEQ ID NO:166. In some cases, the therapeutic agent is an antisense oligomer complementary to a sequence with 100% sequence identity to SEQ ID NO:166. In some cases, the therapeutic agent increases level of a first processed mRNA encoding a protein having a sequence SEQ ID NO: 8133, and decreases level of a second processed mRNA encoding a protein having a sequence SEQ ID NO: 369. In some cases, the targeted region of the pre-mRNA is at most about 1500 nucleotides, about 1000 nucleotides, about 800 nucleotides, about 700 nucleotides, about 600 nucleotides, about 500 nucleotides, about 400 nucleotides, about 300 nucleotides, about 200 nucleotides, about 100 nucleotides, about 80 nucleotides, about 70 nucleotides, about 60 nucleotides, about 50 nucleotides upstream of SEQ ID NO: 167. In some cases, the targeted region of the pre-mRNA is at least about 1500 nucleotides, about 1000 nucleotides, about 800 nucleotides, about 700 nucleotides, about 600 nucleotides, about 500 nucleotides, about 400 nucleotides, about 300 nucleotides, about 200 nucleotides, about 100 nucleotides, about 80 nucleotides, about 70 nucleotides, about 60 nucleotides, about 50 nucleotides upstream of SEQ ID NO: 167. In some cases, the targeted region of the pre-mRNA is at most about 1500 nucleotides, about 1000 nucleotides, about 800 nucleotides, about 700 nucleotides, about 600 nucleotides, about 500 nucleotides, about 400 nucleotides, about 300 nucleotides, about 200 nucleotides, about 100 nucleotides, about 80 nucleotides, about 70 nucleotides, about 60 nucleotides, about 50 nucleotides upstream of genomic site GRCh38/hg38: chr3 113249722. In some cases, the targeted region of the pre-mRNA is at least about 1500 nucleotides, about 1000 nucleotides, about 800 nucleotides, about 700 nucleotides, about 600 nucleotides, about 500 nucleotides, about 400 nucleotides, about 300 nucleotides, about 200 nucleotides, about 100 nucleotides, about 80 nucleotides, about 70 nucleotides, about 60 nucleotides, about 50 nucleotides upstream of genomic site GRCh38/hg38: chr3 113249722. In some cases, the targeted region of the pre-mRNA is at most about 1500 nucleotides, about 1000 nucleotides, about 800 nucleotides, about 700 nucleotides, about 600 nucleotides, about 500 nucleotides, about 400 nucleotides, about 300 nucleotides, about 200 nucleotides, about 100 nucleotides, about 80 nucleotides, about 70 nucleotides, about 60 nucleotides, about 50 nucleotides downstream of SEQ ID NO: 167. In some cases, the targeted region of the pre-mRNA is at least about 1500 nucleotides, about 1000 nucleotides, about 800 nucleotides, about 700 nucleotides, about 600 nucleotides, about 500 nucleotides, about 400 nucleotides, about 300 nucleotides, about 200 nucleotides, about 100 nucleotides, about 80 nucleotides, about 70 nucleotides, about 60 nucleotides, about 50 nucleotides downstream of SEQ ID NO: 167. In some cases, the targeted region of the pre-mRNA is at most about 1500 nucleotides, about 1000 nucleotides, about 800 nucleotides, about 700 nucleotides, about 600 nucleotides, about 500 nucleotides, about 400 nucleotides, about 300 nucleotides, about 200 nucleotides, about 100 nucleotides, about 80 nucleotides, about 70 nucleotides, about 60 nucleotides, about 50 nucleotides downstream of genomic site GRCh38/hg38: chr3 113249899. In some cases. the targeted region of the pre-mRNA is at least about 1500 nucleotides, about 1000 nucleotides, about 800 nucleotides, about 700 nucleotides, about 600 nucleotides, about 500 nucleotides, about 400 nucleotides, about 300 nucleotides, about 200 nucleotides, about 100 nucleotides, about 80 nucleotides, about 70 nucleotides, about 60 nucleotides, about 50 nucleotides downstream of genomic site GRCh38/hg38: chr3 113249899. In some cases, the targeted region of the pre-mRNA is within a sequence SEQ ID NO: 167. In some cases, the targeted region of the pre-mRNA is within a sequence between a pair of genomic sites GRCh38/hg38: chr3 113249722, and GRCh38/hg38: chr3 113249899. In some cases, the therapeutic agent is an antisense oligomer complementary to a sequence with at least about 80%, 85%, 90%, 95%, 96%, 97%, 98%, 99% or 100% sequence identity to SEQ ID NO:167. In some cases, the therapeutic agent is an antisense oligomer complementary to a sequence with 100% sequence identity to SEQ ID NO:167. In some cases, the therapeutic agent increases level of a first processed mRNA encoding a protein having a sequence SEQ ID NO: 8134, and decreases level of a second processed mRNA encoding a protein having a sequence SEQ ID NO: 370. In some cases, the targeted region of the pre-mRNA is at most about 1500 nucleotides, about 1000 nucleotides, about 800 nucleotides, about 700 nucleotides, about 600 nucleotides, about 500 nucleotides, about 400 nucleotides, about 300 nucleotides, about 200 nucleotides, about 100 nucleotides, about 80 nucleotides, about 70 nucleotides, about 60 nucleotides, about 50 nucleotides upstream of SEQ ID NO: 168. In some cases, the targeted region of the pre-mRNA is at least about 1500 nucleotides, about 1000 nucleotides, about 800 nucleotides, about 700 nucleotides, about 600 nucleotides, about 500 nucleotides, about 400 nucleotides, about 300 nucleotides, about 200 nucleotides, about 100 nucleotides, about 80 nucleotides, about 70 nucleotides, about 60 nucleotides, about 50 nucleotides upstream of SEQ ID NO: 168. In some cases, the targeted region of the pre-mRNA is at most about 1500 nucleotides, about 1000 nucleotides, about 800 nucleotides, about 700 nucleotides, about 600 nucleotides, about 500 nucleotides, about 400 nucleotides, about 300 nucleotides, about 200 nucleotides, about 100 nucleotides, about 80 nucleotides, about 70 nucleotides, about 60 nucleotides, about 50 nucleotides upstream of genomic site GRCh38/hg38: chr3 113249722. In some cases, the targeted region of the pre-mRNA is at least about 1500 nucleotides, about 1000 nucleotides, about 800 nucleotides, about 700 nucleotides, about 600 nucleotides, about 500 nucleotides, about 400 nucleotides, about 300 nucleotides, about 200 nucleotides, about 100 nucleotides, about 80 nucleotides, about 70 nucleotides, about 60 nucleotides, about 50 nucleotides upstream of genomic site GRCh38/hg38: chr3 113249722. In some cases, the targeted region of the pre-mRNA is at most about 1500 nucleotides, about 1000 nucleotides, about 800 nucleotides, about 700 nucleotides, about 600 nucleotides, about 500 nucleotides, about 400 nucleotides, about 300 nucleotides, about 200 nucleotides, about 100 nucleotides, about 80 nucleotides, about 70 nucleotides, about 60 nucleotides, about 50 nucleotides downstream of SEQ ID NO: 168. In some cases, the targeted region of the pre-mRNA is at least about 1500 nucleotides, about 1000 nucleotides, about 800 nucleotides, about 700 nucleotides, about 600 nucleotides, about 500 nucleotides, about 400 nucleotides, about 300 nucleotides, about 200 nucleotides, about 100 nucleotides, about 80 nucleotides, about 70 nucleotides, about 60 nucleotides, about 50 nucleotides downstream of SEQ ID NO: 168. In some cases, the targeted region of the pre-mRNA is at most about 1500 nucleotides, about 1000 nucleotides, about 800 nucleotides, about 700 nucleotides, about 600 nucleotides, about 500 nucleotides, about 400 nucleotides, about 300 nucleotides, about 200 nucleotides, about 100 nucleotides, about 80 nucleotides, about 70 nucleotides, about 60 nucleotides, about 50 nucleotides downstream of genomic site GRCh38/hg38: chr3 113249899. In some cases. the targeted region of the pre-mRNA is at least about 1500 nucleotides, about 1000 nucleotides, about 800 nucleotides, about 700 nucleotides, about 600 nucleotides, about 500 nucleotides, about 400 nucleotides, about 300 nucleotides, about 200 nucleotides, about 100 nucleotides, about 80 nucleotides, about 70 nucleotides, about 60 nucleotides, about 50 nucleotides downstream of genomic site GRCh38/hg38: chr3 113249899. In some cases, the targeted region of the pre-mRNA is within a sequence SEQ ID NO: 168. In some cases, the targeted region of the pre-mRNA is within a sequence between a pair of genomic sites GRCh38/hg38: chr3 113249722, and GRCh38/hg38: chr3 113249899. In some cases, the therapeutic agent is an antisense oligomer complementary to a sequence with at least about 80%, 85%, 90%, 95%, 96%, 97%, 98%, 99% or 100% sequence identity to SEQ ID NO:168. In some cases, the therapeutic agent is an antisense oligomer complementary to a sequence with 100% sequence identity to SEQ ID NO:168. In some cases, the therapeutic agent is an antisense oligomer that has a sequence with at least about 80%, 85%, 90%, 95%, 96%, 97%, 98%, 99% or 100% sequence identity to a sequence selected from the group consisting of SEQ ID NOs: 1532-1606. In some cases, the therapeutic agent is an antisense oligomer that has a sequence selected from the group consisting of SEQ ID NOs: 1532-1606. In some cases, the target peptide sequence is a portion of BOC protein, and the method treats a disease or the condition that comprises Malignant neoplasm of breast.

[0127] BRCA1

[0128] In some cases, the target peptide sequence is a portion of BRCA1 protein. In some cases, the therapeutic agent increases level of a first processed mRNA encoding a protein having a sequence SEQ ID NO: 8135, and decreases level of a second processed mRNA encoding a protein having a sequence SEQ ID NO: 371. In some cases, the targeted region of the pre-mRNA is at most about 1500 nucleotides, about 1000 nucleotides, about 800 nucleotides, about 700 nucleotides, about 600 nucleotides, about 500 nucleotides, about 400 nucleotides, about 300 nucleotides, about 200 nucleotides, about 100 nucleotides, about 80 nucleotides, about 70 nucleotides, about 60 nucleotides, about 50 nucleotides upstream of SEQ ID NO: 169. In some cases, the targeted region of the pre-mRNA is at least about 1500 nucleotides, about 1000 nucleotides, about 800 nucleotides, about 700 nucleotides, about 600 nucleotides, about 500 nucleotides, about 400 nucleotides, about 300 nucleotides, about 200 nucleotides, about 100 nucleotides, about 80 nucleotides, about 70 nucleotides, about 60 nucleotides, about 50 nucleotides upstream of SEQ ID NO: 169. In some cases, the targeted region of the pre-mRNA is at most about 1500 nucleotides, about 1000 nucleotides, about 800 nucleotides, about 700 nucleotides, about 600 nucleotides, about 500 nucleotides, about 400 nucleotides, about 300 nucleotides, about 200 nucleotides, about 100 nucleotides, about 80 nucleotides, about 70 nucleotides, about 60 nucleotides, about 50 nucleotides upstream of genomic site GRCh38/hg38: chr17 43106533. In some cases, the targeted region of the pre-mRNA is at least about 1500 nucleotides, about 1000 nucleotides, about 800 nucleotides, about 700 nucleotides, about 600 nucleotides, about 500 nucleotides, about 400 nucleotides, about 300 nucleotides, about 200 nucleotides, about 100 nucleotides, about 80 nucleotides, about 70 nucleotides, about 60 nucleotides, about 50 nucleotides upstream of genomic site GRCh38/hg38: chr17 43106533. In some cases, the targeted region of the pre-mRNA is at most about 1500 nucleotides, about 1000 nucleotides, about 800 nucleotides, about 700 nucleotides, about 600 nucleotides, about 500 nucleotides, about 400 nucleotides, about 300 nucleotides, about 200 nucleotides, about 100 nucleotides, about 80 nucleotides, about 70 nucleotides, about 60 nucleotides, about 50 nucleotides downstream of SEQ ID NO: 169. In some cases, the targeted region of the pre-mRNA is at least about 1500 nucleotides, about 1000 nucleotides, about 800 nucleotides, about 700 nucleotides, about 600 nucleotides, about 500 nucleotides, about 400 nucleotides, about 300 nucleotides, about 200 nucleotides, about 100 nucleotides, about 80 nucleotides, about 70 nucleotides, about 60 nucleotides, about 50 nucleotides downstream of SEQ ID NO: 169. In some cases, the targeted region of the pre-mRNA is at most about 1500 nucleotides, about 1000 nucleotides, about 800 nucleotides, about 700 nucleotides, about 600 nucleotides, about 500 nucleotides, about 400 nucleotides, about 300 nucleotides, about 200 nucleotides, about 100 nucleotides, about 80 nucleotides, about 70 nucleotides, about 60 nucleotides, about 50 nucleotides downstream of genomic site GRCh38/hg38: chr17 43106456. In some cases. the targeted region of the pre-mRNA is at least about 1500 nucleotides, about 1000 nucleotides, about 800 nucleotides, about 700 nucleotides, about 600 nucleotides, about 500 nucleotides, about 400 nucleotides, about 300 nucleotides, about 200 nucleotides, about 100 nucleotides, about 80 nucleotides, about 70 nucleotides, about 60 nucleotides, about 50 nucleotides downstream of genomic site GRCh38/hg38: chr17 43106456. In some cases, the targeted region of the pre-mRNA is within a sequence SEQ ID NO: 169. In some cases, the targeted region of the pre-mRNA is within a sequence between a pair of genomic sites GRCh38/hg38: chr17 43106533, and GRCh38/hg38: chr17 43106456. In some cases, the therapeutic agent is an antisense oligomer complementary to a sequence with at least about 80%, 85%, 90%, 95%, 96%, 97%, 98%, 99% or 100% sequence identity to SEQ ID NO:169. In some cases, the therapeutic agent is an antisense oligomer complementary to a sequence with 100% sequence identity to SEQ ID NO:169. In some cases, the therapeutic agent increases level of a first processed mRNA encoding a protein having a sequence SEQ ID NO: 8136, and decreases level of a second processed mRNA encoding a protein having a sequence SEQ ID NO: 372. In some cases, the targeted region of the pre-mRNA is at most about 1500 nucleotides, about 1000 nucleotides, about 800 nucleotides, about 700 nucleotides, about 600 nucleotides, about 500 nucleotides, about 400 nucleotides, about 300 nucleotides, about 200 nucleotides, about 100 nucleotides, about 80 nucleotides, about 70 nucleotides, about 60 nucleotides, about 50 nucleotides upstream of SEQ ID NO: 170. In some cases, the targeted region of the pre-mRNA is at least about 1500 nucleotides, about 1000 nucleotides, about 800 nucleotides, about 700 nucleotides, about 600 nucleotides, about 500 nucleotides, about 400 nucleotides, about 300 nucleotides, about 200 nucleotides, about 100 nucleotides, about 80 nucleotides, about 70 nucleotides, about 60 nucleotides, about 50 nucleotides upstream of SEQ ID NO: 170. In some cases, the targeted region of the pre-mRNA is at most about 1500 nucleotides, about 1000 nucleotides, about 800 nucleotides, about 700 nucleotides, about 600 nucleotides, about 500 nucleotides, about 400 nucleotides, about 300 nucleotides, about 200 nucleotides, about 100 nucleotides, about 80 nucleotides, about 70 nucleotides, about 60 nucleotides, about 50 nucleotides upstream of genomic site GRCh38/hg38: chr17 43106533. In some cases, the targeted region of the pre-mRNA is at least about 1500 nucleotides, about 1000 nucleotides, about 800 nucleotides, about 700 nucleotides, about 600 nucleotides, about 500 nucleotides, about 400 nucleotides, about 300 nucleotides, about 200 nucleotides, about 100 nucleotides, about 80 nucleotides, about 70 nucleotides, about 60 nucleotides, about 50 nucleotides upstream of genomic site GRCh38/hg38: chr17 43106533. In some cases, the targeted region of the pre-mRNA is at most about 1500 nucleotides, about 1000 nucleotides, about 800 nucleotides, about 700 nucleotides, about 600 nucleotides, about 500 nucleotides, about 400 nucleotides, about 300 nucleotides, about 200 nucleotides, about 100 nucleotides, about 80 nucleotides, about 70 nucleotides, about 60 nucleotides, about 50 nucleotides downstream of SEQ ID NO: 170. In some cases, the targeted region of the pre-mRNA is at least about 1500 nucleotides, about 1000 nucleotides, about 800 nucleotides, about 700 nucleotides, about 600 nucleotides, about 500 nucleotides, about 400 nucleotides, about 300 nucleotides, about 200 nucleotides, about 100 nucleotides, about 80 nucleotides, about 70 nucleotides, about 60 nucleotides, about 50 nucleotides downstream of SEQ ID NO: 170. In some cases, the targeted region of the pre-mRNA is at most about 1500 nucleotides, about 1000 nucleotides, about 800 nucleotides, about 700 nucleotides, about 600 nucleotides, about 500 nucleotides, about 400 nucleotides, about 300 nucleotides, about 200 nucleotides, about 100 nucleotides, about 80 nucleotides, about 70 nucleotides, about 60 nucleotides, about 50 nucleotides downstream of genomic site GRCh38/hg38: chr17 43106456. In some cases. the targeted region of the pre-mRNA is at least about 1500 nucleotides, about 1000 nucleotides, about 800 nucleotides, about 700 nucleotides, about 600 nucleotides, about 500 nucleotides, about 400 nucleotides, about 300 nucleotides, about 200 nucleotides, about 100 nucleotides, about 80 nucleotides, about 70 nucleotides, about 60 nucleotides, about 50 nucleotides downstream of genomic site GRCh38/hg38: chr17 43106456. In some cases, the targeted region of the pre-mRNA is within a sequence SEQ ID NO: 170. In some cases, the targeted region of the pre-mRNA is within a sequence between a pair of genomic sites GRCh38/hg38: chr17 43106533, and GRCh38/hg38: chr17 43106456. In some cases, the therapeutic agent is an antisense oligomer complementary to a sequence with at least about 80%, 85%, 90%, 95%, 96%, 97%, 98%, 99% or 100% sequence identity to SEQ ID NO:170. In some cases, the therapeutic agent is an antisense oligomer complementary to a sequence with 100% sequence identity to SEQ ID NO:170. In some cases, the therapeutic agent is an antisense oligomer that has a sequence with at least about 80%, 85%, 90%, 95%, 96%, 97%, 98%, 99% or 100% sequence identity to a sequence selected from the group consisting of SEQ ID NOs: 1607-1661. In some cases, the therapeutic agent is an antisense oligomer that has a sequence selected from the group consisting of SEQ ID NOs: 1607-1661. In some cases, the target peptide sequence is a portion of BRCA1 protein, and the method treats a disease or the condition that comprises Cytopenia; Gastrointestinal Neoplasms; Depressive disorder; Prostate cancer, familial; Primary peritoneal carcinoma; Ovarian Cancer, Familial, Susceptibility to, 1; Breast Cancer, Familial Male; Malignant Neoplasms; Pancreatic Neoplasm; Breast Cancer, Familial; Neoplasm of uncertain or unknown behavior of breast; Ovarian Carcinoma; Adenocarcinoma of prostate; Neoplasm of uncertain or unknown behavior of ovary; Malignant neoplasm of pancreas; Pancreatic carcinoma; Malignant neoplasm of ovary; Congenital anemia; Hematologic Neoplasms; Breast adenocarcinoma; Breast-Ovarian Cancer, Familial, Susceptibility to, 1; Pancreatic carcinoma, familial; Benign tumor of pancreas; Breast Carcinoma; Ovarian neoplasm; Hereditary Breast and Ovarian Cancer Syndrome; Mental Depression; Epithelial ovarian cancer; Malignant neoplasm of breast; Sporadic Breast Carcinoma; Schizophrenia; Breast-ovarian cancer, familial, 1; or Pancreatic cancer, susceptibility to, 4.

[0129] C8B

[0130] In some cases, the target peptide sequence is a portion of C8B protein. In some cases, the therapeutic agent increases level of a first processed mRNA encoding a protein having a sequence SEQ ID NO: 8137, and decreases level of a second processed mRNA encoding a protein having a sequence SEQ ID NO: 373. In some cases, the targeted region of the pre-mRNA is at most about 1500 nucleotides, about 1000 nucleotides, about 800 nucleotides, about 700 nucleotides, about 600 nucleotides, about 500 nucleotides, about 400 nucleotides, about 300 nucleotides, about 200 nucleotides, about 100 nucleotides, about 80 nucleotides, about 70 nucleotides, about 60 nucleotides, about 50 nucleotides upstream of SEQ ID NO: 171. In some cases, the targeted region of the pre-mRNA is at least about 1500 nucleotides, about 1000 nucleotides, about 800 nucleotides, about 700 nucleotides, about 600 nucleotides, about 500 nucleotides, about 400 nucleotides, about 300 nucleotides, about 200 nucleotides, about 100 nucleotides, about 80 nucleotides, about 70 nucleotides, about 60 nucleotides, about 50 nucleotides upstream of SEQ ID NO: 171. In some cases, the targeted region of the pre-mRNA is at most about 1500 nucleotides, about 1000 nucleotides, about 800 nucleotides, about 700 nucleotides, about 600 nucleotides, about 500 nucleotides, about 400 nucleotides, about 300 nucleotides, about 200 nucleotides, about 100 nucleotides, about 80 nucleotides, about 70 nucleotides, about 60 nucleotides, about 50 nucleotides upstream of genomic site GRCh38/hg38: chr1 56959657. In some cases, the targeted region of the pre-mRNA is at least about 1500 nucleotides, about 1000 nucleotides, about 800 nucleotides, about 700 nucleotides, about 600 nucleotides, about 500 nucleotides, about 400 nucleotides, about 300 nucleotides, about 200 nucleotides, about 100 nucleotides, about 80 nucleotides, about 70 nucleotides, about 60 nucleotides, about 50 nucleotides upstream of genomic site GRCh38/hg38: chr1 56959657. In some cases, the targeted region of the pre-mRNA is at most about 1500 nucleotides, about 1000 nucleotides, about 800 nucleotides, about 700 nucleotides, about 600 nucleotides, about 500 nucleotides, about 400 nucleotides, about 300 nucleotides, about 200 nucleotides, about 100 nucleotides, about 80 nucleotides, about 70 nucleotides, about 60 nucleotides, about 50 nucleotides downstream of SEQ ID NO: 171. In some cases, the targeted region of the pre-mRNA is at least about 1500 nucleotides, about 1000 nucleotides, about 800 nucleotides, about 700 nucleotides, about 600 nucleotides, about 500 nucleotides, about 400 nucleotides, about 300 nucleotides, about 200 nucleotides, about 100 nucleotides, about 80 nucleotides, about 70 nucleotides, about 60 nucleotides, about 50 nucleotides downstream of SEQ ID NO: 171. In some cases, the targeted region of the pre-mRNA is at most about 1500 nucleotides, about 1000 nucleotides, about 800 nucleotides, about 700 nucleotides, about 600 nucleotides, about 500 nucleotides, about 400 nucleotides, about 300 nucleotides, about 200 nucleotides, about 100 nucleotides, about 80 nucleotides, about 70 nucleotides, about 60 nucleotides, about 50 nucleotides downstream of genomic site GRCh38/hg38: chr1 56959529. In some cases. the targeted region of the pre-mRNA is at least about 1500 nucleotides, about 1000 nucleotides, about 800 nucleotides, about 700 nucleotides, about 600 nucleotides, about 500 nucleotides, about 400 nucleotides, about 300 nucleotides, about 200 nucleotides, about 100 nucleotides, about 80 nucleotides, about 70 nucleotides, about 60 nucleotides, about 50 nucleotides downstream of genomic site GRCh38/hg38: chr1 56959529. In some cases, the targeted region of the pre-mRNA is within a sequence SEQ ID NO: 171. In some cases, the targeted region of the pre-mRNA is within a sequence between a pair of genomic sites GRCh38/hg38: chr1 56959657, and GRCh38/hg38: chr1 56959529. In some cases, the therapeutic agent is an antisense oligomer complementary to a sequence with at least about 80%, 85%, 90%, 95%, 96%, 97%, 98%, 99% or 100% sequence identity to SEQ ID NO:171. In some cases, the therapeutic agent is an antisense oligomer complementary to a sequence with 100% sequence identity to SEQ ID NO:171. In some cases, the therapeutic agent increases level of a first processed mRNA encoding a protein having a sequence SEQ ID NO: 8138, and decreases level of a second processed mRNA encoding a protein having a sequence SEQ ID NO: 374. In some cases, the targeted region of the pre-mRNA is at most about 1500 nucleotides, about 1000 nucleotides, about 800 nucleotides, about 700 nucleotides, about 600 nucleotides, about 500 nucleotides, about 400 nucleotides, about 300 nucleotides, about 200 nucleotides, about 100 nucleotides, about 80 nucleotides, about 70 nucleotides, about 60 nucleotides, about 50 nucleotides upstream of SEQ ID NO: 172. In some cases, the targeted region of the pre-mRNA is at least about 1500 nucleotides, about 1000 nucleotides, about 800 nucleotides, about 700 nucleotides, about 600 nucleotides, about 500 nucleotides, about 400 nucleotides, about 300 nucleotides, about 200 nucleotides, about 100 nucleotides, about 80 nucleotides, about 70 nucleotides, about 60 nucleotides, about 50 nucleotides upstream of SEQ ID NO: 172. In some cases, the targeted region of the pre-mRNA is at most about 1500 nucleotides, about 1000 nucleotides, about 800 nucleotides, about 700 nucleotides, about 600 nucleotides, about 500 nucleotides, about 400 nucleotides, about 300 nucleotides, about 200 nucleotides, about 100 nucleotides, about 80 nucleotides, about 70 nucleotides, about 60 nucleotides, about 50 nucleotides upstream of genomic site GRCh38/hg38: chr1 56959657. In some cases, the targeted region of the pre-mRNA is at least about 1500 nucleotides, about 1000 nucleotides, about 800 nucleotides, about 700 nucleotides, about 600 nucleotides, about 500 nucleotides, about 400 nucleotides, about 300 nucleotides, about 200 nucleotides, about 100 nucleotides, about 80 nucleotides, about 70 nucleotides, about 60 nucleotides, about 50 nucleotides upstream of genomic site GRCh38/hg38: chr1 56959657. In some cases, the targeted region of the pre-mRNA is at most about 1500 nucleotides, about 1000 nucleotides, about 800 nucleotides, about 700 nucleotides, about 600 nucleotides, about 500 nucleotides, about 400 nucleotides, about 300 nucleotides, about 200 nucleotides, about 100 nucleotides, about 80 nucleotides, about 70 nucleotides, about 60 nucleotides, about 50 nucleotides downstream of SEQ ID NO: 172. In some cases, the targeted region of the pre-mRNA is at least about 1500 nucleotides, about 1000 nucleotides, about 800 nucleotides, about 700 nucleotides, about 600 nucleotides, about 500 nucleotides, about 400 nucleotides, about 300 nucleotides, about 200 nucleotides, about 100 nucleotides, about 80 nucleotides, about 70 nucleotides, about 60 nucleotides, about 50 nucleotides downstream of SEQ ID NO: 172. In some cases, the targeted region of the pre-mRNA is at most about 1500 nucleotides, about 1000 nucleotides, about 800 nucleotides, about 700 nucleotides, about 600 nucleotides, about 500 nucleotides, about 400 nucleotides, about 300 nucleotides, about 200 nucleotides, about 100 nucleotides, about 80 nucleotides, about 70 nucleotides, about 60 nucleotides, about 50 nucleotides downstream of genomic site GRCh38/hg38: chr1 56959529. In some cases. the targeted region of the pre-mRNA is at least about 1500 nucleotides, about 1000 nucleotides, about 800 nucleotides, about 700 nucleotides, about 600 nucleotides, about 500 nucleotides, about 400 nucleotides, about 300 nucleotides, about 200 nucleotides, about 100 nucleotides, about 80 nucleotides, about 70 nucleotides, about 60 nucleotides, about 50 nucleotides downstream of genomic site GRCh38/hg38: chr1 56959529. In some cases, the targeted region of the pre-mRNA is within a sequence SEQ ID NO: 172. In some cases, the targeted region of the pre-mRNA is within a sequence between a pair of genomic sites GRCh38/hg38: chr1 56959657, and GRCh38/hg38: chr1 56959529. In some cases, the therapeutic agent is an antisense oligomer complementary to a sequence with at least about 80%, 85%, 90%, 95%, 96%, 97%, 98%, 99% or 100% sequence identity to SEQ ID NO:172. In some cases, the therapeutic agent is an antisense oligomer complementary to a sequence with 100% sequence identity to SEQ ID NO:172. In some cases, the therapeutic agent is an antisense oligomer that has a sequence with at least about 80%, 85%, 90%, 95%, 96%, 97%, 98%, 99% or 100% sequence identity to a sequence selected from the group consisting of SEQ ID NOs: 1662-1726. In some cases, the therapeutic agent is an antisense oligomer that has a sequence selected from the group consisting of SEQ ID NOs: 1662-1726. In some cases, the target peptide sequence is a portion of C8B protein, and the method treats a disease or the condition that comprises C8 deficiency, type II.

[0131] CALM1

[0132] In some cases, the target peptide sequence is a portion of CALM1 protein. In some cases, the therapeutic agent increases level of a first processed mRNA encoding a protein having a sequence SEQ ID NO: 8139, and decreases level of a second processed mRNA encoding a protein having a sequence SEQ ID NO: 375. In some cases, the targeted region of the pre-mRNA is at most about 1500 nucleotides, about 1000 nucleotides, about 800 nucleotides, about 700 nucleotides, about 600 nucleotides, about 500 nucleotides, about 400 nucleotides, about 300 nucleotides, about 200 nucleotides, about 100 nucleotides, about 80 nucleotides, about 70 nucleotides, about 60 nucleotides, about 50 nucleotides upstream of SEQ ID NO: 173. In some cases, the targeted region of the pre-mRNA is at least about 1500 nucleotides, about 1000 nucleotides, about 800 nucleotides, about 700 nucleotides, about 600 nucleotides, about 500 nucleotides, about 400 nucleotides, about 300 nucleotides, about 200 nucleotides, about 100 nucleotides, about 80 nucleotides, about 70 nucleotides, about 60 nucleotides, about 50 nucleotides upstream of SEQ ID NO: 173. In some cases, the targeted region of the pre-mRNA is at most about 1500 nucleotides, about 1000 nucleotides, about 800 nucleotides, about 700 nucleotides, about 600 nucleotides, about 500 nucleotides, about 400 nucleotides, about 300 nucleotides, about 200 nucleotides, about 100 nucleotides, about 80 nucleotides, about 70 nucleotides, about 60 nucleotides, about 50 nucleotides upstream of genomic site GRCh38/hg38: chr14 90398991. In some cases, the targeted region of the pre-mRNA is at least about 1500 nucleotides, about 1000 nucleotides, about 800 nucleotides, about 700 nucleotides, about 600 nucleotides, about 500 nucleotides, about 400 nucleotides, about 300 nucleotides, about 200 nucleotides, about 100 nucleotides, about 80 nucleotides, about 70 nucleotides, about 60 nucleotides, about 50 nucleotides upstream of genomic site GRCh38/hg38: chr14 90398991. In some cases, the targeted region of the pre-mRNA is at most about 1500 nucleotides, about 1000 nucleotides, about 800 nucleotides, about 700 nucleotides, about 600 nucleotides, about 500 nucleotides, about 400 nucleotides, about 300 nucleotides, about 200 nucleotides, about 100 nucleotides, about 80 nucleotides, about 70 nucleotides, about 60 nucleotides, about 50 nucleotides downstream of SEQ ID NO: 173. In some cases, the targeted region of the pre-mRNA is at least about 1500 nucleotides, about 1000 nucleotides, about 800 nucleotides, about 700 nucleotides, about 600 nucleotides, about 500 nucleotides, about 400 nucleotides, about 300 nucleotides, about 200 nucleotides, about 100 nucleotides, about 80 nucleotides, about 70 nucleotides, about 60 nucleotides, about 50 nucleotides downstream of SEQ ID NO: 173. In some cases, the targeted region of the pre-mRNA is at most about 1500 nucleotides, about 1000 nucleotides, about 800 nucleotides, about 700 nucleotides, about 600 nucleotides, about 500 nucleotides, about 400 nucleotides, about 300 nucleotides, about 200 nucleotides, about 100 nucleotides, about 80 nucleotides, about 70 nucleotides, about 60 nucleotides, about 50 nucleotides downstream of genomic site GRCh38/hg38: chr14 90399087. In some cases. the targeted region of the pre-mRNA is at least about 1500 nucleotides, about 1000 nucleotides, about 800 nucleotides, about 700 nucleotides, about 600 nucleotides, about 500 nucleotides, about 400 nucleotides, about 300 nucleotides, about 200 nucleotides, about 100 nucleotides, about 80 nucleotides, about 70 nucleotides, about 60 nucleotides, about 50 nucleotides downstream of genomic site GRCh38/hg38: chr14 90399087. In some cases, the targeted region of the pre-mRNA is within a sequence SEQ ID NO: 173. In some cases, the targeted region of the pre-mRNA is within a sequence between a pair of genomic sites GRCh38/hg38: chr14 90398991, and GRCh38/hg38: chr14 90399087. In some cases, the therapeutic agent is an antisense oligomer complementary to a sequence with at least about 80%, 85%, 90%, 95%, 96%, 97%, 98%, 99% or 100% sequence identity to SEQ ID NO:173. In some cases, the therapeutic agent is an antisense oligomer complementary to a sequence with 100% sequence identity to SEQ ID NO:173. In some cases, the therapeutic agent is an antisense oligomer that has a sequence with at least about 80%, 85%, 90%, 95%, 96%, 97%, 98%, 99% or 100% sequence identity to a sequence selected from the group consisting of SEQ ID NOs: 1727-1784. In some cases, the therapeutic agent is an antisense oligomer that has a sequence selected from the group consisting of SEQ ID NOs: 1727-1784. In some cases, the target peptide sequence is a portion of CALM1 protein, and the method treats a disease or the condition that comprises Ventricular Tachycardia, Catecholaminergic Polymorphic, 4; Ventricular Tachycardia, Catecholaminergic Polymorphic, 1; Long QT Syndrome; Romano-Ward Syndrome; Long QT Syndrome 14; or Schizophrenia.

[0133] CALM3

[0134] In some cases, the target peptide sequence is a portion of CALM3 protein. In some cases, the therapeutic agent increases level of a first processed mRNA encoding a protein having a sequence SEQ ID NO: 8140, and decreases level of a second processed mRNA encoding a protein having a sequence SEQ ID NO: 376. In some cases, the targeted region of the pre-mRNA is at most about 1500 nucleotides, about 1000 nucleotides, about 800 nucleotides, about 700 nucleotides, about 600 nucleotides, about 500 nucleotides, about 400 nucleotides, about 300 nucleotides, about 200 nucleotides, about 100 nucleotides, about 80 nucleotides, about 70 nucleotides, about 60 nucleotides, about 50 nucleotides upstream of SEQ ID NO: 174. In some cases, the targeted region of the pre-mRNA is at least about 1500 nucleotides, about 1000 nucleotides, about 800 nucleotides, about 700 nucleotides, about 600 nucleotides, about 500 nucleotides, about 400 nucleotides, about 300 nucleotides, about 200 nucleotides, about 100 nucleotides, about 80 nucleotides, about 70 nucleotides, about 60 nucleotides, about 50 nucleotides upstream of SEQ ID NO: 174. In some cases, the targeted region of the pre-mRNA is at most about 1500 nucleotides, about 1000 nucleotides, about 800 nucleotides, about 700 nucleotides, about 600 nucleotides, about 500 nucleotides, about 400 nucleotides, about 300 nucleotides, about 200 nucleotides, about 100 nucleotides, about 80 nucleotides, about 70 nucleotides, about 60 nucleotides, about 50 nucleotides upstream of genomic site GRCh38/hg38: chr19 46608205. In some cases, the targeted region of the pre-mRNA is at least about 1500 nucleotides, about 1000 nucleotides, about 800 nucleotides, about 700 nucleotides, about 600 nucleotides, about 500 nucleotides, about 400 nucleotides, about 300 nucleotides, about 200 nucleotides, about 100 nucleotides, about 80 nucleotides, about 70 nucleotides, about 60 nucleotides, about 50 nucleotides upstream of genomic site GRCh38/hg38: chr19 46608205. In some cases, the targeted region of the pre-mRNA is at most about 1500 nucleotides, about 1000 nucleotides, about 800 nucleotides, about 700 nucleotides, about 600 nucleotides, about 500 nucleotides, about 400 nucleotides, about 300 nucleotides, about 200 nucleotides, about 100 nucleotides, about 80 nucleotides, about 70 nucleotides, about 60 nucleotides, about 50 nucleotides downstream of SEQ ID NO: 174. In some cases, the targeted region of the pre-mRNA is at least about 1500 nucleotides, about 1000 nucleotides, about 800 nucleotides, about 700 nucleotides, about 600 nucleotides, about 500 nucleotides, about 400 nucleotides, about 300 nucleotides, about 200 nucleotides, about 100 nucleotides, about 80 nucleotides, about 70 nucleotides, about 60 nucleotides, about 50 nucleotides downstream of SEQ ID NO: 174. In some cases, the targeted region of the pre-mRNA is at most about 1500 nucleotides, about 1000 nucleotides, about 800 nucleotides, about 700 nucleotides, about 600 nucleotides, about 500 nucleotides, about 400 nucleotides, about 300 nucleotides, about 200 nucleotides, about 100 nucleotides, about 80 nucleotides, about 70 nucleotides, about 60 nucleotides, about 50 nucleotides downstream of genomic site GRCh38/hg38: chr19 46608340. In some cases. the targeted region of the pre-mRNA is at least about 1500 nucleotides, about 1000 nucleotides, about 800 nucleotides, about 700 nucleotides, about 600 nucleotides, about 500 nucleotides, about 400 nucleotides, about 300 nucleotides, about 200 nucleotides, about 100 nucleotides, about 80 nucleotides, about 70 nucleotides, about 60 nucleotides, about 50 nucleotides downstream of genomic site GRCh38/hg38: chr19 46608340. In some cases, the targeted region of the pre-mRNA is within a sequence SEQ ID NO: 174. In some cases, the targeted region of the pre-mRNA is within a sequence between a pair of genomic sites GRCh38/hg38: chr19 46608205, and GRCh38/hg38: chr19 46608340. In some cases, the therapeutic agent is an antisense oligomer complementary to a sequence with at least about 80%, 85%, 90%, 95%, 96%, 97%, 98%, 99% or 100% sequence identity to SEQ ID NO:174. In some cases, the therapeutic agent is an antisense oligomer complementary to a sequence with 100% sequence identity to SEQ ID NO:174. In some cases, the therapeutic agent is an antisense oligomer that has a sequence with at least about 80%, 85%, 90%, 95%, 96%, 97%, 98%, 99% or 100% sequence identity to a sequence selected from the group consisting of SEQ ID NOs: 1785-1850. In some cases, the therapeutic agent is an antisense oligomer that has a sequence selected from the group consisting of SEQ ID NOs: 1785-1850. In some cases, the target peptide sequence is a portion of CALM3 protein, and the method treats a disease or the condition that comprises Ventricular Tachycardia, Catecholaminergic Polymorphic, 1; or Long QT Syndrome.

[0135] CASP5

[0136] In some cases, the target peptide sequence is a portion of CASP5 protein. In some cases, the therapeutic agent increases level of a first processed mRNA encoding a protein having a sequence SEQ ID NO: 8141, and decreases level of a second processed mRNA encoding a protein having a sequence SEQ ID NO: 377. In some cases, the targeted region of the pre-mRNA is at most about 1500 nucleotides, about 1000 nucleotides, about 800 nucleotides, about 700 nucleotides, about 600 nucleotides, about 500 nucleotides, about 400 nucleotides, about 300 nucleotides, about 200 nucleotides, about 100 nucleotides, about 80 nucleotides, about 70 nucleotides, about 60 nucleotides, about 50 nucleotides upstream of SEQ ID NO: 175. In some cases, the targeted region of the pre-mRNA is at least about 1500 nucleotides, about 1000 nucleotides, about 800 nucleotides, about 700 nucleotides, about 600 nucleotides, about 500 nucleotides, about 400 nucleotides, about 300 nucleotides, about 200 nucleotides, about 100 nucleotides, about 80 nucleotides, about 70 nucleotides, about 60 nucleotides, about 50 nucleotides upstream of SEQ ID NO: 175. In some cases, the targeted region of the pre-mRNA is at most about 1500 nucleotides, about 1000 nucleotides, about 800 nucleotides, about 700 nucleotides, about 600 nucleotides, about 500 nucleotides, about 400 nucleotides, about 300 nucleotides, about 200 nucleotides, about 100 nucleotides, about 80 nucleotides, about 70 nucleotides, about 60 nucleotides, about 50 nucleotides upstream of genomic site GRCh38/hg38: chr11 105009053. In some cases, the targeted region of the pre-mRNA is at least about 1500 nucleotides, about 1000 nucleotides, about 800 nucleotides, about 700 nucleotides, about 600 nucleotides, about 500 nucleotides, about 400 nucleotides, about 300 nucleotides, about 200 nucleotides, about 100 nucleotides, about 80 nucleotides, about 70 nucleotides, about 60 nucleotides, about 50 nucleotides upstream of genomic site GRCh38/hg38: chr11 105009053. In some cases, the targeted region of the pre-mRNA is at most about 1500 nucleotides, about 1000 nucleotides, about 800 nucleotides, about 700 nucleotides, about 600 nucleotides, about 500 nucleotides, about 400 nucleotides, about 300 nucleotides, about 200 nucleotides, about 100 nucleotides, about 80 nucleotides, about 70 nucleotides, about 60 nucleotides, about 50 nucleotides downstream of SEQ ID NO: 175. In some cases, the targeted region of the pre-mRNA is at least about 1500 nucleotides, about 1000 nucleotides, about 800 nucleotides, about 700 nucleotides, about 600 nucleotides, about 500 nucleotides, about 400 nucleotides, about 300 nucleotides, about 200 nucleotides, about 100 nucleotides, about 80 nucleotides, about 70 nucleotides, about 60 nucleotides, about 50 nucleotides downstream of SEQ ID NO: 175. In some cases, the targeted region of the pre-mRNA is at most about 1500 nucleotides, about 1000 nucleotides, about 800 nucleotides, about 700 nucleotides, about 600 nucleotides, about 500 nucleotides, about 400 nucleotides, about 300 nucleotides, about 200 nucleotides, about 100 nucleotides, about 80 nucleotides, about 70 nucleotides, about 60 nucleotides, about 50 nucleotides downstream of genomic site GRCh38/hg38: chr11 105008807. In some cases. the targeted region of the pre-mRNA is at least about 1500 nucleotides, about 1000 nucleotides, about 800 nucleotides, about 700 nucleotides, about 600 nucleotides, about 500 nucleotides, about 400 nucleotides, about 300 nucleotides, about 200 nucleotides, about 100 nucleotides, about 80 nucleotides, about 70 nucleotides, about 60 nucleotides, about 50 nucleotides downstream of genomic site GRCh38/hg38: chr11 105008807. In some cases, the targeted region of the pre-mRNA is within a sequence SEQ ID NO: 175. In some cases, the targeted region of the pre-mRNA is within a sequence between a pair of genomic sites GRCh38/hg38: chr11 105009053, and GRCh38/hg38: chr11 105008807. In some cases, the therapeutic agent is an antisense oligomer complementary to a sequence with at least about 80%, 85%, 90%, 95%, 96%, 97%, 98%, 99% or 100% sequence identity to SEQ ID NO:175. In some cases, the therapeutic agent is an antisense oligomer complementary to a sequence with 100% sequence identity to SEQ ID NO:175. In some cases, the therapeutic agent is an antisense oligomer that has a sequence with at least about 80%, 85%, 90%, 95%, 96%, 97%, 98%, 99% or 100% sequence identity to a sequence selected from the group consisting of SEQ ID NOs: 1851-1938. In some cases, the therapeutic agent is an antisense oligomer that has a sequence selected from the group consisting of SEQ ID NOs: 1851-1938. In some cases, the target peptide sequence is a portion of CASP5 protein, and the method treats a cancer that is associated with CASP5 protein

[0137] CAST

[0138] In some cases, the target peptide sequence is a portion of CAST protein. In some cases, the therapeutic agent increases level of a first processed mRNA encoding a protein having a sequence SEQ ID NO: 8142, and decreases level of a second processed mRNA encoding a protein having a sequence SEQ ID NO: 378. In some cases, the targeted region of the pre-mRNA is at most about 1500 nucleotides, about 1000 nucleotides, about 800 nucleotides, about 700 nucleotides, about 600 nucleotides, about 500 nucleotides, about 400 nucleotides, about 300 nucleotides, about 200 nucleotides, about 100 nucleotides, about 80 nucleotides, about 70 nucleotides, about 60 nucleotides, about 50 nucleotides upstream of SEQ ID NO: 176. In some cases, the targeted region of the pre-mRNA is at least about 1500 nucleotides, about 1000 nucleotides, about 800 nucleotides, about 700 nucleotides, about 600 nucleotides, about 500 nucleotides, about 400 nucleotides, about 300 nucleotides, about 200 nucleotides, about 100 nucleotides, about 80 nucleotides, about 70 nucleotides, about 60 nucleotides, about 50 nucleotides upstream of SEQ ID NO: 176. In some cases, the targeted region of the pre-mRNA is at most about 1500 nucleotides, about 1000 nucleotides, about 800 nucleotides, about 700 nucleotides, about 600 nucleotides, about 500 nucleotides, about 400 nucleotides, about 300 nucleotides, about 200 nucleotides, about 100 nucleotides, about 80 nucleotides, about 70 nucleotides, about 60 nucleotides, about 50 nucleotides upstream of genomic site GRCh38/hg38: chr5 96726754. In some cases, the targeted region of the pre-mRNA is at least about 1500 nucleotides, about 1000 nucleotides, about 800 nucleotides, about 700 nucleotides, about 600 nucleotides, about 500 nucleotides, about 400 nucleotides, about 300 nucleotides, about 200 nucleotides, about 100 nucleotides, about 80 nucleotides, about 70 nucleotides, about 60 nucleotides, about 50 nucleotides upstream of genomic site GRCh38/hg38: chr5 96726754. In some cases, the targeted region of the pre-mRNA is at most about 1500 nucleotides, about 1000 nucleotides, about 800 nucleotides, about 700 nucleotides, about 600 nucleotides, about 500 nucleotides, about 400 nucleotides, about 300 nucleotides, about 200 nucleotides, about 100 nucleotides, about 80 nucleotides, about 70 nucleotides, about 60 nucleotides, about 50 nucleotides downstream of SEQ ID NO: 176. In some cases, the targeted region of the pre-mRNA is at least about 1500 nucleotides, about 1000 nucleotides, about 800 nucleotides, about 700 nucleotides, about 600 nucleotides, about 500 nucleotides, about 400 nucleotides, about 300 nucleotides, about 200 nucleotides, about 100 nucleotides, about 80 nucleotides, about 70 nucleotides, about 60 nucleotides, about 50 nucleotides downstream of SEQ ID NO: 176. In some cases, the targeted region of the pre-mRNA is at most about 1500 nucleotides, about 1000 nucleotides, about 800 nucleotides, about 700 nucleotides, about 600 nucleotides, about 500 nucleotides, about 400 nucleotides, about 300 nucleotides, about 200 nucleotides, about 100 nucleotides, about 80 nucleotides, about 70 nucleotides, about 60 nucleotides, about 50 nucleotides downstream of genomic site GRCh38/hg38: chr5 96726859. In some cases. the targeted region of the pre-mRNA is at least about 1500 nucleotides, about 1000 nucleotides, about 800 nucleotides, about 700 nucleotides, about 600 nucleotides, about 500 nucleotides, about 400 nucleotides, about 300 nucleotides, about 200 nucleotides, about 100 nucleotides, about 80 nucleotides, about 70 nucleotides, about 60 nucleotides, about 50 nucleotides downstream of genomic site GRCh38/hg38: chr5 96726859. In some cases, the targeted region of the pre-mRNA is within a sequence SEQ ID NO: 176. In some cases, the targeted region of the pre-mRNA is within a sequence between a pair of genomic sites GRCh38/hg38: chr5 96726754, and GRCh38/hg38: chr5 96726859. In some cases, the therapeutic agent is an antisense oligomer complementary to a sequence with at least about 80%, 85%, 90%, 95%, 96%, 97%, 98%, 99% or 100% sequence identity to SEQ ID NO:176. In some cases, the therapeutic agent is an antisense oligomer complementary to a sequence with 100% sequence identity to SEQ ID NO:176. In some cases, the therapeutic agent is an antisense oligomer that has a sequence with at least about 80%, 85%, 90%, 95%, 96%, 97%, 98%, 99% or 100% sequence identity to a sequence selected from the group consisting of SEQ ID NOs: 1939-1998. In some cases, the therapeutic agent is an antisense oligomer that has a sequence selected from the group consisting of SEQ ID NOs: 1939-1998. In some cases, the target peptide sequence is a portion of CAST protein, and the method treats a disease or the condition that comprises Peeling Skin Syndrome; Peeling Skin with Leukonychia, Acral Punctate Keratoses, Cheilitis, and Knuckle Pads; Erythrokeratoderma; or Palmoplantar Keratosis.

[0139] CEP19

[0140] In some cases, the target peptide sequence is a portion of CEP19 protein. In some cases, the therapeutic agent increases level of a first processed mRNA encoding a protein having a sequence SEQ ID NO: 8143, and decreases level of a second processed mRNA encoding a protein having a sequence SEQ ID NO: 379. In some cases, the targeted region of the pre-mRNA is at most about 1500 nucleotides, about 1000 nucleotides, about 800 nucleotides, about 700 nucleotides, about 600 nucleotides, about 500 nucleotides, about 400 nucleotides, about 300 nucleotides, about 200 nucleotides, about 100 nucleotides, about 80 nucleotides, about 70 nucleotides, about 60 nucleotides, about 50 nucleotides upstream of SEQ ID NO: 177. In some cases, the targeted region of the pre-mRNA is at least about 1500 nucleotides, about 1000 nucleotides, about 800 nucleotides, about 700 nucleotides, about 600 nucleotides, about 500 nucleotides, about 400 nucleotides, about 300 nucleotides, about 200 nucleotides, about 100 nucleotides, about 80 nucleotides, about 70 nucleotides, about 60 nucleotides, about 50 nucleotides upstream of SEQ ID NO: 177. In some cases, the targeted region of the pre-mRNA is at most about 1500 nucleotides, about 1000 nucleotides, about 800 nucleotides, about 700 nucleotides, about 600 nucleotides, about 500 nucleotides, about 400 nucleotides, about 300 nucleotides, about 200 nucleotides, about 100 nucleotides, about 80 nucleotides, about 70 nucleotides, about 60 nucleotides, about 50 nucleotides upstream of genomic site GRCh38/hg38: chr3 196708727. In some cases, the targeted region of the pre-mRNA is at least about 1500 nucleotides, about 1000 nucleotides, about 800 nucleotides, about 700 nucleotides, about 600 nucleotides, about 500 nucleotides, about 400 nucleotides, about 300 nucleotides, about 200 nucleotides, about 100 nucleotides, about 80 nucleotides, about 70 nucleotides, about 60 nucleotides, about 50 nucleotides upstream of genomic site GRCh38/hg38: chr3 196708727. In some cases, the targeted region of the pre-mRNA is at most about 1500 nucleotides, about 1000 nucleotides, about 800 nucleotides, about 700 nucleotides, about 600 nucleotides, about 500 nucleotides, about 400 nucleotides, about 300 nucleotides, about 200 nucleotides, about 100 nucleotides, about 80 nucleotides, about 70 nucleotides, about 60 nucleotides, about 50 nucleotides downstream of SEQ ID NO: 177. In some cases, the targeted region of the pre-mRNA is at least about 1500 nucleotides, about 1000 nucleotides, about 800 nucleotides, about 700 nucleotides, about 600 nucleotides, about 500 nucleotides, about 400 nucleotides, about 300 nucleotides, about 200 nucleotides, about 100 nucleotides, about 80 nucleotides, about 70 nucleotides, about 60 nucleotides, about 50 nucleotides downstream of SEQ ID NO: 177. In some cases, the targeted region of the pre-mRNA is at most about 1500 nucleotides, about 1000 nucleotides, about 800 nucleotides, about 700 nucleotides, about 600 nucleotides, about 500 nucleotides, about 400 nucleotides, about 300 nucleotides, about 200 nucleotides, about 100 nucleotides, about 80 nucleotides, about 70 nucleotides, about 60 nucleotides, about 50 nucleotides downstream of genomic site GRCh38/hg38: chr3 196708528. In some cases. the targeted region of the pre-mRNA is at least about 1500 nucleotides, about 1000 nucleotides, about 800 nucleotides, about 700 nucleotides, about 600 nucleotides, about 500 nucleotides, about 400 nucleotides, about 300 nucleotides, about 200 nucleotides, about 100 nucleotides, about 80 nucleotides, about 70 nucleotides, about 60 nucleotides, about 50 nucleotides downstream of genomic site GRCh38/hg38: chr3 196708528. In some cases, the targeted region of the pre-mRNA is within a sequence SEQ ID NO: 177. In some cases, the targeted region of the pre-mRNA is within a sequence between a pair of genomic sites GRCh38/hg38: chr3 196708727, and GRCh38/hg38: chr3 196708528. In some cases, the therapeutic agent is an antisense oligomer complementary to a sequence with at least about 80%, 85%, 90%, 95%, 96%, 97%, 98%, 99% or 100% sequence identity to SEQ ID NO:177. In some cases, the therapeutic agent is an antisense oligomer complementary to a sequence with 100% sequence identity to SEQ ID NO:177. In some cases, the therapeutic agent is an antisense oligomer that has a sequence with at least about 80%, 85%, 90%, 95%, 96%, 97%, 98%, 99% or 100% sequence identity to a sequence selected from the group consisting of SEQ ID NOs: 1999-2077. In some cases, the therapeutic agent is an antisense oligomer that has a sequence selected from the group consisting of SEQ ID NOs: 1999-2077. In some cases, the target peptide sequence is a portion of CEP19 protein, and the method treats a disease or the condition that comprises Morbid Obesity and Spermatogenic Failure.

[0141] CEP57

[0142] In some cases, the target peptide sequence is a portion of CEP57 protein. In some cases, the therapeutic agent increases level of a first processed mRNA encoding a protein having a sequence SEQ ID NO: 8144, and decreases level of a second processed mRNA encoding a protein having a sequence SEQ ID NO: 380. In some cases, the targeted region of the pre-mRNA is at most about 1500 nucleotides, about 1000 nucleotides, about 800 nucleotides, about 700 nucleotides, about 600 nucleotides, about 500 nucleotides, about 400 nucleotides, about 300 nucleotides, about 200 nucleotides, about 100 nucleotides, about 80 nucleotides, about 70 nucleotides, about 60 nucleotides, about 50 nucleotides upstream of SEQ ID NO: 178. In some cases, the targeted region of the pre-mRNA is at least about 1500 nucleotides, about 1000 nucleotides, about 800 nucleotides, about 700 nucleotides, about 600 nucleotides, about 500 nucleotides, about 400 nucleotides, about 300 nucleotides, about 200 nucleotides, about 100 nucleotides, about 80 nucleotides, about 70 nucleotides, about 60 nucleotides, about 50 nucleotides upstream of SEQ ID NO: 178. In some cases, the targeted region of the pre-mRNA is at most about 1500 nucleotides, about 1000 nucleotides, about 800 nucleotides, about 700 nucleotides, about 600 nucleotides, about 500 nucleotides, about 400 nucleotides, about 300 nucleotides, about 200 nucleotides, about 100 nucleotides, about 80 nucleotides, about 70 nucleotides, about 60 nucleotides, about 50 nucleotides upstream of genomic site GRCh38/hg38: chr11 95795516. In some cases, the targeted region of the pre-mRNA is at least about 1500 nucleotides, about 1000 nucleotides, about 800 nucleotides, about 700 nucleotides, about 600 nucleotides, about 500 nucleotides, about 400 nucleotides, about 300 nucleotides, about 200 nucleotides, about 100 nucleotides, about 80 nucleotides, about 70 nucleotides, about 60 nucleotides, about 50 nucleotides upstream of genomic site GRCh38/hg38: chr11 95795516. In some cases, the targeted region of the pre-mRNA is at most about 1500 nucleotides, about 1000 nucleotides, about 800 nucleotides, about 700 nucleotides, about 600 nucleotides, about 500 nucleotides, about 400 nucleotides, about 300 nucleotides, about 200 nucleotides, about 100 nucleotides, about 80 nucleotides, about 70 nucleotides, about 60 nucleotides, about 50 nucleotides downstream of SEQ ID NO: 178. In some cases, the targeted region of the pre-mRNA is at least about 1500 nucleotides, about 1000 nucleotides, about 800 nucleotides, about 700 nucleotides, about 600 nucleotides, about 500 nucleotides, about 400 nucleotides, about 300 nucleotides, about 200 nucleotides, about 100 nucleotides, about 80 nucleotides, about 70 nucleotides, about 60 nucleotides, about 50 nucleotides downstream of SEQ ID NO: 178. In some cases, the targeted region of the pre-mRNA is at most about 1500 nucleotides, about 1000 nucleotides, about 800 nucleotides, about 700 nucleotides, about 600 nucleotides, about 500 nucleotides, about 400 nucleotides, about 300 nucleotides, about 200 nucleotides, about 100 nucleotides, about 80 nucleotides, about 70 nucleotides, about 60 nucleotides, about 50 nucleotides downstream of genomic site GRCh38/hg38: chr11 95795559. In some cases. the targeted region of the pre-mRNA is at least about 1500 nucleotides, about 1000 nucleotides, about 800 nucleotides, about 700 nucleotides, about 600 nucleotides, about 500 nucleotides, about 400 nucleotides, about 300 nucleotides, about 200 nucleotides, about 100 nucleotides, about 80 nucleotides, about 70 nucleotides, about 60 nucleotides, about 50 nucleotides downstream of genomic site GRCh38/hg38: chr11 95795559. In some cases, the targeted region of the pre-mRNA is within a sequence SEQ ID NO: 178. In some cases, the targeted region of the pre-mRNA is within a sequence between a pair of genomic sites GRCh38/hg38: chr11 95795516, and GRCh38/hg38: chr1l 95795559. In some cases, the therapeutic agent is an antisense oligomer complementary to a sequence with at least about 80%, 85%, 90%, 95%, 96%, 97%, 98%, 99% or 100% sequence identity to SEQ ID NO:178. In some cases, the therapeutic agent is an antisense oligomer complementary to a sequence with 100% sequence identity to SEQ ID NO:178. In some cases, the therapeutic agent is an antisense oligomer that has a sequence with at least about 80%, 85%, 90%, 95%, 96%, 97%, 98%, 99% or 100% sequence identity to a sequence selected from the group consisting of SEQ ID NOs: 2078-2125. In some cases, the therapeutic agent is an antisense oligomer that has a sequence selected from the group consisting of SEQ ID NOs: 2078-2125. In some cases, the target peptide sequence is a portion of CEP57 protein, and the method treats a disease or the condition that comprises Intellectual Disability; Warburton Anyane Yeboa syndrome; or Mosaic Variegated Aneuploidy Syndrome.

[0143] CHEK1

[0144] In some cases, the target peptide sequence is a portion of CHEK1 protein. In some cases, the therapeutic agent increases level of a first processed mRNA encoding a protein having a sequence SEQ ID NO: 8145, and decreases level of a second processed mRNA encoding a protein having a sequence SEQ ID NO: 381. In some cases, the targeted region of the pre-mRNA is at most about 1500 nucleotides, about 1000 nucleotides, about 800 nucleotides, about 700 nucleotides, about 600 nucleotides, about 500 nucleotides, about 400 nucleotides, about 300 nucleotides, about 200 nucleotides, about 100 nucleotides, about 80 nucleotides, about 70 nucleotides, about 60 nucleotides, about 50 nucleotides upstream of SEQ ID NO: 179. In some cases, the targeted region of the pre-mRNA is at least about 1500 nucleotides, about 1000 nucleotides, about 800 nucleotides, about 700 nucleotides, about 600 nucleotides, about 500 nucleotides, about 400 nucleotides, about 300 nucleotides, about 200 nucleotides, about 100 nucleotides, about 80 nucleotides, about 70 nucleotides, about 60 nucleotides, about 50 nucleotides upstream of SEQ ID NO: 179. In some cases, the targeted region of the pre-mRNA is at most about 1500 nucleotides, about 1000 nucleotides, about 800 nucleotides, about 700 nucleotides, about 600 nucleotides, about 500 nucleotides, about 400 nucleotides, about 300 nucleotides, about 200 nucleotides, about 100 nucleotides, about 80 nucleotides, about 70 nucleotides, about 60 nucleotides, about 50 nucleotides upstream of genomic site GRCh38/hg38: chr11 125627607. In some cases, the targeted region of the pre-mRNA is at least about 1500 nucleotides, about 1000 nucleotides, about 800 nucleotides, about 700 nucleotides, about 600 nucleotides, about 500 nucleotides, about 400 nucleotides, about 300 nucleotides, about 200 nucleotides, about 100 nucleotides, about 80 nucleotides, about 70 nucleotides, about 60 nucleotides, about 50 nucleotides upstream of genomic site GRCh38/hg38: chr11 125627607. In some cases, the targeted region of the pre-mRNA is at most about 1500 nucleotides, about 1000 nucleotides, about 800 nucleotides, about 700 nucleotides, about 600 nucleotides, about 500 nucleotides, about 400 nucleotides, about 300 nucleotides, about 200 nucleotides, about 100 nucleotides, about 80 nucleotides, about 70 nucleotides, about 60 nucleotides, about 50 nucleotides downstream of SEQ ID NO: 179. In some cases, the targeted region of the pre-mRNA is at least about 1500 nucleotides, about 1000 nucleotides, about 800 nucleotides, about 700 nucleotides, about 600 nucleotides, about 500 nucleotides, about 400 nucleotides, about 300 nucleotides, about 200 nucleotides, about 100 nucleotides, about 80 nucleotides, about 70 nucleotides, about 60 nucleotides, about 50 nucleotides downstream of SEQ ID NO: 179. In some cases, the targeted region of the pre-mRNA is at most about 1500 nucleotides, about 1000 nucleotides, about 800 nucleotides, about 700 nucleotides, about 600 nucleotides, about 500 nucleotides, about 400 nucleotides, about 300 nucleotides, about 200 nucleotides, about 100 nucleotides, about 80 nucleotides, about 70 nucleotides, about 60 nucleotides, about 50 nucleotides downstream of genomic site GRCh38/hg38: chr11 125627830. In some cases. the targeted region of the pre-mRNA is at least about 1500 nucleotides, about 1000 nucleotides, about 800 nucleotides, about 700 nucleotides, about 600 nucleotides, about 500 nucleotides, about 400 nucleotides, about 300 nucleotides, about 200 nucleotides, about 100 nucleotides, about 80 nucleotides, about 70 nucleotides, about 60 nucleotides, about 50 nucleotides downstream of genomic site GRCh38/hg38: chr11 125627830. In some cases, the targeted region of the pre-mRNA is within a sequence SEQ ID NO: 179. In some cases, the targeted region of the pre-mRNA is within a sequence between a pair of genomic sites GRCh38/hg38: chr11 125627607, and GRCh38/hg38: chr11 125627830. In some cases, the therapeutic agent is an antisense oligomer complementary to a sequence with at least about 80%, 85%, 90%, 95%, 96%, 97%, 98%, 99% or 100% sequence identity to SEQ ID NO:179. In some cases, the therapeutic agent is an antisense oligomer complementary to a sequence with 100% sequence identity to SEQ ID NO:179. In some cases, the therapeutic agent is an antisense oligomer that has a sequence with at least about 80%, 85%, 90%, 95%, 96%, 97%, 98%, 99% or 100% sequence identity to a sequence selected from the group consisting of SEQ ID NOs: 2126-2209. In some cases, the therapeutic agent is an antisense oligomer that has a sequence selected from the group consisting of SEQ ID NOs: 2126-2209. In some cases, the target peptide sequence is a portion of CHEK1 protein, and the method treats a disease or the condition that comprises Breast Cancer, Familial; Malignant neoplasm of ovary; or Schizophrenia.

[0145] CIB2

[0146] In some cases, the target peptide sequence is a portion of CIB2 protein. In some cases, the therapeutic agent increases level of a first processed mRNA encoding a protein having a sequence SEQ ID NO: 8146, and decreases level of a second processed mRNA encoding a protein having a sequence SEQ ID NO: 382. In some cases, the targeted region of the pre-mRNA is at most about 1500 nucleotides, about 1000 nucleotides, about 800 nucleotides, about 700 nucleotides, about 600 nucleotides, about 500 nucleotides, about 400 nucleotides, about 300 nucleotides, about 200 nucleotides, about 100 nucleotides, about 80 nucleotides, about 70 nucleotides, about 60 nucleotides, about 50 nucleotides upstream of SEQ ID NO: 180. In some cases, the targeted region of the pre-mRNA is at least about 1500 nucleotides, about 1000 nucleotides, about 800 nucleotides, about 700 nucleotides, about 600 nucleotides, about 500 nucleotides, about 400 nucleotides, about 300 nucleotides, about 200 nucleotides, about 100 nucleotides, about 80 nucleotides, about 70 nucleotides, about 60 nucleotides, about 50 nucleotides upstream of SEQ ID NO: 180. In some cases, the targeted region of the pre-mRNA is at most about 1500 nucleotides, about 1000 nucleotides, about 800 nucleotides, about 700 nucleotides, about 600 nucleotides, about 500 nucleotides, about 400 nucleotides, about 300 nucleotides, about 200 nucleotides, about 100 nucleotides, about 80 nucleotides, about 70 nucleotides, about 60 nucleotides, about 50 nucleotides upstream of genomic site GRCh38/hg38: chr15 78111276. In some cases, the targeted region of the pre-mRNA is at least about 1500 nucleotides, about 1000 nucleotides, about 800 nucleotides, about 700 nucleotides, about 600 nucleotides, about 500 nucleotides, about 400 nucleotides, about 300 nucleotides, about 200 nucleotides, about 100 nucleotides, about 80 nucleotides, about 70 nucleotides, about 60 nucleotides, about 50 nucleotides upstream of genomic site GRCh38/hg38: chr15 78111276. In some cases, the targeted region of the pre-mRNA is at most about 1500 nucleotides, about 1000 nucleotides, about 800 nucleotides, about 700 nucleotides, about 600 nucleotides, about 500 nucleotides, about 400 nucleotides, about 300 nucleotides, about 200 nucleotides, about 100 nucleotides, about 80 nucleotides, about 70 nucleotides, about 60 nucleotides, about 50 nucleotides downstream of SEQ ID NO: 180. In some cases, the targeted region of the pre-mRNA is at least about 1500 nucleotides, about 1000 nucleotides, about 800 nucleotides, about 700 nucleotides, about 600 nucleotides, about 500 nucleotides, about 400 nucleotides, about 300 nucleotides, about 200 nucleotides, about 100 nucleotides, about 80 nucleotides, about 70 nucleotides, about 60 nucleotides, about 50 nucleotides downstream of SEQ ID NO: 180. In some cases, the targeted region of the pre-mRNA is at most about 1500 nucleotides, about 1000 nucleotides, about 800 nucleotides, about 700 nucleotides, about 600 nucleotides, about 500 nucleotides, about 400 nucleotides, about 300 nucleotides, about 200 nucleotides, about 100 nucleotides, about 80 nucleotides, about 70 nucleotides, about 60 nucleotides, about 50 nucleotides downstream of genomic site GRCh38/hg38: chr15 78111165. In some cases. the targeted region of the pre-mRNA is at least about 1500 nucleotides, about 1000 nucleotides, about 800 nucleotides, about 700 nucleotides, about 600 nucleotides, about 500 nucleotides, about 400 nucleotides, about 300 nucleotides, about 200 nucleotides, about 100 nucleotides, about 80 nucleotides, about 70 nucleotides, about 60 nucleotides, about 50 nucleotides downstream of genomic site GRCh38/hg38: chr15 78111165. In some cases, the targeted region of the pre-mRNA is within a sequence SEQ ID NO: 180. In some cases, the targeted region of the pre-mRNA is within a sequence between a pair of genomic sites GRCh38/hg38: chr15 78111276, and GRCh38/hg38: chr15 78111165. In some cases, the therapeutic agent is an antisense oligomer complementary to a sequence with at least about 80%, 85%, 90%, 95%, 96%, 97%, 98%, 99% or 100% sequence identity to SEQ ID NO:180. In some cases, the therapeutic agent is an antisense oligomer complementary to a sequence with 100% sequence identity to SEQ ID NO:180. In some cases, the therapeutic agent increases level of a first processed mRNA encoding a protein having a sequence SEQ ID NO: 8147, and decreases level of a second processed mRNA encoding a protein having a sequence SEQ ID NO: 383. In some cases, the targeted region of the pre-mRNA is at most about 1500 nucleotides, about 1000 nucleotides, about 800 nucleotides, about 700 nucleotides, about 600 nucleotides, about 500 nucleotides, about 400 nucleotides, about 300 nucleotides, about 200 nucleotides, about 100 nucleotides, about 80 nucleotides, about 70 nucleotides, about 60 nucleotides, about 50 nucleotides upstream of SEQ ID NO: 181. In some cases, the targeted region of the pre-mRNA is at least about 1500 nucleotides, about 1000 nucleotides, about 800 nucleotides, about 700 nucleotides, about 600 nucleotides, about 500 nucleotides, about 400 nucleotides, about 300 nucleotides, about 200 nucleotides, about 100 nucleotides, about 80 nucleotides, about 70 nucleotides, about 60 nucleotides, about 50 nucleotides upstream of SEQ ID NO: 181. In some cases, the targeted region of the pre-mRNA is at most about 1500 nucleotides, about 1000 nucleotides, about 800 nucleotides, about 700 nucleotides, about 600 nucleotides, about 500 nucleotides, about 400 nucleotides, about 300 nucleotides, about 200 nucleotides, about 100 nucleotides, about 80 nucleotides, about 70 nucleotides, about 60 nucleotides, about 50 nucleotides upstream of genomic site GRCh38/hg38: chr15 78111276. In some cases, the targeted region of the pre-mRNA is at least about 1500 nucleotides, about 1000 nucleotides, about 800 nucleotides, about 700 nucleotides, about 600 nucleotides, about 500 nucleotides, about 400 nucleotides, about 300 nucleotides, about 200 nucleotides, about 100 nucleotides, about 80 nucleotides, about 70 nucleotides, about 60 nucleotides, about 50 nucleotides upstream of genomic site GRCh38/hg38: chr15 78111276. In some cases, the targeted region of the pre-mRNA is at most about 1500 nucleotides, about 1000 nucleotides, about 800 nucleotides, about 700 nucleotides, about 600 nucleotides, about 500 nucleotides, about 400 nucleotides, about 300 nucleotides, about 200 nucleotides, about 100 nucleotides, about 80 nucleotides, about 70 nucleotides, about 60 nucleotides, about 50 nucleotides downstream of SEQ ID NO: 181. In some cases, the targeted region of the pre-mRNA is at least about 1500 nucleotides, about 1000 nucleotides, about 800 nucleotides, about 700 nucleotides, about 600 nucleotides, about 500 nucleotides, about 400 nucleotides, about 300 nucleotides, about 200 nucleotides, about 100 nucleotides, about 80 nucleotides, about 70 nucleotides, about 60 nucleotides, about 50 nucleotides downstream of SEQ ID NO: 181. In some cases, the targeted region of the pre-mRNA is at most about 1500 nucleotides, about 1000 nucleotides, about 800 nucleotides, about 700 nucleotides, about 600 nucleotides, about 500 nucleotides, about 400 nucleotides, about 300 nucleotides, about 200 nucleotides, about 100 nucleotides, about 80 nucleotides, about 70 nucleotides, about 60 nucleotides, about 50 nucleotides downstream of genomic site GRCh38/hg38: chr15 78111165. In some cases. the targeted region of the pre-mRNA is at least about 1500 nucleotides, about 1000 nucleotides, about 800 nucleotides, about 700 nucleotides, about 600 nucleotides, about 500 nucleotides, about 400 nucleotides, about 300 nucleotides, about 200 nucleotides, about 100 nucleotides, about 80 nucleotides, about 70 nucleotides, about 60 nucleotides, about 50 nucleotides downstream of genomic site GRCh38/hg38: chr15 78111165. In some cases, the targeted region of the pre-mRNA is within a sequence SEQ ID NO: 181. In some cases, the targeted region of the pre-mRNA is within a sequence between a pair of genomic sites GRCh38/hg38: chr15 78111276, and GRCh38/hg38: chr15 78111165. In some cases, the therapeutic agent is an antisense oligomer complementary to a sequence with at least about 80%, 85%, 90%, 95%, 96%, 97%, 98%, 99% or 100% sequence identity to SEQ ID NO:181. In some cases, the therapeutic agent is an antisense oligomer complementary to a sequence with 100% sequence identity to SEQ ID NO:181. In some cases, the therapeutic agent is an antisense oligomer that has a sequence with at least about 80%, 85%, 90%, 95%, 96%, 97%, 98%, 99% or 100% sequence identity to a sequence selected from the group consisting of SEQ ID NOs: 2210-2270. In some cases, the therapeutic agent is an antisense oligomer that has a sequence selected from the group consisting of SEQ ID NOs: 2210-2270. In some cases, the target peptide sequence is a portion of CIB2 protein, and the method treats a disease or the condition that comprises Usher Syndrome, Type I; Intellectual Disability; Deafness, Autosomal Recessive 48; or Usher Syndrome, Type IJ.

[0147] COX4I1

[0148] In some cases, the target peptide sequence is a portion of COX4I1 protein. In some cases, the therapeutic agent increases level of a first processed mRNA encoding a protein having a sequence SEQ ID NO: 8148, and decreases level of a second processed mRNA encoding a protein having a sequence SEQ ID NO: 384. In some cases, the targeted region of the pre-mRNA is at most about 1500 nucleotides, about 1000 nucleotides, about 800 nucleotides, about 700 nucleotides, about 600 nucleotides, about 500 nucleotides, about 400 nucleotides, about 300 nucleotides, about 200 nucleotides, about 100 nucleotides, about 80 nucleotides, about 70 nucleotides, about 60 nucleotides, about 50 nucleotides upstream of SEQ ID NO: 182. In some cases, the targeted region of the pre-mRNA is at least about 1500 nucleotides, about 1000 nucleotides, about 800 nucleotides, about 700 nucleotides, about 600 nucleotides, about 500 nucleotides, about 400 nucleotides, about 300 nucleotides, about 200 nucleotides, about 100 nucleotides, about 80 nucleotides, about 70 nucleotides, about 60 nucleotides, about 50 nucleotides upstream of SEQ ID NO: 182. In some cases, the targeted region of the pre-mRNA is at most about 1500 nucleotides, about 1000 nucleotides, about 800 nucleotides, about 700 nucleotides, about 600 nucleotides, about 500 nucleotides, about 400 nucleotides, about 300 nucleotides, about 200 nucleotides, about 100 nucleotides, about 80 nucleotides, about 70 nucleotides, about 60 nucleotides, about 50 nucleotides upstream of genomic site GRCh38/hg38: chr16 85804941. In some cases, the targeted region of the pre-mRNA is at least about 1500 nucleotides, about 1000 nucleotides, about 800 nucleotides, about 700 nucleotides, about 600 nucleotides, about 500 nucleotides, about 400 nucleotides, about 300 nucleotides, about 200 nucleotides, about 100 nucleotides, about 80 nucleotides, about 70 nucleotides, about 60 nucleotides, about 50 nucleotides upstream of genomic site GRCh38/hg38: chr16 85804941. In some cases, the targeted region of the pre-mRNA is at most about 1500 nucleotides, about 1000 nucleotides, about 800 nucleotides, about 700 nucleotides, about 600 nucleotides, about 500 nucleotides, about 400 nucleotides, about 300 nucleotides, about 200 nucleotides, about 100 nucleotides, about 80 nucleotides, about 70 nucleotides, about 60 nucleotides, about 50 nucleotides downstream of SEQ ID NO: 182. In some cases, the targeted region of the pre-mRNA is at least about 1500 nucleotides, about 1000 nucleotides, about 800 nucleotides, about 700 nucleotides, about 600 nucleotides, about 500 nucleotides, about 400 nucleotides, about 300 nucleotides, about 200 nucleotides, about 100 nucleotides, about 80 nucleotides, about 70 nucleotides, about 60 nucleotides, about 50 nucleotides downstream of SEQ ID NO: 182. In some cases, the targeted region of the pre-mRNA is at most about 1500 nucleotides, about 1000 nucleotides, about 800 nucleotides, about 700 nucleotides, about 600 nucleotides, about 500 nucleotides, about 400 nucleotides, about 300 nucleotides, about 200 nucleotides, about 100 nucleotides, about 80 nucleotides, about 70 nucleotides, about 60 nucleotides, about 50 nucleotides downstream of genomic site GRCh38/hg38: chr16 85805104. In some cases. the targeted region of the pre-mRNA is at least about 1500 nucleotides, about 1000 nucleotides, about 800 nucleotides, about 700 nucleotides, about 600 nucleotides, about 500 nucleotides, about 400 nucleotides, about 300 nucleotides, about 200 nucleotides, about 100 nucleotides, about 80 nucleotides, about 70 nucleotides, about 60 nucleotides, about 50 nucleotides downstream of genomic site GRCh38/hg38: chr16 85805104. In some cases, the targeted region of the pre-mRNA is within a sequence SEQ ID NO: 182. In some cases, the targeted region of the pre-mRNA is within a sequence between a pair of genomic sites GRCh38/hg38: chr16 85804941, and GRCh38/hg38: chr16 85805104. In some cases, the therapeutic agent is an antisense oligomer complementary to a sequence with at least about 80%, 85%, 90%, 95%, 96%, 97%, 98%, 99% or 100% sequence identity to SEQ ID NO:182. In some cases, the therapeutic agent is an antisense oligomer complementary to a sequence with 100% sequence identity to SEQ ID NO:182. In some cases, the therapeutic agent is an antisense oligomer that has a sequence with at least about 80%, 85%, 90%, 95%, 96%, 97%, 98%, 99% or 100% sequence identity to a sequence selected from the group consisting of SEQ ID NOs: 2271-2342. In some cases, the therapeutic agent is an antisense oligomer that has a sequence selected from the group consisting of SEQ ID NOs: 2271-2342. In some cases, the target peptide sequence is a portion of COX4I1 protein, and the method treats a disease or the condition that comprises Mitochondrial Diseases.

[0149] DCLRE1C

[0150] In some cases, the target peptide sequence is a portion of DCLRE1C protein. In some cases, the therapeutic agent increases level of a first processed mRNA encoding a protein having a sequence SEQ ID NO: 8149, and decreases level of a second processed mRNA encoding a protein having a sequence SEQ ID NO: 385. In some cases, the targeted region of the pre-mRNA is at most about 1500 nucleotides, about 1000 nucleotides, about 800 nucleotides, about 700 nucleotides, about 600 nucleotides, about 500 nucleotides, about 400 nucleotides, about 300 nucleotides, about 200 nucleotides, about 100 nucleotides, about 80 nucleotides, about 70 nucleotides, about 60 nucleotides, about 50 nucleotides upstream of SEQ ID NO: 183. In some cases, the targeted region of the pre-mRNA is at least about 1500 nucleotides, about 1000 nucleotides, about 800 nucleotides, about 700 nucleotides, about 600 nucleotides, about 500 nucleotides, about 400 nucleotides, about 300 nucleotides, about 200 nucleotides, about 100 nucleotides, about 80 nucleotides, about 70 nucleotides, about 60 nucleotides, about 50 nucleotides upstream of SEQ ID NO: 183. In some cases, the targeted region of the pre-mRNA is at most about 1500 nucleotides, about 1000 nucleotides, about 800 nucleotides, about 700 nucleotides, about 600 nucleotides, about 500 nucleotides, about 400 nucleotides, about 300 nucleotides, about 200 nucleotides, about 100 nucleotides, about 80 nucleotides, about 70 nucleotides, about 60 nucleotides, about 50 nucleotides upstream of genomic site GRCh38/hg38: chr10 14939869. In some cases, the targeted region of the pre-mRNA is at least about 1500 nucleotides, about 1000 nucleotides, about 800 nucleotides, about 700 nucleotides, about 600 nucleotides, about 500 nucleotides, about 400 nucleotides, about 300 nucleotides, about 200 nucleotides, about 100 nucleotides, about 80 nucleotides, about 70 nucleotides, about 60 nucleotides, about 50 nucleotides upstream of genomic site GRCh38/hg38: chr10 14939869. In some cases, the targeted region of the pre-mRNA is at most about 1500 nucleotides, about 1000 nucleotides, about 800 nucleotides, about 700 nucleotides, about 600 nucleotides, about 500 nucleotides, about 400 nucleotides, about 300 nucleotides, about 200 nucleotides, about 100 nucleotides, about 80 nucleotides, about 70 nucleotides, about 60 nucleotides, about 50 nucleotides downstream of SEQ ID NO: 183. In some cases, the targeted region of the pre-mRNA is at least about 1500 nucleotides, about 1000 nucleotides, about 800 nucleotides, about 700 nucleotides, about 600 nucleotides, about 500 nucleotides, about 400 nucleotides, about 300 nucleotides, about 200 nucleotides, about 100 nucleotides, about 80 nucleotides, about 70 nucleotides, about 60 nucleotides, about 50 nucleotides downstream of SEQ ID NO: 183. In some cases, the targeted region of the pre-mRNA is at most about 1500 nucleotides, about 1000 nucleotides, about 800 nucleotides, about 700 nucleotides, about 600 nucleotides, about 500 nucleotides, about 400 nucleotides, about 300 nucleotides, about 200 nucleotides, about 100 nucleotides, about 80 nucleotides, about 70 nucleotides, about 60 nucleotides, about 50 nucleotides downstream of genomic site GRCh38/hg38: chr10 14939810. In some cases. the targeted region of the pre-mRNA is at least about 1500 nucleotides, about 1000 nucleotides, about 800 nucleotides, about 700 nucleotides, about 600 nucleotides, about 500 nucleotides, about 400 nucleotides, about 300 nucleotides, about 200 nucleotides, about 100 nucleotides, about 80 nucleotides, about 70 nucleotides, about 60 nucleotides, about 50 nucleotides downstream of genomic site GRCh38/hg38: chr10 14939810. In some cases, the targeted region of the pre-mRNA is within a sequence SEQ ID NO: 183. In some cases, the targeted region of the pre-mRNA is within a sequence between a pair of genomic sites GRCh38/hg38: chr10 14939869, and GRCh38/hg38: chr10 14939810. In some cases, the therapeutic agent is an antisense oligomer complementary to a sequence with at least about 80%, 85%, 90%, 95%, 96%, 97%, 98%, 99% or 100% sequence identity to SEQ ID NO:183. In some cases, the therapeutic agent is an antisense oligomer complementary to a sequence with 100% sequence identity to SEQ ID NO:183. In some cases, the therapeutic agent is an antisense oligomer that has a sequence with at least about 80%, 85%, 90%, 95%, 96%, 97%, 98%, 99% or 100% sequence identity to a sequence selected from the group consisting of SEQ ID NOs: 2343-2393. In some cases, the therapeutic agent is an antisense oligomer that has a sequence selected from the group consisting of SEQ ID NOs: 2343-2393. In some cases, the target peptide sequence is a portion of DCLRE1C protein, and the method treats a disease or the condition that comprises Severe combined immunodeficiency with sensitivity to ionizing radiation; Severe Combined Immunodeficiency, Partial; Reticuloendotheliosis, familial, with eosinophilia; Omenn Syndrome; Athabaskan severe combined immunodeficiency; or Severe Combined Immunodeficiency, Athabaskan-Type.

[0151] DECR1

[0152] In some cases, the target peptide sequence is a portion of DECR1 protein. In some cases, the therapeutic agent increases level of a first processed mRNA encoding a protein having a sequence SEQ ID NO: 8150, and decreases level of a second processed mRNA encoding a protein having a sequence SEQ ID NO: 386. In some cases, the targeted region of the pre-mRNA is at most about 1500 nucleotides, about 1000 nucleotides, about 800 nucleotides, about 700 nucleotides, about 600 nucleotides, about 500 nucleotides, about 400 nucleotides, about 300 nucleotides, about 200 nucleotides, about 100 nucleotides, about 80 nucleotides, about 70 nucleotides, about 60 nucleotides, about 50 nucleotides upstream of SEQ ID NO: 184. In some cases, the targeted region of the pre-mRNA is at least about 1500 nucleotides, about 1000 nucleotides, about 800 nucleotides, about 700 nucleotides, about 600 nucleotides, about 500 nucleotides, about 400 nucleotides, about 300 nucleotides, about 200 nucleotides, about 100 nucleotides, about 80 nucleotides, about 70 nucleotides, about 60 nucleotides, about 50 nucleotides upstream of SEQ ID NO: 184. In some cases, the targeted region of the pre-mRNA is at most about 1500 nucleotides, about 1000 nucleotides, about 800 nucleotides, about 700 nucleotides, about 600 nucleotides, about 500 nucleotides, about 400 nucleotides, about 300 nucleotides, about 200 nucleotides, about 100 nucleotides, about 80 nucleotides, about 70 nucleotides, about 60 nucleotides, about 50 nucleotides upstream of genomic site GRCh38/hg38: chr8 90005292. In some cases, the targeted region of the pre-mRNA is at least about 1500 nucleotides, about 1000 nucleotides, about 800 nucleotides, about 700 nucleotides, about 600 nucleotides, about 500 nucleotides, about 400 nucleotides, about 300 nucleotides, about 200 nucleotides, about 100 nucleotides, about 80 nucleotides, about 70 nucleotides, about 60 nucleotides, about 50 nucleotides upstream of genomic site GRCh38/hg38: chr8 90005292. In some cases, the targeted region of the pre-mRNA is at most about 1500 nucleotides, about 1000 nucleotides, about 800 nucleotides, about 700 nucleotides, about 600 nucleotides, about 500 nucleotides, about 400 nucleotides, about 300 nucleotides, about 200 nucleotides, about 100 nucleotides, about 80 nucleotides, about 70 nucleotides, about 60 nucleotides, about 50 nucleotides downstream of SEQ ID NO: 184. In some cases, the targeted region of the pre-mRNA is at least about 1500 nucleotides, about 1000 nucleotides, about 800 nucleotides, about 700 nucleotides, about 600 nucleotides, about 500 nucleotides, about 400 nucleotides, about 300 nucleotides, about 200 nucleotides, about 100 nucleotides, about 80 nucleotides, about 70 nucleotides, about 60 nucleotides, about 50 nucleotides downstream of SEQ ID NO: 184. In some cases, the targeted region of the pre-mRNA is at most about 1500 nucleotides, about 1000 nucleotides, about 800 nucleotides, about 700 nucleotides, about 600 nucleotides, about 500 nucleotides, about 400 nucleotides, about 300 nucleotides, about 200 nucleotides, about 100 nucleotides, about 80 nucleotides, about 70 nucleotides, about 60 nucleotides, about 50 nucleotides downstream of genomic site GRCh38/hg38: chr8 90005369. In some cases. the targeted region of the pre-mRNA is at least about 1500 nucleotides, about 1000 nucleotides, about 800 nucleotides, about 700 nucleotides, about 600 nucleotides, about 500 nucleotides, about 400 nucleotides, about 300 nucleotides, about 200 nucleotides, about 100 nucleotides, about 80 nucleotides, about 70 nucleotides, about 60 nucleotides, about 50 nucleotides downstream of genomic site GRCh38/hg38: chr8 90005369. In some cases, the targeted region of the pre-mRNA is within a sequence SEQ ID NO: 184. In some cases, the targeted region of the pre-mRNA is within a sequence between a pair of genomic sites GRCh38/hg38: chr8 90005292, and GRCh38/hg38: chr8 90005369. In some cases, the therapeutic agent is an antisense oligomer complementary to a sequence with at least about 80%, 85%, 90%, 95%, 96%, 97%, 98%, 99% or 100% sequence identity to SEQ ID NO:184. In some cases, the therapeutic agent is an antisense oligomer complementary to a sequence with 100% sequence identity to SEQ ID NO:184. In some cases, the therapeutic agent increases level of a first processed mRNA encoding a protein having a sequence SEQ ID NO: 8151, and decreases level of a second processed mRNA encoding a protein having a sequence SEQ ID NO: 387. In some cases, the targeted region of the pre-mRNA is at most about 1500 nucleotides, about 1000 nucleotides, about 800 nucleotides, about 700 nucleotides, about 600 nucleotides, about 500 nucleotides, about 400 nucleotides, about 300 nucleotides, about 200 nucleotides, about 100 nucleotides, about 80 nucleotides, about 70 nucleotides, about 60 nucleotides, about 50 nucleotides upstream of SEQ ID NO: 185. In some cases, the targeted region of the pre-mRNA is at least about 1500 nucleotides, about 1000 nucleotides, about 800 nucleotides, about 700 nucleotides, about 600 nucleotides, about 500 nucleotides, about 400 nucleotides, about 300 nucleotides, about 200 nucleotides, about 100 nucleotides, about 80 nucleotides, about 70 nucleotides, about 60 nucleotides, about 50 nucleotides upstream of SEQ ID NO: 185. In some cases, the targeted region of the pre-mRNA is at most about 1500 nucleotides, about 1000 nucleotides, about 800 nucleotides, about 700 nucleotides, about 600 nucleotides, about 500 nucleotides, about 400 nucleotides, about 300 nucleotides, about 200 nucleotides, about 100 nucleotides, about 80 nucleotides, about 70 nucleotides, about 60 nucleotides, about 50 nucleotides upstream of genomic site GRCh38/hg38: chr8 90015541. In some cases, the targeted region of the pre-mRNA is at least about 1500 nucleotides, about 1000 nucleotides, about 800 nucleotides, about 700 nucleotides, about 600 nucleotides, about 500 nucleotides, about 400 nucleotides, about 300 nucleotides, about 200 nucleotides, about 100 nucleotides, about 80 nucleotides, about 70 nucleotides, about 60 nucleotides, about 50 nucleotides upstream of genomic site GRCh38/hg38: chr8 90015541. In some cases, the targeted region of the pre-mRNA is at most about 1500 nucleotides, about 1000 nucleotides, about 800 nucleotides, about 700 nucleotides, about 600 nucleotides, about 500 nucleotides, about 400 nucleotides, about 300 nucleotides, about 200 nucleotides, about 100 nucleotides, about 80 nucleotides, about 70 nucleotides, about 60 nucleotides, about 50 nucleotides downstream of SEQ ID NO: 185. In some cases, the targeted region of the pre-mRNA is at least about 1500 nucleotides, about 1000 nucleotides, about 800 nucleotides, about 700 nucleotides, about 600 nucleotides, about 500 nucleotides, about 400 nucleotides, about 300 nucleotides, about 200 nucleotides, about 100 nucleotides, about 80 nucleotides, about 70 nucleotides, about 60 nucleotides, about 50 nucleotides downstream of SEQ ID NO: 185. In some cases, the targeted region of the pre-mRNA is at most about 1500 nucleotides, about 1000 nucleotides, about 800 nucleotides, about 700 nucleotides, about 600 nucleotides, about 500 nucleotides, about 400 nucleotides, about 300 nucleotides, about 200 nucleotides, about 100 nucleotides, about 80 nucleotides, about 70 nucleotides, about 60 nucleotides, about 50 nucleotides downstream of genomic site GRCh38/hg38: chr8 90015666. In some cases. the targeted region of the pre-mRNA is at least about 1500 nucleotides, about 1000 nucleotides, about 800 nucleotides, about 700 nucleotides, about 600 nucleotides, about 500 nucleotides, about 400 nucleotides, about 300 nucleotides, about 200 nucleotides, about 100 nucleotides, about 80 nucleotides, about 70 nucleotides, about 60 nucleotides, about 50 nucleotides downstream of genomic site GRCh38/hg38: chr8 90015666. In some cases, the targeted region of the pre-mRNA is within a sequence SEQ ID NO: 185. In some cases, the targeted region of the pre-mRNA is within a sequence between a pair of genomic sites GRCh38/hg38: chr8 90015541, and GRCh38/hg38: chr8 90015666. In some cases, the therapeutic agent is an antisense oligomer complementary to a sequence with at least about 80%, 85%, 90%, 95%, 96%, 97%, 98%, 99% or 100% sequence identity to SEQ ID NO:185. In some cases, the therapeutic agent is an antisense oligomer complementary to a sequence with 100% sequence identity to SEQ ID NO:185. In some cases, the therapeutic agent is an antisense oligomer that has a sequence with at least about 80%, 85%, 90%, 95%, 96%, 97%, 98%, 99% or 100% sequence identity to a sequence selected from the group consisting of SEQ ID NOs: 2394-2457. In some cases, the therapeutic agent is an antisense oligomer that has a sequence selected from the group consisting of SEQ ID NOs: 2394-2457. In some cases, the target peptide sequence is a portion of DECR1 protein, and the method treats a disease or the condition that comprises Intellectual Disability; or Cocaine Abuse.

[0153] DHFR

[0154] In some cases, the target peptide sequence is a portion of DHFR protein. In some cases, the therapeutic agent increases level of a first processed mRNA encoding a protein having a sequence SEQ ID NO: 8152, and decreases level of a second processed mRNA encoding a protein having a sequence SEQ ID NO: 388. In some cases, the targeted region of the pre-mRNA is at most about 1500 nucleotides, about 1000 nucleotides, about 800 nucleotides, about 700 nucleotides, about 600 nucleotides, about 500 nucleotides, about 400 nucleotides, about 300 nucleotides, about 200 nucleotides, about 100 nucleotides, about 80 nucleotides, about 70 nucleotides, about 60 nucleotides, about 50 nucleotides upstream of SEQ ID NO: 186. In some cases, the targeted region of the pre-mRNA is at least about 1500 nucleotides, about 1000 nucleotides, about 800 nucleotides, about 700 nucleotides, about 600 nucleotides, about 500 nucleotides, about 400 nucleotides, about 300 nucleotides, about 200 nucleotides, about 100 nucleotides, about 80 nucleotides, about 70 nucleotides, about 60 nucleotides, about 50 nucleotides upstream of SEQ ID NO: 186. In some cases, the targeted region of the pre-mRNA is at most about 1500 nucleotides, about 1000 nucleotides, about 800 nucleotides, about 700 nucleotides, about 600 nucleotides, about 500 nucleotides, about 400 nucleotides, about 300 nucleotides, about 200 nucleotides, about 100 nucleotides, about 80 nucleotides, about 70 nucleotides, about 60 nucleotides, about 50 nucleotides upstream of genomic site GRCh38/hg38: chr5 80649494. In some cases, the targeted region of the pre-mRNA is at least about 1500 nucleotides, about 1000 nucleotides, about 800 nucleotides, about 700 nucleotides, about 600 nucleotides, about 500 nucleotides, about 400 nucleotides, about 300 nucleotides, about 200 nucleotides, about 100 nucleotides, about 80 nucleotides, about 70 nucleotides, about 60 nucleotides, about 50 nucleotides upstream of genomic site GRCh38/hg38: chr5 80649494. In some cases, the targeted region of the pre-mRNA is at most about 1500 nucleotides, about 1000 nucleotides, about 800 nucleotides, about 700 nucleotides, about 600 nucleotides, about 500 nucleotides, about 400 nucleotides, about 300 nucleotides, about 200 nucleotides, about 100 nucleotides, about 80 nucleotides, about 70 nucleotides, about 60 nucleotides, about 50 nucleotides downstream of SEQ ID NO: 186. In some cases, the targeted region of the pre-mRNA is at least about 1500 nucleotides, about 1000 nucleotides, about 800 nucleotides, about 700 nucleotides, about 600 nucleotides, about 500 nucleotides, about 400 nucleotides, about 300 nucleotides, about 200 nucleotides, about 100 nucleotides, about 80 nucleotides, about 70 nucleotides, about 60 nucleotides, about 50 nucleotides downstream of SEQ ID NO: 186. In some cases, the targeted region of the pre-mRNA is at most about 1500 nucleotides, about 1000 nucleotides, about 800 nucleotides, about 700 nucleotides, about 600 nucleotides, about 500 nucleotides, about 400 nucleotides, about 300 nucleotides, about 200 nucleotides, about 100 nucleotides, about 80 nucleotides, about 70 nucleotides, about 60 nucleotides, about 50 nucleotides downstream of genomic site GRCh38/hg38: chr5 80649389. In some cases. the targeted region of the pre-mRNA is at least about 1500 nucleotides, about 1000 nucleotides, about 800 nucleotides, about 700 nucleotides, about 600 nucleotides, about 500 nucleotides, about 400 nucleotides, about 300 nucleotides, about 200 nucleotides, about 100 nucleotides, about 80 nucleotides, about 70 nucleotides, about 60 nucleotides, about 50 nucleotides downstream of genomic site GRCh38/hg38: chr5 80649389. In some cases, the targeted region of the pre-mRNA is within a sequence SEQ ID NO: 186. In some cases, the targeted region of the pre-mRNA is within a sequence between a pair of genomic sites GRCh38/hg38: chr5 80649494, and GRCh38/hg38: chr5 80649389. In some cases, the therapeutic agent is an antisense oligomer complementary to a sequence with at least about 80%, 85%, 90%, 95%, 96%, 97%, 98%, 99% or 100% sequence identity to SEQ ID NO:186. In some cases, the therapeutic agent is an antisense oligomer complementary to a sequence with 100% sequence identity to SEQ ID NO:186. In some cases, the therapeutic agent is an antisense oligomer that has a sequence with at least about 80%, 85%, 90%, 95%, 96%, 97%, 98%, 99% or 100% sequence identity to a sequence selected from the group consisting of SEQ ID NOs: 2458-2517. In some cases, the therapeutic agent is an antisense oligomer that has a sequence selected from the group consisting of SEQ ID NOs: 2458-2517. In some cases, the target peptide sequence is a portion of DHFR protein, and the method treats a disease or the condition that comprises Intellectual Disability; Congenital anemia; Cytopenia; Neurodegeneration Due To Cerebral Folate Transport Deficiency; or Megaloblastic Anemia due to Dihydrofolate Reductase Deficiency.

[0155] DKK2

[0156] In some cases, the target peptide sequence is a portion of DKK2 protein. In some cases, the therapeutic agent increases level of a first processed mRNA encoding a protein having a sequence SEQ ID NO: 8153, and decreases level of a second processed mRNA encoding a protein having a sequence SEQ ID NO: 389. In some cases, the targeted region of the pre-mRNA is at most about 1500 nucleotides, about 1000 nucleotides, about 800 nucleotides, about 700 nucleotides, about 600 nucleotides, about 500 nucleotides, about 400 nucleotides, about 300 nucleotides, about 200 nucleotides, about 100 nucleotides, about 80 nucleotides, about 70 nucleotides, about 60 nucleotides, about 50 nucleotides upstream of SEQ ID NO: 187. In some cases, the targeted region of the pre-mRNA is at least about 1500 nucleotides, about 1000 nucleotides, about 800 nucleotides, about 700 nucleotides, about 600 nucleotides, about 500 nucleotides, about 400 nucleotides, about 300 nucleotides, about 200 nucleotides, about 100 nucleotides, about 80 nucleotides, about 70 nucleotides, about 60 nucleotides, about 50 nucleotides upstream of SEQ ID NO: 187. In some cases, the targeted region of the pre-mRNA is at most about 1500 nucleotides, about 1000 nucleotides, about 800 nucleotides, about 700 nucleotides, about 600 nucleotides, about 500 nucleotides, about 400 nucleotides, about 300 nucleotides, about 200 nucleotides, about 100 nucleotides, about 80 nucleotides, about 70 nucleotides, about 60 nucleotides, about 50 nucleotides upstream of genomic site GRCh38/hg38: chr4 106925949. In some cases, the targeted region of the pre-mRNA is at least about 1500 nucleotides, about 1000 nucleotides, about 800 nucleotides, about 700 nucleotides, about 600 nucleotides, about 500 nucleotides, about 400 nucleotides, about 300 nucleotides, about 200 nucleotides, about 100 nucleotides, about 80 nucleotides, about 70 nucleotides, about 60 nucleotides, about 50 nucleotides upstream of genomic site GRCh38/hg38: chr4 106925949. In some cases, the targeted region of the pre-mRNA is at most about 1500 nucleotides, about 1000 nucleotides, about 800 nucleotides, about 700 nucleotides, about 600 nucleotides, about 500 nucleotides, about 400 nucleotides, about 300 nucleotides, about 200 nucleotides, about 100 nucleotides, about 80 nucleotides, about 70 nucleotides, about 60 nucleotides, about 50 nucleotides downstream of SEQ ID NO: 187. In some cases, the targeted region of the pre-mRNA is at least about 1500 nucleotides, about 1000 nucleotides, about 800 nucleotides, about 700 nucleotides, about 600 nucleotides, about 500 nucleotides, about 400 nucleotides, about 300 nucleotides, about 200 nucleotides, about 100 nucleotides, about 80 nucleotides, about 70 nucleotides, about 60 nucleotides, about 50 nucleotides downstream of SEQ ID NO: 187. In some cases, the targeted region of the pre-mRNA is at most about 1500 nucleotides, about 1000 nucleotides, about 800 nucleotides, about 700 nucleotides, about 600 nucleotides, about 500 nucleotides, about 400 nucleotides, about 300 nucleotides, about 200 nucleotides, about 100 nucleotides, about 80 nucleotides, about 70 nucleotides, about 60 nucleotides, about 50 nucleotides downstream of genomic site GRCh38/hg38: chr4 106925799. In some cases. the targeted region of the pre-mRNA is at least about 1500 nucleotides, about 1000 nucleotides, about 800 nucleotides, about 700 nucleotides, about 600 nucleotides, about 500 nucleotides, about 400 nucleotides, about 300 nucleotides, about 200 nucleotides, about 100 nucleotides, about 80 nucleotides, about 70 nucleotides, about 60 nucleotides, about 50 nucleotides downstream of genomic site GRCh38/hg38: chr4 106925799. In some cases, the targeted region of the pre-mRNA is within a sequence SEQ ID NO: 187. In some cases, the targeted region of the pre-mRNA is within a sequence between a pair of genomic sites GRCh38/hg38: chr4 106925949, and GRCh38/hg38: chr4 106925799. In some cases, the therapeutic agent is an antisense oligomer complementary to a sequence with at least about 80%, 85%, 90%, 95%, 96%, 97%, 98%, 99% or 100% sequence identity to SEQ ID NO:187. In some cases, the therapeutic agent is an antisense oligomer complementary to a sequence with 100% sequence identity to SEQ ID NO:187. In some cases, the therapeutic agent is an antisense oligomer that has a sequence with at least about 80%, 85%, 90%, 95%, 96%, 97%, 98%, 99% or 100% sequence identity to a sequence selected from the group consisting of SEQ ID NOs: 2518-2586. In some cases, the therapeutic agent is an antisense oligomer that has a sequence selected from the group consisting of SEQ ID NOs: 2518-2586. In some cases, the target peptide sequence is a portion of DKK2 protein, and the method treats a disease or the condition that comprises Alcoholic Intoxication, Chronic.

[0157] DLG2

[0158] In some cases, the target peptide sequence is a portion of DLG2 protein. In some cases, the therapeutic agent increases level of a first processed mRNA encoding a protein having a sequence SEQ ID NO: 8154, and decreases level of a second processed mRNA encoding a protein having a sequence SEQ ID NO: 390. In some cases, the targeted region of the pre-mRNA is at most about 1500 nucleotides, about 1000 nucleotides, about 800 nucleotides, about 700 nucleotides, about 600 nucleotides, about 500 nucleotides, about 400 nucleotides, about 300 nucleotides, about 200 nucleotides, about 100 nucleotides, about 80 nucleotides, about 70 nucleotides, about 60 nucleotides, about 50 nucleotides upstream of SEQ ID NO: 188. In some cases, the targeted region of the pre-mRNA is at least about 1500 nucleotides, about 1000 nucleotides, about 800 nucleotides, about 700 nucleotides, about 600 nucleotides, about 500 nucleotides, about 400 nucleotides, about 300 nucleotides, about 200 nucleotides, about 100 nucleotides, about 80 nucleotides, about 70 nucleotides, about 60 nucleotides, about 50 nucleotides upstream of SEQ ID NO: 188. In some cases, the targeted region of the pre-mRNA is at most about 1500 nucleotides, about 1000 nucleotides, about 800 nucleotides, about 700 nucleotides, about 600 nucleotides, about 500 nucleotides, about 400 nucleotides, about 300 nucleotides, about 200 nucleotides, about 100 nucleotides, about 80 nucleotides, about 70 nucleotides, about 60 nucleotides, about 50 nucleotides upstream of genomic site GRCh38/hg38: chr11 83651930. In some cases, the targeted region of the pre-mRNA is at least about 1500 nucleotides, about 1000 nucleotides, about 800 nucleotides, about 700 nucleotides, about 600 nucleotides, about 500 nucleotides, about 400 nucleotides, about 300 nucleotides, about 200 nucleotides, about 100 nucleotides, about 80 nucleotides, about 70 nucleotides, about 60 nucleotides, about 50 nucleotides upstream of genomic site GRCh38/hg38: chr11 83651930. In some cases, the targeted region of the pre-mRNA is at most about 1500 nucleotides, about 1000 nucleotides, about 800 nucleotides, about 700 nucleotides, about 600 nucleotides, about 500 nucleotides, about 400 nucleotides, about 300 nucleotides, about 200 nucleotides, about 100 nucleotides, about 80 nucleotides, about 70 nucleotides, about 60 nucleotides, about 50 nucleotides downstream of SEQ ID NO: 188. In some cases, the targeted region of the pre-mRNA is at least about 1500 nucleotides, about 1000 nucleotides, about 800 nucleotides, about 700 nucleotides, about 600 nucleotides, about 500 nucleotides, about 400 nucleotides, about 300 nucleotides, about 200 nucleotides, about 100 nucleotides, about 80 nucleotides, about 70 nucleotides, about 60 nucleotides, about 50 nucleotides downstream of SEQ ID NO: 188. In some cases, the targeted region of the pre-mRNA is at most about 1500 nucleotides, about 1000 nucleotides, about 800 nucleotides, about 700 nucleotides, about 600 nucleotides, about 500 nucleotides, about 400 nucleotides, about 300 nucleotides, about 200 nucleotides, about 100 nucleotides, about 80 nucleotides, about 70 nucleotides, about 60 nucleotides, about 50 nucleotides downstream of genomic site GRCh38/hg38: chr11 83651839. In some cases. the targeted region of the pre-mRNA is at least about 1500 nucleotides, about 1000 nucleotides, about 800 nucleotides, about 700 nucleotides, about 600 nucleotides, about 500 nucleotides, about 400 nucleotides, about 300 nucleotides, about 200 nucleotides, about 100 nucleotides, about 80 nucleotides, about 70 nucleotides, about 60 nucleotides, about 50 nucleotides downstream of genomic site GRCh38/hg38: chr11 83651839. In some cases, the targeted region of the pre-mRNA is within a sequence SEQ ID NO: 188. In some cases, the targeted region of the pre-mRNA is within a sequence between a pair of genomic sites GRCh38/hg38: chr11 83651930, and GRCh38/hg38: chr11 83651839. In some cases, the therapeutic agent is an antisense oligomer complementary to a sequence with at least about 80%, 85%, 90%, 95%, 96%, 97%, 98%, 99% or 100% sequence identity to SEQ ID NO:188. In some cases, the therapeutic agent is an antisense oligomer complementary to a sequence with 100% sequence identity to SEQ ID NO:188. In some cases, the therapeutic agent is an antisense oligomer that has a sequence with at least about 80%, 85%, 90%, 95%, 96%, 97%, 98%, 99% or 100% sequence identity to a sequence selected from the group consisting of SEQ ID NOs: 2587-2643. In some cases, the therapeutic agent is an antisense oligomer that has a sequence selected from the group consisting of SEQ ID NOs: 2587-2643. In some cases, the target peptide sequence is a portion of DLG2 protein, and the method treats a disease or the condition that comprises Intellectual Disability; Bipolar Disorder; Unipolar Depression; Major Depressive Disorder; Schizophrenia related disorders; or Schizophrenia.

[0159] DOK2

[0160] In some cases, the target peptide sequence is a portion of DOK2 protein. In some cases, the therapeutic agent increases level of a first processed mRNA encoding a protein having a sequence SEQ ID NO: 8155, and decreases level of a second processed mRNA encoding a protein having a sequence SEQ ID NO: 391. In some cases, the targeted region of the pre-mRNA is at most about 1500 nucleotides, about 1000 nucleotides, about 800 nucleotides, about 700 nucleotides, about 600 nucleotides, about 500 nucleotides, about 400 nucleotides, about 300 nucleotides, about 200 nucleotides, about 100 nucleotides, about 80 nucleotides, about 70 nucleotides, about 60 nucleotides, about 50 nucleotides upstream of SEQ ID NO: 189. In some cases, the targeted region of the pre-mRNA is at least about 1500 nucleotides, about 1000 nucleotides, about 800 nucleotides, about 700 nucleotides, about 600 nucleotides, about 500 nucleotides, about 400 nucleotides, about 300 nucleotides, about 200 nucleotides, about 100 nucleotides, about 80 nucleotides, about 70 nucleotides, about 60 nucleotides, about 50 nucleotides upstream of SEQ ID NO: 189. In some cases, the targeted region of the pre-mRNA is at most about 1500 nucleotides, about 1000 nucleotides, about 800 nucleotides, about 700 nucleotides, about 600 nucleotides, about 500 nucleotides, about 400 nucleotides, about 300 nucleotides, about 200 nucleotides, about 100 nucleotides, about 80 nucleotides, about 70 nucleotides, about 60 nucleotides, about 50 nucleotides upstream of genomic site GRCh38/hg38: chr8 21910857. In some cases, the targeted region of the pre-mRNA is at least about 1500 nucleotides, about 1000 nucleotides, about 800 nucleotides, about 700 nucleotides, about 600 nucleotides, about 500 nucleotides, about 400 nucleotides, about 300 nucleotides, about 200 nucleotides, about 100 nucleotides, about 80 nucleotides, about 70 nucleotides, about 60 nucleotides, about 50 nucleotides upstream of genomic site GRCh38/hg38: chr8 21910857. In some cases, the targeted region of the pre-mRNA is at most about 1500 nucleotides, about 1000 nucleotides, about 800 nucleotides, about 700 nucleotides, about 600 nucleotides, about 500 nucleotides, about 400 nucleotides, about 300 nucleotides, about 200 nucleotides, about 100 nucleotides, about 80 nucleotides, about 70 nucleotides, about 60 nucleotides, about 50 nucleotides downstream of SEQ ID NO: 189. In some cases, the targeted region of the pre-mRNA is at least about 1500 nucleotides, about 1000 nucleotides, about 800 nucleotides, about 700 nucleotides, about 600 nucleotides, about 500 nucleotides, about 400 nucleotides, about 300 nucleotides, about 200 nucleotides, about 100 nucleotides, about 80 nucleotides, about 70 nucleotides, about 60 nucleotides, about 50 nucleotides downstream of SEQ ID NO: 189. In some cases, the targeted region of the pre-mRNA is at most about 1500 nucleotides, about 1000 nucleotides, about 800 nucleotides, about 700 nucleotides, about 600 nucleotides, about 500 nucleotides, about 400 nucleotides, about 300 nucleotides, about 200 nucleotides, about 100 nucleotides, about 80 nucleotides, about 70 nucleotides, about 60 nucleotides, about 50 nucleotides downstream of genomic site GRCh38/hg38: chr8 21910673. In some cases. the targeted region of the pre-mRNA is at least about 1500 nucleotides, about 1000 nucleotides, about 800 nucleotides, about 700 nucleotides, about 600 nucleotides, about 500 nucleotides, about 400 nucleotides, about 300 nucleotides, about 200 nucleotides, about 100 nucleotides, about 80 nucleotides, about 70 nucleotides, about 60 nucleotides, about 50 nucleotides downstream of genomic site GRCh38/hg38: chr8 21910673. In some cases, the targeted region of the pre-mRNA is within a sequence SEQ ID NO: 189. In some cases, the targeted region of the pre-mRNA is within a sequence between a pair of genomic sites GRCh38/hg38: chr8 21910857, and GRCh38/hg38: chr8 21910673. In some cases, the therapeutic agent is an antisense oligomer complementary to a sequence with at least about 80%, 85%, 90%, 95%, 96%, 97%, 98%, 99% or 100% sequence identity to SEQ ID NO:189. In some cases, the therapeutic agent is an antisense oligomer complementary to a sequence with 100% sequence identity to SEQ ID NO:189. In some cases, the therapeutic agent is an antisense oligomer that has a sequence with at least about 80%, 85%, 90%, 95%, 96%, 97%, 98%, 99% or 100% sequence identity to a sequence selected from the group consisting of SEQ ID NOs: 2644-2719. In some cases, the therapeutic agent is an antisense oligomer that has a sequence selected from the group consisting of SEQ ID NOs: 2644-2719. In some cases, the target peptide sequence is a portion of DOK2 protein, and the method treats a cancer that is associated with DOK2 protein.

[0161] DPF3

[0162] In some cases, the target peptide sequence is a portion of DPF3 protein. In some cases, the therapeutic agent increases level of a first processed mRNA encoding a protein having a sequence SEQ ID NO: 8156, and decreases level of a second processed mRNA encoding a protein having a sequence SEQ ID NO: 392. In some cases, the targeted region of the pre-mRNA is at most about 1500 nucleotides, about 1000 nucleotides, about 800 nucleotides, about 700 nucleotides, about 600 nucleotides, about 500 nucleotides, about 400 nucleotides, about 300 nucleotides, about 200 nucleotides, about 100 nucleotides, about 80 nucleotides, about 70 nucleotides, about 60 nucleotides, about 50 nucleotides upstream of SEQ ID NO: 190. In some cases, the targeted region of the pre-mRNA is at least about 1500 nucleotides, about 1000 nucleotides, about 800 nucleotides, about 700 nucleotides, about 600 nucleotides, about 500 nucleotides, about 400 nucleotides, about 300 nucleotides, about 200 nucleotides, about 100 nucleotides, about 80 nucleotides, about 70 nucleotides, about 60 nucleotides, about 50 nucleotides upstream of SEQ ID NO: 190. In some cases, the targeted region of the pre-mRNA is at most about 1500 nucleotides, about 1000 nucleotides, about 800 nucleotides, about 700 nucleotides, about 600 nucleotides, about 500 nucleotides, about 400 nucleotides, about 300 nucleotides, about 200 nucleotides, about 100 nucleotides, about 80 nucleotides, about 70 nucleotides, about 60 nucleotides, about 50 nucleotides upstream of genomic site GRCh38/hg38: chr14 72879947. In some cases, the targeted region of the pre-mRNA is at least about 1500 nucleotides, about 1000 nucleotides, about 800 nucleotides, about 700 nucleotides, about 600 nucleotides, about 500 nucleotides, about 400 nucleotides, about 300 nucleotides, about 200 nucleotides, about 100 nucleotides, about 80 nucleotides, about 70 nucleotides, about 60 nucleotides, about 50 nucleotides upstream of genomic site GRCh38/hg38: chr14 72879947. In some cases, the targeted region of the pre-mRNA is at most about 1500 nucleotides, about 1000 nucleotides, about 800 nucleotides, about 700 nucleotides, about 600 nucleotides, about 500 nucleotides, about 400 nucleotides, about 300 nucleotides, about 200 nucleotides, about 100 nucleotides, about 80 nucleotides, about 70 nucleotides, about 60 nucleotides, about 50 nucleotides downstream of SEQ ID NO: 190. In some cases, the targeted region of the pre-mRNA is at least about 1500 nucleotides, about 1000 nucleotides, about 800 nucleotides, about 700 nucleotides, about 600 nucleotides, about 500 nucleotides, about 400 nucleotides, about 300 nucleotides, about 200 nucleotides, about 100 nucleotides, about 80 nucleotides, about 70 nucleotides, about 60 nucleotides, about 50 nucleotides downstream of SEQ ID NO: 190. In some cases, the targeted region of the pre-mRNA is at most about 1500 nucleotides, about 1000 nucleotides, about 800 nucleotides, about 700 nucleotides, about 600 nucleotides, about 500 nucleotides, about 400 nucleotides, about 300 nucleotides, about 200 nucleotides, about 100 nucleotides, about 80 nucleotides, about 70 nucleotides, about 60 nucleotides, about 50 nucleotides downstream of genomic site GRCh38/hg38: chr14 72879804. In some cases. the targeted region of the pre-mRNA is at least about 1500 nucleotides, about 1000 nucleotides, about 800 nucleotides, about 700 nucleotides, about 600 nucleotides, about 500 nucleotides, about 400 nucleotides, about 300 nucleotides, about 200 nucleotides, about 100 nucleotides, about 80 nucleotides, about 70 nucleotides, about 60 nucleotides, about 50 nucleotides downstream of genomic site GRCh38/hg38: chr14 72879804. In some cases, the targeted region of the pre-mRNA is within a sequence SEQ ID NO: 190. In some cases, the targeted region of the pre-mRNA is within a sequence between a pair of genomic sites GRCh38/hg38: chr14 72879947, and GRCh38/hg38: chr14 72879804. In some cases, the therapeutic agent is an antisense oligomer complementary to a sequence with at least about 80%, 85%, 90%, 95%, 96%, 97%, 98%, 99% or 100% sequence identity to SEQ ID NO:190. In some cases, the therapeutic agent is an antisense oligomer complementary to a sequence with 100% sequence identity to SEQ ID NO:190. In some cases, the therapeutic agent increases level of a first processed mRNA encoding a protein having a sequence SEQ ID NO: 8157, and decreases level of a second processed mRNA encoding a protein having a sequence SEQ ID NO: 393. In some cases, the targeted region of the pre-mRNA is at most about 1500 nucleotides, about 1000 nucleotides, about 800 nucleotides, about 700 nucleotides, about 600 nucleotides, about 500 nucleotides, about 400 nucleotides, about 300 nucleotides, about 200 nucleotides, about 100 nucleotides, about 80 nucleotides, about 70 nucleotides, about 60 nucleotides, about 50 nucleotides upstream of SEQ ID NO: 191. In some cases, the targeted region of the pre-mRNA is at least about 1500 nucleotides, about 1000 nucleotides, about 800 nucleotides, about 700 nucleotides, about 600 nucleotides, about 500 nucleotides, about 400 nucleotides, about 300 nucleotides, about 200 nucleotides, about 100 nucleotides, about 80 nucleotides, about 70 nucleotides, about 60 nucleotides, about 50 nucleotides upstream of SEQ ID NO: 191. In some cases, the targeted region of the pre-mRNA is at most about 1500 nucleotides, about 1000 nucleotides, about 800 nucleotides, about 700 nucleotides, about 600 nucleotides, about 500 nucleotides, about 400 nucleotides, about 300 nucleotides, about 200 nucleotides, about 100 nucleotides, about 80 nucleotides, about 70 nucleotides, about 60 nucleotides, about 50 nucleotides upstream of genomic site GRCh38/hg38: chr14 72879947. In some cases, the targeted region of the pre-mRNA is at least about 1500 nucleotides, about 1000 nucleotides, about 800 nucleotides, about 700 nucleotides, about 600 nucleotides, about 500 nucleotides, about 400 nucleotides, about 300 nucleotides, about 200 nucleotides, about 100 nucleotides, about 80 nucleotides, about 70 nucleotides, about 60 nucleotides, about 50 nucleotides upstream of genomic site GRCh38/hg38: chr14 72879947. In some cases, the targeted region of the pre-mRNA is at most about 1500 nucleotides, about 1000 nucleotides, about 800 nucleotides, about 700 nucleotides, about 600 nucleotides, about 500 nucleotides, about 400 nucleotides, about 300 nucleotides, about 200 nucleotides, about 100 nucleotides, about 80 nucleotides, about 70 nucleotides, about 60 nucleotides, about 50 nucleotides downstream of SEQ ID NO: 191. In some cases, the targeted region of the pre-mRNA is at least about 1500 nucleotides, about 1000 nucleotides, about 800 nucleotides, about 700 nucleotides, about 600 nucleotides, about 500 nucleotides, about 400 nucleotides, about 300 nucleotides, about 200 nucleotides, about 100 nucleotides, about 80 nucleotides, about 70 nucleotides, about 60 nucleotides, about 50 nucleotides downstream of SEQ ID NO: 191. In some cases, the targeted region of the pre-mRNA is at most about 1500 nucleotides, about 1000 nucleotides, about 800 nucleotides, about 700 nucleotides, about 600 nucleotides, about 500 nucleotides, about 400 nucleotides, about 300 nucleotides, about 200 nucleotides, about 100 nucleotides, about 80 nucleotides, about 70 nucleotides, about 60 nucleotides, about 50 nucleotides downstream of genomic site GRCh38/hg38: chr14 72879804. In some cases. the targeted region of the pre-mRNA is at least about 1500 nucleotides, about 1000 nucleotides, about 800 nucleotides, about 700 nucleotides, about 600 nucleotides, about 500 nucleotides, about 400 nucleotides, about 300 nucleotides, about 200 nucleotides, about 100 nucleotides, about 80 nucleotides, about 70 nucleotides, about 60 nucleotides, about 50 nucleotides downstream of genomic site GRCh38/hg38: chr14 72879804. In some cases, the targeted region of the pre-mRNA is within a sequence SEQ ID NO: 191. In some cases, the targeted region of the pre-mRNA is within a sequence between a pair of genomic sites GRCh38/hg38: chr14 72879947, and GRCh38/hg38: chr14 72879804. In some cases, the therapeutic agent is an antisense oligomer complementary to a sequence with at least about 80%, 85%, 90%, 95%, 96%, 97%, 98%, 99% or 100% sequence identity to SEQ ID NO:191. In some cases, the therapeutic agent is an antisense oligomer complementary to a sequence with 100% sequence identity to SEQ ID NO:191. In some cases, the therapeutic agent is an antisense oligomer that has a sequence with at least about 80%, 85%, 90%, 95%, 96%, 97%, 98%, 99% or 100% sequence identity to a sequence selected from the group consisting of SEQ ID NOs: 2720-2787. In some cases, the therapeutic agent is an antisense oligomer that has a sequence selected from the group consisting of SEQ ID NOs: 2720-2787. In some cases, the target peptide sequence is a portion of DPF3 protein, and the method treats a disease or the condition that comprises Intellectual Disability.

[0163] DTNA

[0164] In some cases, the target peptide sequence is a portion of DTNA protein. In some cases, the therapeutic agent increases level of a first processed mRNA encoding a protein having a sequence SEQ ID NO: 8158, and decreases level of a second processed mRNA encoding a protein having a sequence SEQ ID NO: 394. In some cases, the targeted region of the pre-mRNA is at most about 1500 nucleotides, about 1000 nucleotides, about 800 nucleotides, about 700 nucleotides, about 600 nucleotides, about 500 nucleotides, about 400 nucleotides, about 300 nucleotides, about 200 nucleotides, about 100 nucleotides, about 80 nucleotides, about 70 nucleotides, about 60 nucleotides, about 50 nucleotides upstream of SEQ ID NO: 192. In some cases, the targeted region of the pre-mRNA is at least about 1500 nucleotides, about 1000 nucleotides, about 800 nucleotides, about 700 nucleotides, about 600 nucleotides, about 500 nucleotides, about 400 nucleotides, about 300 nucleotides, about 200 nucleotides, about 100 nucleotides, about 80 nucleotides, about 70 nucleotides, about 60 nucleotides, about 50 nucleotides upstream of SEQ ID NO: 192. In some cases, the targeted region of the pre-mRNA is at most about 1500 nucleotides, about 1000 nucleotides, about 800 nucleotides, about 700 nucleotides, about 600 nucleotides, about 500 nucleotides, about 400 nucleotides, about 300 nucleotides, about 200 nucleotides, about 100 nucleotides, about 80 nucleotides, about 70 nucleotides, about 60 nucleotides, about 50 nucleotides upstream of genomic site GRCh38/hg38: chr18 34757158. In some cases, the targeted region of the pre-mRNA is at least about 1500 nucleotides, about 1000 nucleotides, about 800 nucleotides, about 700 nucleotides, about 600 nucleotides, about 500 nucleotides, about 400 nucleotides, about 300 nucleotides, about 200 nucleotides, about 100 nucleotides, about 80 nucleotides, about 70 nucleotides, about 60 nucleotides, about 50 nucleotides upstream of genomic site GRCh38/hg38: chr18 34757158. In some cases, the targeted region of the pre-mRNA is at most about 1500 nucleotides, about 1000 nucleotides, about 800 nucleotides, about 700 nucleotides, about 600 nucleotides, about 500 nucleotides, about 400 nucleotides, about 300 nucleotides, about 200 nucleotides, about 100 nucleotides, about 80 nucleotides, about 70 nucleotides, about 60 nucleotides, about 50 nucleotides downstream of SEQ ID NO: 192. In some cases, the targeted region of the pre-mRNA is at least about 1500 nucleotides, about 1000 nucleotides, about 800 nucleotides, about 700 nucleotides, about 600 nucleotides, about 500 nucleotides, about 400 nucleotides, about 300 nucleotides, about 200 nucleotides, about 100 nucleotides, about 80 nucleotides, about 70 nucleotides, about 60 nucleotides, about 50 nucleotides downstream of SEQ ID NO: 192. In some cases, the targeted region of the pre-mRNA is at most about 1500 nucleotides, about 1000 nucleotides, about 800 nucleotides, about 700 nucleotides, about 600 nucleotides, about 500 nucleotides, about 400 nucleotides, about 300 nucleotides, about 200 nucleotides, about 100 nucleotides, about 80 nucleotides, about 70 nucleotides, about 60 nucleotides, about 50 nucleotides downstream of genomic site GRCh38/hg38: chr18 34757288. In some cases. the targeted region of the pre-mRNA is at least about 1500 nucleotides, about 1000 nucleotides, about 800 nucleotides, about 700 nucleotides, about 600 nucleotides, about 500 nucleotides, about 400 nucleotides, about 300 nucleotides, about 200 nucleotides, about 100 nucleotides, about 80 nucleotides, about 70 nucleotides, about 60 nucleotides, about 50 nucleotides downstream of genomic site GRCh38/hg38: chr18 34757288. In some cases, the targeted region of the pre-mRNA is within a sequence SEQ ID NO: 192. In some cases, the targeted region of the pre-mRNA is within a sequence between a pair of genomic sites GRCh38/hg38: chr18 34757158, and GRCh38/hg38: chr18 34757288. In some cases, the therapeutic agent is an antisense oligomer complementary to a sequence with at least about 80%, 85%, 90%, 95%, 96%, 97%, 98%, 99% or 100% sequence identity to SEQ ID NO:192. In some cases, the therapeutic agent is an antisense oligomer complementary to a sequence with 100% sequence identity to SEQ ID NO:192. In some cases, the therapeutic agent increases level of a first processed mRNA encoding a protein having a sequence SEQ ID NO: 8159, and decreases level of a second processed mRNA encoding a protein having a sequence SEQ ID NO: 395. In some cases, the targeted region of the pre-mRNA is at most about 1500 nucleotides, about 1000 nucleotides, about 800 nucleotides, about 700 nucleotides, about 600 nucleotides, about 500 nucleotides, about 400 nucleotides, about 300 nucleotides, about 200 nucleotides, about 100 nucleotides, about 80 nucleotides, about 70 nucleotides, about 60 nucleotides, about 50 nucleotides upstream of SEQ ID NO: 193. In some cases, the targeted region of the pre-mRNA is at least about 1500 nucleotides, about 1000 nucleotides, about 800 nucleotides, about 700 nucleotides, about 600 nucleotides, about 500 nucleotides, about 400 nucleotides, about 300 nucleotides, about 200 nucleotides, about 100 nucleotides, about 80 nucleotides, about 70 nucleotides, about 60 nucleotides, about 50 nucleotides upstream of SEQ ID NO: 193. In some cases, the targeted region of the pre-mRNA is at most about 1500 nucleotides, about 1000 nucleotides, about 800 nucleotides, about 700 nucleotides, about 600 nucleotides, about 500 nucleotides, about 400 nucleotides, about 300 nucleotides, about 200 nucleotides, about 100 nucleotides, about 80 nucleotides, about 70 nucleotides, about 60 nucleotides, about 50 nucleotides upstream of genomic site GRCh38/hg38: chr18 34757158. In some cases, the targeted region of the pre-mRNA is at least about 1500 nucleotides, about 1000 nucleotides, about 800 nucleotides, about 700 nucleotides, about 600 nucleotides, about 500 nucleotides, about 400 nucleotides, about 300 nucleotides, about 200 nucleotides, about 100 nucleotides, about 80 nucleotides, about 70 nucleotides, about 60 nucleotides, about 50 nucleotides upstream of genomic site GRCh38/hg38: chr18 34757158. In some cases, the targeted region of the pre-mRNA is at most about 1500 nucleotides, about 1000 nucleotides, about 800 nucleotides, about 700 nucleotides, about 600 nucleotides, about 500 nucleotides, about 400 nucleotides, about 300 nucleotides, about 200 nucleotides, about 100 nucleotides, about 80 nucleotides, about 70 nucleotides, about 60 nucleotides, about 50 nucleotides downstream of SEQ ID NO: 193. In some cases, the targeted region of the pre-mRNA is at least about 1500 nucleotides, about 1000 nucleotides, about 800 nucleotides, about 700 nucleotides, about 600 nucleotides, about 500 nucleotides, about 400 nucleotides, about 300 nucleotides, about 200 nucleotides, about 100 nucleotides, about 80 nucleotides, about 70 nucleotides, about 60 nucleotides, about 50 nucleotides downstream of SEQ ID NO: 193. In some cases, the targeted region of the pre-mRNA is at most about 1500 nucleotides, about 1000 nucleotides, about 800 nucleotides, about 700 nucleotides, about 600 nucleotides, about 500 nucleotides, about 400 nucleotides, about 300 nucleotides, about 200 nucleotides, about 100 nucleotides, about 80 nucleotides, about 70 nucleotides, about 60 nucleotides, about 50 nucleotides downstream of genomic site GRCh38/hg38: chr18 34757288. In some cases. the targeted region of the pre-mRNA is at least about 1500 nucleotides, about 1000 nucleotides, about 800 nucleotides, about 700 nucleotides, about 600 nucleotides, about 500 nucleotides, about 400 nucleotides, about 300 nucleotides, about 200 nucleotides, about 100 nucleotides, about 80 nucleotides, about 70 nucleotides, about 60 nucleotides, about 50 nucleotides downstream of genomic site GRCh38/hg38: chr18 34757288. In some cases, the targeted region of the pre-mRNA is within a sequence SEQ ID NO: 193. In some cases, the targeted region of the pre-mRNA is within a sequence between a pair of genomic sites GRCh38/hg38: chr18 34757158, and GRCh38/hg38: chr18 34757288. In some cases, the therapeutic agent is an antisense oligomer complementary to a sequence with at least about 80%, 85%, 90%, 95%, 96%, 97%, 98%, 99% or 100% sequence identity to SEQ ID NO:193. In some cases, the therapeutic agent is an antisense oligomer complementary to a sequence with 100% sequence identity to SEQ ID NO:193. In some cases, the therapeutic agent is an antisense oligomer that has a sequence with at least about 80%, 85%, 90%, 95%, 96%, 97%, 98%, 99% or 100% sequence identity to a sequence selected from the group consisting of SEQ ID NOs: 2788-2852. In some cases, the therapeutic agent is an antisense oligomer that has a sequence selected from the group consisting of SEQ ID NOs: 2788-2852. In some cases, the target peptide sequence is a portion of DTNA protein, and the method treats a disease or the condition that comprises Left ventricular noncompaction cardiomyopathy; Left ventricular noncompaction; Familial Meniere's disease; Charcot-Marie-Tooth Disease; or Noncompaction of Left Ventricular Myocardium, Familial Isolated, Autosomal Dominant 1.

[0165] DYRK1A

[0166] In some cases, the target peptide sequence is a portion of DYRK1A protein. In some cases, the therapeutic agent increases level of a first processed mRNA encoding a protein having a sequence SEQ ID NO: 8160, and decreases level of a second processed mRNA encoding a protein having a sequence SEQ ID NO: 396. In some cases, the targeted region of the pre-mRNA is at most about 1500 nucleotides, about 1000 nucleotides, about 800 nucleotides, about 700 nucleotides, about 600 nucleotides, about 500 nucleotides, about 400 nucleotides, about 300 nucleotides, about 200 nucleotides, about 100 nucleotides, about 80 nucleotides, about 70 nucleotides, about 60 nucleotides, about 50 nucleotides upstream of SEQ ID NO: 194. In some cases, the targeted region of the pre-mRNA is at least about 1500 nucleotides, about 1000 nucleotides, about 800 nucleotides, about 700 nucleotides, about 600 nucleotides, about 500 nucleotides, about 400 nucleotides, about 300 nucleotides, about 200 nucleotides, about 100 nucleotides, about 80 nucleotides, about 70 nucleotides, about 60 nucleotides, about 50 nucleotides upstream of SEQ ID NO: 194. In some cases, the targeted region of the pre-mRNA is at most about 1500 nucleotides, about 1000 nucleotides, about 800 nucleotides, about 700 nucleotides, about 600 nucleotides, about 500 nucleotides, about 400 nucleotides, about 300 nucleotides, about 200 nucleotides, about 100 nucleotides, about 80 nucleotides, about 70 nucleotides, about 60 nucleotides, about 50 nucleotides upstream of genomic site GRCh38/hg38: chr21 37456130. In some cases, the targeted region of the pre-mRNA is at least about 1500 nucleotides, about 1000 nucleotides, about 800 nucleotides, about 700 nucleotides, about 600 nucleotides, about 500 nucleotides, about 400 nucleotides, about 300 nucleotides, about 200 nucleotides, about 100 nucleotides, about 80 nucleotides, about 70 nucleotides, about 60 nucleotides, about 50 nucleotides upstream of genomic site GRCh38/hg38: chr21 37456130. In some cases, the targeted region of the pre-mRNA is at most about 1500 nucleotides, about 1000 nucleotides, about 800 nucleotides, about 700 nucleotides, about 600 nucleotides, about 500 nucleotides, about 400 nucleotides, about 300 nucleotides, about 200 nucleotides, about 100 nucleotides, about 80 nucleotides, about 70 nucleotides, about 60 nucleotides, about 50 nucleotides downstream of SEQ ID NO: 194. In some cases, the targeted region of the pre-mRNA is at least about 1500 nucleotides, about 1000 nucleotides, about 800 nucleotides, about 700 nucleotides, about 600 nucleotides, about 500 nucleotides, about 400 nucleotides, about 300 nucleotides, about 200 nucleotides, about 100 nucleotides, about 80 nucleotides, about 70 nucleotides, about 60 nucleotides, about 50 nucleotides downstream of SEQ ID NO: 194. In some cases, the targeted region of the pre-mRNA is at most about 1500 nucleotides, about 1000 nucleotides, about 800 nucleotides, about 700 nucleotides, about 600 nucleotides, about 500 nucleotides, about 400 nucleotides, about 300 nucleotides, about 200 nucleotides, about 100 nucleotides, about 80 nucleotides, about 70 nucleotides, about 60 nucleotides, about 50 nucleotides downstream of genomic site GRCh38/hg38: chr21 37456308. In some cases. the targeted region of the pre-mRNA is at least about 1500 nucleotides, about 1000 nucleotides, about 800 nucleotides, about 700 nucleotides, about 600 nucleotides, about 500 nucleotides, about 400 nucleotides, about 300 nucleotides, about 200 nucleotides, about 100 nucleotides, about 80 nucleotides, about 70 nucleotides, about 60 nucleotides, about 50 nucleotides downstream of genomic site GRCh38/hg38: chr21 37456308. In some cases, the targeted region of the pre-mRNA is within a sequence SEQ ID NO: 194. In some cases, the targeted region of the pre-mRNA is within a sequence between a pair of genomic sites GRCh38/hg38: chr21 37456130, and GRCh38/hg38: chr21 37456308. In some cases, the therapeutic agent is an antisense oligomer complementary to a sequence with at least about 80%, 85%, 90%, 95%, 96%, 97%, 98%, 99% or 100% sequence identity to SEQ ID NO:194. In some cases, the therapeutic agent is an antisense oligomer complementary to a sequence with 100% sequence identity to SEQ ID NO:194. In some cases, the therapeutic agent is an antisense oligomer that has a sequence with at least about 80%, 85%, 90%, 95%, 96%, 97%, 98%, 99% or 100% sequence identity to a sequence selected from the group consisting of SEQ ID NOs: 2853-2927. In some cases, the therapeutic agent is an antisense oligomer that has a sequence selected from the group consisting of SEQ ID NOs: 2853-2927. In some cases, the target peptide sequence is a portion of DYRK1A protein, and the method treats a disease or the condition that comprises Intellectual Disability; Primary microcephaly; Microcephaly; Epileptic encephalopathy; or Mental retardation, autosomal dominant 7.

[0167] FOLH1

[0168] In some cases, the target peptide sequence is a portion of FOLH1 protein. In some cases, the therapeutic agent increases level of a first processed mRNA encoding a protein having a sequence SEQ ID NO: 8161, and decreases level of a second processed mRNA encoding a protein having a sequence SEQ ID NO: 397. In some cases, the targeted region of the pre-mRNA is at most about 1500 nucleotides, about 1000 nucleotides, about 800 nucleotides, about 700 nucleotides, about 600 nucleotides, about 500 nucleotides, about 400 nucleotides, about 300 nucleotides, about 200 nucleotides, about 100 nucleotides, about 80 nucleotides, about 70 nucleotides, about 60 nucleotides, about 50 nucleotides upstream of SEQ ID NO: 195. In some cases, the targeted region of the pre-mRNA is at least about 1500 nucleotides, about 1000 nucleotides, about 800 nucleotides, about 700 nucleotides, about 600 nucleotides, about 500 nucleotides, about 400 nucleotides, about 300 nucleotides, about 200 nucleotides, about 100 nucleotides, about 80 nucleotides, about 70 nucleotides, about 60 nucleotides, about 50 nucleotides upstream of SEQ ID NO: 195. In some cases, the targeted region of the pre-mRNA is at most about 1500 nucleotides, about 1000 nucleotides, about 800 nucleotides, about 700 nucleotides, about 600 nucleotides, about 500 nucleotides, about 400 nucleotides, about 300 nucleotides, about 200 nucleotides, about 100 nucleotides, about 80 nucleotides, about 70 nucleotides, about 60 nucleotides, about 50 nucleotides upstream of genomic site GRCh38/hg38: chr11 49206874. In some cases, the targeted region of the pre-mRNA is at least about 1500 nucleotides, about 1000 nucleotides, about 800 nucleotides, about 700 nucleotides, about 600 nucleotides, about 500 nucleotides, about 400 nucleotides, about 300 nucleotides, about 200 nucleotides, about 100 nucleotides, about 80 nucleotides, about 70 nucleotides, about 60 nucleotides, about 50 nucleotides upstream of genomic site GRCh38/hg38: chr11 49206874. In some cases, the targeted region of the pre-mRNA is at most about 1500 nucleotides, about 1000 nucleotides, about 800 nucleotides, about 700 nucleotides, about 600 nucleotides, about 500 nucleotides, about 400 nucleotides, about 300 nucleotides, about 200 nucleotides, about 100 nucleotides, about 80 nucleotides, about 70 nucleotides, about 60 nucleotides, about 50 nucleotides downstream of SEQ ID NO: 195. In some cases, the targeted region of the pre-mRNA is at least about 1500 nucleotides, about 1000 nucleotides, about 800 nucleotides, about 700 nucleotides, about 600 nucleotides, about 500 nucleotides, about 400 nucleotides, about 300 nucleotides, about 200 nucleotides, about 100 nucleotides, about 80 nucleotides, about 70 nucleotides, about 60 nucleotides, about 50 nucleotides downstream of SEQ ID NO: 195. In some cases, the targeted region of the pre-mRNA is at most about 1500 nucleotides, about 1000 nucleotides, about 800 nucleotides, about 700 nucleotides, about 600 nucleotides, about 500 nucleotides, about 400 nucleotides, about 300 nucleotides, about 200 nucleotides, about 100 nucleotides, about 80 nucleotides, about 70 nucleotides, about 60 nucleotides, about 50 nucleotides downstream of genomic site GRCh38/hg38: chr11 49206778. In some cases. the targeted region of the pre-mRNA is at least about 1500 nucleotides, about 1000 nucleotides, about 800 nucleotides, about 700 nucleotides, about 600 nucleotides, about 500 nucleotides, about 400 nucleotides, about 300 nucleotides, about 200 nucleotides, about 100 nucleotides, about 80 nucleotides, about 70 nucleotides, about 60 nucleotides, about 50 nucleotides downstream of genomic site GRCh38/hg38: chr11 49206778. In some cases, the targeted region of the pre-mRNA is within a sequence SEQ ID NO: 195. In some cases, the targeted region of the pre-mRNA is within a sequence between a pair of genomic sites GRCh38/hg38: chr11 49206874, and GRCh38/hg38: chr11 49206778. In some cases, the therapeutic agent is an antisense oligomer complementary to a sequence with at least about 80%, 85%, 90%, 95%, 96%, 97%, 98%, 99% or 100% sequence identity to SEQ ID NO:195. In some cases, the therapeutic agent is an antisense oligomer complementary to a sequence with 100% sequence identity to SEQ ID NO:195. In some cases, the therapeutic agent is an antisense oligomer that has a sequence with at least about 80%, 85%, 90%, 95%, 96%, 97%, 98%, 99% or 100% sequence identity to a sequence selected from the group consisting of SEQ ID NOs: 2928-2985. In some cases, the therapeutic agent is an antisense oligomer that has a sequence selected from the group consisting of SEQ ID NOs: 2928-2985. In some cases, the target peptide sequence is a portion of FOLH1 protein, and the method treats a disease or the condition that comprises Colorectal Cancer; Depressive disorder; Mental Depression; or Schizophrenia.

[0169] FUZ

[0170] In some cases, the target peptide sequence is a portion of FUZ protein. In some cases, the therapeutic agent increases level of a first processed mRNA encoding a protein having a sequence SEQ ID NO: 8162, and decreases level of a second processed mRNA encoding a protein having a sequence SEQ ID NO: 398. In some cases, the targeted region of the pre-mRNA is at most about 1500 nucleotides, about 1000 nucleotides, about 800 nucleotides, about 700 nucleotides, about 600 nucleotides, about 500 nucleotides, about 400 nucleotides, about 300 nucleotides, about 200 nucleotides, about 100 nucleotides, about 80 nucleotides, about 70 nucleotides, about 60 nucleotides, about 50 nucleotides upstream of SEQ ID NO: 196. In some cases, the targeted region of the pre-mRNA is at least about 1500 nucleotides, about 1000 nucleotides, about 800 nucleotides, about 700 nucleotides, about 600 nucleotides, about 500 nucleotides, about 400 nucleotides, about 300 nucleotides, about 200 nucleotides, about 100 nucleotides, about 80 nucleotides, about 70 nucleotides, about 60 nucleotides, about 50 nucleotides upstream of SEQ ID NO: 196. In some cases, the targeted region of the pre-mRNA is at most about 1500 nucleotides, about 1000 nucleotides, about 800 nucleotides, about 700 nucleotides, about 600 nucleotides, about 500 nucleotides, about 400 nucleotides, about 300 nucleotides, about 200 nucleotides, about 100 nucleotides, about 80 nucleotides, about 70 nucleotides, about 60 nucleotides, about 50 nucleotides upstream of genomic site GRCh38/hg38: chr19 49812335. In some cases, the targeted region of the pre-mRNA is at least about 1500 nucleotides, about 1000 nucleotides, about 800 nucleotides, about 700 nucleotides, about 600 nucleotides, about 500 nucleotides, about 400 nucleotides, about 300 nucleotides, about 200 nucleotides, about 100 nucleotides, about 80 nucleotides, about 70 nucleotides, about 60 nucleotides, about 50 nucleotides upstream of genomic site GRCh38/hg38: chr19 49812335. In some cases, the targeted region of the pre-mRNA is at most about 1500 nucleotides, about 1000 nucleotides, about 800 nucleotides, about 700 nucleotides, about 600 nucleotides, about 500 nucleotides, about 400 nucleotides, about 300 nucleotides, about 200 nucleotides, about 100 nucleotides, about 80 nucleotides, about 70 nucleotides, about 60 nucleotides, about 50 nucleotides downstream of SEQ ID NO: 196. In some cases, the targeted region of the pre-mRNA is at least about 1500 nucleotides, about 1000 nucleotides, about 800 nucleotides, about 700 nucleotides, about 600 nucleotides, about 500 nucleotides, about 400 nucleotides, about 300 nucleotides, about 200 nucleotides, about 100 nucleotides, about 80 nucleotides, about 70 nucleotides, about 60 nucleotides, about 50 nucleotides downstream of SEQ ID NO: 196. In some cases, the targeted region of the pre-mRNA is at most about 1500 nucleotides, about 1000 nucleotides, about 800 nucleotides, about 700 nucleotides, about 600 nucleotides, about 500 nucleotides, about 400 nucleotides, about 300 nucleotides, about 200 nucleotides, about 100 nucleotides, about 80 nucleotides, about 70 nucleotides, about 60 nucleotides, about 50 nucleotides downstream of genomic site GRCh38/hg38: chr19 49812251. In some cases. the targeted region of the pre-mRNA is at least about 1500 nucleotides, about 1000 nucleotides, about 800 nucleotides, about 700 nucleotides, about 600 nucleotides, about 500 nucleotides, about 400 nucleotides, about 300 nucleotides, about 200 nucleotides, about 100 nucleotides, about 80 nucleotides, about 70 nucleotides, about 60 nucleotides, about 50 nucleotides downstream of genomic site GRCh38/hg38: chr19 49812251. In some cases, the targeted region of the pre-mRNA is within a sequence SEQ ID NO: 196. In some cases, the targeted region of the pre-mRNA is within a sequence between a pair of genomic sites GRCh38/hg38: chr19 49812335, and GRCh38/hg38: chr19 49812251. In some cases, the therapeutic agent is an antisense oligomer complementary to a sequence with at least about 80%, 85%, 90%, 95%, 96%, 97%, 98%, 99% or 100% sequence identity to SEQ ID NO:196. In some cases, the therapeutic agent is an antisense oligomer complementary to a sequence with 100% sequence identity to SEQ ID NO:196. In some cases, the therapeutic agent is an antisense oligomer that has a sequence with at least about 80%, 85%, 90%, 95%, 96%, 97%, 98%, 99% or 100% sequence identity to a sequence selected from the group consisting of SEQ ID NOs: 2986-3041. In some cases, the therapeutic agent is an antisense oligomer that has a sequence selected from the group consisting of SEQ ID NOs: 2986-3041. In some cases, the target peptide sequence is a portion of FUZ protein, and the method treats a disease or the condition that comprises Caudal Regression Syndrome; Arnold Chiari Malformation; Caudal dysplasia syndrome; Chiari malformation type II; Sacral Agenesis Syndrome; Sacral agenesis; Currarino triad; Spina bifida aperta of cervical spine; or Neural tube defects.

[0171] GANAB

[0172] In some cases, the target peptide sequence is a portion of GANAB protein. In some cases, the therapeutic agent increases level of a first processed mRNA encoding a protein having a sequence SEQ ID NO: 8163, and decreases level of a second processed mRNA encoding a protein having a sequence SEQ ID NO: 399. In some cases, the targeted region of the pre-mRNA is at most about 1500 nucleotides, about 1000 nucleotides, about 800 nucleotides, about 700 nucleotides, about 600 nucleotides, about 500 nucleotides, about 400 nucleotides, about 300 nucleotides, about 200 nucleotides, about 100 nucleotides, about 80 nucleotides, about 70 nucleotides, about 60 nucleotides, about 50 nucleotides upstream of SEQ ID NO: 197. In some cases, the targeted region of the pre-mRNA is at least about 1500 nucleotides, about 1000 nucleotides, about 800 nucleotides, about 700 nucleotides, about 600 nucleotides, about 500 nucleotides, about 400 nucleotides, about 300 nucleotides, about 200 nucleotides, about 100 nucleotides, about 80 nucleotides, about 70 nucleotides, about 60 nucleotides, about 50 nucleotides upstream of SEQ ID NO: 197. In some cases, the targeted region of the pre-mRNA is at most about 1500 nucleotides, about 1000 nucleotides, about 800 nucleotides, about 700 nucleotides, about 600 nucleotides, about 500 nucleotides, about 400 nucleotides, about 300 nucleotides, about 200 nucleotides, about 100 nucleotides, about 80 nucleotides, about 70 nucleotides, about 60 nucleotides, about 50 nucleotides upstream of genomic site GRCh38/hg38: chr11 62639110. In some cases, the targeted region of the pre-mRNA is at least about 1500 nucleotides, about 1000 nucleotides, about 800 nucleotides, about 700 nucleotides, about 600 nucleotides, about 500 nucleotides, about 400 nucleotides, about 300 nucleotides, about 200 nucleotides, about 100 nucleotides, about 80 nucleotides, about 70 nucleotides, about 60 nucleotides, about 50 nucleotides upstream of genomic site GRCh38/hg38: chr11 62639110. In some cases, the targeted region of the pre-mRNA is at most about 1500 nucleotides, about 1000 nucleotides, about 800 nucleotides, about 700 nucleotides, about 600 nucleotides, about 500 nucleotides, about 400 nucleotides, about 300 nucleotides, about 200 nucleotides, about 100 nucleotides, about 80 nucleotides, about 70 nucleotides, about 60 nucleotides, about 50 nucleotides downstream of SEQ ID NO: 197. In some cases, the targeted region of the pre-mRNA is at least about 1500 nucleotides, about 1000 nucleotides, about 800 nucleotides, about 700 nucleotides, about 600 nucleotides, about 500 nucleotides, about 400 nucleotides, about 300 nucleotides, about 200 nucleotides, about 100 nucleotides, about 80 nucleotides, about 70 nucleotides, about 60 nucleotides, about 50 nucleotides downstream of SEQ ID NO: 197. In some cases, the targeted region of the pre-mRNA is at most about 1500 nucleotides, about 1000 nucleotides, about 800 nucleotides, about 700 nucleotides, about 600 nucleotides, about 500 nucleotides, about 400 nucleotides, about 300 nucleotides, about 200 nucleotides, about 100 nucleotides, about 80 nucleotides, about 70 nucleotides, about 60 nucleotides, about 50 nucleotides downstream of genomic site GRCh38/hg38: chr11 62638983. In some cases. the targeted region of the pre-mRNA is at least about 1500 nucleotides, about 1000 nucleotides, about 800 nucleotides, about 700 nucleotides, about 600 nucleotides, about 500 nucleotides, about 400 nucleotides, about 300 nucleotides, about 200 nucleotides, about 100 nucleotides, about 80 nucleotides, about 70 nucleotides, about 60 nucleotides, about 50 nucleotides downstream of genomic site GRCh38/hg38: chr11 62638983. In some cases, the targeted region of the pre-mRNA is within a sequence SEQ ID NO: 197. In some cases, the targeted region of the pre-mRNA is within a sequence between a pair of genomic sites GRCh38/hg38: chr11 62639110, and GRCh38/hg38: chr11 62638983. In some cases, the therapeutic agent is an antisense oligomer complementary to a sequence with at least about 80%, 85%, 90%, 95%, 96%, 97%, 98%, 99% or 100% sequence identity to SEQ ID NO:197. In some cases, the therapeutic agent is an antisense oligomer complementary to a sequence with 100% sequence identity to SEQ ID NO:197. In some cases, the therapeutic agent is an antisense oligomer that has a sequence with at least about 80%, 85%, 90%, 95%, 96%, 97%, 98%, 99% or 100% sequence identity to a sequence selected from the group consisting of SEQ ID NOs: 3042-3106. In some cases, the therapeutic agent is an antisense oligomer that has a sequence selected from the group consisting of SEQ ID NOs: 3042-3106. In some cases, the target peptide sequence is a portion of GANAB protein, and the method treats a disease or the condition that comprises Polycystic Kidney, Autosomal Dominant; or Polycystic Kidney Disease 3, Autosomal Dominant. In some cases, the method treats a cancer that is associated with GANAB protein.

[0173] GEMIN4

[0174] In some cases, the target peptide sequence is a portion of GEMIN4 protein. In some cases, the therapeutic agent increases level of a first processed mRNA encoding a protein having a sequence SEQ ID NO: 8164, and decreases level of a second processed mRNA encoding a protein having a sequence SEQ ID NO: 400. In some cases, the targeted region of the pre-mRNA is at most about 1500 nucleotides, about 1000 nucleotides, about 800 nucleotides, about 700 nucleotides, about 600 nucleotides, about 500 nucleotides, about 400 nucleotides, about 300 nucleotides, about 200 nucleotides, about 100 nucleotides, about 80 nucleotides, about 70 nucleotides, about 60 nucleotides, about 50 nucleotides upstream of SEQ ID NO: 198. In some cases, the targeted region of the pre-mRNA is at least about 1500 nucleotides, about 1000 nucleotides, about 800 nucleotides, about 700 nucleotides, about 600 nucleotides, about 500 nucleotides, about 400 nucleotides, about 300 nucleotides, about 200 nucleotides, about 100 nucleotides, about 80 nucleotides, about 70 nucleotides, about 60 nucleotides, about 50 nucleotides upstream of SEQ ID NO: 198. In some cases, the targeted region of the pre-mRNA is at most about 1500 nucleotides, about 1000 nucleotides, about 800 nucleotides, about 700 nucleotides, about 600 nucleotides, about 500 nucleotides, about 400 nucleotides, about 300 nucleotides, about 200 nucleotides, about 100 nucleotides, about 80 nucleotides, about 70 nucleotides, about 60 nucleotides, about 50 nucleotides upstream of genomic site GRCh38/hg38: chr17 749909. In some cases, the targeted region of the pre-mRNA is at least about 1500 nucleotides, about 1000 nucleotides, about 800 nucleotides, about 700 nucleotides, about 600 nucleotides, about 500 nucleotides, about 400 nucleotides, about 300 nucleotides, about 200 nucleotides, about 100 nucleotides, about 80 nucleotides, about 70 nucleotides, about 60 nucleotides, about 50 nucleotides upstream of genomic site GRCh38/hg38: chr17 749909. In some cases, the targeted region of the pre-mRNA is at most about 1500 nucleotides, about 1000 nucleotides, about 800 nucleotides, about 700 nucleotides, about 600 nucleotides, about 500 nucleotides, about 400 nucleotides, about 300 nucleotides, about 200 nucleotides, about 100 nucleotides, about 80 nucleotides, about 70 nucleotides, about 60 nucleotides, about 50 nucleotides downstream of SEQ ID NO: 198. In some cases, the targeted region of the pre-mRNA is at least about 1500 nucleotides, about 1000 nucleotides, about 800 nucleotides, about 700 nucleotides, about 600 nucleotides, about 500 nucleotides, about 400 nucleotides, about 300 nucleotides, about 200 nucleotides, about 100 nucleotides, about 80 nucleotides, about 70 nucleotides, about 60 nucleotides, about 50 nucleotides downstream of SEQ ID NO: 198. In some cases, the targeted region of the pre-mRNA is at most about 1500 nucleotides, about 1000 nucleotides, about 800 nucleotides, about 700 nucleotides, about 600 nucleotides, about 500 nucleotides, about 400 nucleotides, about 300 nucleotides, about 200 nucleotides, about 100 nucleotides, about 80 nucleotides, about 70 nucleotides, about 60 nucleotides, about 50 nucleotides downstream of genomic site GRCh38/hg38: chr17 749814. In some cases. the targeted region of the pre-mRNA is at least about 1500 nucleotides, about 1000 nucleotides, about 800 nucleotides, about 700 nucleotides, about 600 nucleotides, about 500 nucleotides, about 400 nucleotides, about 300 nucleotides, about 200 nucleotides, about 100 nucleotides, about 80 nucleotides, about 70 nucleotides, about 60 nucleotides, about 50 nucleotides downstream of genomic site GRCh38/hg38: chr17 749814. In some cases, the targeted region of the pre-mRNA is within a sequence SEQ ID NO: 198. In some cases, the targeted region of the pre-mRNA is within a sequence between a pair of genomic sites GRCh38/hg38: chr17 749909, and GRCh38/hg38: chr17 749814. In some cases, the therapeutic agent is an antisense oligomer complementary to a sequence with at least about 80%, 85%, 90%, 95%, 96%, 97%, 98%, 99% or 100% sequence identity to SEQ ID NO:198. In some cases, the therapeutic agent is an antisense oligomer complementary to a sequence with 100% sequence identity to SEQ ID NO:198. In some cases, the therapeutic agent is an antisense oligomer that has a sequence with at least about 80%, 85%, 90%, 95%, 96%, 97%, 98%, 99% or 100% sequence identity to a sequence selected from the group consisting of SEQ ID NOs: 3107-3164. In some cases, the therapeutic agent is an antisense oligomer that has a sequence selected from the group consisting of SEQ ID NOs: 3107-3164. In some cases, the target peptide sequence is a portion of GEMIN4 protein, and the method treats a disease or the condition that comprises Intellectual Disability; Alcoholic Intoxication, Chronic; or Schizophrenia.

[0175] GGA3

[0176] In some cases, the target peptide sequence is a portion of GGA3 protein. In some cases, the therapeutic agent increases level of a first processed mRNA encoding a protein having a sequence SEQ ID NO: 8165, and decreases level of a second processed mRNA encoding a protein having a sequence SEQ ID NO: 401. In some cases, the targeted region of the pre-mRNA is at most about 1500 nucleotides, about 1000 nucleotides, about 800 nucleotides, about 700 nucleotides, about 600 nucleotides, about 500 nucleotides, about 400 nucleotides, about 300 nucleotides, about 200 nucleotides, about 100 nucleotides, about 80 nucleotides, about 70 nucleotides, about 60 nucleotides, about 50 nucleotides upstream of SEQ ID NO: 199. In some cases, the targeted region of the pre-mRNA is at least about 1500 nucleotides, about 1000 nucleotides, about 800 nucleotides, about 700 nucleotides, about 600 nucleotides, about 500 nucleotides, about 400 nucleotides, about 300 nucleotides, about 200 nucleotides, about 100 nucleotides, about 80 nucleotides, about 70 nucleotides, about 60 nucleotides, about 50 nucleotides upstream of SEQ ID NO: 199. In some cases, the targeted region of the pre-mRNA is at most about 1500 nucleotides, about 1000 nucleotides, about 800 nucleotides, about 700 nucleotides, about 600 nucleotides, about 500 nucleotides, about 400 nucleotides, about 300 nucleotides, about 200 nucleotides, about 100 nucleotides, about 80 nucleotides, about 70 nucleotides, about 60 nucleotides, about 50 nucleotides upstream of genomic site GRCh38/hg38: chr17 75243570. In some cases, the targeted region of the pre-mRNA is at least about 1500 nucleotides, about 1000 nucleotides, about 800 nucleotides, about 700 nucleotides, about 600 nucleotides, about 500 nucleotides, about 400 nucleotides, about 300 nucleotides, about 200 nucleotides, about 100 nucleotides, about 80 nucleotides, about 70 nucleotides, about 60 nucleotides, about 50 nucleotides upstream of genomic site GRCh38/hg38: chr17 75243570. In some cases, the targeted region of the pre-mRNA is at most about 1500 nucleotides, about 1000 nucleotides, about 800 nucleotides, about 700 nucleotides, about 600 nucleotides, about 500 nucleotides, about 400 nucleotides, about 300 nucleotides, about 200 nucleotides, about 100 nucleotides, about 80 nucleotides, about 70 nucleotides, about 60 nucleotides, about 50 nucleotides downstream of SEQ ID NO: 199. In some cases, the targeted region of the pre-mRNA is at least about 1500 nucleotides, about 1000 nucleotides, about 800 nucleotides, about 700 nucleotides, about 600 nucleotides, about 500 nucleotides, about 400 nucleotides, about 300 nucleotides, about 200 nucleotides, about 100 nucleotides, about 80 nucleotides, about 70 nucleotides, about 60 nucleotides, about 50 nucleotides downstream of SEQ ID NO: 199. In some cases, the targeted region of the pre-mRNA is at most about 1500 nucleotides, about 1000 nucleotides, about 800 nucleotides, about 700 nucleotides, about 600 nucleotides, about 500 nucleotides, about 400 nucleotides, about 300 nucleotides, about 200 nucleotides, about 100 nucleotides, about 80 nucleotides, about 70 nucleotides, about 60 nucleotides, about 50 nucleotides downstream of genomic site GRCh38/hg38: chr17 75243447. In some cases. the targeted region of the pre-mRNA is at least about 1500 nucleotides, about 1000 nucleotides, about 800 nucleotides, about 700 nucleotides, about 600 nucleotides, about 500 nucleotides, about 400 nucleotides, about 300 nucleotides, about 200 nucleotides, about 100 nucleotides, about 80 nucleotides, about 70 nucleotides, about 60 nucleotides, about 50 nucleotides downstream of genomic site GRCh38/hg38: chr17 75243447. In some cases, the targeted region of the pre-mRNA is within a sequence SEQ ID NO: 199. In some cases, the targeted region of the pre-mRNA is within a sequence between a pair of genomic sites GRCh38/hg38: chr17 75243570, and GRCh38/hg38: chr17 75243447. In some cases, the therapeutic agent is an antisense oligomer complementary to a sequence with at least about 80%, 85%, 90%, 95%, 96%, 97%, 98%, 99% or 100% sequence identity to SEQ ID NO:199. In some cases, the therapeutic agent is an antisense oligomer complementary to a sequence with 100% sequence identity to SEQ ID NO:199. In some cases, the therapeutic agent is an antisense oligomer that has a sequence with at least about 80%, 85%, 90%, 95%, 96%, 97%, 98%, 99% or 100% sequence identity to a sequence selected from the group consisting of SEQ ID NOs: 3165-3228. In some cases, the therapeutic agent is an antisense oligomer that has a sequence selected from the group consisting of SEQ ID NOs: 3165-3228. In some cases, the target peptide sequence is a portion of GGA3 protein, and the method treats a disease or the condition that comprises Malignant neoplasm of breast.

[0177] GOSR2

[0178] In some cases, the target peptide sequence is a portion of GOSR2 protein. In some cases, the therapeutic agent increases level of a first processed mRNA encoding a protein having a sequence SEQ ID NO: 8166, and decreases level of a second processed mRNA encoding a protein having a sequence SEQ ID NO: 402. In some cases, the targeted region of the pre-mRNA is at most about 1500 nucleotides, about 1000 nucleotides, about 800 nucleotides, about 700 nucleotides, about 600 nucleotides, about 500 nucleotides, about 400 nucleotides, about 300 nucleotides, about 200 nucleotides, about 100 nucleotides, about 80 nucleotides, about 70 nucleotides, about 60 nucleotides, about 50 nucleotides upstream of SEQ ID NO: 200. In some cases, the targeted region of the pre-mRNA is at least about 1500 nucleotides, about 1000 nucleotides, about 800 nucleotides, about 700 nucleotides, about 600 nucleotides, about 500 nucleotides, about 400 nucleotides, about 300 nucleotides, about 200 nucleotides, about 100 nucleotides, about 80 nucleotides, about 70 nucleotides, about 60 nucleotides, about 50 nucleotides upstream of SEQ ID NO: 200. In some cases, the targeted region of the pre-mRNA is at most about 1500 nucleotides, about 1000 nucleotides, about 800 nucleotides, about 700 nucleotides, about 600 nucleotides, about 500 nucleotides, about 400 nucleotides, about 300 nucleotides, about 200 nucleotides, about 100 nucleotides, about 80 nucleotides, about 70 nucleotides, about 60 nucleotides, about 50 nucleotides upstream of genomic site GRCh38/hg38: chr17 46924261. In some cases, the targeted region of the pre-mRNA is at least about 1500 nucleotides, about 1000 nucleotides, about 800 nucleotides, about 700 nucleotides, about 600 nucleotides, about 500 nucleotides, about 400 nucleotides, about 300 nucleotides, about 200 nucleotides, about 100 nucleotides, about 80 nucleotides, about 70 nucleotides, about 60 nucleotides, about 50 nucleotides upstream of genomic site GRCh38/hg38: chr17 46924261. In some cases, the targeted region of the pre-mRNA is at most about 1500 nucleotides, about 1000 nucleotides, about 800 nucleotides, about 700 nucleotides, about 600 nucleotides, about 500 nucleotides, about 400 nucleotides, about 300 nucleotides, about 200 nucleotides, about 100 nucleotides, about 80 nucleotides, about 70 nucleotides, about 60 nucleotides, about 50 nucleotides downstream of SEQ ID NO: 200. In some cases, the targeted region of the pre-mRNA is at least about 1500 nucleotides, about 1000 nucleotides, about 800 nucleotides, about 700 nucleotides, about 600 nucleotides, about 500 nucleotides, about 400 nucleotides, about 300 nucleotides, about 200 nucleotides, about 100 nucleotides, about 80 nucleotides, about 70 nucleotides, about 60 nucleotides, about 50 nucleotides downstream of SEQ ID NO: 200. In some cases, the targeted region of the pre-mRNA is at most about 1500 nucleotides, about 1000 nucleotides, about 800 nucleotides, about 700 nucleotides, about 600 nucleotides, about 500 nucleotides, about 400 nucleotides, about 300 nucleotides, about 200 nucleotides, about 100 nucleotides, about 80 nucleotides, about 70 nucleotides, about 60 nucleotides, about 50 nucleotides downstream of genomic site GRCh38/hg38: chr17 46924468. In some cases. the targeted region of the pre-mRNA is at least about 1500 nucleotides, about 1000 nucleotides, about 800 nucleotides, about 700 nucleotides, about 600 nucleotides, about 500 nucleotides, about 400 nucleotides, about 300 nucleotides, about 200 nucleotides, about 100 nucleotides, about 80 nucleotides, about 70 nucleotides, about 60 nucleotides, about 50 nucleotides downstream of genomic site GRCh38/hg38: chr17 46924468. In some cases, the targeted region of the pre-mRNA is within a sequence SEQ ID NO: 200. In some cases, the targeted region of the pre-mRNA is within a sequence between a pair of genomic sites GRCh38/hg38: chr17 46924261, and GRCh38/hg38: chr17 46924468. In some cases, the therapeutic agent is an antisense oligomer complementary to a sequence with at least about 80%, 85%, 90%, 95%, 96%, 97%, 98%, 99% or 100% sequence identity to SEQ ID NO:200. In some cases, the therapeutic agent is an antisense oligomer complementary to a sequence with 100% sequence identity to SEQ ID NO:200. In some cases, the therapeutic agent is an antisense oligomer that has a sequence with at least about 80%, 85%, 90%, 95%, 96%, 97%, 98%, 99% or 100% sequence identity to a sequence selected from the group consisting of SEQ ID NOs: 3229-3309. In some cases, the therapeutic agent is an antisense oligomer that has a sequence selected from the group consisting of SEQ ID NOs: 3229-3309. In some cases, the target peptide sequence is a portion of GOSR2 protein, and the method treats a disease or the condition that comprises Ataxias, Hereditary; Intellectual Disability; Epilepsy, Progressive Myoclonic, 6; or Epileptic encephalopathy.

[0179] GPM6A

[0180] In some cases, the target peptide sequence is a portion of GPM6A protein. In some cases, the therapeutic agent increases level of a first processed mRNA encoding a protein having a sequence SEQ ID NO: 8167, and decreases level of a second processed mRNA encoding a protein having a sequence SEQ ID NO: 403. In some cases, the targeted region of the pre-mRNA is at most about 1500 nucleotides, about 1000 nucleotides, about 800 nucleotides, about 700 nucleotides, about 600 nucleotides, about 500 nucleotides, about 400 nucleotides, about 300 nucleotides, about 200 nucleotides, about 100 nucleotides, about 80 nucleotides, about 70 nucleotides, about 60 nucleotides, about 50 nucleotides upstream of SEQ ID NO: 201. In some cases, the targeted region of the pre-mRNA is at least about 1500 nucleotides, about 1000 nucleotides, about 800 nucleotides, about 700 nucleotides, about 600 nucleotides, about 500 nucleotides, about 400 nucleotides, about 300 nucleotides, about 200 nucleotides, about 100 nucleotides, about 80 nucleotides, about 70 nucleotides, about 60 nucleotides, about 50 nucleotides upstream of SEQ ID NO: 201. In some cases, the targeted region of the pre-mRNA is at most about 1500 nucleotides, about 1000 nucleotides, about 800 nucleotides, about 700 nucleotides, about 600 nucleotides, about 500 nucleotides, about 400 nucleotides, about 300 nucleotides, about 200 nucleotides, about 100 nucleotides, about 80 nucleotides, about 70 nucleotides, about 60 nucleotides, about 50 nucleotides upstream of genomic site GRCh38/hg38: chr4 175812249. In some cases, the targeted region of the pre-mRNA is at least about 1500 nucleotides, about 1000 nucleotides, about 800 nucleotides, about 700 nucleotides, about 600 nucleotides, about 500 nucleotides, about 400 nucleotides, about 300 nucleotides, about 200 nucleotides, about 100 nucleotides, about 80 nucleotides, about 70 nucleotides, about 60 nucleotides, about 50 nucleotides upstream of genomic site GRCh38/hg38: chr4 175812249. In some cases, the targeted region of the pre-mRNA is at most about 1500 nucleotides, about 1000 nucleotides, about 800 nucleotides, about 700 nucleotides, about 600 nucleotides, about 500 nucleotides, about 400 nucleotides, about 300 nucleotides, about 200 nucleotides, about 100 nucleotides, about 80 nucleotides, about 70 nucleotides, about 60 nucleotides, about 50 nucleotides downstream of SEQ ID NO: 201. In some cases, the targeted region of the pre-mRNA is at least about 1500 nucleotides, about 1000 nucleotides, about 800 nucleotides, about 700 nucleotides, about 600 nucleotides, about 500 nucleotides, about 400 nucleotides, about 300 nucleotides, about 200 nucleotides, about 100 nucleotides, about 80 nucleotides, about 70 nucleotides, about 60 nucleotides, about 50 nucleotides downstream of SEQ ID NO: 201. In some cases, the targeted region of the pre-mRNA is at most about 1500 nucleotides, about 1000 nucleotides, about 800 nucleotides, about 700 nucleotides, about 600 nucleotides, about 500 nucleotides, about 400 nucleotides, about 300 nucleotides, about 200 nucleotides, about 100 nucleotides, about 80 nucleotides, about 70 nucleotides, about 60 nucleotides, about 50 nucleotides downstream of genomic site GRCh38/hg38: chr4 175812191. In some cases. the targeted region of the pre-mRNA is at least about 1500 nucleotides, about 1000 nucleotides, about 800 nucleotides, about 700 nucleotides, about 600 nucleotides, about 500 nucleotides, about 400 nucleotides, about 300 nucleotides, about 200 nucleotides, about 100 nucleotides, about 80 nucleotides, about 70 nucleotides, about 60 nucleotides, about 50 nucleotides downstream of genomic site GRCh38/hg38: chr4 175812191. In some cases, the targeted region of the pre-mRNA is within a sequence SEQ ID NO: 201. In some cases, the targeted region of the pre-mRNA is within a sequence between a pair of genomic sites GRCh38/hg38: chr4 175812249, and GRCh38/hg38: chr4 175812191. In some cases, the therapeutic agent is an antisense oligomer complementary to a sequence with at least about 80%, 85%, 90%, 95%, 96%, 97%, 98%, 99% or 100% sequence identity to SEQ ID NO:201. In some cases, the therapeutic agent is an antisense oligomer complementary to a sequence with 100% sequence identity to SEQ ID NO:201. In some cases, the therapeutic agent is an antisense oligomer that has a sequence with at least about 80%, 85%, 90%, 95%, 96%, 97%, 98%, 99% or 100% sequence identity to a sequence selected from the group consisting of SEQ ID NOs: 3310-3360. In some cases, the therapeutic agent is an antisense oligomer that has a sequence selected from the group consisting of SEQ ID NOs: 3310-3360. In some cases, the target peptide sequence is a portion of GPM6A protein, and the method treats a disease or the condition that comprises Schizophrenia.

[0181] GRB10

[0182] In some cases, the target peptide sequence is a portion of GRB10 protein. In some cases, the therapeutic agent increases level of a first processed mRNA encoding a protein having a sequence SEQ ID NO: 8168, and decreases level of a second processed mRNA encoding a protein having a sequence SEQ ID NO: 404. In some cases, the targeted region of the pre-mRNA is at most about 1500 nucleotides, about 1000 nucleotides, about 800 nucleotides, about 700 nucleotides, about 600 nucleotides, about 500 nucleotides, about 400 nucleotides, about 300 nucleotides, about 200 nucleotides, about 100 nucleotides, about 80 nucleotides, about 70 nucleotides, about 60 nucleotides, about 50 nucleotides upstream of SEQ ID NO: 202. In some cases, the targeted region of the pre-mRNA is at least about 1500 nucleotides, about 1000 nucleotides, about 800 nucleotides, about 700 nucleotides, about 600 nucleotides, about 500 nucleotides, about 400 nucleotides, about 300 nucleotides, about 200 nucleotides, about 100 nucleotides, about 80 nucleotides, about 70 nucleotides, about 60 nucleotides, about 50 nucleotides upstream of SEQ ID NO: 202. In some cases, the targeted region of the pre-mRNA is at most about 1500 nucleotides, about 1000 nucleotides, about 800 nucleotides, about 700 nucleotides, about 600 nucleotides, about 500 nucleotides, about 400 nucleotides, about 300 nucleotides, about 200 nucleotides, about 100 nucleotides, about 80 nucleotides, about 70 nucleotides, about 60 nucleotides, about 50 nucleotides upstream of genomic site GRCh38/hg38: chr7 50710990. In some cases, the targeted region of the pre-mRNA is at least about 1500 nucleotides, about 1000 nucleotides, about 800 nucleotides, about 700 nucleotides, about 600 nucleotides, about 500 nucleotides, about 400 nucleotides, about 300 nucleotides, about 200 nucleotides, about 100 nucleotides, about 80 nucleotides, about 70 nucleotides, about 60 nucleotides, about 50 nucleotides upstream of genomic site GRCh38/hg38: chr7 50710990. In some cases, the targeted region of the pre-mRNA is at most about 1500 nucleotides, about 1000 nucleotides, about 800 nucleotides, about 700 nucleotides, about 600 nucleotides, about 500 nucleotides, about 400 nucleotides, about 300 nucleotides, about 200 nucleotides, about 100 nucleotides, about 80 nucleotides, about 70 nucleotides, about 60 nucleotides, about 50 nucleotides downstream of SEQ ID NO: 202. In some cases, the targeted region of the pre-mRNA is at least about 1500 nucleotides, about 1000 nucleotides, about 800 nucleotides, about 700 nucleotides, about 600 nucleotides, about 500 nucleotides, about 400 nucleotides, about 300 nucleotides, about 200 nucleotides, about 100 nucleotides, about 80 nucleotides, about 70 nucleotides, about 60 nucleotides, about 50 nucleotides downstream of SEQ ID NO: 202. In some cases, the targeted region of the pre-mRNA is at most about 1500 nucleotides, about 1000 nucleotides, about 800 nucleotides, about 700 nucleotides, about 600 nucleotides, about 500 nucleotides, about 400 nucleotides, about 300 nucleotides, about 200 nucleotides, about 100 nucleotides, about 80 nucleotides, about 70 nucleotides, about 60 nucleotides, about 50 nucleotides downstream of genomic site GRCh38/hg38: chr7 50710875. In some cases. the targeted region of the pre-mRNA is at least about 1500 nucleotides, about 1000 nucleotides, about 800 nucleotides, about 700 nucleotides, about 600 nucleotides, about 500 nucleotides, about 400 nucleotides, about 300 nucleotides, about 200 nucleotides, about 100 nucleotides, about 80 nucleotides, about 70 nucleotides, about 60 nucleotides, about 50 nucleotides downstream of genomic site GRCh38/hg38: chr7 50710875. In some cases, the targeted region of the pre-mRNA is within a sequence SEQ ID NO: 202. In some cases, the targeted region of the pre-mRNA is within a sequence between a pair of genomic sites GRCh38/hg38: chr7 50710990, and GRCh38/hg38: chr7 50710875. In some cases, the therapeutic agent is an antisense oligomer complementary to a sequence with at least about 80%, 85%, 90%, 95%, 96%, 97%, 98%, 99% or 100% sequence identity to SEQ ID NO:202. In some cases, the therapeutic agent is an antisense oligomer complementary to a sequence with 100% sequence identity to SEQ ID NO:202. In some cases, the therapeutic agent is an antisense oligomer that has a sequence with at least about 80%, 85%, 90%, 95%, 96%, 97%, 98%, 99% or 100% sequence identity to a sequence selected from the group consisting of SEQ ID NOs: 3361-3422. In some cases, the therapeutic agent is an antisense oligomer that has a sequence selected from the group consisting of SEQ ID NOs: 3361-3422. In some cases, the target peptide sequence is a portion of GRB10 protein, and the method treats a disease or the condition that comprises Schizophrenia.

[0183] GSN

[0184] In some cases, the target peptide sequence is a portion of GSN protein. In some cases, the therapeutic agent increases level of a first processed mRNA encoding a protein having a sequence SEQ ID NO: 8169, and decreases level of a second processed mRNA encoding a protein having a sequence SEQ ID NO: 405. In some cases, the targeted region of the pre-mRNA is at most about 1500 nucleotides, about 1000 nucleotides, about 800 nucleotides, about 700 nucleotides, about 600 nucleotides, about 500 nucleotides, about 400 nucleotides, about 300 nucleotides, about 200 nucleotides, about 100 nucleotides, about 80 nucleotides, about 70 nucleotides, about 60 nucleotides, about 50 nucleotides upstream of SEQ ID NO: 203. In some cases, the targeted region of the pre-mRNA is at least about 1500 nucleotides, about 1000 nucleotides, about 800 nucleotides, about 700 nucleotides, about 600 nucleotides, about 500 nucleotides, about 400 nucleotides, about 300 nucleotides, about 200 nucleotides, about 100 nucleotides, about 80 nucleotides, about 70 nucleotides, about 60 nucleotides, about 50 nucleotides upstream of SEQ ID NO: 203. In some cases, the targeted region of the pre-mRNA is at most about 1500 nucleotides, about 1000 nucleotides, about 800 nucleotides, about 700 nucleotides, about 600 nucleotides, about 500 nucleotides, about 400 nucleotides, about 300 nucleotides, about 200 nucleotides, about 100 nucleotides, about 80 nucleotides, about 70 nucleotides, about 60 nucleotides, about 50 nucleotides upstream of genomic site GRCh38/hg38: chr9 121300056. In some cases, the targeted region of the pre-mRNA is at least about 1500 nucleotides, about 1000 nucleotides, about 800 nucleotides, about 700 nucleotides, about 600 nucleotides, about 500 nucleotides, about 400 nucleotides, about 300 nucleotides, about 200 nucleotides, about 100 nucleotides, about 80 nucleotides, about 70 nucleotides, about 60 nucleotides, about 50 nucleotides upstream of genomic site GRCh38/hg38: chr9 121300056. In some cases, the targeted region of the pre-mRNA is at most about 1500 nucleotides, about 1000 nucleotides, about 800 nucleotides, about 700 nucleotides, about 600 nucleotides, about 500 nucleotides, about 400 nucleotides, about 300 nucleotides, about 200 nucleotides, about 100 nucleotides, about 80 nucleotides, about 70 nucleotides, about 60 nucleotides, about 50 nucleotides downstream of SEQ ID NO: 203. In some cases, the targeted region of the pre-mRNA is at least about 1500 nucleotides, about 1000 nucleotides, about 800 nucleotides, about 700 nucleotides, about 600 nucleotides, about 500 nucleotides, about 400 nucleotides, about 300 nucleotides, about 200 nucleotides, about 100 nucleotides, about 80 nucleotides, about 70 nucleotides, about 60 nucleotides, about 50 nucleotides downstream of SEQ ID NO: 203. In some cases, the targeted region of the pre-mRNA is at most about 1500 nucleotides, about 1000 nucleotides, about 800 nucleotides, about 700 nucleotides, about 600 nucleotides, about 500 nucleotides, about 400 nucleotides, about 300 nucleotides, about 200 nucleotides, about 100 nucleotides, about 80 nucleotides, about 70 nucleotides, about 60 nucleotides, about 50 nucleotides downstream of genomic site GRCh38/hg38: chr9 121300126. In some cases. the targeted region of the pre-mRNA is at least about 1500 nucleotides, about 1000 nucleotides, about 800 nucleotides, about 700 nucleotides, about 600 nucleotides, about 500 nucleotides, about 400 nucleotides, about 300 nucleotides, about 200 nucleotides, about 100 nucleotides, about 80 nucleotides, about 70 nucleotides, about 60 nucleotides, about 50 nucleotides downstream of genomic site GRCh38/hg38: chr9 121300126. In some cases, the targeted region of the pre-mRNA is within a sequence SEQ ID NO: 203. In some cases, the targeted region of the pre-mRNA is within a sequence between a pair of genomic sites GRCh38/hg38: chr9 121300056, and GRCh38/hg38: chr9 121300126. In some cases, the therapeutic agent is an antisense oligomer complementary to a sequence with at least about 80%, 85%, 90%, 95%, 96%, 97%, 98%, 99% or 100% sequence identity to SEQ ID NO:203. In some cases, the therapeutic agent is an antisense oligomer complementary to a sequence with 100% sequence identity to SEQ ID NO:203. In some cases, the therapeutic agent is an antisense oligomer that has a sequence with at least about 80%, 85%, 90%, 95%, 96%, 97%, 98%, 99% or 100% sequence identity to a sequence selected from the group consisting of SEQ ID NOs: 3423-3475. In some cases, the therapeutic agent is an antisense oligomer that has a sequence selected from the group consisting of SEQ ID NOs: 3423-3475. In some cases, the target peptide sequence is a portion of GSN protein, and the method treats a disease or the condition that comprises Lattice corneal dystrophy Type II; Meretoja syndrome; Malignant neoplasm of breast; Periodic Fever Syndrome; Familial Amyloid Polyneuropathy, Type IV; Cerebral Amyloid Angiopathy, Gsn-Related; Abnormality of the cornea; Schizophrenia; or Amyloidosis, Finnish type. In some cases, the method treats a cancer that is associated with GSN protein.

[0185] HDAC8

[0186] In some cases, the target peptide sequence is a portion of HDAC8 protein. In some cases, the therapeutic agent increases level of a first processed mRNA encoding a protein having a sequence SEQ ID NO: 8170, and decreases level of a second processed mRNA encoding a protein having a sequence SEQ ID NO: 406. In some cases, the targeted region of the pre-mRNA is at most about 1500 nucleotides, about 1000 nucleotides, about 800 nucleotides, about 700 nucleotides, about 600 nucleotides, about 500 nucleotides, about 400 nucleotides, about 300 nucleotides, about 200 nucleotides, about 100 nucleotides, about 80 nucleotides, about 70 nucleotides, about 60 nucleotides, about 50 nucleotides upstream of SEQ ID NO: 204. In some cases, the targeted region of the pre-mRNA is at least about 1500 nucleotides, about 1000 nucleotides, about 800 nucleotides, about 700 nucleotides, about 600 nucleotides, about 500 nucleotides, about 400 nucleotides, about 300 nucleotides, about 200 nucleotides, about 100 nucleotides, about 80 nucleotides, about 70 nucleotides, about 60 nucleotides, about 50 nucleotides upstream of SEQ ID NO: 204. In some cases, the targeted region of the pre-mRNA is at most about 1500 nucleotides, about 1000 nucleotides, about 800 nucleotides, about 700 nucleotides, about 600 nucleotides, about 500 nucleotides, about 400 nucleotides, about 300 nucleotides, about 200 nucleotides, about 100 nucleotides, about 80 nucleotides, about 70 nucleotides, about 60 nucleotides, about 50 nucleotides upstream of genomic site GRCh38/hg38: chrX 72572109. In some cases, the targeted region of the pre-mRNA is at least about 1500 nucleotides, about 1000 nucleotides, about 800 nucleotides, about 700 nucleotides, about 600 nucleotides, about 500 nucleotides, about 400 nucleotides, about 300 nucleotides, about 200 nucleotides, about 100 nucleotides, about 80 nucleotides, about 70 nucleotides, about 60 nucleotides, about 50 nucleotides upstream of genomic site GRCh38/hg38: chrX 72572109. In some cases, the targeted region of the pre-mRNA is at most about 1500 nucleotides, about 1000 nucleotides, about 800 nucleotides, about 700 nucleotides, about 600 nucleotides, about 500 nucleotides, about 400 nucleotides, about 300 nucleotides, about 200 nucleotides, about 100 nucleotides, about 80 nucleotides, about 70 nucleotides, about 60 nucleotides, about 50 nucleotides downstream of SEQ ID NO: 204. In some cases, the targeted region of the pre-mRNA is at least about 1500 nucleotides, about 1000 nucleotides, about 800 nucleotides, about 700 nucleotides, about 600 nucleotides, about 500 nucleotides, about 400 nucleotides, about 300 nucleotides, about 200 nucleotides, about 100 nucleotides, about 80 nucleotides, about 70 nucleotides, about 60 nucleotides, about 50 nucleotides downstream of SEQ ID NO: 204. In some cases, the targeted region of the pre-mRNA is at most about 1500 nucleotides, about 1000 nucleotides, about 800 nucleotides, about 700 nucleotides, about 600 nucleotides, about 500 nucleotides, about 400 nucleotides, about 300 nucleotides, about 200 nucleotides, about 100 nucleotides, about 80 nucleotides, about 70 nucleotides, about 60 nucleotides, about 50 nucleotides downstream of genomic site GRCh38/hg38: chrX 72572057. In some cases. the targeted region of the pre-mRNA is at least about 1500 nucleotides, about 1000 nucleotides, about 800 nucleotides, about 700 nucleotides, about 600 nucleotides, about 500 nucleotides, about 400 nucleotides, about 300 nucleotides, about 200 nucleotides, about 100 nucleotides, about 80 nucleotides, about 70 nucleotides, about 60 nucleotides, about 50 nucleotides downstream of genomic site GRCh38/hg38: chrX 72572057. In some cases, the targeted region of the pre-mRNA is within a sequence SEQ ID NO: 204. In some cases, the targeted region of the pre-mRNA is within a sequence between a pair of genomic sites GRCh38/hg38: chrX 72572109, and GRCh38/hg38: chrX 72572057. In some cases, the therapeutic agent is an antisense oligomer complementary to a sequence with at least about 80%, 85%, 90%, 95%, 96%, 97%, 98%, 99% or 100% sequence identity to SEQ ID NO:204. In some cases, the therapeutic agent is an antisense oligomer complementary to a sequence with 100% sequence identity to SEQ ID NO:204. In some cases, the therapeutic agent is an antisense oligomer that has a sequence with at least about 80%, 85%, 90%, 95%, 96%, 97%, 98%, 99% or 100% sequence identity to a sequence selected from the group consisting of SEQ ID NOs: 3476-3525. In some cases, the therapeutic agent is an antisense oligomer that has a sequence selected from the group consisting of SEQ ID NOs: 3476-3525. In some cases, the target peptide sequence is a portion of HDAC8 protein, and the method treats a disease or the condition that comprises Intellectual Disability; Primary microcephaly; CORNELIA DE LANGE SYNDROME 5; Radial club hand; Cornelia De Lange Syndrome; or Wilson-Turner X-linked Mental Retardation Syndrome.

[0187] HIVEP1

[0188] In some cases, the target peptide sequence is a portion of HIVEP1 protein. In some cases, the therapeutic agent increases level of a first processed mRNA encoding a protein having a sequence SEQ ID NO: 8171, and decreases level of a second processed mRNA encoding a protein having a sequence SEQ ID NO: 407. In some cases, the targeted region of the pre-mRNA is at most about 1500 nucleotides, about 1000 nucleotides, about 800 nucleotides, about 700 nucleotides, about 600 nucleotides, about 500 nucleotides, about 400 nucleotides, about 300 nucleotides, about 200 nucleotides, about 100 nucleotides, about 80 nucleotides, about 70 nucleotides, about 60 nucleotides, about 50 nucleotides upstream of SEQ ID NO: 205. In some cases, the targeted region of the pre-mRNA is at least about 1500 nucleotides, about 1000 nucleotides, about 800 nucleotides, about 700 nucleotides, about 600 nucleotides, about 500 nucleotides, about 400 nucleotides, about 300 nucleotides, about 200 nucleotides, about 100 nucleotides, about 80 nucleotides, about 70 nucleotides, about 60 nucleotides, about 50 nucleotides upstream of SEQ ID NO: 205. In some cases, the targeted region of the pre-mRNA is at most about 1500 nucleotides, about 1000 nucleotides, about 800 nucleotides, about 700 nucleotides, about 600 nucleotides, about 500 nucleotides, about 400 nucleotides, about 300 nucleotides, about 200 nucleotides, about 100 nucleotides, about 80 nucleotides, about 70 nucleotides, about 60 nucleotides, about 50 nucleotides upstream of genomic site GRCh38/hg38: chr6 12020248. In some cases, the targeted region of the pre-mRNA is at least about 1500 nucleotides, about 1000 nucleotides, about 800 nucleotides, about 700 nucleotides, about 600 nucleotides, about 500 nucleotides, about 400 nucleotides, about 300 nucleotides, about 200 nucleotides, about 100 nucleotides, about 80 nucleotides, about 70 nucleotides, about 60 nucleotides, about 50 nucleotides upstream of genomic site GRCh38/hg38: chr6 12020248. In some cases, the targeted region of the pre-mRNA is at most about 1500 nucleotides, about 1000 nucleotides, about 800 nucleotides, about 700 nucleotides, about 600 nucleotides, about 500 nucleotides, about 400 nucleotides, about 300 nucleotides, about 200 nucleotides, about 100 nucleotides, about 80 nucleotides, about 70 nucleotides, about 60 nucleotides, about 50 nucleotides downstream of SEQ ID NO: 205. In some cases, the targeted region of the pre-mRNA is at least about 1500 nucleotides, about 1000 nucleotides, about 800 nucleotides, about 700 nucleotides, about 600 nucleotides, about 500 nucleotides, about 400 nucleotides, about 300 nucleotides, about 200 nucleotides, about 100 nucleotides, about 80 nucleotides, about 70 nucleotides, about 60 nucleotides, about 50 nucleotides downstream of SEQ ID NO: 205. In some cases, the targeted region of the pre-mRNA is at most about 1500 nucleotides, about 1000 nucleotides, about 800 nucleotides, about 700 nucleotides, about 600 nucleotides, about 500 nucleotides, about 400 nucleotides, about 300 nucleotides, about 200 nucleotides, about 100 nucleotides, about 80 nucleotides, about 70 nucleotides, about 60 nucleotides, about 50 nucleotides downstream of genomic site GRCh38/hg38: chr6 12020418. In some cases. the targeted region of the pre-mRNA is at least about 1500 nucleotides, about 1000 nucleotides, about 800 nucleotides, about 700 nucleotides, about 600 nucleotides, about 500 nucleotides, about 400 nucleotides, about 300 nucleotides, about 200 nucleotides, about 100 nucleotides, about 80 nucleotides, about 70 nucleotides, about 60 nucleotides, about 50 nucleotides downstream of genomic site GRCh38/hg38: chr6 12020418. In some cases, the targeted region of the pre-mRNA is within a sequence SEQ ID NO: 205. In some cases, the targeted region of the pre-mRNA is within a sequence between a pair of genomic sites GRCh38/hg38: chr6 12020248, and GRCh38/hg38: chr6 12020418. In some cases, the therapeutic agent is an antisense oligomer complementary to a sequence with at least about 80%, 85%, 90%, 95%, 96%, 97%, 98%, 99% or 100% sequence identity to SEQ ID NO:205. In some cases, the therapeutic agent is an antisense oligomer complementary to a sequence with 100% sequence identity to SEQ ID NO:205. In some cases, the therapeutic agent is an antisense oligomer that has a sequence with at least about 80%, 85%, 90%, 95%, 96%, 97%, 98%, 99% or 100% sequence identity to a sequence selected from the group consisting of SEQ ID NOs: 3526-3598. In some cases, the therapeutic agent is an antisense oligomer that has a sequence selected from the group consisting of SEQ ID NOs: 3526-3598. In some cases, the target peptide sequence is a portion of HIVEP1 protein, and the method treats a cancer that is associated with HIVEP1 protein.

[0189] HK1

[0190] In some cases, the target peptide sequence is a portion of HK1 protein. In some cases, the therapeutic agent increases level of a first processed mRNA encoding a protein having a sequence SEQ ID NO: 8172, and decreases level of a second processed mRNA encoding a protein having a sequence SEQ ID NO: 408. In some cases, the targeted region of the pre-mRNA is at most about 1500 nucleotides, about 1000 nucleotides, about 800 nucleotides, about 700 nucleotides, about 600 nucleotides, about 500 nucleotides, about 400 nucleotides, about 300 nucleotides, about 200 nucleotides, about 100 nucleotides, about 80 nucleotides, about 70 nucleotides, about 60 nucleotides, about 50 nucleotides upstream of SEQ ID NO: 206. In some cases, the targeted region of the pre-mRNA is at least about 1500 nucleotides, about 1000 nucleotides, about 800 nucleotides, about 700 nucleotides, about 600 nucleotides, about 500 nucleotides, about 400 nucleotides, about 300 nucleotides, about 200 nucleotides, about 100 nucleotides, about 80 nucleotides, about 70 nucleotides, about 60 nucleotides, about 50 nucleotides upstream of SEQ ID NO: 206. In some cases, the targeted region of the pre-mRNA is at most about 1500 nucleotides, about 1000 nucleotides, about 800 nucleotides, about 700 nucleotides, about 600 nucleotides, about 500 nucleotides, about 400 nucleotides, about 300 nucleotides, about 200 nucleotides, about 100 nucleotides, about 80 nucleotides, about 70 nucleotides, about 60 nucleotides, about 50 nucleotides upstream of genomic site GRCh38/hg38: chr10 69300769. In some cases, the targeted region of the pre-mRNA is at least about 1500 nucleotides, about 1000 nucleotides, about 800 nucleotides, about 700 nucleotides, about 600 nucleotides, about 500 nucleotides, about 400 nucleotides, about 300 nucleotides, about 200 nucleotides, about 100 nucleotides, about 80 nucleotides, about 70 nucleotides, about 60 nucleotides, about 50 nucleotides upstream of genomic site GRCh38/hg38: chr10 69300769. In some cases, the targeted region of the pre-mRNA is at most about 1500 nucleotides, about 1000 nucleotides, about 800 nucleotides, about 700 nucleotides, about 600 nucleotides, about 500 nucleotides, about 400 nucleotides, about 300 nucleotides, about 200 nucleotides, about 100 nucleotides, about 80 nucleotides, about 70 nucleotides, about 60 nucleotides, about 50 nucleotides downstream of SEQ ID NO: 206. In some cases, the targeted region of the pre-mRNA is at least about 1500 nucleotides, about 1000 nucleotides, about 800 nucleotides, about 700 nucleotides, about 600 nucleotides, about 500 nucleotides, about 400 nucleotides, about 300 nucleotides, about 200 nucleotides, about 100 nucleotides, about 80 nucleotides, about 70 nucleotides, about 60 nucleotides, about 50 nucleotides downstream of SEQ ID NO: 206. In some cases, the targeted region of the pre-mRNA is at most about 1500 nucleotides, about 1000 nucleotides, about 800 nucleotides, about 700 nucleotides, about 600 nucleotides, about 500 nucleotides, about 400 nucleotides, about 300 nucleotides, about 200 nucleotides, about 100 nucleotides, about 80 nucleotides, about 70 nucleotides, about 60 nucleotides, about 50 nucleotides downstream of genomic site GRCh38/hg38: chr10 69300861. In some cases. the targeted region of the pre-mRNA is at least about 1500 nucleotides, about 1000 nucleotides, about 800 nucleotides, about 700 nucleotides, about 600 nucleotides, about 500 nucleotides, about 400 nucleotides, about 300 nucleotides, about 200 nucleotides, about 100 nucleotides, about 80 nucleotides, about 70 nucleotides, about 60 nucleotides, about 50 nucleotides downstream of genomic site GRCh38/hg38: chr10 69300861. In some cases, the targeted region of the pre-mRNA is within a sequence SEQ ID NO: 206. In some cases, the targeted region of the pre-mRNA is within a sequence between a pair of genomic sites GRCh38/hg38: chr10 69300769, and GRCh38/hg38: chr10 69300861. In some cases, the therapeutic agent is an antisense oligomer complementary to a sequence with at least about 80%, 85%, 90%, 95%, 96%, 97%, 98%, 99% or 100% sequence identity to SEQ ID NO:206. In some cases, the therapeutic agent is an antisense oligomer complementary to a sequence with 100% sequence identity to SEQ ID NO:206. In some cases, the therapeutic agent increases level of a first processed mRNA encoding a protein having a sequence SEQ ID NO: 8173, and decreases level of a second processed mRNA encoding a protein having a sequence SEQ ID NO: 409. In some cases, the targeted region of the pre-mRNA is at most about 1500 nucleotides, about 1000 nucleotides, about 800 nucleotides, about 700 nucleotides, about 600 nucleotides, about 500 nucleotides, about 400 nucleotides, about 300 nucleotides, about 200 nucleotides, about 100 nucleotides, about 80 nucleotides, about 70 nucleotides, about 60 nucleotides, about 50 nucleotides upstream of SEQ ID NO: 207. In some cases, the targeted region of the pre-mRNA is at least about 1500 nucleotides, about 1000 nucleotides, about 800 nucleotides, about 700 nucleotides, about 600 nucleotides, about 500 nucleotides, about 400 nucleotides, about 300 nucleotides, about 200 nucleotides, about 100 nucleotides, about 80 nucleotides, about 70 nucleotides, about 60 nucleotides, about 50 nucleotides upstream of SEQ ID NO: 207. In some cases, the targeted region of the pre-mRNA is at most about 1500 nucleotides, about 1000 nucleotides, about 800 nucleotides, about 700 nucleotides, about 600 nucleotides, about 500 nucleotides, about 400 nucleotides, about 300 nucleotides, about 200 nucleotides, about 100 nucleotides, about 80 nucleotides, about 70 nucleotides, about 60 nucleotides, about 50 nucleotides upstream of genomic site GRCh38/hg38: chr10 69300769. In some cases, the targeted region of the pre-mRNA is at least about 1500 nucleotides, about 1000 nucleotides, about 800 nucleotides, about 700 nucleotides, about 600 nucleotides, about 500 nucleotides, about 400 nucleotides, about 300 nucleotides, about 200 nucleotides, about 100 nucleotides, about 80 nucleotides, about 70 nucleotides, about 60 nucleotides, about 50 nucleotides upstream of genomic site GRCh38/hg38: chr10 69300769. In some cases, the targeted region of the pre-mRNA is at most about 1500 nucleotides, about 1000 nucleotides, about 800 nucleotides, about 700 nucleotides, about 600 nucleotides, about 500 nucleotides, about 400 nucleotides, about 300 nucleotides, about 200 nucleotides, about 100 nucleotides, about 80 nucleotides, about 70 nucleotides, about 60 nucleotides, about 50 nucleotides downstream of SEQ ID NO: 207. In some cases, the targeted region of the pre-mRNA is at least about 1500 nucleotides, about 1000 nucleotides, about 800 nucleotides, about 700 nucleotides, about 600 nucleotides, about 500 nucleotides, about 400 nucleotides, about 300 nucleotides, about 200 nucleotides, about 100 nucleotides, about 80 nucleotides, about 70 nucleotides, about 60 nucleotides, about 50 nucleotides downstream of SEQ ID NO: 207. In some cases, the targeted region of the pre-mRNA is at most about 1500 nucleotides, about 1000 nucleotides, about 800 nucleotides, about 700 nucleotides, about 600 nucleotides, about 500 nucleotides, about 400 nucleotides, about 300 nucleotides, about 200 nucleotides, about 100 nucleotides, about 80 nucleotides, about 70 nucleotides, about 60 nucleotides, about 50 nucleotides downstream of genomic site GRCh38/hg38: chr10 69300861. In some cases. the targeted region of the pre-mRNA is at least about 1500 nucleotides, about 1000 nucleotides, about 800 nucleotides, about 700 nucleotides, about 600 nucleotides, about 500 nucleotides, about 400 nucleotides, about 300 nucleotides, about 200 nucleotides, about 100 nucleotides, about 80 nucleotides, about 70 nucleotides, about 60 nucleotides, about 50 nucleotides downstream of genomic site GRCh38/hg38: chr10 69300861. In some cases, the targeted region of the pre-mRNA is within a sequence SEQ ID NO: 207. In some cases, the targeted region of the pre-mRNA is within a sequence between a pair of genomic sites GRCh38/hg38: chr10 69300769, and GRCh38/hg38: chr10 69300861. In some cases, the therapeutic agent is an antisense oligomer complementary to a sequence with at least about 80%, 85%, 90%, 95%, 96%, 97%, 98%, 99% or 100% sequence identity to SEQ ID NO:207. In some cases, the therapeutic agent is an antisense oligomer complementary to a sequence with 100% sequence identity to SEQ ID NO:207. In some cases, the therapeutic agent is an antisense oligomer that has a sequence with at least about 80%, 85%, 90%, 95%, 96%, 97%, 98%, 99% or 100% sequence identity to a sequence selected from the group consisting of SEQ ID NOs: 3599-3656. In some cases, the therapeutic agent is an antisense oligomer that has a sequence selected from the group consisting of SEQ ID NOs: 3599-3656. In some cases, the target peptide sequence is a portion of HK1 protein, and the method treats a disease or the condition that comprises Intellectual Disability; Congenital anemia; Retinitis Pigmentosa 79; Charcot-Marie-Tooth Disease; Cytopenia; Hemolytic Anemia, Nonspherocytic, due to Hexokinase Deficiency; Neuropathy, hereditary motor and sensory, Russe type; or Schizophrenia.

[0191] IFNGR1

[0192] In some cases, the target peptide sequence is a portion of IFNGR1 protein. In some cases, the therapeutic agent increases level of a first processed mRNA encoding a protein having a sequence SEQ ID NO: 8174, and decreases level of a second processed mRNA encoding a protein having a sequence SEQ ID NO: 410. In some cases, the targeted region of the pre-mRNA is at most about 1500 nucleotides, about 1000 nucleotides, about 800 nucleotides, about 700 nucleotides, about 600 nucleotides, about 500 nucleotides, about 400 nucleotides, about 300 nucleotides, about 200 nucleotides, about 100 nucleotides, about 80 nucleotides, about 70 nucleotides, about 60 nucleotides, about 50 nucleotides upstream of SEQ ID NO: 208. In some cases, the targeted region of the pre-mRNA is at least about 1500 nucleotides, about 1000 nucleotides, about 800 nucleotides, about 700 nucleotides, about 600 nucleotides, about 500 nucleotides, about 400 nucleotides, about 300 nucleotides, about 200 nucleotides, about 100 nucleotides, about 80 nucleotides, about 70 nucleotides, about 60 nucleotides, about 50 nucleotides upstream of SEQ ID NO: 208. In some cases, the targeted region of the pre-mRNA is at most about 1500 nucleotides, about 1000 nucleotides, about 800 nucleotides, about 700 nucleotides, about 600 nucleotides, about 500 nucleotides, about 400 nucleotides, about 300 nucleotides, about 200 nucleotides, about 100 nucleotides, about 80 nucleotides, about 70 nucleotides, about 60 nucleotides, about 50 nucleotides upstream of genomic site GRCh38/hg38: chr6 137215377. In some cases, the targeted region of the pre-mRNA is at least about 1500 nucleotides, about 1000 nucleotides, about 800 nucleotides, about 700 nucleotides, about 600 nucleotides, about 500 nucleotides, about 400 nucleotides, about 300 nucleotides, about 200 nucleotides, about 100 nucleotides, about 80 nucleotides, about 70 nucleotides, about 60 nucleotides, about 50 nucleotides upstream of genomic site GRCh38/hg38: chr6 137215377. In some cases, the targeted region of the pre-mRNA is at most about 1500 nucleotides, about 1000 nucleotides, about 800 nucleotides, about 700 nucleotides, about 600 nucleotides, about 500 nucleotides, about 400 nucleotides, about 300 nucleotides, about 200 nucleotides, about 100 nucleotides, about 80 nucleotides, about 70 nucleotides, about 60 nucleotides, about 50 nucleotides downstream of SEQ ID NO: 208. In some cases, the targeted region of the pre-mRNA is at least about 1500 nucleotides, about 1000 nucleotides, about 800 nucleotides, about 700 nucleotides, about 600 nucleotides, about 500 nucleotides, about 400 nucleotides, about 300 nucleotides, about 200 nucleotides, about 100 nucleotides, about 80 nucleotides, about 70 nucleotides, about 60 nucleotides, about 50 nucleotides downstream of SEQ ID NO: 208. In some cases, the targeted region of the pre-mRNA is at most about 1500 nucleotides, about 1000 nucleotides, about 800 nucleotides, about 700 nucleotides, about 600 nucleotides, about 500 nucleotides, about 400 nucleotides, about 300 nucleotides, about 200 nucleotides, about 100 nucleotides, about 80 nucleotides, about 70 nucleotides, about 60 nucleotides, about 50 nucleotides downstream of genomic site GRCh38/hg38: chr6 137215267. In some cases. the targeted region of the pre-mRNA is at least about 1500 nucleotides, about 1000 nucleotides, about 800 nucleotides, about 700 nucleotides, about 600 nucleotides, about 500 nucleotides, about 400 nucleotides, about 300 nucleotides, about 200 nucleotides, about 100 nucleotides, about 80 nucleotides, about 70 nucleotides, about 60 nucleotides, about 50 nucleotides downstream of genomic site GRCh38/hg38: chr6 137215267. In some cases, the targeted region of the pre-mRNA is within a sequence SEQ ID NO: 208. In some cases, the targeted region of the pre-mRNA is within a sequence between a pair of genomic sites GRCh38/hg38: chr6 137215377, and GRCh38/hg38: chr6 137215267. In some cases, the therapeutic agent is an antisense oligomer complementary to a sequence with at least about 80%, 85%, 90%, 95%, 96%, 97%, 98%, 99% or 100% sequence identity to SEQ ID NO:208. In some cases, the therapeutic agent is an antisense oligomer complementary to a sequence with 100% sequence identity to SEQ ID NO:208. In some cases, the therapeutic agent is an antisense oligomer that has a sequence with at least about 80%, 85%, 90%, 95%, 96%, 97%, 98%, 99% or 100% sequence identity to a sequence selected from the group consisting of SEQ ID NOs: 3657-3717. In some cases, the therapeutic agent is an antisense oligomer that has a sequence selected from the group consisting of SEQ ID NOs: 3657-3717. In some cases, the target peptide sequence is a portion of IFNGR1 protein, and the method treats a disease or the condition that comprises Interferon gamma, receptor 1, deficiency; Immunodeficiency 27A; Immunodeficiency 27B; H. pylori infection, susceptibility to; Tuberculosis infection, protection against; Immunodeficiency 27A, mycobacteriosis, AR; Immunodeficiency 27B, mycobacteriosis, AD; Hepatitis B virus infection, susceptibility to; or Tuberculosis, susceptibility to.

[0193] IKBKB

[0194] In some cases, the target peptide sequence is a portion of IKBKB protein. In some cases, the therapeutic agent increases level of a first processed mRNA encoding a protein having a sequence SEQ ID NO: 8175, and decreases level of a second processed mRNA encoding a protein having a sequence SEQ ID NO: 411. In some cases, the targeted region of the pre-mRNA is at most about 1500 nucleotides, about 1000 nucleotides, about 800 nucleotides, about 700 nucleotides, about 600 nucleotides, about 500 nucleotides, about 400 nucleotides, about 300 nucleotides, about 200 nucleotides, about 100 nucleotides, about 80 nucleotides, about 70 nucleotides, about 60 nucleotides, about 50 nucleotides upstream of SEQ ID NO: 209. In some cases, the targeted region of the pre-mRNA is at least about 1500 nucleotides, about 1000 nucleotides, about 800 nucleotides, about 700 nucleotides, about 600 nucleotides, about 500 nucleotides, about 400 nucleotides, about 300 nucleotides, about 200 nucleotides, about 100 nucleotides, about 80 nucleotides, about 70 nucleotides, about 60 nucleotides, about 50 nucleotides upstream of SEQ ID NO: 209. In some cases, the targeted region of the pre-mRNA is at most about 1500 nucleotides, about 1000 nucleotides, about 800 nucleotides, about 700 nucleotides, about 600 nucleotides, about 500 nucleotides, about 400 nucleotides, about 300 nucleotides, about 200 nucleotides, about 100 nucleotides, about 80 nucleotides, about 70 nucleotides, about 60 nucleotides, about 50 nucleotides upstream of genomic site GRCh38/hg38: chr8 42272083. In some cases, the targeted region of the pre-mRNA is at least about 1500 nucleotides, about 1000 nucleotides, about 800 nucleotides, about 700 nucleotides, about 600 nucleotides, about 500 nucleotides, about 400 nucleotides, about 300 nucleotides, about 200 nucleotides, about 100 nucleotides, about 80 nucleotides, about 70 nucleotides, about 60 nucleotides, about 50 nucleotides upstream of genomic site GRCh38/hg38: chr8 42272083. In some cases, the targeted region of the pre-mRNA is at most about 1500 nucleotides, about 1000 nucleotides, about 800 nucleotides, about 700 nucleotides, about 600 nucleotides, about 500 nucleotides, about 400 nucleotides, about 300 nucleotides, about 200 nucleotides, about 100 nucleotides, about 80 nucleotides, about 70 nucleotides, about 60 nucleotides, about 50 nucleotides downstream of SEQ ID NO: 209. In some cases, the targeted region of the pre-mRNA is at least about 1500 nucleotides, about 1000 nucleotides, about 800 nucleotides, about 700 nucleotides, about 600 nucleotides, about 500 nucleotides, about 400 nucleotides, about 300 nucleotides, about 200 nucleotides, about 100 nucleotides, about 80 nucleotides, about 70 nucleotides, about 60 nucleotides, about 50 nucleotides downstream of SEQ ID NO: 209. In some cases, the targeted region of the pre-mRNA is at most about 1500 nucleotides, about 1000 nucleotides, about 800 nucleotides, about 700 nucleotides, about 600 nucleotides, about 500 nucleotides, about 400 nucleotides, about 300 nucleotides, about 200 nucleotides, about 100 nucleotides, about 80 nucleotides, about 70 nucleotides, about 60 nucleotides, about 50 nucleotides downstream of genomic site GRCh38/hg38: chr8 42272205. In some cases. the targeted region of the pre-mRNA is at least about 1500 nucleotides, about 1000 nucleotides, about 800 nucleotides, about 700 nucleotides, about 600 nucleotides, about 500 nucleotides, about 400 nucleotides, about 300 nucleotides, about 200 nucleotides, about 100 nucleotides, about 80 nucleotides, about 70 nucleotides, about 60 nucleotides, about 50 nucleotides downstream of genomic site GRCh38/hg38: chr8 42272205. In some cases, the targeted region of the pre-mRNA is within a sequence SEQ ID NO: 209. In some cases, the targeted region of the pre-mRNA is within a sequence between a pair of genomic sites GRCh38/hg38: chr8 42272083, and GRCh38/hg38: chr8 42272205. In some cases, the therapeutic agent is an antisense oligomer complementary to a sequence with at least about 80%, 85%, 90%, 95%, 96%, 97%, 98%, 99% or 100% sequence identity to SEQ ID NO:209. In some cases, the therapeutic agent is an antisense oligomer complementary to a sequence with 100% sequence identity to SEQ ID NO:209. In some cases, the therapeutic agent increases level of a first processed mRNA encoding a protein having a sequence SEQ ID NO: 8176, and decreases level of a second processed mRNA encoding a protein having a sequence SEQ ID NO: 412. In some cases, the targeted region of the pre-mRNA is at most about 1500 nucleotides, about 1000 nucleotides, about 800 nucleotides, about 700 nucleotides, about 600 nucleotides, about 500 nucleotides, about 400 nucleotides, about 300 nucleotides, about 200 nucleotides, about 100 nucleotides, about 80 nucleotides, about 70 nucleotides, about 60 nucleotides, about 50 nucleotides upstream of SEQ ID NO: 210. In some cases, the targeted region of the pre-mRNA is at least about 1500 nucleotides, about 1000 nucleotides, about 800 nucleotides, about 700 nucleotides, about 600 nucleotides, about 500 nucleotides, about 400 nucleotides, about 300 nucleotides, about 200 nucleotides, about 100 nucleotides, about 80 nucleotides, about 70 nucleotides, about 60 nucleotides, about 50 nucleotides upstream of SEQ ID NO: 210. In some cases, the targeted region of the pre-mRNA is at most about 1500 nucleotides, about 1000 nucleotides, about 800 nucleotides, about 700 nucleotides, about 600 nucleotides, about 500 nucleotides, about 400 nucleotides, about 300 nucleotides, about 200 nucleotides, about 100 nucleotides, about 80 nucleotides, about 70 nucleotides, about 60 nucleotides, about 50 nucleotides upstream of genomic site GRCh38/hg38: chr8 42272083. In some cases, the targeted region of the pre-mRNA is at least about 1500 nucleotides, about 1000 nucleotides, about 800 nucleotides, about 700 nucleotides, about 600 nucleotides, about 500 nucleotides, about 400 nucleotides, about 300 nucleotides, about 200 nucleotides, about 100 nucleotides, about 80 nucleotides, about 70 nucleotides, about 60 nucleotides, about 50 nucleotides upstream of genomic site GRCh38/hg38: chr8 42272083. In some cases, the targeted region of the pre-mRNA is at most about 1500 nucleotides, about 1000 nucleotides, about 800 nucleotides, about 700 nucleotides, about 600 nucleotides, about 500 nucleotides, about 400 nucleotides, about 300 nucleotides, about 200 nucleotides, about 100 nucleotides, about 80 nucleotides, about 70 nucleotides, about 60 nucleotides, about 50 nucleotides downstream of SEQ ID NO: 210. In some cases, the targeted region of the pre-mRNA is at least about 1500 nucleotides, about 1000 nucleotides, about 800 nucleotides, about 700 nucleotides, about 600 nucleotides, about 500 nucleotides, about 400 nucleotides, about 300 nucleotides, about 200 nucleotides, about 100 nucleotides, about 80 nucleotides, about 70 nucleotides, about 60 nucleotides, about 50 nucleotides downstream of SEQ ID NO: 210. In some cases, the targeted region of the pre-mRNA is at most about 1500 nucleotides, about 1000 nucleotides, about 800 nucleotides, about 700 nucleotides, about 600 nucleotides, about 500 nucleotides, about 400 nucleotides, about 300 nucleotides, about 200 nucleotides, about 100 nucleotides, about 80 nucleotides, about 70 nucleotides, about 60 nucleotides, about 50 nucleotides downstream of genomic site GRCh38/hg38: chr8 42272205. In some cases. the targeted region of the pre-mRNA is at least about 1500 nucleotides, about 1000 nucleotides, about 800 nucleotides, about 700 nucleotides, about 600 nucleotides, about 500 nucleotides, about 400 nucleotides, about 300 nucleotides, about 200 nucleotides, about 100 nucleotides, about 80 nucleotides, about 70 nucleotides, about 60 nucleotides, about 50 nucleotides downstream of genomic site GRCh38/hg38: chr8 42272205. In some cases, the targeted region of the pre-mRNA is within a sequence SEQ ID NO: 210. In some cases, the targeted region of the pre-mRNA is within a sequence between a pair of genomic sites GRCh38/hg38: chr8 42272083, and GRCh38/hg38: chr8 42272205. In some cases, the therapeutic agent is an antisense oligomer complementary to a sequence with at least about 80%, 85%, 90%, 95%, 96%, 97%, 98%, 99% or 100% sequence identity to SEQ ID NO:210. In some cases, the therapeutic agent is an antisense oligomer complementary to a sequence with 100% sequence identity to SEQ ID NO:210. In some cases, the therapeutic agent increases level of a first processed mRNA encoding a protein having a sequence SEQ ID NO: 8177, and decreases level of a second processed mRNA encoding a protein having a sequence SEQ ID NO: 413. In some cases, the targeted region of the pre-mRNA is at most about 1500 nucleotides, about 1000 nucleotides, about 800 nucleotides, about 700 nucleotides, about 600 nucleotides, about 500 nucleotides, about 400 nucleotides, about 300 nucleotides, about 200 nucleotides, about 100 nucleotides, about 80 nucleotides, about 70 nucleotides, about 60 nucleotides, about 50 nucleotides upstream of SEQ ID NO: 211. In some cases, the targeted region of the pre-mRNA is at least about 1500 nucleotides, about 1000 nucleotides, about 800 nucleotides, about 700 nucleotides, about 600 nucleotides, about 500 nucleotides, about 400 nucleotides, about 300 nucleotides, about 200 nucleotides, about 100 nucleotides, about 80 nucleotides, about 70 nucleotides, about 60 nucleotides, about 50 nucleotides upstream of SEQ ID NO: 211. In some cases, the targeted region of the pre-mRNA is at most about 1500 nucleotides, about 1000 nucleotides, about 800 nucleotides, about 700 nucleotides, about 600 nucleotides, about 500 nucleotides, about 400 nucleotides, about 300 nucleotides, about 200 nucleotides, about 100 nucleotides, about 80 nucleotides, about 70 nucleotides, about 60 nucleotides, about 50 nucleotides upstream of genomic site GRCh38/hg38: chr8 42272083. In some cases, the targeted region of the pre-mRNA is at least about 1500 nucleotides, about 1000 nucleotides, about 800 nucleotides, about 700 nucleotides, about 600 nucleotides, about 500 nucleotides, about 400 nucleotides, about 300 nucleotides, about 200 nucleotides, about 100 nucleotides, about 80 nucleotides, about 70 nucleotides, about 60 nucleotides, about 50 nucleotides upstream of genomic site GRCh38/hg38: chr8 42272083. In some cases, the targeted region of the pre-mRNA is at most about 1500 nucleotides, about 1000 nucleotides, about 800 nucleotides, about 700 nucleotides, about 600 nucleotides, about 500 nucleotides, about 400 nucleotides, about 300 nucleotides, about 200 nucleotides, about 100 nucleotides, about 80 nucleotides, about 70 nucleotides, about 60 nucleotides, about 50 nucleotides downstream of SEQ ID NO: 211. In some cases, the targeted region of the pre-mRNA is at least about 1500 nucleotides, about 1000 nucleotides, about 800 nucleotides, about 700 nucleotides, about 600 nucleotides, about 500 nucleotides, about 400 nucleotides, about 300 nucleotides, about 200 nucleotides, about 100 nucleotides, about 80 nucleotides, about 70 nucleotides, about 60 nucleotides, about 50 nucleotides downstream of SEQ ID NO: 211. In some cases, the targeted region of the pre-mRNA is at most about 1500 nucleotides, about 1000 nucleotides, about 800 nucleotides, about 700 nucleotides, about 600 nucleotides, about 500 nucleotides, about 400 nucleotides, about 300 nucleotides, about 200 nucleotides, about 100 nucleotides, about 80 nucleotides, about 70 nucleotides, about 60 nucleotides, about 50 nucleotides downstream of genomic site GRCh38/hg38: chr8 42272205. In some cases. the targeted region of the pre-mRNA is at least about 1500 nucleotides, about 1000 nucleotides, about 800 nucleotides, about 700 nucleotides, about 600 nucleotides, about 500 nucleotides, about 400 nucleotides, about 300 nucleotides, about 200 nucleotides, about 100 nucleotides, about 80 nucleotides, about 70 nucleotides, about 60 nucleotides, about 50 nucleotides downstream of genomic site GRCh38/hg38: chr8 42272205. In some cases, the targeted region of the pre-mRNA is within a sequence SEQ ID NO: 211. In some cases, the targeted region of the pre-mRNA is within a sequence between a pair of genomic sites GRCh38/hg38: chr8 42272083, and GRCh38/hg38: chr8 42272205. In some cases, the therapeutic agent is an antisense oligomer complementary to a sequence with at least about 80%, 85%, 90%, 95%, 96%, 97%, 98%, 99% or 100% sequence identity to SEQ ID NO:211. In some cases, the therapeutic agent is an antisense oligomer complementary to a sequence with 100% sequence identity to SEQ ID NO:211. In some cases, the therapeutic agent increases level of a first processed mRNA encoding a protein having a sequence SEQ ID NO: 8178, and decreases level of a second processed mRNA encoding a protein having a sequence SEQ ID NO: 414. In some cases, the targeted region of the pre-mRNA is at most about 1500 nucleotides, about 1000 nucleotides, about 800 nucleotides, about 700 nucleotides, about 600 nucleotides, about 500 nucleotides, about 400 nucleotides, about 300 nucleotides, about 200 nucleotides, about 100 nucleotides, about 80 nucleotides, about 70 nucleotides, about 60 nucleotides, about 50 nucleotides upstream of SEQ ID NO: 212. In some cases, the targeted region of the pre-mRNA is at least about 1500 nucleotides, about 1000 nucleotides, about 800 nucleotides, about 700 nucleotides, about 600 nucleotides, about 500 nucleotides, about 400 nucleotides, about 300 nucleotides, about 200 nucleotides, about 100 nucleotides, about 80 nucleotides, about 70 nucleotides, about 60 nucleotides, about 50 nucleotides upstream of SEQ ID NO: 212. In some cases, the targeted region of the pre-mRNA is at most about 1500 nucleotides, about 1000 nucleotides, about 800 nucleotides, about 700 nucleotides, about 600 nucleotides, about 500 nucleotides, about 400 nucleotides, about 300 nucleotides, about 200 nucleotides, about 100 nucleotides, about 80 nucleotides, about 70 nucleotides, about 60 nucleotides, about 50 nucleotides upstream of genomic site GRCh38/hg38: chr8 42272083. In some cases, the targeted region of the pre-mRNA is at least about 1500 nucleotides, about 1000 nucleotides, about 800 nucleotides, about 700 nucleotides, about 600 nucleotides, about 500 nucleotides, about 400 nucleotides, about 300 nucleotides, about 200 nucleotides, about 100 nucleotides, about 80 nucleotides, about 70 nucleotides, about 60 nucleotides, about 50 nucleotides upstream of genomic site GRCh38/hg38: chr8 42272083. In some cases, the targeted region of the pre-mRNA is at most about 1500 nucleotides, about 1000 nucleotides, about 800 nucleotides, about 700 nucleotides, about 600 nucleotides, about 500 nucleotides, about 400 nucleotides, about 300 nucleotides, about 200 nucleotides, about 100 nucleotides, about 80 nucleotides, about 70 nucleotides, about 60 nucleotides, about 50 nucleotides downstream of SEQ ID NO: 212. In some cases, the targeted region of the pre-mRNA is at least about 1500 nucleotides, about 1000 nucleotides, about 800 nucleotides, about 700 nucleotides, about 600 nucleotides, about 500 nucleotides, about 400 nucleotides, about 300 nucleotides, about 200 nucleotides, about 100 nucleotides, about 80 nucleotides, about 70 nucleotides, about 60 nucleotides, about 50 nucleotides downstream of SEQ ID NO: 212. In some cases, the targeted region of the pre-mRNA is at most about 1500 nucleotides, about 1000 nucleotides, about 800 nucleotides, about 700 nucleotides, about 600 nucleotides, about 500 nucleotides, about 400 nucleotides, about 300 nucleotides, about 200 nucleotides, about 100 nucleotides, about 80 nucleotides, about 70 nucleotides, about 60 nucleotides, about 50 nucleotides downstream of genomic site GRCh38/hg38: chr8 42272205. In some cases. the targeted region of the pre-mRNA is at least about 1500 nucleotides, about 1000 nucleotides, about 800 nucleotides, about 700 nucleotides, about 600 nucleotides, about 500 nucleotides, about 400 nucleotides, about 300 nucleotides, about 200 nucleotides, about 100 nucleotides, about 80 nucleotides, about 70 nucleotides, about 60 nucleotides, about 50 nucleotides downstream of genomic site GRCh38/hg38: chr8 42272205. In some cases, the targeted region of the pre-mRNA is within a sequence SEQ ID NO: 212. In some cases, the targeted region of the pre-mRNA is within a sequence between a pair of genomic sites GRCh38/hg38: chr8 42272083, and GRCh38/hg38: chr8 42272205. In some cases, the therapeutic agent is an antisense oligomer complementary to a sequence with at least about 80%, 85%, 90%, 95%, 96%, 97%, 98%, 99% or 100% sequence identity to SEQ ID NO:212. In some cases, the therapeutic agent is an antisense oligomer complementary to a sequence with 100% sequence identity to SEQ ID NO:212. In some cases, the therapeutic agent is an antisense oligomer that has a sequence with at least about 80%, 85%, 90%, 95%, 96%, 97%, 98%, 99% or 100% sequence identity to a sequence selected from the group consisting of SEQ ID NOs: 3718-3781. In some cases, the therapeutic agent is an antisense oligomer that has a sequence selected from the group consisting of SEQ ID NOs: 3718-3781. In some cases, the target peptide sequence is a portion of IKBKB protein, and the method treats a disease or the condition that comprises Malignant neoplasm of breast; Lymphoma, Non-Hodgkin; or Immunodeficiency 18.

[0195] ISCU

[0196] In some cases, the target peptide sequence is a portion of ISCU protein. In some cases, the therapeutic agent increases level of a first processed mRNA encoding a protein having a sequence SEQ ID NO: 8179, and decreases level of a second processed mRNA encoding a protein having a sequence SEQ ID NO: 415. In some cases, the targeted region of the pre-mRNA is at most about 1500 nucleotides, about 1000 nucleotides, about 800 nucleotides, about 700 nucleotides, about 600 nucleotides, about 500 nucleotides, about 400 nucleotides, about 300 nucleotides, about 200 nucleotides, about 100 nucleotides, about 80 nucleotides, about 70 nucleotides, about 60 nucleotides, about 50 nucleotides upstream of SEQ ID NO: 213. In some cases, the targeted region of the pre-mRNA is at least about 1500 nucleotides, about 1000 nucleotides, about 800 nucleotides, about 700 nucleotides, about 600 nucleotides, about 500 nucleotides, about 400 nucleotides, about 300 nucleotides, about 200 nucleotides, about 100 nucleotides, about 80 nucleotides, about 70 nucleotides, about 60 nucleotides, about 50 nucleotides upstream of SEQ ID NO: 213. In some cases, the targeted region of the pre-mRNA is at most about 1500 nucleotides, about 1000 nucleotides, about 800 nucleotides, about 700 nucleotides, about 600 nucleotides, about 500 nucleotides, about 400 nucleotides, about 300 nucleotides, about 200 nucleotides, about 100 nucleotides, about 80 nucleotides, about 70 nucleotides, about 60 nucleotides, about 50 nucleotides upstream of genomic site GRCh38/hg38: chr12 108564060. In some cases, the targeted region of the pre-mRNA is at least about 1500 nucleotides, about 1000 nucleotides, about 800 nucleotides, about 700 nucleotides, about 600 nucleotides, about 500 nucleotides, about 400 nucleotides, about 300 nucleotides, about 200 nucleotides, about 100 nucleotides, about 80 nucleotides, about 70 nucleotides, about 60 nucleotides, about 50 nucleotides upstream of genomic site GRCh38/hg38: chr12 108564060. In some cases, the targeted region of the pre-mRNA is at most about 1500 nucleotides, about 1000 nucleotides, about 800 nucleotides, about 700 nucleotides, about 600 nucleotides, about 500 nucleotides, about 400 nucleotides, about 300 nucleotides, about 200 nucleotides, about 100 nucleotides, about 80 nucleotides, about 70 nucleotides, about 60 nucleotides, about 50 nucleotides downstream of SEQ ID NO: 213. In some cases, the targeted region of the pre-mRNA is at least about 1500 nucleotides, about 1000 nucleotides, about 800 nucleotides, about 700 nucleotides, about 600 nucleotides, about 500 nucleotides, about 400 nucleotides, about 300 nucleotides, about 200 nucleotides, about 100 nucleotides, about 80 nucleotides, about 70 nucleotides, about 60 nucleotides, about 50 nucleotides downstream of SEQ ID NO: 213. In some cases, the targeted region of the pre-mRNA is at most about 1500 nucleotides, about 1000 nucleotides, about 800 nucleotides, about 700 nucleotides, about 600 nucleotides, about 500 nucleotides, about 400 nucleotides, about 300 nucleotides, about 200 nucleotides, about 100 nucleotides, about 80 nucleotides, about 70 nucleotides, about 60 nucleotides, about 50 nucleotides downstream of genomic site GRCh38/hg38: chr12 108564155. In some cases. the targeted region of the pre-mRNA is at least about 1500 nucleotides, about 1000 nucleotides, about 800 nucleotides, about 700 nucleotides, about 600 nucleotides, about 500 nucleotides, about 400 nucleotides, about 300 nucleotides, about 200 nucleotides, about 100 nucleotides, about 80 nucleotides, about 70 nucleotides, about 60 nucleotides, about 50 nucleotides downstream of genomic site GRCh38/hg38: chr12 108564155. In some cases, the targeted region of the pre-mRNA is within a sequence SEQ ID NO: 213. In some cases, the targeted region of the pre-mRNA is within a sequence between a pair of genomic sites GRCh38/hg38: chr12 108564060, and GRCh38/hg38: chr12 108564155. In some cases, the therapeutic agent is an antisense oligomer complementary to a sequence with at least about 80%, 85%, 90%, 95%, 96%, 97%, 98%, 99% or 100% sequence identity to SEQ ID NO:213. In some cases, the therapeutic agent is an antisense oligomer complementary to a sequence with 100% sequence identity to SEQ ID NO:213. In some cases, the therapeutic agent is an antisense oligomer that has a sequence with at least about 80%, 85%, 90%, 95%, 96%, 97%, 98%, 99% or 100% sequence identity to a sequence selected from the group consisting of SEQ ID NOs: 3782-3839. In some cases, the therapeutic agent is an antisense oligomer that has a sequence selected from the group consisting of SEQ ID NOs: 3782-3839. In some cases, the target peptide sequence is a portion of ISCU protein, and the method treats a disease or the condition that comprises Mitochondrial Diseases; Congenital myopathy (disorder); Arthrogryposis; Rhabdomyolysis; Myopathy with Exercise Intolerance, Swedish Type; or Myopathy with lactic acidosis, hereditary.

[0197] KARS

[0198] In some cases, the target peptide sequence is a portion of KARS protein. In some cases, the therapeutic agent increases level of a first processed mRNA encoding a protein having a sequence SEQ ID NO: 8180, and decreases level of a second processed mRNA encoding a protein having a sequence SEQ ID NO: 416. In some cases, the targeted region of the pre-mRNA is at most about 1500 nucleotides, about 1000 nucleotides, about 800 nucleotides, about 700 nucleotides, about 600 nucleotides, about 500 nucleotides, about 400 nucleotides, about 300 nucleotides, about 200 nucleotides, about 100 nucleotides, about 80 nucleotides, about 70 nucleotides, about 60 nucleotides, about 50 nucleotides upstream of SEQ ID NO: 214. In some cases, the targeted region of the pre-mRNA is at least about 1500 nucleotides, about 1000 nucleotides, about 800 nucleotides, about 700 nucleotides, about 600 nucleotides, about 500 nucleotides, about 400 nucleotides, about 300 nucleotides, about 200 nucleotides, about 100 nucleotides, about 80 nucleotides, about 70 nucleotides, about 60 nucleotides, about 50 nucleotides upstream of SEQ ID NO: 214. In some cases, the targeted region of the pre-mRNA is at most about 1500 nucleotides, about 1000 nucleotides, about 800 nucleotides, about 700 nucleotides, about 600 nucleotides, about 500 nucleotides, about 400 nucleotides, about 300 nucleotides, about 200 nucleotides, about 100 nucleotides, about 80 nucleotides, about 70 nucleotides, about 60 nucleotides, about 50 nucleotides upstream of genomic site GRCh38/hg38: chr16 75644462. In some cases, the targeted region of the pre-mRNA is at least about 1500 nucleotides, about 1000 nucleotides, about 800 nucleotides, about 700 nucleotides, about 600 nucleotides, about 500 nucleotides, about 400 nucleotides, about 300 nucleotides, about 200 nucleotides, about 100 nucleotides, about 80 nucleotides, about 70 nucleotides, about 60 nucleotides, about 50 nucleotides upstream of genomic site GRCh38/hg38: chr16 75644462. In some cases, the targeted region of the pre-mRNA is at most about 1500 nucleotides, about 1000 nucleotides, about 800 nucleotides, about 700 nucleotides, about 600 nucleotides, about 500 nucleotides, about 400 nucleotides, about 300 nucleotides, about 200 nucleotides, about 100 nucleotides, about 80 nucleotides, about 70 nucleotides, about 60 nucleotides, about 50 nucleotides downstream of SEQ ID NO: 214. In some cases, the targeted region of the pre-mRNA is at least about 1500 nucleotides, about 1000 nucleotides, about 800 nucleotides, about 700 nucleotides, about 600 nucleotides, about 500 nucleotides, about 400 nucleotides, about 300 nucleotides, about 200 nucleotides, about 100 nucleotides, about 80 nucleotides, about 70 nucleotides, about 60 nucleotides, about 50 nucleotides downstream of SEQ ID NO: 214. In some cases, the targeted region of the pre-mRNA is at most about 1500 nucleotides, about 1000 nucleotides, about 800 nucleotides, about 700 nucleotides, about 600 nucleotides, about 500 nucleotides, about 400 nucleotides, about 300 nucleotides, about 200 nucleotides, about 100 nucleotides, about 80 nucleotides, about 70 nucleotides, about 60 nucleotides, about 50 nucleotides downstream of genomic site GRCh38/hg38: chr16 75644283. In some cases. the targeted region of the pre-mRNA is at least about 1500 nucleotides, about 1000 nucleotides, about 800 nucleotides, about 700 nucleotides, about 600 nucleotides, about 500 nucleotides, about 400 nucleotides, about 300 nucleotides, about 200 nucleotides, about 100 nucleotides, about 80 nucleotides, about 70 nucleotides, about 60 nucleotides, about 50 nucleotides downstream of genomic site GRCh38/hg38: chr16 75644283. In some cases, the targeted region of the pre-mRNA is within a sequence SEQ ID NO: 214. In some cases, the targeted region of the pre-mRNA is within a sequence between a pair of genomic sites GRCh38/hg38: chr16 75644462, and GRCh38/hg38: chr16 75644283. In some cases, the therapeutic agent is an antisense oligomer complementary to a sequence with at least about 80%, 85%, 90%, 95%, 96%, 97%, 98%, 99% or 100% sequence identity to SEQ ID NO:214. In some cases, the therapeutic agent is an antisense oligomer complementary to a sequence with 100% sequence identity to SEQ ID NO:214. In some cases, the therapeutic agent increases level of a first processed mRNA encoding a protein having a sequence SEQ ID NO: 8181, and decreases level of a second processed mRNA encoding a protein having a sequence SEQ ID NO: 417. In some cases, the targeted region of the pre-mRNA is at most about 1500 nucleotides, about 1000 nucleotides, about 800 nucleotides, about 700 nucleotides, about 600 nucleotides, about 500 nucleotides, about 400 nucleotides, about 300 nucleotides, about 200 nucleotides, about 100 nucleotides, about 80 nucleotides, about 70 nucleotides, about 60 nucleotides, about 50 nucleotides upstream of SEQ ID NO: 215. In some cases, the targeted region of the pre-mRNA is at least about 1500 nucleotides, about 1000 nucleotides, about 800 nucleotides, about 700 nucleotides, about 600 nucleotides, about 500 nucleotides, about 400 nucleotides, about 300 nucleotides, about 200 nucleotides, about 100 nucleotides, about 80 nucleotides, about 70 nucleotides, about 60 nucleotides, about 50 nucleotides upstream of SEQ ID NO: 215. In some cases, the targeted region of the pre-mRNA is at most about 1500 nucleotides, about 1000 nucleotides, about 800 nucleotides, about 700 nucleotides, about 600 nucleotides, about 500 nucleotides, about 400 nucleotides, about 300 nucleotides, about 200 nucleotides, about 100 nucleotides, about 80 nucleotides, about 70 nucleotides, about 60 nucleotides, about 50 nucleotides upstream of genomic site GRCh38/hg38: chr16 75644462. In some cases, the targeted region of the pre-mRNA is at least about 1500 nucleotides, about 1000 nucleotides, about 800 nucleotides, about 700 nucleotides, about 600 nucleotides, about 500 nucleotides, about 400 nucleotides, about 300 nucleotides, about 200 nucleotides, about 100 nucleotides, about 80 nucleotides, about 70 nucleotides, about 60 nucleotides, about 50 nucleotides upstream of genomic site GRCh38/hg38: chr16 75644462. In some cases, the targeted region of the pre-mRNA is at most about 1500 nucleotides, about 1000 nucleotides, about 800 nucleotides, about 700 nucleotides, about 600 nucleotides, about 500 nucleotides, about 400 nucleotides, about 300 nucleotides, about 200 nucleotides, about 100 nucleotides, about 80 nucleotides, about 70 nucleotides, about 60 nucleotides, about 50 nucleotides downstream of SEQ ID NO: 215. In some cases, the targeted region of the pre-mRNA is at least about 1500 nucleotides, about 1000 nucleotides, about 800 nucleotides, about 700 nucleotides, about 600 nucleotides, about 500 nucleotides, about 400 nucleotides, about 300 nucleotides, about 200 nucleotides, about 100 nucleotides, about 80 nucleotides, about 70 nucleotides, about 60 nucleotides, about 50 nucleotides downstream of SEQ ID NO: 215. In some cases, the targeted region of the pre-mRNA is at most about 1500 nucleotides, about 1000 nucleotides, about 800 nucleotides, about 700 nucleotides, about 600 nucleotides, about 500 nucleotides, about 400 nucleotides, about 300 nucleotides, about 200 nucleotides, about 100 nucleotides, about 80 nucleotides, about 70 nucleotides, about 60 nucleotides, about 50 nucleotides downstream of genomic site GRCh38/hg38: chr16 75644283. In some cases. the targeted region of the pre-mRNA is at least about 1500 nucleotides, about 1000 nucleotides, about 800 nucleotides, about 700 nucleotides, about 600 nucleotides, about 500 nucleotides, about 400 nucleotides, about 300 nucleotides, about 200 nucleotides, about 100 nucleotides, about 80 nucleotides, about 70 nucleotides, about 60 nucleotides, about 50 nucleotides downstream of genomic site GRCh38/hg38: chr16 75644283. In some cases, the targeted region of the pre-mRNA is within a sequence SEQ ID NO: 215. In some cases, the targeted region of the pre-mRNA is within a sequence between a pair of genomic sites GRCh38/hg38: chr16 75644462, and GRCh38/hg38: chr16 75644283. In some cases, the therapeutic agent is an antisense oligomer complementary to a sequence with at least about 80%, 85%, 90%, 95%, 96%, 97%, 98%, 99% or 100% sequence identity to SEQ ID NO:215. In some cases, the therapeutic agent is an antisense oligomer complementary to a sequence with 100% sequence identity to SEQ ID NO:215. In some cases, the therapeutic agent is an antisense oligomer that has a sequence with at least about 80%, 85%, 90%, 95%, 96%, 97%, 98%, 99% or 100% sequence identity to a sequence selected from the group consisting of SEQ ID NOs: 3840-3914. In some cases, the therapeutic agent is an antisense oligomer that has a sequence selected from the group consisting of SEQ ID NOs: 3840-3914. In some cases, the target peptide sequence is a portion of KARS protein, and the method treats a disease or the condition that comprises Intellectual Disability; Mitochondrial Diseases; Charcot-Marie-Tooth Disease, Recessive Intermediate B; Charcot-Marie-Tooth Disease; or Deafness, autosomal recessive 89.

[0199] KIAA0319

[0200] In some cases, the target peptide sequence is a portion of KIAA0319 protein. In some cases, the therapeutic agent increases level of a first processed mRNA encoding a protein having a sequence SEQ ID NO: 8182, and decreases level of a second processed mRNA encoding a protein having a sequence SEQ ID NO: 418. In some cases, the targeted region of the pre-mRNA is at most about 1500 nucleotides, about 1000 nucleotides, about 800 nucleotides, about 700 nucleotides, about 600 nucleotides, about 500 nucleotides, about 400 nucleotides, about 300 nucleotides, about 200 nucleotides, about 100 nucleotides, about 80 nucleotides, about 70 nucleotides, about 60 nucleotides, about 50 nucleotides upstream of SEQ ID NO: 216. In some cases, the targeted region of the pre-mRNA is at least about 1500 nucleotides, about 1000 nucleotides, about 800 nucleotides, about 700 nucleotides, about 600 nucleotides, about 500 nucleotides, about 400 nucleotides, about 300 nucleotides, about 200 nucleotides, about 100 nucleotides, about 80 nucleotides, about 70 nucleotides, about 60 nucleotides, about 50 nucleotides upstream of SEQ ID NO: 216. In some cases, the targeted region of the pre-mRNA is at most about 1500 nucleotides, about 1000 nucleotides, about 800 nucleotides, about 700 nucleotides, about 600 nucleotides, about 500 nucleotides, about 400 nucleotides, about 300 nucleotides, about 200 nucleotides, about 100 nucleotides, about 80 nucleotides, about 70 nucleotides, about 60 nucleotides, about 50 nucleotides upstream of genomic site GRCh38/hg38: chr6 24600709. In some cases, the targeted region of the pre-mRNA is at least about 1500 nucleotides, about 1000 nucleotides, about 800 nucleotides, about 700 nucleotides, about 600 nucleotides, about 500 nucleotides, about 400 nucleotides, about 300 nucleotides, about 200 nucleotides, about 100 nucleotides, about 80 nucleotides, about 70 nucleotides, about 60 nucleotides, about 50 nucleotides upstream of genomic site GRCh38/hg38: chr6 24600709. In some cases, the targeted region of the pre-mRNA is at most about 1500 nucleotides, about 1000 nucleotides, about 800 nucleotides, about 700 nucleotides, about 600 nucleotides, about 500 nucleotides, about 400 nucleotides, about 300 nucleotides, about 200 nucleotides, about 100 nucleotides, about 80 nucleotides, about 70 nucleotides, about 60 nucleotides, about 50 nucleotides downstream of SEQ ID NO: 216. In some cases, the targeted region of the pre-mRNA is at least about 1500 nucleotides, about 1000 nucleotides, about 800 nucleotides, about 700 nucleotides, about 600 nucleotides, about 500 nucleotides, about 400 nucleotides, about 300 nucleotides, about 200 nucleotides, about 100 nucleotides, about 80 nucleotides, about 70 nucleotides, about 60 nucleotides, about 50 nucleotides downstream of SEQ ID NO: 216. In some cases, the targeted region of the pre-mRNA is at most about 1500 nucleotides, about 1000 nucleotides, about 800 nucleotides, about 700 nucleotides, about 600 nucleotides, about 500 nucleotides, about 400 nucleotides, about 300 nucleotides, about 200 nucleotides, about 100 nucleotides, about 80 nucleotides, about 70 nucleotides, about 60 nucleotides, about 50 nucleotides downstream of genomic site GRCh38/hg38: chr6 24600619. In some cases. the targeted region of the pre-mRNA is at least about 1500 nucleotides, about 1000 nucleotides, about 800 nucleotides, about 700 nucleotides, about 600 nucleotides, about 500 nucleotides, about 400 nucleotides, about 300 nucleotides, about 200 nucleotides, about 100 nucleotides, about 80 nucleotides, about 70 nucleotides, about 60 nucleotides, about 50 nucleotides downstream of genomic site GRCh38/hg38: chr6 24600619. In some cases, the targeted region of the pre-mRNA is within a sequence SEQ ID NO: 216. In some cases, the targeted region of the pre-mRNA is within a sequence between a pair of genomic sites GRCh38/hg38: chr6 24600709, and GRCh38/hg38: chr6 24600619. In some cases, the therapeutic agent is an antisense oligomer complementary to a sequence with at least about 80%, 85%, 90%, 95%, 96%, 97%, 98%, 99% or 100% sequence identity to SEQ ID NO:216. In some cases, the therapeutic agent is an antisense oligomer complementary to a sequence with 100% sequence identity to SEQ ID NO:216. In some cases, the therapeutic agent is an antisense oligomer that has a sequence with at least about 80%, 85%, 90%, 95%, 96%, 97%, 98%, 99% or 100% sequence identity to a sequence selected from the group consisting of SEQ ID NOs: 3915-3971. In some cases, the therapeutic agent is an antisense oligomer that has a sequence selected from the group consisting of SEQ ID NOs: 3915-3971. In some cases, the target peptide sequence is a portion of KIAA0319 protein, and the method treats a disease or the condition that comprises; Dyslexia, susceptibility to, 2.

[0201] KIAA0586

[0202] In some cases, the target peptide sequence is a portion of KIAA0586 protein. In some cases, the therapeutic agent increases level of a first processed mRNA encoding a protein having a sequence SEQ ID NO: 8183, and decreases level of a second processed mRNA encoding a protein having a sequence SEQ ID NO: 419. In some cases, the targeted region of the pre-mRNA is at most about 1500 nucleotides, about 1000 nucleotides, about 800 nucleotides, about 700 nucleotides, about 600 nucleotides, about 500 nucleotides, about 400 nucleotides, about 300 nucleotides, about 200 nucleotides, about 100 nucleotides, about 80 nucleotides, about 70 nucleotides, about 60 nucleotides, about 50 nucleotides upstream of SEQ ID NO: 217. In some cases, the targeted region of the pre-mRNA is at least about 1500 nucleotides, about 1000 nucleotides, about 800 nucleotides, about 700 nucleotides, about 600 nucleotides, about 500 nucleotides, about 400 nucleotides, about 300 nucleotides, about 200 nucleotides, about 100 nucleotides, about 80 nucleotides, about 70 nucleotides, about 60 nucleotides, about 50 nucleotides upstream of SEQ ID NO: 217. In some cases, the targeted region of the pre-mRNA is at most about 1500 nucleotides, about 1000 nucleotides, about 800 nucleotides, about 700 nucleotides, about 600 nucleotides, about 500 nucleotides, about 400 nucleotides, about 300 nucleotides, about 200 nucleotides, about 100 nucleotides, about 80 nucleotides, about 70 nucleotides, about 60 nucleotides, about 50 nucleotides upstream of genomic site GRCh38/hg38: chr14 58429363. In some cases, the targeted region of the pre-mRNA is at least about 1500 nucleotides, about 1000 nucleotides, about 800 nucleotides, about 700 nucleotides, about 600 nucleotides, about 500 nucleotides, about 400 nucleotides, about 300 nucleotides, about 200 nucleotides, about 100 nucleotides, about 80 nucleotides, about 70 nucleotides, about 60 nucleotides, about 50 nucleotides upstream of genomic site GRCh38/hg38: chr14 58429363. In some cases, the targeted region of the pre-mRNA is at most about 1500 nucleotides, about 1000 nucleotides, about 800 nucleotides, about 700 nucleotides, about 600 nucleotides, about 500 nucleotides, about 400 nucleotides, about 300 nucleotides, about 200 nucleotides, about 100 nucleotides, about 80 nucleotides, about 70 nucleotides, about 60 nucleotides, about 50 nucleotides downstream of SEQ ID NO: 217. In some cases, the targeted region of the pre-mRNA is at least about 1500 nucleotides, about 1000 nucleotides, about 800 nucleotides, about 700 nucleotides, about 600 nucleotides, about 500 nucleotides, about 400 nucleotides, about 300 nucleotides, about 200 nucleotides, about 100 nucleotides, about 80 nucleotides, about 70 nucleotides, about 60 nucleotides, about 50 nucleotides downstream of SEQ ID NO: 217. In some cases, the targeted region of the pre-mRNA is at most about 1500 nucleotides, about 1000 nucleotides, about 800 nucleotides, about 700 nucleotides, about 600 nucleotides, about 500 nucleotides, about 400 nucleotides, about 300 nucleotides, about 200 nucleotides, about 100 nucleotides, about 80 nucleotides, about 70 nucleotides, about 60 nucleotides, about 50 nucleotides downstream of genomic site GRCh38/hg38: chr14 58429433. In some cases. the targeted region of the pre-mRNA is at least about 1500 nucleotides, about 1000 nucleotides, about 800 nucleotides, about 700 nucleotides, about 600 nucleotides, about 500 nucleotides, about 400 nucleotides, about 300 nucleotides, about 200 nucleotides, about 100 nucleotides, about 80 nucleotides, about 70 nucleotides, about 60 nucleotides, about 50 nucleotides downstream of genomic site GRCh38/hg38: chr14 58429433. In some cases, the targeted region of the pre-mRNA is within a sequence SEQ ID NO: 217. In some cases, the targeted region of the pre-mRNA is within a sequence between a pair of genomic sites GRCh38/hg38: chr14 58429363, and GRCh38/hg38: chr14 58429433. In some cases, the therapeutic agent is an antisense oligomer complementary to a sequence with at least about 80%, 85%, 90%, 95%, 96%, 97%, 98%, 99% or 100% sequence identity to SEQ ID NO:217. In some cases, the therapeutic agent is an antisense oligomer complementary to a sequence with 100% sequence identity to SEQ ID NO:217. In some cases, the therapeutic agent increases level of a first processed mRNA encoding a protein having a sequence SEQ ID NO: 8184, and decreases level of a second processed mRNA encoding a protein having a sequence SEQ ID NO: 420. In some cases, the targeted region of the pre-mRNA is at most about 1500 nucleotides, about 1000 nucleotides, about 800 nucleotides, about 700 nucleotides, about 600 nucleotides, about 500 nucleotides, about 400 nucleotides, about 300 nucleotides, about 200 nucleotides, about 100 nucleotides, about 80 nucleotides, about 70 nucleotides, about 60 nucleotides, about 50 nucleotides upstream of SEQ ID NO: 218. In some cases, the targeted region of the pre-mRNA is at least about 1500 nucleotides, about 1000 nucleotides, about 800 nucleotides, about 700 nucleotides, about 600 nucleotides, about 500 nucleotides, about 400 nucleotides, about 300 nucleotides, about 200 nucleotides, about 100 nucleotides, about 80 nucleotides, about 70 nucleotides, about 60 nucleotides, about 50 nucleotides upstream of SEQ ID NO: 218. In some cases, the targeted region of the pre-mRNA is at most about 1500 nucleotides, about 1000 nucleotides, about 800 nucleotides, about 700 nucleotides, about 600 nucleotides, about 500 nucleotides, about 400 nucleotides, about 300 nucleotides, about 200 nucleotides, about 100 nucleotides, about 80 nucleotides, about 70 nucleotides, about 60 nucleotides, about 50 nucleotides upstream of genomic site GRCh38/hg38: chr14 58429363. In some cases, the targeted region of the pre-mRNA is at least about 1500 nucleotides, about 1000 nucleotides, about 800 nucleotides, about 700 nucleotides, about 600 nucleotides, about 500 nucleotides, about 400 nucleotides, about 300 nucleotides, about 200 nucleotides, about 100 nucleotides, about 80 nucleotides, about 70 nucleotides, about 60 nucleotides, about 50 nucleotides upstream of genomic site GRCh38/hg38: chr14 58429363. In some cases, the targeted region of the pre-mRNA is at most about 1500 nucleotides, about 1000 nucleotides, about 800 nucleotides, about 700 nucleotides, about 600 nucleotides, about 500 nucleotides, about 400 nucleotides, about 300 nucleotides, about 200 nucleotides, about 100 nucleotides, about 80 nucleotides, about 70 nucleotides, about 60 nucleotides, about 50 nucleotides downstream of SEQ ID NO: 218. In some cases, the targeted region of the pre-mRNA is at least about 1500 nucleotides, about 1000 nucleotides, about 800 nucleotides, about 700 nucleotides, about 600 nucleotides, about 500 nucleotides, about 400 nucleotides, about 300 nucleotides, about 200 nucleotides, about 100 nucleotides, about 80 nucleotides, about 70 nucleotides, about 60 nucleotides, about 50 nucleotides downstream of SEQ ID NO: 218. In some cases, the targeted region of the pre-mRNA is at most about 1500 nucleotides, about 1000 nucleotides, about 800 nucleotides, about 700 nucleotides, about 600 nucleotides, about 500 nucleotides, about 400 nucleotides, about 300 nucleotides, about 200 nucleotides, about 100 nucleotides, about 80 nucleotides, about 70 nucleotides, about 60 nucleotides, about 50 nucleotides downstream of genomic site GRCh38/hg38: chr14 58429433. In some cases. the targeted region of the pre-mRNA is at least about 1500 nucleotides, about 1000 nucleotides, about 800 nucleotides, about 700 nucleotides, about 600 nucleotides, about 500 nucleotides, about 400 nucleotides, about 300 nucleotides, about 200 nucleotides, about 100 nucleotides, about 80 nucleotides, about 70 nucleotides, about 60 nucleotides, about 50 nucleotides downstream of genomic site GRCh38/hg38: chr14 58429433. In some cases, the targeted region of the pre-mRNA is within a sequence SEQ ID NO: 218. In some cases, the targeted region of the pre-mRNA is within a sequence between a pair of genomic sites GRCh38/hg38: chr14 58429363, and GRCh38/hg38: chr14 58429433. In some cases, the therapeutic agent is an antisense oligomer complementary to a sequence with at least about 80%, 85%, 90%, 95%, 96%, 97%, 98%, 99% or 100% sequence identity to SEQ ID NO:218. In some cases, the therapeutic agent is an antisense oligomer complementary to a sequence with 100% sequence identity to SEQ ID NO:218. In some cases, the therapeutic agent is an antisense oligomer that has a sequence with at least about 80%, 85%, 90%, 95%, 96%, 97%, 98%, 99% or 100% sequence identity to a sequence selected from the group consisting of SEQ ID NOs: 3972-4024. In some cases, the therapeutic agent is an antisense oligomer that has a sequence selected from the group consisting of SEQ ID NOs: 3972-4024. In some cases, the target peptide sequence is a portion of KIAA0586 protein, and the method treats a disease or the condition that comprises Intellectual Disability; Joubert Syndrome 23; Polydactyly; Familial aplasia of the vermis; Joubert syndrome with Jeune asphyxiating thoracic dystrophy; Hydrocephalus; Ciliopathies; or Short-rib thoracic dysplasia 14 with polydactyly.

[0203] KIZ

[0204] In some cases, the target peptide sequence is a portion of KIZ protein. In some cases, the therapeutic agent increases level of a first processed mRNA encoding a protein having a sequence SEQ ID NO: 8185, and decreases level of a second processed mRNA encoding a protein having a sequence SEQ ID NO: 421. In some cases, the targeted region of the pre-mRNA is at most about 1500 nucleotides, about 1000 nucleotides, about 800 nucleotides, about 700 nucleotides, about 600 nucleotides, about 500 nucleotides, about 400 nucleotides, about 300 nucleotides, about 200 nucleotides, about 100 nucleotides, about 80 nucleotides, about 70 nucleotides, about 60 nucleotides, about 50 nucleotides upstream of SEQ ID NO: 219. In some cases, the targeted region of the pre-mRNA is at least about 1500 nucleotides, about 1000 nucleotides, about 800 nucleotides, about 700 nucleotides, about 600 nucleotides, about 500 nucleotides, about 400 nucleotides, about 300 nucleotides, about 200 nucleotides, about 100 nucleotides, about 80 nucleotides, about 70 nucleotides, about 60 nucleotides, about 50 nucleotides upstream of SEQ ID NO: 219. In some cases, the targeted region of the pre-mRNA is at most about 1500 nucleotides, about 1000 nucleotides, about 800 nucleotides, about 700 nucleotides, about 600 nucleotides, about 500 nucleotides, about 400 nucleotides, about 300 nucleotides, about 200 nucleotides, about 100 nucleotides, about 80 nucleotides, about 70 nucleotides, about 60 nucleotides, about 50 nucleotides upstream of genomic site GRCh38/hg38: chr20 21132097. In some cases, the targeted region of the pre-mRNA is at least about 1500 nucleotides, about 1000 nucleotides, about 800 nucleotides, about 700 nucleotides, about 600 nucleotides, about 500 nucleotides, about 400 nucleotides, about 300 nucleotides, about 200 nucleotides, about 100 nucleotides, about 80 nucleotides, about 70 nucleotides, about 60 nucleotides, about 50 nucleotides upstream of genomic site GRCh38/hg38: chr20 21132097. In some cases, the targeted region of the pre-mRNA is at most about 1500 nucleotides, about 1000 nucleotides, about 800 nucleotides, about 700 nucleotides, about 600 nucleotides, about 500 nucleotides, about 400 nucleotides, about 300 nucleotides, about 200 nucleotides, about 100 nucleotides, about 80 nucleotides, about 70 nucleotides, about 60 nucleotides, about 50 nucleotides downstream of SEQ ID NO: 219. In some cases, the targeted region of the pre-mRNA is at least about 1500 nucleotides, about 1000 nucleotides, about 800 nucleotides, about 700 nucleotides, about 600 nucleotides, about 500 nucleotides, about 400 nucleotides, about 300 nucleotides, about 200 nucleotides, about 100 nucleotides, about 80 nucleotides, about 70 nucleotides, about 60 nucleotides, about 50 nucleotides downstream of SEQ ID NO: 219. In some cases, the targeted region of the pre-mRNA is at most about 1500 nucleotides, about 1000 nucleotides, about 800 nucleotides, about 700 nucleotides, about 600 nucleotides, about 500 nucleotides, about 400 nucleotides, about 300 nucleotides, about 200 nucleotides, about 100 nucleotides, about 80 nucleotides, about 70 nucleotides, about 60 nucleotides, about 50 nucleotides downstream of genomic site GRCh38/hg38: chr20 21132159. In some cases. the targeted region of the pre-mRNA is at least about 1500 nucleotides, about 1000 nucleotides, about 800 nucleotides, about 700 nucleotides, about 600 nucleotides, about 500 nucleotides, about 400 nucleotides, about 300 nucleotides, about 200 nucleotides, about 100 nucleotides, about 80 nucleotides, about 70 nucleotides, about 60 nucleotides, about 50 nucleotides downstream of genomic site GRCh38/hg38: chr20 21132159. In some cases, the targeted region of the pre-mRNA is within a sequence SEQ ID NO: 219. In some cases, the targeted region of the pre-mRNA is within a sequence between a pair of genomic sites GRCh38/hg38: chr20 21132097, and GRCh38/hg38: chr20 21132159. In some cases, the therapeutic agent is an antisense oligomer complementary to a sequence with at least about 80%, 85%, 90%, 95%, 96%, 97%, 98%, 99% or 100% sequence identity to SEQ ID NO:219. In some cases, the therapeutic agent is an antisense oligomer complementary to a sequence with 100% sequence identity to SEQ ID NO:219. In some cases, the therapeutic agent is an antisense oligomer that has a sequence with at least about 80%, 85%, 90%, 95%, 96%, 97%, 98%, 99% or 100% sequence identity to a sequence selected from the group consisting of SEQ ID NOs: 4025-4076. In some cases, the therapeutic agent is an antisense oligomer that has a sequence selected from the group consisting of SEQ ID NOs: 4025-4076. In some cases, the target peptide sequence is a portion of KIZ protein, and the method treats a disease or the condition that comprises Retinitis Pigmentosa; or Retinitis pigmentosa 69.

[0205] KLK6

[0206] In some cases, the target peptide sequence is a portion of KLK6 protein. In some cases, the therapeutic agent increases level of a first processed mRNA encoding a protein having a sequence SEQ ID NO: 8186, and decreases level of a second processed mRNA encoding a protein having a sequence SEQ ID NO: 422. In some cases, the targeted region of the pre-mRNA is at most about 1500 nucleotides, about 1000 nucleotides, about 800 nucleotides, about 700 nucleotides, about 600 nucleotides, about 500 nucleotides, about 400 nucleotides, about 300 nucleotides, about 200 nucleotides, about 100 nucleotides, about 80 nucleotides, about 70 nucleotides, about 60 nucleotides, about 50 nucleotides upstream of SEQ ID NO: 220. In some cases, the targeted region of the pre-mRNA is at least about 1500 nucleotides, about 1000 nucleotides, about 800 nucleotides, about 700 nucleotides, about 600 nucleotides, about 500 nucleotides, about 400 nucleotides, about 300 nucleotides, about 200 nucleotides, about 100 nucleotides, about 80 nucleotides, about 70 nucleotides, about 60 nucleotides, about 50 nucleotides upstream of SEQ ID NO: 220. In some cases, the targeted region of the pre-mRNA is at most about 1500 nucleotides, about 1000 nucleotides, about 800 nucleotides, about 700 nucleotides, about 600 nucleotides, about 500 nucleotides, about 400 nucleotides, about 300 nucleotides, about 200 nucleotides, about 100 nucleotides, about 80 nucleotides, about 70 nucleotides, about 60 nucleotides, about 50 nucleotides upstream of genomic site GRCh38/hg38: chr19 50963549. In some cases, the targeted region of the pre-mRNA is at least about 1500 nucleotides, about 1000 nucleotides, about 800 nucleotides, about 700 nucleotides, about 600 nucleotides, about 500 nucleotides, about 400 nucleotides, about 300 nucleotides, about 200 nucleotides, about 100 nucleotides, about 80 nucleotides, about 70 nucleotides, about 60 nucleotides, about 50 nucleotides upstream of genomic site GRCh38/hg38: chr19 50963549. In some cases, the targeted region of the pre-mRNA is at most about 1500 nucleotides, about 1000 nucleotides, about 800 nucleotides, about 700 nucleotides, about 600 nucleotides, about 500 nucleotides, about 400 nucleotides, about 300 nucleotides, about 200 nucleotides, about 100 nucleotides, about 80 nucleotides, about 70 nucleotides, about 60 nucleotides, about 50 nucleotides downstream of SEQ ID NO: 220. In some cases, the targeted region of the pre-mRNA is at least about 1500 nucleotides, about 1000 nucleotides, about 800 nucleotides, about 700 nucleotides, about 600 nucleotides, about 500 nucleotides, about 400 nucleotides, about 300 nucleotides, about 200 nucleotides, about 100 nucleotides, about 80 nucleotides, about 70 nucleotides, about 60 nucleotides, about 50 nucleotides downstream of SEQ ID NO: 220. In some cases, the targeted region of the pre-mRNA is at most about 1500 nucleotides, about 1000 nucleotides, about 800 nucleotides, about 700 nucleotides, about 600 nucleotides, about 500 nucleotides, about 400 nucleotides, about 300 nucleotides, about 200 nucleotides, about 100 nucleotides, about 80 nucleotides, about 70 nucleotides, about 60 nucleotides, about 50 nucleotides downstream of genomic site GRCh38/hg38: chr19 50963302. In some cases. the targeted region of the pre-mRNA is at least about 1500 nucleotides, about 1000 nucleotides, about 800 nucleotides, about 700 nucleotides, about 600 nucleotides, about 500 nucleotides, about 400 nucleotides, about 300 nucleotides, about 200 nucleotides, about 100 nucleotides, about 80 nucleotides, about 70 nucleotides, about 60 nucleotides, about 50 nucleotides downstream of genomic site GRCh38/hg38: chr19 50963302. In some cases, the targeted region of the pre-mRNA is within a sequence SEQ ID NO: 220. In some cases, the targeted region of the pre-mRNA is within a sequence between a pair of genomic sites GRCh38/hg38: chr19 50963549, and GRCh38/hg38: chr19 50963302. In some cases, the therapeutic agent is an antisense oligomer complementary to a sequence with at least about 80%, 85%, 90%, 95%, 96%, 97%, 98%, 99% or 100% sequence identity to SEQ ID NO:220. In some cases, the therapeutic agent is an antisense oligomer complementary to a sequence with 100% sequence identity to SEQ ID NO:220. In some cases, the therapeutic agent is an antisense oligomer that has a sequence with at least about 80%, 85%, 90%, 95%, 96%, 97%, 98%, 99% or 100% sequence identity to a sequence selected from the group consisting of SEQ ID NOs: 4077-4165. In some cases, the therapeutic agent is an antisense oligomer that has a sequence selected from the group consisting of SEQ ID NOs: 4077-4165. In some cases, the target peptide sequence is a portion of KLK6 protein, and the method treats a cancer that is associated with KLK6 protein.

[0207] LMNA

[0208] In some cases, the target peptide sequence is a portion of LMNA protein. In some cases, the therapeutic agent increases level of a first processed mRNA encoding a protein having a sequence SEQ ID NO: 8187, and decreases level of a second processed mRNA encoding a protein having a sequence SEQ ID NO: 423. In some cases, the targeted region of the pre-mRNA is at most about 1500 nucleotides, about 1000 nucleotides, about 800 nucleotides, about 700 nucleotides, about 600 nucleotides, about 500 nucleotides, about 400 nucleotides, about 300 nucleotides, about 200 nucleotides, about 100 nucleotides, about 80 nucleotides, about 70 nucleotides, about 60 nucleotides, about 50 nucleotides upstream of SEQ ID NO: 221. In some cases, the targeted region of the pre-mRNA is at least about 1500 nucleotides, about 1000 nucleotides, about 800 nucleotides, about 700 nucleotides, about 600 nucleotides, about 500 nucleotides, about 400 nucleotides, about 300 nucleotides, about 200 nucleotides, about 100 nucleotides, about 80 nucleotides, about 70 nucleotides, about 60 nucleotides, about 50 nucleotides upstream of SEQ ID NO: 221. In some cases, the targeted region of the pre-mRNA is at most about 1500 nucleotides, about 1000 nucleotides, about 800 nucleotides, about 700 nucleotides, about 600 nucleotides, about 500 nucleotides, about 400 nucleotides, about 300 nucleotides, about 200 nucleotides, about 100 nucleotides, about 80 nucleotides, about 70 nucleotides, about 60 nucleotides, about 50 nucleotides upstream of genomic site GRCh38/hg38: chr1 156126736. In some cases, the targeted region of the pre-mRNA is at least about 1500 nucleotides, about 1000 nucleotides, about 800 nucleotides, about 700 nucleotides, about 600 nucleotides, about 500 nucleotides, about 400 nucleotides, about 300 nucleotides, about 200 nucleotides, about 100 nucleotides, about 80 nucleotides, about 70 nucleotides, about 60 nucleotides, about 50 nucleotides upstream of genomic site GRCh38/hg38: chr1 156126736. In some cases, the targeted region of the pre-mRNA is at most about 1500 nucleotides, about 1000 nucleotides, about 800 nucleotides, about 700 nucleotides, about 600 nucleotides, about 500 nucleotides, about 400 nucleotides, about 300 nucleotides, about 200 nucleotides, about 100 nucleotides, about 80 nucleotides, about 70 nucleotides, about 60 nucleotides, about 50 nucleotides downstream of SEQ ID NO: 221. In some cases, the targeted region of the pre-mRNA is at least about 1500 nucleotides, about 1000 nucleotides, about 800 nucleotides, about 700 nucleotides, about 600 nucleotides, about 500 nucleotides, about 400 nucleotides, about 300 nucleotides, about 200 nucleotides, about 100 nucleotides, about 80 nucleotides, about 70 nucleotides, about 60 nucleotides, about 50 nucleotides downstream of SEQ ID NO: 221. In some cases, the targeted region of the pre-mRNA is at most about 1500 nucleotides, about 1000 nucleotides, about 800 nucleotides, about 700 nucleotides, about 600 nucleotides, about 500 nucleotides, about 400 nucleotides, about 300 nucleotides, about 200 nucleotides, about 100 nucleotides, about 80 nucleotides, about 70 nucleotides, about 60 nucleotides, about 50 nucleotides downstream of genomic site GRCh38/hg38: chr1 156126915. In some cases. the targeted region of the pre-mRNA is at least about 1500 nucleotides, about 1000 nucleotides, about 800 nucleotides, about 700 nucleotides, about 600 nucleotides, about 500 nucleotides, about 400 nucleotides, about 300 nucleotides, about 200 nucleotides, about 100 nucleotides, about 80 nucleotides, about 70 nucleotides, about 60 nucleotides, about 50 nucleotides downstream of genomic site GRCh38/hg38: chr1 156126915. In some cases, the targeted region of the pre-mRNA is within a sequence SEQ ID NO: 221. In some cases, the targeted region of the pre-mRNA is within a sequence between a pair of genomic sites GRCh38/hg38: chr1 156126736, and GRCh38/hg38: chr1 156126915. In some cases, the therapeutic agent is an antisense oligomer complementary to a sequence with at least about 80%, 85%, 90%, 95%, 96%, 97%, 98%, 99% or 100% sequence identity to SEQ ID NO:221. In some cases, the therapeutic agent is an antisense oligomer complementary to a sequence with 100% sequence identity to SEQ ID NO:221. In some cases, the therapeutic agent is an antisense oligomer that has a sequence with at least about 80%, 85%, 90%, 95%, 96%, 97%, 98%, 99% or 100% sequence identity to a sequence selected from the group consisting of SEQ ID NOs: 4166-4240. In some cases, the therapeutic agent is an antisense oligomer that has a sequence selected from the group consisting of SEQ ID NOs: 4166-4240. In some cases, the target peptide sequence is a portion of LMNA protein, and the method treats a disease or the condition that comprises Intellectual Disability; Muscular Dystrophy, Limb-Girdle, Type 1B; Hypertrophic Cardiomyopathy; Left ventricular noncompaction; Osteogenesis Imperfecta; Charcot-Marie-Tooth Disease; Cardiomyopathy, Familial Idiopathic; Familial Partial Lipodystrophy, Type 1; Left ventricular noncompaction cardiomyopathy; Mandibuloacral dysostosis; MUSCULAR DYSTROPHY, CONGENITAL, LMNA-RELATED (disorder); Congenital myopathy (disorder); Arthrogryposis; Arrhythmogenic Right Ventricular Dysplasia; Muscular Dystrophies, Limb-Girdle; Malouf syndrome; Najjar syndrome; Charcot-Marie-Tooth disease, Type 2B1; Emery-Dreifuss Muscular Dystrophy 3; Lethal tight skin contracture syndrome (disorder); Familial Partial Lipodystrophy, Type 2; Conduction disorder of the heart; Cardiomyopathy, Dilated; Progeria Syndrome, Childhood-Onset; Atypical Werner syndrome; Congenital muscular dystrophy (disorder); Autosomal Recessive Emery-Dreifuss Muscular Dystrophy; Heart-hand syndrome, Slovenian type; Progeria; Autosomal Dominant Emery-Dreifuss Muscular Dystrophy; Cardiomyopathy, dilated, 1A; Mandibuloacral dysplasia; Muscular dystrophy, limb-girdle, type 1B; Emery-Dreifuss muscular dystrophy 2, AD; Malouf syndrome; Restrictive dermopathy, lethal; Emery-Dreifuss muscular dystrophy 3, AR; Heart-hand syndrome, Slovenian type; Charcot-Marie-Tooth disease, type 2B1; Hutchinson-Gilford progeria; Lipodystrophy, familial partial, type 2; or Muscular dystrophy, congenital.

[0209] LMNTD1

[0210] In some cases, the target peptide sequence is a portion of LMNTD1 protein. In some cases, the therapeutic agent increases level of a first processed mRNA encoding a protein having a sequence SEQ ID NO: 8188, and decreases level of a second processed mRNA encoding a protein having a sequence SEQ ID NO: 424. In some cases, the targeted region of the pre-mRNA is at most about 1500 nucleotides, about 1000 nucleotides, about 800 nucleotides, about 700 nucleotides, about 600 nucleotides, about 500 nucleotides, about 400 nucleotides, about 300 nucleotides, about 200 nucleotides, about 100 nucleotides, about 80 nucleotides, about 70 nucleotides, about 60 nucleotides, about 50 nucleotides upstream of SEQ ID NO: 222. In some cases, the targeted region of the pre-mRNA is at least about 1500 nucleotides, about 1000 nucleotides, about 800 nucleotides, about 700 nucleotides, about 600 nucleotides, about 500 nucleotides, about 400 nucleotides, about 300 nucleotides, about 200 nucleotides, about 100 nucleotides, about 80 nucleotides, about 70 nucleotides, about 60 nucleotides, about 50 nucleotides upstream of SEQ ID NO: 222. In some cases, the targeted region of the pre-mRNA is at most about 1500 nucleotides, about 1000 nucleotides, about 800 nucleotides, about 700 nucleotides, about 600 nucleotides, about 500 nucleotides, about 400 nucleotides, about 300 nucleotides, about 200 nucleotides, about 100 nucleotides, about 80 nucleotides, about 70 nucleotides, about 60 nucleotides, about 50 nucleotides upstream of genomic site GRCh38/hg38: chr12 25552989. In some cases, the targeted region of the pre-mRNA is at least about 1500 nucleotides, about 1000 nucleotides, about 800 nucleotides, about 700 nucleotides, about 600 nucleotides, about 500 nucleotides, about 400 nucleotides, about 300 nucleotides, about 200 nucleotides, about 100 nucleotides, about 80 nucleotides, about 70 nucleotides, about 60 nucleotides, about 50 nucleotides upstream of genomic site GRCh38/hg38: chr12 25552989. In some cases, the targeted region of the pre-mRNA is at most about 1500 nucleotides, about 1000 nucleotides, about 800 nucleotides, about 700 nucleotides, about 600 nucleotides, about 500 nucleotides, about 400 nucleotides, about 300 nucleotides, about 200 nucleotides, about 100 nucleotides, about 80 nucleotides, about 70 nucleotides, about 60 nucleotides, about 50 nucleotides downstream of SEQ ID NO: 222. In some cases, the targeted region of the pre-mRNA is at least about 1500 nucleotides, about 1000 nucleotides, about 800 nucleotides, about 700 nucleotides, about 600 nucleotides, about 500 nucleotides, about 400 nucleotides, about 300 nucleotides, about 200 nucleotides, about 100 nucleotides, about 80 nucleotides, about 70 nucleotides, about 60 nucleotides, about 50 nucleotides downstream of SEQ ID NO: 222. In some cases, the targeted region of the pre-mRNA is at most about 1500 nucleotides, about 1000 nucleotides, about 800 nucleotides, about 700 nucleotides, about 600 nucleotides, about 500 nucleotides, about 400 nucleotides, about 300 nucleotides, about 200 nucleotides, about 100 nucleotides, about 80 nucleotides, about 70 nucleotides, about 60 nucleotides, about 50 nucleotides downstream of genomic site GRCh38/hg38: chr12 25552871. In some cases. the targeted region of the pre-mRNA is at least about 1500 nucleotides, about 1000 nucleotides, about 800 nucleotides, about 700 nucleotides, about 600 nucleotides, about 500 nucleotides, about 400 nucleotides, about 300 nucleotides, about 200 nucleotides, about 100 nucleotides, about 80 nucleotides, about 70 nucleotides, about 60 nucleotides, about 50 nucleotides downstream of genomic site GRCh38/hg38: chr12 25552871. In some cases, the targeted region of the pre-mRNA is within a sequence SEQ ID NO: 222. In some cases, the targeted region of the pre-mRNA is within a sequence between a pair of genomic sites GRCh38/hg38: chr12 25552989, and GRCh38/hg38: chr12 25552871. In some cases, the therapeutic agent is an antisense oligomer complementary to a sequence with at least about 80%, 85%, 90%, 95%, 96%, 97%, 98%, 99% or 100% sequence identity to SEQ ID NO:222. In some cases, the therapeutic agent is an antisense oligomer complementary to a sequence with 100% sequence identity to SEQ ID NO:222. In some cases, the therapeutic agent increases level of a first processed mRNA encoding a protein having a sequence SEQ ID NO: 8189, and decreases level of a second processed mRNA encoding a protein having a sequence SEQ ID NO: 425. In some cases, the targeted region of the pre-mRNA is at most about 1500 nucleotides, about 1000 nucleotides, about 800 nucleotides, about 700 nucleotides, about 600 nucleotides, about 500 nucleotides, about 400 nucleotides, about 300 nucleotides, about 200 nucleotides, about 100 nucleotides, about 80 nucleotides, about 70 nucleotides, about 60 nucleotides, about 50 nucleotides upstream of SEQ ID NO: 223. In some cases, the targeted region of the pre-mRNA is at least about 1500 nucleotides, about 1000 nucleotides, about 800 nucleotides, about 700 nucleotides, about 600 nucleotides, about 500 nucleotides, about 400 nucleotides, about 300 nucleotides, about 200 nucleotides, about 100 nucleotides, about 80 nucleotides, about 70 nucleotides, about 60 nucleotides, about 50 nucleotides upstream of SEQ ID NO: 223. In some cases, the targeted region of the pre-mRNA is at most about 1500 nucleotides, about 1000 nucleotides, about 800 nucleotides, about 700 nucleotides, about 600 nucleotides, about 500 nucleotides, about 400 nucleotides, about 300 nucleotides, about 200 nucleotides, about 100 nucleotides, about 80 nucleotides, about 70 nucleotides, about 60 nucleotides, about 50 nucleotides upstream of genomic site GRCh38/hg38: chr12 25552989. In some cases, the targeted region of the pre-mRNA is at least about 1500 nucleotides, about 1000 nucleotides, about 800 nucleotides, about 700 nucleotides, about 600 nucleotides, about 500 nucleotides, about 400 nucleotides, about 300 nucleotides, about 200 nucleotides, about 100 nucleotides, about 80 nucleotides, about 70 nucleotides, about 60 nucleotides, about 50 nucleotides upstream of genomic site GRCh38/hg38: chr12 25552989. In some cases, the targeted region of the pre-mRNA is at most about 1500 nucleotides, about 1000 nucleotides, about 800 nucleotides, about 700 nucleotides, about 600 nucleotides, about 500 nucleotides, about 400 nucleotides, about 300 nucleotides, about 200 nucleotides, about 100 nucleotides, about 80 nucleotides, about 70 nucleotides, about 60 nucleotides, about 50 nucleotides downstream of SEQ ID NO: 223. In some cases, the targeted region of the pre-mRNA is at least about 1500 nucleotides, about 1000 nucleotides, about 800 nucleotides, about 700 nucleotides, about 600 nucleotides, about 500 nucleotides, about 400 nucleotides, about 300 nucleotides, about 200 nucleotides, about 100 nucleotides, about 80 nucleotides, about 70 nucleotides, about 60 nucleotides, about 50 nucleotides downstream of SEQ ID NO: 223. In some cases, the targeted region of the pre-mRNA is at most about 1500 nucleotides, about 1000 nucleotides, about 800 nucleotides, about 700 nucleotides, about 600 nucleotides, about 500 nucleotides, about 400 nucleotides, about 300 nucleotides, about 200 nucleotides, about 100 nucleotides, about 80 nucleotides, about 70 nucleotides, about 60 nucleotides, about 50 nucleotides downstream of genomic site GRCh38/hg38: chr12 25552871. In some cases. the targeted region of the pre-mRNA is at least about 1500 nucleotides, about 1000 nucleotides, about 800 nucleotides, about 700 nucleotides, about 600 nucleotides, about 500 nucleotides, about 400 nucleotides, about 300 nucleotides, about 200 nucleotides, about 100 nucleotides, about 80 nucleotides, about 70 nucleotides, about 60 nucleotides, about 50 nucleotides downstream of genomic site GRCh38/hg38: chr12 25552871. In some cases, the targeted region of the pre-mRNA is within a sequence SEQ ID NO: 223. In some cases, the targeted region of the pre-mRNA is within a sequence between a pair of genomic sites GRCh38/hg38: chr12 25552989, and GRCh38/hg38: chr12 25552871. In some cases, the therapeutic agent is an antisense oligomer complementary to a sequence with at least about 80%, 85%, 90%, 95%, 96%, 97%, 98%, 99% or 100% sequence identity to SEQ ID NO:223. In some cases, the therapeutic agent is an antisense oligomer complementary to a sequence with 100% sequence identity to SEQ ID NO:223. In some cases, the therapeutic agent is an antisense oligomer that has a sequence with at least about 80%, 85%, 90%, 95%, 96%, 97%, 98%, 99% or 100% sequence identity to a sequence selected from the group consisting of SEQ ID NOs: 4241-4303. In some cases, the therapeutic agent is an antisense oligomer that has a sequence selected from the group consisting of SEQ ID NOs: 4241-4303. In some cases, the target peptide sequence is a portion of LMNTD1 protein, and the method treats a cancer that is associated with LMNTD1 protein.

[0211] LRRC7

[0212] In some cases, the target peptide sequence is a portion of LRRC7 protein. In some cases, the therapeutic agent increases level of a first processed mRNA encoding a protein having a sequence SEQ ID NO: 8190, and decreases level of a second processed mRNA encoding a protein having a sequence SEQ ID NO: 426. In some cases, the targeted region of the pre-mRNA is at most about 1500 nucleotides, about 1000 nucleotides, about 800 nucleotides, about 700 nucleotides, about 600 nucleotides, about 500 nucleotides, about 400 nucleotides, about 300 nucleotides, about 200 nucleotides, about 100 nucleotides, about 80 nucleotides, about 70 nucleotides, about 60 nucleotides, about 50 nucleotides upstream of SEQ ID NO: 224. In some cases, the targeted region of the pre-mRNA is at least about 1500 nucleotides, about 1000 nucleotides, about 800 nucleotides, about 700 nucleotides, about 600 nucleotides, about 500 nucleotides, about 400 nucleotides, about 300 nucleotides, about 200 nucleotides, about 100 nucleotides, about 80 nucleotides, about 70 nucleotides, about 60 nucleotides, about 50 nucleotides upstream of SEQ ID NO: 224. In some cases, the targeted region of the pre-mRNA is at most about 1500 nucleotides, about 1000 nucleotides, about 800 nucleotides, about 700 nucleotides, about 600 nucleotides, about 500 nucleotides, about 400 nucleotides, about 300 nucleotides, about 200 nucleotides, about 100 nucleotides, about 80 nucleotides, about 70 nucleotides, about 60 nucleotides, about 50 nucleotides upstream of genomic site GRCh38/hg38: chr1 69716142. In some cases, the targeted region of the pre-mRNA is at least about 1500 nucleotides, about 1000 nucleotides, about 800 nucleotides, about 700 nucleotides, about 600 nucleotides, about 500 nucleotides, about 400 nucleotides, about 300 nucleotides, about 200 nucleotides, about 100 nucleotides, about 80 nucleotides, about 70 nucleotides, about 60 nucleotides, about 50 nucleotides upstream of genomic site GRCh38/hg38: chr1 69716142. In some cases, the targeted region of the pre-mRNA is at most about 1500 nucleotides, about 1000 nucleotides, about 800 nucleotides, about 700 nucleotides, about 600 nucleotides, about 500 nucleotides, about 400 nucleotides, about 300 nucleotides, about 200 nucleotides, about 100 nucleotides, about 80 nucleotides, about 70 nucleotides, about 60 nucleotides, about 50 nucleotides downstream of SEQ ID NO: 224. In some cases, the targeted region of the pre-mRNA is at least about 1500 nucleotides, about 1000 nucleotides, about 800 nucleotides, about 700 nucleotides, about 600 nucleotides, about 500 nucleotides, about 400 nucleotides, about 300 nucleotides, about 200 nucleotides, about 100 nucleotides, about 80 nucleotides, about 70 nucleotides, about 60 nucleotides, about 50 nucleotides downstream of SEQ ID NO: 224. In some cases, the targeted region of the pre-mRNA is at most about 1500 nucleotides, about 1000 nucleotides, about 800 nucleotides, about 700 nucleotides, about 600 nucleotides, about 500 nucleotides, about 400 nucleotides, about 300 nucleotides, about 200 nucleotides, about 100 nucleotides, about 80 nucleotides, about 70 nucleotides, about 60 nucleotides, about 50 nucleotides downstream of genomic site GRCh38/hg38: chr1 69716218. In some cases. the targeted region of the pre-mRNA is at least about 1500 nucleotides, about 1000 nucleotides, about 800 nucleotides, about 700 nucleotides, about 600 nucleotides, about 500 nucleotides, about 400 nucleotides, about 300 nucleotides, about 200 nucleotides, about 100 nucleotides, about 80 nucleotides, about 70 nucleotides, about 60 nucleotides, about 50 nucleotides downstream of genomic site GRCh38/hg38: chr1 69716218. In some cases, the targeted region of the pre-mRNA is within a sequence SEQ ID NO: 224. In some cases, the targeted region of the pre-mRNA is within a sequence between a pair of genomic sites GRCh38/hg38: chr1 69716142, and GRCh38/hg38: chr1 69716218. In some cases, the therapeutic agent is an antisense oligomer complementary to a sequence with at least about 80%, 85%, 90%, 95%, 96%, 97%, 98%, 99% or 100% sequence identity to SEQ ID NO:224. In some cases, the therapeutic agent is an antisense oligomer complementary to a sequence with 100% sequence identity to SEQ ID NO:224. In some cases, the therapeutic agent is an antisense oligomer that has a sequence with at least about 80%, 85%, 90%, 95%, 96%, 97%, 98%, 99% or 100% sequence identity to a sequence selected from the group consisting of SEQ ID NOs: 4304-4357. In some cases, the therapeutic agent is an antisense oligomer that has a sequence selected from the group consisting of SEQ ID NOs: 4304-4357. In some cases, the target peptide sequence is a portion of LRRC7 protein, and the method treats a disease or the condition that comprises Malignant neoplasm of breast.

[0213] LRTOMT

[0214] In some cases, the target peptide sequence is a portion of LRTOMT protein. In some cases, the therapeutic agent increases level of a first processed mRNA encoding a protein having a sequence SEQ ID NO: 8191, and decreases level of a second processed mRNA encoding a protein having a sequence SEQ ID NO: 427. In some cases, the targeted region of the pre-mRNA is at most about 1500 nucleotides, about 1000 nucleotides, about 800 nucleotides, about 700 nucleotides, about 600 nucleotides, about 500 nucleotides, about 400 nucleotides, about 300 nucleotides, about 200 nucleotides, about 100 nucleotides, about 80 nucleotides, about 70 nucleotides, about 60 nucleotides, about 50 nucleotides upstream of SEQ ID NO: 225. In some cases, the targeted region of the pre-mRNA is at least about 1500 nucleotides, about 1000 nucleotides, about 800 nucleotides, about 700 nucleotides, about 600 nucleotides, about 500 nucleotides, about 400 nucleotides, about 300 nucleotides, about 200 nucleotides, about 100 nucleotides, about 80 nucleotides, about 70 nucleotides, about 60 nucleotides, about 50 nucleotides upstream of SEQ ID NO: 225. In some cases, the targeted region of the pre-mRNA is at most about 1500 nucleotides, about 1000 nucleotides, about 800 nucleotides, about 700 nucleotides, about 600 nucleotides, about 500 nucleotides, about 400 nucleotides, about 300 nucleotides, about 200 nucleotides, about 100 nucleotides, about 80 nucleotides, about 70 nucleotides, about 60 nucleotides, about 50 nucleotides upstream of genomic site GRCh38/hg38: chr11 72089029. In some cases, the targeted region of the pre-mRNA is at least about 1500 nucleotides, about 1000 nucleotides, about 800 nucleotides, about 700 nucleotides, about 600 nucleotides, about 500 nucleotides, about 400 nucleotides, about 300 nucleotides, about 200 nucleotides, about 100 nucleotides, about 80 nucleotides, about 70 nucleotides, about 60 nucleotides, about 50 nucleotides upstream of genomic site GRCh38/hg38: chr11 72089029. In some cases, the targeted region of the pre-mRNA is at most about 1500 nucleotides, about 1000 nucleotides, about 800 nucleotides, about 700 nucleotides, about 600 nucleotides, about 500 nucleotides, about 400 nucleotides, about 300 nucleotides, about 200 nucleotides, about 100 nucleotides, about 80 nucleotides, about 70 nucleotides, about 60 nucleotides, about 50 nucleotides downstream of SEQ ID NO: 225. In some cases, the targeted region of the pre-mRNA is at least about 1500 nucleotides, about 1000 nucleotides, about 800 nucleotides, about 700 nucleotides, about 600 nucleotides, about 500 nucleotides, about 400 nucleotides, about 300 nucleotides, about 200 nucleotides, about 100 nucleotides, about 80 nucleotides, about 70 nucleotides, about 60 nucleotides, about 50 nucleotides downstream of SEQ ID NO: 225. In some cases, the targeted region of the pre-mRNA is at most about 1500 nucleotides, about 1000 nucleotides, about 800 nucleotides, about 700 nucleotides, about 600 nucleotides, about 500 nucleotides, about 400 nucleotides, about 300 nucleotides, about 200 nucleotides, about 100 nucleotides, about 80 nucleotides, about 70 nucleotides, about 60 nucleotides, about 50 nucleotides downstream of genomic site GRCh38/hg38: chr11 72089165. In some cases. the targeted region of the pre-mRNA is at least about 1500 nucleotides, about 1000 nucleotides, about 800 nucleotides, about 700 nucleotides, about 600 nucleotides, about 500 nucleotides, about 400 nucleotides, about 300 nucleotides, about 200 nucleotides, about 100 nucleotides, about 80 nucleotides, about 70 nucleotides, about 60 nucleotides, about 50 nucleotides downstream of genomic site GRCh38/hg38: chr11 72089165. In some cases, the targeted region of the pre-mRNA is within a sequence SEQ ID NO: 225. In some cases, the targeted region of the pre-mRNA is within a sequence between a pair of genomic sites GRCh38/hg38: chr11 72089029, and GRCh38/hg38: chr11 72089165. In some cases, the therapeutic agent is an antisense oligomer complementary to a sequence with at least about 80%, 85%, 90%, 95%, 96%, 97%, 98%, 99% or 100% sequence identity to SEQ ID NO:225. In some cases, the therapeutic agent is an antisense oligomer complementary to a sequence with 100% sequence identity to SEQ ID NO:225. In some cases, the therapeutic agent increases level of a first processed mRNA encoding a protein having a sequence SEQ ID NO: 8192, and decreases level of a second processed mRNA encoding a protein having a sequence SEQ ID NO: 428. In some cases, the targeted region of the pre-mRNA is at most about 1500 nucleotides, about 1000 nucleotides, about 800 nucleotides, about 700 nucleotides, about 600 nucleotides, about 500 nucleotides, about 400 nucleotides, about 300 nucleotides, about 200 nucleotides, about 100 nucleotides, about 80 nucleotides, about 70 nucleotides, about 60 nucleotides, about 50 nucleotides upstream of SEQ ID NO: 226. In some cases, the targeted region of the pre-mRNA is at least about 1500 nucleotides, about 1000 nucleotides, about 800 nucleotides, about 700 nucleotides, about 600 nucleotides, about 500 nucleotides, about 400 nucleotides, about 300 nucleotides, about 200 nucleotides, about 100 nucleotides, about 80 nucleotides, about 70 nucleotides, about 60 nucleotides, about 50 nucleotides upstream of SEQ ID NO: 226. In some cases, the targeted region of the pre-mRNA is at most about 1500 nucleotides, about 1000 nucleotides, about 800 nucleotides, about 700 nucleotides, about 600 nucleotides, about 500 nucleotides, about 400 nucleotides, about 300 nucleotides, about 200 nucleotides, about 100 nucleotides, about 80 nucleotides, about 70 nucleotides, about 60 nucleotides, about 50 nucleotides upstream of genomic site GRCh38/hg38: chr1l 72089029. In some cases, the targeted region of the pre-mRNA is at least about 1500 nucleotides, about 1000 nucleotides, about 800 nucleotides, about 700 nucleotides, about 600 nucleotides, about 500 nucleotides, about 400 nucleotides, about 300 nucleotides, about 200 nucleotides, about 100 nucleotides, about 80 nucleotides, about 70 nucleotides, about 60 nucleotides, about 50 nucleotides upstream of genomic site GRCh38/hg38: chr11 72089029. In some cases, the targeted region of the pre-mRNA is at most about 1500 nucleotides, about 1000 nucleotides, about 800 nucleotides, about 700 nucleotides, about 600 nucleotides, about 500 nucleotides, about 400 nucleotides, about 300 nucleotides, about 200 nucleotides, about 100 nucleotides, about 80 nucleotides, about 70 nucleotides, about 60 nucleotides, about 50 nucleotides downstream of SEQ ID NO: 226. In some cases, the targeted region of the pre-mRNA is at least about 1500 nucleotides, about 1000 nucleotides, about 800 nucleotides, about 700 nucleotides, about 600 nucleotides, about 500 nucleotides, about 400 nucleotides, about 300 nucleotides, about 200 nucleotides, about 100 nucleotides, about 80 nucleotides, about 70 nucleotides, about 60 nucleotides, about 50 nucleotides downstream of SEQ ID NO: 226. In some cases, the targeted region of the pre-mRNA is at most about 1500 nucleotides, about 1000 nucleotides, about 800 nucleotides, about 700 nucleotides, about 600 nucleotides, about 500 nucleotides, about 400 nucleotides, about 300 nucleotides, about 200 nucleotides, about 100 nucleotides, about 80 nucleotides, about 70 nucleotides, about 60 nucleotides, about 50 nucleotides downstream of genomic site GRCh38/hg38: chr11 72089165. In some cases. the targeted region of the pre-mRNA is at least about 1500 nucleotides, about 1000 nucleotides, about 800 nucleotides, about 700 nucleotides, about 600 nucleotides, about 500 nucleotides, about 400 nucleotides, about 300 nucleotides, about 200 nucleotides, about 100 nucleotides, about 80 nucleotides, about 70 nucleotides, about 60 nucleotides, about 50 nucleotides downstream of genomic site GRCh38/hg38: chr11 72089165. In some cases, the targeted region of the pre-mRNA is within a sequence SEQ ID NO: 226. In some cases, the targeted region of the pre-mRNA is within a sequence between a pair of genomic sites GRCh38/hg38: chr11 72089029, and GRCh38/hg38: chr11 72089165. In some cases, the therapeutic agent is an antisense oligomer complementary to a sequence with at least about 80%, 85%, 90%, 95%, 96%, 97%, 98%, 99% or 100% sequence identity to SEQ ID NO:226. In some cases, the therapeutic agent is an antisense oligomer complementary to a sequence with 100% sequence identity to SEQ ID NO:226. In some cases, the therapeutic agent increases level of a first processed mRNA encoding a protein having a sequence SEQ ID NO: 8193, and decreases level of a second processed mRNA encoding a protein having a sequence SEQ ID NO: 429. In some cases, the targeted region of the pre-mRNA is at most about 1500 nucleotides, about 1000 nucleotides, about 800 nucleotides, about 700 nucleotides, about 600 nucleotides, about 500 nucleotides, about 400 nucleotides, about 300 nucleotides, about 200 nucleotides, about 100 nucleotides, about 80 nucleotides, about 70 nucleotides, about 60 nucleotides, about 50 nucleotides upstream of SEQ ID NO: 227. In some cases, the targeted region of the pre-mRNA is at least about 1500 nucleotides, about 1000 nucleotides, about 800 nucleotides, about 700 nucleotides, about 600 nucleotides, about 500 nucleotides, about 400 nucleotides, about 300 nucleotides, about 200 nucleotides, about 100 nucleotides, about 80 nucleotides, about 70 nucleotides, about 60 nucleotides, about 50 nucleotides upstream of SEQ ID NO: 227. In some cases, the targeted region of the pre-mRNA is at most about 1500 nucleotides, about 1000 nucleotides, about 800 nucleotides, about 700 nucleotides, about 600 nucleotides, about 500 nucleotides, about 400 nucleotides, about 300 nucleotides, about 200 nucleotides, about 100 nucleotides, about 80 nucleotides, about 70 nucleotides, about 60 nucleotides, about 50 nucleotides upstream of genomic site GRCh38/hg38: chr1l 72089029. In some cases, the targeted region of the pre-mRNA is at least about 1500 nucleotides, about 1000 nucleotides, about 800 nucleotides, about 700 nucleotides, about 600 nucleotides, about 500 nucleotides, about 400 nucleotides, about 300 nucleotides, about 200 nucleotides, about 100 nucleotides, about 80 nucleotides, about 70 nucleotides, about 60 nucleotides, about 50 nucleotides upstream of genomic site GRCh38/hg38: chr11 72089029. In some cases, the targeted region of the pre-mRNA is at most about 1500 nucleotides, about 1000 nucleotides, about 800 nucleotides, about 700 nucleotides, about 600 nucleotides, about 500 nucleotides, about 400 nucleotides, about 300 nucleotides, about 200 nucleotides, about 100 nucleotides, about 80 nucleotides, about 70 nucleotides, about 60 nucleotides, about 50 nucleotides downstream of SEQ ID NO: 227. In some cases, the targeted region of the pre-mRNA is at least about 1500 nucleotides, about 1000 nucleotides, about 800 nucleotides, about 700 nucleotides, about 600 nucleotides, about 500 nucleotides, about 400 nucleotides, about 300 nucleotides, about 200 nucleotides, about 100 nucleotides, about 80 nucleotides, about 70 nucleotides, about 60 nucleotides, about 50 nucleotides downstream of SEQ ID NO: 227. In some cases, the targeted region of the pre-mRNA is at most about 1500 nucleotides, about 1000 nucleotides, about 800 nucleotides, about 700 nucleotides, about 600 nucleotides, about 500 nucleotides, about 400 nucleotides, about 300 nucleotides, about 200 nucleotides, about 100 nucleotides, about 80 nucleotides, about 70 nucleotides, about 60 nucleotides, about 50 nucleotides downstream of genomic site GRCh38/hg38: chr11 72089165. In some cases. the targeted region of the pre-mRNA is at least about 1500 nucleotides, about 1000 nucleotides, about 800 nucleotides, about 700 nucleotides, about 600 nucleotides, about 500 nucleotides, about 400 nucleotides, about 300 nucleotides, about 200 nucleotides, about 100 nucleotides, about 80 nucleotides, about 70 nucleotides, about 60 nucleotides, about 50 nucleotides downstream of genomic site GRCh38/hg38: chr11 72089165. In some cases, the targeted region of the pre-mRNA is within a sequence SEQ ID NO: 227. In some cases, the targeted region of the pre-mRNA is within a sequence between a pair of genomic sites GRCh38/hg38: chr11 72089029, and GRCh38/hg38: chr11 72089165. In some cases, the therapeutic agent is an antisense oligomer complementary to a sequence with at least about 80%, 85%, 90%, 95%, 96%, 97%, 98%, 99% or 100% sequence identity to SEQ ID NO:227. In some cases, the therapeutic agent is an antisense oligomer complementary to a sequence with 100% sequence identity to SEQ ID NO:227. In some cases, the therapeutic agent increases level of a first processed mRNA encoding a protein having a sequence SEQ ID NO: 8194, and decreases level of a second processed mRNA encoding a protein having a sequence SEQ ID NO: 430. In some cases, the targeted region of the pre-mRNA is at most about 1500 nucleotides, about 1000 nucleotides, about 800 nucleotides, about 700 nucleotides, about 600 nucleotides, about 500 nucleotides, about 400 nucleotides, about 300 nucleotides, about 200 nucleotides, about 100 nucleotides, about 80 nucleotides, about 70 nucleotides, about 60 nucleotides, about 50 nucleotides upstream of SEQ ID NO: 228. In some cases, the targeted region of the pre-mRNA is at least about 1500 nucleotides, about 1000 nucleotides, about 800 nucleotides, about 700 nucleotides, about 600 nucleotides, about 500 nucleotides, about 400 nucleotides, about 300 nucleotides, about 200 nucleotides, about 100 nucleotides, about 80 nucleotides, about 70 nucleotides, about 60 nucleotides, about 50 nucleotides upstream of SEQ ID NO: 228. In some cases, the targeted region of the pre-mRNA is at most about 1500 nucleotides, about 1000 nucleotides, about 800 nucleotides, about 700 nucleotides, about 600 nucleotides, about 500 nucleotides, about 400 nucleotides, about 300 nucleotides, about 200 nucleotides, about 100 nucleotides, about 80 nucleotides, about 70 nucleotides, about 60 nucleotides, about 50 nucleotides upstream of genomic site GRCh38/hg38: chr1l 72089029. In some cases, the targeted region of the pre-mRNA is at least about 1500 nucleotides, about 1000 nucleotides, about 800 nucleotides, about 700 nucleotides, about 600 nucleotides, about 500 nucleotides, about 400 nucleotides, about 300 nucleotides, about 200 nucleotides, about 100 nucleotides, about 80 nucleotides, about 70 nucleotides, about 60 nucleotides, about 50 nucleotides upstream of genomic site GRCh38/hg38: chr11 72089029. In some cases, the targeted region of the pre-mRNA is at most about 1500 nucleotides, about 1000 nucleotides, about 800 nucleotides, about 700 nucleotides, about 600 nucleotides, about 500 nucleotides, about 400 nucleotides, about 300 nucleotides, about 200 nucleotides, about 100 nucleotides, about 80 nucleotides, about 70 nucleotides, about 60 nucleotides, about 50 nucleotides downstream of SEQ ID NO: 228. In some cases, the targeted region of the pre-mRNA is at least about 1500 nucleotides, about 1000 nucleotides, about 800 nucleotides, about 700 nucleotides, about 600 nucleotides, about 500 nucleotides, about 400 nucleotides, about 300 nucleotides, about 200 nucleotides, about 100 nucleotides, about 80 nucleotides, about 70 nucleotides, about 60 nucleotides, about 50 nucleotides downstream of SEQ ID NO: 228. In some cases, the targeted region of the pre-mRNA is at most about 1500 nucleotides, about 1000 nucleotides, about 800 nucleotides, about 700 nucleotides, about 600 nucleotides, about 500 nucleotides, about 400 nucleotides, about 300 nucleotides, about 200 nucleotides, about 100 nucleotides, about 80 nucleotides, about 70 nucleotides, about 60 nucleotides, about 50 nucleotides downstream of genomic site GRCh38/hg38: chr11 72089165. In some cases. the targeted region of the pre-mRNA is at least about 1500 nucleotides, about 1000 nucleotides, about 800 nucleotides, about 700 nucleotides, about 600 nucleotides, about 500 nucleotides, about 400 nucleotides, about 300 nucleotides, about 200 nucleotides, about 100 nucleotides, about 80 nucleotides, about 70 nucleotides, about 60 nucleotides, about 50 nucleotides downstream of genomic site GRCh38/hg38: chr11 72089165. In some cases, the targeted region of the pre-mRNA is within a sequence SEQ ID NO: 228. In some cases, the targeted region of the pre-mRNA is within a sequence between a pair of genomic sites GRCh38/hg38: chr11 72089029, and GRCh38/hg38: chr11 72089165. In some cases, the therapeutic agent is an antisense oligomer complementary to a sequence with at least about 80%, 85%, 90%, 95%, 96%, 97%, 98%, 99% or 100% sequence identity to SEQ ID NO:228. In some cases, the therapeutic agent is an antisense oligomer complementary to a sequence with 100% sequence identity to SEQ ID NO:228. In some cases, the therapeutic agent increases level of a first processed mRNA encoding a protein having a sequence SEQ ID NO: 8195, and decreases level of a second processed mRNA encoding a protein having a sequence SEQ ID NO: 431. In some cases, the targeted region of the pre-mRNA is at most about 1500 nucleotides, about 1000 nucleotides, about 800 nucleotides, about 700 nucleotides, about 600 nucleotides, about 500 nucleotides, about 400 nucleotides, about 300 nucleotides, about 200 nucleotides, about 100 nucleotides, about 80 nucleotides, about 70 nucleotides, about 60 nucleotides, about 50 nucleotides upstream of SEQ ID NO: 229. In some cases, the targeted region of the pre-mRNA is at least about 1500 nucleotides, about 1000 nucleotides, about 800 nucleotides, about 700 nucleotides, about 600 nucleotides, about 500 nucleotides, about 400 nucleotides, about 300 nucleotides, about 200 nucleotides, about 100 nucleotides, about 80 nucleotides, about 70 nucleotides, about 60 nucleotides, about 50 nucleotides upstream of SEQ ID NO: 229. In some cases, the targeted region of the pre-mRNA is at most about 1500 nucleotides, about 1000 nucleotides, about 800 nucleotides, about 700 nucleotides, about 600 nucleotides, about 500 nucleotides, about 400 nucleotides, about 300 nucleotides, about 200 nucleotides, about 100 nucleotides, about 80 nucleotides, about 70 nucleotides, about 60 nucleotides, about 50 nucleotides upstream of genomic site GRCh38/hg38: chr1l 72089029. In some cases, the targeted region of the pre-mRNA is at least about 1500 nucleotides, about 1000 nucleotides, about 800 nucleotides, about 700 nucleotides, about 600 nucleotides, about 500 nucleotides, about 400 nucleotides, about 300 nucleotides, about 200 nucleotides, about 100 nucleotides, about 80 nucleotides, about 70 nucleotides, about 60 nucleotides, about 50 nucleotides upstream of genomic site GRCh38/hg38: chr11 72089029. In some cases, the targeted region of the pre-mRNA is at most about 1500 nucleotides, about 1000 nucleotides, about 800 nucleotides, about 700 nucleotides, about 600 nucleotides, about 500 nucleotides, about 400 nucleotides, about 300 nucleotides, about 200 nucleotides, about 100 nucleotides, about 80 nucleotides, about 70 nucleotides, about 60 nucleotides, about 50 nucleotides downstream of SEQ ID NO: 229. In some cases, the targeted region of the pre-mRNA is at least about 1500 nucleotides, about 1000 nucleotides, about 800 nucleotides, about 700 nucleotides, about 600 nucleotides, about 500 nucleotides, about 400 nucleotides, about 300 nucleotides, about 200 nucleotides, about 100 nucleotides, about 80 nucleotides, about 70 nucleotides, about 60 nucleotides, about 50 nucleotides downstream of SEQ ID NO: 229. In some cases, the targeted region of the pre-mRNA is at most about 1500 nucleotides, about 1000 nucleotides, about 800 nucleotides, about 700 nucleotides, about 600 nucleotides, about 500 nucleotides, about 400 nucleotides, about 300 nucleotides, about 200 nucleotides, about 100 nucleotides, about 80 nucleotides, about 70 nucleotides, about 60 nucleotides, about 50 nucleotides downstream of genomic site GRCh38/hg38: chr11 72089165. In some cases. the targeted region of the pre-mRNA is at least about 1500 nucleotides, about 1000 nucleotides, about 800 nucleotides, about 700 nucleotides, about 600 nucleotides, about 500 nucleotides, about 400 nucleotides, about 300 nucleotides, about 200 nucleotides, about 100 nucleotides, about 80 nucleotides, about 70 nucleotides, about 60 nucleotides, about 50 nucleotides downstream of genomic site GRCh38/hg38: chr11 72089165. In some cases, the targeted region of the pre-mRNA is within a sequence SEQ ID NO: 229. In some cases, the targeted region of the pre-mRNA is within a sequence between a pair of genomic sites GRCh38/hg38: chr11 72089029, and GRCh38/hg38: chr11 72089165. In some cases, the therapeutic agent is an antisense oligomer complementary to a sequence with at least about 80%, 85%, 90%, 95%, 96%, 97%, 98%, 99% or 100% sequence identity to SEQ ID NO:229. In some cases, the therapeutic agent is an antisense oligomer complementary to a sequence with 100% sequence identity to SEQ ID NO:229. In some cases, the therapeutic agent increases level of a first processed mRNA encoding a protein having a sequence SEQ ID NO: 8196, and decreases level of a second processed mRNA encoding a protein having a sequence SEQ ID NO: 432. In some cases, the targeted region of the pre-mRNA is at most about 1500 nucleotides, about 1000 nucleotides, about 800 nucleotides, about 700 nucleotides, about 600 nucleotides, about 500 nucleotides, about 400 nucleotides, about 300 nucleotides, about 200 nucleotides, about 100 nucleotides, about 80 nucleotides, about 70 nucleotides, about 60 nucleotides, about 50 nucleotides upstream of SEQ ID NO: 230. In some cases, the targeted region of the pre-mRNA is at least about 1500 nucleotides, about 1000 nucleotides, about 800 nucleotides, about 700 nucleotides, about 600 nucleotides, about 500 nucleotides, about 400 nucleotides, about 300 nucleotides, about 200 nucleotides, about 100 nucleotides, about 80 nucleotides, about 70 nucleotides, about 60 nucleotides, about 50 nucleotides upstream of SEQ ID NO: 230. In some cases, the targeted region of the pre-mRNA is at most about 1500 nucleotides, about 1000 nucleotides, about 800 nucleotides, about 700 nucleotides, about 600 nucleotides, about 500 nucleotides, about 400 nucleotides, about 300 nucleotides, about 200 nucleotides, about 100 nucleotides, about 80 nucleotides, about 70 nucleotides, about 60 nucleotides, about 50 nucleotides upstream of genomic site GRCh38/hg38: chr1l 72089029. In some cases, the targeted region of the pre-mRNA is at least about 1500 nucleotides, about 1000 nucleotides, about 800 nucleotides, about 700 nucleotides, about 600 nucleotides, about 500 nucleotides, about 400 nucleotides, about 300 nucleotides, about 200 nucleotides, about 100 nucleotides, about 80 nucleotides, about 70 nucleotides, about 60 nucleotides, about 50 nucleotides upstream of genomic site GRCh38/hg38: chr11 72089029. In some cases, the targeted region of the pre-mRNA is at most about 1500 nucleotides, about 1000 nucleotides, about 800 nucleotides, about 700 nucleotides, about 600 nucleotides, about 500 nucleotides, about 400 nucleotides, about 300 nucleotides, about 200 nucleotides, about 100 nucleotides, about 80 nucleotides, about 70 nucleotides, about 60 nucleotides, about 50 nucleotides downstream of SEQ ID NO: 230. In some cases, the targeted region of the pre-mRNA is at least about 1500 nucleotides, about 1000 nucleotides, about 800 nucleotides, about 700 nucleotides, about 600 nucleotides, about 500 nucleotides, about 400 nucleotides, about 300 nucleotides, about 200 nucleotides, about 100 nucleotides, about 80 nucleotides, about 70 nucleotides, about 60 nucleotides, about 50 nucleotides downstream of SEQ ID NO: 230. In some cases, the targeted region of the pre-mRNA is at most about 1500 nucleotides, about 1000 nucleotides, about 800 nucleotides, about 700 nucleotides, about 600 nucleotides, about 500 nucleotides, about 400 nucleotides, about 300 nucleotides, about 200 nucleotides, about 100 nucleotides, about 80 nucleotides, about 70 nucleotides, about 60 nucleotides, about 50 nucleotides downstream of genomic site GRCh38/hg38: chr11 72089165. In some cases. the targeted region of the pre-mRNA is at least about 1500 nucleotides, about 1000 nucleotides, about 800 nucleotides, about 700 nucleotides, about 600 nucleotides, about 500 nucleotides, about 400 nucleotides, about 300 nucleotides, about 200 nucleotides, about 100 nucleotides, about 80 nucleotides, about 70 nucleotides, about 60 nucleotides, about 50 nucleotides downstream of genomic site GRCh38/hg38: chr11 72089165. In some cases, the targeted region of the pre-mRNA is within a sequence SEQ ID NO: 230. In some cases, the targeted region of the pre-mRNA is within a sequence between a pair of genomic sites GRCh38/hg38: chr11 72089029, and GRCh38/hg38: chr11 72089165. In some cases, the therapeutic agent is an antisense oligomer complementary to a sequence with at least about 80%, 85%, 90%, 95%, 96%, 97%, 98%, 99% or 100% sequence identity to SEQ ID NO:230. In some cases, the therapeutic agent is an antisense oligomer complementary to a sequence with 100% sequence identity to SEQ ID NO:230. In some cases, the therapeutic agent increases level of a first processed mRNA encoding a protein having a sequence SEQ ID NO: 8197, and decreases level of a second processed mRNA encoding a protein having a sequence SEQ ID NO: 433. In some cases, the targeted region of the pre-mRNA is at most about 1500 nucleotides, about 1000 nucleotides, about 800 nucleotides, about 700 nucleotides, about 600 nucleotides, about 500 nucleotides, about 400 nucleotides, about 300 nucleotides, about 200 nucleotides, about 100 nucleotides, about 80 nucleotides, about 70 nucleotides, about 60 nucleotides, about 50 nucleotides upstream of SEQ ID NO: 231. In some cases, the targeted region of the pre-mRNA is at least about 1500 nucleotides, about 1000 nucleotides, about 800 nucleotides, about 700 nucleotides, about 600 nucleotides, about 500 nucleotides, about 400 nucleotides, about 300 nucleotides, about 200 nucleotides, about 100 nucleotides, about 80 nucleotides, about 70 nucleotides, about 60 nucleotides, about 50 nucleotides upstream of SEQ ID NO: 231. In some cases, the targeted region of the pre-mRNA is at most about 1500 nucleotides, about 1000 nucleotides, about 800 nucleotides, about 700 nucleotides, about 600 nucleotides, about 500 nucleotides, about 400 nucleotides, about 300 nucleotides, about 200 nucleotides, about 100 nucleotides, about 80 nucleotides, about 70 nucleotides, about 60 nucleotides, about 50 nucleotides upstream of genomic site GRCh38/hg38: chr1l 72089029. In some cases, the targeted region of the pre-mRNA is at least about 1500 nucleotides, about 1000 nucleotides, about 800 nucleotides, about 700 nucleotides, about 600 nucleotides, about 500 nucleotides, about 400 nucleotides, about 300 nucleotides, about 200 nucleotides, about 100 nucleotides, about 80 nucleotides, about 70 nucleotides, about 60 nucleotides, about 50 nucleotides upstream of genomic site GRCh38/hg38: chr11 72089029. In some cases, the targeted region of the pre-mRNA is at most about 1500 nucleotides, about 1000 nucleotides, about 800 nucleotides, about 700 nucleotides, about 600 nucleotides, about 500 nucleotides, about 400 nucleotides, about 300 nucleotides, about 200 nucleotides, about 100 nucleotides, about 80 nucleotides, about 70 nucleotides, about 60 nucleotides, about 50 nucleotides downstream of SEQ ID NO: 231. In some cases, the targeted region of the pre-mRNA is at least about 1500 nucleotides, about 1000 nucleotides, about 800 nucleotides, about 700 nucleotides, about 600 nucleotides, about 500 nucleotides, about 400 nucleotides, about 300 nucleotides, about 200 nucleotides, about 100 nucleotides, about 80 nucleotides, about 70 nucleotides, about 60 nucleotides, about 50 nucleotides downstream of SEQ ID NO: 231. In some cases, the targeted region of the pre-mRNA is at most about 1500 nucleotides, about 1000 nucleotides, about 800 nucleotides, about 700 nucleotides, about 600 nucleotides, about 500 nucleotides, about 400 nucleotides, about 300 nucleotides, about 200 nucleotides, about 100 nucleotides, about 80 nucleotides, about 70 nucleotides, about 60 nucleotides, about 50 nucleotides downstream of genomic site GRCh38/hg38: chr11 72089165. In some cases. the targeted region of the pre-mRNA is at least about 1500 nucleotides, about 1000 nucleotides, about 800 nucleotides, about 700 nucleotides, about 600 nucleotides, about 500 nucleotides, about 400 nucleotides, about 300 nucleotides, about 200 nucleotides, about 100 nucleotides, about 80 nucleotides, about 70 nucleotides, about 60 nucleotides, about 50 nucleotides downstream of genomic site GRCh38/hg38: chr11 72089165. In some cases, the targeted region of the pre-mRNA is within a sequence SEQ ID NO: 231. In some cases, the targeted region of the pre-mRNA is within a sequence between a pair of genomic sites GRCh38/hg38: chr11 72089029, and GRCh38/hg38: chr11 72089165. In some cases, the therapeutic agent is an antisense oligomer complementary to a sequence with at least about 80%, 85%, 90%, 95%, 96%, 97%, 98%, 99% or 100% sequence identity to SEQ ID NO:231. In some cases, the therapeutic agent is an antisense oligomer complementary to a sequence with 100% sequence identity to SEQ ID NO:231. In some cases, the therapeutic agent increases level of a first processed mRNA encoding a protein having a sequence SEQ ID NO: 8198, and decreases level of a second processed mRNA encoding a protein having a sequence SEQ ID NO: 434. In some cases, the targeted region of the pre-mRNA is at most about 1500 nucleotides, about 1000 nucleotides, about 800 nucleotides, about 700 nucleotides, about 600 nucleotides, about 500 nucleotides, about 400 nucleotides, about 300 nucleotides, about 200 nucleotides, about 100 nucleotides, about 80 nucleotides, about 70 nucleotides, about 60 nucleotides, about 50 nucleotides upstream of SEQ ID NO: 232. In some cases, the targeted region of the pre-mRNA is at least about 1500 nucleotides, about 1000 nucleotides, about 800 nucleotides, about 700 nucleotides, about 600 nucleotides, about 500 nucleotides, about 400 nucleotides, about 300 nucleotides, about 200 nucleotides, about 100 nucleotides, about 80 nucleotides, about 70 nucleotides, about 60 nucleotides, about 50 nucleotides upstream of SEQ ID NO: 232. In some cases, the targeted region of the pre-mRNA is at most about 1500 nucleotides, about 1000 nucleotides, about 800 nucleotides, about 700 nucleotides, about 600 nucleotides, about 500 nucleotides, about 400 nucleotides, about 300 nucleotides, about 200 nucleotides, about 100 nucleotides, about 80 nucleotides, about 70 nucleotides, about 60 nucleotides, about 50 nucleotides upstream of genomic site GRCh38/hg38: chr1l 72089029. In some cases, the targeted region of the pre-mRNA is at least about 1500 nucleotides, about 1000 nucleotides, about 800 nucleotides, about 700 nucleotides, about 600 nucleotides, about 500 nucleotides, about 400 nucleotides, about 300 nucleotides, about 200 nucleotides, about 100 nucleotides, about 80 nucleotides, about 70 nucleotides, about 60 nucleotides, about 50 nucleotides upstream of genomic site GRCh38/hg38: chr11 72089029. In some cases, the targeted region of the pre-mRNA is at most about 1500 nucleotides, about 1000 nucleotides, about 800 nucleotides, about 700 nucleotides, about 600 nucleotides, about 500 nucleotides, about 400 nucleotides, about 300 nucleotides, about 200 nucleotides, about 100 nucleotides, about 80 nucleotides, about 70 nucleotides, about 60 nucleotides, about 50 nucleotides downstream of SEQ ID NO: 232. In some cases, the targeted region of the pre-mRNA is at least about 1500 nucleotides, about 1000 nucleotides, about 800 nucleotides, about 700 nucleotides, about 600 nucleotides, about 500 nucleotides, about 400 nucleotides, about 300 nucleotides, about 200 nucleotides, about 100 nucleotides, about 80 nucleotides, about 70 nucleotides, about 60 nucleotides, about 50 nucleotides downstream of SEQ ID NO: 232. In some cases, the targeted region of the pre-mRNA is at most about 1500 nucleotides, about 1000 nucleotides, about 800 nucleotides, about 700 nucleotides, about 600 nucleotides, about 500 nucleotides, about 400 nucleotides, about 300 nucleotides, about 200 nucleotides, about 100 nucleotides, about 80 nucleotides, about 70 nucleotides, about 60 nucleotides, about 50 nucleotides downstream of genomic site GRCh38/hg38: chr11 72089165. In some cases. the targeted region of the pre-mRNA is at least about 1500 nucleotides, about 1000 nucleotides, about 800 nucleotides, about 700 nucleotides, about 600 nucleotides, about 500 nucleotides, about 400 nucleotides, about 300 nucleotides, about 200 nucleotides, about 100 nucleotides, about 80 nucleotides, about 70 nucleotides, about 60 nucleotides, about 50 nucleotides downstream of genomic site GRCh38/hg38: chr11 72089165. In some cases, the targeted region of the pre-mRNA is within a sequence SEQ ID NO: 232. In some cases, the targeted region of the pre-mRNA is within a sequence between a pair of genomic sites GRCh38/hg38: chr11 72089029, and GRCh38/hg38: chr11 72089165. In some cases, the therapeutic agent is an antisense oligomer complementary to a sequence with at least about 80%, 85%, 90%, 95%, 96%, 97%, 98%, 99% or 100% sequence identity to SEQ ID NO:232. In some cases, the therapeutic agent is an antisense oligomer complementary to a sequence with 100% sequence identity to SEQ ID NO:232. In some cases, the therapeutic agent increases level of a first processed mRNA encoding a protein having a sequence SEQ ID NO: 8199, and decreases level of a second processed mRNA encoding a protein having a sequence SEQ ID NO: 435. In some cases, the targeted region of the pre-mRNA is at most about 1500 nucleotides, about 1000 nucleotides, about 800 nucleotides, about 700 nucleotides, about 600 nucleotides, about 500 nucleotides, about 400 nucleotides, about 300 nucleotides, about 200 nucleotides, about 100 nucleotides, about 80 nucleotides, about 70 nucleotides, about 60 nucleotides, about 50 nucleotides upstream of SEQ ID NO: 233. In some cases, the targeted region of the pre-mRNA is at least about 1500 nucleotides, about 1000 nucleotides, about 800 nucleotides, about 700 nucleotides, about 600 nucleotides, about 500 nucleotides, about 400 nucleotides, about 300 nucleotides, about 200 nucleotides, about 100 nucleotides, about 80 nucleotides, about 70 nucleotides, about 60 nucleotides, about 50 nucleotides upstream of SEQ ID NO: 233. In some cases, the targeted region of the pre-mRNA is at most about 1500 nucleotides, about 1000 nucleotides, about 800 nucleotides, about 700 nucleotides, about 600 nucleotides, about 500 nucleotides, about 400 nucleotides, about 300 nucleotides, about 200 nucleotides, about 100 nucleotides, about 80 nucleotides, about 70 nucleotides, about 60 nucleotides, about 50 nucleotides upstream of genomic site GRCh38/hg38: chr1l 72089029. In some cases, the targeted region of the pre-mRNA is at least about 1500 nucleotides, about 1000 nucleotides, about 800 nucleotides, about 700 nucleotides, about 600 nucleotides, about 500 nucleotides, about 400 nucleotides, about 300 nucleotides, about 200 nucleotides, about 100 nucleotides, about 80 nucleotides, about 70 nucleotides, about 60 nucleotides, about 50 nucleotides upstream of genomic site GRCh38/hg38: chr11 72089029. In some cases, the targeted region of the pre-mRNA is at most about 1500 nucleotides, about 1000 nucleotides, about 800 nucleotides, about 700 nucleotides, about 600 nucleotides, about 500 nucleotides, about 400 nucleotides, about 300 nucleotides, about 200 nucleotides, about 100 nucleotides, about 80 nucleotides, about 70 nucleotides, about 60 nucleotides, about 50 nucleotides downstream of SEQ ID NO: 233. In some cases, the targeted region of the pre-mRNA is at least about 1500 nucleotides, about 1000 nucleotides, about 800 nucleotides, about 700 nucleotides, about 600 nucleotides, about 500 nucleotides, about 400 nucleotides, about 300 nucleotides, about 200 nucleotides, about 100 nucleotides, about 80 nucleotides, about 70 nucleotides, about 60 nucleotides, about 50 nucleotides downstream of SEQ ID NO: 233. In some cases, the targeted region of the pre-mRNA is at most about 1500 nucleotides, about 1000 nucleotides, about 800 nucleotides, about 700 nucleotides, about 600 nucleotides, about 500 nucleotides, about 400 nucleotides, about 300 nucleotides, about 200 nucleotides, about 100 nucleotides, about 80 nucleotides, about 70 nucleotides, about 60 nucleotides, about 50 nucleotides downstream of genomic site GRCh38/hg38: chr11 72089165. In some cases. the targeted region of the pre-mRNA is at least about 1500 nucleotides, about 1000 nucleotides, about 800 nucleotides, about 700 nucleotides, about 600 nucleotides, about 500 nucleotides, about 400 nucleotides, about 300 nucleotides, about 200 nucleotides, about 100 nucleotides, about 80 nucleotides, about 70 nucleotides, about 60 nucleotides, about 50 nucleotides downstream of genomic site GRCh38/hg38: chr11 72089165. In some cases, the targeted region of the pre-mRNA is within a sequence SEQ ID NO: 233. In some cases, the targeted region of the pre-mRNA is within a sequence between a pair of genomic sites GRCh38/hg38: chr11 72089029, and GRCh38/hg38: chr11 72089165. In some cases, the therapeutic agent is an antisense oligomer complementary to a sequence with at least about 80%, 85%, 90%, 95%, 96%, 97%, 98%, 99% or 100% sequence identity to SEQ ID NO:233. In some cases, the therapeutic agent is an antisense oligomer complementary to a sequence with 100% sequence identity to SEQ ID NO:233. In some cases, the therapeutic agent increases level of a first processed mRNA encoding a protein having a sequence SEQ ID NO: 8200, and decreases level of a second processed mRNA encoding a protein having a sequence SEQ ID NO: 436. In some cases, the targeted region of the pre-mRNA is at most about 1500 nucleotides, about 1000 nucleotides, about 800 nucleotides, about 700 nucleotides, about 600 nucleotides, about 500 nucleotides, about 400 nucleotides, about 300 nucleotides, about 200 nucleotides, about 100 nucleotides, about 80 nucleotides, about 70 nucleotides, about 60 nucleotides, about 50 nucleotides upstream of SEQ ID NO: 234. In some cases, the targeted region of the pre-mRNA is at least about 1500 nucleotides, about 1000 nucleotides, about 800 nucleotides, about 700 nucleotides, about 600 nucleotides, about 500 nucleotides, about 400 nucleotides, about 300 nucleotides, about 200 nucleotides, about 100 nucleotides, about 80 nucleotides, about 70 nucleotides, about 60 nucleotides, about 50 nucleotides upstream of SEQ ID NO: 234. In some cases, the targeted region of the pre-mRNA is at most about 1500 nucleotides, about 1000 nucleotides, about 800 nucleotides, about 700 nucleotides, about 600 nucleotides, about 500 nucleotides, about 400 nucleotides, about 300 nucleotides, about 200 nucleotides, about 100 nucleotides, about 80 nucleotides, about 70 nucleotides, about 60 nucleotides, about 50 nucleotides upstream of genomic site GRCh38/hg38: chr1l 72089029. In some cases, the targeted region of the pre-mRNA is at least about 1500 nucleotides, about 1000 nucleotides, about 800 nucleotides, about 700 nucleotides, about 600 nucleotides, about 500 nucleotides, about 400 nucleotides, about 300 nucleotides, about 200 nucleotides, about 100 nucleotides, about 80 nucleotides, about 70 nucleotides, about 60 nucleotides, about 50 nucleotides upstream of genomic site GRCh38/hg38: chr11 72089029. In some cases, the targeted region of the pre-mRNA is at most about 1500 nucleotides, about 1000 nucleotides, about 800 nucleotides, about 700 nucleotides, about 600 nucleotides, about 500 nucleotides, about 400 nucleotides, about 300 nucleotides, about 200 nucleotides, about 100 nucleotides, about 80 nucleotides, about 70 nucleotides, about 60 nucleotides, about 50 nucleotides downstream of SEQ ID NO: 234. In some cases, the targeted region of the pre-mRNA is at least about 1500 nucleotides, about 1000 nucleotides, about 800 nucleotides, about 700 nucleotides, about 600 nucleotides, about 500 nucleotides, about 400 nucleotides, about 300 nucleotides, about 200 nucleotides, about 100 nucleotides, about 80 nucleotides, about 70 nucleotides, about 60 nucleotides, about 50 nucleotides downstream of SEQ ID NO: 234. In some cases, the targeted region of the pre-mRNA is at most about 1500 nucleotides, about 1000 nucleotides, about 800 nucleotides, about 700 nucleotides, about 600 nucleotides, about 500 nucleotides, about 400 nucleotides, about 300 nucleotides, about 200 nucleotides, about 100 nucleotides, about 80 nucleotides, about 70 nucleotides, about 60 nucleotides, about 50 nucleotides downstream of genomic site GRCh38/hg38: chr11 72089165. In some cases. the targeted region of the pre-mRNA is at least about 1500 nucleotides, about 1000 nucleotides, about 800 nucleotides, about 700 nucleotides, about 600 nucleotides, about 500 nucleotides, about 400 nucleotides, about 300 nucleotides, about 200 nucleotides, about 100 nucleotides, about 80 nucleotides, about 70 nucleotides, about 60 nucleotides, about 50 nucleotides downstream of genomic site GRCh38/hg38: chr11 72089165. In some cases, the targeted region of the pre-mRNA is within a sequence SEQ ID NO: 234. In some cases, the targeted region of the pre-mRNA is within a sequence between a pair of genomic sites GRCh38/hg38: chr11 72089029, and GRCh38/hg38: chr11 72089165. In some cases, the therapeutic agent is an antisense oligomer complementary to a sequence with at least about 80%, 85%, 90%, 95%, 96%, 97%, 98%, 99% or 100% sequence identity to SEQ ID NO:234. In some cases, the therapeutic agent is an antisense oligomer complementary to a sequence with 100% sequence identity to SEQ ID NO:234. In some cases, the therapeutic agent increases level of a first processed mRNA encoding a protein having a sequence SEQ ID NO: 8201, and decreases level of a second processed mRNA encoding a protein having a sequence SEQ ID NO: 437. In some cases, the targeted region of the pre-mRNA is at most about 1500 nucleotides, about 1000 nucleotides, about 800 nucleotides, about 700 nucleotides, about 600 nucleotides, about 500 nucleotides, about 400 nucleotides, about 300 nucleotides, about 200 nucleotides, about 100 nucleotides, about 80 nucleotides, about 70 nucleotides, about 60 nucleotides, about 50 nucleotides upstream of SEQ ID NO: 235. In some cases, the targeted region of the pre-mRNA is at least about 1500 nucleotides, about 1000 nucleotides, about 800 nucleotides, about 700 nucleotides, about 600 nucleotides, about 500 nucleotides, about 400 nucleotides, about 300 nucleotides, about 200 nucleotides, about 100 nucleotides, about 80 nucleotides, about 70 nucleotides, about 60 nucleotides, about 50 nucleotides upstream of SEQ ID NO: 235. In some cases, the targeted region of the pre-mRNA is at most about 1500 nucleotides, about 1000 nucleotides, about 800 nucleotides, about 700 nucleotides, about 600 nucleotides, about 500 nucleotides, about 400 nucleotides, about 300 nucleotides, about 200 nucleotides, about 100 nucleotides, about 80 nucleotides, about 70 nucleotides, about 60 nucleotides, about 50 nucleotides upstream of genomic site GRCh38/hg38: chr1l 72089029. In some cases, the targeted region of the pre-mRNA is at least about 1500 nucleotides, about 1000 nucleotides, about 800 nucleotides, about 700 nucleotides, about 600 nucleotides, about 500 nucleotides, about 400 nucleotides, about 300 nucleotides, about 200 nucleotides, about 100 nucleotides, about 80 nucleotides, about 70 nucleotides, about 60 nucleotides, about 50 nucleotides upstream of genomic site GRCh38/hg38: chr11 72089029. In some cases, the targeted region of the pre-mRNA is at most about 1500 nucleotides, about 1000 nucleotides, about 800 nucleotides, about 700 nucleotides, about 600 nucleotides, about 500 nucleotides, about 400 nucleotides, about 300 nucleotides, about 200 nucleotides, about 100 nucleotides, about 80 nucleotides, about 70 nucleotides, about 60 nucleotides, about 50 nucleotides downstream of SEQ ID NO: 235. In some cases, the targeted region of the pre-mRNA is at least about 1500 nucleotides, about 1000 nucleotides, about 800 nucleotides, about 700 nucleotides, about 600 nucleotides, about 500 nucleotides, about 400 nucleotides, about 300 nucleotides, about 200 nucleotides, about 100 nucleotides, about 80 nucleotides, about 70 nucleotides, about 60 nucleotides, about 50 nucleotides downstream of SEQ ID NO: 235. In some cases, the targeted region of the pre-mRNA is at most about 1500 nucleotides, about 1000 nucleotides, about 800 nucleotides, about 700 nucleotides, about 600 nucleotides, about 500 nucleotides, about 400 nucleotides, about 300 nucleotides, about 200 nucleotides, about 100 nucleotides, about 80 nucleotides, about 70 nucleotides, about 60 nucleotides, about 50 nucleotides downstream of genomic site GRCh38/hg38: chr11 72089165. In some cases. the targeted region of the pre-mRNA is at least about 1500 nucleotides, about 1000 nucleotides, about 800 nucleotides, about 700 nucleotides, about 600 nucleotides, about 500 nucleotides, about 400 nucleotides, about 300 nucleotides, about 200 nucleotides, about 100 nucleotides, about 80 nucleotides, about 70 nucleotides, about 60 nucleotides, about 50 nucleotides downstream of genomic site GRCh38/hg38: chr11 72089165. In some cases, the targeted region of the pre-mRNA is within a sequence SEQ ID NO: 235. In some cases, the targeted region of the pre-mRNA is within a sequence between a pair of genomic sites GRCh38/hg38: chr11 72089029, and GRCh38/hg38: chr11 72089165. In some cases, the therapeutic agent is an antisense oligomer complementary to a sequence with at least about 80%, 85%, 90%, 95%, 96%, 97%, 98%, 99% or 100% sequence identity to SEQ ID NO:235. In some cases, the therapeutic agent is an antisense oligomer complementary to a sequence with 100% sequence identity to SEQ ID NO:235. In some cases, the therapeutic agent is an antisense oligomer that has a sequence with at least about 80%, 85%, 90%, 95%, 96%, 97%, 98%, 99% or 100% sequence identity to a sequence selected from the group consisting of SEQ ID NOs: 4358-4423. In some cases, the therapeutic agent is an antisense oligomer that has a sequence selected from the group consisting of SEQ ID NOs: 4358-4423. In some cases, the target peptide sequence is a portion of LRTOMT protein, and the method treats a disease or the condition that comprises Deafness, Automal Recessive 71.

[0215] LZTFL1

[0216] In some cases, the target peptide sequence is a portion of LZTFL1 protein. In some cases, the therapeutic agent increases level of a first processed mRNA encoding a protein having a sequence SEQ ID NO: 8202, and decreases level of a second processed mRNA encoding a protein having a sequence SEQ ID NO: 438. In some cases, the targeted region of the pre-mRNA is at most about 1500 nucleotides, about 1000 nucleotides, about 800 nucleotides, about 700 nucleotides, about 600 nucleotides, about 500 nucleotides, about 400 nucleotides, about 300 nucleotides, about 200 nucleotides, about 100 nucleotides, about 80 nucleotides, about 70 nucleotides, about 60 nucleotides, about 50 nucleotides upstream of SEQ ID NO: 236. In some cases, the targeted region of the pre-mRNA is at least about 1500 nucleotides, about 1000 nucleotides, about 800 nucleotides, about 700 nucleotides, about 600 nucleotides, about 500 nucleotides, about 400 nucleotides, about 300 nucleotides, about 200 nucleotides, about 100 nucleotides, about 80 nucleotides, about 70 nucleotides, about 60 nucleotides, about 50 nucleotides upstream of SEQ ID NO: 236. In some cases, the targeted region of the pre-mRNA is at most about 1500 nucleotides, about 1000 nucleotides, about 800 nucleotides, about 700 nucleotides, about 600 nucleotides, about 500 nucleotides, about 400 nucleotides, about 300 nucleotides, about 200 nucleotides, about 100 nucleotides, about 80 nucleotides, about 70 nucleotides, about 60 nucleotides, about 50 nucleotides upstream of genomic site GRCh38/hg38: chr3 45838051. In some cases, the targeted region of the pre-mRNA is at least about 1500 nucleotides, about 1000 nucleotides, about 800 nucleotides, about 700 nucleotides, about 600 nucleotides, about 500 nucleotides, about 400 nucleotides, about 300 nucleotides, about 200 nucleotides, about 100 nucleotides, about 80 nucleotides, about 70 nucleotides, about 60 nucleotides, about 50 nucleotides upstream of genomic site GRCh38/hg38: chr3 45838051. In some cases, the targeted region of the pre-mRNA is at most about 1500 nucleotides, about 1000 nucleotides, about 800 nucleotides, about 700 nucleotides, about 600 nucleotides, about 500 nucleotides, about 400 nucleotides, about 300 nucleotides, about 200 nucleotides, about 100 nucleotides, about 80 nucleotides, about 70 nucleotides, about 60 nucleotides, about 50 nucleotides downstream of SEQ ID NO: 236. In some cases, the targeted region of the pre-mRNA is at least about 1500 nucleotides, about 1000 nucleotides, about 800 nucleotides, about 700 nucleotides, about 600 nucleotides, about 500 nucleotides, about 400 nucleotides, about 300 nucleotides, about 200 nucleotides, about 100 nucleotides, about 80 nucleotides, about 70 nucleotides, about 60 nucleotides, about 50 nucleotides downstream of SEQ ID NO: 236. In some cases, the targeted region of the pre-mRNA is at most about 1500 nucleotides, about 1000 nucleotides, about 800 nucleotides, about 700 nucleotides, about 600 nucleotides, about 500 nucleotides, about 400 nucleotides, about 300 nucleotides, about 200 nucleotides, about 100 nucleotides, about 80 nucleotides, about 70 nucleotides, about 60 nucleotides, about 50 nucleotides downstream of genomic site GRCh38/hg38: chr3 45837927. In some cases. the targeted region of the pre-mRNA is at least about 1500 nucleotides, about 1000 nucleotides, about 800 nucleotides, about 700 nucleotides, about 600 nucleotides, about 500 nucleotides, about 400 nucleotides, about 300 nucleotides, about 200 nucleotides, about 100 nucleotides, about 80 nucleotides, about 70 nucleotides, about 60 nucleotides, about 50 nucleotides downstream of genomic site GRCh38/hg38: chr3 45837927. In some cases, the targeted region of the pre-mRNA is within a sequence SEQ ID NO: 236. In some cases, the targeted region of the pre-mRNA is within a sequence between a pair of genomic sites GRCh38/hg38: chr3 45838051, and GRCh38/hg38: chr3 45837927. In some cases, the therapeutic agent is an antisense oligomer complementary to a sequence with at least about 80%, 85%, 90%, 95%, 96%, 97%, 98%, 99% or 100% sequence identity to SEQ ID NO:236. In some cases, the therapeutic agent is an antisense oligomer complementary to a sequence with 100% sequence identity to SEQ ID NO:236. In some cases, the therapeutic agent is an antisense oligomer that has a sequence with at least about 80%, 85%, 90%, 95%, 96%, 97%, 98%, 99% or 100% sequence identity to a sequence selected from the group consisting of SEQ ID NOs: 4424-4487. In some cases, the therapeutic agent is an antisense oligomer that has a sequence selected from the group consisting of SEQ ID NOs: 4424-4487. In some cases, the target peptide sequence is a portion of LZTFL1 protein, and the method treats a disease or the condition that comprises Bardet-Biedl Syndrome; Polydactyly; Ciliopathies; or Bardet-Biedl Syndrome 17.

[0217] MAGI2

[0218] In some cases, the target peptide sequence is a portion of MAGI2 protein. In some cases, the therapeutic agent increases level of a first processed mRNA encoding a protein having a sequence SEQ ID NO: 8203, and decreases level of a second processed mRNA encoding a protein having a sequence SEQ ID NO: 439. In some cases, the targeted region of the pre-mRNA is at most about 1500 nucleotides, about 1000 nucleotides, about 800 nucleotides, about 700 nucleotides, about 600 nucleotides, about 500 nucleotides, about 400 nucleotides, about 300 nucleotides, about 200 nucleotides, about 100 nucleotides, about 80 nucleotides, about 70 nucleotides, about 60 nucleotides, about 50 nucleotides upstream of SEQ ID NO: 237. In some cases, the targeted region of the pre-mRNA is at least about 1500 nucleotides, about 1000 nucleotides, about 800 nucleotides, about 700 nucleotides, about 600 nucleotides, about 500 nucleotides, about 400 nucleotides, about 300 nucleotides, about 200 nucleotides, about 100 nucleotides, about 80 nucleotides, about 70 nucleotides, about 60 nucleotides, about 50 nucleotides upstream of SEQ ID NO: 237. In some cases, the targeted region of the pre-mRNA is at most about 1500 nucleotides, about 1000 nucleotides, about 800 nucleotides, about 700 nucleotides, about 600 nucleotides, about 500 nucleotides, about 400 nucleotides, about 300 nucleotides, about 200 nucleotides, about 100 nucleotides, about 80 nucleotides, about 70 nucleotides, about 60 nucleotides, about 50 nucleotides upstream of genomic site GRCh38/hg38: chr7 78554671. In some cases, the targeted region of the pre-mRNA is at least about 1500 nucleotides, about 1000 nucleotides, about 800 nucleotides, about 700 nucleotides, about 600 nucleotides, about 500 nucleotides, about 400 nucleotides, about 300 nucleotides, about 200 nucleotides, about 100 nucleotides, about 80 nucleotides, about 70 nucleotides, about 60 nucleotides, about 50 nucleotides upstream of genomic site GRCh38/hg38: chr7 78554671. In some cases, the targeted region of the pre-mRNA is at most about 1500 nucleotides, about 1000 nucleotides, about 800 nucleotides, about 700 nucleotides, about 600 nucleotides, about 500 nucleotides, about 400 nucleotides, about 300 nucleotides, about 200 nucleotides, about 100 nucleotides, about 80 nucleotides, about 70 nucleotides, about 60 nucleotides, about 50 nucleotides downstream of SEQ ID NO: 237. In some cases, the targeted region of the pre-mRNA is at least about 1500 nucleotides, about 1000 nucleotides, about 800 nucleotides, about 700 nucleotides, about 600 nucleotides, about 500 nucleotides, about 400 nucleotides, about 300 nucleotides, about 200 nucleotides, about 100 nucleotides, about 80 nucleotides, about 70 nucleotides, about 60 nucleotides, about 50 nucleotides downstream of SEQ ID NO: 237. In some cases, the targeted region of the pre-mRNA is at most about 1500 nucleotides, about 1000 nucleotides, about 800 nucleotides, about 700 nucleotides, about 600 nucleotides, about 500 nucleotides, about 400 nucleotides, about 300 nucleotides, about 200 nucleotides, about 100 nucleotides, about 80 nucleotides, about 70 nucleotides, about 60 nucleotides, about 50 nucleotides downstream of genomic site GRCh38/hg38: chr7 78554567. In some cases. the targeted region of the pre-mRNA is at least about 1500 nucleotides, about 1000 nucleotides, about 800 nucleotides, about 700 nucleotides, about 600 nucleotides, about 500 nucleotides, about 400 nucleotides, about 300 nucleotides, about 200 nucleotides, about 100 nucleotides, about 80 nucleotides, about 70 nucleotides, about 60 nucleotides, about 50 nucleotides downstream of genomic site GRCh38/hg38: chr7 78554567. In some cases, the targeted region of the pre-mRNA is within a sequence SEQ ID NO: 237. In some cases, the targeted region of the pre-mRNA is within a sequence between a pair of genomic sites GRCh38/hg38: chr7 78554671, and GRCh38/hg38: chr7 78554567. In some cases, the therapeutic agent is an antisense oligomer complementary to a sequence with at least about 80%, 85%, 90%, 95%, 96%, 97%, 98%, 99% or 100% sequence identity to SEQ ID NO:237. In some cases, the therapeutic agent is an antisense oligomer complementary to a sequence with 100% sequence identity to SEQ ID NO:237. In some cases, the therapeutic agent is an antisense oligomer that has a sequence with at least about 80%, 85%, 90%, 95%, 96%, 97%, 98%, 99% or 100% sequence identity to a sequence selected from the group consisting of SEQ ID NOs: 4488-4547. In some cases, the therapeutic agent is an antisense oligomer that has a sequence selected from the group consisting of SEQ ID NOs: 4488-4547. In some cases, the target peptide sequence is a portion of MAGI2 protein, and the method treats a disease or the condition that comprises Intellectual Disability; Major Affective Disorder 2; Bipolar Disorder; Epileptic encephalopathy; or Schizophrenia.

[0219] MERTK

[0220] In some cases, the target peptide sequence is a portion of MERTK protein. In some cases, the therapeutic agent increases level of a first processed mRNA encoding a protein having a sequence SEQ ID NO: 8206, and decreases level of a second processed mRNA encoding a protein having a sequence SEQ ID NO: 442. In some cases, the targeted region of the pre-mRNA is at most about 1500 nucleotides, about 1000 nucleotides, about 800 nucleotides, about 700 nucleotides, about 600 nucleotides, about 500 nucleotides, about 400 nucleotides, about 300 nucleotides, about 200 nucleotides, about 100 nucleotides, about 80 nucleotides, about 70 nucleotides, about 60 nucleotides, about 50 nucleotides upstream of SEQ ID NO: 240. In some cases, the targeted region of the pre-mRNA is at least about 1500 nucleotides, about 1000 nucleotides, about 800 nucleotides, about 700 nucleotides, about 600 nucleotides, about 500 nucleotides, about 400 nucleotides, about 300 nucleotides, about 200 nucleotides, about 100 nucleotides, about 80 nucleotides, about 70 nucleotides, about 60 nucleotides, about 50 nucleotides upstream of SEQ ID NO: 240. In some cases, the targeted region of the pre-mRNA is at most about 1500 nucleotides, about 1000 nucleotides, about 800 nucleotides, about 700 nucleotides, about 600 nucleotides, about 500 nucleotides, about 400 nucleotides, about 300 nucleotides, about 200 nucleotides, about 100 nucleotides, about 80 nucleotides, about 70 nucleotides, about 60 nucleotides, about 50 nucleotides upstream of genomic site GRCh38/hg38: chr2 111944960. In some cases, the targeted region of the pre-mRNA is at least about 1500 nucleotides, about 1000 nucleotides, about 800 nucleotides, about 700 nucleotides, about 600 nucleotides, about 500 nucleotides, about 400 nucleotides, about 300 nucleotides, about 200 nucleotides, about 100 nucleotides, about 80 nucleotides, about 70 nucleotides, about 60 nucleotides, about 50 nucleotides upstream of genomic site GRCh38/hg38: chr2 111944960. In some cases, the targeted region of the pre-mRNA is at most about 1500 nucleotides, about 1000 nucleotides, about 800 nucleotides, about 700 nucleotides, about 600 nucleotides, about 500 nucleotides, about 400 nucleotides, about 300 nucleotides, about 200 nucleotides, about 100 nucleotides, about 80 nucleotides, about 70 nucleotides, about 60 nucleotides, about 50 nucleotides downstream of SEQ ID NO: 240. In some cases, the targeted region of the pre-mRNA is at least about 1500 nucleotides, about 1000 nucleotides, about 800 nucleotides, about 700 nucleotides, about 600 nucleotides, about 500 nucleotides, about 400 nucleotides, about 300 nucleotides, about 200 nucleotides, about 100 nucleotides, about 80 nucleotides, about 70 nucleotides, about 60 nucleotides, about 50 nucleotides downstream of SEQ ID NO: 240. In some cases, the targeted region of the pre-mRNA is at most about 1500 nucleotides, about 1000 nucleotides, about 800 nucleotides, about 700 nucleotides, about 600 nucleotides, about 500 nucleotides, about 400 nucleotides, about 300 nucleotides, about 200 nucleotides, about 100 nucleotides, about 80 nucleotides, about 70 nucleotides, about 60 nucleotides, about 50 nucleotides downstream of genomic site GRCh38/hg38: chr2 111945060. In some cases. the targeted region of the pre-mRNA is at least about 1500 nucleotides, about 1000 nucleotides, about 800 nucleotides, about 700 nucleotides, about 600 nucleotides, about 500 nucleotides, about 400 nucleotides, about 300 nucleotides, about 200 nucleotides, about 100 nucleotides, about 80 nucleotides, about 70 nucleotides, about 60 nucleotides, about 50 nucleotides downstream of genomic site GRCh38/hg38: chr2 111945060. In some cases, the targeted region of the pre-mRNA is within a sequence SEQ ID NO: 240. In some cases, the targeted region of the pre-mRNA is within a sequence between a pair of genomic sites GRCh38/hg38: chr2 111944960, and GRCh38/hg38: chr2 111945060. In some cases, the therapeutic agent is an antisense oligomer complementary to a sequence with at least about 80%, 85%, 90%, 95%, 96%, 97%, 98%, 99% or 100% sequence identity to SEQ ID NO:240. In some cases, the therapeutic agent is an antisense oligomer complementary to a sequence with 100% sequence identity to SEQ ID NO:240. In some cases, the therapeutic agent is an antisense oligomer that has a sequence with at least about 80%, 85%, 90%, 95%, 96%, 97%, 98%, 99% or 100% sequence identity to a sequence selected from the group consisting of SEQ ID NOs: 4612-4670. In some cases, the therapeutic agent is an antisense oligomer that has a sequence selected from the group consisting of SEQ ID NOs: 4612-4670. In some cases, the target peptide sequence is a portion of MERTK protein, and the method treats a disease or the condition that comprises Benign neoplasm of adrenal gland; Retinitis Pigmentosa; Conventional (Clear Cell) Renal Cell Carcinoma; Squamous cell carcinoma of the head and neck; Malignant neoplasm of aortic body and other paraganglia; Retinitis Pigmentosa 38; Malignant Adrenal Medulla Neoplasm; or Benign neoplasm of aortic body and other paraganglia.

[0221] MFSD2A

[0222] In some cases, the target peptide sequence is a portion of MFSD2A protein. In some cases, the therapeutic agent increases level of a first processed mRNA encoding a protein having a sequence SEQ ID NO: 8207, and decreases level of a second processed mRNA encoding a protein having a sequence SEQ ID NO: 443. In some cases, the targeted region of the pre-mRNA is at most about 1500 nucleotides, about 1000 nucleotides, about 800 nucleotides, about 700 nucleotides, about 600 nucleotides, about 500 nucleotides, about 400 nucleotides, about 300 nucleotides, about 200 nucleotides, about 100 nucleotides, about 80 nucleotides, about 70 nucleotides, about 60 nucleotides, about 50 nucleotides upstream of SEQ ID NO: 241. In some cases, the targeted region of the pre-mRNA is at least about 1500 nucleotides, about 1000 nucleotides, about 800 nucleotides, about 700 nucleotides, about 600 nucleotides, about 500 nucleotides, about 400 nucleotides, about 300 nucleotides, about 200 nucleotides, about 100 nucleotides, about 80 nucleotides, about 70 nucleotides, about 60 nucleotides, about 50 nucleotides upstream of SEQ ID NO: 241. In some cases, the targeted region of the pre-mRNA is at most about 1500 nucleotides, about 1000 nucleotides, about 800 nucleotides, about 700 nucleotides, about 600 nucleotides, about 500 nucleotides, about 400 nucleotides, about 300 nucleotides, about 200 nucleotides, about 100 nucleotides, about 80 nucleotides, about 70 nucleotides, about 60 nucleotides, about 50 nucleotides upstream of genomic site GRCh38/hg38: chr1 39965211. In some cases, the targeted region of the pre-mRNA is at least about 1500 nucleotides, about 1000 nucleotides, about 800 nucleotides, about 700 nucleotides, about 600 nucleotides, about 500 nucleotides, about 400 nucleotides, about 300 nucleotides, about 200 nucleotides, about 100 nucleotides, about 80 nucleotides, about 70 nucleotides, about 60 nucleotides, about 50 nucleotides upstream of genomic site GRCh38/hg38: chr1 39965211. In some cases, the targeted region of the pre-mRNA is at most about 1500 nucleotides, about 1000 nucleotides, about 800 nucleotides, about 700 nucleotides, about 600 nucleotides, about 500 nucleotides, about 400 nucleotides, about 300 nucleotides, about 200 nucleotides, about 100 nucleotides, about 80 nucleotides, about 70 nucleotides, about 60 nucleotides, about 50 nucleotides downstream of SEQ ID NO: 241. In some cases, the targeted region of the pre-mRNA is at least about 1500 nucleotides, about 1000 nucleotides, about 800 nucleotides, about 700 nucleotides, about 600 nucleotides, about 500 nucleotides, about 400 nucleotides, about 300 nucleotides, about 200 nucleotides, about 100 nucleotides, about 80 nucleotides, about 70 nucleotides, about 60 nucleotides, about 50 nucleotides downstream of SEQ ID NO: 241. In some cases, the targeted region of the pre-mRNA is at most about 1500 nucleotides, about 1000 nucleotides, about 800 nucleotides, about 700 nucleotides, about 600 nucleotides, about 500 nucleotides, about 400 nucleotides, about 300 nucleotides, about 200 nucleotides, about 100 nucleotides, about 80 nucleotides, about 70 nucleotides, about 60 nucleotides, about 50 nucleotides downstream of genomic site GRCh38/hg38: chr1 39965334. In some cases. the targeted region of the pre-mRNA is at least about 1500 nucleotides, about 1000 nucleotides, about 800 nucleotides, about 700 nucleotides, about 600 nucleotides, about 500 nucleotides, about 400 nucleotides, about 300 nucleotides, about 200 nucleotides, about 100 nucleotides, about 80 nucleotides, about 70 nucleotides, about 60 nucleotides, about 50 nucleotides downstream of genomic site GRCh38/hg38: chr1 39965334. In some cases, the targeted region of the pre-mRNA is within a sequence SEQ ID NO: 241. In some cases, the targeted region of the pre-mRNA is within a sequence between a pair of genomic sites GRCh38/hg38: chr1 39965211, and GRCh38/hg38: chr1 39965334. In some cases, the therapeutic agent is an antisense oligomer complementary to a sequence with at least about 80%, 85%, 90%, 95%, 96%, 97%, 98%, 99% or 100% sequence identity to SEQ ID NO:241. In some cases, the therapeutic agent is an antisense oligomer complementary to a sequence with 100% sequence identity to SEQ ID NO:241. In some cases, the therapeutic agent is an antisense oligomer that has a sequence with at least about 80%, 85%, 90%, 95%, 96%, 97%, 98%, 99% or 100% sequence identity to a sequence selected from the group consisting of SEQ ID NOs: 4671-4734. In some cases, the therapeutic agent is an antisense oligomer that has a sequence selected from the group consisting of SEQ ID NOs: 4671-4734. In some cases, the target peptide sequence is a portion of MFSD2A protein, and the method treats a disease or the condition that comprises Intellectual Disability; Primary microcephaly; Microcephaly 15, Primary, Autosomal Recessive; Autosomal Recessive Primary Microcephaly; or Microcephaly. In some cases, the method treats a cancer that is associated with MFSD2A protein.

[0223] MLF1

[0224] In some cases, the target peptide sequence is a portion of MLF1 protein. In some cases, the therapeutic agent increases level of a first processed mRNA encoding a protein having a sequence SEQ ID NO: 8208, and decreases level of a second processed mRNA encoding a protein having a sequence SEQ ID NO: 444. In some cases, the targeted region of the pre-mRNA is at most about 1500 nucleotides, about 1000 nucleotides, about 800 nucleotides, about 700 nucleotides, about 600 nucleotides, about 500 nucleotides, about 400 nucleotides, about 300 nucleotides, about 200 nucleotides, about 100 nucleotides, about 80 nucleotides, about 70 nucleotides, about 60 nucleotides, about 50 nucleotides upstream of SEQ ID NO: 242. In some cases, the targeted region of the pre-mRNA is at least about 1500 nucleotides, about 1000 nucleotides, about 800 nucleotides, about 700 nucleotides, about 600 nucleotides, about 500 nucleotides, about 400 nucleotides, about 300 nucleotides, about 200 nucleotides, about 100 nucleotides, about 80 nucleotides, about 70 nucleotides, about 60 nucleotides, about 50 nucleotides upstream of SEQ ID NO: 242. In some cases, the targeted region of the pre-mRNA is at most about 1500 nucleotides, about 1000 nucleotides, about 800 nucleotides, about 700 nucleotides, about 600 nucleotides, about 500 nucleotides, about 400 nucleotides, about 300 nucleotides, about 200 nucleotides, about 100 nucleotides, about 80 nucleotides, about 70 nucleotides, about 60 nucleotides, about 50 nucleotides upstream of genomic site GRCh38/hg38: chr3 158592434. In some cases, the targeted region of the pre-mRNA is at least about 1500 nucleotides, about 1000 nucleotides, about 800 nucleotides, about 700 nucleotides, about 600 nucleotides, about 500 nucleotides, about 400 nucleotides, about 300 nucleotides, about 200 nucleotides, about 100 nucleotides, about 80 nucleotides, about 70 nucleotides, about 60 nucleotides, about 50 nucleotides upstream of genomic site GRCh38/hg38: chr3 158592434. In some cases, the targeted region of the pre-mRNA is at most about 1500 nucleotides, about 1000 nucleotides, about 800 nucleotides, about 700 nucleotides, about 600 nucleotides, about 500 nucleotides, about 400 nucleotides, about 300 nucleotides, about 200 nucleotides, about 100 nucleotides, about 80 nucleotides, about 70 nucleotides, about 60 nucleotides, about 50 nucleotides downstream of SEQ ID NO: 242. In some cases, the targeted region of the pre-mRNA is at least about 1500 nucleotides, about 1000 nucleotides, about 800 nucleotides, about 700 nucleotides, about 600 nucleotides, about 500 nucleotides, about 400 nucleotides, about 300 nucleotides, about 200 nucleotides, about 100 nucleotides, about 80 nucleotides, about 70 nucleotides, about 60 nucleotides, about 50 nucleotides downstream of SEQ ID NO: 242. In some cases, the targeted region of the pre-mRNA is at most about 1500 nucleotides, about 1000 nucleotides, about 800 nucleotides, about 700 nucleotides, about 600 nucleotides, about 500 nucleotides, about 400 nucleotides, about 300 nucleotides, about 200 nucleotides, about 100 nucleotides, about 80 nucleotides, about 70 nucleotides, about 60 nucleotides, about 50 nucleotides downstream of genomic site GRCh38/hg38: chr3 158592581. In some cases. the targeted region of the pre-mRNA is at least about 1500 nucleotides, about 1000 nucleotides, about 800 nucleotides, about 700 nucleotides, about 600 nucleotides, about 500 nucleotides, about 400 nucleotides, about 300 nucleotides, about 200 nucleotides, about 100 nucleotides, about 80 nucleotides, about 70 nucleotides, about 60 nucleotides, about 50 nucleotides downstream of genomic site GRCh38/hg38: chr3 158592581. In some cases, the targeted region of the pre-mRNA is within a sequence SEQ ID NO: 242. In some cases, the targeted region of the pre-mRNA is within a sequence between a pair of genomic sites GRCh38/hg38: chr3 158592434, and GRCh38/hg38: chr3 158592581. In some cases, the therapeutic agent is an antisense oligomer complementary to a sequence with at least about 80%, 85%, 90%, 95%, 96%, 97%, 98%, 99% or 100% sequence identity to SEQ ID NO:242. In some cases, the therapeutic agent is an antisense oligomer complementary to a sequence with 100% sequence identity to SEQ ID NO:242. In some cases, the therapeutic agent increases level of a first processed mRNA encoding a protein having a sequence SEQ ID NO: 8209, and decreases level of a second processed mRNA encoding a protein having a sequence SEQ ID NO: 445. In some cases, the targeted region of the pre-mRNA is at most about 1500 nucleotides, about 1000 nucleotides, about 800 nucleotides, about 700 nucleotides, about 600 nucleotides, about 500 nucleotides, about 400 nucleotides, about 300 nucleotides, about 200 nucleotides, about 100 nucleotides, about 80 nucleotides, about 70 nucleotides, about 60 nucleotides, about 50 nucleotides upstream of SEQ ID NO: 243. In some cases, the targeted region of the pre-mRNA is at least about 1500 nucleotides, about 1000 nucleotides, about 800 nucleotides, about 700 nucleotides, about 600 nucleotides, about 500 nucleotides, about 400 nucleotides, about 300 nucleotides, about 200 nucleotides, about 100 nucleotides, about 80 nucleotides, about 70 nucleotides, about 60 nucleotides, about 50 nucleotides upstream of SEQ ID NO: 243. In some cases, the targeted region of the pre-mRNA is at most about 1500 nucleotides, about 1000 nucleotides, about 800 nucleotides, about 700 nucleotides, about 600 nucleotides, about 500 nucleotides, about 400 nucleotides, about 300 nucleotides, about 200 nucleotides, about 100 nucleotides, about 80 nucleotides, about 70 nucleotides, about 60 nucleotides, about 50 nucleotides upstream of genomic site GRCh38/hg38: chr3 158592434. In some cases, the targeted region of the pre-mRNA is at least about 1500 nucleotides, about 1000 nucleotides, about 800 nucleotides, about 700 nucleotides, about 600 nucleotides, about 500 nucleotides, about 400 nucleotides, about 300 nucleotides, about 200 nucleotides, about 100 nucleotides, about 80 nucleotides, about 70 nucleotides, about 60 nucleotides, about 50 nucleotides upstream of genomic site GRCh38/hg38: chr3 158592434. In some cases, the targeted region of the pre-mRNA is at most about 1500 nucleotides, about 1000 nucleotides, about 800 nucleotides, about 700 nucleotides, about 600 nucleotides, about 500 nucleotides, about 400 nucleotides, about 300 nucleotides, about 200 nucleotides, about 100 nucleotides, about 80 nucleotides, about 70 nucleotides, about 60 nucleotides, about 50 nucleotides downstream of SEQ ID NO: 243. In some cases, the targeted region of the pre-mRNA is at least about 1500 nucleotides, about 1000 nucleotides, about 800 nucleotides, about 700 nucleotides, about 600 nucleotides, about 500 nucleotides, about 400 nucleotides, about 300 nucleotides, about 200 nucleotides, about 100 nucleotides, about 80 nucleotides, about 70 nucleotides, about 60 nucleotides, about 50 nucleotides downstream of SEQ ID NO: 243. In some cases, the targeted region of the pre-mRNA is at most about 1500 nucleotides, about 1000 nucleotides, about 800 nucleotides, about 700 nucleotides, about 600 nucleotides, about 500 nucleotides, about 400 nucleotides, about 300 nucleotides, about 200 nucleotides, about 100 nucleotides, about 80 nucleotides, about 70 nucleotides, about 60 nucleotides, about 50 nucleotides downstream of genomic site GRCh38/hg38: chr3 158592581. In some cases. the targeted region of the pre-mRNA is at least about 1500 nucleotides, about 1000 nucleotides, about 800 nucleotides, about 700 nucleotides, about 600 nucleotides, about 500 nucleotides, about 400 nucleotides, about 300 nucleotides, about 200 nucleotides, about 100 nucleotides, about 80 nucleotides, about 70 nucleotides, about 60 nucleotides, about 50 nucleotides downstream of genomic site GRCh38/hg38: chr3 158592581. In some cases, the targeted region of the pre-mRNA is within a sequence SEQ ID NO: 243. In some cases, the targeted region of the pre-mRNA is within a sequence between a pair of genomic sites GRCh38/hg38: chr3 158592434, and GRCh38/hg38: chr3 158592581. In some cases, the therapeutic agent is an antisense oligomer complementary to a sequence with at least about 80%, 85%, 90%, 95%, 96%, 97%, 98%, 99% or 100% sequence identity to SEQ ID NO:243. In some cases, the therapeutic agent is an antisense oligomer complementary to a sequence with 100% sequence identity to SEQ ID NO:243. In some cases, the therapeutic agent increases level of a first processed mRNA encoding a protein having a sequence SEQ ID NO: 8210, and decreases level of a second processed mRNA encoding a protein having a sequence SEQ ID NO: 446. In some cases, the targeted region of the pre-mRNA is at most about 1500 nucleotides, about 1000 nucleotides, about 800 nucleotides, about 700 nucleotides, about 600 nucleotides, about 500 nucleotides, about 400 nucleotides, about 300 nucleotides, about 200 nucleotides, about 100 nucleotides, about 80 nucleotides, about 70 nucleotides, about 60 nucleotides, about 50 nucleotides upstream of SEQ ID NO: 244. In some cases, the targeted region of the pre-mRNA is at least about 1500 nucleotides, about 1000 nucleotides, about 800 nucleotides, about 700 nucleotides, about 600 nucleotides, about 500 nucleotides, about 400 nucleotides, about 300 nucleotides, about 200 nucleotides, about 100 nucleotides, about 80 nucleotides, about 70 nucleotides, about 60 nucleotides, about 50 nucleotides upstream of SEQ ID NO: 244. In some cases, the targeted region of the pre-mRNA is at most about 1500 nucleotides, about 1000 nucleotides, about 800 nucleotides, about 700 nucleotides, about 600 nucleotides, about 500 nucleotides, about 400 nucleotides, about 300 nucleotides, about 200 nucleotides, about 100 nucleotides, about 80 nucleotides, about 70 nucleotides, about 60 nucleotides, about 50 nucleotides upstream of genomic site GRCh38/hg38: chr3 158592434. In some cases, the targeted region of the pre-mRNA is at least about 1500 nucleotides, about 1000 nucleotides, about 800 nucleotides, about 700 nucleotides, about 600 nucleotides, about 500 nucleotides, about 400 nucleotides, about 300 nucleotides, about 200 nucleotides, about 100 nucleotides, about 80 nucleotides, about 70 nucleotides, about 60 nucleotides, about 50 nucleotides upstream of genomic site GRCh38/hg38: chr3 158592434. In some cases, the targeted region of the pre-mRNA is at most about 1500 nucleotides, about 1000 nucleotides, about 800 nucleotides, about 700 nucleotides, about 600 nucleotides, about 500 nucleotides, about 400 nucleotides, about 300 nucleotides, about 200 nucleotides, about 100 nucleotides, about 80 nucleotides, about 70 nucleotides, about 60 nucleotides, about 50 nucleotides downstream of SEQ ID NO: 244. In some cases, the targeted region of the pre-mRNA is at least about 1500 nucleotides, about 1000 nucleotides, about 800 nucleotides, about 700 nucleotides, about 600 nucleotides, about 500 nucleotides, about 400 nucleotides, about 300 nucleotides, about 200 nucleotides, about 100 nucleotides, about 80 nucleotides, about 70 nucleotides, about 60 nucleotides, about 50 nucleotides downstream of SEQ ID NO: 244. In some cases, the targeted region of the pre-mRNA is at most about 1500 nucleotides, about 1000 nucleotides, about 800 nucleotides, about 700 nucleotides, about 600 nucleotides, about 500 nucleotides, about 400 nucleotides, about 300 nucleotides, about 200 nucleotides, about 100 nucleotides, about 80 nucleotides, about 70 nucleotides, about 60 nucleotides, about 50 nucleotides downstream of genomic site GRCh38/hg38: chr3 158592581. In some cases. the targeted region of the pre-mRNA is at least about 1500 nucleotides, about 1000 nucleotides, about 800 nucleotides, about 700 nucleotides, about 600 nucleotides, about 500 nucleotides, about 400 nucleotides, about 300 nucleotides, about 200 nucleotides, about 100 nucleotides, about 80 nucleotides, about 70 nucleotides, about 60 nucleotides, about 50 nucleotides downstream of genomic site GRCh38/hg38: chr3 158592581. In some cases, the targeted region of the pre-mRNA is within a sequence SEQ ID NO: 244. In some cases, the targeted region of the pre-mRNA is within a sequence between a pair of genomic sites GRCh38/hg38: chr3 158592434, and GRCh38/hg38: chr3 158592581. In some cases, the therapeutic agent is an antisense oligomer complementary to a sequence with at least about 80%, 85%, 90%, 95%, 96%, 97%, 98%, 99% or 100% sequence identity to SEQ ID NO:244. In some cases, the therapeutic agent is an antisense oligomer complementary to a sequence with 100% sequence identity to SEQ ID NO:244. In some cases, the therapeutic agent increases level of a first processed mRNA encoding a protein having a sequence SEQ ID NO: 8211, and decreases level of a second processed mRNA encoding a protein having a sequence SEQ ID NO: 447. In some cases, the targeted region of the pre-mRNA is at most about 1500 nucleotides, about 1000 nucleotides, about 800 nucleotides, about 700 nucleotides, about 600 nucleotides, about 500 nucleotides, about 400 nucleotides, about 300 nucleotides, about 200 nucleotides, about 100 nucleotides, about 80 nucleotides, about 70 nucleotides, about 60 nucleotides, about 50 nucleotides upstream of SEQ ID NO: 245. In some cases, the targeted region of the pre-mRNA is at least about 1500 nucleotides, about 1000 nucleotides, about 800 nucleotides, about 700 nucleotides, about 600 nucleotides, about 500 nucleotides, about 400 nucleotides, about 300 nucleotides, about 200 nucleotides, about 100 nucleotides, about 80 nucleotides, about 70 nucleotides, about 60 nucleotides, about 50 nucleotides upstream of SEQ ID NO: 245. In some cases, the targeted region of the pre-mRNA is at most about 1500 nucleotides, about 1000 nucleotides, about 800 nucleotides, about 700 nucleotides, about 600 nucleotides, about 500 nucleotides, about 400 nucleotides, about 300 nucleotides, about 200 nucleotides, about 100 nucleotides, about 80 nucleotides, about 70 nucleotides, about 60 nucleotides, about 50 nucleotides upstream of genomic site GRCh38/hg38: chr3 158592434. In some cases, the targeted region of the pre-mRNA is at least about 1500 nucleotides, about 1000 nucleotides, about 800 nucleotides, about 700 nucleotides, about 600 nucleotides, about 500 nucleotides, about 400 nucleotides, about 300 nucleotides, about 200 nucleotides, about 100 nucleotides, about 80 nucleotides, about 70 nucleotides, about 60 nucleotides, about 50 nucleotides upstream of genomic site GRCh38/hg38: chr3 158592434. In some cases, the targeted region of the pre-mRNA is at most about 1500 nucleotides, about 1000 nucleotides, about 800 nucleotides, about 700 nucleotides, about 600 nucleotides, about 500 nucleotides, about 400 nucleotides, about 300 nucleotides, about 200 nucleotides, about 100 nucleotides, about 80 nucleotides, about 70 nucleotides, about 60 nucleotides, about 50 nucleotides downstream of SEQ ID NO: 245. In some cases, the targeted region of the pre-mRNA is at least about 1500 nucleotides, about 1000 nucleotides, about 800 nucleotides, about 700 nucleotides, about 600 nucleotides, about 500 nucleotides, about 400 nucleotides, about 300 nucleotides, about 200 nucleotides, about 100 nucleotides, about 80 nucleotides, about 70 nucleotides, about 60 nucleotides, about 50 nucleotides downstream of SEQ ID NO: 245. In some cases, the targeted region of the pre-mRNA is at most about 1500 nucleotides, about 1000 nucleotides, about 800 nucleotides, about 700 nucleotides, about 600 nucleotides, about 500 nucleotides, about 400 nucleotides, about 300 nucleotides, about 200 nucleotides, about 100 nucleotides, about 80 nucleotides, about 70 nucleotides, about 60 nucleotides, about 50 nucleotides downstream of genomic site GRCh38/hg38: chr3 158592581. In some cases. the targeted region of the pre-mRNA is at least about 1500 nucleotides, about 1000 nucleotides, about 800 nucleotides, about 700 nucleotides, about 600 nucleotides, about 500 nucleotides, about 400 nucleotides, about 300 nucleotides, about 200 nucleotides, about 100 nucleotides, about 80 nucleotides, about 70 nucleotides, about 60 nucleotides, about 50 nucleotides downstream of genomic site GRCh38/hg38: chr3 158592581. In some cases, the targeted region of the pre-mRNA is within a sequence SEQ ID NO: 245. In some cases, the targeted region of the pre-mRNA is within a sequence between a pair of genomic sites GRCh38/hg38: chr3 158592434, and GRCh38/hg38: chr3 158592581. In some cases, the therapeutic agent is an antisense oligomer complementary to a sequence with at least about 80%, 85%, 90%, 95%, 96%, 97%, 98%, 99% or 100% sequence identity to SEQ ID NO:245. In some cases, the therapeutic agent is an antisense oligomer complementary to a sequence with 100% sequence identity to SEQ ID NO:245. In some cases, the therapeutic agent increases level of a first processed mRNA encoding a protein having a sequence SEQ ID NO: 8212, and decreases level of a second processed mRNA encoding a protein having a sequence SEQ ID NO: 448. In some cases, the targeted region of the pre-mRNA is at most about 1500 nucleotides, about 1000 nucleotides, about 800 nucleotides, about 700 nucleotides, about 600 nucleotides, about 500 nucleotides, about 400 nucleotides, about 300 nucleotides, about 200 nucleotides, about 100 nucleotides, about 80 nucleotides, about 70 nucleotides, about 60 nucleotides, about 50 nucleotides upstream of SEQ ID NO: 246. In some cases, the targeted region of the pre-mRNA is at least about 1500 nucleotides, about 1000 nucleotides, about 800 nucleotides, about 700 nucleotides, about 600 nucleotides, about 500 nucleotides, about 400 nucleotides, about 300 nucleotides, about 200 nucleotides, about 100 nucleotides, about 80 nucleotides, about 70 nucleotides, about 60 nucleotides, about 50 nucleotides upstream of SEQ ID NO: 246. In some cases, the targeted region of the pre-mRNA is at most about 1500 nucleotides, about 1000 nucleotides, about 800 nucleotides, about 700 nucleotides, about 600 nucleotides, about 500 nucleotides, about 400 nucleotides, about 300 nucleotides, about 200 nucleotides, about 100 nucleotides, about 80 nucleotides, about 70 nucleotides, about 60 nucleotides, about 50 nucleotides upstream of genomic site GRCh38/hg38: chr3 158592434. In some cases, the targeted region of the pre-mRNA is at least about 1500 nucleotides, about 1000 nucleotides, about 800 nucleotides, about 700 nucleotides, about 600 nucleotides, about 500 nucleotides, about 400 nucleotides, about 300 nucleotides, about 200 nucleotides, about 100 nucleotides, about 80 nucleotides, about 70 nucleotides, about 60 nucleotides, about 50 nucleotides upstream of genomic site GRCh38/hg38: chr3 158592434. In some cases, the targeted region of the pre-mRNA is at most about 1500 nucleotides, about 1000 nucleotides, about 800 nucleotides, about 700 nucleotides, about 600 nucleotides, about 500 nucleotides, about 400 nucleotides, about 300 nucleotides, about 200 nucleotides, about 100 nucleotides, about 80 nucleotides, about 70 nucleotides, about 60 nucleotides, about 50 nucleotides downstream of SEQ ID NO: 246. In some cases, the targeted region of the pre-mRNA is at least about 1500 nucleotides, about 1000 nucleotides, about 800 nucleotides, about 700 nucleotides, about 600 nucleotides, about 500 nucleotides, about 400 nucleotides, about 300 nucleotides, about 200 nucleotides, about 100 nucleotides, about 80 nucleotides, about 70 nucleotides, about 60 nucleotides, about 50 nucleotides downstream of SEQ ID NO: 246. In some cases, the targeted region of the pre-mRNA is at most about 1500 nucleotides, about 1000 nucleotides, about 800 nucleotides, about 700 nucleotides, about 600 nucleotides, about 500 nucleotides, about 400 nucleotides, about 300 nucleotides, about 200 nucleotides, about 100 nucleotides, about 80 nucleotides, about 70 nucleotides, about 60 nucleotides, about 50 nucleotides downstream of genomic site GRCh38/hg38: chr3 158592581. In some cases. the targeted region of the pre-mRNA is at least about 1500 nucleotides, about 1000 nucleotides, about 800 nucleotides, about 700 nucleotides, about 600 nucleotides, about 500 nucleotides, about 400 nucleotides, about 300 nucleotides, about 200 nucleotides, about 100 nucleotides, about 80 nucleotides, about 70 nucleotides, about 60 nucleotides, about 50 nucleotides downstream of genomic site GRCh38/hg38: chr3 158592581. In some cases, the targeted region of the pre-mRNA is within a sequence SEQ ID NO: 246. In some cases, the targeted region of the pre-mRNA is within a sequence between a pair of genomic sites GRCh38/hg38: chr3 158592434, and GRCh38/hg38: chr3 158592581. In some cases, the therapeutic agent is an antisense oligomer complementary to a sequence with at least about 80%, 85%, 90%, 95%, 96%, 97%, 98%, 99% or 100% sequence identity to SEQ ID NO:246. In some cases, the therapeutic agent is an antisense oligomer complementary to a sequence with 100% sequence identity to SEQ ID NO:246. In some cases, the therapeutic agent is an antisense oligomer that has a sequence with at least about 80%, 85%, 90%, 95%, 96%, 97%, 98%, 99% or 100% sequence identity to a sequence selected from the group consisting of SEQ ID NOs: 4735-4803. In some cases, the therapeutic agent is an antisense oligomer that has a sequence selected from the group consisting of SEQ ID NOs: 4735-4803. In some cases, the target peptide sequence is a portion of MLF1 protein, and the method treats a disease or the condition that comprises Leukemia, acute myeloid.

[0225] MOB1B

[0226] In some cases, the target peptide sequence is a portion of MOB1B protein. In some cases, the therapeutic agent increases level of a first processed mRNA encoding a protein having a sequence SEQ ID NO: 8213, and decreases level of a second processed mRNA encoding a protein having a sequence SEQ ID NO: 449. In some cases, the targeted region of the pre-mRNA is at most about 1500 nucleotides, about 1000 nucleotides, about 800 nucleotides, about 700 nucleotides, about 600 nucleotides, about 500 nucleotides, about 400 nucleotides, about 300 nucleotides, about 200 nucleotides, about 100 nucleotides, about 80 nucleotides, about 70 nucleotides, about 60 nucleotides, about 50 nucleotides upstream of SEQ ID NO: 247. In some cases, the targeted region of the pre-mRNA is at least about 1500 nucleotides, about 1000 nucleotides, about 800 nucleotides, about 700 nucleotides, about 600 nucleotides, about 500 nucleotides, about 400 nucleotides, about 300 nucleotides, about 200 nucleotides, about 100 nucleotides, about 80 nucleotides, about 70 nucleotides, about 60 nucleotides, about 50 nucleotides upstream of SEQ ID NO: 247. In some cases, the targeted region of the pre-mRNA is at most about 1500 nucleotides, about 1000 nucleotides, about 800 nucleotides, about 700 nucleotides, about 600 nucleotides, about 500 nucleotides, about 400 nucleotides, about 300 nucleotides, about 200 nucleotides, about 100 nucleotides, about 80 nucleotides, about 70 nucleotides, about 60 nucleotides, about 50 nucleotides upstream of genomic site GRCh38/hg38: chr4 70950700. In some cases, the targeted region of the pre-mRNA is at least about 1500 nucleotides, about 1000 nucleotides, about 800 nucleotides, about 700 nucleotides, about 600 nucleotides, about 500 nucleotides, about 400 nucleotides, about 300 nucleotides, about 200 nucleotides, about 100 nucleotides, about 80 nucleotides, about 70 nucleotides, about 60 nucleotides, about 50 nucleotides upstream of genomic site GRCh38/hg38: chr4 70950700. In some cases, the targeted region of the pre-mRNA is at most about 1500 nucleotides, about 1000 nucleotides, about 800 nucleotides, about 700 nucleotides, about 600 nucleotides, about 500 nucleotides, about 400 nucleotides, about 300 nucleotides, about 200 nucleotides, about 100 nucleotides, about 80 nucleotides, about 70 nucleotides, about 60 nucleotides, about 50 nucleotides downstream of SEQ ID NO: 247. In some cases, the targeted region of the pre-mRNA is at least about 1500 nucleotides, about 1000 nucleotides, about 800 nucleotides, about 700 nucleotides, about 600 nucleotides, about 500 nucleotides, about 400 nucleotides, about 300 nucleotides, about 200 nucleotides, about 100 nucleotides, about 80 nucleotides, about 70 nucleotides, about 60 nucleotides, about 50 nucleotides downstream of SEQ ID NO: 247. In some cases, the targeted region of the pre-mRNA is at most about 1500 nucleotides, about 1000 nucleotides, about 800 nucleotides, about 700 nucleotides, about 600 nucleotides, about 500 nucleotides, about 400 nucleotides, about 300 nucleotides, about 200 nucleotides, about 100 nucleotides, about 80 nucleotides, about 70 nucleotides, about 60 nucleotides, about 50 nucleotides downstream of genomic site GRCh38/hg38: chr4 70950811. In some cases. the targeted region of the pre-mRNA is at least about 1500 nucleotides, about 1000 nucleotides, about 800 nucleotides, about 700 nucleotides, about 600 nucleotides, about 500 nucleotides, about 400 nucleotides, about 300 nucleotides, about 200 nucleotides, about 100 nucleotides, about 80 nucleotides, about 70 nucleotides, about 60 nucleotides, about 50 nucleotides downstream of genomic site GRCh38/hg38: chr4 70950811. In some cases, the targeted region of the pre-mRNA is within a sequence SEQ ID NO: 247. In some cases, the targeted region of the pre-mRNA is within a sequence between a pair of genomic sites GRCh38/hg38: chr4 70950700, and GRCh38/hg38: chr4 70950811. In some cases, the therapeutic agent is an antisense oligomer complementary to a sequence with at least about 80%, 85%, 90%, 95%, 96%, 97%, 98%, 99% or 100% sequence identity to SEQ ID NO:247. In some cases, the therapeutic agent is an antisense oligomer complementary to a sequence with 100% sequence identity to SEQ ID NO:247. In some cases, the therapeutic agent is an antisense oligomer that has a sequence with at least about 80%, 85%, 90%, 95%, 96%, 97%, 98%, 99% or 100% sequence identity to a sequence selected from the group consisting of SEQ ID NOs: 4804-4864. In some cases, the therapeutic agent is an antisense oligomer that has a sequence selected from the group consisting of SEQ ID NOs: 4804-4864. In some cases, the target peptide sequence is a portion of MOB1B protein, and the method treats a cancer that is associated with MOB1B protein.

[0227] MSRB3

[0228] In some cases, the target peptide sequence is a portion of MSRB3 protein. In some cases, the therapeutic agent increases level of a first processed mRNA encoding a protein having a sequence SEQ ID NO: 8214, and decreases level of a second processed mRNA encoding a protein having a sequence SEQ ID NO: 450. In some cases, the targeted region of the pre-mRNA is at most about 1500 nucleotides, about 1000 nucleotides, about 800 nucleotides, about 700 nucleotides, about 600 nucleotides, about 500 nucleotides, about 400 nucleotides, about 300 nucleotides, about 200 nucleotides, about 100 nucleotides, about 80 nucleotides, about 70 nucleotides, about 60 nucleotides, about 50 nucleotides upstream of SEQ ID NO: 248. In some cases, the targeted region of the pre-mRNA is at least about 1500 nucleotides, about 1000 nucleotides, about 800 nucleotides, about 700 nucleotides, about 600 nucleotides, about 500 nucleotides, about 400 nucleotides, about 300 nucleotides, about 200 nucleotides, about 100 nucleotides, about 80 nucleotides, about 70 nucleotides, about 60 nucleotides, about 50 nucleotides upstream of SEQ ID NO: 248. In some cases, the targeted region of the pre-mRNA is at most about 1500 nucleotides, about 1000 nucleotides, about 800 nucleotides, about 700 nucleotides, about 600 nucleotides, about 500 nucleotides, about 400 nucleotides, about 300 nucleotides, about 200 nucleotides, about 100 nucleotides, about 80 nucleotides, about 70 nucleotides, about 60 nucleotides, about 50 nucleotides upstream of genomic site GRCh38/hg38: chr12 65308529. In some cases, the targeted region of the pre-mRNA is at least about 1500 nucleotides, about 1000 nucleotides, about 800 nucleotides, about 700 nucleotides, about 600 nucleotides, about 500 nucleotides, about 400 nucleotides, about 300 nucleotides, about 200 nucleotides, about 100 nucleotides, about 80 nucleotides, about 70 nucleotides, about 60 nucleotides, about 50 nucleotides upstream of genomic site GRCh38/hg38: chr12 65308529. In some cases, the targeted region of the pre-mRNA is at most about 1500 nucleotides, about 1000 nucleotides, about 800 nucleotides, about 700 nucleotides, about 600 nucleotides, about 500 nucleotides, about 400 nucleotides, about 300 nucleotides, about 200 nucleotides, about 100 nucleotides, about 80 nucleotides, about 70 nucleotides, about 60 nucleotides, about 50 nucleotides downstream of SEQ ID NO: 248. In some cases, the targeted region of the pre-mRNA is at least about 1500 nucleotides, about 1000 nucleotides, about 800 nucleotides, about 700 nucleotides, about 600 nucleotides, about 500 nucleotides, about 400 nucleotides, about 300 nucleotides, about 200 nucleotides, about 100 nucleotides, about 80 nucleotides, about 70 nucleotides, about 60 nucleotides, about 50 nucleotides downstream of SEQ ID NO: 248. In some cases, the targeted region of the pre-mRNA is at most about 1500 nucleotides, about 1000 nucleotides, about 800 nucleotides, about 700 nucleotides, about 600 nucleotides, about 500 nucleotides, about 400 nucleotides, about 300 nucleotides, about 200 nucleotides, about 100 nucleotides, about 80 nucleotides, about 70 nucleotides, about 60 nucleotides, about 50 nucleotides downstream of genomic site GRCh38/hg38: chr12 65308655. In some cases. the targeted region of the pre-mRNA is at least about 1500 nucleotides, about 1000 nucleotides, about 800 nucleotides, about 700 nucleotides, about 600 nucleotides, about 500 nucleotides, about 400 nucleotides, about 300 nucleotides, about 200 nucleotides, about 100 nucleotides, about 80 nucleotides, about 70 nucleotides, about 60 nucleotides, about 50 nucleotides downstream of genomic site GRCh38/hg38: chr12 65308655. In some cases, the targeted region of the pre-mRNA is within a sequence SEQ ID NO: 248. In some cases, the targeted region of the pre-mRNA is within a sequence between a pair of genomic sites GRCh38/hg38: chr12 65308529, and GRCh38/hg38: chr12 65308655. In some cases, the therapeutic agent is an antisense oligomer complementary to a sequence with at least about 80%, 85%, 90%, 95%, 96%, 97%, 98%, 99% or 100% sequence identity to SEQ ID NO:248. In some cases, the therapeutic agent is an antisense oligomer complementary to a sequence with 100% sequence identity to SEQ ID NO:248. In some cases, the therapeutic agent is an antisense oligomer that has a sequence with at least about 80%, 85%, 90%, 95%, 96%, 97%, 98%, 99% or 100% sequence identity to a sequence selected from the group consisting of SEQ ID NOs: 4865-4928. In some cases, the therapeutic agent is an antisense oligomer that has a sequence selected from the group consisting of SEQ ID NOs: 4865-4928. In some cases, the target peptide sequence is a portion of MSRB3 protein, and the method treats a disease or the condition that comprises Deafness, Autosomal Recessive 74.

[0229] NR1I3

[0230] In some cases, the target peptide sequence is a portion of NR1I3 protein. In some cases, the therapeutic agent increases level of a first processed mRNA encoding a protein having a sequence SEQ ID NO: 8215, and decreases level of a second processed mRNA encoding a protein having a sequence SEQ ID NO: 451. In some cases, the targeted region of the pre-mRNA is at most about 1500 nucleotides, about 1000 nucleotides, about 800 nucleotides, about 700 nucleotides, about 600 nucleotides, about 500 nucleotides, about 400 nucleotides, about 300 nucleotides, about 200 nucleotides, about 100 nucleotides, about 80 nucleotides, about 70 nucleotides, about 60 nucleotides, about 50 nucleotides upstream of SEQ ID NO: 249. In some cases, the targeted region of the pre-mRNA is at least about 1500 nucleotides, about 1000 nucleotides, about 800 nucleotides, about 700 nucleotides, about 600 nucleotides, about 500 nucleotides, about 400 nucleotides, about 300 nucleotides, about 200 nucleotides, about 100 nucleotides, about 80 nucleotides, about 70 nucleotides, about 60 nucleotides, about 50 nucleotides upstream of SEQ ID NO: 249. In some cases, the targeted region of the pre-mRNA is at most about 1500 nucleotides, about 1000 nucleotides, about 800 nucleotides, about 700 nucleotides, about 600 nucleotides, about 500 nucleotides, about 400 nucleotides, about 300 nucleotides, about 200 nucleotides, about 100 nucleotides, about 80 nucleotides, about 70 nucleotides, about 60 nucleotides, about 50 nucleotides upstream of genomic site GRCh38/hg38: chr1 161236598. In some cases, the targeted region of the pre-mRNA is at least about 1500 nucleotides, about 1000 nucleotides, about 800 nucleotides, about 700 nucleotides, about 600 nucleotides, about 500 nucleotides, about 400 nucleotides, about 300 nucleotides, about 200 nucleotides, about 100 nucleotides, about 80 nucleotides, about 70 nucleotides, about 60 nucleotides, about 50 nucleotides upstream of genomic site GRCh38/hg38: chr1 161236598. In some cases, the targeted region of the pre-mRNA is at most about 1500 nucleotides, about 1000 nucleotides, about 800 nucleotides, about 700 nucleotides, about 600 nucleotides, about 500 nucleotides, about 400 nucleotides, about 300 nucleotides, about 200 nucleotides, about 100 nucleotides, about 80 nucleotides, about 70 nucleotides, about 60 nucleotides, about 50 nucleotides downstream of SEQ ID NO: 249. In some cases, the targeted region of the pre-mRNA is at least about 1500 nucleotides, about 1000 nucleotides, about 800 nucleotides, about 700 nucleotides, about 600 nucleotides, about 500 nucleotides, about 400 nucleotides, about 300 nucleotides, about 200 nucleotides, about 100 nucleotides, about 80 nucleotides, about 70 nucleotides, about 60 nucleotides, about 50 nucleotides downstream of SEQ ID NO: 249. In some cases, the targeted region of the pre-mRNA is at most about 1500 nucleotides, about 1000 nucleotides, about 800 nucleotides, about 700 nucleotides, about 600 nucleotides, about 500 nucleotides, about 400 nucleotides, about 300 nucleotides, about 200 nucleotides, about 100 nucleotides, about 80 nucleotides, about 70 nucleotides, about 60 nucleotides, about 50 nucleotides downstream of genomic site GRCh38/hg38: chr1 161236459. In some cases. the targeted region of the pre-mRNA is at least about 1500 nucleotides, about 1000 nucleotides, about 800 nucleotides, about 700 nucleotides, about 600 nucleotides, about 500 nucleotides, about 400 nucleotides, about 300 nucleotides, about 200 nucleotides, about 100 nucleotides, about 80 nucleotides, about 70 nucleotides, about 60 nucleotides, about 50 nucleotides downstream of genomic site GRCh38/hg38: chr1 161236459. In some cases, the targeted region of the pre-mRNA is within a sequence SEQ ID NO: 249. In some cases, the targeted region of the pre-mRNA is within a sequence between a pair of genomic sites GRCh38/hg38: chr1 161236598, and GRCh38/hg38: chr1 161236459. In some cases, the therapeutic agent is an antisense oligomer complementary to a sequence with at least about 80%, 85%, 90%, 95%, 96%, 97%, 98%, 99% or 100% sequence identity to SEQ ID NO:249. In some cases, the therapeutic agent is an antisense oligomer complementary to a sequence with 100% sequence identity to SEQ ID NO:249. In some cases, the therapeutic agent increases level of a first processed mRNA encoding a protein having a sequence SEQ ID NO: 8216, and decreases level of a second processed mRNA encoding a protein having a sequence SEQ ID NO: 452. In some cases, the targeted region of the pre-mRNA is at most about 1500 nucleotides, about 1000 nucleotides, about 800 nucleotides, about 700 nucleotides, about 600 nucleotides, about 500 nucleotides, about 400 nucleotides, about 300 nucleotides, about 200 nucleotides, about 100 nucleotides, about 80 nucleotides, about 70 nucleotides, about 60 nucleotides, about 50 nucleotides upstream of SEQ ID NO: 250. In some cases, the targeted region of the pre-mRNA is at least about 1500 nucleotides, about 1000 nucleotides, about 800 nucleotides, about 700 nucleotides, about 600 nucleotides, about 500 nucleotides, about 400 nucleotides, about 300 nucleotides, about 200 nucleotides, about 100 nucleotides, about 80 nucleotides, about 70 nucleotides, about 60 nucleotides, about 50 nucleotides upstream of SEQ ID NO: 250. In some cases, the targeted region of the pre-mRNA is at most about 1500 nucleotides, about 1000 nucleotides, about 800 nucleotides, about 700 nucleotides, about 600 nucleotides, about 500 nucleotides, about 400 nucleotides, about 300 nucleotides, about 200 nucleotides, about 100 nucleotides, about 80 nucleotides, about 70 nucleotides, about 60 nucleotides, about 50 nucleotides upstream of genomic site GRCh38/hg38: chr1 161236598. In some cases, the targeted region of the pre-mRNA is at least about 1500 nucleotides, about 1000 nucleotides, about 800 nucleotides, about 700 nucleotides, about 600 nucleotides, about 500 nucleotides, about 400 nucleotides, about 300 nucleotides, about 200 nucleotides, about 100 nucleotides, about 80 nucleotides, about 70 nucleotides, about 60 nucleotides, about 50 nucleotides upstream of genomic site GRCh38/hg38: chr1 161236598. In some cases, the targeted region of the pre-mRNA is at most about 1500 nucleotides, about 1000 nucleotides, about 800 nucleotides, about 700 nucleotides, about 600 nucleotides, about 500 nucleotides, about 400 nucleotides, about 300 nucleotides, about 200 nucleotides, about 100 nucleotides, about 80 nucleotides, about 70 nucleotides, about 60 nucleotides, about 50 nucleotides downstream of SEQ ID NO: 250. In some cases, the targeted region of the pre-mRNA is at least about 1500 nucleotides, about 1000 nucleotides, about 800 nucleotides, about 700 nucleotides, about 600 nucleotides, about 500 nucleotides, about 400 nucleotides, about 300 nucleotides, about 200 nucleotides, about 100 nucleotides, about 80 nucleotides, about 70 nucleotides, about 60 nucleotides, about 50 nucleotides downstream of SEQ ID NO: 250. In some cases, the targeted region of the pre-mRNA is at most about 1500 nucleotides, about 1000 nucleotides, about 800 nucleotides, about 700 nucleotides, about 600 nucleotides, about 500 nucleotides, about 400 nucleotides, about 300 nucleotides, about 200 nucleotides, about 100 nucleotides, about 80 nucleotides, about 70 nucleotides, about 60 nucleotides, about 50 nucleotides downstream of genomic site GRCh38/hg38: chr1 161236459. In some cases. the targeted region of the pre-mRNA is at least about 1500 nucleotides, about 1000 nucleotides, about 800 nucleotides, about 700 nucleotides, about 600 nucleotides, about 500 nucleotides, about 400 nucleotides, about 300 nucleotides, about 200 nucleotides, about 100 nucleotides, about 80 nucleotides, about 70 nucleotides, about 60 nucleotides, about 50 nucleotides downstream of genomic site GRCh38/hg38: chr1 161236459. In some cases, the targeted region of the pre-mRNA is within a sequence SEQ ID NO: 250. In some cases, the targeted region of the pre-mRNA is within a sequence between a pair of genomic sites GRCh38/hg38: chr1 161236598, and GRCh38/hg38: chr1 161236459. In some cases, the therapeutic agent is an antisense oligomer complementary to a sequence with at least about 80%, 85%, 90%, 95%, 96%, 97%, 98%, 99% or 100% sequence identity to SEQ ID NO:250. In some cases, the therapeutic agent is an antisense oligomer complementary to a sequence with 100% sequence identity to SEQ ID NO:250. In some cases, the therapeutic agent increases level of a first processed mRNA encoding a protein having a sequence SEQ ID NO: 8217, and decreases level of a second processed mRNA encoding a protein having a sequence SEQ ID NO: 453. In some cases, the targeted region of the pre-mRNA is at most about 1500 nucleotides, about 1000 nucleotides, about 800 nucleotides, about 700 nucleotides, about 600 nucleotides, about 500 nucleotides, about 400 nucleotides, about 300 nucleotides, about 200 nucleotides, about 100 nucleotides, about 80 nucleotides, about 70 nucleotides, about 60 nucleotides, about 50 nucleotides upstream of SEQ ID NO: 251. In some cases, the targeted region of the pre-mRNA is at least about 1500 nucleotides, about 1000 nucleotides, about 800 nucleotides, about 700 nucleotides, about 600 nucleotides, about 500 nucleotides, about 400 nucleotides, about 300 nucleotides, about 200 nucleotides, about 100 nucleotides, about 80 nucleotides, about 70 nucleotides, about 60 nucleotides, about 50 nucleotides upstream of SEQ ID NO: 251. In some cases, the targeted region of the pre-mRNA is at most about 1500 nucleotides, about 1000 nucleotides, about 800 nucleotides, about 700 nucleotides, about 600 nucleotides, about 500 nucleotides, about 400 nucleotides, about 300 nucleotides, about 200 nucleotides, about 100 nucleotides, about 80 nucleotides, about 70 nucleotides, about 60 nucleotides, about 50 nucleotides upstream of genomic site GRCh38/hg38: chr1 161236598. In some cases, the targeted region of the pre-mRNA is at least about 1500 nucleotides, about 1000 nucleotides, about 800 nucleotides, about 700 nucleotides, about 600 nucleotides, about 500 nucleotides, about 400 nucleotides, about 300 nucleotides, about 200 nucleotides, about 100 nucleotides, about 80 nucleotides, about 70 nucleotides, about 60 nucleotides, about 50 nucleotides upstream of genomic site GRCh38/hg38: chr1 161236598. In some cases, the targeted region of the pre-mRNA is at most about 1500 nucleotides, about 1000 nucleotides, about 800 nucleotides, about 700 nucleotides, about 600 nucleotides, about 500 nucleotides, about 400 nucleotides, about 300 nucleotides, about 200 nucleotides, about 100 nucleotides, about 80 nucleotides, about 70 nucleotides, about 60 nucleotides, about 50 nucleotides downstream of SEQ ID NO: 251. In some cases, the targeted region of the pre-mRNA is at least about 1500 nucleotides, about 1000 nucleotides, about 800 nucleotides, about 700 nucleotides, about 600 nucleotides, about 500 nucleotides, about 400 nucleotides, about 300 nucleotides, about 200 nucleotides, about 100 nucleotides, about 80 nucleotides, about 70 nucleotides, about 60 nucleotides, about 50 nucleotides downstream of SEQ ID NO: 251. In some cases, the targeted region of the pre-mRNA is at most about 1500 nucleotides, about 1000 nucleotides, about 800 nucleotides, about 700 nucleotides, about 600 nucleotides, about 500 nucleotides, about 400 nucleotides, about 300 nucleotides, about 200 nucleotides, about 100 nucleotides, about 80 nucleotides, about 70 nucleotides, about 60 nucleotides, about 50 nucleotides downstream of genomic site GRCh38/hg38: chr1 161236459. In some cases. the targeted region of the pre-mRNA is at least about 1500 nucleotides, about 1000 nucleotides, about 800 nucleotides, about 700 nucleotides, about 600 nucleotides, about 500 nucleotides, about 400 nucleotides, about 300 nucleotides, about 200 nucleotides, about 100 nucleotides, about 80 nucleotides, about 70 nucleotides, about 60 nucleotides, about 50 nucleotides downstream of genomic site GRCh38/hg38: chr1 161236459. In some cases, the targeted region of the pre-mRNA is within a sequence SEQ ID NO: 251. In some cases, the targeted region of the pre-mRNA is within a sequence between a pair of genomic sites GRCh38/hg38: chr1 161236598, and GRCh38/hg38: chr1 161236459. In some cases, the therapeutic agent is an antisense oligomer complementary to a sequence with at least about 80%, 85%, 90%, 95%, 96%, 97%, 98%, 99% or 100% sequence identity to SEQ ID NO:251. In some cases, the therapeutic agent is an antisense oligomer complementary to a sequence with 100% sequence identity to SEQ ID NO:251. In some cases, the therapeutic agent increases level of a first processed mRNA encoding a protein having a sequence SEQ ID NO: 8218, and decreases level of a second processed mRNA encoding a protein having a sequence SEQ ID NO: 454. In some cases, the targeted region of the pre-mRNA is at most about 1500 nucleotides, about 1000 nucleotides, about 800 nucleotides, about 700 nucleotides, about 600 nucleotides, about 500 nucleotides, about 400 nucleotides, about 300 nucleotides, about 200 nucleotides, about 100 nucleotides, about 80 nucleotides, about 70 nucleotides, about 60 nucleotides, about 50 nucleotides upstream of SEQ ID NO: 252. In some cases, the targeted region of the pre-mRNA is at least about 1500 nucleotides, about 1000 nucleotides, about 800 nucleotides, about 700 nucleotides, about 600 nucleotides, about 500 nucleotides, about 400 nucleotides, about 300 nucleotides, about 200 nucleotides, about 100 nucleotides, about 80 nucleotides, about 70 nucleotides, about 60 nucleotides, about 50 nucleotides upstream of SEQ ID NO: 252. In some cases, the targeted region of the pre-mRNA is at most about 1500 nucleotides, about 1000 nucleotides, about 800 nucleotides, about 700 nucleotides, about 600 nucleotides, about 500 nucleotides, about 400 nucleotides, about 300 nucleotides, about 200 nucleotides, about 100 nucleotides, about 80 nucleotides, about 70 nucleotides, about 60 nucleotides, about 50 nucleotides upstream of genomic site GRCh38/hg38: chr1 161236598. In some cases, the targeted region of the pre-mRNA is at least about 1500 nucleotides, about 1000 nucleotides, about 800 nucleotides, about 700 nucleotides, about 600 nucleotides, about 500 nucleotides, about 400 nucleotides, about 300 nucleotides, about 200 nucleotides, about 100 nucleotides, about 80 nucleotides, about 70 nucleotides, about 60 nucleotides, about 50 nucleotides upstream of genomic site GRCh38/hg38: chr1 161236598. In some cases, the targeted region of the pre-mRNA is at most about 1500 nucleotides, about 1000 nucleotides, about 800 nucleotides, about 700 nucleotides, about 600 nucleotides, about 500 nucleotides, about 400 nucleotides, about 300 nucleotides, about 200 nucleotides, about 100 nucleotides, about 80 nucleotides, about 70 nucleotides, about 60 nucleotides, about 50 nucleotides downstream of SEQ ID NO: 252. In some cases, the targeted region of the pre-mRNA is at least about 1500 nucleotides, about 1000 nucleotides, about 800 nucleotides, about 700 nucleotides, about 600 nucleotides, about 500 nucleotides, about 400 nucleotides, about 300 nucleotides, about 200 nucleotides, about 100 nucleotides, about 80 nucleotides, about 70 nucleotides, about 60 nucleotides, about 50 nucleotides downstream of SEQ ID NO: 252. In some cases, the targeted region of the pre-mRNA is at most about 1500 nucleotides, about 1000 nucleotides, about 800 nucleotides, about 700 nucleotides, about 600 nucleotides, about 500 nucleotides, about 400 nucleotides, about 300 nucleotides, about 200 nucleotides, about 100 nucleotides, about 80 nucleotides, about 70 nucleotides, about 60 nucleotides, about 50 nucleotides downstream of genomic site GRCh38/hg38: chr1 161236459. In some cases. the targeted region of the pre-mRNA is at least about 1500 nucleotides, about 1000 nucleotides, about 800 nucleotides, about 700 nucleotides, about 600 nucleotides, about 500 nucleotides, about 400 nucleotides, about 300 nucleotides, about 200 nucleotides, about 100 nucleotides, about 80 nucleotides, about 70 nucleotides, about 60 nucleotides, about 50 nucleotides downstream of genomic site GRCh38/hg38: chr1 161236459. In some cases, the targeted region of the pre-mRNA is within a sequence SEQ ID NO: 252. In some cases, the targeted region of the pre-mRNA is within a sequence between a pair of genomic sites GRCh38/hg38: chr1 161236598, and GRCh38/hg38: chr1 161236459. In some cases, the therapeutic agent is an antisense oligomer complementary to a sequence with at least about 80%, 85%, 90%, 95%, 96%, 97%, 98%, 99% or 100% sequence identity to SEQ ID NO:252. In some cases, the therapeutic agent is an antisense oligomer complementary to a sequence with 100% sequence identity to SEQ ID NO:252. In some cases, the therapeutic agent increases level of a first processed mRNA encoding a protein having a sequence SEQ ID NO: 8219, and decreases level of a second processed mRNA encoding a protein having a sequence SEQ ID NO: 455. In some cases, the targeted region of the pre-mRNA is at most about 1500 nucleotides, about 1000 nucleotides, about 800 nucleotides, about 700 nucleotides, about 600 nucleotides, about 500 nucleotides, about 400 nucleotides, about 300 nucleotides, about 200 nucleotides, about 100 nucleotides, about 80 nucleotides, about 70 nucleotides, about 60 nucleotides, about 50 nucleotides upstream of SEQ ID NO: 253. In some cases, the targeted region of the pre-mRNA is at least about 1500 nucleotides, about 1000 nucleotides, about 800 nucleotides, about 700 nucleotides, about 600 nucleotides, about 500 nucleotides, about 400 nucleotides, about 300 nucleotides, about 200 nucleotides, about 100 nucleotides, about 80 nucleotides, about 70 nucleotides, about 60 nucleotides, about 50 nucleotides upstream of SEQ ID NO: 253. In some cases, the targeted region of the pre-mRNA is at most about 1500 nucleotides, about 1000 nucleotides, about 800 nucleotides, about 700 nucleotides, about 600 nucleotides, about 500 nucleotides, about 400 nucleotides, about 300 nucleotides, about 200 nucleotides, about 100 nucleotides, about 80 nucleotides, about 70 nucleotides, about 60 nucleotides, about 50 nucleotides upstream of genomic site GRCh38/hg38: chr1 161236598. In some cases, the targeted region of the pre-mRNA is at least about 1500 nucleotides, about 1000 nucleotides, about 800 nucleotides, about 700 nucleotides, about 600 nucleotides, about 500 nucleotides, about 400 nucleotides, about 300 nucleotides, about 200 nucleotides, about 100 nucleotides, about 80 nucleotides, about 70 nucleotides, about 60 nucleotides, about 50 nucleotides upstream of genomic site GRCh38/hg38: chr1 161236598. In some cases, the targeted region of the pre-mRNA is at most about 1500 nucleotides, about 1000 nucleotides, about 800 nucleotides, about 700 nucleotides, about 600 nucleotides, about 500 nucleotides, about 400 nucleotides, about 300 nucleotides, about 200 nucleotides, about 100 nucleotides, about 80 nucleotides, about 70 nucleotides, about 60 nucleotides, about 50 nucleotides downstream of SEQ ID NO: 253. In some cases, the targeted region of the pre-mRNA is at least about 1500 nucleotides, about 1000 nucleotides, about 800 nucleotides, about 700 nucleotides, about 600 nucleotides, about 500 nucleotides, about 400 nucleotides, about 300 nucleotides, about 200 nucleotides, about 100 nucleotides, about 80 nucleotides, about 70 nucleotides, about 60 nucleotides, about 50 nucleotides downstream of SEQ ID NO: 253. In some cases, the targeted region of the pre-mRNA is at most about 1500 nucleotides, about 1000 nucleotides, about 800 nucleotides, about 700 nucleotides, about 600 nucleotides, about 500 nucleotides, about 400 nucleotides, about 300 nucleotides, about 200 nucleotides, about 100 nucleotides, about 80 nucleotides, about 70 nucleotides, about 60 nucleotides, about 50 nucleotides downstream of genomic site GRCh38/hg38: chr1 161236459. In some cases. the targeted region of the pre-mRNA is at least about 1500 nucleotides, about 1000 nucleotides, about 800 nucleotides, about 700 nucleotides, about 600 nucleotides, about 500 nucleotides, about 400 nucleotides, about 300 nucleotides, about 200 nucleotides, about 100 nucleotides, about 80 nucleotides, about 70 nucleotides, about 60 nucleotides, about 50 nucleotides downstream of genomic site GRCh38/hg38: chr1 161236459. In some cases, the targeted region of the pre-mRNA is within a sequence SEQ ID NO: 253. In some cases, the targeted region of the pre-mRNA is within a sequence between a pair of genomic sites GRCh38/hg38: chr1 161236598, and GRCh38/hg38: chr1 161236459. In some cases, the therapeutic agent is an antisense oligomer complementary to a sequence with at least about 80%, 85%, 90%, 95%, 96%, 97%, 98%, 99% or 100% sequence identity to SEQ ID NO:253. In some cases, the therapeutic agent is an antisense oligomer complementary to a sequence with 100% sequence identity to SEQ ID NO:253. In some cases, the therapeutic agent increases level of a first processed mRNA encoding a protein having a sequence SEQ ID NO: 8220, and decreases level of a second processed mRNA encoding a protein having a sequence SEQ ID NO: 456. In some cases, the targeted region of the pre-mRNA is at most about 1500 nucleotides, about 1000 nucleotides, about 800 nucleotides, about 700 nucleotides, about 600 nucleotides, about 500 nucleotides, about 400 nucleotides, about 300 nucleotides, about 200 nucleotides, about 100 nucleotides, about 80 nucleotides, about 70 nucleotides, about 60 nucleotides, about 50 nucleotides upstream of SEQ ID NO: 254. In some cases, the targeted region of the pre-mRNA is at least about 1500 nucleotides, about 1000 nucleotides, about 800 nucleotides, about 700 nucleotides, about 600 nucleotides, about 500 nucleotides, about 400 nucleotides, about 300 nucleotides, about 200 nucleotides, about 100 nucleotides, about 80 nucleotides, about 70 nucleotides, about 60 nucleotides, about 50 nucleotides upstream of SEQ ID NO: 254. In some cases, the targeted region of the pre-mRNA is at most about 1500 nucleotides, about 1000 nucleotides, about 800 nucleotides, about 700 nucleotides, about 600 nucleotides, about 500 nucleotides, about 400 nucleotides, about 300 nucleotides, about 200 nucleotides, about 100 nucleotides, about 80 nucleotides, about 70 nucleotides, about 60 nucleotides, about 50 nucleotides upstream of genomic site GRCh38/hg38: chr1 161236598. In some cases, the targeted region of the pre-mRNA is at least about 1500 nucleotides, about 1000 nucleotides, about 800 nucleotides, about 700 nucleotides, about 600 nucleotides, about 500 nucleotides, about 400 nucleotides, about 300 nucleotides, about 200 nucleotides, about 100 nucleotides, about 80 nucleotides, about 70 nucleotides, about 60 nucleotides, about 50 nucleotides upstream of genomic site GRCh38/hg38: chr1 161236598. In some cases, the targeted region of the pre-mRNA is at most about 1500 nucleotides, about 1000 nucleotides, about 800 nucleotides, about 700 nucleotides, about 600 nucleotides, about 500 nucleotides, about 400 nucleotides, about 300 nucleotides, about 200 nucleotides, about 100 nucleotides, about 80 nucleotides, about 70 nucleotides, about 60 nucleotides, about 50 nucleotides downstream of SEQ ID NO: 254. In some cases, the targeted region of the pre-mRNA is at least about 1500 nucleotides, about 1000 nucleotides, about 800 nucleotides, about 700 nucleotides, about 600 nucleotides, about 500 nucleotides, about 400 nucleotides, about 300 nucleotides, about 200 nucleotides, about 100 nucleotides, about 80 nucleotides, about 70 nucleotides, about 60 nucleotides, about 50 nucleotides downstream of SEQ ID NO: 254. In some cases, the targeted region of the pre-mRNA is at most about 1500 nucleotides, about 1000 nucleotides, about 800 nucleotides, about 700 nucleotides, about 600 nucleotides, about 500 nucleotides, about 400 nucleotides, about 300 nucleotides, about 200 nucleotides, about 100 nucleotides, about 80 nucleotides, about 70 nucleotides, about 60 nucleotides, about 50 nucleotides downstream of genomic site GRCh38/hg38: chr1 161236459. In some cases. the targeted region of the pre-mRNA is at least about 1500 nucleotides, about 1000 nucleotides, about 800 nucleotides, about 700 nucleotides, about 600 nucleotides, about 500 nucleotides, about 400 nucleotides, about 300 nucleotides, about 200 nucleotides, about 100 nucleotides, about 80 nucleotides, about 70 nucleotides, about 60 nucleotides, about 50 nucleotides downstream of genomic site GRCh38/hg38: chr1 161236459. In some cases, the targeted region of the pre-mRNA is within a sequence SEQ ID NO: 254. In some cases, the targeted region of the pre-mRNA is within a sequence between a pair of genomic sites GRCh38/hg38: chr1 161236598, and GRCh38/hg38: chr1 161236459. In some cases, the therapeutic agent is an antisense oligomer complementary to a sequence with at least about 80%, 85%, 90%, 95%, 96%, 97%, 98%, 99% or 100% sequence identity to SEQ ID NO:254. In some cases, the therapeutic agent is an antisense oligomer complementary to a sequence with 100% sequence identity to SEQ ID NO:254. In some cases, the therapeutic agent increases level of a first processed mRNA encoding a protein having a sequence SEQ ID NO: 8221, and decreases level of a second processed mRNA encoding a protein having a sequence SEQ ID NO: 457. In some cases, the targeted region of the pre-mRNA is at most about 1500 nucleotides, about 1000 nucleotides, about 800 nucleotides, about 700 nucleotides, about 600 nucleotides, about 500 nucleotides, about 400 nucleotides, about 300 nucleotides, about 200 nucleotides, about 100 nucleotides, about 80 nucleotides, about 70 nucleotides, about 60 nucleotides, about 50 nucleotides upstream of SEQ ID NO: 255. In some cases, the targeted region of the pre-mRNA is at least about 1500 nucleotides, about 1000 nucleotides, about 800 nucleotides, about 700 nucleotides, about 600 nucleotides, about 500 nucleotides, about 400 nucleotides, about 300 nucleotides, about 200 nucleotides, about 100 nucleotides, about 80 nucleotides, about 70 nucleotides, about 60 nucleotides, about 50 nucleotides upstream of SEQ ID NO: 255. In some cases, the targeted region of the pre-mRNA is at most about 1500 nucleotides, about 1000 nucleotides, about 800 nucleotides, about 700 nucleotides, about 600 nucleotides, about 500 nucleotides, about 400 nucleotides, about 300 nucleotides, about 200 nucleotides, about 100 nucleotides, about 80 nucleotides, about 70 nucleotides, about 60 nucleotides, about 50 nucleotides upstream of genomic site GRCh38/hg38: chr1 161236598. In some cases, the targeted region of the pre-mRNA is at least about 1500 nucleotides, about 1000 nucleotides, about 800 nucleotides, about 700 nucleotides, about 600 nucleotides, about 500 nucleotides, about 400 nucleotides, about 300 nucleotides, about 200 nucleotides, about 100 nucleotides, about 80 nucleotides, about 70 nucleotides, about 60 nucleotides, about 50 nucleotides upstream of genomic site GRCh38/hg38: chr1 161236598. In some cases, the targeted region of the pre-mRNA is at most about 1500 nucleotides, about 1000 nucleotides, about 800 nucleotides, about 700 nucleotides, about 600 nucleotides, about 500 nucleotides, about 400 nucleotides, about 300 nucleotides, about 200 nucleotides, about 100 nucleotides, about 80 nucleotides, about 70 nucleotides, about 60 nucleotides, about 50 nucleotides downstream of SEQ ID NO: 255. In some cases, the targeted region of the pre-mRNA is at least about 1500 nucleotides, about 1000 nucleotides, about 800 nucleotides, about 700 nucleotides, about 600 nucleotides, about 500 nucleotides, about 400 nucleotides, about 300 nucleotides, about 200 nucleotides, about 100 nucleotides, about 80 nucleotides, about 70 nucleotides, about 60 nucleotides, about 50 nucleotides downstream of SEQ ID NO: 255. In some cases, the targeted region of the pre-mRNA is at most about 1500 nucleotides, about 1000 nucleotides, about 800 nucleotides, about 700 nucleotides, about 600 nucleotides, about 500 nucleotides, about 400 nucleotides, about 300 nucleotides, about 200 nucleotides, about 100 nucleotides, about 80 nucleotides, about 70 nucleotides, about 60 nucleotides, about 50 nucleotides downstream of genomic site GRCh38/hg38: chr1 161236459. In some cases. the targeted region of the pre-mRNA is at least about 1500 nucleotides, about 1000 nucleotides, about 800 nucleotides, about 700 nucleotides, about 600 nucleotides, about 500 nucleotides, about 400 nucleotides, about 300 nucleotides, about 200 nucleotides, about 100 nucleotides, about 80 nucleotides, about 70 nucleotides, about 60 nucleotides, about 50 nucleotides downstream of genomic site GRCh38/hg38: chr1 161236459. In some cases, the targeted region of the pre-mRNA is within a sequence SEQ ID NO: 255. In some cases, the targeted region of the pre-mRNA is within a sequence between a pair of genomic sites GRCh38/hg38: chr1 161236598, and GRCh38/hg38: chr1 161236459. In some cases, the therapeutic agent is an antisense oligomer complementary to a sequence with at least about 80%, 85%, 90%, 95%, 96%, 97%, 98%, 99% or 100% sequence identity to SEQ ID NO:255. In some cases, the therapeutic agent is an antisense oligomer complementary to a sequence with 100% sequence identity to SEQ ID NO:255. In some cases, the therapeutic agent increases level of a first processed mRNA encoding a protein having a sequence SEQ ID NO: 8222, and decreases level of a second processed mRNA encoding a protein having a sequence SEQ ID NO: 458. In some cases, the targeted region of the pre-mRNA is at most about 1500 nucleotides, about 1000 nucleotides, about 800 nucleotides, about 700 nucleotides, about 600 nucleotides, about 500 nucleotides, about 400 nucleotides, about 300 nucleotides, about 200 nucleotides, about 100 nucleotides, about 80 nucleotides, about 70 nucleotides, about 60 nucleotides, about 50 nucleotides upstream of SEQ ID NO: 256. In some cases, the targeted region of the pre-mRNA is at least about 1500 nucleotides, about 1000 nucleotides, about 800 nucleotides, about 700 nucleotides, about 600 nucleotides, about 500 nucleotides, about 400 nucleotides, about 300 nucleotides, about 200 nucleotides, about 100 nucleotides, about 80 nucleotides, about 70 nucleotides, about 60 nucleotides, about 50 nucleotides upstream of SEQ ID NO: 256. In some cases, the targeted region of the pre-mRNA is at most about 1500 nucleotides, about 1000 nucleotides, about 800 nucleotides, about 700 nucleotides, about 600 nucleotides, about 500 nucleotides, about 400 nucleotides, about 300 nucleotides, about 200 nucleotides, about 100 nucleotides, about 80 nucleotides, about 70 nucleotides, about 60 nucleotides, about 50 nucleotides upstream of genomic site GRCh38/hg38: chr1 161236598. In some cases, the targeted region of the pre-mRNA is at least about 1500 nucleotides, about 1000 nucleotides, about 800 nucleotides, about 700 nucleotides, about 600 nucleotides, about 500 nucleotides, about 400 nucleotides, about 300 nucleotides, about 200 nucleotides, about 100 nucleotides, about 80 nucleotides, about 70 nucleotides, about 60 nucleotides, about 50 nucleotides upstream of genomic site GRCh38/hg38: chr1 161236598. In some cases, the targeted region of the pre-mRNA is at most about 1500 nucleotides, about 1000 nucleotides, about 800 nucleotides, about 700 nucleotides, about 600 nucleotides, about 500 nucleotides, about 400 nucleotides, about 300 nucleotides, about 200 nucleotides, about 100 nucleotides, about 80 nucleotides, about 70 nucleotides, about 60 nucleotides, about 50 nucleotides downstream of SEQ ID NO: 256. In some cases, the targeted region of the pre-mRNA is at least about 1500 nucleotides, about 1000 nucleotides, about 800 nucleotides, about 700 nucleotides, about 600 nucleotides, about 500 nucleotides, about 400 nucleotides, about 300 nucleotides, about 200 nucleotides, about 100 nucleotides, about 80 nucleotides, about 70 nucleotides, about 60 nucleotides, about 50 nucleotides downstream of SEQ ID NO: 256. In some cases, the targeted region of the pre-mRNA is at most about 1500 nucleotides, about 1000 nucleotides, about 800 nucleotides, about 700 nucleotides, about 600 nucleotides, about 500 nucleotides, about 400 nucleotides, about 300 nucleotides, about 200 nucleotides, about 100 nucleotides, about 80 nucleotides, about 70 nucleotides, about 60 nucleotides, about 50 nucleotides downstream of genomic site GRCh38/hg38: chr1 161236459. In some cases. the targeted region of the pre-mRNA is at least about 1500 nucleotides, about 1000 nucleotides, about 800 nucleotides, about 700 nucleotides, about 600 nucleotides, about 500 nucleotides, about 400 nucleotides, about 300 nucleotides, about 200 nucleotides, about 100 nucleotides, about 80 nucleotides, about 70 nucleotides, about 60 nucleotides, about 50 nucleotides downstream of genomic site GRCh38/hg38: chr1 161236459. In some cases, the targeted region of the pre-mRNA is within a sequence SEQ ID NO: 256. In some cases, the targeted region of the pre-mRNA is within a sequence between a pair of genomic sites GRCh38/hg38: chr1 161236598, and GRCh38/hg38: chr1 161236459. In some cases, the therapeutic agent is an antisense oligomer complementary to a sequence with at least about 80%, 85%, 90%, 95%, 96%, 97%, 98%, 99% or 100% sequence identity to SEQ ID NO:256. In some cases, the therapeutic agent is an antisense oligomer complementary to a sequence with 100% sequence identity to SEQ ID NO:256. In some cases, the therapeutic agent increases level of a first processed mRNA encoding a protein having a sequence SEQ ID NO: 8223, and decreases level of a second processed mRNA encoding a protein having a sequence SEQ ID NO: 459. In some cases, the targeted region of the pre-mRNA is at most about 1500 nucleotides, about 1000 nucleotides, about 800 nucleotides, about 700 nucleotides, about 600 nucleotides, about 500 nucleotides, about 400 nucleotides, about 300 nucleotides, about 200 nucleotides, about 100 nucleotides, about 80 nucleotides, about 70 nucleotides, about 60 nucleotides, about 50 nucleotides upstream of SEQ ID NO: 257. In some cases, the targeted region of the pre-mRNA is at least about 1500 nucleotides, about 1000 nucleotides, about 800 nucleotides, about 700 nucleotides, about 600 nucleotides, about 500 nucleotides, about 400 nucleotides, about 300 nucleotides, about 200 nucleotides, about 100 nucleotides, about 80 nucleotides, about 70 nucleotides, about 60 nucleotides, about 50 nucleotides upstream of SEQ ID NO: 257. In some cases, the targeted region of the pre-mRNA is at most about 1500 nucleotides, about 1000 nucleotides, about 800 nucleotides, about 700 nucleotides, about 600 nucleotides, about 500 nucleotides, about 400 nucleotides, about 300 nucleotides, about 200 nucleotides, about 100 nucleotides, about 80 nucleotides, about 70 nucleotides, about 60 nucleotides, about 50 nucleotides upstream of genomic site GRCh38/hg38: chr1 161236598. In some cases, the targeted region of the pre-mRNA is at least about 1500 nucleotides, about 1000 nucleotides, about 800 nucleotides, about 700 nucleotides, about 600 nucleotides, about 500 nucleotides, about 400 nucleotides, about 300 nucleotides, about 200 nucleotides, about 100 nucleotides, about 80 nucleotides, about 70 nucleotides, about 60 nucleotides, about 50 nucleotides upstream of genomic site GRCh38/hg38: chr1 161236598. In some cases, the targeted region of the pre-mRNA is at most about 1500 nucleotides, about 1000 nucleotides, about 800 nucleotides, about 700 nucleotides, about 600 nucleotides, about 500 nucleotides, about 400 nucleotides, about 300 nucleotides, about 200 nucleotides, about 100 nucleotides, about 80 nucleotides, about 70 nucleotides, about 60 nucleotides, about 50 nucleotides downstream of SEQ ID NO: 257. In some cases, the targeted region of the pre-mRNA is at least about 1500 nucleotides, about 1000 nucleotides, about 800 nucleotides, about 700 nucleotides, about 600 nucleotides, about 500 nucleotides, about 400 nucleotides, about 300 nucleotides, about 200 nucleotides, about 100 nucleotides, about 80 nucleotides, about 70 nucleotides, about 60 nucleotides, about 50 nucleotides downstream of SEQ ID NO: 257. In some cases, the targeted region of the pre-mRNA is at most about 1500 nucleotides, about 1000 nucleotides, about 800 nucleotides, about 700 nucleotides, about 600 nucleotides, about 500 nucleotides, about 400 nucleotides, about 300 nucleotides, about 200 nucleotides, about 100 nucleotides, about 80 nucleotides, about 70 nucleotides, about 60 nucleotides, about 50 nucleotides downstream of genomic site GRCh38/hg38: chr1 161236459. In some cases. the targeted region of the pre-mRNA is at least about 1500 nucleotides, about 1000 nucleotides, about 800 nucleotides, about 700 nucleotides, about 600 nucleotides, about 500 nucleotides, about 400 nucleotides, about 300 nucleotides, about 200 nucleotides, about 100 nucleotides, about 80 nucleotides, about 70 nucleotides, about 60 nucleotides, about 50 nucleotides downstream of genomic site GRCh38/hg38: chr1 161236459. In some cases, the targeted region of the pre-mRNA is within a sequence SEQ ID NO: 257. In some cases, the targeted region of the pre-mRNA is within a sequence between a pair of genomic sites GRCh38/hg38: chr1 161236598, and GRCh38/hg38: chr1 161236459. In some cases, the therapeutic agent is an antisense oligomer complementary to a sequence with at least about 80%, 85%, 90%, 95%, 96%, 97%, 98%, 99% or 100% sequence identity to SEQ ID NO:257. In some cases, the therapeutic agent is an antisense oligomer complementary to a sequence with 100% sequence identity to SEQ ID NO:257. In some cases, the therapeutic agent increases level of a first processed mRNA encoding a protein having a sequence SEQ ID NO: 8224, and decreases level of a second processed mRNA encoding a protein having a sequence SEQ ID NO: 460. In some cases, the targeted region of the pre-mRNA is at most about 1500 nucleotides, about 1000 nucleotides, about 800 nucleotides, about 700 nucleotides, about 600 nucleotides, about 500 nucleotides, about 400 nucleotides, about 300 nucleotides, about 200 nucleotides, about 100 nucleotides, about 80 nucleotides, about 70 nucleotides, about 60 nucleotides, about 50 nucleotides upstream of SEQ ID NO: 258. In some cases, the targeted region of the pre-mRNA is at least about 1500 nucleotides, about 1000 nucleotides, about 800 nucleotides, about 700 nucleotides, about 600 nucleotides, about 500 nucleotides, about 400 nucleotides, about 300 nucleotides, about 200 nucleotides, about 100 nucleotides, about 80 nucleotides, about 70 nucleotides, about 60 nucleotides, about 50 nucleotides upstream of SEQ ID NO: 258. In some cases, the targeted region of the pre-mRNA is at most about 1500 nucleotides, about 1000 nucleotides, about 800 nucleotides, about 700 nucleotides, about 600 nucleotides, about 500 nucleotides, about 400 nucleotides, about 300 nucleotides, about 200 nucleotides, about 100 nucleotides, about 80 nucleotides, about 70 nucleotides, about 60 nucleotides, about 50 nucleotides upstream of genomic site GRCh38/hg38: chr1 161236598. In some cases, the targeted region of the pre-mRNA is at least about 1500 nucleotides, about 1000 nucleotides, about 800 nucleotides, about 700 nucleotides, about 600 nucleotides, about 500 nucleotides, about 400 nucleotides, about 300 nucleotides, about 200 nucleotides, about 100 nucleotides, about 80 nucleotides, about 70 nucleotides, about 60 nucleotides, about 50 nucleotides upstream of genomic site GRCh38/hg38: chr1 161236598. In some cases, the targeted region of the pre-mRNA is at most about 1500 nucleotides, about 1000 nucleotides, about 800 nucleotides, about 700 nucleotides, about 600 nucleotides, about 500 nucleotides, about 400 nucleotides, about 300 nucleotides, about 200 nucleotides, about 100 nucleotides, about 80 nucleotides, about 70 nucleotides, about 60 nucleotides, about 50 nucleotides downstream of SEQ ID NO: 258. In some cases, the targeted region of the pre-mRNA is at least about 1500 nucleotides, about 1000 nucleotides, about 800 nucleotides, about 700 nucleotides, about 600 nucleotides, about 500 nucleotides, about 400 nucleotides, about 300 nucleotides, about 200 nucleotides, about 100 nucleotides, about 80 nucleotides, about 70 nucleotides, about 60 nucleotides, about 50 nucleotides downstream of SEQ ID NO: 258. In some cases, the targeted region of the pre-mRNA is at most about 1500 nucleotides, about 1000 nucleotides, about 800 nucleotides, about 700 nucleotides, about 600 nucleotides, about 500 nucleotides, about 400 nucleotides, about 300 nucleotides, about 200 nucleotides, about 100 nucleotides, about 80 nucleotides, about 70 nucleotides, about 60 nucleotides, about 50 nucleotides downstream of genomic site GRCh38/hg38: chr1 161236459. In some cases. the targeted region of the pre-mRNA is at least about 1500 nucleotides, about 1000 nucleotides, about 800 nucleotides, about 700 nucleotides, about 600 nucleotides, about 500 nucleotides, about 400 nucleotides, about 300 nucleotides, about 200 nucleotides, about 100 nucleotides, about 80 nucleotides, about 70 nucleotides, about 60 nucleotides, about 50 nucleotides downstream of genomic site GRCh38/hg38: chr1 161236459. In some cases, the targeted region of the pre-mRNA is within a sequence SEQ ID NO: 258. In some cases, the targeted region of the pre-mRNA is within a sequence between a pair of genomic sites GRCh38/hg38: chr1 161236598, and GRCh38/hg38: chr1 161236459. In some cases, the therapeutic agent is an antisense oligomer complementary to a sequence with at least about 80%, 85%, 90%, 95%, 96%, 97%, 98%, 99% or 100% sequence identity to SEQ ID NO:258. In some cases, the therapeutic agent is an antisense oligomer complementary to a sequence with 100% sequence identity to SEQ ID NO:258. In some cases, the therapeutic agent increases level of a first processed mRNA encoding a protein having a sequence SEQ ID NO: 8225, and decreases level of a second processed mRNA encoding a protein having a sequence SEQ ID NO: 461. In some cases, the targeted region of the pre-mRNA is at most about 1500 nucleotides, about 1000 nucleotides, about 800 nucleotides, about 700 nucleotides, about 600 nucleotides, about 500 nucleotides, about 400 nucleotides, about 300 nucleotides, about 200 nucleotides, about 100 nucleotides, about 80 nucleotides, about 70 nucleotides, about 60 nucleotides, about 50 nucleotides upstream of SEQ ID NO: 259. In some cases, the targeted region of the pre-mRNA is at least about 1500 nucleotides, about 1000 nucleotides, about 800 nucleotides, about 700 nucleotides, about 600 nucleotides, about 500 nucleotides, about 400 nucleotides, about 300 nucleotides, about 200 nucleotides, about 100 nucleotides, about 80 nucleotides, about 70 nucleotides, about 60 nucleotides, about 50 nucleotides upstream of SEQ ID NO: 259. In some cases, the targeted region of the pre-mRNA is at most about 1500 nucleotides, about 1000 nucleotides, about 800 nucleotides, about 700 nucleotides, about 600 nucleotides, about 500 nucleotides, about 400 nucleotides, about 300 nucleotides, about 200 nucleotides, about 100 nucleotides, about 80 nucleotides, about 70 nucleotides, about 60 nucleotides, about 50 nucleotides upstream of genomic site GRCh38/hg38: chr1 161236598. In some cases, the targeted region of the pre-mRNA is at least about 1500 nucleotides, about 1000 nucleotides, about 800 nucleotides, about 700 nucleotides, about 600 nucleotides, about 500 nucleotides, about 400 nucleotides, about 300 nucleotides, about 200 nucleotides, about 100 nucleotides, about 80 nucleotides, about 70 nucleotides, about 60 nucleotides, about 50 nucleotides upstream of genomic site GRCh38/hg38: chr1 161236598. In some cases, the targeted region of the pre-mRNA is at most about 1500 nucleotides, about 1000 nucleotides, about 800 nucleotides, about 700 nucleotides, about 600 nucleotides, about 500 nucleotides, about 400 nucleotides, about 300 nucleotides, about 200 nucleotides, about 100 nucleotides, about 80 nucleotides, about 70 nucleotides, about 60 nucleotides, about 50 nucleotides downstream of SEQ ID NO: 259. In some cases, the targeted region of the pre-mRNA is at least about 1500 nucleotides, about 1000 nucleotides, about 800 nucleotides, about 700 nucleotides, about 600 nucleotides, about 500 nucleotides, about 400 nucleotides, about 300 nucleotides, about 200 nucleotides, about 100 nucleotides, about 80 nucleotides, about 70 nucleotides, about 60 nucleotides, about 50 nucleotides downstream of SEQ ID NO: 259. In some cases, the targeted region of the pre-mRNA is at most about 1500 nucleotides, about 1000 nucleotides, about 800 nucleotides, about 700 nucleotides, about 600 nucleotides, about 500 nucleotides, about 400 nucleotides, about 300 nucleotides, about 200 nucleotides, about 100 nucleotides, about 80 nucleotides, about 70 nucleotides, about 60 nucleotides, about 50 nucleotides downstream of genomic site GRCh38/hg38: chr1 161236459. In some cases. the targeted region of the pre-mRNA is at least about 1500 nucleotides, about 1000 nucleotides, about 800 nucleotides, about 700 nucleotides, about 600 nucleotides, about 500 nucleotides, about 400 nucleotides, about 300 nucleotides, about 200 nucleotides, about 100 nucleotides, about 80 nucleotides, about 70 nucleotides, about 60 nucleotides, about 50 nucleotides downstream of genomic site GRCh38/hg38: chr1 161236459. In some cases, the targeted region of the pre-mRNA is within a sequence SEQ ID NO: 259. In some cases, the targeted region of the pre-mRNA is within a sequence between a pair of genomic sites GRCh38/hg38: chr1 161236598, and GRCh38/hg38: chr1 161236459. In some cases, the therapeutic agent is an antisense oligomer complementary to a sequence with at least about 80%, 85%, 90%, 95%, 96%, 97%, 98%, 99% or 100% sequence identity to SEQ ID NO:259. In some cases, the therapeutic agent is an antisense oligomer complementary to a sequence with 100% sequence identity to SEQ ID NO:259. In some cases, the therapeutic agent increases level of a first processed mRNA encoding a protein having a sequence SEQ ID NO: 8226, and decreases level of a second processed mRNA encoding a protein having a sequence SEQ ID NO: 462. In some cases, the targeted region of the pre-mRNA is at most about 1500 nucleotides, about 1000 nucleotides, about 800 nucleotides, about 700 nucleotides, about 600 nucleotides, about 500 nucleotides, about 400 nucleotides, about 300 nucleotides, about 200 nucleotides, about 100 nucleotides, about 80 nucleotides, about 70 nucleotides, about 60 nucleotides, about 50 nucleotides upstream of SEQ ID NO: 260. In some cases, the targeted region of the pre-mRNA is at least about 1500 nucleotides, about 1000 nucleotides, about 800 nucleotides, about 700 nucleotides, about 600 nucleotides, about 500 nucleotides, about 400 nucleotides, about 300 nucleotides, about 200 nucleotides, about 100 nucleotides, about 80 nucleotides, about 70 nucleotides, about 60 nucleotides, about 50 nucleotides upstream of SEQ ID NO: 260. In some cases, the targeted region of the pre-mRNA is at most about 1500 nucleotides, about 1000 nucleotides, about 800 nucleotides, about 700 nucleotides, about 600 nucleotides, about 500 nucleotides, about 400 nucleotides, about 300 nucleotides, about 200 nucleotides, about 100 nucleotides, about 80 nucleotides, about 70 nucleotides, about 60 nucleotides, about 50 nucleotides upstream of genomic site GRCh38/hg38: chr1 161236598. In some cases, the targeted region of the pre-mRNA is at least about 1500 nucleotides, about 1000 nucleotides, about 800 nucleotides, about 700 nucleotides, about 600 nucleotides, about 500 nucleotides, about 400 nucleotides, about 300 nucleotides, about 200 nucleotides, about 100 nucleotides, about 80 nucleotides, about 70 nucleotides, about 60 nucleotides, about 50 nucleotides upstream of genomic site GRCh38/hg38: chr1 161236598. In some cases, the targeted region of the pre-mRNA is at most about 1500 nucleotides, about 1000 nucleotides, about 800 nucleotides, about 700 nucleotides, about 600 nucleotides, about 500 nucleotides, about 400 nucleotides, about 300 nucleotides, about 200 nucleotides, about 100 nucleotides, about 80 nucleotides, about 70 nucleotides, about 60 nucleotides, about 50 nucleotides downstream of SEQ ID NO: 260. In some cases, the targeted region of the pre-mRNA is at least about 1500 nucleotides, about 1000 nucleotides, about 800 nucleotides, about 700 nucleotides, about 600 nucleotides, about 500 nucleotides, about 400 nucleotides, about 300 nucleotides, about 200 nucleotides, about 100 nucleotides, about 80 nucleotides, about 70 nucleotides, about 60 nucleotides, about 50 nucleotides downstream of SEQ ID NO: 260. In some cases, the targeted region of the pre-mRNA is at most about 1500 nucleotides, about 1000 nucleotides, about 800 nucleotides, about 700 nucleotides, about 600 nucleotides, about 500 nucleotides, about 400 nucleotides, about 300 nucleotides, about 200 nucleotides, about 100 nucleotides, about 80 nucleotides, about 70 nucleotides, about 60 nucleotides, about 50 nucleotides downstream of genomic site GRCh38/hg38: chr1 161236459. In some cases. the targeted region of the pre-mRNA is at least about 1500 nucleotides, about 1000 nucleotides, about 800 nucleotides, about 700 nucleotides, about 600 nucleotides, about 500 nucleotides, about 400 nucleotides, about 300 nucleotides, about 200 nucleotides, about 100 nucleotides, about 80 nucleotides, about 70 nucleotides, about 60 nucleotides, about 50 nucleotides downstream of genomic site GRCh38/hg38: chr1 161236459. In some cases, the targeted region of the pre-mRNA is within a sequence SEQ ID NO: 260. In some cases, the targeted region of the pre-mRNA is within a sequence between a pair of genomic sites GRCh38/hg38: chr1 161236598, and GRCh38/hg38: chr1 161236459. In some cases, the therapeutic agent is an antisense oligomer complementary to a sequence with at least about 80%, 85%, 90%, 95%, 96%, 97%, 98%, 99% or 100% sequence identity to SEQ ID NO:260. In some cases, the therapeutic agent is an antisense oligomer complementary to a sequence with 100% sequence identity to SEQ ID NO:260. In some cases, the therapeutic agent increases level of a first processed mRNA encoding a protein having a sequence SEQ ID NO: 8227, and decreases level of a second processed mRNA encoding a protein having a sequence SEQ ID NO: 463. In some cases, the targeted region of the pre-mRNA is at most about 1500 nucleotides, about 1000 nucleotides, about 800 nucleotides, about 700 nucleotides, about 600 nucleotides, about 500 nucleotides, about 400 nucleotides, about 300 nucleotides, about 200 nucleotides, about 100 nucleotides, about 80 nucleotides, about 70 nucleotides, about 60 nucleotides, about 50 nucleotides upstream of SEQ ID NO: 261. In some cases, the targeted region of the pre-mRNA is at least about 1500 nucleotides, about 1000 nucleotides, about 800 nucleotides, about 700 nucleotides, about 600 nucleotides, about 500 nucleotides, about 400 nucleotides, about 300 nucleotides, about 200 nucleotides, about 100 nucleotides, about 80 nucleotides, about 70 nucleotides, about 60 nucleotides, about 50 nucleotides upstream of SEQ ID NO: 261. In some cases, the targeted region of the pre-mRNA is at most about 1500 nucleotides, about 1000 nucleotides, about 800 nucleotides, about 700 nucleotides, about 600 nucleotides, about 500 nucleotides, about 400 nucleotides, about 300 nucleotides, about 200 nucleotides, about 100 nucleotides, about 80 nucleotides, about 70 nucleotides, about 60 nucleotides, about 50 nucleotides upstream of genomic site GRCh38/hg38: chr1 161236598. In some cases, the targeted region of the pre-mRNA is at least about 1500 nucleotides, about 1000 nucleotides, about 800 nucleotides, about 700 nucleotides, about 600 nucleotides, about 500 nucleotides, about 400 nucleotides, about 300 nucleotides, about 200 nucleotides, about 100 nucleotides, about 80 nucleotides, about 70 nucleotides, about 60 nucleotides, about 50 nucleotides upstream of genomic site GRCh38/hg38: chr1 161236598. In some cases, the targeted region of the pre-mRNA is at most about 1500 nucleotides, about 1000 nucleotides, about 800 nucleotides, about 700 nucleotides, about 600 nucleotides, about 500 nucleotides, about 400 nucleotides, about 300 nucleotides, about 200 nucleotides, about 100 nucleotides, about 80 nucleotides, about 70 nucleotides, about 60 nucleotides, about 50 nucleotides downstream of SEQ ID NO: 261. In some cases, the targeted region of the pre-mRNA is at least about 1500 nucleotides, about 1000 nucleotides, about 800 nucleotides, about 700 nucleotides, about 600 nucleotides, about 500 nucleotides, about 400 nucleotides, about 300 nucleotides, about 200 nucleotides, about 100 nucleotides, about 80 nucleotides, about 70 nucleotides, about 60 nucleotides, about 50 nucleotides downstream of SEQ ID NO: 261. In some cases, the targeted region of the pre-mRNA is at most about 1500 nucleotides, about 1000 nucleotides, about 800 nucleotides, about 700 nucleotides, about 600 nucleotides, about 500 nucleotides, about 400 nucleotides, about 300 nucleotides, about 200 nucleotides, about 100 nucleotides, about 80 nucleotides, about 70 nucleotides, about 60 nucleotides, about 50 nucleotides downstream of genomic site GRCh38/hg38: chr1 161236459. In some cases. the targeted region of the pre-mRNA is at least about 1500 nucleotides, about 1000 nucleotides, about 800 nucleotides, about 700 nucleotides, about 600 nucleotides, about 500 nucleotides, about 400 nucleotides, about 300 nucleotides, about 200 nucleotides, about 100 nucleotides, about 80 nucleotides, about 70 nucleotides, about 60 nucleotides, about 50 nucleotides downstream of genomic site GRCh38/hg38: chr1 161236459. In some cases, the targeted region of the pre-mRNA is within a sequence SEQ ID NO: 261. In some cases, the targeted region of the pre-mRNA is within a sequence between a pair of genomic sites GRCh38/hg38: chr1 161236598, and GRCh38/hg38: chr1 161236459. In some cases, the therapeutic agent is an antisense oligomer complementary to a sequence with at least about 80%, 85%, 90%, 95%, 96%, 97%, 98%, 99% or 100% sequence identity to SEQ ID NO:261. In some cases, the therapeutic agent is an antisense oligomer complementary to a sequence with 100% sequence identity to SEQ ID NO:261. In some cases, the therapeutic agent is an antisense oligomer that has a sequence with at least about 80%, 85%, 90%, 95%, 96%, 97%, 98%, 99% or 100% sequence identity to a sequence selected from the group consisting of SEQ ID NOs: 4929-4995. In some cases, the therapeutic agent is an antisense oligomer that has a sequence selected from the group consisting of SEQ ID NOs: 4929-4995. In some cases, the target peptide sequence is a portion of NR1I3 protein, and the method treats a disease or the condition that comprises Intellectual Disability.

[0231] NT5C3A

[0232] In some cases, the target peptide sequence is a portion of NT5C3A protein. In some cases, the therapeutic agent increases level of a first processed mRNA encoding a protein having a sequence SEQ ID NO: 8228, and decreases level of a second processed mRNA encoding a protein having a sequence SEQ ID NO: 464. In some cases, the targeted region of the pre-mRNA is at most about 1500 nucleotides, about 1000 nucleotides, about 800 nucleotides, about 700 nucleotides, about 600 nucleotides, about 500 nucleotides, about 400 nucleotides, about 300 nucleotides, about 200 nucleotides, about 100 nucleotides, about 80 nucleotides, about 70 nucleotides, about 60 nucleotides, about 50 nucleotides upstream of SEQ ID NO: 262. In some cases, the targeted region of the pre-mRNA is at least about 1500 nucleotides, about 1000 nucleotides, about 800 nucleotides, about 700 nucleotides, about 600 nucleotides, about 500 nucleotides, about 400 nucleotides, about 300 nucleotides, about 200 nucleotides, about 100 nucleotides, about 80 nucleotides, about 70 nucleotides, about 60 nucleotides, about 50 nucleotides upstream of SEQ ID NO: 262. In some cases, the targeted region of the pre-mRNA is at most about 1500 nucleotides, about 1000 nucleotides, about 800 nucleotides, about 700 nucleotides, about 600 nucleotides, about 500 nucleotides, about 400 nucleotides, about 300 nucleotides, about 200 nucleotides, about 100 nucleotides, about 80 nucleotides, about 70 nucleotides, about 60 nucleotides, about 50 nucleotides upstream of genomic site GRCh38/hg38: chr7 33035988. In some cases, the targeted region of the pre-mRNA is at least about 1500 nucleotides, about 1000 nucleotides, about 800 nucleotides, about 700 nucleotides, about 600 nucleotides, about 500 nucleotides, about 400 nucleotides, about 300 nucleotides, about 200 nucleotides, about 100 nucleotides, about 80 nucleotides, about 70 nucleotides, about 60 nucleotides, about 50 nucleotides upstream of genomic site GRCh38/hg38: chr7 33035988. In some cases, the targeted region of the pre-mRNA is at most about 1500 nucleotides, about 1000 nucleotides, about 800 nucleotides, about 700 nucleotides, about 600 nucleotides, about 500 nucleotides, about 400 nucleotides, about 300 nucleotides, about 200 nucleotides, about 100 nucleotides, about 80 nucleotides, about 70 nucleotides, about 60 nucleotides, about 50 nucleotides downstream of SEQ ID NO: 262. In some cases, the targeted region of the pre-mRNA is at least about 1500 nucleotides, about 1000 nucleotides, about 800 nucleotides, about 700 nucleotides, about 600 nucleotides, about 500 nucleotides, about 400 nucleotides, about 300 nucleotides, about 200 nucleotides, about 100 nucleotides, about 80 nucleotides, about 70 nucleotides, about 60 nucleotides, about 50 nucleotides downstream of SEQ ID NO: 262. In some cases, the targeted region of the pre-mRNA is at most about 1500 nucleotides, about 1000 nucleotides, about 800 nucleotides, about 700 nucleotides, about 600 nucleotides, about 500 nucleotides, about 400 nucleotides, about 300 nucleotides, about 200 nucleotides, about 100 nucleotides, about 80 nucleotides, about 70 nucleotides, about 60 nucleotides, about 50 nucleotides downstream of genomic site GRCh38/hg38: chr7 33035934. In some cases. the targeted region of the pre-mRNA is at least about 1500 nucleotides, about 1000 nucleotides, about 800 nucleotides, about 700 nucleotides, about 600 nucleotides, about 500 nucleotides, about 400 nucleotides, about 300 nucleotides, about 200 nucleotides, about 100 nucleotides, about 80 nucleotides, about 70 nucleotides, about 60 nucleotides, about 50 nucleotides downstream of genomic site GRCh38/hg38: chr7 33035934. In some cases, the targeted region of the pre-mRNA is within a sequence SEQ ID NO: 262. In some cases, the targeted region of the pre-mRNA is within a sequence between a pair of genomic sites GRCh38/hg38: chr7 33035988, and GRCh38/hg38: chr7 33035934. In some cases, the therapeutic agent is an antisense oligomer complementary to a sequence with at least about 80%, 85%, 90%, 95%, 96%, 97%, 98%, 99% or 100% sequence identity to SEQ ID NO:262. In some cases, the therapeutic agent is an antisense oligomer complementary to a sequence with 100% sequence identity to SEQ ID NO:262. In some cases, the therapeutic agent increases level of a first processed mRNA encoding a protein having a sequence SEQ ID NO: 8229, and decreases level of a second processed mRNA encoding a protein having a sequence SEQ ID NO: 465. In some cases, the targeted region of the pre-mRNA is at most about 1500 nucleotides, about 1000 nucleotides, about 800 nucleotides, about 700 nucleotides, about 600 nucleotides, about 500 nucleotides, about 400 nucleotides, about 300 nucleotides, about 200 nucleotides, about 100 nucleotides, about 80 nucleotides, about 70 nucleotides, about 60 nucleotides, about 50 nucleotides upstream of SEQ ID NO: 263. In some cases, the targeted region of the pre-mRNA is at least about 1500 nucleotides, about 1000 nucleotides, about 800 nucleotides, about 700 nucleotides, about 600 nucleotides, about 500 nucleotides, about 400 nucleotides, about 300 nucleotides, about 200 nucleotides, about 100 nucleotides, about 80 nucleotides, about 70 nucleotides, about 60 nucleotides, about 50 nucleotides upstream of SEQ ID NO: 263. In some cases, the targeted region of the pre-mRNA is at most about 1500 nucleotides, about 1000 nucleotides, about 800 nucleotides, about 700 nucleotides, about 600 nucleotides, about 500 nucleotides, about 400 nucleotides, about 300 nucleotides, about 200 nucleotides, about 100 nucleotides, about 80 nucleotides, about 70 nucleotides, about 60 nucleotides, about 50 nucleotides upstream of genomic site GRCh38/hg38: chr7 33035988. In some cases, the targeted region of the pre-mRNA is at least about 1500 nucleotides, about 1000 nucleotides, about 800 nucleotides, about 700 nucleotides, about 600 nucleotides, about 500 nucleotides, about 400 nucleotides, about 300 nucleotides, about 200 nucleotides, about 100 nucleotides, about 80 nucleotides, about 70 nucleotides, about 60 nucleotides, about 50 nucleotides upstream of genomic site GRCh38/hg38: chr7 33035988. In some cases, the targeted region of the pre-mRNA is at most about 1500 nucleotides, about 1000 nucleotides, about 800 nucleotides, about 700 nucleotides, about 600 nucleotides, about 500 nucleotides, about 400 nucleotides, about 300 nucleotides, about 200 nucleotides, about 100 nucleotides, about 80 nucleotides, about 70 nucleotides, about 60 nucleotides, about 50 nucleotides downstream of SEQ ID NO: 263. In some cases, the targeted region of the pre-mRNA is at least about 1500 nucleotides, about 1000 nucleotides, about 800 nucleotides, about 700 nucleotides, about 600 nucleotides, about 500 nucleotides, about 400 nucleotides, about 300 nucleotides, about 200 nucleotides, about 100 nucleotides, about 80 nucleotides, about 70 nucleotides, about 60 nucleotides, about 50 nucleotides downstream of SEQ ID NO: 263. In some cases, the targeted region of the pre-mRNA is at most about 1500 nucleotides, about 1000 nucleotides, about 800 nucleotides, about 700 nucleotides, about 600 nucleotides, about 500 nucleotides, about 400 nucleotides, about 300 nucleotides, about 200 nucleotides, about 100 nucleotides, about 80 nucleotides, about 70 nucleotides, about 60 nucleotides, about 50 nucleotides downstream of genomic site GRCh38/hg38: chr7 33035934. In some cases. the targeted region of the pre-mRNA is at least about 1500 nucleotides, about 1000 nucleotides, about 800 nucleotides, about 700 nucleotides, about 600 nucleotides, about 500 nucleotides, about 400 nucleotides, about 300 nucleotides, about 200 nucleotides, about 100 nucleotides, about 80 nucleotides, about 70 nucleotides, about 60 nucleotides, about 50 nucleotides downstream of genomic site GRCh38/hg38: chr7 33035934. In some cases, the targeted region of the pre-mRNA is within a sequence SEQ ID NO: 263. In some cases, the targeted region of the pre-mRNA is within a sequence between a pair of genomic sites GRCh38/hg38: chr7 33035988, and GRCh38/hg38: chr7 33035934. In some cases, the therapeutic agent is an antisense oligomer complementary to a sequence with at least about 80%, 85%, 90%, 95%, 96%, 97%, 98%, 99% or 100% sequence identity to SEQ ID NO:263. In some cases, the therapeutic agent is an antisense oligomer complementary to a sequence with 100% sequence identity to SEQ ID NO:263. In some cases, the therapeutic agent is an antisense oligomer that has a sequence with at least about 80%, 85%, 90%, 95%, 96%, 97%, 98%, 99% or 100% sequence identity to a sequence selected from the group consisting of SEQ ID NOs: 4996-5045. In some cases, the therapeutic agent is an antisense oligomer that has a sequence selected from the group consisting of SEQ ID NOs: 4996-5045. In some cases, the target peptide sequence is a portion of NT5C3A protein, and the method treats a disease or the condition that comprises Intellectual Disability; Cytopenia; Uridine 5-Prime Monophosphate Hydrolase Deficiency, Hemolytic Anemia due to; or Congenital anemia.

[0233] NUTM1

[0234] In some cases, the target peptide sequence is a portion of NUTM1 protein. In some cases, the therapeutic agent increases level of a first processed mRNA encoding a protein having a sequence SEQ ID NO: 8230, and decreases level of a second processed mRNA encoding a protein having a sequence SEQ ID NO: 466. In some cases, the targeted region of the pre-mRNA is at most about 1500 nucleotides, about 1000 nucleotides, about 800 nucleotides, about 700 nucleotides, about 600 nucleotides, about 500 nucleotides, about 400 nucleotides, about 300 nucleotides, about 200 nucleotides, about 100 nucleotides, about 80 nucleotides, about 70 nucleotides, about 60 nucleotides, about 50 nucleotides upstream of SEQ ID NO: 264. In some cases, the targeted region of the pre-mRNA is at least about 1500 nucleotides, about 1000 nucleotides, about 800 nucleotides, about 700 nucleotides, about 600 nucleotides, about 500 nucleotides, about 400 nucleotides, about 300 nucleotides, about 200 nucleotides, about 100 nucleotides, about 80 nucleotides, about 70 nucleotides, about 60 nucleotides, about 50 nucleotides upstream of SEQ ID NO: 264. In some cases, the targeted region of the pre-mRNA is at most about 1500 nucleotides, about 1000 nucleotides, about 800 nucleotides, about 700 nucleotides, about 600 nucleotides, about 500 nucleotides, about 400 nucleotides, about 300 nucleotides, about 200 nucleotides, about 100 nucleotides, about 80 nucleotides, about 70 nucleotides, about 60 nucleotides, about 50 nucleotides upstream of genomic site GRCh38/hg38: chr15 34345857. In some cases, the targeted region of the pre-mRNA is at least about 1500 nucleotides, about 1000 nucleotides, about 800 nucleotides, about 700 nucleotides, about 600 nucleotides, about 500 nucleotides, about 400 nucleotides, about 300 nucleotides, about 200 nucleotides, about 100 nucleotides, about 80 nucleotides, about 70 nucleotides, about 60 nucleotides, about 50 nucleotides upstream of genomic site GRCh38/hg38: chr15 34345857. In some cases, the targeted region of the pre-mRNA is at most about 1500 nucleotides, about 1000 nucleotides, about 800 nucleotides, about 700 nucleotides, about 600 nucleotides, about 500 nucleotides, about 400 nucleotides, about 300 nucleotides, about 200 nucleotides, about 100 nucleotides, about 80 nucleotides, about 70 nucleotides, about 60 nucleotides, about 50 nucleotides downstream of SEQ ID NO: 264. In some cases, the targeted region of the pre-mRNA is at least about 1500 nucleotides, about 1000 nucleotides, about 800 nucleotides, about 700 nucleotides, about 600 nucleotides, about 500 nucleotides, about 400 nucleotides, about 300 nucleotides, about 200 nucleotides, about 100 nucleotides, about 80 nucleotides, about 70 nucleotides, about 60 nucleotides, about 50 nucleotides downstream of SEQ ID NO: 264. In some cases, the targeted region of the pre-mRNA is at most about 1500 nucleotides, about 1000 nucleotides, about 800 nucleotides, about 700 nucleotides, about 600 nucleotides, about 500 nucleotides, about 400 nucleotides, about 300 nucleotides, about 200 nucleotides, about 100 nucleotides, about 80 nucleotides, about 70 nucleotides, about 60 nucleotides, about 50 nucleotides downstream of genomic site GRCh38/hg38: chr15 34346035. In some cases. the targeted region of the pre-mRNA is at least about 1500 nucleotides, about 1000 nucleotides, about 800 nucleotides, about 700 nucleotides, about 600 nucleotides, about 500 nucleotides, about 400 nucleotides, about 300 nucleotides, about 200 nucleotides, about 100 nucleotides, about 80 nucleotides, about 70 nucleotides, about 60 nucleotides, about 50 nucleotides downstream of genomic site GRCh38/hg38: chr15 34346035. In some cases, the targeted region of the pre-mRNA is within a sequence SEQ ID NO: 264. In some cases, the targeted region of the pre-mRNA is within a sequence between a pair of genomic sites GRCh38/hg38: chr15 34345857, and GRCh38/hg38: chr15 34346035. In some cases, the therapeutic agent is an antisense oligomer complementary to a sequence with at least about 80%, 85%, 90%, 95%, 96%, 97%, 98%, 99% or 100% sequence identity to SEQ ID NO:264. In some cases, the therapeutic agent is an antisense oligomer complementary to a sequence with 100% sequence identity to SEQ ID NO:264. In some cases, the therapeutic agent is an antisense oligomer that has a sequence with at least about 80%, 85%, 90%, 95%, 96%, 97%, 98%, 99% or 100% sequence identity to a sequence selected from the group consisting of SEQ ID NOs: 5046-5120. In some cases, the therapeutic agent is an antisense oligomer that has a sequence selected from the group consisting of SEQ ID NOs: 5046-5120. In some cases, the target peptide sequence is a portion of NUTM1 protein, and the method treats a disease or the condition that comprises NUT midline carcinoma.

[0235] OTOF

[0236] In some cases, the target peptide sequence is a portion of OTOF protein. In some cases, the therapeutic agent increases level of a first processed mRNA encoding a protein having a sequence SEQ ID NO: 8231, and decreases level of a second processed mRNA encoding a protein having a sequence SEQ ID NO: 467. In some cases, the targeted region of the pre-mRNA is at most about 1500 nucleotides, about 1000 nucleotides, about 800 nucleotides, about 700 nucleotides, about 600 nucleotides, about 500 nucleotides, about 400 nucleotides, about 300 nucleotides, about 200 nucleotides, about 100 nucleotides, about 80 nucleotides, about 70 nucleotides, about 60 nucleotides, about 50 nucleotides upstream of SEQ ID NO: 265. In some cases, the targeted region of the pre-mRNA is at least about 1500 nucleotides, about 1000 nucleotides, about 800 nucleotides, about 700 nucleotides, about 600 nucleotides, about 500 nucleotides, about 400 nucleotides, about 300 nucleotides, about 200 nucleotides, about 100 nucleotides, about 80 nucleotides, about 70 nucleotides, about 60 nucleotides, about 50 nucleotides upstream of SEQ ID NO: 265. In some cases, the targeted region of the pre-mRNA is at most about 1500 nucleotides, about 1000 nucleotides, about 800 nucleotides, about 700 nucleotides, about 600 nucleotides, about 500 nucleotides, about 400 nucleotides, about 300 nucleotides, about 200 nucleotides, about 100 nucleotides, about 80 nucleotides, about 70 nucleotides, about 60 nucleotides, about 50 nucleotides upstream of genomic site GRCh38/hg38: chr2 26477749. In some cases, the targeted region of the pre-mRNA is at least about 1500 nucleotides, about 1000 nucleotides, about 800 nucleotides, about 700 nucleotides, about 600 nucleotides, about 500 nucleotides, about 400 nucleotides, about 300 nucleotides, about 200 nucleotides, about 100 nucleotides, about 80 nucleotides, about 70 nucleotides, about 60 nucleotides, about 50 nucleotides upstream of genomic site GRCh38/hg38: chr2 26477749. In some cases, the targeted region of the pre-mRNA is at most about 1500 nucleotides, about 1000 nucleotides, about 800 nucleotides, about 700 nucleotides, about 600 nucleotides, about 500 nucleotides, about 400 nucleotides, about 300 nucleotides, about 200 nucleotides, about 100 nucleotides, about 80 nucleotides, about 70 nucleotides, about 60 nucleotides, about 50 nucleotides downstream of SEQ ID NO: 265. In some cases, the targeted region of the pre-mRNA is at least about 1500 nucleotides, about 1000 nucleotides, about 800 nucleotides, about 700 nucleotides, about 600 nucleotides, about 500 nucleotides, about 400 nucleotides, about 300 nucleotides, about 200 nucleotides, about 100 nucleotides, about 80 nucleotides, about 70 nucleotides, about 60 nucleotides, about 50 nucleotides downstream of SEQ ID NO: 265. In some cases, the targeted region of the pre-mRNA is at most about 1500 nucleotides, about 1000 nucleotides, about 800 nucleotides, about 700 nucleotides, about 600 nucleotides, about 500 nucleotides, about 400 nucleotides, about 300 nucleotides, about 200 nucleotides, about 100 nucleotides, about 80 nucleotides, about 70 nucleotides, about 60 nucleotides, about 50 nucleotides downstream of genomic site GRCh38/hg38: chr2 26477649. In some cases. the targeted region of the pre-mRNA is at least about 1500 nucleotides, about 1000 nucleotides, about 800 nucleotides, about 700 nucleotides, about 600 nucleotides, about 500 nucleotides, about 400 nucleotides, about 300 nucleotides, about 200 nucleotides, about 100 nucleotides, about 80 nucleotides, about 70 nucleotides, about 60 nucleotides, about 50 nucleotides downstream of genomic site GRCh38/hg38: chr2 26477649. In some cases, the targeted region of the pre-mRNA is within a sequence SEQ ID NO: 265. In some cases, the targeted region of the pre-mRNA is within a sequence between a pair of genomic sites GRCh38/hg38: chr2 26477749, and GRCh38/hg38: chr2 26477649. In some cases, the therapeutic agent is an antisense oligomer complementary to a sequence with at least about 80%, 85%, 90%, 95%, 96%, 97%, 98%, 99% or 100% sequence identity to SEQ ID NO:265. In some cases, the therapeutic agent is an antisense oligomer complementary to a sequence with 100% sequence identity to SEQ ID NO:265. In some cases, the therapeutic agent increases level of a first processed mRNA encoding a protein having a sequence SEQ ID NO: 8232, and decreases level of a second processed mRNA encoding a protein having a sequence SEQ ID NO: 468. In some cases, the targeted region of the pre-mRNA is at most about 1500 nucleotides, about 1000 nucleotides, about 800 nucleotides, about 700 nucleotides, about 600 nucleotides, about 500 nucleotides, about 400 nucleotides, about 300 nucleotides, about 200 nucleotides, about 100 nucleotides, about 80 nucleotides, about 70 nucleotides, about 60 nucleotides, about 50 nucleotides upstream of SEQ ID NO: 266. In some cases, the targeted region of the pre-mRNA is at least about 1500 nucleotides, about 1000 nucleotides, about 800 nucleotides, about 700 nucleotides, about 600 nucleotides, about 500 nucleotides, about 400 nucleotides, about 300 nucleotides, about 200 nucleotides, about 100 nucleotides, about 80 nucleotides, about 70 nucleotides, about 60 nucleotides, about 50 nucleotides upstream of SEQ ID NO: 266. In some cases, the targeted region of the pre-mRNA is at most about 1500 nucleotides, about 1000 nucleotides, about 800 nucleotides, about 700 nucleotides, about 600 nucleotides, about 500 nucleotides, about 400 nucleotides, about 300 nucleotides, about 200 nucleotides, about 100 nucleotides, about 80 nucleotides, about 70 nucleotides, about 60 nucleotides, about 50 nucleotides upstream of genomic site GRCh38/hg38: chr2 26477749. In some cases, the targeted region of the pre-mRNA is at least about 1500 nucleotides, about 1000 nucleotides, about 800 nucleotides, about 700 nucleotides, about 600 nucleotides, about 500 nucleotides, about 400 nucleotides, about 300 nucleotides, about 200 nucleotides, about 100 nucleotides, about 80 nucleotides, about 70 nucleotides, about 60 nucleotides, about 50 nucleotides upstream of genomic site GRCh38/hg38: chr2 26477749. In some cases, the targeted region of the pre-mRNA is at most about 1500 nucleotides, about 1000 nucleotides, about 800 nucleotides, about 700 nucleotides, about 600 nucleotides, about 500 nucleotides, about 400 nucleotides, about 300 nucleotides, about 200 nucleotides, about 100 nucleotides, about 80 nucleotides, about 70 nucleotides, about 60 nucleotides, about 50 nucleotides downstream of SEQ ID NO: 266. In some cases, the targeted region of the pre-mRNA is at least about 1500 nucleotides, about 1000 nucleotides, about 800 nucleotides, about 700 nucleotides, about 600 nucleotides, about 500 nucleotides, about 400 nucleotides, about 300 nucleotides, about 200 nucleotides, about 100 nucleotides, about 80 nucleotides, about 70 nucleotides, about 60 nucleotides, about 50 nucleotides downstream of SEQ ID NO: 266. In some cases, the targeted region of the pre-mRNA is at most about 1500 nucleotides, about 1000 nucleotides, about 800 nucleotides, about 700 nucleotides, about 600 nucleotides, about 500 nucleotides, about 400 nucleotides, about 300 nucleotides, about 200 nucleotides, about 100 nucleotides, about 80 nucleotides, about 70 nucleotides, about 60 nucleotides, about 50 nucleotides downstream of genomic site GRCh38/hg38: chr2 26477649. In some cases. the targeted region of the pre-mRNA is at least about 1500 nucleotides, about 1000 nucleotides, about 800 nucleotides, about 700 nucleotides, about 600 nucleotides, about 500 nucleotides, about 400 nucleotides, about 300 nucleotides, about 200 nucleotides, about 100 nucleotides, about 80 nucleotides, about 70 nucleotides, about 60 nucleotides, about 50 nucleotides downstream of genomic site GRCh38/hg38: chr2 26477649. In some cases, the targeted region of the pre-mRNA is within a sequence SEQ ID NO: 266. In some cases, the targeted region of the pre-mRNA is within a sequence between a pair of genomic sites GRCh38/hg38: chr2 26477749, and GRCh38/hg38: chr2 26477649. In some cases, the therapeutic agent is an antisense oligomer complementary to a sequence with at least about 80%, 85%, 90%, 95%, 96%, 97%, 98%, 99% or 100% sequence identity to SEQ ID NO:266. In some cases, the therapeutic agent is an antisense oligomer complementary to a sequence with 100% sequence identity to SEQ ID NO:266. In some cases, the therapeutic agent is an antisense oligomer that has a sequence with at least about 80%, 85%, 90%, 95%, 96%, 97%, 98%, 99% or 100% sequence identity to a sequence selected from the group consisting of SEQ ID NOs: 5121-5179. In some cases, the therapeutic agent is an antisense oligomer that has a sequence selected from the group consisting of SEQ ID NOs: 5121-5179. In some cases, the target peptide sequence is a portion of OTOF protein, and the method treats a disease or the condition that comprises Malignant neoplasm of breast; Deafness, Autosomal Recessive; Deafness, Autosomal Recessive 9; Auditory Neuropathy, Nonsyndromic Recessive; or Auditory neuropathy, autosomal recessive, 1.

[0237] PDCD4

[0238] In some cases, the target peptide sequence is a portion of PDCD4 protein. In some cases, the therapeutic agent increases level of a first processed mRNA encoding a protein having a sequence SEQ ID NO: 8233, and decreases level of a second processed mRNA encoding a protein having a sequence SEQ ID NO: 469. In some cases, the targeted region of the pre-mRNA is at most about 1500 nucleotides, about 1000 nucleotides, about 800 nucleotides, about 700 nucleotides, about 600 nucleotides, about 500 nucleotides, about 400 nucleotides, about 300 nucleotides, about 200 nucleotides, about 100 nucleotides, about 80 nucleotides, about 70 nucleotides, about 60 nucleotides, about 50 nucleotides upstream of SEQ ID NO: 267. In some cases, the targeted region of the pre-mRNA is at least about 1500 nucleotides, about 1000 nucleotides, about 800 nucleotides, about 700 nucleotides, about 600 nucleotides, about 500 nucleotides, about 400 nucleotides, about 300 nucleotides, about 200 nucleotides, about 100 nucleotides, about 80 nucleotides, about 70 nucleotides, about 60 nucleotides, about 50 nucleotides upstream of SEQ ID NO: 267. In some cases, the targeted region of the pre-mRNA is at most about 1500 nucleotides, about 1000 nucleotides, about 800 nucleotides, about 700 nucleotides, about 600 nucleotides, about 500 nucleotides, about 400 nucleotides, about 300 nucleotides, about 200 nucleotides, about 100 nucleotides, about 80 nucleotides, about 70 nucleotides, about 60 nucleotides, about 50 nucleotides upstream of genomic site GRCh38/hg38: chr10 110876670. In some cases, the targeted region of the pre-mRNA is at least about 1500 nucleotides, about 1000 nucleotides, about 800 nucleotides, about 700 nucleotides, about 600 nucleotides, about 500 nucleotides, about 400 nucleotides, about 300 nucleotides, about 200 nucleotides, about 100 nucleotides, about 80 nucleotides, about 70 nucleotides, about 60 nucleotides, about 50 nucleotides upstream of genomic site GRCh38/hg38: chr10 110876670. In some cases, the targeted region of the pre-mRNA is at most about 1500 nucleotides, about 1000 nucleotides, about 800 nucleotides, about 700 nucleotides, about 600 nucleotides, about 500 nucleotides, about 400 nucleotides, about 300 nucleotides, about 200 nucleotides, about 100 nucleotides, about 80 nucleotides, about 70 nucleotides, about 60 nucleotides, about 50 nucleotides downstream of SEQ ID NO: 267. In some cases, the targeted region of the pre-mRNA is at least about 1500 nucleotides, about 1000 nucleotides, about 800 nucleotides, about 700 nucleotides, about 600 nucleotides, about 500 nucleotides, about 400 nucleotides, about 300 nucleotides, about 200 nucleotides, about 100 nucleotides, about 80 nucleotides, about 70 nucleotides, about 60 nucleotides, about 50 nucleotides downstream of SEQ ID NO: 267. In some cases, the targeted region of the pre-mRNA is at most about 1500 nucleotides, about 1000 nucleotides, about 800 nucleotides, about 700 nucleotides, about 600 nucleotides, about 500 nucleotides, about 400 nucleotides, about 300 nucleotides, about 200 nucleotides, about 100 nucleotides, about 80 nucleotides, about 70 nucleotides, about 60 nucleotides, about 50 nucleotides downstream of genomic site GRCh38/hg38: chr10 110876753. In some cases. the targeted region of the pre-mRNA is at least about 1500 nucleotides, about 1000 nucleotides, about 800 nucleotides, about 700 nucleotides, about 600 nucleotides, about 500 nucleotides, about 400 nucleotides, about 300 nucleotides, about 200 nucleotides, about 100 nucleotides, about 80 nucleotides, about 70 nucleotides, about 60 nucleotides, about 50 nucleotides downstream of genomic site GRCh38/hg38: chr10 110876753. In some cases, the targeted region of the pre-mRNA is within a sequence SEQ ID NO: 267. In some cases, the targeted region of the pre-mRNA is within a sequence between a pair of genomic sites GRCh38/hg38: chr10 110876670, and GRCh38/hg38: chr10 110876753. In some cases, the therapeutic agent is an antisense oligomer complementary to a sequence with at least about 80%, 85%, 90%, 95%, 96%, 97%, 98%, 99% or 100% sequence identity to SEQ ID NO:267. In some cases, the therapeutic agent is an antisense oligomer complementary to a sequence with 100% sequence identity to SEQ ID NO:267. In some cases, the therapeutic agent is an antisense oligomer that has a sequence with at least about 80%, 85%, 90%, 95%, 96%, 97%, 98%, 99% or 100% sequence identity to a sequence selected from the group consisting of SEQ ID NOs: 5180-5235. In some cases, the therapeutic agent is an antisense oligomer that has a sequence selected from the group consisting of SEQ ID NOs: 5180-5235. In some cases, the target peptide sequence is a portion of PDCD4 protein, and the method treats a disease or the condition that comprises Malignant neoplasm of breast. In some cases, the method treats a cancer that is associated with PDCD4 protein.

[0239] PDPK1

[0240] In some cases, the target peptide sequence is a portion of PDPK1 protein. In some cases, the therapeutic agent increases level of a first processed mRNA encoding a protein having a sequence SEQ ID NO: 8234, and decreases level of a second processed mRNA encoding a protein having a sequence SEQ ID NO: 470. In some cases, the targeted region of the pre-mRNA is at most about 1500 nucleotides, about 1000 nucleotides, about 800 nucleotides, about 700 nucleotides, about 600 nucleotides, about 500 nucleotides, about 400 nucleotides, about 300 nucleotides, about 200 nucleotides, about 100 nucleotides, about 80 nucleotides, about 70 nucleotides, about 60 nucleotides, about 50 nucleotides upstream of SEQ ID NO: 268. In some cases, the targeted region of the pre-mRNA is at least about 1500 nucleotides, about 1000 nucleotides, about 800 nucleotides, about 700 nucleotides, about 600 nucleotides, about 500 nucleotides, about 400 nucleotides, about 300 nucleotides, about 200 nucleotides, about 100 nucleotides, about 80 nucleotides, about 70 nucleotides, about 60 nucleotides, about 50 nucleotides upstream of SEQ ID NO: 268. In some cases, the targeted region of the pre-mRNA is at most about 1500 nucleotides, about 1000 nucleotides, about 800 nucleotides, about 700 nucleotides, about 600 nucleotides, about 500 nucleotides, about 400 nucleotides, about 300 nucleotides, about 200 nucleotides, about 100 nucleotides, about 80 nucleotides, about 70 nucleotides, about 60 nucleotides, about 50 nucleotides upstream of genomic site GRCh38/hg38: chr16 2566356. In some cases, the targeted region of the pre-mRNA is at least about 1500 nucleotides, about 1000 nucleotides, about 800 nucleotides, about 700 nucleotides, about 600 nucleotides, about 500 nucleotides, about 400 nucleotides, about 300 nucleotides, about 200 nucleotides, about 100 nucleotides, about 80 nucleotides, about 70 nucleotides, about 60 nucleotides, about 50 nucleotides upstream of genomic site GRCh38/hg38: chr16 2566356. In some cases, the targeted region of the pre-mRNA is at most about 1500 nucleotides, about 1000 nucleotides, about 800 nucleotides, about 700 nucleotides, about 600 nucleotides, about 500 nucleotides, about 400 nucleotides, about 300 nucleotides, about 200 nucleotides, about 100 nucleotides, about 80 nucleotides, about 70 nucleotides, about 60 nucleotides, about 50 nucleotides downstream of SEQ ID NO: 268. In some cases, the targeted region of the pre-mRNA is at least about 1500 nucleotides, about 1000 nucleotides, about 800 nucleotides, about 700 nucleotides, about 600 nucleotides, about 500 nucleotides, about 400 nucleotides, about 300 nucleotides, about 200 nucleotides, about 100 nucleotides, about 80 nucleotides, about 70 nucleotides, about 60 nucleotides, about 50 nucleotides downstream of SEQ ID NO: 268. In some cases, the targeted region of the pre-mRNA is at most about 1500 nucleotides, about 1000 nucleotides, about 800 nucleotides, about 700 nucleotides, about 600 nucleotides, about 500 nucleotides, about 400 nucleotides, about 300 nucleotides, about 200 nucleotides, about 100 nucleotides, about 80 nucleotides, about 70 nucleotides, about 60 nucleotides, about 50 nucleotides downstream of genomic site GRCh38/hg38: chr16 2566453. In some cases. the targeted region of the pre-mRNA is at least about 1500 nucleotides, about 1000 nucleotides, about 800 nucleotides, about 700 nucleotides, about 600 nucleotides, about 500 nucleotides, about 400 nucleotides, about 300 nucleotides, about 200 nucleotides, about 100 nucleotides, about 80 nucleotides, about 70 nucleotides, about 60 nucleotides, about 50 nucleotides downstream of genomic site GRCh38/hg38: chr16 2566453. In some cases, the targeted region of the pre-mRNA is within a sequence SEQ ID NO: 268. In some cases, the targeted region of the pre-mRNA is within a sequence between a pair of genomic sites GRCh38/hg38: chr16 2566356, and GRCh38/hg38: chr16 2566453. In some cases, the therapeutic agent is an antisense oligomer complementary to a sequence with at least about 80%, 85%, 90%, 95%, 96%, 97%, 98%, 99% or 100% sequence identity to SEQ ID NO:268. In some cases, the therapeutic agent is an antisense oligomer complementary to a sequence with 100% sequence identity to SEQ ID NO:268. In some cases, the therapeutic agent is an antisense oligomer that has a sequence with at least about 80%, 85%, 90%, 95%, 96%, 97%, 98%, 99% or 100% sequence identity to a sequence selected from the group consisting of SEQ ID NOs: 5236-5294. In some cases, the therapeutic agent is an antisense oligomer that has a sequence selected from the group consisting of SEQ ID NOs: 5236-5294. In some cases, the target peptide sequence is a portion of PDPK1 protein, and the method treats a disease or the condition that comprises Malignant neoplasm of breast; Breast Carcinoma; Neoplasm of uncertain or unknown behavior of breast; or Breast adenocarcinoma.

[0241] PHKB

[0242] In some cases, the target peptide sequence is a portion of PHKB protein. In some cases, the therapeutic agent increases level of a first processed mRNA encoding a protein having a sequence SEQ ID NO: 8235, and decreases level of a second processed mRNA encoding a protein having a sequence SEQ ID NO: 471. In some cases, the targeted region of the pre-mRNA is at most about 1500 nucleotides, about 1000 nucleotides, about 800 nucleotides, about 700 nucleotides, about 600 nucleotides, about 500 nucleotides, about 400 nucleotides, about 300 nucleotides, about 200 nucleotides, about 100 nucleotides, about 80 nucleotides, about 70 nucleotides, about 60 nucleotides, about 50 nucleotides upstream of SEQ ID NO: 269. In some cases, the targeted region of the pre-mRNA is at least about 1500 nucleotides, about 1000 nucleotides, about 800 nucleotides, about 700 nucleotides, about 600 nucleotides, about 500 nucleotides, about 400 nucleotides, about 300 nucleotides, about 200 nucleotides, about 100 nucleotides, about 80 nucleotides, about 70 nucleotides, about 60 nucleotides, about 50 nucleotides upstream of SEQ ID NO: 269. In some cases, the targeted region of the pre-mRNA is at most about 1500 nucleotides, about 1000 nucleotides, about 800 nucleotides, about 700 nucleotides, about 600 nucleotides, about 500 nucleotides, about 400 nucleotides, about 300 nucleotides, about 200 nucleotides, about 100 nucleotides, about 80 nucleotides, about 70 nucleotides, about 60 nucleotides, about 50 nucleotides upstream of genomic site GRCh38/hg38: chr16 47463899. In some cases, the targeted region of the pre-mRNA is at least about 1500 nucleotides, about 1000 nucleotides, about 800 nucleotides, about 700 nucleotides, about 600 nucleotides, about 500 nucleotides, about 400 nucleotides, about 300 nucleotides, about 200 nucleotides, about 100 nucleotides, about 80 nucleotides, about 70 nucleotides, about 60 nucleotides, about 50 nucleotides upstream of genomic site GRCh38/hg38: chr16 47463899. In some cases, the targeted region of the pre-mRNA is at most about 1500 nucleotides, about 1000 nucleotides, about 800 nucleotides, about 700 nucleotides, about 600 nucleotides, about 500 nucleotides, about 400 nucleotides, about 300 nucleotides, about 200 nucleotides, about 100 nucleotides, about 80 nucleotides, about 70 nucleotides, about 60 nucleotides, about 50 nucleotides downstream of SEQ ID NO: 269. In some cases, the targeted region of the pre-mRNA is at least about 1500 nucleotides, about 1000 nucleotides, about 800 nucleotides, about 700 nucleotides, about 600 nucleotides, about 500 nucleotides, about 400 nucleotides, about 300 nucleotides, about 200 nucleotides, about 100 nucleotides, about 80 nucleotides, about 70 nucleotides, about 60 nucleotides, about 50 nucleotides downstream of SEQ ID NO: 269. In some cases, the targeted region of the pre-mRNA is at most about 1500 nucleotides, about 1000 nucleotides, about 800 nucleotides, about 700 nucleotides, about 600 nucleotides, about 500 nucleotides, about 400 nucleotides, about 300 nucleotides, about 200 nucleotides, about 100 nucleotides, about 80 nucleotides, about 70 nucleotides, about 60 nucleotides, about 50 nucleotides downstream of genomic site GRCh38/hg38: chr16 47463993. In some cases. the targeted region of the pre-mRNA is at least about 1500 nucleotides, about 1000 nucleotides, about 800 nucleotides, about 700 nucleotides, about 600 nucleotides, about 500 nucleotides, about 400 nucleotides, about 300 nucleotides, about 200 nucleotides, about 100 nucleotides, about 80 nucleotides, about 70 nucleotides, about 60 nucleotides, about 50 nucleotides downstream of genomic site GRCh38/hg38: chr16 47463993. In some cases, the targeted region of the pre-mRNA is within a sequence SEQ ID NO: 269. In some cases, the targeted region of the pre-mRNA is within a sequence between a pair of genomic sites GRCh38/hg38: chr16 47463899, and GRCh38/hg38: chr16 47463993. In some cases, the therapeutic agent is an antisense oligomer complementary to a sequence with at least about 80%, 85%, 90%, 95%, 96%, 97%, 98%, 99% or 100% sequence identity to SEQ ID NO:269. In some cases, the therapeutic agent is an antisense oligomer complementary to a sequence with 100% sequence identity to SEQ ID NO:269. In some cases, the therapeutic agent increases level of a first processed mRNA encoding a protein having a sequence SEQ ID NO: 8236, and decreases level of a second processed mRNA encoding a protein having a sequence SEQ ID NO: 472. In some cases, the targeted region of the pre-mRNA is at most about 1500 nucleotides, about 1000 nucleotides, about 800 nucleotides, about 700 nucleotides, about 600 nucleotides, about 500 nucleotides, about 400 nucleotides, about 300 nucleotides, about 200 nucleotides, about 100 nucleotides, about 80 nucleotides, about 70 nucleotides, about 60 nucleotides, about 50 nucleotides upstream of SEQ ID NO: 270. In some cases, the targeted region of the pre-mRNA is at least about 1500 nucleotides, about 1000 nucleotides, about 800 nucleotides, about 700 nucleotides, about 600 nucleotides, about 500 nucleotides, about 400 nucleotides, about 300 nucleotides, about 200 nucleotides, about 100 nucleotides, about 80 nucleotides, about 70 nucleotides, about 60 nucleotides, about 50 nucleotides upstream of SEQ ID NO: 270. In some cases, the targeted region of the pre-mRNA is at most about 1500 nucleotides, about 1000 nucleotides, about 800 nucleotides, about 700 nucleotides, about 600 nucleotides, about 500 nucleotides, about 400 nucleotides, about 300 nucleotides, about 200 nucleotides, about 100 nucleotides, about 80 nucleotides, about 70 nucleotides, about 60 nucleotides, about 50 nucleotides upstream of genomic site GRCh38/hg38: chr16 47463882. In some cases, the targeted region of the pre-mRNA is at least about 1500 nucleotides, about 1000 nucleotides, about 800 nucleotides, about 700 nucleotides, about 600 nucleotides, about 500 nucleotides, about 400 nucleotides, about 300 nucleotides, about 200 nucleotides, about 100 nucleotides, about 80 nucleotides, about 70 nucleotides, about 60 nucleotides, about 50 nucleotides upstream of genomic site GRCh38/hg38: chr16 47463882. In some cases, the targeted region of the pre-mRNA is at most about 1500 nucleotides, about 1000 nucleotides, about 800 nucleotides, about 700 nucleotides, about 600 nucleotides, about 500 nucleotides, about 400 nucleotides, about 300 nucleotides, about 200 nucleotides, about 100 nucleotides, about 80 nucleotides, about 70 nucleotides, about 60 nucleotides, about 50 nucleotides downstream of SEQ ID NO: 270. In some cases, the targeted region of the pre-mRNA is at least about 1500 nucleotides, about 1000 nucleotides, about 800 nucleotides, about 700 nucleotides, about 600 nucleotides, about 500 nucleotides, about 400 nucleotides, about 300 nucleotides, about 200 nucleotides, about 100 nucleotides, about 80 nucleotides, about 70 nucleotides, about 60 nucleotides, about 50 nucleotides downstream of SEQ ID NO: 270. In some cases, the targeted region of the pre-mRNA is at most about 1500 nucleotides, about 1000 nucleotides, about 800 nucleotides, about 700 nucleotides, about 600 nucleotides, about 500 nucleotides, about 400 nucleotides, about 300 nucleotides, about 200 nucleotides, about 100 nucleotides, about 80 nucleotides, about 70 nucleotides, about 60 nucleotides, about 50 nucleotides downstream of genomic site GRCh38/hg38: chr16 47463993. In some cases. the targeted region of the pre-mRNA is at least about 1500 nucleotides, about 1000 nucleotides, about 800 nucleotides, about 700 nucleotides, about 600 nucleotides, about 500 nucleotides, about 400 nucleotides, about 300 nucleotides, about 200 nucleotides, about 100 nucleotides, about 80 nucleotides, about 70 nucleotides, about 60 nucleotides, about 50 nucleotides downstream of genomic site GRCh38/hg38: chr16 47463993. In some cases, the targeted region of the pre-mRNA is within a sequence SEQ ID NO: 270. In some cases, the targeted region of the pre-mRNA is within a sequence between a pair of genomic sites GRCh38/hg38: chr16 47463882, and GRCh38/hg38: chr16 47463993. In some cases, the therapeutic agent is an antisense oligomer complementary to a sequence with at least about 80%, 85%, 90%, 95%, 96%, 97%, 98%, 99% or 100% sequence identity to SEQ ID NO:270. In some cases, the therapeutic agent is an antisense oligomer complementary to a sequence with 100% sequence identity to SEQ ID NO:270. In some cases, the therapeutic agent is an antisense oligomer that has a sequence with at least about 80%, 85%, 90%, 95%, 96%, 97%, 98%, 99% or 100% sequence identity to a sequence selected from the group consisting of SEQ ID NOs: 5295-5352. In some cases, the therapeutic agent is an antisense oligomer that has a sequence selected from the group consisting of SEQ ID NOs: 5295-5352. In some cases, the target peptide sequence is a portion of PHKB protein, and the method treats a disease or the condition that comprises Malignant neoplasm of breast; Ketotic hypoglycemia; Rhabdomyolysis; Glycogen Storage Disease IXB; or Phosphorylase kinase deficiency of liver and muscle, autosomal recessive.

[0243] PIGA

[0244] In some cases, the target peptide sequence is a portion of PIGA protein. In some cases, the therapeutic agent increases level of a first processed mRNA encoding a protein having a sequence SEQ ID NO: 8237, and decreases level of a second processed mRNA encoding a protein having a sequence SEQ ID NO: 473. In some cases, the targeted region of the pre-mRNA is at most about 1500 nucleotides, about 1000 nucleotides, about 800 nucleotides, about 700 nucleotides, about 600 nucleotides, about 500 nucleotides, about 400 nucleotides, about 300 nucleotides, about 200 nucleotides, about 100 nucleotides, about 80 nucleotides, about 70 nucleotides, about 60 nucleotides, about 50 nucleotides upstream of SEQ ID NO: 271. In some cases, the targeted region of the pre-mRNA is at least about 1500 nucleotides, about 1000 nucleotides, about 800 nucleotides, about 700 nucleotides, about 600 nucleotides, about 500 nucleotides, about 400 nucleotides, about 300 nucleotides, about 200 nucleotides, about 100 nucleotides, about 80 nucleotides, about 70 nucleotides, about 60 nucleotides, about 50 nucleotides upstream of SEQ ID NO: 271. In some cases, the targeted region of the pre-mRNA is at most about 1500 nucleotides, about 1000 nucleotides, about 800 nucleotides, about 700 nucleotides, about 600 nucleotides, about 500 nucleotides, about 400 nucleotides, about 300 nucleotides, about 200 nucleotides, about 100 nucleotides, about 80 nucleotides, about 70 nucleotides, about 60 nucleotides, about 50 nucleotides upstream of genomic site GRCh38/hg38: chrX 15331992. In some cases, the targeted region of the pre-mRNA is at least about 1500 nucleotides, about 1000 nucleotides, about 800 nucleotides, about 700 nucleotides, about 600 nucleotides, about 500 nucleotides, about 400 nucleotides, about 300 nucleotides, about 200 nucleotides, about 100 nucleotides, about 80 nucleotides, about 70 nucleotides, about 60 nucleotides, about 50 nucleotides upstream of genomic site GRCh38/hg38: chrX 15331992. In some cases, the targeted region of the pre-mRNA is at most about 1500 nucleotides, about 1000 nucleotides, about 800 nucleotides, about 700 nucleotides, about 600 nucleotides, about 500 nucleotides, about 400 nucleotides, about 300 nucleotides, about 200 nucleotides, about 100 nucleotides, about 80 nucleotides, about 70 nucleotides, about 60 nucleotides, about 50 nucleotides downstream of SEQ ID NO: 271. In some cases, the targeted region of the pre-mRNA is at least about 1500 nucleotides, about 1000 nucleotides, about 800 nucleotides, about 700 nucleotides, about 600 nucleotides, about 500 nucleotides, about 400 nucleotides, about 300 nucleotides, about 200 nucleotides, about 100 nucleotides, about 80 nucleotides, about 70 nucleotides, about 60 nucleotides, about 50 nucleotides downstream of SEQ ID NO: 271. In some cases, the targeted region of the pre-mRNA is at most about 1500 nucleotides, about 1000 nucleotides, about 800 nucleotides, about 700 nucleotides, about 600 nucleotides, about 500 nucleotides, about 400 nucleotides, about 300 nucleotides, about 200 nucleotides, about 100 nucleotides, about 80 nucleotides, about 70 nucleotides, about 60 nucleotides, about 50 nucleotides downstream of genomic site GRCh38/hg38: chrX 15331216. In some cases. the targeted region of the pre-mRNA is at least about 1500 nucleotides, about 1000 nucleotides, about 800 nucleotides, about 700 nucleotides, about 600 nucleotides, about 500 nucleotides, about 400 nucleotides, about 300 nucleotides, about 200 nucleotides, about 100 nucleotides, about 80 nucleotides, about 70 nucleotides, about 60 nucleotides, about 50 nucleotides downstream of genomic site GRCh38/hg38: chrX 15331216. In some cases, the targeted region of the pre-mRNA is within a sequence SEQ ID NO: 271. In some cases, the targeted region of the pre-mRNA is within a sequence between a pair of genomic sites GRCh38/hg38: chrX 15331992, and GRCh38/hg38: chrX 15331216. In some cases, the therapeutic agent is an antisense oligomer complementary to a sequence with at least about 80%, 85%, 90%, 95%, 96%, 97%, 98%, 99% or 100% sequence identity to SEQ ID NO:271. In some cases, the therapeutic agent is an antisense oligomer complementary to a sequence with 100% sequence identity to SEQ ID NO:271. In some cases, the therapeutic agent increases level of a first processed mRNA encoding a protein having a sequence SEQ ID NO: 8238, and decreases level of a second processed mRNA encoding a protein having a sequence SEQ ID NO: 474. In some cases, the targeted region of the pre-mRNA is at most about 1500 nucleotides, about 1000 nucleotides, about 800 nucleotides, about 700 nucleotides, about 600 nucleotides, about 500 nucleotides, about 400 nucleotides, about 300 nucleotides, about 200 nucleotides, about 100 nucleotides, about 80 nucleotides, about 70 nucleotides, about 60 nucleotides, about 50 nucleotides upstream of SEQ ID NO: 272. In some cases, the targeted region of the pre-mRNA is at least about 1500 nucleotides, about 1000 nucleotides, about 800 nucleotides, about 700 nucleotides, about 600 nucleotides, about 500 nucleotides, about 400 nucleotides, about 300 nucleotides, about 200 nucleotides, about 100 nucleotides, about 80 nucleotides, about 70 nucleotides, about 60 nucleotides, about 50 nucleotides upstream of SEQ ID NO: 272. In some cases, the targeted region of the pre-mRNA is at most about 1500 nucleotides, about 1000 nucleotides, about 800 nucleotides, about 700 nucleotides, about 600 nucleotides, about 500 nucleotides, about 400 nucleotides, about 300 nucleotides, about 200 nucleotides, about 100 nucleotides, about 80 nucleotides, about 70 nucleotides, about 60 nucleotides, about 50 nucleotides upstream of genomic site GRCh38/hg38: chrX 15331992. In some cases, the targeted region of the pre-mRNA is at least about 1500 nucleotides, about 1000 nucleotides, about 800 nucleotides, about 700 nucleotides, about 600 nucleotides, about 500 nucleotides, about 400 nucleotides, about 300 nucleotides, about 200 nucleotides, about 100 nucleotides, about 80 nucleotides, about 70 nucleotides, about 60 nucleotides, about 50 nucleotides upstream of genomic site GRCh38/hg38: chrX 15331992. In some cases, the targeted region of the pre-mRNA is at most about 1500 nucleotides, about 1000 nucleotides, about 800 nucleotides, about 700 nucleotides, about 600 nucleotides, about 500 nucleotides, about 400 nucleotides, about 300 nucleotides, about 200 nucleotides, about 100 nucleotides, about 80 nucleotides, about 70 nucleotides, about 60 nucleotides, about 50 nucleotides downstream of SEQ ID NO: 272. In some cases, the targeted region of the pre-mRNA is at least about 1500 nucleotides, about 1000 nucleotides, about 800 nucleotides, about 700 nucleotides, about 600 nucleotides, about 500 nucleotides, about 400 nucleotides, about 300 nucleotides, about 200 nucleotides, about 100 nucleotides, about 80 nucleotides, about 70 nucleotides, about 60 nucleotides, about 50 nucleotides downstream of SEQ ID NO: 272. In some cases, the targeted region of the pre-mRNA is at most about 1500 nucleotides, about 1000 nucleotides, about 800 nucleotides, about 700 nucleotides, about 600 nucleotides, about 500 nucleotides, about 400 nucleotides, about 300 nucleotides, about 200 nucleotides, about 100 nucleotides, about 80 nucleotides, about 70 nucleotides, about 60 nucleotides, about 50 nucleotides downstream of genomic site GRCh38/hg38: chrX 15331216. In some cases. the targeted region of the pre-mRNA is at least about 1500 nucleotides, about 1000 nucleotides, about 800 nucleotides, about 700 nucleotides, about 600 nucleotides, about 500 nucleotides, about 400 nucleotides, about 300 nucleotides, about 200 nucleotides, about 100 nucleotides, about 80 nucleotides, about 70 nucleotides, about 60 nucleotides, about 50 nucleotides downstream of genomic site GRCh38/hg38: chrX 15331216. In some cases, the targeted region of the pre-mRNA is within a sequence SEQ ID NO: 272. In some cases, the targeted region of the pre-mRNA is within a sequence between a pair of genomic sites GRCh38/hg38: chrX 15331992, and GRCh38/hg38: chrX 15331216. In some cases, the therapeutic agent is an antisense oligomer complementary to a sequence with at least about 80%, 85%, 90%, 95%, 96%, 97%, 98%, 99% or 100% sequence identity to SEQ ID NO:272. In some cases, the therapeutic agent is an antisense oligomer complementary to a sequence with 100% sequence identity to SEQ ID NO:272. In some cases, the therapeutic agent is an antisense oligomer that has a sequence with at least about 80%, 85%, 90%, 95%, 96%, 97%, 98%, 99% or 100% sequence identity to a sequence selected from the group consisting of SEQ ID NOs: 5353-5546. In some cases, the therapeutic agent is an antisense oligomer that has a sequence selected from the group consisting of SEQ ID NOs: 5353-5546. In some cases, the target peptide sequence is a portion of PIGA protein, and the method treats a disease or the condition that comprises Intellectual Disability; Congenital anemia; Congenital Disorders of Glycosylation; Cytopenia; Epileptic encephalopathy; Paroxysmal nocturnal hemoglobinuria; Paroxysmal Nocturnal Hemoglobinuria 1; West Syndrome; or Multiple Congenital Anomalies-Hypotonia-Seizures Syndome 2.

[0245] PLOD2

[0246] In some cases, the target peptide sequence is a portion of PLOD2 protein. In some cases, the therapeutic agent increases level of a first processed mRNA encoding a protein having a sequence SEQ ID NO: 8239, and decreases level of a second processed mRNA encoding a protein having a sequence SEQ ID NO: 475. In some cases, the targeted region of the pre-mRNA is at most about 1500 nucleotides, about 1000 nucleotides, about 800 nucleotides, about 700 nucleotides, about 600 nucleotides, about 500 nucleotides, about 400 nucleotides, about 300 nucleotides, about 200 nucleotides, about 100 nucleotides, about 80 nucleotides, about 70 nucleotides, about 60 nucleotides, about 50 nucleotides upstream of SEQ ID NO: 273. In some cases, the targeted region of the pre-mRNA is at least about 1500 nucleotides, about 1000 nucleotides, about 800 nucleotides, about 700 nucleotides, about 600 nucleotides, about 500 nucleotides, about 400 nucleotides, about 300 nucleotides, about 200 nucleotides, about 100 nucleotides, about 80 nucleotides, about 70 nucleotides, about 60 nucleotides, about 50 nucleotides upstream of SEQ ID NO: 273. In some cases, the targeted region of the pre-mRNA is at most about 1500 nucleotides, about 1000 nucleotides, about 800 nucleotides, about 700 nucleotides, about 600 nucleotides, about 500 nucleotides, about 400 nucleotides, about 300 nucleotides, about 200 nucleotides, about 100 nucleotides, about 80 nucleotides, about 70 nucleotides, about 60 nucleotides, about 50 nucleotides upstream of genomic site GRCh38/hg38: chr3 146124229. In some cases, the targeted region of the pre-mRNA is at least about 1500 nucleotides, about 1000 nucleotides, about 800 nucleotides, about 700 nucleotides, about 600 nucleotides, about 500 nucleotides, about 400 nucleotides, about 300 nucleotides, about 200 nucleotides, about 100 nucleotides, about 80 nucleotides, about 70 nucleotides, about 60 nucleotides, about 50 nucleotides upstream of genomic site GRCh38/hg38: chr3 146124229. In some cases, the targeted region of the pre-mRNA is at most about 1500 nucleotides, about 1000 nucleotides, about 800 nucleotides, about 700 nucleotides, about 600 nucleotides, about 500 nucleotides, about 400 nucleotides, about 300 nucleotides, about 200 nucleotides, about 100 nucleotides, about 80 nucleotides, about 70 nucleotides, about 60 nucleotides, about 50 nucleotides downstream of SEQ ID NO: 273. In some cases, the targeted region of the pre-mRNA is at least about 1500 nucleotides, about 1000 nucleotides, about 800 nucleotides, about 700 nucleotides, about 600 nucleotides, about 500 nucleotides, about 400 nucleotides, about 300 nucleotides, about 200 nucleotides, about 100 nucleotides, about 80 nucleotides, about 70 nucleotides, about 60 nucleotides, about 50 nucleotides downstream of SEQ ID NO: 273. In some cases, the targeted region of the pre-mRNA is at most about 1500 nucleotides, about 1000 nucleotides, about 800 nucleotides, about 700 nucleotides, about 600 nucleotides, about 500 nucleotides, about 400 nucleotides, about 300 nucleotides, about 200 nucleotides, about 100 nucleotides, about 80 nucleotides, about 70 nucleotides, about 60 nucleotides, about 50 nucleotides downstream of genomic site GRCh38/hg38: chr3 146124138. In some cases. the targeted region of the pre-mRNA is at least about 1500 nucleotides, about 1000 nucleotides, about 800 nucleotides, about 700 nucleotides, about 600 nucleotides, about 500 nucleotides, about 400 nucleotides, about 300 nucleotides, about 200 nucleotides, about 100 nucleotides, about 80 nucleotides, about 70 nucleotides, about 60 nucleotides, about 50 nucleotides downstream of genomic site GRCh38/hg38: chr3 146124138. In some cases, the targeted region of the pre-mRNA is within a sequence SEQ ID NO: 273. In some cases, the targeted region of the pre-mRNA is within a sequence between a pair of genomic sites GRCh38/hg38: chr3 146124229, and GRCh38/hg38: chr3 146124138. In some cases, the therapeutic agent is an antisense oligomer complementary to a sequence with at least about 80%, 85%, 90%, 95%, 96%, 97%, 98%, 99% or 100% sequence identity to SEQ ID NO:273. In some cases, the therapeutic agent is an antisense oligomer complementary to a sequence with 100% sequence identity to SEQ ID NO:273. In some cases, the therapeutic agent is an antisense oligomer that has a sequence with at least about 80%, 85%, 90%, 95%, 96%, 97%, 98%, 99% or 100% sequence identity to a sequence selected from the group consisting of SEQ ID NOs: 5547-5603. In some cases, the therapeutic agent is an antisense oligomer that has a sequence selected from the group consisting of SEQ ID NOs: 5547-5603. In some cases, the target peptide sequence is a portion of PLOD2 protein, and the method treats a disease or the condition that comprises Intellectual Disability; Bruck syndrome 2; Osteogenesis Imperfecta; Bruck syndrome 1; Arthrogryposis; or Bruck syndrome.

[0247] POLR2F

[0248] In some cases, the target peptide sequence is a portion of POLR2F protein. In some cases, the therapeutic agent increases level of a first processed mRNA encoding a protein having a sequence SEQ ID NO: 8240, and decreases level of a second processed mRNA encoding a protein having a sequence SEQ ID NO: 476. In some cases, the targeted region of the pre-mRNA is at most about 1500 nucleotides, about 1000 nucleotides, about 800 nucleotides, about 700 nucleotides, about 600 nucleotides, about 500 nucleotides, about 400 nucleotides, about 300 nucleotides, about 200 nucleotides, about 100 nucleotides, about 80 nucleotides, about 70 nucleotides, about 60 nucleotides, about 50 nucleotides upstream of SEQ ID NO: 274. In some cases, the targeted region of the pre-mRNA is at least about 1500 nucleotides, about 1000 nucleotides, about 800 nucleotides, about 700 nucleotides, about 600 nucleotides, about 500 nucleotides, about 400 nucleotides, about 300 nucleotides, about 200 nucleotides, about 100 nucleotides, about 80 nucleotides, about 70 nucleotides, about 60 nucleotides, about 50 nucleotides upstream of SEQ ID NO: 274. In some cases, the targeted region of the pre-mRNA is at most about 1500 nucleotides, about 1000 nucleotides, about 800 nucleotides, about 700 nucleotides, about 600 nucleotides, about 500 nucleotides, about 400 nucleotides, about 300 nucleotides, about 200 nucleotides, about 100 nucleotides, about 80 nucleotides, about 70 nucleotides, about 60 nucleotides, about 50 nucleotides upstream of genomic site GRCh38/hg38: chr22 37958374. In some cases, the targeted region of the pre-mRNA is at least about 1500 nucleotides, about 1000 nucleotides, about 800 nucleotides, about 700 nucleotides, about 600 nucleotides, about 500 nucleotides, about 400 nucleotides, about 300 nucleotides, about 200 nucleotides, about 100 nucleotides, about 80 nucleotides, about 70 nucleotides, about 60 nucleotides, about 50 nucleotides upstream of genomic site GRCh38/hg38: chr22 37958374. In some cases, the targeted region of the pre-mRNA is at most about 1500 nucleotides, about 1000 nucleotides, about 800 nucleotides, about 700 nucleotides, about 600 nucleotides, about 500 nucleotides, about 400 nucleotides, about 300 nucleotides, about 200 nucleotides, about 100 nucleotides, about 80 nucleotides, about 70 nucleotides, about 60 nucleotides, about 50 nucleotides downstream of SEQ ID NO: 274. In some cases, the targeted region of the pre-mRNA is at least about 1500 nucleotides, about 1000 nucleotides, about 800 nucleotides, about 700 nucleotides, about 600 nucleotides, about 500 nucleotides, about 400 nucleotides, about 300 nucleotides, about 200 nucleotides, about 100 nucleotides, about 80 nucleotides, about 70 nucleotides, about 60 nucleotides, about 50 nucleotides downstream of SEQ ID NO: 274. In some cases, the targeted region of the pre-mRNA is at most about 1500 nucleotides, about 1000 nucleotides, about 800 nucleotides, about 700 nucleotides, about 600 nucleotides, about 500 nucleotides, about 400 nucleotides, about 300 nucleotides, about 200 nucleotides, about 100 nucleotides, about 80 nucleotides, about 70 nucleotides, about 60 nucleotides, about 50 nucleotides downstream of genomic site GRCh38/hg38: chr22 37958471. In some cases. the targeted region of the pre-mRNA is at least about 1500 nucleotides, about 1000 nucleotides, about 800 nucleotides, about 700 nucleotides, about 600 nucleotides, about 500 nucleotides, about 400 nucleotides, about 300 nucleotides, about 200 nucleotides, about 100 nucleotides, about 80 nucleotides, about 70 nucleotides, about 60 nucleotides, about 50 nucleotides downstream of genomic site GRCh38/hg38: chr22 37958471. In some cases, the targeted region of the pre-mRNA is within a sequence SEQ ID NO: 274. In some cases, the targeted region of the pre-mRNA is within a sequence between a pair of genomic sites GRCh38/hg38: chr22 37958374, and GRCh38/hg38: chr22 37958471. In some cases, the therapeutic agent is an antisense oligomer complementary to a sequence with at least about 80%, 85%, 90%, 95%, 96%, 97%, 98%, 99% or 100% sequence identity to SEQ ID NO:274. In some cases, the therapeutic agent is an antisense oligomer complementary to a sequence with 100% sequence identity to SEQ ID NO:274. In some cases, the therapeutic agent is an antisense oligomer that has a sequence with at least about 80%, 85%, 90%, 95%, 96%, 97%, 98%, 99% or 100% sequence identity to a sequence selected from the group consisting of SEQ ID NOs: 5604-5662. In some cases, the therapeutic agent is an antisense oligomer that has a sequence selected from the group consisting of SEQ ID NOs: 5604-5662. In some cases, the target peptide sequence is a portion of POLR2F protein, and the method treats a disease or the condition that comprises Malignant neoplasm of breast.

[0249] PPP6C

[0250] In some cases, the target peptide sequence is a portion of PPP6C protein. In some cases, the therapeutic agent increases level of a first processed mRNA encoding a protein having a sequence SEQ ID NO: 8241, and decreases level of a second processed mRNA encoding a protein having a sequence SEQ ID NO: 477. In some cases, the targeted region of the pre-mRNA is at most about 1500 nucleotides, about 1000 nucleotides, about 800 nucleotides, about 700 nucleotides, about 600 nucleotides, about 500 nucleotides, about 400 nucleotides, about 300 nucleotides, about 200 nucleotides, about 100 nucleotides, about 80 nucleotides, about 70 nucleotides, about 60 nucleotides, about 50 nucleotides upstream of SEQ ID NO: 275. In some cases, the targeted region of the pre-mRNA is at least about 1500 nucleotides, about 1000 nucleotides, about 800 nucleotides, about 700 nucleotides, about 600 nucleotides, about 500 nucleotides, about 400 nucleotides, about 300 nucleotides, about 200 nucleotides, about 100 nucleotides, about 80 nucleotides, about 70 nucleotides, about 60 nucleotides, about 50 nucleotides upstream of SEQ ID NO: 275. In some cases, the targeted region of the pre-mRNA is at most about 1500 nucleotides, about 1000 nucleotides, about 800 nucleotides, about 700 nucleotides, about 600 nucleotides, about 500 nucleotides, about 400 nucleotides, about 300 nucleotides, about 200 nucleotides, about 100 nucleotides, about 80 nucleotides, about 70 nucleotides, about 60 nucleotides, about 50 nucleotides upstream of genomic site GRCh38/hg38: chr9 125172001. In some cases, the targeted region of the pre-mRNA is at least about 1500 nucleotides, about 1000 nucleotides, about 800 nucleotides, about 700 nucleotides, about 600 nucleotides, about 500 nucleotides, about 400 nucleotides, about 300 nucleotides, about 200 nucleotides, about 100 nucleotides, about 80 nucleotides, about 70 nucleotides, about 60 nucleotides, about 50 nucleotides upstream of genomic site GRCh38/hg38: chr9 125172001. In some cases, the targeted region of the pre-mRNA is at most about 1500 nucleotides, about 1000 nucleotides, about 800 nucleotides, about 700 nucleotides, about 600 nucleotides, about 500 nucleotides, about 400 nucleotides, about 300 nucleotides, about 200 nucleotides, about 100 nucleotides, about 80 nucleotides, about 70 nucleotides, about 60 nucleotides, about 50 nucleotides downstream of SEQ ID NO: 275. In some cases, the targeted region of the pre-mRNA is at least about 1500 nucleotides, about 1000 nucleotides, about 800 nucleotides, about 700 nucleotides, about 600 nucleotides, about 500 nucleotides, about 400 nucleotides, about 300 nucleotides, about 200 nucleotides, about 100 nucleotides, about 80 nucleotides, about 70 nucleotides, about 60 nucleotides, about 50 nucleotides downstream of SEQ ID NO: 275. In some cases, the targeted region of the pre-mRNA is at most about 1500 nucleotides, about 1000 nucleotides, about 800 nucleotides, about 700 nucleotides, about 600 nucleotides, about 500 nucleotides, about 400 nucleotides, about 300 nucleotides, about 200 nucleotides, about 100 nucleotides, about 80 nucleotides, about 70 nucleotides, about 60 nucleotides, about 50 nucleotides downstream of genomic site GRCh38/hg38: chr9 125171909. In some cases. the targeted region of the pre-mRNA is at least about 1500 nucleotides, about 1000 nucleotides, about 800 nucleotides, about 700 nucleotides, about 600 nucleotides, about 500 nucleotides, about 400 nucleotides, about 300 nucleotides, about 200 nucleotides, about 100 nucleotides, about 80 nucleotides, about 70 nucleotides, about 60 nucleotides, about 50 nucleotides downstream of genomic site GRCh38/hg38: chr9 125171909. In some cases, the targeted region of the pre-mRNA is within a sequence SEQ ID NO: 275. In some cases, the targeted region of the pre-mRNA is within a sequence between a pair of genomic sites GRCh38/hg38: chr9 125172001, and GRCh38/hg38: chr9 125171909. In some cases, the therapeutic agent is an antisense oligomer complementary to a sequence with at least about 80%, 85%, 90%, 95%, 96%, 97%, 98%, 99% or 100% sequence identity to SEQ ID NO:275. In some cases, the therapeutic agent is an antisense oligomer complementary to a sequence with 100% sequence identity to SEQ ID NO:275. In some cases, the therapeutic agent is an antisense oligomer that has a sequence with at least about 80%, 85%, 90%, 95%, 96%, 97%, 98%, 99% or 100% sequence identity to a sequence selected from the group consisting of SEQ ID NOs: 5663-5720. In some cases, the therapeutic agent is an antisense oligomer that has a sequence selected from the group consisting of SEQ ID NOs: 5663-5720. In some cases, the target peptide sequence is a portion of PPP6C protein, and the method treats a disease or the condition that comprises Cutaneous Melanoma; or melanoma.

[0251] PRKN

[0252] In some cases, the target peptide sequence is a portion of PRKN protein. In some cases, the therapeutic agent increases level of a first processed mRNA encoding a protein having a sequence SEQ ID NO: 8242, and decreases level of a second processed mRNA encoding a protein having a sequence SEQ ID NO: 478. In some cases, the targeted region of the pre-mRNA is at most about 1500 nucleotides, about 1000 nucleotides, about 800 nucleotides, about 700 nucleotides, about 600 nucleotides, about 500 nucleotides, about 400 nucleotides, about 300 nucleotides, about 200 nucleotides, about 100 nucleotides, about 80 nucleotides, about 70 nucleotides, about 60 nucleotides, about 50 nucleotides upstream of SEQ ID NO: 276. In some cases, the targeted region of the pre-mRNA is at least about 1500 nucleotides, about 1000 nucleotides, about 800 nucleotides, about 700 nucleotides, about 600 nucleotides, about 500 nucleotides, about 400 nucleotides, about 300 nucleotides, about 200 nucleotides, about 100 nucleotides, about 80 nucleotides, about 70 nucleotides, about 60 nucleotides, about 50 nucleotides upstream of SEQ ID NO: 276. In some cases, the targeted region of the pre-mRNA is at most about 1500 nucleotides, about 1000 nucleotides, about 800 nucleotides, about 700 nucleotides, about 600 nucleotides, about 500 nucleotides, about 400 nucleotides, about 300 nucleotides, about 200 nucleotides, about 100 nucleotides, about 80 nucleotides, about 70 nucleotides, about 60 nucleotides, about 50 nucleotides upstream of genomic site GRCh38/hg38: chr6 162262765. In some cases, the targeted region of the pre-mRNA is at least about 1500 nucleotides, about 1000 nucleotides, about 800 nucleotides, about 700 nucleotides, about 600 nucleotides, about 500 nucleotides, about 400 nucleotides, about 300 nucleotides, about 200 nucleotides, about 100 nucleotides, about 80 nucleotides, about 70 nucleotides, about 60 nucleotides, about 50 nucleotides upstream of genomic site GRCh38/hg38: chr6 162262765. In some cases, the targeted region of the pre-mRNA is at most about 1500 nucleotides, about 1000 nucleotides, about 800 nucleotides, about 700 nucleotides, about 600 nucleotides, about 500 nucleotides, about 400 nucleotides, about 300 nucleotides, about 200 nucleotides, about 100 nucleotides, about 80 nucleotides, about 70 nucleotides, about 60 nucleotides, about 50 nucleotides downstream of SEQ ID NO: 276. In some cases, the targeted region of the pre-mRNA is at least about 1500 nucleotides, about 1000 nucleotides, about 800 nucleotides, about 700 nucleotides, about 600 nucleotides, about 500 nucleotides, about 400 nucleotides, about 300 nucleotides, about 200 nucleotides, about 100 nucleotides, about 80 nucleotides, about 70 nucleotides, about 60 nucleotides, about 50 nucleotides downstream of SEQ ID NO: 276. In some cases, the targeted region of the pre-mRNA is at most about 1500 nucleotides, about 1000 nucleotides, about 800 nucleotides, about 700 nucleotides, about 600 nucleotides, about 500 nucleotides, about 400 nucleotides, about 300 nucleotides, about 200 nucleotides, about 100 nucleotides, about 80 nucleotides, about 70 nucleotides, about 60 nucleotides, about 50 nucleotides downstream of genomic site GRCh38/hg38: chr6 162262525. In some cases. the targeted region of the pre-mRNA is at least about 1500 nucleotides, about 1000 nucleotides, about 800 nucleotides, about 700 nucleotides, about 600 nucleotides, about 500 nucleotides, about 400 nucleotides, about 300 nucleotides, about 200 nucleotides, about 100 nucleotides, about 80 nucleotides, about 70 nucleotides, about 60 nucleotides, about 50 nucleotides downstream of genomic site GRCh38/hg38: chr6 162262525. In some cases, the targeted region of the pre-mRNA is within a sequence SEQ ID NO: 276. In some cases, the targeted region of the pre-mRNA is within a sequence between a pair of genomic sites GRCh38/hg38: chr6 162262765, and GRCh38/hg38: chr6 162262525. In some cases, the therapeutic agent is an antisense oligomer complementary to a sequence with at least about 80%, 85%, 90%, 95%, 96%, 97%, 98%, 99% or 100% sequence identity to SEQ ID NO:276. In some cases, the therapeutic agent is an antisense oligomer complementary to a sequence with 100% sequence identity to SEQ ID NO:276. In some cases, the therapeutic agent is an antisense oligomer that has a sequence with at least about 80%, 85%, 90%, 95%, 96%, 97%, 98%, 99% or 100% sequence identity to a sequence selected from the group consisting of SEQ ID NOs: 5721-5807. In some cases, the therapeutic agent is an antisense oligomer that has a sequence selected from the group consisting of SEQ ID NOs: 5721-5807. In some cases, the target peptide sequence is a portion of PRKN protein, and the method treats a disease or the condition that comprises Parkinson Disease 2, Autosomal Recessive Juvenile; Parkinson Disease; Young onset Parkinson disease; Parkinson Disease, Late-onset; Leprosy, susceptibility to; Adenocarcinoma, ovarian, somatic; or Adenocarcinoma of lung, somatic.

[0253] PRUNE1

[0254] In some cases, the target peptide sequence is a portion of PRUNE1 protein. In some cases, the therapeutic agent increases level of a first processed mRNA encoding a protein having a sequence SEQ ID NO: 8243, and decreases level of a second processed mRNA encoding a protein having a sequence SEQ ID NO: 479. In some cases, the targeted region of the pre-mRNA is at most about 1500 nucleotides, about 1000 nucleotides, about 800 nucleotides, about 700 nucleotides, about 600 nucleotides, about 500 nucleotides, about 400 nucleotides, about 300 nucleotides, about 200 nucleotides, about 100 nucleotides, about 80 nucleotides, about 70 nucleotides, about 60 nucleotides, about 50 nucleotides upstream of SEQ ID NO: 277. In some cases, the targeted region of the pre-mRNA is at least about 1500 nucleotides, about 1000 nucleotides, about 800 nucleotides, about 700 nucleotides, about 600 nucleotides, about 500 nucleotides, about 400 nucleotides, about 300 nucleotides, about 200 nucleotides, about 100 nucleotides, about 80 nucleotides, about 70 nucleotides, about 60 nucleotides, about 50 nucleotides upstream of SEQ ID NO: 277. In some cases, the targeted region of the pre-mRNA is at most about 1500 nucleotides, about 1000 nucleotides, about 800 nucleotides, about 700 nucleotides, about 600 nucleotides, about 500 nucleotides, about 400 nucleotides, about 300 nucleotides, about 200 nucleotides, about 100 nucleotides, about 80 nucleotides, about 70 nucleotides, about 60 nucleotides, about 50 nucleotides upstream of genomic site GRCh38/hg38: chr1 151027233. In some cases, the targeted region of the pre-mRNA is at least about 1500 nucleotides, about 1000 nucleotides, about 800 nucleotides, about 700 nucleotides, about 600 nucleotides, about 500 nucleotides, about 400 nucleotides, about 300 nucleotides, about 200 nucleotides, about 100 nucleotides, about 80 nucleotides, about 70 nucleotides, about 60 nucleotides, about 50 nucleotides upstream of genomic site GRCh38/hg38: chr1 151027233. In some cases, the targeted region of the pre-mRNA is at most about 1500 nucleotides, about 1000 nucleotides, about 800 nucleotides, about 700 nucleotides, about 600 nucleotides, about 500 nucleotides, about 400 nucleotides, about 300 nucleotides, about 200 nucleotides, about 100 nucleotides, about 80 nucleotides, about 70 nucleotides, about 60 nucleotides, about 50 nucleotides downstream of SEQ ID NO: 277. In some cases, the targeted region of the pre-mRNA is at least about 1500 nucleotides, about 1000 nucleotides, about 800 nucleotides, about 700 nucleotides, about 600 nucleotides, about 500 nucleotides, about 400 nucleotides, about 300 nucleotides, about 200 nucleotides, about 100 nucleotides, about 80 nucleotides, about 70 nucleotides, about 60 nucleotides, about 50 nucleotides downstream of SEQ ID NO: 277. In some cases, the targeted region of the pre-mRNA is at most about 1500 nucleotides, about 1000 nucleotides, about 800 nucleotides, about 700 nucleotides, about 600 nucleotides, about 500 nucleotides, about 400 nucleotides, about 300 nucleotides, about 200 nucleotides, about 100 nucleotides, about 80 nucleotides, about 70 nucleotides, about 60 nucleotides, about 50 nucleotides downstream of genomic site GRCh38/hg38: chr1 151027327. In some cases. the targeted region of the pre-mRNA is at least about 1500 nucleotides, about 1000 nucleotides, about 800 nucleotides, about 700 nucleotides, about 600 nucleotides, about 500 nucleotides, about 400 nucleotides, about 300 nucleotides, about 200 nucleotides, about 100 nucleotides, about 80 nucleotides, about 70 nucleotides, about 60 nucleotides, about 50 nucleotides downstream of genomic site GRCh38/hg38: chr1 151027327. In some cases, the targeted region of the pre-mRNA is within a sequence SEQ ID NO: 277. In some cases, the targeted region of the pre-mRNA is within a sequence between a pair of genomic sites GRCh38/hg38: chr1 151027233, and GRCh38/hg38: chr1 151027327. In some cases, the therapeutic agent is an antisense oligomer complementary to a sequence with at least about 80%, 85%, 90%, 95%, 96%, 97%, 98%, 99% or 100% sequence identity to SEQ ID NO:277. In some cases, the therapeutic agent is an antisense oligomer complementary to a sequence with 100% sequence identity to SEQ ID NO:277. In some cases, the therapeutic agent is an antisense oligomer that has a sequence with at least about 80%, 85%, 90%, 95%, 96%, 97%, 98%, 99% or 100% sequence identity to a sequence selected from the group consisting of SEQ ID NOs: 5808-5865. In some cases, the therapeutic agent is an antisense oligomer that has a sequence selected from the group consisting of SEQ ID NOs: 5808-5865. In some cases, the target peptide sequence is a portion of PRUNE1 protein, and the method treats a disease or the condition that comprises Intellectual Disability; Primary microcephaly; or Neurodevelopmental Disorder with Microcephaly, Hypotonia, and Variable Brain Anomalies.

[0255] PSMA6

[0256] In some cases, the target peptide sequence is a portion of PSMA6 protein. In some cases, the therapeutic agent increases level of a first processed mRNA encoding a protein having a sequence SEQ ID NO: 8244, and decreases level of a second processed mRNA encoding a protein having a sequence SEQ ID NO: 480. In some cases, the targeted region of the pre-mRNA is at most about 1500 nucleotides, about 1000 nucleotides, about 800 nucleotides, about 700 nucleotides, about 600 nucleotides, about 500 nucleotides, about 400 nucleotides, about 300 nucleotides, about 200 nucleotides, about 100 nucleotides, about 80 nucleotides, about 70 nucleotides, about 60 nucleotides, about 50 nucleotides upstream of SEQ ID NO: 278. In some cases, the targeted region of the pre-mRNA is at least about 1500 nucleotides, about 1000 nucleotides, about 800 nucleotides, about 700 nucleotides, about 600 nucleotides, about 500 nucleotides, about 400 nucleotides, about 300 nucleotides, about 200 nucleotides, about 100 nucleotides, about 80 nucleotides, about 70 nucleotides, about 60 nucleotides, about 50 nucleotides upstream of SEQ ID NO: 278. In some cases, the targeted region of the pre-mRNA is at most about 1500 nucleotides, about 1000 nucleotides, about 800 nucleotides, about 700 nucleotides, about 600 nucleotides, about 500 nucleotides, about 400 nucleotides, about 300 nucleotides, about 200 nucleotides, about 100 nucleotides, about 80 nucleotides, about 70 nucleotides, about 60 nucleotides, about 50 nucleotides upstream of genomic site GRCh38/hg38: chr14 35308914. In some cases, the targeted region of the pre-mRNA is at least about 1500 nucleotides, about 1000 nucleotides, about 800 nucleotides, about 700 nucleotides, about 600 nucleotides, about 500 nucleotides, about 400 nucleotides, about 300 nucleotides, about 200 nucleotides, about 100 nucleotides, about 80 nucleotides, about 70 nucleotides, about 60 nucleotides, about 50 nucleotides upstream of genomic site GRCh38/hg38: chr14 35308914. In some cases, the targeted region of the pre-mRNA is at most about 1500 nucleotides, about 1000 nucleotides, about 800 nucleotides, about 700 nucleotides, about 600 nucleotides, about 500 nucleotides, about 400 nucleotides, about 300 nucleotides, about 200 nucleotides, about 100 nucleotides, about 80 nucleotides, about 70 nucleotides, about 60 nucleotides, about 50 nucleotides downstream of SEQ ID NO: 278. In some cases, the targeted region of the pre-mRNA is at least about 1500 nucleotides, about 1000 nucleotides, about 800 nucleotides, about 700 nucleotides, about 600 nucleotides, about 500 nucleotides, about 400 nucleotides, about 300 nucleotides, about 200 nucleotides, about 100 nucleotides, about 80 nucleotides, about 70 nucleotides, about 60 nucleotides, about 50 nucleotides downstream of SEQ ID NO: 278. In some cases, the targeted region of the pre-mRNA is at most about 1500 nucleotides, about 1000 nucleotides, about 800 nucleotides, about 700 nucleotides, about 600 nucleotides, about 500 nucleotides, about 400 nucleotides, about 300 nucleotides, about 200 nucleotides, about 100 nucleotides, about 80 nucleotides, about 70 nucleotides, about 60 nucleotides, about 50 nucleotides downstream of genomic site GRCh38/hg38: chr14 35308995. In some cases. the targeted region of the pre-mRNA is at least about 1500 nucleotides, about 1000 nucleotides, about 800 nucleotides, about 700 nucleotides, about 600 nucleotides, about 500 nucleotides, about 400 nucleotides, about 300 nucleotides, about 200 nucleotides, about 100 nucleotides, about 80 nucleotides, about 70 nucleotides, about 60 nucleotides, about 50 nucleotides downstream of genomic site GRCh38/hg38: chr14 35308995. In some cases, the targeted region of the pre-mRNA is within a sequence SEQ ID NO: 278. In some cases, the targeted region of the pre-mRNA is within a sequence between a pair of genomic sites GRCh38/hg38: chr14 35308914, and GRCh38/hg38: chr14 35308995. In some cases, the therapeutic agent is an antisense oligomer complementary to a sequence with at least about 80%, 85%, 90%, 95%, 96%, 97%, 98%, 99% or 100% sequence identity to SEQ ID NO:278. In some cases, the therapeutic agent is an antisense oligomer complementary to a sequence with 100% sequence identity to SEQ ID NO:278. In some cases, the therapeutic agent is an antisense oligomer that has a sequence with at least about 80%, 85%, 90%, 95%, 96%, 97%, 98%, 99% or 100% sequence identity to a sequence selected from the group consisting of SEQ ID NOs: 5866-5920. In some cases, the therapeutic agent is an antisense oligomer that has a sequence selected from the group consisting of SEQ ID NOs: 5866-5920. In some cases, the target peptide sequence is a portion of PSMA6 protein, and the method treats a disease or the condition that comprises Myocardial infarcation, susceptibility to.

[0257] PSMC3IP

[0258] In some cases, the target peptide sequence is a portion of PSMC3IP protein. In some cases, the therapeutic agent increases level of a first processed mRNA encoding a protein having a sequence SEQ ID NO: 8245, and decreases level of a second processed mRNA encoding a protein having a sequence SEQ ID NO: 481. In some cases, the targeted region of the pre-mRNA is at most about 1500 nucleotides, about 1000 nucleotides, about 800 nucleotides, about 700 nucleotides, about 600 nucleotides, about 500 nucleotides, about 400 nucleotides, about 300 nucleotides, about 200 nucleotides, about 100 nucleotides, about 80 nucleotides, about 70 nucleotides, about 60 nucleotides, about 50 nucleotides upstream of SEQ ID NO: 279. In some cases, the targeted region of the pre-mRNA is at least about 1500 nucleotides, about 1000 nucleotides, about 800 nucleotides, about 700 nucleotides, about 600 nucleotides, about 500 nucleotides, about 400 nucleotides, about 300 nucleotides, about 200 nucleotides, about 100 nucleotides, about 80 nucleotides, about 70 nucleotides, about 60 nucleotides, about 50 nucleotides upstream of SEQ ID NO: 279. In some cases, the targeted region of the pre-mRNA is at most about 1500 nucleotides, about 1000 nucleotides, about 800 nucleotides, about 700 nucleotides, about 600 nucleotides, about 500 nucleotides, about 400 nucleotides, about 300 nucleotides, about 200 nucleotides, about 100 nucleotides, about 80 nucleotides, about 70 nucleotides, about 60 nucleotides, about 50 nucleotides upstream of genomic site GRCh38/hg38: chr17 42573623. In some cases, the targeted region of the pre-mRNA is at least about 1500 nucleotides, about 1000 nucleotides, about 800 nucleotides, about 700 nucleotides, about 600 nucleotides, about 500 nucleotides, about 400 nucleotides, about 300 nucleotides, about 200 nucleotides, about 100 nucleotides, about 80 nucleotides, about 70 nucleotides, about 60 nucleotides, about 50 nucleotides upstream of genomic site GRCh38/hg38: chr17 42573623. In some cases, the targeted region of the pre-mRNA is at most about 1500 nucleotides, about 1000 nucleotides, about 800 nucleotides, about 700 nucleotides, about 600 nucleotides, about 500 nucleotides, about 400 nucleotides, about 300 nucleotides, about 200 nucleotides, about 100 nucleotides, about 80 nucleotides, about 70 nucleotides, about 60 nucleotides, about 50 nucleotides downstream of SEQ ID NO: 279. In some cases, the targeted region of the pre-mRNA is at least about 1500 nucleotides, about 1000 nucleotides, about 800 nucleotides, about 700 nucleotides, about 600 nucleotides, about 500 nucleotides, about 400 nucleotides, about 300 nucleotides, about 200 nucleotides, about 100 nucleotides, about 80 nucleotides, about 70 nucleotides, about 60 nucleotides, about 50 nucleotides downstream of SEQ ID NO: 279. In some cases, the targeted region of the pre-mRNA is at most about 1500 nucleotides, about 1000 nucleotides, about 800 nucleotides, about 700 nucleotides, about 600 nucleotides, about 500 nucleotides, about 400 nucleotides, about 300 nucleotides, about 200 nucleotides, about 100 nucleotides, about 80 nucleotides, about 70 nucleotides, about 60 nucleotides, about 50 nucleotides downstream of genomic site GRCh38/hg38: chr17 42573478. In some cases. the targeted region of the pre-mRNA is at least about 1500 nucleotides, about 1000 nucleotides, about 800 nucleotides, about 700 nucleotides, about 600 nucleotides, about 500 nucleotides, about 400 nucleotides, about 300 nucleotides, about 200 nucleotides, about 100 nucleotides, about 80 nucleotides, about 70 nucleotides, about 60 nucleotides, about 50 nucleotides downstream of genomic site GRCh38/hg38: chr17 42573478. In some cases, the targeted region of the pre-mRNA is within a sequence SEQ ID NO: 279. In some cases, the targeted region of the pre-mRNA is within a sequence between a pair of genomic sites GRCh38/hg38: chr17 42573623, and GRCh38/hg38: chr17 42573478. In some cases, the therapeutic agent is an antisense oligomer complementary to a sequence with at least about 80%, 85%, 90%, 95%, 96%, 97%, 98%, 99% or 100% sequence identity to SEQ ID NO:279. In some cases, the therapeutic agent is an antisense oligomer complementary to a sequence with 100% sequence identity to SEQ ID NO:279. In some cases, the therapeutic agent is an antisense oligomer that has a sequence with at least about 80%, 85%, 90%, 95%, 96%, 97%, 98%, 99% or 100% sequence identity to a sequence selected from the group consisting of SEQ ID NOs: 5921-5988. In some cases, the therapeutic agent is an antisense oligomer that has a sequence selected from the group consisting of SEQ ID NOs: 5921-5988. In some cases, the target peptide sequence is a portion of PSMC3IP protein, and the method treats a disease or the condition that comprises Pure Gonadal Dysgenesis, 46, XX; or Ovarian dysgenesis 3.

[0259] PTPN1

[0260] In some cases, the target peptide sequence is a portion of PTPN1 protein. In some cases, the therapeutic agent increases level of a first processed mRNA encoding a protein having a sequence SEQ ID NO: 8246, and decreases level of a second processed mRNA encoding a protein having a sequence SEQ ID NO: 482. In some cases, the targeted region of the pre-mRNA is at most about 1500 nucleotides, about 1000 nucleotides, about 800 nucleotides, about 700 nucleotides, about 600 nucleotides, about 500 nucleotides, about 400 nucleotides, about 300 nucleotides, about 200 nucleotides, about 100 nucleotides, about 80 nucleotides, about 70 nucleotides, about 60 nucleotides, about 50 nucleotides upstream of SEQ ID NO: 280. In some cases, the targeted region of the pre-mRNA is at least about 1500 nucleotides, about 1000 nucleotides, about 800 nucleotides, about 700 nucleotides, about 600 nucleotides, about 500 nucleotides, about 400 nucleotides, about 300 nucleotides, about 200 nucleotides, about 100 nucleotides, about 80 nucleotides, about 70 nucleotides, about 60 nucleotides, about 50 nucleotides upstream of SEQ ID NO: 280. In some cases, the targeted region of the pre-mRNA is at most about 1500 nucleotides, about 1000 nucleotides, about 800 nucleotides, about 700 nucleotides, about 600 nucleotides, about 500 nucleotides, about 400 nucleotides, about 300 nucleotides, about 200 nucleotides, about 100 nucleotides, about 80 nucleotides, about 70 nucleotides, about 60 nucleotides, about 50 nucleotides upstream of genomic site GRCh38/hg38: chr20 50564969. In some cases, the targeted region of the pre-mRNA is at least about 1500 nucleotides, about 1000 nucleotides, about 800 nucleotides, about 700 nucleotides, about 600 nucleotides, about 500 nucleotides, about 400 nucleotides, about 300 nucleotides, about 200 nucleotides, about 100 nucleotides, about 80 nucleotides, about 70 nucleotides, about 60 nucleotides, about 50 nucleotides upstream of genomic site GRCh38/hg38: chr20 50564969. In some cases, the targeted region of the pre-mRNA is at most about 1500 nucleotides, about 1000 nucleotides, about 800 nucleotides, about 700 nucleotides, about 600 nucleotides, about 500 nucleotides, about 400 nucleotides, about 300 nucleotides, about 200 nucleotides, about 100 nucleotides, about 80 nucleotides, about 70 nucleotides, about 60 nucleotides, about 50 nucleotides downstream of SEQ ID NO: 280. In some cases, the targeted region of the pre-mRNA is at least about 1500 nucleotides, about 1000 nucleotides, about 800 nucleotides, about 700 nucleotides, about 600 nucleotides, about 500 nucleotides, about 400 nucleotides, about 300 nucleotides, about 200 nucleotides, about 100 nucleotides, about 80 nucleotides, about 70 nucleotides, about 60 nucleotides, about 50 nucleotides downstream of SEQ ID NO: 280. In some cases, the targeted region of the pre-mRNA is at most about 1500 nucleotides, about 1000 nucleotides, about 800 nucleotides, about 700 nucleotides, about 600 nucleotides, about 500 nucleotides, about 400 nucleotides, about 300 nucleotides, about 200 nucleotides, about 100 nucleotides, about 80 nucleotides, about 70 nucleotides, about 60 nucleotides, about 50 nucleotides downstream of genomic site GRCh38/hg38: chr20 50565069. In some cases. the targeted region of the pre-mRNA is at least about 1500 nucleotides, about 1000 nucleotides, about 800 nucleotides, about 700 nucleotides, about 600 nucleotides, about 500 nucleotides, about 400 nucleotides, about 300 nucleotides, about 200 nucleotides, about 100 nucleotides, about 80 nucleotides, about 70 nucleotides, about 60 nucleotides, about 50 nucleotides downstream of genomic site GRCh38/hg38: chr20 50565069. In some cases, the targeted region of the pre-mRNA is within a sequence SEQ ID NO: 280. In some cases, the targeted region of the pre-mRNA is within a sequence between a pair of genomic sites GRCh38/hg38: chr20 50564969, and GRCh38/hg38: chr20 50565069. In some cases, the therapeutic agent is an antisense oligomer complementary to a sequence with at least about 80%, 85%, 90%, 95%, 96%, 97%, 98%, 99% or 100% sequence identity to SEQ ID NO:280. In some cases, the therapeutic agent is an antisense oligomer complementary to a sequence with 100% sequence identity to SEQ ID NO:280. In some cases, the therapeutic agent is an antisense oligomer that has a sequence with at least about 80%, 85%, 90%, 95%, 96%, 97%, 98%, 99% or 100% sequence identity to a sequence selected from the group consisting of SEQ ID NOs: 5989-6047. In some cases, the therapeutic agent is an antisense oligomer that has a sequence selected from the group consisting of SEQ ID NOs: 5989-6047. In some cases, the target peptide sequence is a portion of PTPN1 protein, and the method treats a disease or the condition that comprises Schizophrenia; or Insulin resistance, susceptibility to. In some cases, the method treats a cancer that is associated with PTPN1 protein.

[0261] RAB11B

[0262] In some cases, the target peptide sequence is a portion of RAB11B protein. In some cases, the therapeutic agent increases level of a first processed mRNA encoding a protein having a sequence SEQ ID NO: 8247, and decreases level of a second processed mRNA encoding a protein having a sequence SEQ ID NO: 483. In some cases, the targeted region of the pre-mRNA is at most about 1500 nucleotides, about 1000 nucleotides, about 800 nucleotides, about 700 nucleotides, about 600 nucleotides, about 500 nucleotides, about 400 nucleotides, about 300 nucleotides, about 200 nucleotides, about 100 nucleotides, about 80 nucleotides, about 70 nucleotides, about 60 nucleotides, about 50 nucleotides upstream of SEQ ID NO: 281. In some cases, the targeted region of the pre-mRNA is at least about 1500 nucleotides, about 1000 nucleotides, about 800 nucleotides, about 700 nucleotides, about 600 nucleotides, about 500 nucleotides, about 400 nucleotides, about 300 nucleotides, about 200 nucleotides, about 100 nucleotides, about 80 nucleotides, about 70 nucleotides, about 60 nucleotides, about 50 nucleotides upstream of SEQ ID NO: 281. In some cases, the targeted region of the pre-mRNA is at most about 1500 nucleotides, about 1000 nucleotides, about 800 nucleotides, about 700 nucleotides, about 600 nucleotides, about 500 nucleotides, about 400 nucleotides, about 300 nucleotides, about 200 nucleotides, about 100 nucleotides, about 80 nucleotides, about 70 nucleotides, about 60 nucleotides, about 50 nucleotides upstream of genomic site GRCh38/hg38: chr19 8402086. In some cases, the targeted region of the pre-mRNA is at least about 1500 nucleotides, about 1000 nucleotides, about 800 nucleotides, about 700 nucleotides, about 600 nucleotides, about 500 nucleotides, about 400 nucleotides, about 300 nucleotides, about 200 nucleotides, about 100 nucleotides, about 80 nucleotides, about 70 nucleotides, about 60 nucleotides, about 50 nucleotides upstream of genomic site GRCh38/hg38: chr19 8402086. In some cases, the targeted region of the pre-mRNA is at most about 1500 nucleotides, about 1000 nucleotides, about 800 nucleotides, about 700 nucleotides, about 600 nucleotides, about 500 nucleotides, about 400 nucleotides, about 300 nucleotides, about 200 nucleotides, about 100 nucleotides, about 80 nucleotides, about 70 nucleotides, about 60 nucleotides, about 50 nucleotides downstream of SEQ ID NO: 281. In some cases, the targeted region of the pre-mRNA is at least about 1500 nucleotides, about 1000 nucleotides, about 800 nucleotides, about 700 nucleotides, about 600 nucleotides, about 500 nucleotides, about 400 nucleotides, about 300 nucleotides, about 200 nucleotides, about 100 nucleotides, about 80 nucleotides, about 70 nucleotides, about 60 nucleotides, about 50 nucleotides downstream of SEQ ID NO: 281. In some cases, the targeted region of the pre-mRNA is at most about 1500 nucleotides, about 1000 nucleotides, about 800 nucleotides, about 700 nucleotides, about 600 nucleotides, about 500 nucleotides, about 400 nucleotides, about 300 nucleotides, about 200 nucleotides, about 100 nucleotides, about 80 nucleotides, about 70 nucleotides, about 60 nucleotides, about 50 nucleotides downstream of genomic site GRCh38/hg38: chr19 8402279. In some cases. the targeted region of the pre-mRNA is at least about 1500 nucleotides, about 1000 nucleotides, about 800 nucleotides, about 700 nucleotides, about 600 nucleotides, about 500 nucleotides, about 400 nucleotides, about 300 nucleotides, about 200 nucleotides, about 100 nucleotides, about 80 nucleotides, about 70 nucleotides, about 60 nucleotides, about 50 nucleotides downstream of genomic site GRCh38/hg38: chr19 8402279. In some cases, the targeted region of the pre-mRNA is within a sequence SEQ ID NO: 281. In some cases, the targeted region of the pre-mRNA is within a sequence between a pair of genomic sites GRCh38/hg38: chr19 8402086, and GRCh38/hg38: chr19 8402279. In some cases, the therapeutic agent is an antisense oligomer complementary to a sequence with at least about 80%, 85%, 90%, 95%, 96%, 97%, 98%, 99% or 100% sequence identity to SEQ ID NO:281. In some cases, the therapeutic agent is an antisense oligomer complementary to a sequence with 100% sequence identity to SEQ ID NO:281. In some cases, the therapeutic agent is an antisense oligomer that has a sequence with at least about 80%, 85%, 90%, 95%, 96%, 97%, 98%, 99% or 100% sequence identity to a sequence selected from the group consisting of SEQ ID NOs: 6048-6125. In some cases, the therapeutic agent is an antisense oligomer that has a sequence selected from the group consisting of SEQ ID NOs: 6048-6125. In some cases, the target peptide sequence is a portion of RAB11B protein, and the method treats a disease or the condition that comprises Intellectual Disability; Leukodystrophy; or Epileptic encephalopathy.

[0263] RBPJ

[0264] In some cases, the target peptide sequence is a portion of RBPJ protein. In some cases, the therapeutic agent increases level of a first processed mRNA encoding a protein having a sequence SEQ ID NO: 8248, and decreases level of a second processed mRNA encoding a protein having a sequence SEQ ID NO: 484. In some cases, the targeted region of the pre-mRNA is at most about 1500 nucleotides, about 1000 nucleotides, about 800 nucleotides, about 700 nucleotides, about 600 nucleotides, about 500 nucleotides, about 400 nucleotides, about 300 nucleotides, about 200 nucleotides, about 100 nucleotides, about 80 nucleotides, about 70 nucleotides, about 60 nucleotides, about 50 nucleotides upstream of SEQ ID NO: 282. In some cases, the targeted region of the pre-mRNA is at least about 1500 nucleotides, about 1000 nucleotides, about 800 nucleotides, about 700 nucleotides, about 600 nucleotides, about 500 nucleotides, about 400 nucleotides, about 300 nucleotides, about 200 nucleotides, about 100 nucleotides, about 80 nucleotides, about 70 nucleotides, about 60 nucleotides, about 50 nucleotides upstream of SEQ ID NO: 282. In some cases, the targeted region of the pre-mRNA is at most about 1500 nucleotides, about 1000 nucleotides, about 800 nucleotides, about 700 nucleotides, about 600 nucleotides, about 500 nucleotides, about 400 nucleotides, about 300 nucleotides, about 200 nucleotides, about 100 nucleotides, about 80 nucleotides, about 70 nucleotides, about 60 nucleotides, about 50 nucleotides upstream of genomic site GRCh38/hg38: chr4 26320700. In some cases, the targeted region of the pre-mRNA is at least about 1500 nucleotides, about 1000 nucleotides, about 800 nucleotides, about 700 nucleotides, about 600 nucleotides, about 500 nucleotides, about 400 nucleotides, about 300 nucleotides, about 200 nucleotides, about 100 nucleotides, about 80 nucleotides, about 70 nucleotides, about 60 nucleotides, about 50 nucleotides upstream of genomic site GRCh38/hg38: chr4 26320700. In some cases, the targeted region of the pre-mRNA is at most about 1500 nucleotides, about 1000 nucleotides, about 800 nucleotides, about 700 nucleotides, about 600 nucleotides, about 500 nucleotides, about 400 nucleotides, about 300 nucleotides, about 200 nucleotides, about 100 nucleotides, about 80 nucleotides, about 70 nucleotides, about 60 nucleotides, about 50 nucleotides downstream of SEQ ID NO: 282. In some cases, the targeted region of the pre-mRNA is at least about 1500 nucleotides, about 1000 nucleotides, about 800 nucleotides, about 700 nucleotides, about 600 nucleotides, about 500 nucleotides, about 400 nucleotides, about 300 nucleotides, about 200 nucleotides, about 100 nucleotides, about 80 nucleotides, about 70 nucleotides, about 60 nucleotides, about 50 nucleotides downstream of SEQ ID NO: 282. In some cases, the targeted region of the pre-mRNA is at most about 1500 nucleotides, about 1000 nucleotides, about 800 nucleotides, about 700 nucleotides, about 600 nucleotides, about 500 nucleotides, about 400 nucleotides, about 300 nucleotides, about 200 nucleotides, about 100 nucleotides, about 80 nucleotides, about 70 nucleotides, about 60 nucleotides, about 50 nucleotides downstream of genomic site GRCh38/hg38: chr4 26320815. In some cases. the targeted region of the pre-mRNA is at least about 1500 nucleotides, about 1000 nucleotides, about 800 nucleotides, about 700 nucleotides, about 600 nucleotides, about 500 nucleotides, about 400 nucleotides, about 300 nucleotides, about 200 nucleotides, about 100 nucleotides, about 80 nucleotides, about 70 nucleotides, about 60 nucleotides, about 50 nucleotides downstream of genomic site GRCh38/hg38: chr4 26320815. In some cases, the targeted region of the pre-mRNA is within a sequence SEQ ID NO: 282. In some cases, the targeted region of the pre-mRNA is within a sequence between a pair of genomic sites GRCh38/hg38: chr4 26320700, and GRCh38/hg38: chr4 26320815. In some cases, the therapeutic agent is an antisense oligomer complementary to a sequence with at least about 80%, 85%, 90%, 95%, 96%, 97%, 98%, 99% or 100% sequence identity to SEQ ID NO:282. In some cases, the therapeutic agent is an antisense oligomer complementary to a sequence with 100% sequence identity to SEQ ID NO:282. In some cases, the therapeutic agent increases level of a first processed mRNA encoding a protein having a sequence SEQ ID NO: 8249, and decreases level of a second processed mRNA encoding a protein having a sequence SEQ ID NO: 485. In some cases, the targeted region of the pre-mRNA is at most about 1500 nucleotides, about 1000 nucleotides, about 800 nucleotides, about 700 nucleotides, about 600 nucleotides, about 500 nucleotides, about 400 nucleotides, about 300 nucleotides, about 200 nucleotides, about 100 nucleotides, about 80 nucleotides, about 70 nucleotides, about 60 nucleotides, about 50 nucleotides upstream of SEQ ID NO: 283. In some cases, the targeted region of the pre-mRNA is at least about 1500 nucleotides, about 1000 nucleotides, about 800 nucleotides, about 700 nucleotides, about 600 nucleotides, about 500 nucleotides, about 400 nucleotides, about 300 nucleotides, about 200 nucleotides, about 100 nucleotides, about 80 nucleotides, about 70 nucleotides, about 60 nucleotides, about 50 nucleotides upstream of SEQ ID NO: 283. In some cases, the targeted region of the pre-mRNA is at most about 1500 nucleotides, about 1000 nucleotides, about 800 nucleotides, about 700 nucleotides, about 600 nucleotides, about 500 nucleotides, about 400 nucleotides, about 300 nucleotides, about 200 nucleotides, about 100 nucleotides, about 80 nucleotides, about 70 nucleotides, about 60 nucleotides, about 50 nucleotides upstream of genomic site GRCh38/hg38: chr4 26320700. In some cases, the targeted region of the pre-mRNA is at least about 1500 nucleotides, about 1000 nucleotides, about 800 nucleotides, about 700 nucleotides, about 600 nucleotides, about 500 nucleotides, about 400 nucleotides, about 300 nucleotides, about 200 nucleotides, about 100 nucleotides, about 80 nucleotides, about 70 nucleotides, about 60 nucleotides, about 50 nucleotides upstream of genomic site GRCh38/hg38: chr4 26320700. In some cases, the targeted region of the pre-mRNA is at most about 1500 nucleotides, about 1000 nucleotides, about 800 nucleotides, about 700 nucleotides, about 600 nucleotides, about 500 nucleotides, about 400 nucleotides, about 300 nucleotides, about 200 nucleotides, about 100 nucleotides, about 80 nucleotides, about 70 nucleotides, about 60 nucleotides, about 50 nucleotides downstream of SEQ ID NO: 283. In some cases, the targeted region of the pre-mRNA is at least about 1500 nucleotides, about 1000 nucleotides, about 800 nucleotides, about 700 nucleotides, about 600 nucleotides, about 500 nucleotides, about 400 nucleotides, about 300 nucleotides, about 200 nucleotides, about 100 nucleotides, about 80 nucleotides, about 70 nucleotides, about 60 nucleotides, about 50 nucleotides downstream of SEQ ID NO: 283. In some cases, the targeted region of the pre-mRNA is at most about 1500 nucleotides, about 1000 nucleotides, about 800 nucleotides, about 700 nucleotides, about 600 nucleotides, about 500 nucleotides, about 400 nucleotides, about 300 nucleotides, about 200 nucleotides, about 100 nucleotides, about 80 nucleotides, about 70 nucleotides, about 60 nucleotides, about 50 nucleotides downstream of genomic site GRCh38/hg38: chr4 26320815. In some cases. the targeted region of the pre-mRNA is at least about 1500 nucleotides, about 1000 nucleotides, about 800 nucleotides, about 700 nucleotides, about 600 nucleotides, about 500 nucleotides, about 400 nucleotides, about 300 nucleotides, about 200 nucleotides, about 100 nucleotides, about 80 nucleotides, about 70 nucleotides, about 60 nucleotides, about 50 nucleotides downstream of genomic site GRCh38/hg38: chr4 26320815. In some cases, the targeted region of the pre-mRNA is within a sequence SEQ ID NO: 283. In some cases, the targeted region of the pre-mRNA is within a sequence between a pair of genomic sites GRCh38/hg38: chr4 26320700, and GRCh38/hg38: chr4 26320815. In some cases, the therapeutic agent is an antisense oligomer complementary to a sequence with at least about 80%, 85%, 90%, 95%, 96%, 97%, 98%, 99% or 100% sequence identity to SEQ ID NO:283. In some cases, the therapeutic agent is an antisense oligomer complementary to a sequence with 100% sequence identity to SEQ ID NO:283. In some cases, the therapeutic agent is an antisense oligomer that has a sequence with at least about 80%, 85%, 90%, 95%, 96%, 97%, 98%, 99% or 100% sequence identity to a sequence selected from the group consisting of SEQ ID NOs: 6126-6187. In some cases, the therapeutic agent is an antisense oligomer that has a sequence selected from the group consisting of SEQ ID NOs: 6126-6187. In some cases, the target peptide sequence is a portion of RBPJ protein, and the method treats a disease or the condition that comprises Intellectual Disability; ADAMS-OLIVER SYNDROME 3; or Adams Oliver syndrome.

[0265] RNPS1

[0266] In some cases, the target peptide sequence is a portion of RNPS1 protein. In some cases, the therapeutic agent increases level of a first processed mRNA encoding a protein having a sequence SEQ ID NO: 8250, and decreases level of a second processed mRNA encoding a protein having a sequence SEQ ID NO: 486. In some cases, the targeted region of the pre-mRNA is at most about 1500 nucleotides, about 1000 nucleotides, about 800 nucleotides, about 700 nucleotides, about 600 nucleotides, about 500 nucleotides, about 400 nucleotides, about 300 nucleotides, about 200 nucleotides, about 100 nucleotides, about 80 nucleotides, about 70 nucleotides, about 60 nucleotides, about 50 nucleotides upstream of SEQ ID NO: 284. In some cases, the targeted region of the pre-mRNA is at least about 1500 nucleotides, about 1000 nucleotides, about 800 nucleotides, about 700 nucleotides, about 600 nucleotides, about 500 nucleotides, about 400 nucleotides, about 300 nucleotides, about 200 nucleotides, about 100 nucleotides, about 80 nucleotides, about 70 nucleotides, about 60 nucleotides, about 50 nucleotides upstream of SEQ ID NO: 284. In some cases, the targeted region of the pre-mRNA is at most about 1500 nucleotides, about 1000 nucleotides, about 800 nucleotides, about 700 nucleotides, about 600 nucleotides, about 500 nucleotides, about 400 nucleotides, about 300 nucleotides, about 200 nucleotides, about 100 nucleotides, about 80 nucleotides, about 70 nucleotides, about 60 nucleotides, about 50 nucleotides upstream of genomic site GRCh38/hg38: chr16 2264760. In some cases, the targeted region of the pre-mRNA is at least about 1500 nucleotides, about 1000 nucleotides, about 800 nucleotides, about 700 nucleotides, about 600 nucleotides, about 500 nucleotides, about 400 nucleotides, about 300 nucleotides, about 200 nucleotides, about 100 nucleotides, about 80 nucleotides, about 70 nucleotides, about 60 nucleotides, about 50 nucleotides upstream of genomic site GRCh38/hg38: chr16 2264760. In some cases, the targeted region of the pre-mRNA is at most about 1500 nucleotides, about 1000 nucleotides, about 800 nucleotides, about 700 nucleotides, about 600 nucleotides, about 500 nucleotides, about 400 nucleotides, about 300 nucleotides, about 200 nucleotides, about 100 nucleotides, about 80 nucleotides, about 70 nucleotides, about 60 nucleotides, about 50 nucleotides downstream of SEQ ID NO: 284. In some cases, the targeted region of the pre-mRNA is at least about 1500 nucleotides, about 1000 nucleotides, about 800 nucleotides, about 700 nucleotides, about 600 nucleotides, about 500 nucleotides, about 400 nucleotides, about 300 nucleotides, about 200 nucleotides, about 100 nucleotides, about 80 nucleotides, about 70 nucleotides, about 60 nucleotides, about 50 nucleotides downstream of SEQ ID NO: 284. In some cases, the targeted region of the pre-mRNA is at most about 1500 nucleotides, about 1000 nucleotides, about 800 nucleotides, about 700 nucleotides, about 600 nucleotides, about 500 nucleotides, about 400 nucleotides, about 300 nucleotides, about 200 nucleotides, about 100 nucleotides, about 80 nucleotides, about 70 nucleotides, about 60 nucleotides, about 50 nucleotides downstream of genomic site GRCh38/hg38: chr16 2264573. In some cases. the targeted region of the pre-mRNA is at least about 1500 nucleotides, about 1000 nucleotides, about 800 nucleotides, about 700 nucleotides, about 600 nucleotides, about 500 nucleotides, about 400 nucleotides, about 300 nucleotides, about 200 nucleotides, about 100 nucleotides, about 80 nucleotides, about 70 nucleotides, about 60 nucleotides, about 50 nucleotides downstream of genomic site GRCh38/hg38: chr16 2264573. In some cases, the targeted region of the pre-mRNA is within a sequence SEQ ID NO: 284. In some cases, the targeted region of the pre-mRNA is within a sequence between a pair of genomic sites GRCh38/hg38: chr16 2264760, and GRCh38/hg38: chr16 2264573. In some cases, the therapeutic agent is an antisense oligomer complementary to a sequence with at least about 80%, 85%, 90%, 95%, 96%, 97%, 98%, 99% or 100% sequence identity to SEQ ID NO:284. In some cases, the therapeutic agent is an antisense oligomer complementary to a sequence with 100% sequence identity to SEQ ID NO:284. In some cases, the therapeutic agent increases level of a first processed mRNA encoding a protein having a sequence SEQ ID NO: 8251, and decreases level of a second processed mRNA encoding a protein having a sequence SEQ ID NO: 487. In some cases, the targeted region of the pre-mRNA is at most about 1500 nucleotides, about 1000 nucleotides, about 800 nucleotides, about 700 nucleotides, about 600 nucleotides, about 500 nucleotides, about 400 nucleotides, about 300 nucleotides, about 200 nucleotides, about 100 nucleotides, about 80 nucleotides, about 70 nucleotides, about 60 nucleotides, about 50 nucleotides upstream of SEQ ID NO: 285. In some cases, the targeted region of the pre-mRNA is at least about 1500 nucleotides, about 1000 nucleotides, about 800 nucleotides, about 700 nucleotides, about 600 nucleotides, about 500 nucleotides, about 400 nucleotides, about 300 nucleotides, about 200 nucleotides, about 100 nucleotides, about 80 nucleotides, about 70 nucleotides, about 60 nucleotides, about 50 nucleotides upstream of SEQ ID NO: 285. In some cases, the targeted region of the pre-mRNA is at most about 1500 nucleotides, about 1000 nucleotides, about 800 nucleotides, about 700 nucleotides, about 600 nucleotides, about 500 nucleotides, about 400 nucleotides, about 300 nucleotides, about 200 nucleotides, about 100 nucleotides, about 80 nucleotides, about 70 nucleotides, about 60 nucleotides, about 50 nucleotides upstream of genomic site GRCh38/hg38: chr16 2264760. In some cases, the targeted region of the pre-mRNA is at least about 1500 nucleotides, about 1000 nucleotides, about 800 nucleotides, about 700 nucleotides, about 600 nucleotides, about 500 nucleotides, about 400 nucleotides, about 300 nucleotides, about 200 nucleotides, about 100 nucleotides, about 80 nucleotides, about 70 nucleotides, about 60 nucleotides, about 50 nucleotides upstream of genomic site GRCh38/hg38: chr16 2264760. In some cases, the targeted region of the pre-mRNA is at most about 1500 nucleotides, about 1000 nucleotides, about 800 nucleotides, about 700 nucleotides, about 600 nucleotides, about 500 nucleotides, about 400 nucleotides, about 300 nucleotides, about 200 nucleotides, about 100 nucleotides, about 80 nucleotides, about 70 nucleotides, about 60 nucleotides, about 50 nucleotides downstream of SEQ ID NO: 285. In some cases, the targeted region of the pre-mRNA is at least about 1500 nucleotides, about 1000 nucleotides, about 800 nucleotides, about 700 nucleotides, about 600 nucleotides, about 500 nucleotides, about 400 nucleotides, about 300 nucleotides, about 200 nucleotides, about 100 nucleotides, about 80 nucleotides, about 70 nucleotides, about 60 nucleotides, about 50 nucleotides downstream of SEQ ID NO: 285. In some cases, the targeted region of the pre-mRNA is at most about 1500 nucleotides, about 1000 nucleotides, about 800 nucleotides, about 700 nucleotides, about 600 nucleotides, about 500 nucleotides, about 400 nucleotides, about 300 nucleotides, about 200 nucleotides, about 100 nucleotides, about 80 nucleotides, about 70 nucleotides, about 60 nucleotides, about 50 nucleotides downstream of genomic site GRCh38/hg38: chr16 2264573. In some cases. the targeted region of the pre-mRNA is at least about 1500 nucleotides, about 1000 nucleotides, about 800 nucleotides, about 700 nucleotides, about 600 nucleotides, about 500 nucleotides, about 400 nucleotides, about 300 nucleotides, about 200 nucleotides, about 100 nucleotides, about 80 nucleotides, about 70 nucleotides, about 60 nucleotides, about 50 nucleotides downstream of genomic site GRCh38/hg38: chr16 2264573. In some cases, the targeted region of the pre-mRNA is within a sequence SEQ ID NO: 285. In some cases, the targeted region of the pre-mRNA is within a sequence between a pair of genomic sites GRCh38/hg38: chr16 2264760, and GRCh38/hg38: chr16 2264573. In some cases, the therapeutic agent is an antisense oligomer complementary to a sequence with at least about 80%, 85%, 90%, 95%, 96%, 97%, 98%, 99% or 100% sequence identity to SEQ ID NO:285. In some cases, the therapeutic agent is an antisense oligomer complementary to a sequence with 100% sequence identity to SEQ ID NO:285. In some cases, the therapeutic agent increases level of a first processed mRNA encoding a protein having a sequence SEQ ID NO: 8252, and decreases level of a second processed mRNA encoding a protein having a sequence SEQ ID NO: 488. In some cases, the targeted region of the pre-mRNA is at most about 1500 nucleotides, about 1000 nucleotides, about 800 nucleotides, about 700 nucleotides, about 600 nucleotides, about 500 nucleotides, about 400 nucleotides, about 300 nucleotides, about 200 nucleotides, about 100 nucleotides, about 80 nucleotides, about 70 nucleotides, about 60 nucleotides, about 50 nucleotides upstream of SEQ ID NO: 286. In some cases, the targeted region of the pre-mRNA is at least about 1500 nucleotides, about 1000 nucleotides, about 800 nucleotides, about 700 nucleotides, about 600 nucleotides, about 500 nucleotides, about 400 nucleotides, about 300 nucleotides, about 200 nucleotides, about 100 nucleotides, about 80 nucleotides, about 70 nucleotides, about 60 nucleotides, about 50 nucleotides upstream of SEQ ID NO: 286. In some cases, the targeted region of the pre-mRNA is at most about 1500 nucleotides, about 1000 nucleotides, about 800 nucleotides, about 700 nucleotides, about 600 nucleotides, about 500 nucleotides, about 400 nucleotides, about 300 nucleotides, about 200 nucleotides, about 100 nucleotides, about 80 nucleotides, about 70 nucleotides, about 60 nucleotides, about 50 nucleotides upstream of genomic site GRCh38/hg38: chr16 2264760. In some cases, the targeted region of the pre-mRNA is at least about 1500 nucleotides, about 1000 nucleotides, about 800 nucleotides, about 700 nucleotides, about 600 nucleotides, about 500 nucleotides, about 400 nucleotides, about 300 nucleotides, about 200 nucleotides, about 100 nucleotides, about 80 nucleotides, about 70 nucleotides, about 60 nucleotides, about 50 nucleotides upstream of genomic site GRCh38/hg38: chr16 2264760. In some cases, the targeted region of the pre-mRNA is at most about 1500 nucleotides, about 1000 nucleotides, about 800 nucleotides, about 700 nucleotides, about 600 nucleotides, about 500 nucleotides, about 400 nucleotides, about 300 nucleotides, about 200 nucleotides, about 100 nucleotides, about 80 nucleotides, about 70 nucleotides, about 60 nucleotides, about 50 nucleotides downstream of SEQ ID NO: 286. In some cases, the targeted region of the pre-mRNA is at least about 1500 nucleotides, about 1000 nucleotides, about 800 nucleotides, about 700 nucleotides, about 600 nucleotides, about 500 nucleotides, about 400 nucleotides, about 300 nucleotides, about 200 nucleotides, about 100 nucleotides, about 80 nucleotides, about 70 nucleotides, about 60 nucleotides, about 50 nucleotides downstream of SEQ ID NO: 286. In some cases, the targeted region of the pre-mRNA is at most about 1500 nucleotides, about 1000 nucleotides, about 800 nucleotides, about 700 nucleotides, about 600 nucleotides, about 500 nucleotides, about 400 nucleotides, about 300 nucleotides, about 200 nucleotides, about 100 nucleotides, about 80 nucleotides, about 70 nucleotides, about 60 nucleotides, about 50 nucleotides downstream of genomic site GRCh38/hg38: chr16 2264573. In some cases. the targeted region of the pre-mRNA is at least about 1500 nucleotides, about 1000 nucleotides, about 800 nucleotides, about 700 nucleotides, about 600 nucleotides, about 500 nucleotides, about 400 nucleotides, about 300 nucleotides, about 200 nucleotides, about 100 nucleotides, about 80 nucleotides, about 70 nucleotides, about 60 nucleotides, about 50 nucleotides downstream of genomic site GRCh38/hg38: chr16 2264573. In some cases, the targeted region of the pre-mRNA is within a sequence SEQ ID NO: 286. In some cases, the targeted region of the pre-mRNA is within a sequence between a pair of genomic sites GRCh38/hg38: chr16 2264760, and GRCh38/hg38: chr16 2264573. In some cases, the therapeutic agent is an antisense oligomer complementary to a sequence with at least about 80%, 85%, 90%, 95%, 96%, 97%, 98%, 99% or 100% sequence identity to SEQ ID NO:286. In some cases, the therapeutic agent is an antisense oligomer complementary to a sequence with 100% sequence identity to SEQ ID NO:286. In some cases, the therapeutic agent increases level of a first processed mRNA encoding a protein having a sequence SEQ ID NO: 8253, and decreases level of a second processed mRNA encoding a protein having a sequence SEQ ID NO: 489. In some cases, the targeted region of the pre-mRNA is at most about 1500 nucleotides, about 1000 nucleotides, about 800 nucleotides, about 700 nucleotides, about 600 nucleotides, about 500 nucleotides, about 400 nucleotides, about 300 nucleotides, about 200 nucleotides, about 100 nucleotides, about 80 nucleotides, about 70 nucleotides, about 60 nucleotides, about 50 nucleotides upstream of SEQ ID NO: 287. In some cases, the targeted region of the pre-mRNA is at least about 1500 nucleotides, about 1000 nucleotides, about 800 nucleotides, about 700 nucleotides, about 600 nucleotides, about 500 nucleotides, about 400 nucleotides, about 300 nucleotides, about 200 nucleotides, about 100 nucleotides, about 80 nucleotides, about 70 nucleotides, about 60 nucleotides, about 50 nucleotides upstream of SEQ ID NO: 287. In some cases, the targeted region of the pre-mRNA is at most about 1500 nucleotides, about 1000 nucleotides, about 800 nucleotides, about 700 nucleotides, about 600 nucleotides, about 500 nucleotides, about 400 nucleotides, about 300 nucleotides, about 200 nucleotides, about 100 nucleotides, about 80 nucleotides, about 70 nucleotides, about 60 nucleotides, about 50 nucleotides upstream of genomic site GRCh38/hg38: chr16 2264760. In some cases, the targeted region of the pre-mRNA is at least about 1500 nucleotides, about 1000 nucleotides, about 800 nucleotides, about 700 nucleotides, about 600 nucleotides, about 500 nucleotides, about 400 nucleotides, about 300 nucleotides, about 200 nucleotides, about 100 nucleotides, about 80 nucleotides, about 70 nucleotides, about 60 nucleotides, about 50 nucleotides upstream of genomic site GRCh38/hg38: chr16 2264760. In some cases, the targeted region of the pre-mRNA is at most about 1500 nucleotides, about 1000 nucleotides, about 800 nucleotides, about 700 nucleotides, about 600 nucleotides, about 500 nucleotides, about 400 nucleotides, about 300 nucleotides, about 200 nucleotides, about 100 nucleotides, about 80 nucleotides, about 70 nucleotides, about 60 nucleotides, about 50 nucleotides downstream of SEQ ID NO: 287. In some cases, the targeted region of the pre-mRNA is at least about 1500 nucleotides, about 1000 nucleotides, about 800 nucleotides, about 700 nucleotides, about 600 nucleotides, about 500 nucleotides, about 400 nucleotides, about 300 nucleotides, about 200 nucleotides, about 100 nucleotides, about 80 nucleotides, about 70 nucleotides, about 60 nucleotides, about 50 nucleotides downstream of SEQ ID NO: 287. In some cases, the targeted region of the pre-mRNA is at most about 1500 nucleotides, about 1000 nucleotides, about 800 nucleotides, about 700 nucleotides, about 600 nucleotides, about 500 nucleotides, about 400 nucleotides, about 300 nucleotides, about 200 nucleotides, about 100 nucleotides, about 80 nucleotides, about 70 nucleotides, about 60 nucleotides, about 50 nucleotides downstream of genomic site GRCh38/hg38: chr16 2264573. In some cases. the targeted region of the pre-mRNA is at least about 1500 nucleotides, about 1000 nucleotides, about 800 nucleotides, about 700 nucleotides, about 600 nucleotides, about 500 nucleotides, about 400 nucleotides, about 300 nucleotides, about 200 nucleotides, about 100 nucleotides, about 80 nucleotides, about 70 nucleotides, about 60 nucleotides, about 50 nucleotides downstream of genomic site GRCh38/hg38: chr16 2264573. In some cases, the targeted region of the pre-mRNA is within a sequence SEQ ID NO: 287. In some cases, the targeted region of the pre-mRNA is within a sequence between a pair of genomic sites GRCh38/hg38: chr16 2264760, and GRCh38/hg38: chr16 2264573. In some cases, the therapeutic agent is an antisense oligomer complementary to a sequence with at least about 80%, 85%, 90%, 95%, 96%, 97%, 98%, 99% or 100% sequence identity to SEQ ID NO:287. In some cases, the therapeutic agent is an antisense oligomer complementary to a sequence with 100% sequence identity to SEQ ID NO:287. In some cases, the therapeutic agent is an antisense oligomer that has a sequence with at least about 80%, 85%, 90%, 95%, 96%, 97%, 98%, 99% or 100% sequence identity to a sequence selected from the group consisting of SEQ ID NOs: 6188-6264. In some cases, the therapeutic agent is an antisense oligomer that has a sequence selected from the group consisting of SEQ ID NOs: 6188-6264. In some cases, the target peptide sequence is a portion of RNPS1 protein, and the method treats a disease or the condition that comprises Mood Disorders.

[0267] RPL5

[0268] In some cases, the target peptide sequence is a portion of RPL5 protein. In some cases, the therapeutic agent increases level of a first processed mRNA encoding a protein having a sequence SEQ ID NO: 8254, and decreases level of a second processed mRNA encoding a protein having a sequence SEQ ID NO: 490. In some cases, the targeted region of the pre-mRNA is at most about 1500 nucleotides, about 1000 nucleotides, about 800 nucleotides, about 700 nucleotides, about 600 nucleotides, about 500 nucleotides, about 400 nucleotides, about 300 nucleotides, about 200 nucleotides, about 100 nucleotides, about 80 nucleotides, about 70 nucleotides, about 60 nucleotides, about 50 nucleotides upstream of SEQ ID NO: 288. In some cases, the targeted region of the pre-mRNA is at least about 1500 nucleotides, about 1000 nucleotides, about 800 nucleotides, about 700 nucleotides, about 600 nucleotides, about 500 nucleotides, about 400 nucleotides, about 300 nucleotides, about 200 nucleotides, about 100 nucleotides, about 80 nucleotides, about 70 nucleotides, about 60 nucleotides, about 50 nucleotides upstream of SEQ ID NO: 288. In some cases, the targeted region of the pre-mRNA is at most about 1500 nucleotides, about 1000 nucleotides, about 800 nucleotides, about 700 nucleotides, about 600 nucleotides, about 500 nucleotides, about 400 nucleotides, about 300 nucleotides, about 200 nucleotides, about 100 nucleotides, about 80 nucleotides, about 70 nucleotides, about 60 nucleotides, about 50 nucleotides upstream of genomic site GRCh38/hg38: chr1 92833545. In some cases, the targeted region of the pre-mRNA is at least about 1500 nucleotides, about 1000 nucleotides, about 800 nucleotides, about 700 nucleotides, about 600 nucleotides, about 500 nucleotides, about 400 nucleotides, about 300 nucleotides, about 200 nucleotides, about 100 nucleotides, about 80 nucleotides, about 70 nucleotides, about 60 nucleotides, about 50 nucleotides upstream of genomic site GRCh38/hg38: chr1 92833545. In some cases, the targeted region of the pre-mRNA is at most about 1500 nucleotides, about 1000 nucleotides, about 800 nucleotides, about 700 nucleotides, about 600 nucleotides, about 500 nucleotides, about 400 nucleotides, about 300 nucleotides, about 200 nucleotides, about 100 nucleotides, about 80 nucleotides, about 70 nucleotides, about 60 nucleotides, about 50 nucleotides downstream of SEQ ID NO: 288. In some cases, the targeted region of the pre-mRNA is at least about 1500 nucleotides, about 1000 nucleotides, about 800 nucleotides, about 700 nucleotides, about 600 nucleotides, about 500 nucleotides, about 400 nucleotides, about 300 nucleotides, about 200 nucleotides, about 100 nucleotides, about 80 nucleotides, about 70 nucleotides, about 60 nucleotides, about 50 nucleotides downstream of SEQ ID NO: 288. In some cases, the targeted region of the pre-mRNA is at most about 1500 nucleotides, about 1000 nucleotides, about 800 nucleotides, about 700 nucleotides, about 600 nucleotides, about 500 nucleotides, about 400 nucleotides, about 300 nucleotides, about 200 nucleotides, about 100 nucleotides, about 80 nucleotides, about 70 nucleotides, about 60 nucleotides, about 50 nucleotides downstream of genomic site GRCh38/hg38: chr1 92833660. In some cases. the targeted region of the pre-mRNA is at least about 1500 nucleotides, about 1000 nucleotides, about 800 nucleotides, about 700 nucleotides, about 600 nucleotides, about 500 nucleotides, about 400 nucleotides, about 300 nucleotides, about 200 nucleotides, about 100 nucleotides, about 80 nucleotides, about 70 nucleotides, about 60 nucleotides, about 50 nucleotides downstream of genomic site GRCh38/hg38: chr1 92833660. In some cases, the targeted region of the pre-mRNA is within a sequence SEQ ID NO: 288. In some cases, the targeted region of the pre-mRNA is within a sequence between a pair of genomic sites GRCh38/hg38: chr1 92833545, and GRCh38/hg38: chr1 92833660. In some cases, the therapeutic agent is an antisense oligomer complementary to a sequence with at least about 80%, 85%, 90%, 95%, 96%, 97%, 98%, 99% or 100% sequence identity to SEQ ID NO:288. In some cases, the therapeutic agent is an antisense oligomer complementary to a sequence with 100% sequence identity to SEQ ID NO:288. In some cases, the therapeutic agent is an antisense oligomer that has a sequence with at least about 80%, 85%, 90%, 95%, 96%, 97%, 98%, 99% or 100% sequence identity to a sequence selected from the group consisting of SEQ ID NOs: 6265-6326. In some cases, the therapeutic agent is an antisense oligomer that has a sequence selected from the group consisting of SEQ ID NOs: 6265-6326. In some cases, the target peptide sequence is a portion of RPL5 protein, and the method treats a disease or the condition that comprises Congenital anemia; Hematologic Neoplasms; Anemia, Diamond-Blackfan; Cytopenia; Aase Smith syndrome 2; Radial club hand; Precursor T-Cell Lymphoblastic Leukemia-Lymphoma; or Diamond-Blackfan anemia 6. In some cases, the method treats a cancer that is associated with RPL5 protein.

[0269] RPS20

[0270] In some cases, the target peptide sequence is a portion of RPS20 protein. In some cases, the therapeutic agent increases level of a first processed mRNA encoding a protein having a sequence SEQ ID NO: 8255, and decreases level of a second processed mRNA encoding a protein having a sequence SEQ ID NO: 491. In some cases, the targeted region of the pre-mRNA is at most about 1500 nucleotides, about 1000 nucleotides, about 800 nucleotides, about 700 nucleotides, about 600 nucleotides, about 500 nucleotides, about 400 nucleotides, about 300 nucleotides, about 200 nucleotides, about 100 nucleotides, about 80 nucleotides, about 70 nucleotides, about 60 nucleotides, about 50 nucleotides upstream of SEQ ID NO: 289. In some cases, the targeted region of the pre-mRNA is at least about 1500 nucleotides, about 1000 nucleotides, about 800 nucleotides, about 700 nucleotides, about 600 nucleotides, about 500 nucleotides, about 400 nucleotides, about 300 nucleotides, about 200 nucleotides, about 100 nucleotides, about 80 nucleotides, about 70 nucleotides, about 60 nucleotides, about 50 nucleotides upstream of SEQ ID NO: 289. In some cases, the targeted region of the pre-mRNA is at most about 1500 nucleotides, about 1000 nucleotides, about 800 nucleotides, about 700 nucleotides, about 600 nucleotides, about 500 nucleotides, about 400 nucleotides, about 300 nucleotides, about 200 nucleotides, about 100 nucleotides, about 80 nucleotides, about 70 nucleotides, about 60 nucleotides, about 50 nucleotides upstream of genomic site GRCh38/hg38: chr8 56073768. In some cases, the targeted region of the pre-mRNA is at least about 1500 nucleotides, about 1000 nucleotides, about 800 nucleotides, about 700 nucleotides, about 600 nucleotides, about 500 nucleotides, about 400 nucleotides, about 300 nucleotides, about 200 nucleotides, about 100 nucleotides, about 80 nucleotides, about 70 nucleotides, about 60 nucleotides, about 50 nucleotides upstream of genomic site GRCh38/hg38: chr8 56073768. In some cases, the targeted region of the pre-mRNA is at most about 1500 nucleotides, about 1000 nucleotides, about 800 nucleotides, about 700 nucleotides, about 600 nucleotides, about 500 nucleotides, about 400 nucleotides, about 300 nucleotides, about 200 nucleotides, about 100 nucleotides, about 80 nucleotides, about 70 nucleotides, about 60 nucleotides, about 50 nucleotides downstream of SEQ ID NO: 289. In some cases, the targeted region of the pre-mRNA is at least about 1500 nucleotides, about 1000 nucleotides, about 800 nucleotides, about 700 nucleotides, about 600 nucleotides, about 500 nucleotides, about 400 nucleotides, about 300 nucleotides, about 200 nucleotides, about 100 nucleotides, about 80 nucleotides, about 70 nucleotides, about 60 nucleotides, about 50 nucleotides downstream of SEQ ID NO: 289. In some cases, the targeted region of the pre-mRNA is at most about 1500 nucleotides, about 1000 nucleotides, about 800 nucleotides, about 700 nucleotides, about 600 nucleotides, about 500 nucleotides, about 400 nucleotides, about 300 nucleotides, about 200 nucleotides, about 100 nucleotides, about 80 nucleotides, about 70 nucleotides, about 60 nucleotides, about 50 nucleotides downstream of genomic site GRCh38/hg38: chr8 56073695. In some cases. the targeted region of the pre-mRNA is at least about 1500 nucleotides, about 1000 nucleotides, about 800 nucleotides, about 700 nucleotides, about 600 nucleotides, about 500 nucleotides, about 400 nucleotides, about 300 nucleotides, about 200 nucleotides, about 100 nucleotides, about 80 nucleotides, about 70 nucleotides, about 60 nucleotides, about 50 nucleotides downstream of genomic site GRCh38/hg38: chr8 56073695. In some cases, the targeted region of the pre-mRNA is within a sequence SEQ ID NO: 289. In some cases, the targeted region of the pre-mRNA is within a sequence between a pair of genomic sites GRCh38/hg38: chr8 56073768, and GRCh38/hg38: chr8 56073695. In some cases, the therapeutic agent is an antisense oligomer complementary to a sequence with at least about 80%, 85%, 90%, 95%, 96%, 97%, 98%, 99% or 100% sequence identity to SEQ ID NO:289. In some cases, the therapeutic agent is an antisense oligomer complementary to a sequence with 100% sequence identity to SEQ ID NO:289. In some cases, the therapeutic agent is an antisense oligomer that has a sequence with at least about 80%, 85%, 90%, 95%, 96%, 97%, 98%, 99% or 100% sequence identity to a sequence selected from the group consisting of SEQ ID NOs: 6327-6380. In some cases, the therapeutic agent is an antisense oligomer that has a sequence selected from the group consisting of SEQ ID NOs: 6327-6380. In some cases, the target peptide sequence is a portion of RPS20 protein, and the method treats a disease or the condition that comprises Hereditary non-polyposis colorectal cancer syndrome; Familial Colorectal Cancer Type X; Hereditary Nonpolyposis Colorectal Cancer; or Hereditary Nonpolyposis Colorectal Neoplasms.

[0271] SECISBP2

[0272] In some cases, the target peptide sequence is a portion of SECISBP2 protein. In some cases, the therapeutic agent increases level of a first processed mRNA encoding a protein having a sequence SEQ ID NO: 8256, and decreases level of a second processed mRNA encoding a protein having a sequence SEQ ID NO: 492. In some cases, the targeted region of the pre-mRNA is at most about 1500 nucleotides, about 1000 nucleotides, about 800 nucleotides, about 700 nucleotides, about 600 nucleotides, about 500 nucleotides, about 400 nucleotides, about 300 nucleotides, about 200 nucleotides, about 100 nucleotides, about 80 nucleotides, about 70 nucleotides, about 60 nucleotides, about 50 nucleotides upstream of SEQ ID NO: 290. In some cases, the targeted region of the pre-mRNA is at least about 1500 nucleotides, about 1000 nucleotides, about 800 nucleotides, about 700 nucleotides, about 600 nucleotides, about 500 nucleotides, about 400 nucleotides, about 300 nucleotides, about 200 nucleotides, about 100 nucleotides, about 80 nucleotides, about 70 nucleotides, about 60 nucleotides, about 50 nucleotides upstream of SEQ ID NO: 290. In some cases, the targeted region of the pre-mRNA is at most about 1500 nucleotides, about 1000 nucleotides, about 800 nucleotides, about 700 nucleotides, about 600 nucleotides, about 500 nucleotides, about 400 nucleotides, about 300 nucleotides, about 200 nucleotides, about 100 nucleotides, about 80 nucleotides, about 70 nucleotides, about 60 nucleotides, about 50 nucleotides upstream of genomic site GRCh38/hg38: chr9 89325427. In some cases, the targeted region of the pre-mRNA is at least about 1500 nucleotides, about 1000 nucleotides, about 800 nucleotides, about 700 nucleotides, about 600 nucleotides, about 500 nucleotides, about 400 nucleotides, about 300 nucleotides, about 200 nucleotides, about 100 nucleotides, about 80 nucleotides, about 70 nucleotides, about 60 nucleotides, about 50 nucleotides upstream of genomic site GRCh38/hg38: chr9 89325427. In some cases, the targeted region of the pre-mRNA is at most about 1500 nucleotides, about 1000 nucleotides, about 800 nucleotides, about 700 nucleotides, about 600 nucleotides, about 500 nucleotides, about 400 nucleotides, about 300 nucleotides, about 200 nucleotides, about 100 nucleotides, about 80 nucleotides, about 70 nucleotides, about 60 nucleotides, about 50 nucleotides downstream of SEQ ID NO: 290. In some cases, the targeted region of the pre-mRNA is at least about 1500 nucleotides, about 1000 nucleotides, about 800 nucleotides, about 700 nucleotides, about 600 nucleotides, about 500 nucleotides, about 400 nucleotides, about 300 nucleotides, about 200 nucleotides, about 100 nucleotides, about 80 nucleotides, about 70 nucleotides, about 60 nucleotides, about 50 nucleotides downstream of SEQ ID NO: 290. In some cases, the targeted region of the pre-mRNA is at most about 1500 nucleotides, about 1000 nucleotides, about 800 nucleotides, about 700 nucleotides, about 600 nucleotides, about 500 nucleotides, about 400 nucleotides, about 300 nucleotides, about 200 nucleotides, about 100 nucleotides, about 80 nucleotides, about 70 nucleotides, about 60 nucleotides, about 50 nucleotides downstream of genomic site GRCh38/hg38: chr9 89325676. In some cases. the targeted region of the pre-mRNA is at least about 1500 nucleotides, about 1000 nucleotides, about 800 nucleotides, about 700 nucleotides, about 600 nucleotides, about 500 nucleotides, about 400 nucleotides, about 300 nucleotides, about 200 nucleotides, about 100 nucleotides, about 80 nucleotides, about 70 nucleotides, about 60 nucleotides, about 50 nucleotides downstream of genomic site GRCh38/hg38: chr9 89325676. In some cases, the targeted region of the pre-mRNA is within a sequence SEQ ID NO: 290. In some cases, the targeted region of the pre-mRNA is within a sequence between a pair of genomic sites GRCh38/hg38: chr9 89325427, and GRCh38/hg38: chr9 89325676. In some cases, the therapeutic agent is an antisense oligomer complementary to a sequence with at least about 80%, 85%, 90%, 95%, 96%, 97%, 98%, 99% or 100% sequence identity to SEQ ID NO:290. In some cases, the therapeutic agent is an antisense oligomer complementary to a sequence with 100% sequence identity to SEQ ID NO:290. In some cases, the therapeutic agent is an antisense oligomer that has a sequence with at least about 80%, 85%, 90%, 95%, 96%, 97%, 98%, 99% or 100% sequence identity to a sequence selected from the group consisting of SEQ ID NOs: 6381-6469. In some cases, the therapeutic agent is an antisense oligomer that has a sequence selected from the group consisting of SEQ ID NOs: 6381-6469. In some cases, the target peptide sequence is a portion of SECISBP2 protein, and the method treats a disease or the condition that comprises Thyroid Hormone Metabolism, Abnormal; or Thyroid Hormone Resistance Syndrome.

[0273] SELENBP1

[0274] In some cases, the target peptide sequence is a portion of SELENBP1 protein. In some cases, the therapeutic agent increases level of a first processed mRNA encoding a protein having a sequence SEQ ID NO: 8257, and decreases level of a second processed mRNA encoding a protein having a sequence SEQ ID NO: 493. In some cases, the targeted region of the pre-mRNA is at most about 1500 nucleotides, about 1000 nucleotides, about 800 nucleotides, about 700 nucleotides, about 600 nucleotides, about 500 nucleotides, about 400 nucleotides, about 300 nucleotides, about 200 nucleotides, about 100 nucleotides, about 80 nucleotides, about 70 nucleotides, about 60 nucleotides, about 50 nucleotides upstream of SEQ ID NO: 291. In some cases, the targeted region of the pre-mRNA is at least about 1500 nucleotides, about 1000 nucleotides, about 800 nucleotides, about 700 nucleotides, about 600 nucleotides, about 500 nucleotides, about 400 nucleotides, about 300 nucleotides, about 200 nucleotides, about 100 nucleotides, about 80 nucleotides, about 70 nucleotides, about 60 nucleotides, about 50 nucleotides upstream of SEQ ID NO: 291. In some cases, the targeted region of the pre-mRNA is at most about 1500 nucleotides, about 1000 nucleotides, about 800 nucleotides, about 700 nucleotides, about 600 nucleotides, about 500 nucleotides, about 400 nucleotides, about 300 nucleotides, about 200 nucleotides, about 100 nucleotides, about 80 nucleotides, about 70 nucleotides, about 60 nucleotides, about 50 nucleotides upstream of genomic site GRCh38/hg38: chr1 151369978. In some cases, the targeted region of the pre-mRNA is at least about 1500 nucleotides, about 1000 nucleotides, about 800 nucleotides, about 700 nucleotides, about 600 nucleotides, about 500 nucleotides, about 400 nucleotides, about 300 nucleotides, about 200 nucleotides, about 100 nucleotides, about 80 nucleotides, about 70 nucleotides, about 60 nucleotides, about 50 nucleotides upstream of genomic site GRCh38/hg38: chr1 151369978. In some cases, the targeted region of the pre-mRNA is at most about 1500 nucleotides, about 1000 nucleotides, about 800 nucleotides, about 700 nucleotides, about 600 nucleotides, about 500 nucleotides, about 400 nucleotides, about 300 nucleotides, about 200 nucleotides, about 100 nucleotides, about 80 nucleotides, about 70 nucleotides, about 60 nucleotides, about 50 nucleotides downstream of SEQ ID NO: 291. In some cases, the targeted region of the pre-mRNA is at least about 1500 nucleotides, about 1000 nucleotides, about 800 nucleotides, about 700 nucleotides, about 600 nucleotides, about 500 nucleotides, about 400 nucleotides, about 300 nucleotides, about 200 nucleotides, about 100 nucleotides, about 80 nucleotides, about 70 nucleotides, about 60 nucleotides, about 50 nucleotides downstream of SEQ ID NO: 291. In some cases, the targeted region of the pre-mRNA is at most about 1500 nucleotides, about 1000 nucleotides, about 800 nucleotides, about 700 nucleotides, about 600 nucleotides, about 500 nucleotides, about 400 nucleotides, about 300 nucleotides, about 200 nucleotides, about 100 nucleotides, about 80 nucleotides, about 70 nucleotides, about 60 nucleotides, about 50 nucleotides downstream of genomic site GRCh38/hg38: chr1 151369713. In some cases. the targeted region of the pre-mRNA is at least about 1500 nucleotides, about 1000 nucleotides, about 800 nucleotides, about 700 nucleotides, about 600 nucleotides, about 500 nucleotides, about 400 nucleotides, about 300 nucleotides, about 200 nucleotides, about 100 nucleotides, about 80 nucleotides, about 70 nucleotides, about 60 nucleotides, about 50 nucleotides downstream of genomic site GRCh38/hg38: chr1 151369713. In some cases, the targeted region of the pre-mRNA is within a sequence SEQ ID NO: 291. In some cases, the targeted region of the pre-mRNA is within a sequence between a pair of genomic sites GRCh38/hg38: chr1 151369978, and GRCh38/hg38: chr1 151369713. In some cases, the therapeutic agent is an antisense oligomer complementary to a sequence with at least about 80%, 85%, 90%, 95%, 96%, 97%, 98%, 99% or 100% sequence identity to SEQ ID NO:291. In some cases, the therapeutic agent is an antisense oligomer complementary to a sequence with 100% sequence identity to SEQ ID NO:291. In some cases, the therapeutic agent increases level of a first processed mRNA encoding a protein having a sequence SEQ ID NO: 8258, and decreases level of a second processed mRNA encoding a protein having a sequence SEQ ID NO: 494. In some cases, the targeted region of the pre-mRNA is at most about 1500 nucleotides, about 1000 nucleotides, about 800 nucleotides, about 700 nucleotides, about 600 nucleotides, about 500 nucleotides, about 400 nucleotides, about 300 nucleotides, about 200 nucleotides, about 100 nucleotides, about 80 nucleotides, about 70 nucleotides, about 60 nucleotides, about 50 nucleotides upstream of SEQ ID NO: 292. In some cases, the targeted region of the pre-mRNA is at least about 1500 nucleotides, about 1000 nucleotides, about 800 nucleotides, about 700 nucleotides, about 600 nucleotides, about 500 nucleotides, about 400 nucleotides, about 300 nucleotides, about 200 nucleotides, about 100 nucleotides, about 80 nucleotides, about 70 nucleotides, about 60 nucleotides, about 50 nucleotides upstream of SEQ ID NO: 292. In some cases, the targeted region of the pre-mRNA is at most about 1500 nucleotides, about 1000 nucleotides, about 800 nucleotides, about 700 nucleotides, about 600 nucleotides, about 500 nucleotides, about 400 nucleotides, about 300 nucleotides, about 200 nucleotides, about 100 nucleotides, about 80 nucleotides, about 70 nucleotides, about 60 nucleotides, about 50 nucleotides upstream of genomic site GRCh38/hg38: chr1 151369978. In some cases, the targeted region of the pre-mRNA is at least about 1500 nucleotides, about 1000 nucleotides, about 800 nucleotides, about 700 nucleotides, about 600 nucleotides, about 500 nucleotides, about 400 nucleotides, about 300 nucleotides, about 200 nucleotides, about 100 nucleotides, about 80 nucleotides, about 70 nucleotides, about 60 nucleotides, about 50 nucleotides upstream of genomic site GRCh38/hg38: chr1 151369978. In some cases, the targeted region of the pre-mRNA is at most about 1500 nucleotides, about 1000 nucleotides, about 800 nucleotides, about 700 nucleotides, about 600 nucleotides, about 500 nucleotides, about 400 nucleotides, about 300 nucleotides, about 200 nucleotides, about 100 nucleotides, about 80 nucleotides, about 70 nucleotides, about 60 nucleotides, about 50 nucleotides downstream of SEQ ID NO: 292. In some cases, the targeted region of the pre-mRNA is at least about 1500 nucleotides, about 1000 nucleotides, about 800 nucleotides, about 700 nucleotides, about 600 nucleotides, about 500 nucleotides, about 400 nucleotides, about 300 nucleotides, about 200 nucleotides, about 100 nucleotides, about 80 nucleotides, about 70 nucleotides, about 60 nucleotides, about 50 nucleotides downstream of SEQ ID NO: 292. In some cases, the targeted region of the pre-mRNA is at most about 1500 nucleotides, about 1000 nucleotides, about 800 nucleotides, about 700 nucleotides, about 600 nucleotides, about 500 nucleotides, about 400 nucleotides, about 300 nucleotides, about 200 nucleotides, about 100 nucleotides, about 80 nucleotides, about 70 nucleotides, about 60 nucleotides, about 50 nucleotides downstream of genomic site GRCh38/hg38: chr1 151369713. In some cases. the targeted region of the pre-mRNA is at least about 1500 nucleotides, about 1000 nucleotides, about 800 nucleotides, about 700 nucleotides, about 600 nucleotides, about 500 nucleotides, about 400 nucleotides, about 300 nucleotides, about 200 nucleotides, about 100 nucleotides, about 80 nucleotides, about 70 nucleotides, about 60 nucleotides, about 50 nucleotides downstream of genomic site GRCh38/hg38: chr1 151369713. In some cases, the targeted region of the pre-mRNA is within a sequence SEQ ID NO: 292. In some cases, the targeted region of the pre-mRNA is within a sequence between a pair of genomic sites GRCh38/hg38: chr1 151369978, and GRCh38/hg38: chr1 151369713. In some cases, the therapeutic agent is an antisense oligomer complementary to a sequence with at least about 80%, 85%, 90%, 95%, 96%, 97%, 98%, 99% or 100% sequence identity to SEQ ID NO:292. In some cases, the therapeutic agent is an antisense oligomer complementary to a sequence with 100% sequence identity to SEQ ID NO:292. In some cases, the therapeutic agent is an antisense oligomer that has a sequence with at least about 80%, 85%, 90%, 95%, 96%, 97%, 98%, 99% or 100% sequence identity to a sequence selected from the group consisting of SEQ ID NOs: 6470-6561. In some cases, the therapeutic agent is an antisense oligomer that has a sequence selected from the group consisting of SEQ ID NOs: 6470-6561. In some cases, the target peptide sequence is a portion of SELENBP1 protein, and the method treats a cancer that is associated with SELENBP1 protein.

[0275] SEPT11

[0276] In some cases, the target peptide sequence is a portion of SEPT11 protein. In some cases, the therapeutic agent increases level of a first processed mRNA encoding a protein having a sequence SEQ ID NO: 8259, and decreases level of a second processed mRNA encoding a protein having a sequence SEQ ID NO: 495. In some cases, the targeted region of the pre-mRNA is at most about 1500 nucleotides, about 1000 nucleotides, about 800 nucleotides, about 700 nucleotides, about 600 nucleotides, about 500 nucleotides, about 400 nucleotides, about 300 nucleotides, about 200 nucleotides, about 100 nucleotides, about 80 nucleotides, about 70 nucleotides, about 60 nucleotides, about 50 nucleotides upstream of SEQ ID NO: 293. In some cases, the targeted region of the pre-mRNA is at least about 1500 nucleotides, about 1000 nucleotides, about 800 nucleotides, about 700 nucleotides, about 600 nucleotides, about 500 nucleotides, about 400 nucleotides, about 300 nucleotides, about 200 nucleotides, about 100 nucleotides, about 80 nucleotides, about 70 nucleotides, about 60 nucleotides, about 50 nucleotides upstream of SEQ ID NO: 293. In some cases, the targeted region of the pre-mRNA is at most about 1500 nucleotides, about 1000 nucleotides, about 800 nucleotides, about 700 nucleotides, about 600 nucleotides, about 500 nucleotides, about 400 nucleotides, about 300 nucleotides, about 200 nucleotides, about 100 nucleotides, about 80 nucleotides, about 70 nucleotides, about 60 nucleotides, about 50 nucleotides upstream of genomic site GRCh38/hg38: chr4 76995781. In some cases, the targeted region of the pre-mRNA is at least about 1500 nucleotides, about 1000 nucleotides, about 800 nucleotides, about 700 nucleotides, about 600 nucleotides, about 500 nucleotides, about 400 nucleotides, about 300 nucleotides, about 200 nucleotides, about 100 nucleotides, about 80 nucleotides, about 70 nucleotides, about 60 nucleotides, about 50 nucleotides upstream of genomic site GRCh38/hg38: chr4 76995781. In some cases, the targeted region of the pre-mRNA is at most about 1500 nucleotides, about 1000 nucleotides, about 800 nucleotides, about 700 nucleotides, about 600 nucleotides, about 500 nucleotides, about 400 nucleotides, about 300 nucleotides, about 200 nucleotides, about 100 nucleotides, about 80 nucleotides, about 70 nucleotides, about 60 nucleotides, about 50 nucleotides downstream of SEQ ID NO: 293. In some cases, the targeted region of the pre-mRNA is at least about 1500 nucleotides, about 1000 nucleotides, about 800 nucleotides, about 700 nucleotides, about 600 nucleotides, about 500 nucleotides, about 400 nucleotides, about 300 nucleotides, about 200 nucleotides, about 100 nucleotides, about 80 nucleotides, about 70 nucleotides, about 60 nucleotides, about 50 nucleotides downstream of SEQ ID NO: 293. In some cases, the targeted region of the pre-mRNA is at most about 1500 nucleotides, about 1000 nucleotides, about 800 nucleotides, about 700 nucleotides, about 600 nucleotides, about 500 nucleotides, about 400 nucleotides, about 300 nucleotides, about 200 nucleotides, about 100 nucleotides, about 80 nucleotides, about 70 nucleotides, about 60 nucleotides, about 50 nucleotides downstream of genomic site GRCh38/hg38: chr4 76995938. In some cases. the targeted region of the pre-mRNA is at least about 1500 nucleotides, about 1000 nucleotides, about 800 nucleotides, about 700 nucleotides, about 600 nucleotides, about 500 nucleotides, about 400 nucleotides, about 300 nucleotides, about 200 nucleotides, about 100 nucleotides, about 80 nucleotides, about 70 nucleotides, about 60 nucleotides, about 50 nucleotides downstream of genomic site GRCh38/hg38: chr4 76995938. In some cases, the targeted region of the pre-mRNA is within a sequence SEQ ID NO: 293. In some cases, the targeted region of the pre-mRNA is within a sequence between a pair of genomic sites GRCh38/hg38: chr4 76995781, and GRCh38/hg38: chr4 76995938. In some cases, the therapeutic agent is an antisense oligomer complementary to a sequence with at least about 80%, 85%, 90%, 95%, 96%, 97%, 98%, 99% or 100% sequence identity to SEQ ID NO:293. In some cases, the therapeutic agent is an antisense oligomer complementary to a sequence with 100% sequence identity to SEQ ID NO:293. In some cases, the therapeutic agent is an antisense oligomer that has a sequence with at least about 80%, 85%, 90%, 95%, 96%, 97%, 98%, 99% or 100% sequence identity to a sequence selected from the group consisting of SEQ ID NOs: 6562-6632. In some cases, the therapeutic agent is an antisense oligomer that has a sequence selected from the group consisting of SEQ ID NOs: 6562-6632. In some cases, the target peptide sequence is a portion of SEPT11 protein, and the method treats a disease or the condition that comprises Bipolar Disorder; or Schizophrenia.

[0277] SIRT2

[0278] In some cases, the target peptide sequence is a portion of SIRT2 protein. In some cases, the therapeutic agent increases level of a first processed mRNA encoding a protein having a sequence SEQ ID NO: 8260, and decreases level of a second processed mRNA encoding a protein having a sequence SEQ ID NO: 496. In some cases, the targeted region of the pre-mRNA is at most about 1500 nucleotides, about 1000 nucleotides, about 800 nucleotides, about 700 nucleotides, about 600 nucleotides, about 500 nucleotides, about 400 nucleotides, about 300 nucleotides, about 200 nucleotides, about 100 nucleotides, about 80 nucleotides, about 70 nucleotides, about 60 nucleotides, about 50 nucleotides upstream of SEQ ID NO: 294. In some cases, the targeted region of the pre-mRNA is at least about 1500 nucleotides, about 1000 nucleotides, about 800 nucleotides, about 700 nucleotides, about 600 nucleotides, about 500 nucleotides, about 400 nucleotides, about 300 nucleotides, about 200 nucleotides, about 100 nucleotides, about 80 nucleotides, about 70 nucleotides, about 60 nucleotides, about 50 nucleotides upstream of SEQ ID NO: 294. In some cases, the targeted region of the pre-mRNA is at most about 1500 nucleotides, about 1000 nucleotides, about 800 nucleotides, about 700 nucleotides, about 600 nucleotides, about 500 nucleotides, about 400 nucleotides, about 300 nucleotides, about 200 nucleotides, about 100 nucleotides, about 80 nucleotides, about 70 nucleotides, about 60 nucleotides, about 50 nucleotides upstream of genomic site GRCh38/hg38: chr19 38893867. In some cases, the targeted region of the pre-mRNA is at least about 1500 nucleotides, about 1000 nucleotides, about 800 nucleotides, about 700 nucleotides, about 600 nucleotides, about 500 nucleotides, about 400 nucleotides, about 300 nucleotides, about 200 nucleotides, about 100 nucleotides, about 80 nucleotides, about 70 nucleotides, about 60 nucleotides, about 50 nucleotides upstream of genomic site GRCh38/hg38: chr19 38893867. In some cases, the targeted region of the pre-mRNA is at most about 1500 nucleotides, about 1000 nucleotides, about 800 nucleotides, about 700 nucleotides, about 600 nucleotides, about 500 nucleotides, about 400 nucleotides, about 300 nucleotides, about 200 nucleotides, about 100 nucleotides, about 80 nucleotides, about 70 nucleotides, about 60 nucleotides, about 50 nucleotides downstream of SEQ ID NO: 294. In some cases, the targeted region of the pre-mRNA is at least about 1500 nucleotides, about 1000 nucleotides, about 800 nucleotides, about 700 nucleotides, about 600 nucleotides, about 500 nucleotides, about 400 nucleotides, about 300 nucleotides, about 200 nucleotides, about 100 nucleotides, about 80 nucleotides, about 70 nucleotides, about 60 nucleotides, about 50 nucleotides downstream of SEQ ID NO: 294. In some cases, the targeted region of the pre-mRNA is at most about 1500 nucleotides, about 1000 nucleotides, about 800 nucleotides, about 700 nucleotides, about 600 nucleotides, about 500 nucleotides, about 400 nucleotides, about 300 nucleotides, about 200 nucleotides, about 100 nucleotides, about 80 nucleotides, about 70 nucleotides, about 60 nucleotides, about 50 nucleotides downstream of genomic site GRCh38/hg38: chr19 38893819. In some cases. the targeted region of the pre-mRNA is at least about 1500 nucleotides, about 1000 nucleotides, about 800 nucleotides, about 700 nucleotides, about 600 nucleotides, about 500 nucleotides, about 400 nucleotides, about 300 nucleotides, about 200 nucleotides, about 100 nucleotides, about 80 nucleotides, about 70 nucleotides, about 60 nucleotides, about 50 nucleotides downstream of genomic site GRCh38/hg38: chr19 38893819. In some cases, the targeted region of the pre-mRNA is within a sequence SEQ ID NO: 294. In some cases, the targeted region of the pre-mRNA is within a sequence between a pair of genomic sites GRCh38/hg38: chr19 38893867, and GRCh38/hg38: chr19 38893819. In some cases, the therapeutic agent is an antisense oligomer complementary to a sequence with at least about 80%, 85%, 90%, 95%, 96%, 97%, 98%, 99% or 100% sequence identity to SEQ ID NO:294. In some cases, the therapeutic agent is an antisense oligomer complementary to a sequence with 100% sequence identity to SEQ ID NO:294. In some cases, the therapeutic agent increases level of a first processed mRNA encoding a protein having a sequence SEQ ID NO: 8261, and decreases level of a second processed mRNA encoding a protein having a sequence SEQ ID NO: 497. In some cases, the targeted region of the pre-mRNA is at most about 1500 nucleotides, about 1000 nucleotides, about 800 nucleotides, about 700 nucleotides, about 600 nucleotides, about 500 nucleotides, about 400 nucleotides, about 300 nucleotides, about 200 nucleotides, about 100 nucleotides, about 80 nucleotides, about 70 nucleotides, about 60 nucleotides, about 50 nucleotides upstream of SEQ ID NO: 295. In some cases, the targeted region of the pre-mRNA is at least about 1500 nucleotides, about 1000 nucleotides, about 800 nucleotides, about 700 nucleotides, about 600 nucleotides, about 500 nucleotides, about 400 nucleotides, about 300 nucleotides, about 200 nucleotides, about 100 nucleotides, about 80 nucleotides, about 70 nucleotides, about 60 nucleotides, about 50 nucleotides upstream of SEQ ID NO: 295. In some cases, the targeted region of the pre-mRNA is at most about 1500 nucleotides, about 1000 nucleotides, about 800 nucleotides, about 700 nucleotides, about 600 nucleotides, about 500 nucleotides, about 400 nucleotides, about 300 nucleotides, about 200 nucleotides, about 100 nucleotides, about 80 nucleotides, about 70 nucleotides, about 60 nucleotides, about 50 nucleotides upstream of genomic site GRCh38/hg38: chr19 38893867. In some cases, the targeted region of the pre-mRNA is at least about 1500 nucleotides, about 1000 nucleotides, about 800 nucleotides, about 700 nucleotides, about 600 nucleotides, about 500 nucleotides, about 400 nucleotides, about 300 nucleotides, about 200 nucleotides, about 100 nucleotides, about 80 nucleotides, about 70 nucleotides, about 60 nucleotides, about 50 nucleotides upstream of genomic site GRCh38/hg38: chr19 38893867. In some cases, the targeted region of the pre-mRNA is at most about 1500 nucleotides, about 1000 nucleotides, about 800 nucleotides, about 700 nucleotides, about 600 nucleotides, about 500 nucleotides, about 400 nucleotides, about 300 nucleotides, about 200 nucleotides, about 100 nucleotides, about 80 nucleotides, about 70 nucleotides, about 60 nucleotides, about 50 nucleotides downstream of SEQ ID NO: 295. In some cases, the targeted region of the pre-mRNA is at least about 1500 nucleotides, about 1000 nucleotides, about 800 nucleotides, about 700 nucleotides, about 600 nucleotides, about 500 nucleotides, about 400 nucleotides, about 300 nucleotides, about 200 nucleotides, about 100 nucleotides, about 80 nucleotides, about 70 nucleotides, about 60 nucleotides, about 50 nucleotides downstream of SEQ ID NO: 295. In some cases, the targeted region of the pre-mRNA is at most about 1500 nucleotides, about 1000 nucleotides, about 800 nucleotides, about 700 nucleotides, about 600 nucleotides, about 500 nucleotides, about 400 nucleotides, about 300 nucleotides, about 200 nucleotides, about 100 nucleotides, about 80 nucleotides, about 70 nucleotides, about 60 nucleotides, about 50 nucleotides downstream of genomic site GRCh38/hg38: chr19 38893819. In some cases. the targeted region of the pre-mRNA is at least about 1500 nucleotides, about 1000 nucleotides, about 800 nucleotides, about 700 nucleotides, about 600 nucleotides, about 500 nucleotides, about 400 nucleotides, about 300 nucleotides, about 200 nucleotides, about 100 nucleotides, about 80 nucleotides, about 70 nucleotides, about 60 nucleotides, about 50 nucleotides downstream of genomic site GRCh38/hg38: chr19 38893819. In some cases, the targeted region of the pre-mRNA is within a sequence SEQ ID NO: 295. In some cases, the targeted region of the pre-mRNA is within a sequence between a pair of genomic sites GRCh38/hg38: chr19 38893867, and GRCh38/hg38: chr19 38893819. In some cases, the therapeutic agent is an antisense oligomer complementary to a sequence with at least about 80%, 85%, 90%, 95%, 96%, 97%, 98%, 99% or 100% sequence identity to SEQ ID NO:295. In some cases, the therapeutic agent is an antisense oligomer complementary to a sequence with 100% sequence identity to SEQ ID NO:295. In some cases, the therapeutic agent increases level of a first processed mRNA encoding a protein having a sequence SEQ ID NO: 8262, and decreases level of a second processed mRNA encoding a protein having a sequence SEQ ID NO: 498. In some cases, the targeted region of the pre-mRNA is at most about 1500 nucleotides, about 1000 nucleotides, about 800 nucleotides, about 700 nucleotides, about 600 nucleotides, about 500 nucleotides, about 400 nucleotides, about 300 nucleotides, about 200 nucleotides, about 100 nucleotides, about 80 nucleotides, about 70 nucleotides, about 60 nucleotides, about 50 nucleotides upstream of SEQ ID NO: 296. In some cases, the targeted region of the pre-mRNA is at least about 1500 nucleotides, about 1000 nucleotides, about 800 nucleotides, about 700 nucleotides, about 600 nucleotides, about 500 nucleotides, about 400 nucleotides, about 300 nucleotides, about 200 nucleotides, about 100 nucleotides, about 80 nucleotides, about 70 nucleotides, about 60 nucleotides, about 50 nucleotides upstream of SEQ ID NO: 296. In some cases, the targeted region of the pre-mRNA is at most about 1500 nucleotides, about 1000 nucleotides, about 800 nucleotides, about 700 nucleotides, about 600 nucleotides, about 500 nucleotides, about 400 nucleotides, about 300 nucleotides, about 200 nucleotides, about 100 nucleotides, about 80 nucleotides, about 70 nucleotides, about 60 nucleotides, about 50 nucleotides upstream of genomic site GRCh38/hg38: chr19 38893867. In some cases, the targeted region of the pre-mRNA is at least about 1500 nucleotides, about 1000 nucleotides, about 800 nucleotides, about 700 nucleotides, about 600 nucleotides, about 500 nucleotides, about 400 nucleotides, about 300 nucleotides, about 200 nucleotides, about 100 nucleotides, about 80 nucleotides, about 70 nucleotides, about 60 nucleotides, about 50 nucleotides upstream of genomic site GRCh38/hg38: chr19 38893867. In some cases, the targeted region of the pre-mRNA is at most about 1500 nucleotides, about 1000 nucleotides, about 800 nucleotides, about 700 nucleotides, about 600 nucleotides, about 500 nucleotides, about 400 nucleotides, about 300 nucleotides, about 200 nucleotides, about 100 nucleotides, about 80 nucleotides, about 70 nucleotides, about 60 nucleotides, about 50 nucleotides downstream of SEQ ID NO: 296. In some cases, the targeted region of the pre-mRNA is at least about 1500 nucleotides, about 1000 nucleotides, about 800 nucleotides, about 700 nucleotides, about 600 nucleotides, about 500 nucleotides, about 400 nucleotides, about 300 nucleotides, about 200 nucleotides, about 100 nucleotides, about 80 nucleotides, about 70 nucleotides, about 60 nucleotides, about 50 nucleotides downstream of SEQ ID NO: 296. In some cases, the targeted region of the pre-mRNA is at most about 1500 nucleotides, about 1000 nucleotides, about 800 nucleotides, about 700 nucleotides, about 600 nucleotides, about 500 nucleotides, about 400 nucleotides, about 300 nucleotides, about 200 nucleotides, about 100 nucleotides, about 80 nucleotides, about 70 nucleotides, about 60 nucleotides, about 50 nucleotides downstream of genomic site GRCh38/hg38: chr19 38893819. In some cases. the targeted region of the pre-mRNA is at least about 1500 nucleotides, about 1000 nucleotides, about 800 nucleotides, about 700 nucleotides, about 600 nucleotides, about 500 nucleotides, about 400 nucleotides, about 300 nucleotides, about 200 nucleotides, about 100 nucleotides, about 80 nucleotides, about 70 nucleotides, about 60 nucleotides, about 50 nucleotides downstream of genomic site GRCh38/hg38: chr19 38893819. In some cases, the targeted region of the pre-mRNA is within a sequence SEQ ID NO: 296. In some cases, the targeted region of the pre-mRNA is within a sequence between a pair of genomic sites GRCh38/hg38: chr19 38893867, and GRCh38/hg38: chr19 38893819. In some cases, the therapeutic agent is an antisense oligomer complementary to a sequence with at least about 80%, 85%, 90%, 95%, 96%, 97%, 98%, 99% or 100% sequence identity to SEQ ID NO:296. In some cases, the therapeutic agent is an antisense oligomer complementary to a sequence with 100% sequence identity to SEQ ID NO:296. In some cases, the therapeutic agent increases level of a first processed mRNA encoding a protein having a sequence SEQ ID NO: 8263, and decreases level of a second processed mRNA encoding a protein having a sequence SEQ ID NO: 499. In some cases, the targeted region of the pre-mRNA is at most about 1500 nucleotides, about 1000 nucleotides, about 800 nucleotides, about 700 nucleotides, about 600 nucleotides, about 500 nucleotides, about 400 nucleotides, about 300 nucleotides, about 200 nucleotides, about 100 nucleotides, about 80 nucleotides, about 70 nucleotides, about 60 nucleotides, about 50 nucleotides upstream of SEQ ID NO: 297. In some cases, the targeted region of the pre-mRNA is at least about 1500 nucleotides, about 1000 nucleotides, about 800 nucleotides, about 700 nucleotides, about 600 nucleotides, about 500 nucleotides, about 400 nucleotides, about 300 nucleotides, about 200 nucleotides, about 100 nucleotides, about 80 nucleotides, about 70 nucleotides, about 60 nucleotides, about 50 nucleotides upstream of SEQ ID NO: 297. In some cases, the targeted region of the pre-mRNA is at most about 1500 nucleotides, about 1000 nucleotides, about 800 nucleotides, about 700 nucleotides, about 600 nucleotides, about 500 nucleotides, about 400 nucleotides, about 300 nucleotides, about 200 nucleotides, about 100 nucleotides, about 80 nucleotides, about 70 nucleotides, about 60 nucleotides, about 50 nucleotides upstream of genomic site GRCh38/hg38: chr19 38893867. In some cases, the targeted region of the pre-mRNA is at least about 1500 nucleotides, about 1000 nucleotides, about 800 nucleotides, about 700 nucleotides, about 600 nucleotides, about 500 nucleotides, about 400 nucleotides, about 300 nucleotides, about 200 nucleotides, about 100 nucleotides, about 80 nucleotides, about 70 nucleotides, about 60 nucleotides, about 50 nucleotides upstream of genomic site GRCh38/hg38: chr19 38893867. In some cases, the targeted region of the pre-mRNA is at most about 1500 nucleotides, about 1000 nucleotides, about 800 nucleotides, about 700 nucleotides, about 600 nucleotides, about 500 nucleotides, about 400 nucleotides, about 300 nucleotides, about 200 nucleotides, about 100 nucleotides, about 80 nucleotides, about 70 nucleotides, about 60 nucleotides, about 50 nucleotides downstream of SEQ ID NO: 297. In some cases, the targeted region of the pre-mRNA is at least about 1500 nucleotides, about 1000 nucleotides, about 800 nucleotides, about 700 nucleotides, about 600 nucleotides, about 500 nucleotides, about 400 nucleotides, about 300 nucleotides, about 200 nucleotides, about 100 nucleotides, about 80 nucleotides, about 70 nucleotides, about 60 nucleotides, about 50 nucleotides downstream of SEQ ID NO: 297. In some cases, the targeted region of the pre-mRNA is at most about 1500 nucleotides, about 1000 nucleotides, about 800 nucleotides, about 700 nucleotides, about 600 nucleotides, about 500 nucleotides, about 400 nucleotides, about 300 nucleotides, about 200 nucleotides, about 100 nucleotides, about 80 nucleotides, about 70 nucleotides, about 60 nucleotides, about 50 nucleotides downstream of genomic site GRCh38/hg38: chr19 38893819. In some cases. the targeted region of the pre-mRNA is at least about 1500 nucleotides, about 1000 nucleotides, about 800 nucleotides, about 700 nucleotides, about 600 nucleotides, about 500 nucleotides, about 400 nucleotides, about 300 nucleotides, about 200 nucleotides, about 100 nucleotides, about 80 nucleotides, about 70 nucleotides, about 60 nucleotides, about 50 nucleotides downstream of genomic site GRCh38/hg38: chr19 38893819. In some cases, the targeted region of the pre-mRNA is within a sequence SEQ ID NO: 297. In some cases, the targeted region of the pre-mRNA is within a sequence between a pair of genomic sites GRCh38/hg38: chr19 38893867, and GRCh38/hg38: chr19 38893819. In some cases, the therapeutic agent is an antisense oligomer complementary to a sequence with at least about 80%, 85%, 90%, 95%, 96%, 97%, 98%, 99% or 100% sequence identity to SEQ ID NO:297. In some cases, the therapeutic agent is an antisense oligomer complementary to a sequence with 100% sequence identity to SEQ ID NO:297. In some cases, the therapeutic agent increases level of a first processed mRNA encoding a protein having a sequence SEQ ID NO: 8264, and decreases level of a second processed mRNA encoding a protein having a sequence SEQ ID NO: 500. In some cases, the targeted region of the pre-mRNA is at most about 1500 nucleotides, about 1000 nucleotides, about 800 nucleotides, about 700 nucleotides, about 600 nucleotides, about 500 nucleotides, about 400 nucleotides, about 300 nucleotides, about 200 nucleotides, about 100 nucleotides, about 80 nucleotides, about 70 nucleotides, about 60 nucleotides, about 50 nucleotides upstream of SEQ ID NO: 298. In some cases, the targeted region of the pre-mRNA is at least about 1500 nucleotides, about 1000 nucleotides, about 800 nucleotides, about 700 nucleotides, about 600 nucleotides, about 500 nucleotides, about 400 nucleotides, about 300 nucleotides, about 200 nucleotides, about 100 nucleotides, about 80 nucleotides, about 70 nucleotides, about 60 nucleotides, about 50 nucleotides upstream of SEQ ID NO: 298. In some cases, the targeted region of the pre-mRNA is at most about 1500 nucleotides, about 1000 nucleotides, about 800 nucleotides, about 700 nucleotides, about 600 nucleotides, about 500 nucleotides, about 400 nucleotides, about 300 nucleotides, about 200 nucleotides, about 100 nucleotides, about 80 nucleotides, about 70 nucleotides, about 60 nucleotides, about 50 nucleotides upstream of genomic site GRCh38/hg38: chr19 38893867. In some cases, the targeted region of the pre-mRNA is at least about 1500 nucleotides, about 1000 nucleotides, about 800 nucleotides, about 700 nucleotides, about 600 nucleotides, about 500 nucleotides, about 400 nucleotides, about 300 nucleotides, about 200 nucleotides, about 100 nucleotides, about 80 nucleotides, about 70 nucleotides, about 60 nucleotides, about 50 nucleotides upstream of genomic site GRCh38/hg38: chr19 38893867. In some cases, the targeted region of the pre-mRNA is at most about 1500 nucleotides, about 1000 nucleotides, about 800 nucleotides, about 700 nucleotides, about 600 nucleotides, about 500 nucleotides, about 400 nucleotides, about 300 nucleotides, about 200 nucleotides, about 100 nucleotides, about 80 nucleotides, about 70 nucleotides, about 60 nucleotides, about 50 nucleotides downstream of SEQ ID NO: 298. In some cases, the targeted region of the pre-mRNA is at least about 1500 nucleotides, about 1000 nucleotides, about 800 nucleotides, about 700 nucleotides, about 600 nucleotides, about 500 nucleotides, about 400 nucleotides, about 300 nucleotides, about 200 nucleotides, about 100 nucleotides, about 80 nucleotides, about 70 nucleotides, about 60 nucleotides, about 50 nucleotides downstream of SEQ ID NO: 298. In some cases, the targeted region of the pre-mRNA is at most about 1500 nucleotides, about 1000 nucleotides, about 800 nucleotides, about 700 nucleotides, about 600 nucleotides, about 500 nucleotides, about 400 nucleotides, about 300 nucleotides, about 200 nucleotides, about 100 nucleotides, about 80 nucleotides, about 70 nucleotides, about 60 nucleotides, about 50 nucleotides downstream of genomic site GRCh38/hg38: chr19 38893819. In some cases. the targeted region of the pre-mRNA is at least about 1500 nucleotides, about 1000 nucleotides, about 800 nucleotides, about 700 nucleotides, about 600 nucleotides, about 500 nucleotides, about 400 nucleotides, about 300 nucleotides, about 200 nucleotides, about 100 nucleotides, about 80 nucleotides, about 70 nucleotides, about 60 nucleotides, about 50 nucleotides downstream of genomic site GRCh38/hg38: chr19 38893819. In some cases, the targeted region of the pre-mRNA is within a sequence SEQ ID NO: 298. In some cases, the targeted region of the pre-mRNA is within a sequence between a pair of genomic sites GRCh38/hg38: chr19 38893867, and GRCh38/hg38: chr19 38893819. In some cases, the therapeutic agent is an antisense oligomer complementary to a sequence with at least about 80%, 85%, 90%, 95%, 96%, 97%, 98%, 99% or 100% sequence identity to SEQ ID NO:298. In some cases, the therapeutic agent is an antisense oligomer complementary to a sequence with 100% sequence identity to SEQ ID NO:298. In some cases, the therapeutic agent is an antisense oligomer that has a sequence with at least about 80%, 85%, 90%, 95%, 96%, 97%, 98%, 99% or 100% sequence identity to a sequence selected from the group consisting of SEQ ID NOs: 6633-6681. In some cases, the therapeutic agent is an antisense oligomer that has a sequence selected from the group consisting of SEQ ID NOs: 6633-6681. In some cases, the target peptide sequence is a portion of SIRT2 protein, and the method treats a disease or the condition that comprises Disturbance in mood; or Mood Disorders. In some cases, the method treats a cancer that is associated with SIRT2 protein.

[0279] SLC25A26

[0280] In some cases, the target peptide sequence is a portion of SLC25A26 protein. In some cases, the therapeutic agent increases level of a first processed mRNA encoding a protein having a sequence SEQ ID NO: 8265, and decreases level of a second processed mRNA encoding a protein having a sequence SEQ ID NO: 501. In some cases, the targeted region of the pre-mRNA is at most about 1500 nucleotides, about 1000 nucleotides, about 800 nucleotides, about 700 nucleotides, about 600 nucleotides, about 500 nucleotides, about 400 nucleotides, about 300 nucleotides, about 200 nucleotides, about 100 nucleotides, about 80 nucleotides, about 70 nucleotides, about 60 nucleotides, about 50 nucleotides upstream of SEQ ID NO: 299. In some cases, the targeted region of the pre-mRNA is at least about 1500 nucleotides, about 1000 nucleotides, about 800 nucleotides, about 700 nucleotides, about 600 nucleotides, about 500 nucleotides, about 400 nucleotides, about 300 nucleotides, about 200 nucleotides, about 100 nucleotides, about 80 nucleotides, about 70 nucleotides, about 60 nucleotides, about 50 nucleotides upstream of SEQ ID NO: 299. In some cases, the targeted region of the pre-mRNA is at most about 1500 nucleotides, about 1000 nucleotides, about 800 nucleotides, about 700 nucleotides, about 600 nucleotides, about 500 nucleotides, about 400 nucleotides, about 300 nucleotides, about 200 nucleotides, about 100 nucleotides, about 80 nucleotides, about 70 nucleotides, about 60 nucleotides, about 50 nucleotides upstream of genomic site GRCh38/hg38: chr3 66243203. In some cases, the targeted region of the pre-mRNA is at least about 1500 nucleotides, about 1000 nucleotides, about 800 nucleotides, about 700 nucleotides, about 600 nucleotides, about 500 nucleotides, about 400 nucleotides, about 300 nucleotides, about 200 nucleotides, about 100 nucleotides, about 80 nucleotides, about 70 nucleotides, about 60 nucleotides, about 50 nucleotides upstream of genomic site GRCh38/hg38: chr3 66243203. In some cases, the targeted region of the pre-mRNA is at most about 1500 nucleotides, about 1000 nucleotides, about 800 nucleotides, about 700 nucleotides, about 600 nucleotides, about 500 nucleotides, about 400 nucleotides, about 300 nucleotides, about 200 nucleotides, about 100 nucleotides, about 80 nucleotides, about 70 nucleotides, about 60 nucleotides, about 50 nucleotides downstream of SEQ ID NO: 299. In some cases, the targeted region of the pre-mRNA is at least about 1500 nucleotides, about 1000 nucleotides, about 800 nucleotides, about 700 nucleotides, about 600 nucleotides, about 500 nucleotides, about 400 nucleotides, about 300 nucleotides, about 200 nucleotides, about 100 nucleotides, about 80 nucleotides, about 70 nucleotides, about 60 nucleotides, about 50 nucleotides downstream of SEQ ID NO: 299. In some cases, the targeted region of the pre-mRNA is at most about 1500 nucleotides, about 1000 nucleotides, about 800 nucleotides, about 700 nucleotides, about 600 nucleotides, about 500 nucleotides, about 400 nucleotides, about 300 nucleotides, about 200 nucleotides, about 100 nucleotides, about 80 nucleotides, about 70 nucleotides, about 60 nucleotides, about 50 nucleotides downstream of genomic site GRCh38/hg38: chr3 66243312. In some cases. the targeted region of the pre-mRNA is at least about 1500 nucleotides, about 1000 nucleotides, about 800 nucleotides, about 700 nucleotides, about 600 nucleotides, about 500 nucleotides, about 400 nucleotides, about 300 nucleotides, about 200 nucleotides, about 100 nucleotides, about 80 nucleotides, about 70 nucleotides, about 60 nucleotides, about 50 nucleotides downstream of genomic site GRCh38/hg38: chr3 66243312. In some cases, the targeted region of the pre-mRNA is within a sequence SEQ ID NO: 299. In some cases, the targeted region of the pre-mRNA is within a sequence between a pair of genomic sites GRCh38/hg38: chr3 66243203, and GRCh38/hg38: chr3 66243312. In some cases, the therapeutic agent is an antisense oligomer complementary to a sequence with at least about 80%, 85%, 90%, 95%, 96%, 97%, 98%, 99% or 100% sequence identity to SEQ ID NO:299. In some cases, the therapeutic agent is an antisense oligomer complementary to a sequence with 100% sequence identity to SEQ ID NO:299. In some cases, the therapeutic agent increases level of a first processed mRNA encoding a protein having a sequence SEQ ID NO: 8266, and decreases level of a second processed mRNA encoding a protein having a sequence SEQ ID NO: 502. In some cases, the targeted region of the pre-mRNA is at most about 1500 nucleotides, about 1000 nucleotides, about 800 nucleotides, about 700 nucleotides, about 600 nucleotides, about 500 nucleotides, about 400 nucleotides, about 300 nucleotides, about 200 nucleotides, about 100 nucleotides, about 80 nucleotides, about 70 nucleotides, about 60 nucleotides, about 50 nucleotides upstream of SEQ ID NO: 300. In some cases, the targeted region of the pre-mRNA is at least about 1500 nucleotides, about 1000 nucleotides, about 800 nucleotides, about 700 nucleotides, about 600 nucleotides, about 500 nucleotides, about 400 nucleotides, about 300 nucleotides, about 200 nucleotides, about 100 nucleotides, about 80 nucleotides, about 70 nucleotides, about 60 nucleotides, about 50 nucleotides upstream of SEQ ID NO: 300. In some cases, the targeted region of the pre-mRNA is at most about 1500 nucleotides, about 1000 nucleotides, about 800 nucleotides, about 700 nucleotides, about 600 nucleotides, about 500 nucleotides, about 400 nucleotides, about 300 nucleotides, about 200 nucleotides, about 100 nucleotides, about 80 nucleotides, about 70 nucleotides, about 60 nucleotides, about 50 nucleotides upstream of genomic site GRCh38/hg38: chr3 66243203. In some cases, the targeted region of the pre-mRNA is at least about 1500 nucleotides, about 1000 nucleotides, about 800 nucleotides, about 700 nucleotides, about 600 nucleotides, about 500 nucleotides, about 400 nucleotides, about 300 nucleotides, about 200 nucleotides, about 100 nucleotides, about 80 nucleotides, about 70 nucleotides, about 60 nucleotides, about 50 nucleotides upstream of genomic site GRCh38/hg38: chr3 66243203. In some cases, the targeted region of the pre-mRNA is at most about 1500 nucleotides, about 1000 nucleotides, about 800 nucleotides, about 700 nucleotides, about 600 nucleotides, about 500 nucleotides, about 400 nucleotides, about 300 nucleotides, about 200 nucleotides, about 100 nucleotides, about 80 nucleotides, about 70 nucleotides, about 60 nucleotides, about 50 nucleotides downstream of SEQ ID NO: 300. In some cases, the targeted region of the pre-mRNA is at least about 1500 nucleotides, about 1000 nucleotides, about 800 nucleotides, about 700 nucleotides, about 600 nucleotides, about 500 nucleotides, about 400 nucleotides, about 300 nucleotides, about 200 nucleotides, about 100 nucleotides, about 80 nucleotides, about 70 nucleotides, about 60 nucleotides, about 50 nucleotides downstream of SEQ ID NO: 300. In some cases, the targeted region of the pre-mRNA is at most about 1500 nucleotides, about 1000 nucleotides, about 800 nucleotides, about 700 nucleotides, about 600 nucleotides, about 500 nucleotides, about 400 nucleotides, about 300 nucleotides, about 200 nucleotides, about 100 nucleotides, about 80 nucleotides, about 70 nucleotides, about 60 nucleotides, about 50 nucleotides downstream of genomic site GRCh38/hg38: chr3 66243312. In some cases. the targeted region of the pre-mRNA is at least about 1500 nucleotides, about 1000 nucleotides, about 800 nucleotides, about 700 nucleotides, about 600 nucleotides, about 500 nucleotides, about 400 nucleotides, about 300 nucleotides, about 200 nucleotides, about 100 nucleotides, about 80 nucleotides, about 70 nucleotides, about 60 nucleotides, about 50 nucleotides downstream of genomic site GRCh38/hg38: chr3 66243312. In some cases, the targeted region of the pre-mRNA is within a sequence SEQ ID NO: 300. In some cases, the targeted region of the pre-mRNA is within a sequence between a pair of genomic sites GRCh38/hg38: chr3 66243203, and GRCh38/hg38: chr3 66243312. In some cases, the therapeutic agent is an antisense oligomer complementary to a sequence with at least about 80%, 85%, 90%, 95%, 96%, 97%, 98%, 99% or 100% sequence identity to SEQ ID NO:300. In some cases, the therapeutic agent is an antisense oligomer complementary to a sequence with 100% sequence identity to SEQ ID NO:300. In some cases, the therapeutic agent is an antisense oligomer that has a sequence with at least about 80%, 85%, 90%, 95%, 96%, 97%, 98%, 99% or 100% sequence identity to a sequence selected from the group consisting of SEQ ID NOs: 6682-6742. In some cases, the therapeutic agent is an antisense oligomer that has a sequence selected from the group consisting of SEQ ID NOs: 6682-6742. In some cases, the target peptide sequence is a portion of SLC25A26 protein, and the method treats a disease or the condition that comprises Intellectual Disability; Combined Oxidative Phosphorylation Deficiency 28; or Mitochondrial Diseases.

[0281] SMARCE1

[0282] In some cases, the target peptide sequence is a portion of SMARCE1 protein. In some cases, the therapeutic agent increases level of a first processed mRNA encoding a protein having a sequence SEQ ID NO: 8267, and decreases level of a second processed mRNA encoding a protein having a sequence SEQ ID NO: 503. In some cases, the targeted region of the pre-mRNA is at most about 1500 nucleotides, about 1000 nucleotides, about 800 nucleotides, about 700 nucleotides, about 600 nucleotides, about 500 nucleotides, about 400 nucleotides, about 300 nucleotides, about 200 nucleotides, about 100 nucleotides, about 80 nucleotides, about 70 nucleotides, about 60 nucleotides, about 50 nucleotides upstream of SEQ ID NO: 301. In some cases, the targeted region of the pre-mRNA is at least about 1500 nucleotides, about 1000 nucleotides, about 800 nucleotides, about 700 nucleotides, about 600 nucleotides, about 500 nucleotides, about 400 nucleotides, about 300 nucleotides, about 200 nucleotides, about 100 nucleotides, about 80 nucleotides, about 70 nucleotides, about 60 nucleotides, about 50 nucleotides upstream of SEQ ID NO: 301. In some cases, the targeted region of the pre-mRNA is at most about 1500 nucleotides, about 1000 nucleotides, about 800 nucleotides, about 700 nucleotides, about 600 nucleotides, about 500 nucleotides, about 400 nucleotides, about 300 nucleotides, about 200 nucleotides, about 100 nucleotides, about 80 nucleotides, about 70 nucleotides, about 60 nucleotides, about 50 nucleotides upstream of genomic site GRCh38/hg38: chr17 40644459. In some cases, the targeted region of the pre-mRNA is at least about 1500 nucleotides, about 1000 nucleotides, about 800 nucleotides, about 700 nucleotides, about 600 nucleotides, about 500 nucleotides, about 400 nucleotides, about 300 nucleotides, about 200 nucleotides, about 100 nucleotides, about 80 nucleotides, about 70 nucleotides, about 60 nucleotides, about 50 nucleotides upstream of genomic site GRCh38/hg38: chr17 40644459. In some cases, the targeted region of the pre-mRNA is at most about 1500 nucleotides, about 1000 nucleotides, about 800 nucleotides, about 700 nucleotides, about 600 nucleotides, about 500 nucleotides, about 400 nucleotides, about 300 nucleotides, about 200 nucleotides, about 100 nucleotides, about 80 nucleotides, about 70 nucleotides, about 60 nucleotides, about 50 nucleotides downstream of SEQ ID NO: 301. In some cases, the targeted region of the pre-mRNA is at least about 1500 nucleotides, about 1000 nucleotides, about 800 nucleotides, about 700 nucleotides, about 600 nucleotides, about 500 nucleotides, about 400 nucleotides, about 300 nucleotides, about 200 nucleotides, about 100 nucleotides, about 80 nucleotides, about 70 nucleotides, about 60 nucleotides, about 50 nucleotides downstream of SEQ ID NO: 301. In some cases, the targeted region of the pre-mRNA is at most about 1500 nucleotides, about 1000 nucleotides, about 800 nucleotides, about 700 nucleotides, about 600 nucleotides, about 500 nucleotides, about 400 nucleotides, about 300 nucleotides, about 200 nucleotides, about 100 nucleotides, about 80 nucleotides, about 70 nucleotides, about 60 nucleotides, about 50 nucleotides downstream of genomic site GRCh38/hg38: chr17 40644385. In some cases. the targeted region of the pre-mRNA is at least about 1500 nucleotides, about 1000 nucleotides, about 800 nucleotides, about 700 nucleotides, about 600 nucleotides, about 500 nucleotides, about 400 nucleotides, about 300 nucleotides, about 200 nucleotides, about 100 nucleotides, about 80 nucleotides, about 70 nucleotides, about 60 nucleotides, about 50 nucleotides downstream of genomic site GRCh38/hg38: chr17 40644385. In some cases, the targeted region of the pre-mRNA is within a sequence SEQ ID NO: 301. In some cases, the targeted region of the pre-mRNA is within a sequence between a pair of genomic sites GRCh38/hg38: chr17 40644459, and GRCh38/hg38: chr17 40644385. In some cases, the therapeutic agent is an antisense oligomer complementary to a sequence with at least about 80%, 85%, 90%, 95%, 96%, 97%, 98%, 99% or 100% sequence identity to SEQ ID NO:301. In some cases, the therapeutic agent is an antisense oligomer complementary to a sequence with 100% sequence identity to SEQ ID NO:301. In some cases, the therapeutic agent is an antisense oligomer that has a sequence with at least about 80%, 85%, 90%, 95%, 96%, 97%, 98%, 99% or 100% sequence identity to a sequence selected from the group consisting of SEQ ID NOs: 6743-6796. In some cases, the therapeutic agent is an antisense oligomer that has a sequence selected from the group consisting of SEQ ID NOs: 6743-6796. In some cases, the target peptide sequence is a portion of SMARCE1 protein, and the method treats a disease or the condition that comprises Intellectual Disability; Coffin-Siris Syndrome 5; Coffin-Siris syndrome; Meningioma; Meningiomas, Multiple; or Meningioma, familial, susceptibility to.

[0283] SMC1A

[0284] In some cases, the target peptide sequence is a portion of SMC1A protein. In some cases, the therapeutic agent increases level of a first processed mRNA encoding a protein having a sequence SEQ ID NO: 8268, and decreases level of a second processed mRNA encoding a protein having a sequence SEQ ID NO: 504. In some cases, the targeted region of the pre-mRNA is at most about 1500 nucleotides, about 1000 nucleotides, about 800 nucleotides, about 700 nucleotides, about 600 nucleotides, about 500 nucleotides, about 400 nucleotides, about 300 nucleotides, about 200 nucleotides, about 100 nucleotides, about 80 nucleotides, about 70 nucleotides, about 60 nucleotides, about 50 nucleotides upstream of SEQ ID NO: 302. In some cases, the targeted region of the pre-mRNA is at least about 1500 nucleotides, about 1000 nucleotides, about 800 nucleotides, about 700 nucleotides, about 600 nucleotides, about 500 nucleotides, about 400 nucleotides, about 300 nucleotides, about 200 nucleotides, about 100 nucleotides, about 80 nucleotides, about 70 nucleotides, about 60 nucleotides, about 50 nucleotides upstream of SEQ ID NO: 302. In some cases, the targeted region of the pre-mRNA is at most about 1500 nucleotides, about 1000 nucleotides, about 800 nucleotides, about 700 nucleotides, about 600 nucleotides, about 500 nucleotides, about 400 nucleotides, about 300 nucleotides, about 200 nucleotides, about 100 nucleotides, about 80 nucleotides, about 70 nucleotides, about 60 nucleotides, about 50 nucleotides upstream of genomic site GRCh38/hg38: chrX 53422040. In some cases, the targeted region of the pre-mRNA is at least about 1500 nucleotides, about 1000 nucleotides, about 800 nucleotides, about 700 nucleotides, about 600 nucleotides, about 500 nucleotides, about 400 nucleotides, about 300 nucleotides, about 200 nucleotides, about 100 nucleotides, about 80 nucleotides, about 70 nucleotides, about 60 nucleotides, about 50 nucleotides upstream of genomic site GRCh38/hg38: chrX 53422040. In some cases, the targeted region of the pre-mRNA is at most about 1500 nucleotides, about 1000 nucleotides, about 800 nucleotides, about 700 nucleotides, about 600 nucleotides, about 500 nucleotides, about 400 nucleotides, about 300 nucleotides, about 200 nucleotides, about 100 nucleotides, about 80 nucleotides, about 70 nucleotides, about 60 nucleotides, about 50 nucleotides downstream of SEQ ID NO: 302. In some cases, the targeted region of the pre-mRNA is at least about 1500 nucleotides, about 1000 nucleotides, about 800 nucleotides, about 700 nucleotides, about 600 nucleotides, about 500 nucleotides, about 400 nucleotides, about 300 nucleotides, about 200 nucleotides, about 100 nucleotides, about 80 nucleotides, about 70 nucleotides, about 60 nucleotides, about 50 nucleotides downstream of SEQ ID NO: 302. In some cases, the targeted region of the pre-mRNA is at most about 1500 nucleotides, about 1000 nucleotides, about 800 nucleotides, about 700 nucleotides, about 600 nucleotides, about 500 nucleotides, about 400 nucleotides, about 300 nucleotides, about 200 nucleotides, about 100 nucleotides, about 80 nucleotides, about 70 nucleotides, about 60 nucleotides, about 50 nucleotides downstream of genomic site GRCh38/hg38: chrX 53421895. In some cases. the targeted region of the pre-mRNA is at least about 1500 nucleotides, about 1000 nucleotides, about 800 nucleotides, about 700 nucleotides, about 600 nucleotides, about 500 nucleotides, about 400 nucleotides, about 300 nucleotides, about 200 nucleotides, about 100 nucleotides, about 80 nucleotides, about 70 nucleotides, about 60 nucleotides, about 50 nucleotides downstream of genomic site GRCh38/hg38: chrX 53421895. In some cases, the targeted region of the pre-mRNA is within a sequence SEQ ID NO: 302. In some cases, the targeted region of the pre-mRNA is within a sequence between a pair of genomic sites GRCh38/hg38: chrX 53422040, and GRCh38/hg38: chrX 53421895. In some cases, the therapeutic agent is an antisense oligomer complementary to a sequence with at least about 80%, 85%, 90%, 95%, 96%, 97%, 98%, 99% or 100% sequence identity to SEQ ID NO:302. In some cases, the therapeutic agent is an antisense oligomer complementary to a sequence with 100% sequence identity to SEQ ID NO:302. In some cases, the therapeutic agent is an antisense oligomer that has a sequence with at least about 80%, 85%, 90%, 95%, 96%, 97%, 98%, 99% or 100% sequence identity to a sequence selected from the group consisting of SEQ ID NOs: 6797-6864. In some cases, the therapeutic agent is an antisense oligomer that has a sequence selected from the group consisting of SEQ ID NOs: 6797-6864. In some cases, the target peptide sequence is a portion of SMC1A protein, and the method treats a disease or the condition that comprises Intellectual Disability; Primary microcephaly; Congenital anemia; Osteogenesis Imperfecta; Cytopenia; Epileptic encephalopathy; Radial club hand; Cornelia De Lange Syndrome; Growth Deficiency and Mental Retardation with Facial Dysmorphism; Congenital muscular hypertrophy-cerebral syndrome; or Cornelia de Lange syndrome 2.

[0285] SMG1

[0286] In some cases, the target peptide sequence is a portion of SMG1 protein. In some cases, the therapeutic agent increases level of a first processed mRNA encoding a protein having a sequence SEQ ID NO: 8269, and decreases level of a second processed mRNA encoding a protein having a sequence SEQ ID NO: 505. In some cases, the targeted region of the pre-mRNA is at most about 1500 nucleotides, about 1000 nucleotides, about 800 nucleotides, about 700 nucleotides, about 600 nucleotides, about 500 nucleotides, about 400 nucleotides, about 300 nucleotides, about 200 nucleotides, about 100 nucleotides, about 80 nucleotides, about 70 nucleotides, about 60 nucleotides, about 50 nucleotides upstream of SEQ ID NO: 303. In some cases, the targeted region of the pre-mRNA is at least about 1500 nucleotides, about 1000 nucleotides, about 800 nucleotides, about 700 nucleotides, about 600 nucleotides, about 500 nucleotides, about 400 nucleotides, about 300 nucleotides, about 200 nucleotides, about 100 nucleotides, about 80 nucleotides, about 70 nucleotides, about 60 nucleotides, about 50 nucleotides upstream of SEQ ID NO: 303. In some cases, the targeted region of the pre-mRNA is at most about 1500 nucleotides, about 1000 nucleotides, about 800 nucleotides, about 700 nucleotides, about 600 nucleotides, about 500 nucleotides, about 400 nucleotides, about 300 nucleotides, about 200 nucleotides, about 100 nucleotides, about 80 nucleotides, about 70 nucleotides, about 60 nucleotides, about 50 nucleotides upstream of genomic site GRCh38/hg38: chr16 18900044. In some cases, the targeted region of the pre-mRNA is at least about 1500 nucleotides, about 1000 nucleotides, about 800 nucleotides, about 700 nucleotides, about 600 nucleotides, about 500 nucleotides, about 400 nucleotides, about 300 nucleotides, about 200 nucleotides, about 100 nucleotides, about 80 nucleotides, about 70 nucleotides, about 60 nucleotides, about 50 nucleotides upstream of genomic site GRCh38/hg38: chr16 18900044. In some cases, the targeted region of the pre-mRNA is at most about 1500 nucleotides, about 1000 nucleotides, about 800 nucleotides, about 700 nucleotides, about 600 nucleotides, about 500 nucleotides, about 400 nucleotides, about 300 nucleotides, about 200 nucleotides, about 100 nucleotides, about 80 nucleotides, about 70 nucleotides, about 60 nucleotides, about 50 nucleotides downstream of SEQ ID NO: 303. In some cases, the targeted region of the pre-mRNA is at least about 1500 nucleotides, about 1000 nucleotides, about 800 nucleotides, about 700 nucleotides, about 600 nucleotides, about 500 nucleotides, about 400 nucleotides, about 300 nucleotides, about 200 nucleotides, about 100 nucleotides, about 80 nucleotides, about 70 nucleotides, about 60 nucleotides, about 50 nucleotides downstream of SEQ ID NO: 303. In some cases, the targeted region of the pre-mRNA is at most about 1500 nucleotides, about 1000 nucleotides, about 800 nucleotides, about 700 nucleotides, about 600 nucleotides, about 500 nucleotides, about 400 nucleotides, about 300 nucleotides, about 200 nucleotides, about 100 nucleotides, about 80 nucleotides, about 70 nucleotides, about 60 nucleotides, about 50 nucleotides downstream of genomic site GRCh38/hg38: chr16 18899987. In some cases. the targeted region of the pre-mRNA is at least about 1500 nucleotides, about 1000 nucleotides, about 800 nucleotides, about 700 nucleotides, about 600 nucleotides, about 500 nucleotides, about 400 nucleotides, about 300 nucleotides, about 200 nucleotides, about 100 nucleotides, about 80 nucleotides, about 70 nucleotides, about 60 nucleotides, about 50 nucleotides downstream of genomic site GRCh38/hg38: chr16 18899987. In some cases, the targeted region of the pre-mRNA is within a sequence SEQ ID NO: 303. In some cases, the targeted region of the pre-mRNA is within a sequence between a pair of genomic sites GRCh38/hg38: chr16 18900044, and GRCh38/hg38: chr16 18899987. In some cases, the therapeutic agent is an antisense oligomer complementary to a sequence with at least about 80%, 85%, 90%, 95%, 96%, 97%, 98%, 99% or 100% sequence identity to SEQ ID NO:303. In some cases, the therapeutic agent is an antisense oligomer complementary to a sequence with 100% sequence identity to SEQ ID NO:303. In some cases, the therapeutic agent is an antisense oligomer that has a sequence with at least about 80%, 85%, 90%, 95%, 96%, 97%, 98%, 99% or 100% sequence identity to a sequence selected from the group consisting of SEQ ID NOs: 6865-6915. In some cases, the therapeutic agent is an antisense oligomer that has a sequence selected from the group consisting of SEQ ID NOs: 6865-6915. In some cases, the target peptide sequence is a portion of SMG1 protein, and the method treats a disease or the condition that comprises Infiltrating duct carcinoma of female breast.

[0287] SPACA7

[0288] In some cases, the target peptide sequence is a portion of SPACA7 protein. In some cases, the therapeutic agent increases level of a first processed mRNA encoding a protein having a sequence SEQ ID NO: 8270, and decreases level of a second processed mRNA encoding a protein having a sequence SEQ ID NO: 506. In some cases, the targeted region of the pre-mRNA is at most about 1500 nucleotides, about 1000 nucleotides, about 800 nucleotides, about 700 nucleotides, about 600 nucleotides, about 500 nucleotides, about 400 nucleotides, about 300 nucleotides, about 200 nucleotides, about 100 nucleotides, about 80 nucleotides, about 70 nucleotides, about 60 nucleotides, about 50 nucleotides upstream of SEQ ID NO: 304. In some cases, the targeted region of the pre-mRNA is at least about 1500 nucleotides, about 1000 nucleotides, about 800 nucleotides, about 700 nucleotides, about 600 nucleotides, about 500 nucleotides, about 400 nucleotides, about 300 nucleotides, about 200 nucleotides, about 100 nucleotides, about 80 nucleotides, about 70 nucleotides, about 60 nucleotides, about 50 nucleotides upstream of SEQ ID NO: 304. In some cases, the targeted region of the pre-mRNA is at most about 1500 nucleotides, about 1000 nucleotides, about 800 nucleotides, about 700 nucleotides, about 600 nucleotides, about 500 nucleotides, about 400 nucleotides, about 300 nucleotides, about 200 nucleotides, about 100 nucleotides, about 80 nucleotides, about 70 nucleotides, about 60 nucleotides, about 50 nucleotides upstream of genomic site GRCh38/hg38: chr13 112382278. In some cases, the targeted region of the pre-mRNA is at least about 1500 nucleotides, about 1000 nucleotides, about 800 nucleotides, about 700 nucleotides, about 600 nucleotides, about 500 nucleotides, about 400 nucleotides, about 300 nucleotides, about 200 nucleotides, about 100 nucleotides, about 80 nucleotides, about 70 nucleotides, about 60 nucleotides, about 50 nucleotides upstream of genomic site GRCh38/hg38: chr13 112382278. In some cases, the targeted region of the pre-mRNA is at most about 1500 nucleotides, about 1000 nucleotides, about 800 nucleotides, about 700 nucleotides, about 600 nucleotides, about 500 nucleotides, about 400 nucleotides, about 300 nucleotides, about 200 nucleotides, about 100 nucleotides, about 80 nucleotides, about 70 nucleotides, about 60 nucleotides, about 50 nucleotides downstream of SEQ ID NO: 304. In some cases, the targeted region of the pre-mRNA is at least about 1500 nucleotides, about 1000 nucleotides, about 800 nucleotides, about 700 nucleotides, about 600 nucleotides, about 500 nucleotides, about 400 nucleotides, about 300 nucleotides, about 200 nucleotides, about 100 nucleotides, about 80 nucleotides, about 70 nucleotides, about 60 nucleotides, about 50 nucleotides downstream of SEQ ID NO: 304. In some cases, the targeted region of the pre-mRNA is at most about 1500 nucleotides, about 1000 nucleotides, about 800 nucleotides, about 700 nucleotides, about 600 nucleotides, about 500 nucleotides, about 400 nucleotides, about 300 nucleotides, about 200 nucleotides, about 100 nucleotides, about 80 nucleotides, about 70 nucleotides, about 60 nucleotides, about 50 nucleotides downstream of genomic site GRCh38/hg38: chr13 112382507. In some cases. the targeted region of the pre-mRNA is at least about 1500 nucleotides, about 1000 nucleotides, about 800 nucleotides, about 700 nucleotides, about 600 nucleotides, about 500 nucleotides, about 400 nucleotides, about 300 nucleotides, about 200 nucleotides, about 100 nucleotides, about 80 nucleotides, about 70 nucleotides, about 60 nucleotides, about 50 nucleotides downstream of genomic site GRCh38/hg38: chr13 112382507. In some cases, the targeted region of the pre-mRNA is within a sequence SEQ ID NO: 304. In some cases, the targeted region of the pre-mRNA is within a sequence between a pair of genomic sites GRCh38/hg38: chr13 112382278, and GRCh38/hg38: chr13 112382507. In some cases, the therapeutic agent is an antisense oligomer complementary to a sequence with at least about 80%, 85%, 90%, 95%, 96%, 97%, 98%, 99% or 100% sequence identity to SEQ ID NO:304. In some cases, the therapeutic agent is an antisense oligomer complementary to a sequence with 100% sequence identity to SEQ ID NO:304. In some cases, the therapeutic agent is an antisense oligomer that has a sequence with at least about 80%, 85%, 90%, 95%, 96%, 97%, 98%, 99% or 100% sequence identity to a sequence selected from the group consisting of SEQ ID NOs: 6916-7000. In some cases, the therapeutic agent is an antisense oligomer that has a sequence selected from the group consisting of SEQ ID NOs: 6916-7000. In some cases, the target peptide sequence is a portion of SPACA7 protein, and the method treats a disease or the condition that comprises Colorectal Cancer.

[0289] SPRED1

[0290] In some cases, the target peptide sequence is a portion of SPRED1 protein. In some cases, the therapeutic agent increases level of a first processed mRNA encoding a protein having a sequence SEQ ID NO: 8271, and decreases level of a second processed mRNA encoding a protein having a sequence SEQ ID NO: 507. In some cases, the targeted region of the pre-mRNA is at most about 1500 nucleotides, about 1000 nucleotides, about 800 nucleotides, about 700 nucleotides, about 600 nucleotides, about 500 nucleotides, about 400 nucleotides, about 300 nucleotides, about 200 nucleotides, about 100 nucleotides, about 80 nucleotides, about 70 nucleotides, about 60 nucleotides, about 50 nucleotides upstream of SEQ ID NO: 305. In some cases, the targeted region of the pre-mRNA is at least about 1500 nucleotides, about 1000 nucleotides, about 800 nucleotides, about 700 nucleotides, about 600 nucleotides, about 500 nucleotides, about 400 nucleotides, about 300 nucleotides, about 200 nucleotides, about 100 nucleotides, about 80 nucleotides, about 70 nucleotides, about 60 nucleotides, about 50 nucleotides upstream of SEQ ID NO: 305. In some cases, the targeted region of the pre-mRNA is at most about 1500 nucleotides, about 1000 nucleotides, about 800 nucleotides, about 700 nucleotides, about 600 nucleotides, about 500 nucleotides, about 400 nucleotides, about 300 nucleotides, about 200 nucleotides, about 100 nucleotides, about 80 nucleotides, about 70 nucleotides, about 60 nucleotides, about 50 nucleotides upstream of genomic site GRCh38/hg38: chr15 38299373. In some cases, the targeted region of the pre-mRNA is at least about 1500 nucleotides, about 1000 nucleotides, about 800 nucleotides, about 700 nucleotides, about 600 nucleotides, about 500 nucleotides, about 400 nucleotides, about 300 nucleotides, about 200 nucleotides, about 100 nucleotides, about 80 nucleotides, about 70 nucleotides, about 60 nucleotides, about 50 nucleotides upstream of genomic site GRCh38/hg38: chr15 38299373. In some cases, the targeted region of the pre-mRNA is at most about 1500 nucleotides, about 1000 nucleotides, about 800 nucleotides, about 700 nucleotides, about 600 nucleotides, about 500 nucleotides, about 400 nucleotides, about 300 nucleotides, about 200 nucleotides, about 100 nucleotides, about 80 nucleotides, about 70 nucleotides, about 60 nucleotides, about 50 nucleotides downstream of SEQ ID NO: 305. In some cases, the targeted region of the pre-mRNA is at least about 1500 nucleotides, about 1000 nucleotides, about 800 nucleotides, about 700 nucleotides, about 600 nucleotides, about 500 nucleotides, about 400 nucleotides, about 300 nucleotides, about 200 nucleotides, about 100 nucleotides, about 80 nucleotides, about 70 nucleotides, about 60 nucleotides, about 50 nucleotides downstream of SEQ ID NO: 305. In some cases, the targeted region of the pre-mRNA is at most about 1500 nucleotides, about 1000 nucleotides, about 800 nucleotides, about 700 nucleotides, about 600 nucleotides, about 500 nucleotides, about 400 nucleotides, about 300 nucleotides, about 200 nucleotides, about 100 nucleotides, about 80 nucleotides, about 70 nucleotides, about 60 nucleotides, about 50 nucleotides downstream of genomic site GRCh38/hg38: chr15 38299547. In some cases. the targeted region of the pre-mRNA is at least about 1500 nucleotides, about 1000 nucleotides, about 800 nucleotides, about 700 nucleotides, about 600 nucleotides, about 500 nucleotides, about 400 nucleotides, about 300 nucleotides, about 200 nucleotides, about 100 nucleotides, about 80 nucleotides, about 70 nucleotides, about 60 nucleotides, about 50 nucleotides downstream of genomic site GRCh38/hg38: chr15 38299547. In some cases, the targeted region of the pre-mRNA is within a sequence SEQ ID NO: 305. In some cases, the targeted region of the pre-mRNA is within a sequence between a pair of genomic sites GRCh38/hg38: chr15 38299373, and GRCh38/hg38: chr15 38299547. In some cases, the therapeutic agent is an antisense oligomer complementary to a sequence with at least about 80%, 85%, 90%, 95%, 96%, 97%, 98%, 99% or 100% sequence identity to SEQ ID NO:305. In some cases, the therapeutic agent is an antisense oligomer complementary to a sequence with 100% sequence identity to SEQ ID NO:305. In some cases, the therapeutic agent is an antisense oligomer that has a sequence with at least about 80%, 85%, 90%, 95%, 96%, 97%, 98%, 99% or 100% sequence identity to a sequence selected from the group consisting of SEQ ID NOs: 7001-7074. In some cases, the therapeutic agent is an antisense oligomer that has a sequence selected from the group consisting of SEQ ID NOs: 7001-7074. In some cases, the target peptide sequence is a portion of SPRED1 protein, and the method treats a disease or the condition that comprises Intellectual Disability; Neurofibromatosis 1; Neurofibromatosis, Type 1-like Syndrome; or Legius syndrome.

[0291] SRP54

[0292] In some cases, the target peptide sequence is a portion of SRP54 protein. In some cases, the therapeutic agent increases level of a first processed mRNA encoding a protein having a sequence SEQ ID NO: 8272, and decreases level of a second processed mRNA encoding a protein having a sequence SEQ ID NO: 508. In some cases, the targeted region of the pre-mRNA is at most about 1500 nucleotides, about 1000 nucleotides, about 800 nucleotides, about 700 nucleotides, about 600 nucleotides, about 500 nucleotides, about 400 nucleotides, about 300 nucleotides, about 200 nucleotides, about 100 nucleotides, about 80 nucleotides, about 70 nucleotides, about 60 nucleotides, about 50 nucleotides upstream of SEQ ID NO: 306. In some cases, the targeted region of the pre-mRNA is at least about 1500 nucleotides, about 1000 nucleotides, about 800 nucleotides, about 700 nucleotides, about 600 nucleotides, about 500 nucleotides, about 400 nucleotides, about 300 nucleotides, about 200 nucleotides, about 100 nucleotides, about 80 nucleotides, about 70 nucleotides, about 60 nucleotides, about 50 nucleotides upstream of SEQ ID NO: 306. In some cases, the targeted region of the pre-mRNA is at most about 1500 nucleotides, about 1000 nucleotides, about 800 nucleotides, about 700 nucleotides, about 600 nucleotides, about 500 nucleotides, about 400 nucleotides, about 300 nucleotides, about 200 nucleotides, about 100 nucleotides, about 80 nucleotides, about 70 nucleotides, about 60 nucleotides, about 50 nucleotides upstream of genomic site GRCh38/hg38: chr14 35000936. In some cases, the targeted region of the pre-mRNA is at least about 1500 nucleotides, about 1000 nucleotides, about 800 nucleotides, about 700 nucleotides, about 600 nucleotides, about 500 nucleotides, about 400 nucleotides, about 300 nucleotides, about 200 nucleotides, about 100 nucleotides, about 80 nucleotides, about 70 nucleotides, about 60 nucleotides, about 50 nucleotides upstream of genomic site GRCh38/hg38: chr14 35000936. In some cases, the targeted region of the pre-mRNA is at most about 1500 nucleotides, about 1000 nucleotides, about 800 nucleotides, about 700 nucleotides, about 600 nucleotides, about 500 nucleotides, about 400 nucleotides, about 300 nucleotides, about 200 nucleotides, about 100 nucleotides, about 80 nucleotides, about 70 nucleotides, about 60 nucleotides, about 50 nucleotides downstream of SEQ ID NO: 306. In some cases, the targeted region of the pre-mRNA is at least about 1500 nucleotides, about 1000 nucleotides, about 800 nucleotides, about 700 nucleotides, about 600 nucleotides, about 500 nucleotides, about 400 nucleotides, about 300 nucleotides, about 200 nucleotides, about 100 nucleotides, about 80 nucleotides, about 70 nucleotides, about 60 nucleotides, about 50 nucleotides downstream of SEQ ID NO: 306. In some cases, the targeted region of the pre-mRNA is at most about 1500 nucleotides, about 1000 nucleotides, about 800 nucleotides, about 700 nucleotides, about 600 nucleotides, about 500 nucleotides, about 400 nucleotides, about 300 nucleotides, about 200 nucleotides, about 100 nucleotides, about 80 nucleotides, about 70 nucleotides, about 60 nucleotides, about 50 nucleotides downstream of genomic site GRCh38/hg38: chr14 35001020. In some cases. the targeted region of the pre-mRNA is at least about 1500 nucleotides, about 1000 nucleotides, about 800 nucleotides, about 700 nucleotides, about 600 nucleotides, about 500 nucleotides, about 400 nucleotides, about 300 nucleotides, about 200 nucleotides, about 100 nucleotides, about 80 nucleotides, about 70 nucleotides, about 60 nucleotides, about 50 nucleotides downstream of genomic site GRCh38/hg38: chr14 35001020. In some cases, the targeted region of the pre-mRNA is within a sequence SEQ ID NO: 306. In some cases, the targeted region of the pre-mRNA is within a sequence between a pair of genomic sites GRCh38/hg38: chr14 35000936, and GRCh38/hg38: chr14 35001020. In some cases, the therapeutic agent is an antisense oligomer complementary to a sequence with at least about 80%, 85%, 90%, 95%, 96%, 97%, 98%, 99% or 100% sequence identity to SEQ ID NO:306. In some cases, the therapeutic agent is an antisense oligomer complementary to a sequence with 100% sequence identity to SEQ ID NO:306. In some cases, the therapeutic agent is an antisense oligomer that has a sequence with at least about 80%, 85%, 90%, 95%, 96%, 97%, 98%, 99% or 100% sequence identity to a sequence selected from the group consisting of SEQ ID NOs: 7075-7130. In some cases, the therapeutic agent is an antisense oligomer that has a sequence selected from the group consisting of SEQ ID NOs: 7075-7130. In some cases, the target peptide sequence is a portion of SRP54 protein, and the method treats a disease or the condition that comprises Shwachman syndrome.

[0293] SRPK2

[0294] In some cases, the target peptide sequence is a portion of SRPK2 protein. In some cases, the therapeutic agent increases level of a first processed mRNA encoding a protein having a sequence SEQ ID NO: 8273, and decreases level of a second processed mRNA encoding a protein having a sequence SEQ ID NO: 509. In some cases, the targeted region of the pre-mRNA is at most about 1500 nucleotides, about 1000 nucleotides, about 800 nucleotides, about 700 nucleotides, about 600 nucleotides, about 500 nucleotides, about 400 nucleotides, about 300 nucleotides, about 200 nucleotides, about 100 nucleotides, about 80 nucleotides, about 70 nucleotides, about 60 nucleotides, about 50 nucleotides upstream of SEQ ID NO: 307. In some cases, the targeted region of the pre-mRNA is at least about 1500 nucleotides, about 1000 nucleotides, about 800 nucleotides, about 700 nucleotides, about 600 nucleotides, about 500 nucleotides, about 400 nucleotides, about 300 nucleotides, about 200 nucleotides, about 100 nucleotides, about 80 nucleotides, about 70 nucleotides, about 60 nucleotides, about 50 nucleotides upstream of SEQ ID NO: 307. In some cases, the targeted region of the pre-mRNA is at most about 1500 nucleotides, about 1000 nucleotides, about 800 nucleotides, about 700 nucleotides, about 600 nucleotides, about 500 nucleotides, about 400 nucleotides, about 300 nucleotides, about 200 nucleotides, about 100 nucleotides, about 80 nucleotides, about 70 nucleotides, about 60 nucleotides, about 50 nucleotides upstream of genomic site GRCh38/hg38: chr7 105268869. In some cases, the targeted region of the pre-mRNA is at least about 1500 nucleotides, about 1000 nucleotides, about 800 nucleotides, about 700 nucleotides, about 600 nucleotides, about 500 nucleotides, about 400 nucleotides, about 300 nucleotides, about 200 nucleotides, about 100 nucleotides, about 80 nucleotides, about 70 nucleotides, about 60 nucleotides, about 50 nucleotides upstream of genomic site GRCh38/hg38: chr7 105268869. In some cases, the targeted region of the pre-mRNA is at most about 1500 nucleotides, about 1000 nucleotides, about 800 nucleotides, about 700 nucleotides, about 600 nucleotides, about 500 nucleotides, about 400 nucleotides, about 300 nucleotides, about 200 nucleotides, about 100 nucleotides, about 80 nucleotides, about 70 nucleotides, about 60 nucleotides, about 50 nucleotides downstream of SEQ ID NO: 307. In some cases, the targeted region of the pre-mRNA is at least about 1500 nucleotides, about 1000 nucleotides, about 800 nucleotides, about 700 nucleotides, about 600 nucleotides, about 500 nucleotides, about 400 nucleotides, about 300 nucleotides, about 200 nucleotides, about 100 nucleotides, about 80 nucleotides, about 70 nucleotides, about 60 nucleotides, about 50 nucleotides downstream of SEQ ID NO: 307. In some cases, the targeted region of the pre-mRNA is at most about 1500 nucleotides, about 1000 nucleotides, about 800 nucleotides, about 700 nucleotides, about 600 nucleotides, about 500 nucleotides, about 400 nucleotides, about 300 nucleotides, about 200 nucleotides, about 100 nucleotides, about 80 nucleotides, about 70 nucleotides, about 60 nucleotides, about 50 nucleotides downstream of genomic site GRCh38/hg38: chr7 105268806. In some cases. the targeted region of the pre-mRNA is at least about 1500 nucleotides, about 1000 nucleotides, about 800 nucleotides, about 700 nucleotides, about 600 nucleotides, about 500 nucleotides, about 400 nucleotides, about 300 nucleotides, about 200 nucleotides, about 100 nucleotides, about 80 nucleotides, about 70 nucleotides, about 60 nucleotides, about 50 nucleotides downstream of genomic site GRCh38/hg38: chr7 105268806. In some cases, the targeted region of the pre-mRNA is within a sequence SEQ ID NO: 307. In some cases, the targeted region of the pre-mRNA is within a sequence between a pair of genomic sites GRCh38/hg38: chr7 105268869, and GRCh38/hg38: chr7 105268806. In some cases, the therapeutic agent is an antisense oligomer complementary to a sequence with at least about 80%, 85%, 90%, 95%, 96%, 97%, 98%, 99% or 100% sequence identity to SEQ ID NO:307. In some cases, the therapeutic agent is an antisense oligomer complementary to a sequence with 100% sequence identity to SEQ ID NO:307. In some cases, the therapeutic agent is an antisense oligomer that has a sequence with at least about 80%, 85%, 90%, 95%, 96%, 97%, 98%, 99% or 100% sequence identity to a sequence selected from the group consisting of SEQ ID NOs: 7131-7182. In some cases, the therapeutic agent is an antisense oligomer that has a sequence selected from the group consisting of SEQ ID NOs: 7131-7182. In some cases, the target peptide sequence is a portion of SRPK2 protein, and the method treats a disease or the condition that comprises Glioblastoma Multiforme.

[0295] STK36

[0296] In some cases, the target peptide sequence is a portion of STK36 protein. In some cases, the therapeutic agent increases level of a first processed mRNA encoding a protein having a sequence SEQ ID NO: 8274, and decreases level of a second processed mRNA encoding a protein having a sequence SEQ ID NO: 510. In some cases, the targeted region of the pre-mRNA is at most about 1500 nucleotides, about 1000 nucleotides, about 800 nucleotides, about 700 nucleotides, about 600 nucleotides, about 500 nucleotides, about 400 nucleotides, about 300 nucleotides, about 200 nucleotides, about 100 nucleotides, about 80 nucleotides, about 70 nucleotides, about 60 nucleotides, about 50 nucleotides upstream of SEQ ID NO: 308. In some cases, the targeted region of the pre-mRNA is at least about 1500 nucleotides, about 1000 nucleotides, about 800 nucleotides, about 700 nucleotides, about 600 nucleotides, about 500 nucleotides, about 400 nucleotides, about 300 nucleotides, about 200 nucleotides, about 100 nucleotides, about 80 nucleotides, about 70 nucleotides, about 60 nucleotides, about 50 nucleotides upstream of SEQ ID NO: 308. In some cases, the targeted region of the pre-mRNA is at most about 1500 nucleotides, about 1000 nucleotides, about 800 nucleotides, about 700 nucleotides, about 600 nucleotides, about 500 nucleotides, about 400 nucleotides, about 300 nucleotides, about 200 nucleotides, about 100 nucleotides, about 80 nucleotides, about 70 nucleotides, about 60 nucleotides, about 50 nucleotides upstream of genomic site GRCh38/hg38: chr2 218673665. In some cases, the targeted region of the pre-mRNA is at least about 1500 nucleotides, about 1000 nucleotides, about 800 nucleotides, about 700 nucleotides, about 600 nucleotides, about 500 nucleotides, about 400 nucleotides, about 300 nucleotides, about 200 nucleotides, about 100 nucleotides, about 80 nucleotides, about 70 nucleotides, about 60 nucleotides, about 50 nucleotides upstream of genomic site GRCh38/hg38: chr2 218673665. In some cases, the targeted region of the pre-mRNA is at most about 1500 nucleotides, about 1000 nucleotides, about 800 nucleotides, about 700 nucleotides, about 600 nucleotides, about 500 nucleotides, about 400 nucleotides, about 300 nucleotides, about 200 nucleotides, about 100 nucleotides, about 80 nucleotides, about 70 nucleotides, about 60 nucleotides, about 50 nucleotides downstream of SEQ ID NO: 308. In some cases, the targeted region of the pre-mRNA is at least about 1500 nucleotides, about 1000 nucleotides, about 800 nucleotides, about 700 nucleotides, about 600 nucleotides, about 500 nucleotides, about 400 nucleotides, about 300 nucleotides, about 200 nucleotides, about 100 nucleotides, about 80 nucleotides, about 70 nucleotides, about 60 nucleotides, about 50 nucleotides downstream of SEQ ID NO: 308. In some cases, the targeted region of the pre-mRNA is at most about 1500 nucleotides, about 1000 nucleotides, about 800 nucleotides, about 700 nucleotides, about 600 nucleotides, about 500 nucleotides, about 400 nucleotides, about 300 nucleotides, about 200 nucleotides, about 100 nucleotides, about 80 nucleotides, about 70 nucleotides, about 60 nucleotides, about 50 nucleotides downstream of genomic site GRCh38/hg38: chr2 218673765. In some cases. the targeted region of the pre-mRNA is at least about 1500 nucleotides, about 1000 nucleotides, about 800 nucleotides, about 700 nucleotides, about 600 nucleotides, about 500 nucleotides, about 400 nucleotides, about 300 nucleotides, about 200 nucleotides, about 100 nucleotides, about 80 nucleotides, about 70 nucleotides, about 60 nucleotides, about 50 nucleotides downstream of genomic site GRCh38/hg38: chr2 218673765. In some cases, the targeted region of the pre-mRNA is within a sequence SEQ ID NO: 308. In some cases, the targeted region of the pre-mRNA is within a sequence between a pair of genomic sites GRCh38/hg38: chr2 218673665, and GRCh38/hg38: chr2 218673765. In some cases, the therapeutic agent is an antisense oligomer complementary to a sequence with at least about 80%, 85%, 90%, 95%, 96%, 97%, 98%, 99% or 100% sequence identity to SEQ ID NO:308. In some cases, the therapeutic agent is an antisense oligomer complementary to a sequence with 100% sequence identity to SEQ ID NO:308. In some cases, the therapeutic agent is an antisense oligomer that has a sequence with at least about 80%, 85%, 90%, 95%, 96%, 97%, 98%, 99% or 100% sequence identity to a sequence selected from the group consisting of SEQ ID NOs: 7183-7241. In some cases, the therapeutic agent is an antisense oligomer that has a sequence selected from the group consisting of SEQ ID NOs: 7183-7241. In some cases, the target peptide sequence is a portion of STK36 protein, and the method treats a disease or the condition that comprises Ovarian Serous Adenocarcinoma; Polynesian Bronchiectasis; or Kartagener Syndrome.

[0297] STRADA

[0298] In some cases, the target peptide sequence is a portion of STRADA protein. In some cases, the therapeutic agent increases level of a first processed mRNA encoding a protein having a sequence SEQ ID NO: 8275, and decreases level of a second processed mRNA encoding a protein having a sequence SEQ ID NO: 511. In some cases, the targeted region of the pre-mRNA is at most about 1500 nucleotides, about 1000 nucleotides, about 800 nucleotides, about 700 nucleotides, about 600 nucleotides, about 500 nucleotides, about 400 nucleotides, about 300 nucleotides, about 200 nucleotides, about 100 nucleotides, about 80 nucleotides, about 70 nucleotides, about 60 nucleotides, about 50 nucleotides upstream of SEQ ID NO: 309. In some cases, the targeted region of the pre-mRNA is at least about 1500 nucleotides, about 1000 nucleotides, about 800 nucleotides, about 700 nucleotides, about 600 nucleotides, about 500 nucleotides, about 400 nucleotides, about 300 nucleotides, about 200 nucleotides, about 100 nucleotides, about 80 nucleotides, about 70 nucleotides, about 60 nucleotides, about 50 nucleotides upstream of SEQ ID NO: 309. In some cases, the targeted region of the pre-mRNA is at most about 1500 nucleotides, about 1000 nucleotides, about 800 nucleotides, about 700 nucleotides, about 600 nucleotides, about 500 nucleotides, about 400 nucleotides, about 300 nucleotides, about 200 nucleotides, about 100 nucleotides, about 80 nucleotides, about 70 nucleotides, about 60 nucleotides, about 50 nucleotides upstream of genomic site GRCh38/hg38: chr17 63714108. In some cases, the targeted region of the pre-mRNA is at least about 1500 nucleotides, about 1000 nucleotides, about 800 nucleotides, about 700 nucleotides, about 600 nucleotides, about 500 nucleotides, about 400 nucleotides, about 300 nucleotides, about 200 nucleotides, about 100 nucleotides, about 80 nucleotides, about 70 nucleotides, about 60 nucleotides, about 50 nucleotides upstream of genomic site GRCh38/hg38: chr17 63714108. In some cases, the targeted region of the pre-mRNA is at most about 1500 nucleotides, about 1000 nucleotides, about 800 nucleotides, about 700 nucleotides, about 600 nucleotides, about 500 nucleotides, about 400 nucleotides, about 300 nucleotides, about 200 nucleotides, about 100 nucleotides, about 80 nucleotides, about 70 nucleotides, about 60 nucleotides, about 50 nucleotides downstream of SEQ ID NO: 309. In some cases, the targeted region of the pre-mRNA is at least about 1500 nucleotides, about 1000 nucleotides, about 800 nucleotides, about 700 nucleotides, about 600 nucleotides, about 500 nucleotides, about 400 nucleotides, about 300 nucleotides, about 200 nucleotides, about 100 nucleotides, about 80 nucleotides, about 70 nucleotides, about 60 nucleotides, about 50 nucleotides downstream of SEQ ID NO: 309. In some cases, the targeted region of the pre-mRNA is at most about 1500 nucleotides, about 1000 nucleotides, about 800 nucleotides, about 700 nucleotides, about 600 nucleotides, about 500 nucleotides, about 400 nucleotides, about 300 nucleotides, about 200 nucleotides, about 100 nucleotides, about 80 nucleotides, about 70 nucleotides, about 60 nucleotides, about 50 nucleotides downstream of genomic site GRCh38/hg38: chr17 63714006. In some cases. the targeted region of the pre-mRNA is at least about 1500 nucleotides, about 1000 nucleotides, about 800 nucleotides, about 700 nucleotides, about 600 nucleotides, about 500 nucleotides, about 400 nucleotides, about 300 nucleotides, about 200 nucleotides, about 100 nucleotides, about 80 nucleotides, about 70 nucleotides, about 60 nucleotides, about 50 nucleotides downstream of genomic site GRCh38/hg38: chr17 63714006. In some cases, the targeted region of the pre-mRNA is within a sequence SEQ ID NO: 309. In some cases, the targeted region of the pre-mRNA is within a sequence between a pair of genomic sites GRCh38/hg38: chr17 63714108, and GRCh38/hg38: chr17 63714006. In some cases, the therapeutic agent is an antisense oligomer complementary to a sequence with at least about 80%, 85%, 90%, 95%, 96%, 97%, 98%, 99% or 100% sequence identity to SEQ ID NO:309. In some cases, the therapeutic agent is an antisense oligomer complementary to a sequence with 100% sequence identity to SEQ ID NO:309. In some cases, the therapeutic agent increases level of a first processed mRNA encoding a protein having a sequence SEQ ID NO: 8276, and decreases level of a second processed mRNA encoding a protein having a sequence SEQ ID NO: 512. In some cases, the targeted region of the pre-mRNA is at most about 1500 nucleotides, about 1000 nucleotides, about 800 nucleotides, about 700 nucleotides, about 600 nucleotides, about 500 nucleotides, about 400 nucleotides, about 300 nucleotides, about 200 nucleotides, about 100 nucleotides, about 80 nucleotides, about 70 nucleotides, about 60 nucleotides, about 50 nucleotides upstream of SEQ ID NO: 310. In some cases, the targeted region of the pre-mRNA is at least about 1500 nucleotides, about 1000 nucleotides, about 800 nucleotides, about 700 nucleotides, about 600 nucleotides, about 500 nucleotides, about 400 nucleotides, about 300 nucleotides, about 200 nucleotides, about 100 nucleotides, about 80 nucleotides, about 70 nucleotides, about 60 nucleotides, about 50 nucleotides upstream of SEQ ID NO: 310. In some cases, the targeted region of the pre-mRNA is at most about 1500 nucleotides, about 1000 nucleotides, about 800 nucleotides, about 700 nucleotides, about 600 nucleotides, about 500 nucleotides, about 400 nucleotides, about 300 nucleotides, about 200 nucleotides, about 100 nucleotides, about 80 nucleotides, about 70 nucleotides, about 60 nucleotides, about 50 nucleotides upstream of genomic site GRCh38/hg38: chr17 63714108. In some cases, the targeted region of the pre-mRNA is at least about 1500 nucleotides, about 1000 nucleotides, about 800 nucleotides, about 700 nucleotides, about 600 nucleotides, about 500 nucleotides, about 400 nucleotides, about 300 nucleotides, about 200 nucleotides, about 100 nucleotides, about 80 nucleotides, about 70 nucleotides, about 60 nucleotides, about 50 nucleotides upstream of genomic site GRCh38/hg38: chr17 63714108. In some cases, the targeted region of the pre-mRNA is at most about 1500 nucleotides, about 1000 nucleotides, about 800 nucleotides, about 700 nucleotides, about 600 nucleotides, about 500 nucleotides, about 400 nucleotides, about 300 nucleotides, about 200 nucleotides, about 100 nucleotides, about 80 nucleotides, about 70 nucleotides, about 60 nucleotides, about 50 nucleotides downstream of SEQ ID NO: 310. In some cases, the targeted region of the pre-mRNA is at least about 1500 nucleotides, about 1000 nucleotides, about 800 nucleotides, about 700 nucleotides, about 600 nucleotides, about 500 nucleotides, about 400 nucleotides, about 300 nucleotides, about 200 nucleotides, about 100 nucleotides, about 80 nucleotides, about 70 nucleotides, about 60 nucleotides, about 50 nucleotides downstream of SEQ ID NO: 310. In some cases, the targeted region of the pre-mRNA is at most about 1500 nucleotides, about 1000 nucleotides, about 800 nucleotides, about 700 nucleotides, about 600 nucleotides, about 500 nucleotides, about 400 nucleotides, about 300 nucleotides, about 200 nucleotides, about 100 nucleotides, about 80 nucleotides, about 70 nucleotides, about 60 nucleotides, about 50 nucleotides downstream of genomic site GRCh38/hg38: chr17 63714006. In some cases. the targeted region of the pre-mRNA is at least about 1500 nucleotides, about 1000 nucleotides, about 800 nucleotides, about 700 nucleotides, about 600 nucleotides, about 500 nucleotides, about 400 nucleotides, about 300 nucleotides, about 200 nucleotides, about 100 nucleotides, about 80 nucleotides, about 70 nucleotides, about 60 nucleotides, about 50 nucleotides downstream of genomic site GRCh38/hg38: chr17 63714006. In some cases, the targeted region of the pre-mRNA is within a sequence SEQ ID NO: 310. In some cases, the targeted region of the pre-mRNA is within a sequence between a pair of genomic sites GRCh38/hg38: chr17 63714108, and GRCh38/hg38: chr17 63714006. In some cases, the therapeutic agent is an antisense oligomer complementary to a sequence with at least about 80%, 85%, 90%, 95%, 96%, 97%, 98%, 99% or 100% sequence identity to SEQ ID NO:310. In some cases, the therapeutic agent is an antisense oligomer complementary to a sequence with 100% sequence identity to SEQ ID NO:310. In some cases, the therapeutic agent increases level of a first processed mRNA encoding a protein having a sequence SEQ ID NO: 8277, and decreases level of a second processed mRNA encoding a protein having a sequence SEQ ID NO: 513. In some cases, the targeted region of the pre-mRNA is at most about 1500 nucleotides, about 1000 nucleotides, about 800 nucleotides, about 700 nucleotides, about 600 nucleotides, about 500 nucleotides, about 400 nucleotides, about 300 nucleotides, about 200 nucleotides, about 100 nucleotides, about 80 nucleotides, about 70 nucleotides, about 60 nucleotides, about 50 nucleotides upstream of SEQ ID NO: 311. In some cases, the targeted region of the pre-mRNA is at least about 1500 nucleotides, about 1000 nucleotides, about 800 nucleotides, about 700 nucleotides, about 600 nucleotides, about 500 nucleotides, about 400 nucleotides, about 300 nucleotides, about 200 nucleotides, about 100 nucleotides, about 80 nucleotides, about 70 nucleotides, about 60 nucleotides, about 50 nucleotides upstream of SEQ ID NO: 311. In some cases, the targeted region of the pre-mRNA is at most about 1500 nucleotides, about 1000 nucleotides, about 800 nucleotides, about 700 nucleotides, about 600 nucleotides, about 500 nucleotides, about 400 nucleotides, about 300 nucleotides, about 200 nucleotides, about 100 nucleotides, about 80 nucleotides, about 70 nucleotides, about 60 nucleotides, about 50 nucleotides upstream of genomic site GRCh38/hg38: chr17 63714108. In some cases, the targeted region of the pre-mRNA is at least about 1500 nucleotides, about 1000 nucleotides, about 800 nucleotides, about 700 nucleotides, about 600 nucleotides, about 500 nucleotides, about 400 nucleotides, about 300 nucleotides, about 200 nucleotides, about 100 nucleotides, about 80 nucleotides, about 70 nucleotides, about 60 nucleotides, about 50 nucleotides upstream of genomic site GRCh38/hg38: chr17 63714108. In some cases, the targeted region of the pre-mRNA is at most about 1500 nucleotides, about 1000 nucleotides, about 800 nucleotides, about 700 nucleotides, about 600 nucleotides, about 500 nucleotides, about 400 nucleotides, about 300 nucleotides, about 200 nucleotides, about 100 nucleotides, about 80 nucleotides, about 70 nucleotides, about 60 nucleotides, about 50 nucleotides downstream of SEQ ID NO: 311. In some cases, the targeted region of the pre-mRNA is at least about 1500 nucleotides, about 1000 nucleotides, about 800 nucleotides, about 700 nucleotides, about 600 nucleotides, about 500 nucleotides, about 400 nucleotides, about 300 nucleotides, about 200 nucleotides, about 100 nucleotides, about 80 nucleotides, about 70 nucleotides, about 60 nucleotides, about 50 nucleotides downstream of SEQ ID NO: 311. In some cases, the targeted region of the pre-mRNA is at most about 1500 nucleotides, about 1000 nucleotides, about 800 nucleotides, about 700 nucleotides, about 600 nucleotides, about 500 nucleotides, about 400 nucleotides, about 300 nucleotides, about 200 nucleotides, about 100 nucleotides, about 80 nucleotides, about 70 nucleotides, about 60 nucleotides, about 50 nucleotides downstream of genomic site GRCh38/hg38: chr17 63714006. In some cases. the targeted region of the pre-mRNA is at least about 1500 nucleotides, about 1000 nucleotides, about 800 nucleotides, about 700 nucleotides, about 600 nucleotides, about 500 nucleotides, about 400 nucleotides, about 300 nucleotides, about 200 nucleotides, about 100 nucleotides, about 80 nucleotides, about 70 nucleotides, about 60 nucleotides, about 50 nucleotides downstream of genomic site GRCh38/hg38: chr17 63714006. In some cases, the targeted region of the pre-mRNA is within a sequence SEQ ID NO: 311. In some cases, the targeted region of the pre-mRNA is within a sequence between a pair of genomic sites GRCh38/hg38: chr17 63714108, and GRCh38/hg38: chr17 63714006. In some cases, the therapeutic agent is an antisense oligomer complementary to a sequence with at least about 80%, 85%, 90%, 95%, 96%, 97%, 98%, 99% or 100% sequence identity to SEQ ID NO:311. In some cases, the therapeutic agent is an antisense oligomer complementary to a sequence with 100% sequence identity to SEQ ID NO:311. In some cases, the therapeutic agent increases level of a first processed mRNA encoding a protein having a sequence SEQ ID NO: 8278, and decreases level of a second processed mRNA encoding a protein having a sequence SEQ ID NO: 514. In some cases, the targeted region of the pre-mRNA is at most about 1500 nucleotides, about 1000 nucleotides, about 800 nucleotides, about 700 nucleotides, about 600 nucleotides, about 500 nucleotides, about 400 nucleotides, about 300 nucleotides, about 200 nucleotides, about 100 nucleotides, about 80 nucleotides, about 70 nucleotides, about 60 nucleotides, about 50 nucleotides upstream of SEQ ID NO: 312. In some cases, the targeted region of the pre-mRNA is at least about 1500 nucleotides, about 1000 nucleotides, about 800 nucleotides, about 700 nucleotides, about 600 nucleotides, about 500 nucleotides, about 400 nucleotides, about 300 nucleotides, about 200 nucleotides, about 100 nucleotides, about 80 nucleotides, about 70 nucleotides, about 60 nucleotides, about 50 nucleotides upstream of SEQ ID NO: 312. In some cases, the targeted region of the pre-mRNA is at most about 1500 nucleotides, about 1000 nucleotides, about 800 nucleotides, about 700 nucleotides, about 600 nucleotides, about 500 nucleotides, about 400 nucleotides, about 300 nucleotides, about 200 nucleotides, about 100 nucleotides, about 80 nucleotides, about 70 nucleotides, about 60 nucleotides, about 50 nucleotides upstream of genomic site GRCh38/hg38: chr17 63714108. In some cases, the targeted region of the pre-mRNA is at least about 1500 nucleotides, about 1000 nucleotides, about 800 nucleotides, about 700 nucleotides, about 600 nucleotides, about 500 nucleotides, about 400 nucleotides, about 300 nucleotides, about 200 nucleotides, about 100 nucleotides, about 80 nucleotides, about 70 nucleotides, about 60 nucleotides, about 50 nucleotides upstream of genomic site GRCh38/hg38: chr17 63714108. In some cases, the targeted region of the pre-mRNA is at most about 1500 nucleotides, about 1000 nucleotides, about 800 nucleotides, about 700 nucleotides, about 600 nucleotides, about 500 nucleotides, about 400 nucleotides, about 300 nucleotides, about 200 nucleotides, about 100 nucleotides, about 80 nucleotides, about 70 nucleotides, about 60 nucleotides, about 50 nucleotides downstream of SEQ ID NO: 312. In some cases, the targeted region of the pre-mRNA is at least about 1500 nucleotides, about 1000 nucleotides, about 800 nucleotides, about 700 nucleotides, about 600 nucleotides, about 500 nucleotides, about 400 nucleotides, about 300 nucleotides, about 200 nucleotides, about 100 nucleotides, about 80 nucleotides, about 70 nucleotides, about 60 nucleotides, about 50 nucleotides downstream of SEQ ID NO: 312. In some cases, the targeted region of the pre-mRNA is at most about 1500 nucleotides, about 1000 nucleotides, about 800 nucleotides, about 700 nucleotides, about 600 nucleotides, about 500 nucleotides, about 400 nucleotides, about 300 nucleotides, about 200 nucleotides, about 100 nucleotides, about 80 nucleotides, about 70 nucleotides, about 60 nucleotides, about 50 nucleotides downstream of genomic site GRCh38/hg38: chr17 63714006. In some cases. the targeted region of the pre-mRNA is at least about 1500 nucleotides, about 1000 nucleotides, about 800 nucleotides, about 700 nucleotides, about 600 nucleotides, about 500 nucleotides, about 400 nucleotides, about 300 nucleotides, about 200 nucleotides, about 100 nucleotides, about 80 nucleotides, about 70 nucleotides, about 60 nucleotides, about 50 nucleotides downstream of genomic site GRCh38/hg38: chr17 63714006. In some cases, the targeted region of the pre-mRNA is within a sequence SEQ ID NO: 312. In some cases, the targeted region of the pre-mRNA is within a sequence between a pair of genomic sites GRCh38/hg38: chr17 63714108, and GRCh38/hg38: chr17 63714006. In some cases, the therapeutic agent is an antisense oligomer complementary to a sequence with at least about 80%, 85%, 90%, 95%, 96%, 97%, 98%, 99% or 100% sequence identity to SEQ ID NO:312. In some cases, the therapeutic agent is an antisense oligomer complementary to a sequence with 100% sequence identity to SEQ ID NO:312. In some cases, the therapeutic agent increases level of a first processed mRNA encoding a protein having a sequence SEQ ID NO: 8279, and decreases level of a second processed mRNA encoding a protein having a sequence SEQ ID NO: 515. In some cases, the targeted region of the pre-mRNA is at most about 1500 nucleotides, about 1000 nucleotides, about 800 nucleotides, about 700 nucleotides, about 600 nucleotides, about 500 nucleotides, about 400 nucleotides, about 300 nucleotides, about 200 nucleotides, about 100 nucleotides, about 80 nucleotides, about 70 nucleotides, about 60 nucleotides, about 50 nucleotides upstream of SEQ ID NO: 313. In some cases, the targeted region of the pre-mRNA is at least about 1500 nucleotides, about 1000 nucleotides, about 800 nucleotides, about 700 nucleotides, about 600 nucleotides, about 500 nucleotides, about 400 nucleotides, about 300 nucleotides, about 200 nucleotides, about 100 nucleotides, about 80 nucleotides, about 70 nucleotides, about 60 nucleotides, about 50 nucleotides upstream of SEQ ID NO: 313. In some cases, the targeted region of the pre-mRNA is at most about 1500 nucleotides, about 1000 nucleotides, about 800 nucleotides, about 700 nucleotides, about 600 nucleotides, about 500 nucleotides, about 400 nucleotides, about 300 nucleotides, about 200 nucleotides, about 100 nucleotides, about 80 nucleotides, about 70 nucleotides, about 60 nucleotides, about 50 nucleotides upstream of genomic site GRCh38/hg38: chr17 63714108. In some cases, the targeted region of the pre-mRNA is at least about 1500 nucleotides, about 1000 nucleotides, about 800 nucleotides, about 700 nucleotides, about 600 nucleotides, about 500 nucleotides, about 400 nucleotides, about 300 nucleotides, about 200 nucleotides, about 100 nucleotides, about 80 nucleotides, about 70 nucleotides, about 60 nucleotides, about 50 nucleotides upstream of genomic site GRCh38/hg38: chr17 63714108. In some cases, the targeted region of the pre-mRNA is at most about 1500 nucleotides, about 1000 nucleotides, about 800 nucleotides, about 700 nucleotides, about 600 nucleotides, about 500 nucleotides, about 400 nucleotides, about 300 nucleotides, about 200 nucleotides, about 100 nucleotides, about 80 nucleotides, about 70 nucleotides, about 60 nucleotides, about 50 nucleotides downstream of SEQ ID NO: 313. In some cases, the targeted region of the pre-mRNA is at least about 1500 nucleotides, about 1000 nucleotides, about 800 nucleotides, about 700 nucleotides, about 600 nucleotides, about 500 nucleotides, about 400 nucleotides, about 300 nucleotides, about 200 nucleotides, about 100 nucleotides, about 80 nucleotides, about 70 nucleotides, about 60 nucleotides, about 50 nucleotides downstream of SEQ ID NO: 313. In some cases, the targeted region of the pre-mRNA is at most about 1500 nucleotides, about 1000 nucleotides, about 800 nucleotides, about 700 nucleotides, about 600 nucleotides, about 500 nucleotides, about 400 nucleotides, about 300 nucleotides, about 200 nucleotides, about 100 nucleotides, about 80 nucleotides, about 70 nucleotides, about 60 nucleotides, about 50 nucleotides downstream of genomic site GRCh38/hg38: chr17 63714006. In some cases. the targeted region of the pre-mRNA is at least about 1500 nucleotides, about 1000 nucleotides, about 800 nucleotides, about 700 nucleotides, about 600 nucleotides, about 500 nucleotides, about 400 nucleotides, about 300 nucleotides, about 200 nucleotides, about 100 nucleotides, about 80 nucleotides, about 70 nucleotides, about 60 nucleotides, about 50 nucleotides downstream of genomic site GRCh38/hg38: chr17 63714006. In some cases, the targeted region of the pre-mRNA is within a sequence SEQ ID NO: 313. In some cases, the targeted region of the pre-mRNA is within a sequence between a pair of genomic sites GRCh38/hg38: chr17 63714108, and GRCh38/hg38: chr17 63714006. In some cases, the therapeutic agent is an antisense oligomer complementary to a sequence with at least about 80%, 85%, 90%, 95%, 96%, 97%, 98%, 99% or 100% sequence identity to SEQ ID NO:313. In some cases, the therapeutic agent is an antisense oligomer complementary to a sequence with 100% sequence identity to SEQ ID NO:313. In some cases, the therapeutic agent increases level of a first processed mRNA encoding a protein having a sequence SEQ ID NO: 8280, and decreases level of a second processed mRNA encoding a protein having a sequence SEQ ID NO: 516. In some cases, the targeted region of the pre-mRNA is at most about 1500 nucleotides, about 1000 nucleotides, about 800 nucleotides, about 700 nucleotides, about 600 nucleotides, about 500 nucleotides, about 400 nucleotides, about 300 nucleotides, about 200 nucleotides, about 100 nucleotides, about 80 nucleotides, about 70 nucleotides, about 60 nucleotides, about 50 nucleotides upstream of SEQ ID NO: 314. In some cases, the targeted region of the pre-mRNA is at least about 1500 nucleotides, about 1000 nucleotides, about 800 nucleotides, about 700 nucleotides, about 600 nucleotides, about 500 nucleotides, about 400 nucleotides, about 300 nucleotides, about 200 nucleotides, about 100 nucleotides, about 80 nucleotides, about 70 nucleotides, about 60 nucleotides, about 50 nucleotides upstream of SEQ ID NO: 314. In some cases, the targeted region of the pre-mRNA is at most about 1500 nucleotides, about 1000 nucleotides, about 800 nucleotides, about 700 nucleotides, about 600 nucleotides, about 500 nucleotides, about 400 nucleotides, about 300 nucleotides, about 200 nucleotides, about 100 nucleotides, about 80 nucleotides, about 70 nucleotides, about 60 nucleotides, about 50 nucleotides upstream of genomic site GRCh38/hg38: chr17 63714108. In some cases, the targeted region of the pre-mRNA is at least about 1500 nucleotides, about 1000 nucleotides, about 800 nucleotides, about 700 nucleotides, about 600 nucleotides, about 500 nucleotides, about 400 nucleotides, about 300 nucleotides, about 200 nucleotides, about 100 nucleotides, about 80 nucleotides, about 70 nucleotides, about 60 nucleotides, about 50 nucleotides upstream of genomic site GRCh38/hg38: chr17 63714108. In some cases, the targeted region of the pre-mRNA is at most about 1500 nucleotides, about 1000 nucleotides, about 800 nucleotides, about 700 nucleotides, about 600 nucleotides, about 500 nucleotides, about 400 nucleotides, about 300 nucleotides, about 200 nucleotides, about 100 nucleotides, about 80 nucleotides, about 70 nucleotides, about 60 nucleotides, about 50 nucleotides downstream of SEQ ID NO: 314. In some cases, the targeted region of the pre-mRNA is at least about 1500 nucleotides, about 1000 nucleotides, about 800 nucleotides, about 700 nucleotides, about 600 nucleotides, about 500 nucleotides, about 400 nucleotides, about 300 nucleotides, about 200 nucleotides, about 100 nucleotides, about 80 nucleotides, about 70 nucleotides, about 60 nucleotides, about 50 nucleotides downstream of SEQ ID NO: 314. In some cases, the targeted region of the pre-mRNA is at most about 1500 nucleotides, about 1000 nucleotides, about 800 nucleotides, about 700 nucleotides, about 600 nucleotides, about 500 nucleotides, about 400 nucleotides, about 300 nucleotides, about 200 nucleotides, about 100 nucleotides, about 80 nucleotides, about 70 nucleotides, about 60 nucleotides, about 50 nucleotides downstream of genomic site GRCh38/hg38: chr17 63714006. In some cases. the targeted region of the pre-mRNA is at least about 1500 nucleotides, about 1000 nucleotides, about 800 nucleotides, about 700 nucleotides, about 600 nucleotides, about 500 nucleotides, about 400 nucleotides, about 300 nucleotides, about 200 nucleotides, about 100 nucleotides, about 80 nucleotides, about 70 nucleotides, about 60 nucleotides, about 50 nucleotides downstream of genomic site GRCh38/hg38: chr17 63714006. In some cases, the targeted region of the pre-mRNA is within a sequence SEQ ID NO: 314. In some cases, the targeted region of the pre-mRNA is within a sequence between a pair of genomic sites GRCh38/hg38: chr17 63714108, and GRCh38/hg38: chr17 63714006. In some cases, the therapeutic agent is an antisense oligomer complementary to a sequence with at least about 80%, 85%, 90%, 95%, 96%, 97%, 98%, 99% or 100% sequence identity to SEQ ID NO:314. In some cases, the therapeutic agent is an antisense oligomer complementary to a sequence with 100% sequence identity to SEQ ID NO:314. In some cases, the therapeutic agent increases level of a first processed mRNA encoding a protein having a sequence SEQ ID NO: 8281, and decreases level of a second processed mRNA encoding a protein having a sequence SEQ ID NO: 517. In some cases, the targeted region of the pre-mRNA is at most about 1500 nucleotides, about 1000 nucleotides, about 800 nucleotides, about 700 nucleotides, about 600 nucleotides, about 500 nucleotides, about 400 nucleotides, about 300 nucleotides, about 200 nucleotides, about 100 nucleotides, about 80 nucleotides, about 70 nucleotides, about 60 nucleotides, about 50 nucleotides upstream of SEQ ID NO: 315. In some cases, the targeted region of the pre-mRNA is at least about 1500 nucleotides, about 1000 nucleotides, about 800 nucleotides, about 700 nucleotides, about 600 nucleotides, about 500 nucleotides, about 400 nucleotides, about 300 nucleotides, about 200 nucleotides, about 100 nucleotides, about 80 nucleotides, about 70 nucleotides, about 60 nucleotides, about 50 nucleotides upstream of SEQ ID NO: 315. In some cases, the targeted region of the pre-mRNA is at most about 1500 nucleotides, about 1000 nucleotides, about 800 nucleotides, about 700 nucleotides, about 600 nucleotides, about 500 nucleotides, about 400 nucleotides, about 300 nucleotides, about 200 nucleotides, about 100 nucleotides, about 80 nucleotides, about 70 nucleotides, about 60 nucleotides, about 50 nucleotides upstream of genomic site GRCh38/hg38: chr17 63714108. In some cases, the targeted region of the pre-mRNA is at least about 1500 nucleotides, about 1000 nucleotides, about 800 nucleotides, about 700 nucleotides, about 600 nucleotides, about 500 nucleotides, about 400 nucleotides, about 300 nucleotides, about 200 nucleotides, about 100 nucleotides, about 80 nucleotides, about 70 nucleotides, about 60 nucleotides, about 50 nucleotides upstream of genomic site GRCh38/hg38: chr17 63714108. In some cases, the targeted region of the pre-mRNA is at most about 1500 nucleotides, about 1000 nucleotides, about 800 nucleotides, about 700 nucleotides, about 600 nucleotides, about 500 nucleotides, about 400 nucleotides, about 300 nucleotides, about 200 nucleotides, about 100 nucleotides, about 80 nucleotides, about 70 nucleotides, about 60 nucleotides, about 50 nucleotides downstream of SEQ ID NO: 315. In some cases, the targeted region of the pre-mRNA is at least about 1500 nucleotides, about 1000 nucleotides, about 800 nucleotides, about 700 nucleotides, about 600 nucleotides, about 500 nucleotides, about 400 nucleotides, about 300 nucleotides, about 200 nucleotides, about 100 nucleotides, about 80 nucleotides, about 70 nucleotides, about 60 nucleotides, about 50 nucleotides downstream of SEQ ID NO: 315. In some cases, the targeted region of the pre-mRNA is at most about 1500 nucleotides, about 1000 nucleotides, about 800 nucleotides, about 700 nucleotides, about 600 nucleotides, about 500 nucleotides, about 400 nucleotides, about 300 nucleotides, about 200 nucleotides, about 100 nucleotides, about 80 nucleotides, about 70 nucleotides, about 60 nucleotides, about 50 nucleotides downstream of genomic site GRCh38/hg38: chr17 63714006. In some cases. the targeted region of the pre-mRNA is at least about 1500 nucleotides, about 1000 nucleotides, about 800 nucleotides, about 700 nucleotides, about 600 nucleotides, about 500 nucleotides, about 400 nucleotides, about 300 nucleotides, about 200 nucleotides, about 100 nucleotides, about 80 nucleotides, about 70 nucleotides, about 60 nucleotides, about 50 nucleotides downstream of genomic site GRCh38/hg38: chr17 63714006. In some cases, the targeted region of the pre-mRNA is within a sequence SEQ ID NO: 315. In some cases, the targeted region of the pre-mRNA is within a sequence between a pair of genomic sites GRCh38/hg38: chr17 63714108, and GRCh38/hg38: chr17 63714006. In some cases, the therapeutic agent is an antisense oligomer complementary to a sequence with at least about 80%, 85%, 90%, 95%, 96%, 97%, 98%, 99% or 100% sequence identity to SEQ ID NO:315. In some cases, the therapeutic agent is an antisense oligomer complementary to a sequence with 100% sequence identity to SEQ ID NO:315. In some cases, the therapeutic agent increases level of a first processed mRNA encoding a protein having a sequence SEQ ID NO: 8282, and decreases level of a second processed mRNA encoding a protein having a sequence SEQ ID NO: 518. In some cases, the targeted region of the pre-mRNA is at most about 1500 nucleotides, about 1000 nucleotides, about 800 nucleotides, about 700 nucleotides, about 600 nucleotides, about 500 nucleotides, about 400 nucleotides, about 300 nucleotides, about 200 nucleotides, about 100 nucleotides, about 80 nucleotides, about 70 nucleotides, about 60 nucleotides, about 50 nucleotides upstream of SEQ ID NO: 316. In some cases, the targeted region of the pre-mRNA is at least about 1500 nucleotides, about 1000 nucleotides, about 800 nucleotides, about 700 nucleotides, about 600 nucleotides, about 500 nucleotides, about 400 nucleotides, about 300 nucleotides, about 200 nucleotides, about 100 nucleotides, about 80 nucleotides, about 70 nucleotides, about 60 nucleotides, about 50 nucleotides upstream of SEQ ID NO: 316. In some cases, the targeted region of the pre-mRNA is at most about 1500 nucleotides, about 1000 nucleotides, about 800 nucleotides, about 700 nucleotides, about 600 nucleotides, about 500 nucleotides, about 400 nucleotides, about 300 nucleotides, about 200 nucleotides, about 100 nucleotides, about 80 nucleotides, about 70 nucleotides, about 60 nucleotides, about 50 nucleotides upstream of genomic site GRCh38/hg38: chr17 63714108. In some cases, the targeted region of the pre-mRNA is at least about 1500 nucleotides, about 1000 nucleotides, about 800 nucleotides, about 700 nucleotides, about 600 nucleotides, about 500 nucleotides, about 400 nucleotides, about 300 nucleotides, about 200 nucleotides, about 100 nucleotides, about 80 nucleotides, about 70 nucleotides, about 60 nucleotides, about 50 nucleotides upstream of genomic site GRCh38/hg38: chr17 63714108. In some cases, the targeted region of the pre-mRNA is at most about 1500 nucleotides, about 1000 nucleotides, about 800 nucleotides, about 700 nucleotides, about 600 nucleotides, about 500 nucleotides, about 400 nucleotides, about 300 nucleotides, about 200 nucleotides, about 100 nucleotides, about 80 nucleotides, about 70 nucleotides, about 60 nucleotides, about 50 nucleotides downstream of SEQ ID NO: 316. In some cases, the targeted region of the pre-mRNA is at least about 1500 nucleotides, about 1000 nucleotides, about 800 nucleotides, about 700 nucleotides, about 600 nucleotides, about 500 nucleotides, about 400 nucleotides, about 300 nucleotides, about 200 nucleotides, about 100 nucleotides, about 80 nucleotides, about 70 nucleotides, about 60 nucleotides, about 50 nucleotides downstream of SEQ ID NO: 316. In some cases, the targeted region of the pre-mRNA is at most about 1500 nucleotides, about 1000 nucleotides, about 800 nucleotides, about 700 nucleotides, about 600 nucleotides, about 500 nucleotides, about 400 nucleotides, about 300 nucleotides, about 200 nucleotides, about 100 nucleotides, about 80 nucleotides, about 70 nucleotides, about 60 nucleotides, about 50 nucleotides downstream of genomic site GRCh38/hg38: chr17 63714006. In some cases. the targeted region of the pre-mRNA is at least about 1500 nucleotides, about 1000 nucleotides, about 800 nucleotides, about 700 nucleotides, about 600 nucleotides, about 500 nucleotides, about 400 nucleotides, about 300 nucleotides, about 200 nucleotides, about 100 nucleotides, about 80 nucleotides, about 70 nucleotides, about 60 nucleotides, about 50 nucleotides downstream of genomic site GRCh38/hg38: chr17 63714006. In some cases, the targeted region of the pre-mRNA is within a sequence SEQ ID NO: 316. In some cases, the targeted region of the pre-mRNA is within a sequence between a pair of genomic sites GRCh38/hg38: chr17 63714108, and GRCh38/hg38: chr17 63714006. In some cases, the therapeutic agent is an antisense oligomer complementary to a sequence with at least about 80%, 85%, 90%, 95%, 96%, 97%, 98%, 99% or 100% sequence identity to SEQ ID NO:316. In some cases, the therapeutic agent is an antisense oligomer complementary to a sequence with 100% sequence identity to SEQ ID NO:316. In some cases, the therapeutic agent increases level of a first processed mRNA encoding a protein having a sequence SEQ ID NO: 8283, and decreases level of a second processed mRNA encoding a protein having a sequence SEQ ID NO: 519. In some cases, the targeted region of the pre-mRNA is at most about 1500 nucleotides, about 1000 nucleotides, about 800 nucleotides, about 700 nucleotides, about 600 nucleotides, about 500 nucleotides, about 400 nucleotides, about 300 nucleotides, about 200 nucleotides, about 100 nucleotides, about 80 nucleotides, about 70 nucleotides, about 60 nucleotides, about 50 nucleotides upstream of SEQ ID NO: 317. In some cases, the targeted region of the pre-mRNA is at least about 1500 nucleotides, about 1000 nucleotides, about 800 nucleotides, about 700 nucleotides, about 600 nucleotides, about 500 nucleotides, about 400 nucleotides, about 300 nucleotides, about 200 nucleotides, about 100 nucleotides, about 80 nucleotides, about 70 nucleotides, about 60 nucleotides, about 50 nucleotides upstream of SEQ ID NO: 317. In some cases, the targeted region of the pre-mRNA is at most about 1500 nucleotides, about 1000 nucleotides, about 800 nucleotides, about 700 nucleotides, about 600 nucleotides, about 500 nucleotides, about 400 nucleotides, about 300 nucleotides, about 200 nucleotides, about 100 nucleotides, about 80 nucleotides, about 70 nucleotides, about 60 nucleotides, about 50 nucleotides upstream of genomic site GRCh38/hg38: chr17 63714108. In some cases, the targeted region of the pre-mRNA is at least about 1500 nucleotides, about 1000 nucleotides, about 800 nucleotides, about 700 nucleotides, about 600 nucleotides, about 500 nucleotides, about 400 nucleotides, about 300 nucleotides, about 200 nucleotides, about 100 nucleotides, about 80 nucleotides, about 70 nucleotides, about 60 nucleotides, about 50 nucleotides upstream of genomic site GRCh38/hg38: chr17 63714108. In some cases, the targeted region of the pre-mRNA is at most about 1500 nucleotides, about 1000 nucleotides, about 800 nucleotides, about 700 nucleotides, about 600 nucleotides, about 500 nucleotides, about 400 nucleotides, about 300 nucleotides, about 200 nucleotides, about 100 nucleotides, about 80 nucleotides, about 70 nucleotides, about 60 nucleotides, about 50 nucleotides downstream of SEQ ID NO: 317. In some cases, the targeted region of the pre-mRNA is at least about 1500 nucleotides, about 1000 nucleotides, about 800 nucleotides, about 700 nucleotides, about 600 nucleotides, about 500 nucleotides, about 400 nucleotides, about 300 nucleotides, about 200 nucleotides, about 100 nucleotides, about 80 nucleotides, about 70 nucleotides, about 60 nucleotides, about 50 nucleotides downstream of SEQ ID NO: 317. In some cases, the targeted region of the pre-mRNA is at most about 1500 nucleotides, about 1000 nucleotides, about 800 nucleotides, about 700 nucleotides, about 600 nucleotides, about 500 nucleotides, about 400 nucleotides, about 300 nucleotides, about 200 nucleotides, about 100 nucleotides, about 80 nucleotides, about 70 nucleotides, about 60 nucleotides, about 50 nucleotides downstream of genomic site GRCh38/hg38: chr17 63714006. In some cases. the targeted region of the pre-mRNA is at least about 1500 nucleotides, about 1000 nucleotides, about 800 nucleotides, about 700 nucleotides, about 600 nucleotides, about 500 nucleotides, about 400 nucleotides, about 300 nucleotides, about 200 nucleotides, about 100 nucleotides, about 80 nucleotides, about 70 nucleotides, about 60 nucleotides, about 50 nucleotides downstream of genomic site GRCh38/hg38: chr17 63714006. In some cases, the targeted region of the pre-mRNA is within a sequence SEQ ID NO: 317. In some cases, the targeted region of the pre-mRNA is within a sequence between a pair of genomic sites GRCh38/hg38: chr17 63714108, and GRCh38/hg38: chr17 63714006. In some cases, the therapeutic agent is an antisense oligomer complementary to a sequence with at least about 80%, 85%, 90%, 95%, 96%, 97%, 98%, 99% or 100% sequence identity to SEQ ID NO:317. In some cases, the therapeutic agent is an antisense oligomer complementary to a sequence with 100% sequence identity to SEQ ID NO:317. In some cases, the therapeutic agent is an antisense oligomer that has a sequence with at least about 80%, 85%, 90%, 95%, 96%, 97%, 98%, 99% or 100% sequence identity to a sequence selected from the group consisting of SEQ ID NOs: 7242-7301. In some cases, the therapeutic agent is an antisense oligomer that has a sequence selected from the group consisting of SEQ ID NOs: 7242-7301. In some cases, the target peptide sequence is a portion of STRADA protein, and the method treats a disease or the condition that comprises Polyhydramnios, Megalencephaly, and Symptomatic Epilepsy; Hydrocephalus; Intellectual Disability; or Epileptic encephalopathy. In some cases, the method treats a cancer that is associated with STRADA protein.

[0299] SUMO1

[0300] In some cases, the target peptide sequence is a portion of SUMO1 protein. In some cases, the therapeutic agent increases level of a first processed mRNA encoding a protein having a sequence SEQ ID NO: 8284, and decreases level of a second processed mRNA encoding a protein having a sequence SEQ ID NO: 520. In some cases, the targeted region of the pre-mRNA is at most about 1500 nucleotides, about 1000 nucleotides, about 800 nucleotides, about 700 nucleotides, about 600 nucleotides, about 500 nucleotides, about 400 nucleotides, about 300 nucleotides, about 200 nucleotides, about 100 nucleotides, about 80 nucleotides, about 70 nucleotides, about 60 nucleotides, about 50 nucleotides upstream of SEQ ID NO: 318. In some cases, the targeted region of the pre-mRNA is at least about 1500 nucleotides, about 1000 nucleotides, about 800 nucleotides, about 700 nucleotides, about 600 nucleotides, about 500 nucleotides, about 400 nucleotides, about 300 nucleotides, about 200 nucleotides, about 100 nucleotides, about 80 nucleotides, about 70 nucleotides, about 60 nucleotides, about 50 nucleotides upstream of SEQ ID NO: 318. In some cases, the targeted region of the pre-mRNA is at most about 1500 nucleotides, about 1000 nucleotides, about 800 nucleotides, about 700 nucleotides, about 600 nucleotides, about 500 nucleotides, about 400 nucleotides, about 300 nucleotides, about 200 nucleotides, about 100 nucleotides, about 80 nucleotides, about 70 nucleotides, about 60 nucleotides, about 50 nucleotides upstream of genomic site GRCh38/hg38: chr2 202214429. In some cases, the targeted region of the pre-mRNA is at least about 1500 nucleotides, about 1000 nucleotides, about 800 nucleotides, about 700 nucleotides, about 600 nucleotides, about 500 nucleotides, about 400 nucleotides, about 300 nucleotides, about 200 nucleotides, about 100 nucleotides, about 80 nucleotides, about 70 nucleotides, about 60 nucleotides, about 50 nucleotides upstream of genomic site GRCh38/hg38: chr2 202214429. In some cases, the targeted region of the pre-mRNA is at most about 1500 nucleotides, about 1000 nucleotides, about 800 nucleotides, about 700 nucleotides, about 600 nucleotides, about 500 nucleotides, about 400 nucleotides, about 300 nucleotides, about 200 nucleotides, about 100 nucleotides, about 80 nucleotides, about 70 nucleotides, about 60 nucleotides, about 50 nucleotides downstream of SEQ ID NO: 318. In some cases, the targeted region of the pre-mRNA is at least about 1500 nucleotides, about 1000 nucleotides, about 800 nucleotides, about 700 nucleotides, about 600 nucleotides, about 500 nucleotides, about 400 nucleotides, about 300 nucleotides, about 200 nucleotides, about 100 nucleotides, about 80 nucleotides, about 70 nucleotides, about 60 nucleotides, about 50 nucleotides downstream of SEQ ID NO: 318. In some cases, the targeted region of the pre-mRNA is at most about 1500 nucleotides, about 1000 nucleotides, about 800 nucleotides, about 700 nucleotides, about 600 nucleotides, about 500 nucleotides, about 400 nucleotides, about 300 nucleotides, about 200 nucleotides, about 100 nucleotides, about 80 nucleotides, about 70 nucleotides, about 60 nucleotides, about 50 nucleotides downstream of genomic site GRCh38/hg38: chr2 202214357. In some cases. the targeted region of the pre-mRNA is at least about 1500 nucleotides, about 1000 nucleotides, about 800 nucleotides, about 700 nucleotides, about 600 nucleotides, about 500 nucleotides, about 400 nucleotides, about 300 nucleotides, about 200 nucleotides, about 100 nucleotides, about 80 nucleotides, about 70 nucleotides, about 60 nucleotides, about 50 nucleotides downstream of genomic site GRCh38/hg38: chr2 202214357. In some cases, the targeted region of the pre-mRNA is within a sequence SEQ ID NO: 318. In some cases, the targeted region of the pre-mRNA is within a sequence between a pair of genomic sites GRCh38/hg38: chr2 202214429, and GRCh38/hg38: chr2 202214357. In some cases, the therapeutic agent is an antisense oligomer complementary to a sequence with at least about 80%, 85%, 90%, 95%, 96%, 97%, 98%, 99% or 100% sequence identity to SEQ ID NO:318. In some cases, the therapeutic agent is an antisense oligomer complementary to a sequence with 100% sequence identity to SEQ ID NO:318. In some cases, the therapeutic agent is an antisense oligomer that has a sequence with at least about 80%, 85%, 90%, 95%, 96%, 97%, 98%, 99% or 100% sequence identity to a sequence selected from the group consisting of SEQ ID NOs: 7302-7355. In some cases, the therapeutic agent is an antisense oligomer that has a sequence selected from the group consisting of SEQ ID NOs: 7302-7355. In some cases, the target peptide sequence is a portion of SUMO1 protein, and the method treats a disease or the condition that comprises Oligodontia; Hypodontia; or Orofacial cleft 10.

[0301] TBL1XR1

[0302] In some cases, the target peptide sequence is a portion of TBL1XR1 protein. In some cases, the therapeutic agent increases level of a first processed mRNA encoding a protein having a sequence SEQ ID NO: 8285, and decreases level of a second processed mRNA encoding a protein having a sequence SEQ ID NO: 521. In some cases, the targeted region of the pre-mRNA is at most about 1500 nucleotides, about 1000 nucleotides, about 800 nucleotides, about 700 nucleotides, about 600 nucleotides, about 500 nucleotides, about 400 nucleotides, about 300 nucleotides, about 200 nucleotides, about 100 nucleotides, about 80 nucleotides, about 70 nucleotides, about 60 nucleotides, about 50 nucleotides upstream of SEQ ID NO: 319. In some cases, the targeted region of the pre-mRNA is at least about 1500 nucleotides, about 1000 nucleotides, about 800 nucleotides, about 700 nucleotides, about 600 nucleotides, about 500 nucleotides, about 400 nucleotides, about 300 nucleotides, about 200 nucleotides, about 100 nucleotides, about 80 nucleotides, about 70 nucleotides, about 60 nucleotides, about 50 nucleotides upstream of SEQ ID NO: 319. In some cases, the targeted region of the pre-mRNA is at most about 1500 nucleotides, about 1000 nucleotides, about 800 nucleotides, about 700 nucleotides, about 600 nucleotides, about 500 nucleotides, about 400 nucleotides, about 300 nucleotides, about 200 nucleotides, about 100 nucleotides, about 80 nucleotides, about 70 nucleotides, about 60 nucleotides, about 50 nucleotides upstream of genomic site GRCh38/hg38: chr3 177065022. In some cases, the targeted region of the pre-mRNA is at least about 1500 nucleotides, about 1000 nucleotides, about 800 nucleotides, about 700 nucleotides, about 600 nucleotides, about 500 nucleotides, about 400 nucleotides, about 300 nucleotides, about 200 nucleotides, about 100 nucleotides, about 80 nucleotides, about 70 nucleotides, about 60 nucleotides, about 50 nucleotides upstream of genomic site GRCh38/hg38: chr3 177065022. In some cases, the targeted region of the pre-mRNA is at most about 1500 nucleotides, about 1000 nucleotides, about 800 nucleotides, about 700 nucleotides, about 600 nucleotides, about 500 nucleotides, about 400 nucleotides, about 300 nucleotides, about 200 nucleotides, about 100 nucleotides, about 80 nucleotides, about 70 nucleotides, about 60 nucleotides, about 50 nucleotides downstream of SEQ ID NO: 319. In some cases, the targeted region of the pre-mRNA is at least about 1500 nucleotides, about 1000 nucleotides, about 800 nucleotides, about 700 nucleotides, about 600 nucleotides, about 500 nucleotides, about 400 nucleotides, about 300 nucleotides, about 200 nucleotides, about 100 nucleotides, about 80 nucleotides, about 70 nucleotides, about 60 nucleotides, about 50 nucleotides downstream of SEQ ID NO: 319. In some cases, the targeted region of the pre-mRNA is at most about 1500 nucleotides, about 1000 nucleotides, about 800 nucleotides, about 700 nucleotides, about 600 nucleotides, about 500 nucleotides, about 400 nucleotides, about 300 nucleotides, about 200 nucleotides, about 100 nucleotides, about 80 nucleotides, about 70 nucleotides, about 60 nucleotides, about 50 nucleotides downstream of genomic site GRCh38/hg38: chr3 177064920. In some cases. the targeted region of the pre-mRNA is at least about 1500 nucleotides, about 1000 nucleotides, about 800 nucleotides, about 700 nucleotides, about 600 nucleotides, about 500 nucleotides, about 400 nucleotides, about 300 nucleotides, about 200 nucleotides, about 100 nucleotides, about 80 nucleotides, about 70 nucleotides, about 60 nucleotides, about 50 nucleotides downstream of genomic site GRCh38/hg38: chr3 177064920. In some cases, the targeted region of the pre-mRNA is within a sequence SEQ ID NO: 319. In some cases, the targeted region of the pre-mRNA is within a sequence between a pair of genomic sites GRCh38/hg38: chr3 177065022, and GRCh38/hg38: chr3 177064920. In some cases, the therapeutic agent is an antisense oligomer complementary to a sequence with at least about 80%, 85%, 90%, 95%, 96%, 97%, 98%, 99% or 100% sequence identity to SEQ ID NO:319. In some cases, the therapeutic agent is an antisense oligomer complementary to a sequence with 100% sequence identity to SEQ ID NO:319. In some cases, the therapeutic agent increases level of a first processed mRNA encoding a protein having a sequence SEQ ID NO: 8286, and decreases level of a second processed mRNA encoding a protein having a sequence SEQ ID NO: 522. In some cases, the targeted region of the pre-mRNA is at most about 1500 nucleotides, about 1000 nucleotides, about 800 nucleotides, about 700 nucleotides, about 600 nucleotides, about 500 nucleotides, about 400 nucleotides, about 300 nucleotides, about 200 nucleotides, about 100 nucleotides, about 80 nucleotides, about 70 nucleotides, about 60 nucleotides, about 50 nucleotides upstream of SEQ ID NO: 320. In some cases, the targeted region of the pre-mRNA is at least about 1500 nucleotides, about 1000 nucleotides, about 800 nucleotides, about 700 nucleotides, about 600 nucleotides, about 500 nucleotides, about 400 nucleotides, about 300 nucleotides, about 200 nucleotides, about 100 nucleotides, about 80 nucleotides, about 70 nucleotides, about 60 nucleotides, about 50 nucleotides upstream of SEQ ID NO: 320. In some cases, the targeted region of the pre-mRNA is at most about 1500 nucleotides, about 1000 nucleotides, about 800 nucleotides, about 700 nucleotides, about 600 nucleotides, about 500 nucleotides, about 400 nucleotides, about 300 nucleotides, about 200 nucleotides, about 100 nucleotides, about 80 nucleotides, about 70 nucleotides, about 60 nucleotides, about 50 nucleotides upstream of genomic site GRCh38/hg38: chr3 177065022. In some cases, the targeted region of the pre-mRNA is at least about 1500 nucleotides, about 1000 nucleotides, about 800 nucleotides, about 700 nucleotides, about 600 nucleotides, about 500 nucleotides, about 400 nucleotides, about 300 nucleotides, about 200 nucleotides, about 100 nucleotides, about 80 nucleotides, about 70 nucleotides, about 60 nucleotides, about 50 nucleotides upstream of genomic site GRCh38/hg38: chr3 177065022. In some cases, the targeted region of the pre-mRNA is at most about 1500 nucleotides, about 1000 nucleotides, about 800 nucleotides, about 700 nucleotides, about 600 nucleotides, about 500 nucleotides, about 400 nucleotides, about 300 nucleotides, about 200 nucleotides, about 100 nucleotides, about 80 nucleotides, about 70 nucleotides, about 60 nucleotides, about 50 nucleotides downstream of SEQ ID NO: 320. In some cases, the targeted region of the pre-mRNA is at least about 1500 nucleotides, about 1000 nucleotides, about 800 nucleotides, about 700 nucleotides, about 600 nucleotides, about 500 nucleotides, about 400 nucleotides, about 300 nucleotides, about 200 nucleotides, about 100 nucleotides, about 80 nucleotides, about 70 nucleotides, about 60 nucleotides, about 50 nucleotides downstream of SEQ ID NO: 320. In some cases, the targeted region of the pre-mRNA is at most about 1500 nucleotides, about 1000 nucleotides, about 800 nucleotides, about 700 nucleotides, about 600 nucleotides, about 500 nucleotides, about 400 nucleotides, about 300 nucleotides, about 200 nucleotides, about 100 nucleotides, about 80 nucleotides, about 70 nucleotides, about 60 nucleotides, about 50 nucleotides downstream of genomic site GRCh38/hg38: chr3 177064920. In some cases. the targeted region of the pre-mRNA is at least about 1500 nucleotides, about 1000 nucleotides, about 800 nucleotides, about 700 nucleotides, about 600 nucleotides, about 500 nucleotides, about 400 nucleotides, about 300 nucleotides, about 200 nucleotides, about 100 nucleotides, about 80 nucleotides, about 70 nucleotides, about 60 nucleotides, about 50 nucleotides downstream of genomic site GRCh38/hg38: chr3 177064920. In some cases, the targeted region of the pre-mRNA is within a sequence SEQ ID NO: 320. In some cases, the targeted region of the pre-mRNA is within a sequence between a pair of genomic sites GRCh38/hg38: chr3 177065022, and GRCh38/hg38: chr3 177064920. In some cases, the therapeutic agent is an antisense oligomer complementary to a sequence with at least about 80%, 85%, 90%, 95%, 96%, 97%, 98%, 99% or 100% sequence identity to SEQ ID NO:320. In some cases, the therapeutic agent is an antisense oligomer complementary to a sequence with 100% sequence identity to SEQ ID NO:320. In some cases, the therapeutic agent increases level of a first processed mRNA encoding a protein having a sequence SEQ ID NO: 8287, and decreases level of a second processed mRNA encoding a protein having a sequence SEQ ID NO: 523. In some cases, the targeted region of the pre-mRNA is at most about 1500 nucleotides, about 1000 nucleotides, about 800 nucleotides, about 700 nucleotides, about 600 nucleotides, about 500 nucleotides, about 400 nucleotides, about 300 nucleotides, about 200 nucleotides, about 100 nucleotides, about 80 nucleotides, about 70 nucleotides, about 60 nucleotides, about 50 nucleotides upstream of SEQ ID NO: 321. In some cases, the targeted region of the pre-mRNA is at least about 1500 nucleotides, about 1000 nucleotides, about 800 nucleotides, about 700 nucleotides, about 600 nucleotides, about 500 nucleotides, about 400 nucleotides, about 300 nucleotides, about 200 nucleotides, about 100 nucleotides, about 80 nucleotides, about 70 nucleotides, about 60 nucleotides, about 50 nucleotides upstream of SEQ ID NO: 321. In some cases, the targeted region of the pre-mRNA is at most about 1500 nucleotides, about 1000 nucleotides, about 800 nucleotides, about 700 nucleotides, about 600 nucleotides, about 500 nucleotides, about 400 nucleotides, about 300 nucleotides, about 200 nucleotides, about 100 nucleotides, about 80 nucleotides, about 70 nucleotides, about 60 nucleotides, about 50 nucleotides upstream of genomic site GRCh38/hg38: chr3 177065022. In some cases, the targeted region of the pre-mRNA is at least about 1500 nucleotides, about 1000 nucleotides, about 800 nucleotides, about 700 nucleotides, about 600 nucleotides, about 500 nucleotides, about 400 nucleotides, about 300 nucleotides, about 200 nucleotides, about 100 nucleotides, about 80 nucleotides, about 70 nucleotides, about 60 nucleotides, about 50 nucleotides upstream of genomic site GRCh38/hg38: chr3 177065022. In some cases, the targeted region of the pre-mRNA is at most about 1500 nucleotides, about 1000 nucleotides, about 800 nucleotides, about 700 nucleotides, about 600 nucleotides, about 500 nucleotides, about 400 nucleotides, about 300 nucleotides, about 200 nucleotides, about 100 nucleotides, about 80 nucleotides, about 70 nucleotides, about 60 nucleotides, about 50 nucleotides downstream of SEQ ID NO: 321. In some cases, the targeted region of the pre-mRNA is at least about 1500 nucleotides, about 1000 nucleotides, about 800 nucleotides, about 700 nucleotides, about 600 nucleotides, about 500 nucleotides, about 400 nucleotides, about 300 nucleotides, about 200 nucleotides, about 100 nucleotides, about 80 nucleotides, about 70 nucleotides, about 60 nucleotides, about 50 nucleotides downstream of SEQ ID NO: 321. In some cases, the targeted region of the pre-mRNA is at most about 1500 nucleotides, about 1000 nucleotides, about 800 nucleotides, about 700 nucleotides, about 600 nucleotides, about 500 nucleotides, about 400 nucleotides, about 300 nucleotides, about 200 nucleotides, about 100 nucleotides, about 80 nucleotides, about 70 nucleotides, about 60 nucleotides, about 50 nucleotides downstream of genomic site GRCh38/hg38: chr3 177064920. In some cases. the targeted region of the pre-mRNA is at least about 1500 nucleotides, about 1000 nucleotides, about 800 nucleotides, about 700 nucleotides, about 600 nucleotides, about 500 nucleotides, about 400 nucleotides, about 300 nucleotides, about 200 nucleotides, about 100 nucleotides, about 80 nucleotides, about 70 nucleotides, about 60 nucleotides, about 50 nucleotides downstream of genomic site GRCh38/hg38: chr3 177064920. In some cases, the targeted region of the pre-mRNA is within a sequence SEQ ID NO: 321. In some cases, the targeted region of the pre-mRNA is within a sequence between a pair of genomic sites GRCh38/hg38: chr3 177065022, and GRCh38/hg38: chr3 177064920. In some cases, the therapeutic agent is an antisense oligomer complementary to a sequence with at least about 80%, 85%, 90%, 95%, 96%, 97%, 98%, 99% or 100% sequence identity to SEQ ID NO:321. In some cases, the therapeutic agent is an antisense oligomer complementary to a sequence with 100% sequence identity to SEQ ID NO:321. In some cases, the therapeutic agent increases level of a first processed mRNA encoding a protein having a sequence SEQ ID NO: 8288, and decreases level of a second processed mRNA encoding a protein having a sequence SEQ ID NO: 524. In some cases, the targeted region of the pre-mRNA is at most about 1500 nucleotides, about 1000 nucleotides, about 800 nucleotides, about 700 nucleotides, about 600 nucleotides, about 500 nucleotides, about 400 nucleotides, about 300 nucleotides, about 200 nucleotides, about 100 nucleotides, about 80 nucleotides, about 70 nucleotides, about 60 nucleotides, about 50 nucleotides upstream of SEQ ID NO: 322. In some cases, the targeted region of the pre-mRNA is at least about 1500 nucleotides, about 1000 nucleotides, about 800 nucleotides, about 700 nucleotides, about 600 nucleotides, about 500 nucleotides, about 400 nucleotides, about 300 nucleotides, about 200 nucleotides, about 100 nucleotides, about 80 nucleotides, about 70 nucleotides, about 60 nucleotides, about 50 nucleotides upstream of SEQ ID NO: 322. In some cases, the targeted region of the pre-mRNA is at most about 1500 nucleotides, about 1000 nucleotides, about 800 nucleotides, about 700 nucleotides, about 600 nucleotides, about 500 nucleotides, about 400 nucleotides, about 300 nucleotides, about 200 nucleotides, about 100 nucleotides, about 80 nucleotides, about 70 nucleotides, about 60 nucleotides, about 50 nucleotides upstream of genomic site GRCh38/hg38: chr3 177065022. In some cases, the targeted region of the pre-mRNA is at least about 1500 nucleotides, about 1000 nucleotides, about 800 nucleotides, about 700 nucleotides, about 600 nucleotides, about 500 nucleotides, about 400 nucleotides, about 300 nucleotides, about 200 nucleotides, about 100 nucleotides, about 80 nucleotides, about 70 nucleotides, about 60 nucleotides, about 50 nucleotides upstream of genomic site GRCh38/hg38: chr3 177065022. In some cases, the targeted region of the pre-mRNA is at most about 1500 nucleotides, about 1000 nucleotides, about 800 nucleotides, about 700 nucleotides, about 600 nucleotides, about 500 nucleotides, about 400 nucleotides, about 300 nucleotides, about 200 nucleotides, about 100 nucleotides, about 80 nucleotides, about 70 nucleotides, about 60 nucleotides, about 50 nucleotides downstream of SEQ ID NO: 322. In some cases, the targeted region of the pre-mRNA is at least about 1500 nucleotides, about 1000 nucleotides, about 800 nucleotides, about 700 nucleotides, about 600 nucleotides, about 500 nucleotides, about 400 nucleotides, about 300 nucleotides, about 200 nucleotides, about 100 nucleotides, about 80 nucleotides, about 70 nucleotides, about 60 nucleotides, about 50 nucleotides downstream of SEQ ID NO: 322. In some cases, the targeted region of the pre-mRNA is at most about 1500 nucleotides, about 1000 nucleotides, about 800 nucleotides, about 700 nucleotides, about 600 nucleotides, about 500 nucleotides, about 400 nucleotides, about 300 nucleotides, about 200 nucleotides, about 100 nucleotides, about 80 nucleotides, about 70 nucleotides, about 60 nucleotides, about 50 nucleotides downstream of genomic site GRCh38/hg38: chr3 177064920. In some cases. the targeted region of the pre-mRNA is at least about 1500 nucleotides, about 1000 nucleotides, about 800 nucleotides, about 700 nucleotides, about 600 nucleotides, about 500 nucleotides, about 400 nucleotides, about 300 nucleotides, about 200 nucleotides, about 100 nucleotides, about 80 nucleotides, about 70 nucleotides, about 60 nucleotides, about 50 nucleotides downstream of genomic site GRCh38/hg38: chr3 177064920. In some cases, the targeted region of the pre-mRNA is within a sequence SEQ ID NO: 322. In some cases, the targeted region of the pre-mRNA is within a sequence between a pair of genomic sites GRCh38/hg38: chr3 177065022, and GRCh38/hg38: chr3 177064920. In some cases, the therapeutic agent is an antisense oligomer complementary to a sequence with at least about 80%, 85%, 90%, 95%, 96%, 97%, 98%, 99% or 100% sequence identity to SEQ ID NO:322. In some cases, the therapeutic agent is an antisense oligomer complementary to a sequence with 100% sequence identity to SEQ ID NO:322. In some cases, the therapeutic agent is an antisense oligomer that has a sequence with at least about 80%, 85%, 90%, 95%, 96%, 97%, 98%, 99% or 100% sequence identity to a sequence selected from the group consisting of SEQ ID NOs: 7356-7415. In some cases, the therapeutic agent is an antisense oligomer that has a sequence selected from the group consisting of SEQ ID NOs: 7356-7415. In some cases, the target peptide sequence is a portion of TBL1XR1 protein, and the method treats a disease or the condition that comprises Malignant neoplasm of urinary bladder; Intellectual Disability; Acute Promyelocytic Leukemia; Adenocarcinoma of large intestine; Bladder Neoplasm; Epileptic encephalopathy; Neoplasm of uncertain or unknown behavior of bladder; Mental Retardation, Autosomal Dominant 41; Benign neoplasm of bladder; Lymphoma, Non-Hodgkin; Carcinoma in situ of bladder; Central nervous system lymphoma; Carcinoma of bladder; Plantar Lipomatosis, Unusual Facies, and Developmental Delay; or Pierpont syndrome.

[0303] TLR8

[0304] In some cases, the target peptide sequence is a portion of TLR8 protein. In some cases, the therapeutic agent increases level of a first processed mRNA encoding a protein having a sequence SEQ ID NO: 8289, and decreases level of a second processed mRNA encoding a protein having a sequence SEQ ID NO: 525. In some cases, the targeted region of the pre-mRNA is at most about 1500 nucleotides, about 1000 nucleotides, about 800 nucleotides, about 700 nucleotides, about 600 nucleotides, about 500 nucleotides, about 400 nucleotides, about 300 nucleotides, about 200 nucleotides, about 100 nucleotides, about 80 nucleotides, about 70 nucleotides, about 60 nucleotides, about 50 nucleotides upstream of SEQ ID NO: 323. In some cases, the targeted region of the pre-mRNA is at least about 1500 nucleotides, about 1000 nucleotides, about 800 nucleotides, about 700 nucleotides, about 600 nucleotides, about 500 nucleotides, about 400 nucleotides, about 300 nucleotides, about 200 nucleotides, about 100 nucleotides, about 80 nucleotides, about 70 nucleotides, about 60 nucleotides, about 50 nucleotides upstream of SEQ ID NO: 323. In some cases, the targeted region of the pre-mRNA is at most about 1500 nucleotides, about 1000 nucleotides, about 800 nucleotides, about 700 nucleotides, about 600 nucleotides, about 500 nucleotides, about 400 nucleotides, about 300 nucleotides, about 200 nucleotides, about 100 nucleotides, about 80 nucleotides, about 70 nucleotides, about 60 nucleotides, about 50 nucleotides upstream of genomic site GRCh38/hg38: chrX 12910306. In some cases, the targeted region of the pre-mRNA is at least about 1500 nucleotides, about 1000 nucleotides, about 800 nucleotides, about 700 nucleotides, about 600 nucleotides, about 500 nucleotides, about 400 nucleotides, about 300 nucleotides, about 200 nucleotides, about 100 nucleotides, about 80 nucleotides, about 70 nucleotides, about 60 nucleotides, about 50 nucleotides upstream of genomic site GRCh38/hg38: chrX 12910306. In some cases, the targeted region of the pre-mRNA is at most about 1500 nucleotides, about 1000 nucleotides, about 800 nucleotides, about 700 nucleotides, about 600 nucleotides, about 500 nucleotides, about 400 nucleotides, about 300 nucleotides, about 200 nucleotides, about 100 nucleotides, about 80 nucleotides, about 70 nucleotides, about 60 nucleotides, about 50 nucleotides downstream of SEQ ID NO: 323. In some cases, the targeted region of the pre-mRNA is at least about 1500 nucleotides, about 1000 nucleotides, about 800 nucleotides, about 700 nucleotides, about 600 nucleotides, about 500 nucleotides, about 400 nucleotides, about 300 nucleotides, about 200 nucleotides, about 100 nucleotides, about 80 nucleotides, about 70 nucleotides, about 60 nucleotides, about 50 nucleotides downstream of SEQ ID NO: 323. In some cases, the targeted region of the pre-mRNA is at most about 1500 nucleotides, about 1000 nucleotides, about 800 nucleotides, about 700 nucleotides, about 600 nucleotides, about 500 nucleotides, about 400 nucleotides, about 300 nucleotides, about 200 nucleotides, about 100 nucleotides, about 80 nucleotides, about 70 nucleotides, about 60 nucleotides, about 50 nucleotides downstream of genomic site GRCh38/hg38: chrX 12910442. In some cases. the targeted region of the pre-mRNA is at least about 1500 nucleotides, about 1000 nucleotides, about 800 nucleotides, about 700 nucleotides, about 600 nucleotides, about 500 nucleotides, about 400 nucleotides, about 300 nucleotides, about 200 nucleotides, about 100 nucleotides, about 80 nucleotides, about 70 nucleotides, about 60 nucleotides, about 50 nucleotides downstream of genomic site GRCh38/hg38: chrX 12910442. In some cases, the targeted region of the pre-mRNA is within a sequence SEQ ID NO: 323. In some cases, the targeted region of the pre-mRNA is within a sequence between a pair of genomic sites GRCh38/hg38: chrX 12910306, and GRCh38/hg38: chrX 12910442. In some cases, the therapeutic agent is an antisense oligomer complementary to a sequence with at least about 80%, 85%, 90%, 95%, 96%, 97%, 98%, 99% or 100% sequence identity to SEQ ID NO:323. In some cases, the therapeutic agent is an antisense oligomer complementary to a sequence with 100% sequence identity to SEQ ID NO:323. In some cases, the therapeutic agent is an antisense oligomer that has a sequence with at least about 80%, 85%, 90%, 95%, 96%, 97%, 98%, 99% or 100% sequence identity to a sequence selected from the group consisting of SEQ ID NOs: 7416-7481. In some cases, the therapeutic agent is an antisense oligomer that has a sequence selected from the group consisting of SEQ ID NOs: 7416-7481. In some cases, the target peptide sequence is a portion of TLR8 protein, and the method treats a disease or the condition that comprises Intellectual Disability; or Familial Meniere's disease.

[0305] TXNRD2

[0306] In some cases, the target peptide sequence is a portion of TXNRD2 protein. In some cases, the therapeutic agent increases level of a first processed mRNA encoding a protein having a sequence SEQ ID NO: 8290, and decreases level of a second processed mRNA encoding a protein having a sequence SEQ ID NO: 526. In some cases, the targeted region of the pre-mRNA is at most about 1500 nucleotides, about 1000 nucleotides, about 800 nucleotides, about 700 nucleotides, about 600 nucleotides, about 500 nucleotides, about 400 nucleotides, about 300 nucleotides, about 200 nucleotides, about 100 nucleotides, about 80 nucleotides, about 70 nucleotides, about 60 nucleotides, about 50 nucleotides upstream of SEQ ID NO: 324. In some cases, the targeted region of the pre-mRNA is at least about 1500 nucleotides, about 1000 nucleotides, about 800 nucleotides, about 700 nucleotides, about 600 nucleotides, about 500 nucleotides, about 400 nucleotides, about 300 nucleotides, about 200 nucleotides, about 100 nucleotides, about 80 nucleotides, about 70 nucleotides, about 60 nucleotides, about 50 nucleotides upstream of SEQ ID NO: 324. In some cases, the targeted region of the pre-mRNA is at most about 1500 nucleotides, about 1000 nucleotides, about 800 nucleotides, about 700 nucleotides, about 600 nucleotides, about 500 nucleotides, about 400 nucleotides, about 300 nucleotides, about 200 nucleotides, about 100 nucleotides, about 80 nucleotides, about 70 nucleotides, about 60 nucleotides, about 50 nucleotides upstream of genomic site GRCh38/hg38: chr22 19880945. In some cases, the targeted region of the pre-mRNA is at least about 1500 nucleotides, about 1000 nucleotides, about 800 nucleotides, about 700 nucleotides, about 600 nucleotides, about 500 nucleotides, about 400 nucleotides, about 300 nucleotides, about 200 nucleotides, about 100 nucleotides, about 80 nucleotides, about 70 nucleotides, about 60 nucleotides, about 50 nucleotides upstream of genomic site GRCh38/hg38: chr22 19880945. In some cases, the targeted region of the pre-mRNA is at most about 1500 nucleotides, about 1000 nucleotides, about 800 nucleotides, about 700 nucleotides, about 600 nucleotides, about 500 nucleotides, about 400 nucleotides, about 300 nucleotides, about 200 nucleotides, about 100 nucleotides, about 80 nucleotides, about 70 nucleotides, about 60 nucleotides, about 50 nucleotides downstream of SEQ ID NO: 324. In some cases, the targeted region of the pre-mRNA is at least about 1500 nucleotides, about 1000 nucleotides, about 800 nucleotides, about 700 nucleotides, about 600 nucleotides, about 500 nucleotides, about 400 nucleotides, about 300 nucleotides, about 200 nucleotides, about 100 nucleotides, about 80 nucleotides, about 70 nucleotides, about 60 nucleotides, about 50 nucleotides downstream of SEQ ID NO: 324. In some cases, the targeted region of the pre-mRNA is at most about 1500 nucleotides, about 1000 nucleotides, about 800 nucleotides, about 700 nucleotides, about 600 nucleotides, about 500 nucleotides, about 400 nucleotides, about 300 nucleotides, about 200 nucleotides, about 100 nucleotides, about 80 nucleotides, about 70 nucleotides, about 60 nucleotides, about 50 nucleotides downstream of genomic site GRCh38/hg38: chr22 19880856. In some cases. the targeted region of the pre-mRNA is at least about 1500 nucleotides, about 1000 nucleotides, about 800 nucleotides, about 700 nucleotides, about 600 nucleotides, about 500 nucleotides, about 400 nucleotides, about 300 nucleotides, about 200 nucleotides, about 100 nucleotides, about 80 nucleotides, about 70 nucleotides, about 60 nucleotides, about 50 nucleotides downstream of genomic site GRCh38/hg38: chr22 19880856. In some cases, the targeted region of the pre-mRNA is within a sequence SEQ ID NO: 324. In some cases, the targeted region of the pre-mRNA is within a sequence between a pair of genomic sites GRCh38/hg38: chr22 19880945, and GRCh38/hg38: chr22 19880856. In some cases, the therapeutic agent is an antisense oligomer complementary to a sequence with at least about 80%, 85%, 90%, 95%, 96%, 97%, 98%, 99% or 100% sequence identity to SEQ ID NO:324. In some cases, the therapeutic agent is an antisense oligomer complementary to a sequence with 100% sequence identity to SEQ ID NO:324. In some cases, the therapeutic agent is an antisense oligomer that has a sequence with at least about 80%, 85%, 90%, 95%, 96%, 97%, 98%, 99% or 100% sequence identity to a sequence selected from the group consisting of SEQ ID NOs: 7482-7538. In some cases, the therapeutic agent is an antisense oligomer that has a sequence selected from the group consisting of SEQ ID NOs: 7482-7538. In some cases, the target peptide sequence is a portion of TXNRD2 protein, and the method treats a disease or the condition that comprises X-linked Adrenal Hypoplasia; Depressive Symptoms; Familial dilated cardiomyopathy; Familial Glucocorticoid Deficiency Type 1; Conduction disorder of the heart; or Cardiomyopathy, Dilated.

[0307] UBE3A

[0308] In some cases, the target peptide sequence is a portion of UBE3A protein. In some cases, the therapeutic agent increases level of a first processed mRNA encoding a protein having a sequence SEQ ID NO: 8291, and decreases level of a second processed mRNA encoding a protein having a sequence SEQ ID NO: 527. In some cases, the targeted region of the pre-mRNA is at most about 1500 nucleotides, about 1000 nucleotides, about 800 nucleotides, about 700 nucleotides, about 600 nucleotides, about 500 nucleotides, about 400 nucleotides, about 300 nucleotides, about 200 nucleotides, about 100 nucleotides, about 80 nucleotides, about 70 nucleotides, about 60 nucleotides, about 50 nucleotides upstream of SEQ ID NO: 325. In some cases, the targeted region of the pre-mRNA is at least about 1500 nucleotides, about 1000 nucleotides, about 800 nucleotides, about 700 nucleotides, about 600 nucleotides, about 500 nucleotides, about 400 nucleotides, about 300 nucleotides, about 200 nucleotides, about 100 nucleotides, about 80 nucleotides, about 70 nucleotides, about 60 nucleotides, about 50 nucleotides upstream of SEQ ID NO: 325. In some cases, the targeted region of the pre-mRNA is at most about 1500 nucleotides, about 1000 nucleotides, about 800 nucleotides, about 700 nucleotides, about 600 nucleotides, about 500 nucleotides, about 400 nucleotides, about 300 nucleotides, about 200 nucleotides, about 100 nucleotides, about 80 nucleotides, about 70 nucleotides, about 60 nucleotides, about 50 nucleotides upstream of genomic site GRCh38/hg38: chr15 25408684. In some cases, the targeted region of the pre-mRNA is at least about 1500 nucleotides, about 1000 nucleotides, about 800 nucleotides, about 700 nucleotides, about 600 nucleotides, about 500 nucleotides, about 400 nucleotides, about 300 nucleotides, about 200 nucleotides, about 100 nucleotides, about 80 nucleotides, about 70 nucleotides, about 60 nucleotides, about 50 nucleotides upstream of genomic site GRCh38/hg38: chr15 25408684. In some cases, the targeted region of the pre-mRNA is at most about 1500 nucleotides, about 1000 nucleotides, about 800 nucleotides, about 700 nucleotides, about 600 nucleotides, about 500 nucleotides, about 400 nucleotides, about 300 nucleotides, about 200 nucleotides, about 100 nucleotides, about 80 nucleotides, about 70 nucleotides, about 60 nucleotides, about 50 nucleotides downstream of SEQ ID NO: 325. In some cases, the targeted region of the pre-mRNA is at least about 1500 nucleotides, about 1000 nucleotides, about 800 nucleotides, about 700 nucleotides, about 600 nucleotides, about 500 nucleotides, about 400 nucleotides, about 300 nucleotides, about 200 nucleotides, about 100 nucleotides, about 80 nucleotides, about 70 nucleotides, about 60 nucleotides, about 50 nucleotides downstream of SEQ ID NO: 325. In some cases, the targeted region of the pre-mRNA is at most about 1500 nucleotides, about 1000 nucleotides, about 800 nucleotides, about 700 nucleotides, about 600 nucleotides, about 500 nucleotides, about 400 nucleotides, about 300 nucleotides, about 200 nucleotides, about 100 nucleotides, about 80 nucleotides, about 70 nucleotides, about 60 nucleotides, about 50 nucleotides downstream of genomic site GRCh38/hg38: chr15 25408620. In some cases. the targeted region of the pre-mRNA is at least about 1500 nucleotides, about 1000 nucleotides, about 800 nucleotides, about 700 nucleotides, about 600 nucleotides, about 500 nucleotides, about 400 nucleotides, about 300 nucleotides, about 200 nucleotides, about 100 nucleotides, about 80 nucleotides, about 70 nucleotides, about 60 nucleotides, about 50 nucleotides downstream of genomic site GRCh38/hg38: chr15 25408620. In some cases, the targeted region of the pre-mRNA is within a sequence SEQ ID NO: 325. In some cases, the targeted region of the pre-mRNA is within a sequence between a pair of genomic sites GRCh38/hg38: chr15 25408684, and GRCh38/hg38: chr15 25408620. In some cases, the therapeutic agent is an antisense oligomer complementary to a sequence with at least about 80%, 85%, 90%, 95%, 96%, 97%, 98%, 99% or 100% sequence identity to SEQ ID NO:325. In some cases, the therapeutic agent is an antisense oligomer complementary to a sequence with 100% sequence identity to SEQ ID NO:325. In some cases, the therapeutic agent increases level of a first processed mRNA encoding a protein having a sequence SEQ ID NO: 8292, and decreases level of a second processed mRNA encoding a protein having a sequence SEQ ID NO: 528. In some cases, the targeted region of the pre-mRNA is at most about 1500 nucleotides, about 1000 nucleotides, about 800 nucleotides, about 700 nucleotides, about 600 nucleotides, about 500 nucleotides, about 400 nucleotides, about 300 nucleotides, about 200 nucleotides, about 100 nucleotides, about 80 nucleotides, about 70 nucleotides, about 60 nucleotides, about 50 nucleotides upstream of SEQ ID NO: 326. In some cases, the targeted region of the pre-mRNA is at least about 1500 nucleotides, about 1000 nucleotides, about 800 nucleotides, about 700 nucleotides, about 600 nucleotides, about 500 nucleotides, about 400 nucleotides, about 300 nucleotides, about 200 nucleotides, about 100 nucleotides, about 80 nucleotides, about 70 nucleotides, about 60 nucleotides, about 50 nucleotides upstream of SEQ ID NO: 326. In some cases, the targeted region of the pre-mRNA is at most about 1500 nucleotides, about 1000 nucleotides, about 800 nucleotides, about 700 nucleotides, about 600 nucleotides, about 500 nucleotides, about 400 nucleotides, about 300 nucleotides, about 200 nucleotides, about 100 nucleotides, about 80 nucleotides, about 70 nucleotides, about 60 nucleotides, about 50 nucleotides upstream of genomic site GRCh38/hg38: chr15 25408684. In some cases, the targeted region of the pre-mRNA is at least about 1500 nucleotides, about 1000 nucleotides, about 800 nucleotides, about 700 nucleotides, about 600 nucleotides, about 500 nucleotides, about 400 nucleotides, about 300 nucleotides, about 200 nucleotides, about 100 nucleotides, about 80 nucleotides, about 70 nucleotides, about 60 nucleotides, about 50 nucleotides upstream of genomic site GRCh38/hg38: chr15 25408684. In some cases, the targeted region of the pre-mRNA is at most about 1500 nucleotides, about 1000 nucleotides, about 800 nucleotides, about 700 nucleotides, about 600 nucleotides, about 500 nucleotides, about 400 nucleotides, about 300 nucleotides, about 200 nucleotides, about 100 nucleotides, about 80 nucleotides, about 70 nucleotides, about 60 nucleotides, about 50 nucleotides downstream of SEQ ID NO: 326. In some cases, the targeted region of the pre-mRNA is at least about 1500 nucleotides, about 1000 nucleotides, about 800 nucleotides, about 700 nucleotides, about 600 nucleotides, about 500 nucleotides, about 400 nucleotides, about 300 nucleotides, about 200 nucleotides, about 100 nucleotides, about 80 nucleotides, about 70 nucleotides, about 60 nucleotides, about 50 nucleotides downstream of SEQ ID NO: 326. In some cases, the targeted region of the pre-mRNA is at most about 1500 nucleotides, about 1000 nucleotides, about 800 nucleotides, about 700 nucleotides, about 600 nucleotides, about 500 nucleotides, about 400 nucleotides, about 300 nucleotides, about 200 nucleotides, about 100 nucleotides, about 80 nucleotides, about 70 nucleotides, about 60 nucleotides, about 50 nucleotides downstream of genomic site GRCh38/hg38: chr15 25408620. In some cases. the targeted region of the pre-mRNA is at least about 1500 nucleotides, about 1000 nucleotides, about 800 nucleotides, about 700 nucleotides, about 600 nucleotides, about 500 nucleotides, about 400 nucleotides, about 300 nucleotides, about 200 nucleotides, about 100 nucleotides, about 80 nucleotides, about 70 nucleotides, about 60 nucleotides, about 50 nucleotides downstream of genomic site GRCh38/hg38: chr15 25408620. In some cases, the targeted region of the pre-mRNA is within a sequence SEQ ID NO: 326. In some cases, the targeted region of the pre-mRNA is within a sequence between a pair of genomic sites GRCh38/hg38: chr15 25408684, and GRCh38/hg38: chr15 25408620. In some cases, the therapeutic agent is an antisense oligomer complementary to a sequence with at least about 80%, 85%, 90%, 95%, 96%, 97%, 98%, 99% or 100% sequence identity to SEQ ID NO:326. In some cases, the therapeutic agent is an antisense oligomer complementary to a sequence with 100% sequence identity to SEQ ID NO:326. In some cases, the therapeutic agent is an antisense oligomer that has a sequence with at least about 80%, 85%, 90%, 95%, 96%, 97%, 98%, 99% or 100% sequence identity to a sequence selected from the group consisting of SEQ ID NOs: 7539-7590. In some cases, the therapeutic agent is an antisense oligomer that has a sequence selected from the group consisting of SEQ ID NOs: 7539-7590. In some cases, the target peptide sequence is a portion of UBE3A protein, and the method treats a disease or the condition that comprises Intellectual Disability; Angelman Syndrome; Epileptic encephalopathy; Microcephaly; or Duplication 15q11-q13 Syndrome.

[0309] UFM1

[0310] In some cases, the target peptide sequence is a portion of UFM1 protein. In some cases, the therapeutic agent increases level of a first processed mRNA encoding a protein having a sequence SEQ ID NO: 8293, and decreases level of a second processed mRNA encoding a protein having a sequence SEQ ID NO: 529. In some cases, the targeted region of the pre-mRNA is at most about 1500 nucleotides, about 1000 nucleotides, about 800 nucleotides, about 700 nucleotides, about 600 nucleotides, about 500 nucleotides, about 400 nucleotides, about 300 nucleotides, about 200 nucleotides, about 100 nucleotides, about 80 nucleotides, about 70 nucleotides, about 60 nucleotides, about 50 nucleotides upstream of SEQ ID NO: 327. In some cases, the targeted region of the pre-mRNA is at least about 1500 nucleotides, about 1000 nucleotides, about 800 nucleotides, about 700 nucleotides, about 600 nucleotides, about 500 nucleotides, about 400 nucleotides, about 300 nucleotides, about 200 nucleotides, about 100 nucleotides, about 80 nucleotides, about 70 nucleotides, about 60 nucleotides, about 50 nucleotides upstream of SEQ ID NO: 327. In some cases, the targeted region of the pre-mRNA is at most about 1500 nucleotides, about 1000 nucleotides, about 800 nucleotides, about 700 nucleotides, about 600 nucleotides, about 500 nucleotides, about 400 nucleotides, about 300 nucleotides, about 200 nucleotides, about 100 nucleotides, about 80 nucleotides, about 70 nucleotides, about 60 nucleotides, about 50 nucleotides upstream of genomic site GRCh38/hg38: chr13 38349999. In some cases, the targeted region of the pre-mRNA is at least about 1500 nucleotides, about 1000 nucleotides, about 800 nucleotides, about 700 nucleotides, about 600 nucleotides, about 500 nucleotides, about 400 nucleotides, about 300 nucleotides, about 200 nucleotides, about 100 nucleotides, about 80 nucleotides, about 70 nucleotides, about 60 nucleotides, about 50 nucleotides upstream of genomic site GRCh38/hg38: chr13 38349999. In some cases, the targeted region of the pre-mRNA is at most about 1500 nucleotides, about 1000 nucleotides, about 800 nucleotides, about 700 nucleotides, about 600 nucleotides, about 500 nucleotides, about 400 nucleotides, about 300 nucleotides, about 200 nucleotides, about 100 nucleotides, about 80 nucleotides, about 70 nucleotides, about 60 nucleotides, about 50 nucleotides downstream of SEQ ID NO: 327. In some cases, the targeted region of the pre-mRNA is at least about 1500 nucleotides, about 1000 nucleotides, about 800 nucleotides, about 700 nucleotides, about 600 nucleotides, about 500 nucleotides, about 400 nucleotides, about 300 nucleotides, about 200 nucleotides, about 100 nucleotides, about 80 nucleotides, about 70 nucleotides, about 60 nucleotides, about 50 nucleotides downstream of SEQ ID NO: 327. In some cases, the targeted region of the pre-mRNA is at most about 1500 nucleotides, about 1000 nucleotides, about 800 nucleotides, about 700 nucleotides, about 600 nucleotides, about 500 nucleotides, about 400 nucleotides, about 300 nucleotides, about 200 nucleotides, about 100 nucleotides, about 80 nucleotides, about 70 nucleotides, about 60 nucleotides, about 50 nucleotides downstream of genomic site GRCh38/hg38: chr13 38350227. In some cases. the targeted region of the pre-mRNA is at least about 1500 nucleotides, about 1000 nucleotides, about 800 nucleotides, about 700 nucleotides, about 600 nucleotides, about 500 nucleotides, about 400 nucleotides, about 300 nucleotides, about 200 nucleotides, about 100 nucleotides, about 80 nucleotides, about 70 nucleotides, about 60 nucleotides, about 50 nucleotides downstream of genomic site GRCh38/hg38: chr13 38350227. In some cases, the targeted region of the pre-mRNA is within a sequence SEQ ID NO: 327. In some cases, the targeted region of the pre-mRNA is within a sequence between a pair of genomic sites GRCh38/hg38: chr13 38349999, and GRCh38/hg38: chr13 38350227. In some cases, the therapeutic agent is an antisense oligomer complementary to a sequence with at least about 80%, 85%, 90%, 95%, 96%, 97%, 98%, 99% or 100% sequence identity to SEQ ID NO:327. In some cases, the therapeutic agent is an antisense oligomer complementary to a sequence with 100% sequence identity to SEQ ID NO:327. In some cases, the therapeutic agent is an antisense oligomer that has a sequence with at least about 80%, 85%, 90%, 95%, 96%, 97%, 98%, 99% or 100% sequence identity to a sequence selected from the group consisting of SEQ ID NOs: 7591-7675. In some cases, the therapeutic agent is an antisense oligomer that has a sequence selected from the group consisting of SEQ ID NOs: 7591-7675. In some cases, the target peptide sequence is a portion of UFM1 protein, and the method treats a disease or the condition that comprises Leukodystrophy, Hypomyelinating, 6.

[0311] WAC

[0312] In some cases, the target peptide sequence is a portion of WAC protein. In some cases, the therapeutic agent increases level of a first processed mRNA encoding a protein having a sequence SEQ ID NO: 8294, and decreases level of a second processed mRNA encoding a protein having a sequence SEQ ID NO: 530. In some cases, the targeted region of the pre-mRNA is at most about 1500 nucleotides, about 1000 nucleotides, about 800 nucleotides, about 700 nucleotides, about 600 nucleotides, about 500 nucleotides, about 400 nucleotides, about 300 nucleotides, about 200 nucleotides, about 100 nucleotides, about 80 nucleotides, about 70 nucleotides, about 60 nucleotides, about 50 nucleotides upstream of SEQ ID NO: 328. In some cases, the targeted region of the pre-mRNA is at least about 1500 nucleotides, about 1000 nucleotides, about 800 nucleotides, about 700 nucleotides, about 600 nucleotides, about 500 nucleotides, about 400 nucleotides, about 300 nucleotides, about 200 nucleotides, about 100 nucleotides, about 80 nucleotides, about 70 nucleotides, about 60 nucleotides, about 50 nucleotides upstream of SEQ ID NO: 328. In some cases, the targeted region of the pre-mRNA is at most about 1500 nucleotides, about 1000 nucleotides, about 800 nucleotides, about 700 nucleotides, about 600 nucleotides, about 500 nucleotides, about 400 nucleotides, about 300 nucleotides, about 200 nucleotides, about 100 nucleotides, about 80 nucleotides, about 70 nucleotides, about 60 nucleotides, about 50 nucleotides upstream of genomic site GRCh38/hg38: chr10 28535562. In some cases, the targeted region of the pre-mRNA is at least about 1500 nucleotides, about 1000 nucleotides, about 800 nucleotides, about 700 nucleotides, about 600 nucleotides, about 500 nucleotides, about 400 nucleotides, about 300 nucleotides, about 200 nucleotides, about 100 nucleotides, about 80 nucleotides, about 70 nucleotides, about 60 nucleotides, about 50 nucleotides upstream of genomic site GRCh38/hg38: chr10 28535562. In some cases, the targeted region of the pre-mRNA is at most about 1500 nucleotides, about 1000 nucleotides, about 800 nucleotides, about 700 nucleotides, about 600 nucleotides, about 500 nucleotides, about 400 nucleotides, about 300 nucleotides, about 200 nucleotides, about 100 nucleotides, about 80 nucleotides, about 70 nucleotides, about 60 nucleotides, about 50 nucleotides downstream of SEQ ID NO: 328. In some cases, the targeted region of the pre-mRNA is at least about 1500 nucleotides, about 1000 nucleotides, about 800 nucleotides, about 700 nucleotides, about 600 nucleotides, about 500 nucleotides, about 400 nucleotides, about 300 nucleotides, about 200 nucleotides, about 100 nucleotides, about 80 nucleotides, about 70 nucleotides, about 60 nucleotides, about 50 nucleotides downstream of SEQ ID NO: 328. In some cases, the targeted region of the pre-mRNA is at most about 1500 nucleotides, about 1000 nucleotides, about 800 nucleotides, about 700 nucleotides, about 600 nucleotides, about 500 nucleotides, about 400 nucleotides, about 300 nucleotides, about 200 nucleotides, about 100 nucleotides, about 80 nucleotides, about 70 nucleotides, about 60 nucleotides, about 50 nucleotides downstream of genomic site GRCh38/hg38: chr10 28535757. In some cases. the targeted region of the pre-mRNA is at least about 1500 nucleotides, about 1000 nucleotides, about 800 nucleotides, about 700 nucleotides, about 600 nucleotides, about 500 nucleotides, about 400 nucleotides, about 300 nucleotides, about 200 nucleotides, about 100 nucleotides, about 80 nucleotides, about 70 nucleotides, about 60 nucleotides, about 50 nucleotides downstream of genomic site GRCh38/hg38: chr10 28535757. In some cases, the targeted region of the pre-mRNA is within a sequence SEQ ID NO: 328. In some cases, the targeted region of the pre-mRNA is within a sequence between a pair of genomic sites GRCh38/hg38: chr10 28535562, and GRCh38/hg38: chr10 28535757. In some cases, the therapeutic agent is an antisense oligomer complementary to a sequence with at least about 80%, 85%, 90%, 95%, 96%, 97%, 98%, 99% or 100% sequence identity to SEQ ID NO:328. In some cases, the therapeutic agent is an antisense oligomer complementary to a sequence with 100% sequence identity to SEQ ID NO:328. In some cases, the therapeutic agent is an antisense oligomer that has a sequence with at least about 80%, 85%, 90%, 95%, 96%, 97%, 98%, 99% or 100% sequence identity to a sequence selected from the group consisting of SEQ ID NOs: 7676-7753. In some cases, the therapeutic agent is an antisense oligomer that has a sequence selected from the group consisting of SEQ ID NOs: 7676-7753. In some cases, the target peptide sequence is a portion of WAC protein, and the method treats a disease or the condition that comprises Intellectual Disability; Chromosome 10p12-p11 Deletion Syndrome; Colorectal Cancer; or Desanto-Shinawi Syndrome.

[0313] WDR81

[0314] In some cases, the target peptide sequence is a portion of WDR81 protein. In some cases, the therapeutic agent increases level of a first processed mRNA encoding a protein having a sequence SEQ ID NO: 8295, and decreases level of a second processed mRNA encoding a protein having a sequence SEQ ID NO: 531. In some cases, the targeted region of the pre-mRNA is at most about 1500 nucleotides, about 1000 nucleotides, about 800 nucleotides, about 700 nucleotides, about 600 nucleotides, about 500 nucleotides, about 400 nucleotides, about 300 nucleotides, about 200 nucleotides, about 100 nucleotides, about 80 nucleotides, about 70 nucleotides, about 60 nucleotides, about 50 nucleotides upstream of SEQ ID NO: 329. In some cases, the targeted region of the pre-mRNA is at least about 1500 nucleotides, about 1000 nucleotides, about 800 nucleotides, about 700 nucleotides, about 600 nucleotides, about 500 nucleotides, about 400 nucleotides, about 300 nucleotides, about 200 nucleotides, about 100 nucleotides, about 80 nucleotides, about 70 nucleotides, about 60 nucleotides, about 50 nucleotides upstream of SEQ ID NO: 329. In some cases, the targeted region of the pre-mRNA is at most about 1500 nucleotides, about 1000 nucleotides, about 800 nucleotides, about 700 nucleotides, about 600 nucleotides, about 500 nucleotides, about 400 nucleotides, about 300 nucleotides, about 200 nucleotides, about 100 nucleotides, about 80 nucleotides, about 70 nucleotides, about 60 nucleotides, about 50 nucleotides upstream of genomic site GRCh38/hg38: chr17 1727990. In some cases, the targeted region of the pre-mRNA is at least about 1500 nucleotides, about 1000 nucleotides, about 800 nucleotides, about 700 nucleotides, about 600 nucleotides, about 500 nucleotides, about 400 nucleotides, about 300 nucleotides, about 200 nucleotides, about 100 nucleotides, about 80 nucleotides, about 70 nucleotides, about 60 nucleotides, about 50 nucleotides upstream of genomic site GRCh38/hg38: chr17 1727990. In some cases, the targeted region of the pre-mRNA is at most about 1500 nucleotides, about 1000 nucleotides, about 800 nucleotides, about 700 nucleotides, about 600 nucleotides, about 500 nucleotides, about 400 nucleotides, about 300 nucleotides, about 200 nucleotides, about 100 nucleotides, about 80 nucleotides, about 70 nucleotides, about 60 nucleotides, about 50 nucleotides downstream of SEQ ID NO: 329. In some cases, the targeted region of the pre-mRNA is at least about 1500 nucleotides, about 1000 nucleotides, about 800 nucleotides, about 700 nucleotides, about 600 nucleotides, about 500 nucleotides, about 400 nucleotides, about 300 nucleotides, about 200 nucleotides, about 100 nucleotides, about 80 nucleotides, about 70 nucleotides, about 60 nucleotides, about 50 nucleotides downstream of SEQ ID NO: 329. In some cases, the targeted region of the pre-mRNA is at most about 1500 nucleotides, about 1000 nucleotides, about 800 nucleotides, about 700 nucleotides, about 600 nucleotides, about 500 nucleotides, about 400 nucleotides, about 300 nucleotides, about 200 nucleotides, about 100 nucleotides, about 80 nucleotides, about 70 nucleotides, about 60 nucleotides, about 50 nucleotides downstream of genomic site GRCh38/hg38: chr17 1728626. In some cases. the targeted region of the pre-mRNA is at least about 1500 nucleotides, about 1000 nucleotides, about 800 nucleotides, about 700 nucleotides, about 600 nucleotides, about 500 nucleotides, about 400 nucleotides, about 300 nucleotides, about 200 nucleotides, about 100 nucleotides, about 80 nucleotides, about 70 nucleotides, about 60 nucleotides, about 50 nucleotides downstream of genomic site GRCh38/hg38: chr17 1728626. In some cases, the targeted region of the pre-mRNA is within a sequence SEQ ID NO: 329. In some cases, the targeted region of the pre-mRNA is within a sequence between a pair of genomic sites GRCh38/hg38: chr17 1727990, and GRCh38/hg38: chr17 1728626. In some cases, the therapeutic agent is an antisense oligomer complementary to a sequence with at least about 80%, 85%, 90%, 95%, 96%, 97%, 98%, 99% or 100% sequence identity to SEQ ID NO:329. In some cases, the therapeutic agent is an antisense oligomer complementary to a sequence with 100% sequence identity to SEQ ID NO:329. In some cases, the therapeutic agent is an antisense oligomer that has a sequence with at least about 80%, 85%, 90%, 95%, 96%, 97%, 98%, 99% or 100% sequence identity to a sequence selected from the group consisting of SEQ ID NOs: 7754-7919. In some cases, the therapeutic agent is an antisense oligomer that has a sequence selected from the group consisting of SEQ ID NOs: 7754-7919. In some cases, the target peptide sequence is a portion of WDR81 protein, and the method treats a disease or the condition that comprises Intellectual Disability; Ataxias, Hereditary; Cerebellar Ataxia, Mental Retardation, And Dysequilibrium Syndrome 2; Hydrocephalus; Cerebellar Hypoplasia; or Dysequilibrium syndrome.

[0315] YME1L1

[0316] In some cases, the target peptide sequence is a portion of YME1L1 protein. In some cases, the therapeutic agent increases level of a first processed mRNA encoding a protein having a sequence SEQ ID NO: 8296, and decreases level of a second processed mRNA encoding a protein having a sequence SEQ ID NO: 532. In some cases, the targeted region of the pre-mRNA is at most about 1500 nucleotides, about 1000 nucleotides, about 800 nucleotides, about 700 nucleotides, about 600 nucleotides, about 500 nucleotides, about 400 nucleotides, about 300 nucleotides, about 200 nucleotides, about 100 nucleotides, about 80 nucleotides, about 70 nucleotides, about 60 nucleotides, about 50 nucleotides upstream of SEQ ID NO: 330. In some cases, the targeted region of the pre-mRNA is at least about 1500 nucleotides, about 1000 nucleotides, about 800 nucleotides, about 700 nucleotides, about 600 nucleotides, about 500 nucleotides, about 400 nucleotides, about 300 nucleotides, about 200 nucleotides, about 100 nucleotides, about 80 nucleotides, about 70 nucleotides, about 60 nucleotides, about 50 nucleotides upstream of SEQ ID NO: 330. In some cases, the targeted region of the pre-mRNA is at most about 1500 nucleotides, about 1000 nucleotides, about 800 nucleotides, about 700 nucleotides, about 600 nucleotides, about 500 nucleotides, about 400 nucleotides, about 300 nucleotides, about 200 nucleotides, about 100 nucleotides, about 80 nucleotides, about 70 nucleotides, about 60 nucleotides, about 50 nucleotides upstream of genomic site GRCh38/hg38: chr10 27153281. In some cases, the targeted region of the pre-mRNA is at least about 1500 nucleotides, about 1000 nucleotides, about 800 nucleotides, about 700 nucleotides, about 600 nucleotides, about 500 nucleotides, about 400 nucleotides, about 300 nucleotides, about 200 nucleotides, about 100 nucleotides, about 80 nucleotides, about 70 nucleotides, about 60 nucleotides, about 50 nucleotides upstream of genomic site GRCh38/hg38: chr10 27153281. In some cases, the targeted region of the pre-mRNA is at most about 1500 nucleotides, about 1000 nucleotides, about 800 nucleotides, about 700 nucleotides, about 600 nucleotides, about 500 nucleotides, about 400 nucleotides, about 300 nucleotides, about 200 nucleotides, about 100 nucleotides, about 80 nucleotides, about 70 nucleotides, about 60 nucleotides, about 50 nucleotides downstream of SEQ ID NO: 330. In some cases, the targeted region of the pre-mRNA is at least about 1500 nucleotides, about 1000 nucleotides, about 800 nucleotides, about 700 nucleotides, about 600 nucleotides, about 500 nucleotides, about 400 nucleotides, about 300 nucleotides, about 200 nucleotides, about 100 nucleotides, about 80 nucleotides, about 70 nucleotides, about 60 nucleotides, about 50 nucleotides downstream of SEQ ID NO: 330. In some cases, the targeted region of the pre-mRNA is at most about 1500 nucleotides, about 1000 nucleotides, about 800 nucleotides, about 700 nucleotides, about 600 nucleotides, about 500 nucleotides, about 400 nucleotides, about 300 nucleotides, about 200 nucleotides, about 100 nucleotides, about 80 nucleotides, about 70 nucleotides, about 60 nucleotides, about 50 nucleotides downstream of genomic site GRCh38/hg38: chr10 27153227. In some cases. the targeted region of the pre-mRNA is at least about 1500 nucleotides, about 1000 nucleotides, about 800 nucleotides, about 700 nucleotides, about 600 nucleotides, about 500 nucleotides, about 400 nucleotides, about 300 nucleotides, about 200 nucleotides, about 100 nucleotides, about 80 nucleotides, about 70 nucleotides, about 60 nucleotides, about 50 nucleotides downstream of genomic site GRCh38/hg38: chr10 27153227. In some cases, the targeted region of the pre-mRNA is within a sequence SEQ ID NO: 330. In some cases, the targeted region of the pre-mRNA is within a sequence between a pair of genomic sites GRCh38/hg38: chr10 27153281, and GRCh38/hg38: chr10 27153227. In some cases, the therapeutic agent is an antisense oligomer complementary to a sequence with at least about 80%, 85%, 90%, 95%, 96%, 97%, 98%, 99% or 100% sequence identity to SEQ ID NO:330. In some cases, the therapeutic agent is an antisense oligomer complementary to a sequence with 100% sequence identity to SEQ ID NO:330. In some cases, the therapeutic agent is an antisense oligomer that has a sequence with at least about 80%, 85%, 90%, 95%, 96%, 97%, 98%, 99% or 100% sequence identity to a sequence selected from the group consisting of SEQ ID NOs: 7920-7969. In some cases, the therapeutic agent is an antisense oligomer that has a sequence selected from the group consisting of SEQ ID NOs: 7920-7969. In some cases, the target peptide sequence is a portion of YME1L1 protein, and the method treats a disease or the condition that comprises Optic Atrophy 11.

[0317] ZMYND10

[0318] In some cases, the target peptide sequence is a portion of ZMYND10 protein. In some cases, the therapeutic agent increases level of a first processed mRNA encoding a protein having a sequence SEQ ID NO: 8297, and decreases level of a second processed mRNA encoding a protein having a sequence SEQ ID NO: 533. In some cases, the targeted region of the pre-mRNA is at most about 1500 nucleotides, about 1000 nucleotides, about 800 nucleotides, about 700 nucleotides, about 600 nucleotides, about 500 nucleotides, about 400 nucleotides, about 300 nucleotides, about 200 nucleotides, about 100 nucleotides, about 80 nucleotides, about 70 nucleotides, about 60 nucleotides, about 50 nucleotides upstream of SEQ ID NO: 331. In some cases, the targeted region of the pre-mRNA is at least about 1500 nucleotides, about 1000 nucleotides, about 800 nucleotides, about 700 nucleotides, about 600 nucleotides, about 500 nucleotides, about 400 nucleotides, about 300 nucleotides, about 200 nucleotides, about 100 nucleotides, about 80 nucleotides, about 70 nucleotides, about 60 nucleotides, about 50 nucleotides upstream of SEQ ID NO: 331. In some cases, the targeted region of the pre-mRNA is at most about 1500 nucleotides, about 1000 nucleotides, about 800 nucleotides, about 700 nucleotides, about 600 nucleotides, about 500 nucleotides, about 400 nucleotides, about 300 nucleotides, about 200 nucleotides, about 100 nucleotides, about 80 nucleotides, about 70 nucleotides, about 60 nucleotides, about 50 nucleotides upstream of genomic site GRCh38/hg38: chr3 50345232. In some cases, the targeted region of the pre-mRNA is at least about 1500 nucleotides, about 1000 nucleotides, about 800 nucleotides, about 700 nucleotides, about 600 nucleotides, about 500 nucleotides, about 400 nucleotides, about 300 nucleotides, about 200 nucleotides, about 100 nucleotides, about 80 nucleotides, about 70 nucleotides, about 60 nucleotides, about 50 nucleotides upstream of genomic site GRCh38/hg38: chr3 50345232. In some cases, the targeted region of the pre-mRNA is at most about 1500 nucleotides, about 1000 nucleotides, about 800 nucleotides, about 700 nucleotides, about 600 nucleotides, about 500 nucleotides, about 400 nucleotides, about 300 nucleotides, about 200 nucleotides, about 100 nucleotides, about 80 nucleotides, about 70 nucleotides, about 60 nucleotides, about 50 nucleotides downstream of SEQ ID NO: 331. In some cases, the targeted region of the pre-mRNA is at least about 1500 nucleotides, about 1000 nucleotides, about 800 nucleotides, about 700 nucleotides, about 600 nucleotides, about 500 nucleotides, about 400 nucleotides, about 300 nucleotides, about 200 nucleotides, about 100 nucleotides, about 80 nucleotides, about 70 nucleotides, about 60 nucleotides, about 50 nucleotides downstream of SEQ ID NO: 331. In some cases, the targeted region of the pre-mRNA is at most about 1500 nucleotides, about 1000 nucleotides, about 800 nucleotides, about 700 nucleotides, about 600 nucleotides, about 500 nucleotides, about 400 nucleotides, about 300 nucleotides, about 200 nucleotides, about 100 nucleotides, about 80 nucleotides, about 70 nucleotides, about 60 nucleotides, about 50 nucleotides downstream of genomic site GRCh38/hg38: chr3 50345124. In some cases. the targeted region of the pre-mRNA is at least about 1500 nucleotides, about 1000 nucleotides, about 800 nucleotides, about 700 nucleotides, about 600 nucleotides, about 500 nucleotides, about 400 nucleotides, about 300 nucleotides, about 200 nucleotides, about 100 nucleotides, about 80 nucleotides, about 70 nucleotides, about 60 nucleotides, about 50 nucleotides downstream of genomic site GRCh38/hg38: chr3 50345124. In some cases, the targeted region of the pre-mRNA is within a sequence SEQ ID NO: 331. In some cases, the targeted region of the pre-mRNA is within a sequence between a pair of genomic sites GRCh38/hg38: chr3 50345232, and GRCh38/hg38: chr3 50345124. In some cases, the therapeutic agent is an antisense oligomer complementary to a sequence with at least about 80%, 85%, 90%, 95%, 96%, 97%, 98%, 99% or 100% sequence identity to SEQ ID NO:331. In some cases, the therapeutic agent is an antisense oligomer complementary to a sequence with 100% sequence identity to SEQ ID NO:331. In some cases, the therapeutic agent is an antisense oligomer that has a sequence with at least about 80%, 85%, 90%, 95%, 96%, 97%, 98%, 99% or 100% sequence identity to a sequence selected from the group consisting of SEQ ID NOs: 7970-8030. In some cases, the therapeutic agent is an antisense oligomer that has a sequence selected from the group consisting of SEQ ID NOs: 7970-8030. In some cases, the target peptide sequence is a portion of ZMYND10 protein, and the method treats a disease or the condition that comprises Polynesian Bronchiectasis; Ciliary Dyskinesia, Primary, 22; Kartagener Syndrome; or Ciliopathies. In some cases, the method treats a cancer that is associated with ZMYND10 protein.

### Therapeutic Agents

[0319] In various embodiments of the present disclosure, compositions and methods comprising a therapeutic agent are provided to modulate protein expression level. In some embodiments, provided herein are compositions and methods to modulate alternative splicing of a pre-mRNA that encodes a target peptide sequence. In some embodiments, provided herein are compositions and methods to induce exon skipping in the splicing of the pre-mRNA that encodes the target peptide sequence. In other embodiments, therapeutic agents may be used to induce the inclusion of an exon in order to decrease the protein expression level.

[0320] In some cases, a therapeutic agent comprises a polynucleic acid polymer. In some cases, a therapeutic agent comprises a viral vector expressing a polynucleic acid polymer that binds to the targeted region of a pre-mRNA the encodes the target peptide sequence. In some cases, the viral vector comprises an adenoviral vector, adeno-associated viral (AAV) vector, lentiviral vector, Herpes Simplex Virus (HSV) viral vector, retroviral vector, or any applicable viral vector. In some cases, a therapeutic agent comprises a gene editing tool that is configured to modify a gene encoding the target peptide sequence such that a gene region that encodes the inefficient translation region is deleted. In some cases, a gene editing tool comprises vector, e.g., viral vector, for gene editing based on CRISPR-Cas9, TALEN, Zinc Finger, or other applicable technologies.

[0321] According to one aspect of the present disclosure, provided herein is a method of treating a disease or a condition in a subject in need thereof by modulating expression of a target peptide sequence in a cell of the subject, the cell having a pre-mRNA that encodes the target peptide sequence and comprises an inefficient translation region, the method comprising: contacting the cell of the subject with a therapeutic agent that modulates splicing of the inefficient translation region from the pre-mRNA encoding the target peptide sequence, wherein the therapeutic agent binds to a targeted region of the pre-mRNA, whereby splicing of the inefficient translation region from the pre-mRNA is modulated, thereby modulating a level of a first processed mRNA that is devoid of the inefficient translation region and encodes the target peptide sequence, and thereby modulating the expression of the target peptide sequence in the cell of the subject, wherein the first processed mRNA has a higher translation efficiency for producing the target peptide sequence in the cells as compared to a second processed mRNA that comprises the inefficient translation region. In some cases, the second processed mRNA is otherwise identical to the first processed mRNA but comprises the inefficient translation region.

[0322] In some other aspect, provided herein is a method of treating a disease or a condition in a subject in need thereof by modulating expression of a target peptide sequence in a cell of the subject, the cell having a pre-mRNA that encodes the target peptide sequence and comprises a first start codon, a second start codon, and a premature termination codon (PTC) located downstream of the first start codon and upstream of the second start codon, the method comprising: contacting the cell of the subject with a therapeutic agent that modulates splicing of the PTC and the second start codon from the pre-mRNA encoding the target peptide sequence, wherein the therapeutic agent binds to a targeted region of the pre-mRNA, whereby splicing of the PTC and the second start codon from the pre-mRNA is modulated, thereby modulating a level of first processed mRNA that is devoid of the PTC and the second start codon and encodes the target peptide sequence, and thereby modulating the expression of the target peptide sequence in the cell of the subject.

[0323] Where reference is made to reducing inclusion of the inefficient translation region or the PTC followed by the alternative region in the mature mRNA, the reduction may be complete, e.g., 100%, or may be partial. The reduction may be clinically significant. The reduction/correction may be relative to the level of inclusion of the inefficient translation region or the PTC followed by the alternative region in the subject without treatment, or relative to the amount of inclusion of the inefficient translation region or the PTC followed by the alternative region in a population of similar subjects. The reduction/correction may be at least 10% less inclusion relative to the average subject, or the subject prior to treatment. The reduction may be at least 20% less inclusion relative to an average subject, or the subject prior to treatment. The reduction may be at least 40% less inclusion relative to an average subject, or the subject prior to treatment. The reduction may be at least 50% less inclusion relative to an average subject, or the subject prior to treatment. The reduction may be at least 60% less inclusion relative to an average subject, or the subject prior to treatment. The reduction may be at least 80% less inclusion relative to an average subject, or the subject prior to treatment. The reduction may be at least 90% less inclusion relative to an average subject, or the subject prior to treatment.

[0324] Where reference is made to increasing MeCP2-e1 protein levels, the increase may be clinically significant. The increase may be relative to the level of MeCP2-e1 protein in the subject without treatment, or relative to the amount of active MeCP2-e1 protein in a population of similar subjects. The increase may be at least 10% more active MeCP2-e1 protein relative to the average subject, or the subject prior to treatment. The increase may be at least 20% more active MeCP2-e1 protein relative to the average subject, or the subject prior to treatment. The increase may be at least 40% more active MeCP2-e1 protein relative to the average subject, or the subject prior to treatment. The increase may be at least 50% more active MeCP2-e1 protein relative to the average subject, or the subject prior to treatment. The increase may be at least 80% more active MeCP2-e1 protein relative to the average subject, or the subject prior to treatment. The increase may be at least 100% more active MeCP2-e1 protein relative to the average subject, or the subject prior to treatment. The increase may be at least 200% more active MeCP2-e1 protein relative to the average subject, or the subject prior to treatment. The increase may be at least 500% more active MeCP2-e1 protein relative to the average subject, or the subject prior to treatment.

[0325] In embodiments wherein the agent comprises a polynucleic acid polymer, the polynucleic acid polymer may be about 50 nucleotides in length. The polynucleic acid polymer may be about 45 nucleotides in length. The polynucleic acid polymer may be about 40 nucleotides in length. The polynucleic acid polymer may be about 35 nucleotides in length. The polynucleic acid polymer may be about 30 nucleotides in length. The polynucleic acid polymer may be about 24 nucleotides in length. The polynucleic acid polymer may be about 25 nucleotides in length. The polynucleic acid polymer may be about 20 nucleotides in length. The polynucleic acid polymer may be about 19 nucleotides in length. The polynucleic acid polymer may be about 18 nucleotides in length. The polynucleic acid polymer may be about 17 nucleotides in length. The polynucleic acid polymer may be about 16 nucleotides in length. The polynucleic acid polymer may be about 15 nucleotides in length. The polynucleic acid polymer may be about 14 nucleotides in length. The polynucleic acid polymer may be about 13 nucleotides in length. The polynucleic acid polymer may be about 12 nucleotides in length. The polynucleic acid polymer may be about 11 nucleotides in length. The polynucleic acid polymer may be about 10 nucleotides in length. The polynucleic acid polymer may be between about 10 and about 50 nucleotides in length. The polynucleic acid polymer may be between about 10 and about 45 nucleotides in length. The polynucleic acid polymer may be between about 10 and about 40 nucleotides in length. The polynucleic acid polymer may be between about 10 and about 35 nucleotides in length. The polynucleic acid polymer may be between about 10 and about 30 nucleotides in length. The polynucleic acid polymer may be between about 10 and about 25 nucleotides in length. The polynucleic acid polymer may be between about 10 and about 20 nucleotides in length. The polynucleic acid polymer may be between about 15 and about 25 nucleotides in length. The polynucleic acid polymer may be between about 15 and about 30 nucleotides in length. The polynucleic acid polymer may be between about 12 and about 30 nucleotides in length.

[0326] The sequence of the polynucleic acid polymer may be at least 50%, 55%, 60%, 65%, 70%, 75%, 80%, 85%, 90%, 91%, 92%, 93%, 94%, 95%, 96%, 97%, 98%, 99%, or 99.5% complementary to a target sequence of an mRNA transcript, e.g., a partially processed mRNA transcript. The sequence of the polynucleic acid polymer may be 100% complementary to a target sequence of a pre-mRNA transcript.

[0327] The sequence of the polynucleic acid polymer may have 4 or fewer mismatches to a target sequence of the pre-mRNA transcript. The sequence of the polynucleic acid polymer may have 3 or fewer mismatches to a target sequence of the pre-mRNA transcript. The sequence of the polynucleic acid polymer may have 2 or fewer mismatches to a target sequence of the pre-mRNA transcript. The sequence of the polynucleic acid polymer may have 1 or fewer mismatches to a target sequence of the pre-mRNA transcript. The sequence of the polynucleic acid polymer may have no mismatches to a target sequence of the pre-mRNA transcript.

[0328] The polynucleic acid polymer may specifically hybridize to a target sequence of the pre-mRNA transcript. For example, the polynucleic acid polymer may have 91%, 92%, 93%, 94%, 95%, 96%, 97%, 98%, 99%, 99.5% or 100% sequence complementarity to a target sequence of the pre-mRNA transcript. The hybridization may be under high stringent hybridization conditions.

[0329] The polynucleic acid polymer comprising a sequence with at least 50%, 55%, 60%, 65%, 70%, 75%, 80%, 85%, 90%, 91%, 92%, 93%, 94%, 95%, 96%, 97%, 98%, 99%, or 99.5% sequence identity to a sequence selected from the group consisting of SEQ ID NOs: 35-129, or 534-8095. The polynucleic acid polymer may comprise a sequence with 100% sequence identity to a sequence selected from the group consisting of SEQ ID NOs: 35-129, or 534-8095. Table 2 below lists exemplary sequences that the polynucleic acid polymer can comprise.

TABLE 2
Exemplary sequences of polynucleic
acid polymers for translation modulation

| | SEQ ID NOs of |
|---|---|
| | Exemplary Sequences of |
| Target Gene | Polynucleic Acid Polymers |
| ACIN1 | 534-584 |
| ACTN1 | 585-646 |
| ACTN2 | 647-702 |
| ADH4 | 703-769 |
| AGER | 8031-8095 |
| AKR1C3 | 770-824 |
| ALDH1A2 | 825-882 |
| ALG8 | 883-933 |
| AMPD2 | 934-1043 |
| AMT | 1044-1113 |
| ANKRD11 | 1114-1181 |
| ANKS3 | 1182-1244 |
| APOL4 | 1245-1302 |
| APPL1 | 1303-1352 |
| ARCN1 | 1353-1424 |
| ARMC8 | 1425-1478 |
| ARNTL | 1479-1531 |
| BOC | 1532-1606 |
| BRCA1 | 1607-1661 |
| C8B | 1662-1726 |
| CALM1 | 1727-1784 |
| CALM3 | 1785-1850 |
| CASP5 | 1851-1938 |
| CAST | 1939-1998 |
| CEP19 | 1999-2077 |
| CEP57 | 2078-2125 |
| CHEK1 | 2126-2209 |
| CIB2 | 2210-2270 |
| COX4I1 | 2271-2342 |
| DCLRE1C | 2343-2393 |
| DECR1 | 2394-2457 |
| DHFR | 2458-2517 |
| DKK2 | 2518-2586 |
| DLG2 | 2587-2643 |
| DOK2 | 2644-2719 |
| DPF3 | 2720-2787 |
| DTNA | 2788-2852 |
| DYRK1A | 2853-2927 |
| FOLH1 | 2928-2985 |
| FUZ | 2986-3041 |
| GANAB | 3042-3106 |
| GEMIN4 | 3107-3164 |
| GGA3 | 3165-3228 |
| GOSR2 | 3229-3309 |
| GPM6A | 3310-3360 |
| GRB10 | 3361-3422 |
| GSN | 3423-3475 |
| HDAC8 | 3476-3525 |
| HIVEP1 | 3526-3598 |
| HK1 | 3599-3656 |
| IFNGR1 | 3657-3717 |
| IKBKB | 3718-3781 |
| ISCU | 3782-3839 |
| KARS | 3840-3914 |
| KIAA0319 | 3915-3971 |
| KIAA0586 | 3972-4024 |
| KIZ | 4025-4076 |
| KLK6 | 4077-4165 |
| LMNA | 4166-4240 |
| LMNTD1 | 4241-4303 |
| LRRC7 | 4304-4357 |
| LRTOMT | 4358-4423 |
| LZTFL1 | 4424-4487 |
| MAGI2 | 4488-4547 |
| MECP2 | 35-129, 4548-4611 |
| MERTK | 4612-4670 |
| MFSD2A | 4671-4734 |
| MLF1 | 4735-4803 |
| MOB1B | 4804-4864 |
| MSRB3 | 4865-4928 |
| NR1I3 | 4929-4995 |
| NT5C3A | 4996-5045 |
| NUTM1 | 5046-5120 |
| OTOF | 5121-5179 |
| PDCD4 | 5180-5235 |
| PDPK1 | 5236-5294 |
| PHKB | 5295-5352 |
| PIGA | 5353-5546 |
| PLOD2 | 5547-5603 |
| POLR2F | 5604-5662 |
| PPP6C | 5663-5720 |
| PRKN | 5721-5807 |
| PRUNE1 | 5808-5865 |
| PSMA6 | 5866-5920 |
| PSMC3IP | 5921-5988 |
| PTPN1 | 5989-6047 |
| RAB11B | 6048-6125 |
| RBPJ | 6126-6187 |
| RNPS1 | 6188-6264 |
| RPL5 | 6265-6326 |
| RPS20 | 6327-6380 |
| SECISBP2 | 6381-6469 |
| SELENBP1 | 6470-6561 |
| SEPT11 | 6562-6632 |
| SIRT2 | 6633-6681 |
| SLC25A26 | 6682-6742 |
| SMARCE1 | 6743-6796 |
| SMC1A | 6797-6864 |
| SMG1 | 6865-6915 |
| SPACA7 | 6916-7000 |
| SPRED1 | 7001-7074 |
| SRP54 | 7075-7130 |
| SRPK2 | 7131-7182 |
| STK36 | 7183-7241 |
| STRADA | 7242-7301 |
| SUMO1 | 7302-7355 |
| TBL1XR1 | 7356-7415 |
| TLR8 | 7416-7481 |
| TXNRD2 | 7482-7538 |
| UBE3A | 7539-7590 |
| UFM1 | 7591-7675 |
| WAC | 7676-7753 |
| WDR81 | 7754-7919 |
| YME1L1 | 7920-7969 |
| ZMYND10 | 7970-8030 |

[0330] Where reference is made to a polynucleic acid polymer sequence, the skilled person will understand that one or more substitutions may be tolerated, optionally two substitutions may be tolerated in the sequence, such that it maintains the ability to hybridize to the target sequence; or where the substitution is in a target sequence, the ability to be recognized as the target sequence. References to sequence identity may be determined by BLAST sequence alignment using standard/default parameters. For example, the sequence may have 99% identity and still function according to the present disclosure. In other embodiments, the sequence may have 98% identity and still function according to the present disclosure. In another embodiment, the sequence may have 95% identity and still function according to the present disclosure. In another embodiment, the sequence may have 90% identity and still function according to the present disclosure.

### Antisense Oligomers

[0331] Provided herein is a composition comprising an antisense oligomer that induces exon skipping by binding to a targeted portion of a pre-mRNA that comprises an exon containing an inefficient translation region or a PTC followed by an alternative start codon. As used herein, the terms “ASO” and “antisense oligomer” are used interchangeably and refer to an oligomer such as a polynucleotide, comprising nucleobases that hybridizes to a target nucleic acid (e.g., MECP2 pre-mRNA) sequence by Watson-Crick base pairing or wobble base pairing (G-U). The ASO may have exact sequence complementary to the target sequence or near complementarity (e.g., sufficient complementarity to bind the target sequence and enhancing splicing at a splice site). ASOs are designed so that they bind (hybridize) to a target nucleic acid (e.g., a targeted portion of a pre-mRNA transcript) and remain hybridized under physiological conditions. Typically, if they hybridize to a site other than the intended (targeted) nucleic acid sequence, they hybridize to a limited number of sequences that are not a target nucleic acid (to a few sites other than a target nucleic acid). Design of an ASO can take into consideration the occurrence of the nucleic acid sequence of the targeted portion of the pre-mRNA transcript or a sufficiently similar nucleic acid sequence in other locations in the genome or cellular pre-mRNA or transcriptome, such that the likelihood the ASO will bind other sites and cause “off-target” effects is limited. Any antisense oligomers known in the art, for example in PCT Application No. PCT/US2014/054151, published as WO 2015/035091, titled “Reducing Nonsense-Mediated mRNA Decay,” incorporated by reference herein, can be used to practice the methods described herein.

[0332] In some embodiments, ASOs “specifically hybridize” to or are “specific” to a target nucleic acid or a targeted portion of a pre-mRNA. Typically such hybridization occurs with a Tₘ substantially greater than 37° C., preferably at least 50° C., and typically between 60° C. to approximately 90° C. Such hybridization preferably corresponds to stringent hybridization conditions. At a given ionic strength and pH, the Tₘ is the temperature at which 50% of a target sequence hybridizes to a complementary oligonucleotide.

[0333] Oligomers, such as oligonucleotides, are “complementary” to one another when hybridization occurs in an antiparallel configuration between two single-stranded polynucleotides. A double-stranded polynucleotide can be “complementary” to another polynucleotide, if hybridization can occur between one of the strands of the first polynucleotide and the second. Complementarity (the degree to which one polynucleotide is complementary with another) is quantifiable in terms of the proportion (e.g., the percentage) of bases in opposing strands that are expected to form hydrogen bonds with each other, according to generally accepted base-pairing rules. The sequence of an antisense oligomer (ASO) need not be 100% complementary to that of its target nucleic acid to hybridize. In certain embodiments, ASOs can comprise at least 70%, at least 75%, at least 80%, at least 85%, at least 90%, at least 95%, at least 96%, at least 97%, at least 98%, or at least 99% sequence complementarity to a target region within the target nucleic acid sequence to which they are targeted. For example, an ASO in which 18 of 20 nucleobases of the oligomeric compound are complementary to a target region, and would therefore specifically hybridize, would represent 90 percent complementarity. In this example, the remaining non-complementary nucleobases may be clustered together or interspersed with complementary nucleobases and need not be contiguous to each other or to complementary nucleobases. Percent complementarity of an ASO with a region of a target nucleic acid can be determined routinely using BLAST programs (basic local alignment search tools) and PowerBLAST programs known in the art (Altschul, et al., J. Mol. Biol., 1990, 215, 403-410; Zhang and Madden, Genome Res., 1997, 7, 649-656).

[0334] An ASO need not hybridize to all nucleobases in a target sequence and the nucleobases to which it does hybridize may be contiguous or noncontiguous. ASOs may hybridize over one or more segments of a pre-mRNA transcript, such that intervening or adjacent segments are not involved in the hybridization event (e.g., a loop structure or hairpin structure may be formed). In certain embodiments, an ASO hybridizes to noncontiguous nucleobases in a target pre-mRNA transcript. For example, an ASO can hybridize to nucleobases in a pre-mRNA transcript that are separated by one or more nucleobase(s) to which the ASO does not hybridize.

[0335] The ASOs described herein comprise nucleobases that are complementary to nucleobases present in a target portion of a pre-mRNA. The term ASO embodies oligonucleotides and any other oligomeric molecule that comprises nucleobases capable of hybridizing to a complementary nucleobase on a target mRNA but does not comprise a sugar moiety, such as a peptide nucleic acid (PNA). The ASOs may comprise naturally-occurring nucleotides, nucleotide analogs, modified nucleotides, or any combination of two or three of the preceding. The term “naturally occurring nucleotides” includes deoxyribonucleotides and ribonucleotides. The term “modified nucleotides” includes nucleotides with modified or substituted sugar groups and/or having a modified backbone. In some embodiments, all of the nucleotides of the ASO are modified nucleotides. Chemical modifications of ASOs or components of ASOs that are compatible with the methods and compositions described herein will be evident to one of skill in the art and can be found, for example, in U.S. Pat. No. 8,258,109 B2, U.S. Pat. No. 5,656,612, U.S. Patent Publication No. 2012/0190728, and Dias and Stein, Mol. Cancer Ther. 2002, 347-355, herein incorporated by reference in their entirety.

[0336] One or more nucleobases of an ASO may be any naturally occurring, unmodified nucleobase such as adenine, guanine, cytosine, thymine and uracil, or any synthetic or modified nucleobase that is sufficiently similar to an unmodified nucleobase such that it is capable of hydrogen bonding with a nucleobase present on a target pre-mRNA. Examples of modified nucleobases include, without limitation, hypoxanthine, xanthine, 7-methylguanine, 5, 6-dihydrouracil, 5-methylcytosine, and 5-hydroxymethoylcytosine.

[0337] The ASOs described herein also comprise a backbone structure that connects the components of an oligomer. The term “backbone structure” and “oligomer linkages” may be used interchangeably and refer to the connection between monomers of the ASO. In naturally occurring oligonucleotides, the backbone comprises a 3′-5′ phosphodiester linkage connecting sugar moieties of the oligomer. The backbone structure or oligomer linkages of the ASOs described herein may include (but are not limited to) phosphorothioate, phosphorodithioate, phosphoroselenoate, phosphorodiselenoate, phosphoroanilothioate, phosphoraniladate, phosphoramidate, and the like. See, e.g., LaPlanche, et al., Nucleic Acids Res. 14:9081 (1986); Stec, et al., J. Am. Chem. Soc. 106:6077 (1984), Stein, et al., Nucleic Acids Res. 16:3209 (1988), Zon, et al., Anti-Cancer Drug Design 6:539 (1991); Zon, et al., Oligonucleotides and Analogues: A Practical Approach, pp. 87-108 (F. Eckstein, Ed., Oxford University Press, Oxford England (1991)); Stec, et al., U.S. Pat. No. 5,151,510; Uhlmann and Peyman, Chemical Reviews 90:543 (1990). In some embodiments, the backbone structure of the ASO does not contain phosphorous but rather contains peptide bonds, for example in a peptide nucleic acid (PNA), or linking groups including carbamate, amides, and linear and cyclic hydrocarbon groups. In some embodiments, the backbone modification is a phosphothioate linkage. In some embodiments, the backbone modification is a phosphoramidate linkage.

[0338] In some embodiments, the stereochemistry at each of the phosphorus internucleotide linkages of the ASO backbone is random. In some embodiments, the stereochemistry at each of the phosphorus internucleotide linkages of the ASO backbone is controlled and is not random. For example, U.S. Pat. App. Pub. No. 2014/0194610, “Methods for the Synthesis of Functionalized Nucleic Acids,” incorporated herein by reference, describes methods for independently selecting the handedness of chirality at each phosphorous atom in a nucleic acid oligomer. In some embodiments, an ASO used in the methods of the disclosure, including, but not limited to, any of the ASOs set forth herein in Tables 5 and 6, comprises an ASO having phosphorus internucleotide linkages that are not random. In some embodiments, a composition used in the methods of the disclosure comprises a pure diastereomeric ASO. In some embodiments, a composition used in the methods of the disclosure comprises an ASO that has diastereomeric purity of at least about 90%, at least about 91%, at least about 92%, at least about 93%, at least about 94%, at least about 95%, at least about 96%, at least about 97%, at least about 98%, at least about 99%, about 100%, about 90% to about 100%, about 91% to about 100%, about 92% to about 100%, about 93% to about 100%, about 94% to about 100%, about 95% to about 100%, about 96% to about 100%, about 97% to about 100%, about 98% to about 100%, or about 99% to about 100%.

[0339] In some embodiments, the ASO has a nonrandom mixture of Rp and Sp configurations at its phosphorus internucleotide linkages. For example, it has been suggested that a mix of Rp and Sp is required in antisense oligonucleotides to achieve a balance between good activity and nuclease stability (Wan, et al., 2014, “Synthesis, biophysical properties and biological activity of second generation antisense oligonucleotides containing chiral phosphorothioate linkages,” Nucleic Acids Research 42(22): 13456-13468, incorporated herein by reference). In some embodiments, an ASO used in the methods of the disclosure, including, but not limited to, any of the ASOs set forth herein in SEQ ID NOs: 35-129, or 534-8095, comprises about 5-100% Rp, at least about 5% Rp, at least about 10% Rp, at least about 15% Rp, at least about 20% Rp, at least about 25% Rp, at least about 30% Rp, at least about 35% Rp, at least about 40% Rp, at least about 45% Rp, at least about 50% Rp, at least about 55% Rp, at least about 60% Rp, at least about 65% Rp, at least about 70% Rp, at least about 75% Rp, at least about 80% Rp, at least about 85% Rp, at least about 90% Rp, or at least about 95% Rp, with the remainder Sp, or about 100% Rp. In some embodiments, an ASO used in the methods of the disclosure, including, but not limited to, any of the ASOs set forth herein comprise a sequence with at least about 80%, 85%, 90%, 95%, 97%, or 100% sequence identity to a region comprising at least 8 contiguous nucleic acids of any one of SEQ ID NOs: 35-129, or 534-8095, comprises about 10% to about 100% Rp, about 15% to about 100% Rp, about 20% to about 100% Rp, about 25% to about 100% Rp, about 30% to about 100% Rp, about 35% to about 100% Rp, about 40% to about 100% Rp, about 45% to about 100% Rp, about 50% to about 100% Rp, about 55% to about 100% Rp, about 60% to about 100% Rp, about 65% to about 100% Rp, about 70% to about 100% Rp, about 75% to about 100% Rp, about 80% to about 100% Rp, about 85% to about 100% Rp, about 90% to about 100% Rp, or about 95% to about 100% Rp, about 20% to about 80% Rp, about 25% to about 75% Rp, about 30% to about 70% Rp, about 40% to about 60% Rp, or about 45% to about 55% Rp, with the remainder Sp.

[0340] In some embodiments, an ASO used in the methods of the disclosure, including, but not limited to, any of the ASOs set forth herein comprise a sequence with at least about 80%, 85%, 90%, 95%, 97%, or 100% sequence identity to a region comprising at least 8 contiguous nucleic acids of any one of SEQ ID NOs: 35-129, or 534-8095, comprises about 5-100% Sp, at least about 5% Sp, at least about 10% Sp, at least about 15% Sp, at least about 20% Sp, at least about 25% Sp, at least about 30% Sp, at least about 35% Sp, at least about 40% Sp, at least about 45% Sp, at least about 50% Sp, at least about 55% Sp, at least about 60% Sp, at least about 65% Sp, at least about 70% Sp, at least about 75% Sp, at least about 80% Sp, at least about 85% Sp, at least about 90% Sp, or at least about 95% Sp, with the remainder Rp, or about 100% Sp. In embodiments, an ASO used in the methods of the disclosure, including, but not limited to, any of the ASOs set forth herein comprise a sequence with at least about 80%, 85%, 90%, 95%, 97%, or 100% sequence identity to a region comprising at least 8 contiguous nucleic acids of any one of SEQ ID NOs: 35-129, or 534-8095, comprises about 10% to about 100% Sp, about 15% to about 100% Sp, about 20% to about 100% Sp, about 25% to about 100% Sp, about 30% to about 100% Sp, about 35% to about 100% Sp, about 40% to about 100% Sp, about 45% to about 100% Sp, about 50% to about 100% Sp, about 55% to about 100% Sp, about 60% to about 100% Sp, about 65% to about 100% Sp, about 70% to about 100% Sp, about 75% to about 100% Sp, about 80% to about 100% Sp, about 85% to about 100% Sp, about 90% to about 100% Sp, or about 95% to about 100% Sp, about 20% to about 80% Sp, about 25% to about 75% Sp, about 30% to about 70% Sp, about 40% to about 60% Sp, or about 45% to about 55% Sp, with the remainder Rp.

[0341] Any of the ASOs described herein may contain a sugar moiety that comprises ribose or deoxyribose, as present in naturally occurring nucleotides, or a modified sugar moiety or sugar analog, including a morpholine ring. Non-limiting examples of modified sugar moieties include 2′ substitutions such as 2′-O-methyl (2′-O-Me), 2′-O-methoxyethyl (2′MOE), 2′-O-aminoethyl, 2′F; N3′->P5′ phosphoramidate, 2′dimethylaminooxyethoxy, 2′dimethylaminoethoxyethoxy, 2′-guanidinidium, 2′-O-guanidinium ethyl, carbamate modified sugars, and bicyclic modified sugars. In some embodiments, the sugar moiety modification is selected from 2′-O-Me, 2′F, and 2′MOE. In some embodiments, the sugar moiety modification is an extra bridge bond, such as in a locked nucleic acid (LNA). In some embodiments the sugar analog contains a morpholine ring, such as phosphorodiamidate morpholino (PMO). In some embodiments, the sugar moiety comprises a ribofuransyl or 2′deoxyribofuransyl modification. In some embodiments, the sugar moiety comprises 2′4′-constrained 2′O-methyloxyethyl (cMOE) modifications. In some embodiments, the sugar moiety comprises cEt 2′, 4′ constrained 2′-O ethyl BNA modifications. In some embodiments, the sugar moiety comprises tricycloDNA (tcDNA) modifications. In some embodiments, the sugar moiety comprises ethylene nucleic acid (ENA) modifications. In some embodiments, the sugar moiety comprises MCE modifications. Modifications are known in the art and described in the literature, e.g., by Jarver, et al., 2014, “A Chemical View of Oligonucleotides for Exon Skipping and Related Drug Applications,” Nucleic Acid Therapeutics 24(1): 37-47, incorporated by reference for this purpose herein.

[0342] In some embodiments, each monomer of the ASO is modified in the same way, for example each linkage of the backbone of the ASO comprises a phosphorothioate linkage or each ribose sugar moiety comprises a 2′O-methyl modification. Such modifications that are present on each of the monomer components of an ASO are referred to as “uniform modifications.” In some examples, a combination of different modifications may be desired, for example, an ASO may comprise a combination of phosphorodiamidate linkages and sugar moieties comprising morpholine rings (morpholinos). Combinations of different modifications to an ASO are referred to as “mixed modifications” or “mixed chemistries.”

[0343] In some embodiments, the ASO comprises one or more backbone modifications. In some embodiments, the ASO comprises one or more sugar moiety modification. In some embodiments, the ASO comprises one or more backbone modifications and one or more sugar moiety modifications. In some embodiments, the ASO comprises a 2′MOE modification and a phosphorothioate backbone. In some embodiments, the ASO comprises a phosphorodiamidate morpholino (PMO). In some embodiments, the ASO comprises a peptide nucleic acid (PNA). Any of the ASOs or any component of an ASO (e.g., a nucleobase, sugar moiety, backbone) described herein may be modified in order to achieve desired properties or activities of the ASO or reduce undesired properties or activities of the ASO. For example, an ASO or one or more components of any ASO may be modified to enhance binding affinity to a target sequence on a pre-mRNA transcript; reduce binding to any non-target sequence; reduce degradation by cellular nucleases (i.e., RNase H); improve uptake of the ASO into a cell and/or into the nucleus of a cell; alter the pharmacokinetics or pharmacodynamics of the ASO; and/or modulate the half-life of the ASO.

[0344] In some embodiments, the ASOs are comprised of 2′-O-(2-methoxyethyl) (MOE) phosphorothioate-modified nucleotides. ASOs comprised of such nucleotides are especially well-suited to the methods disclosed herein; oligomers having such modifications have been shown to have significantly enhanced resistance to nuclease degradation and increased bioavailability, making them suitable, for example, for oral delivery in some embodiments described herein. See e.g., Geary, et al., J Pharmacol Exp Ther. 2001; 296(3):890-7; Geary, et al., J Pharmacol Exp Ther. 2001; 296(3):898-904.

[0345] Methods of synthesizing ASOs will be known to one of skill in the art. Alternatively or in addition, ASOs may be obtained from a commercial source.

[0346] Unless specified otherwise, the left-hand end of single-stranded nucleic acid (e.g., pre-mRNA transcript, oligonucleotide, ASO, etc.) sequences is the 5′ end and the left-hand direction of single or double-stranded nucleic acid sequences is referred to as the 5′ direction. Similarly, the right-hand end or direction of a nucleic acid sequence (single or double stranded) is the 3′ end or direction. Generally, a region or sequence that is 5′ to a reference point in a nucleic acid is referred to as “upstream,” and a region or sequence that is 3′ to a reference point in a nucleic acid is referred to as “downstream.” Generally, the 5′ direction or end of an mRNA is where the initiation or start codon is located, while the 3′ end or direction is where the termination codon is located. In some aspects, nucleotides that are upstream of a reference point in a nucleic acid may be designated by a negative number, while nucleotides that are downstream of a reference point may be designated by a positive number. For example, a reference point (e.g., an exon-exon junction in mRNA) may be designated as the “zero” site, and a nucleotide that is directly adjacent and upstream of the reference point is designated “minus one,” e.g., “−1,” while a nucleotide that is directly adjacent and downstream of the reference point is designated “plus one,” e.g., “+1.”

[0347] In some embodiments, the ASOs are complementary to (and bind to) a targeted portion of a pre-mRNA that that comprises an exon containing an inefficient translation region or a PTC followed by an alternative start codon, and the targeted portion is downstream (in the 3′ direction) of the 5′ splice site of the exon. In some embodiments, the target portion is within the region about +1 to about +500 relative to the 5′ splice site (or 3′ end) of the exon. In some embodiments, the targeted portion is within the region between nucleotides +6 and +40,000 relative to the 5′ splice site (or 3′ end) of the exon. In some aspects, the ASOs are complementary to a targeted portion that is within the region about +1 to about +40,000, about +1 to about +30,000, about +1 to about +20,000, about +1 to about +15,000, about +1 to about +10,000, about +1 to about +5,000, about +1 to about +4,000, about +1 to about +3,000, about +1 to about +2,000, about +1 to about +1,000, about +1 to about +500, about +1 to about +490, about +1 to about +480, about +1 to about +470, about +1 to about +460, about +1 to about +450, about +1 to about +440, about +1 to about +430, about +1 to about +420, about +1 to about +410, about +1 to about +400, about +1 to about +390, about +1 to about +380, about +1 to about +370, about +1 to about +360, about +1 to about +350, about +1 to about +340, about +1 to about +330, about +1 to about +320, about +1 to about +310, about +1 to about +300, about +1 to about +290, about +1 to about +280, about +1 to about +270, about +1 to about +260, about +1 to about +250, about +1 to about +240, about +1 to about +230, about +1 to about +220, about +1 to about +210, about +1 to about +200, about +1 to about +190, about +1 to about +180, about +1 to about +170, about +1 to about +160, about +1 to about +150, about +1 to about +140, about +1 to about +130, about +1 to about +120, about +1 to about +110, about +1 to about +100, about +1 to about +90, about +1 to about +80, about +1 to about +70, about +1 to about +60, about +1 to about +50, about +1 to about +40, about +1 to about +30, or about +1 to about +20 relative to 5′ splice site (or 3′ end) of the exon. In some aspects, the ASOs are complementary to a targeted portion that is within the region from about +1 to about +100, from about +100 to about +200, from about +200 to about +300, from about +300 to about +400, or from about +400 to about +500 relative to 5′ splice site (or 3′ end) of the exon.

[0348] In some embodiments, the ASOs are complementary to (and bind to) a targeted portion of a pre-mRNA that that comprises an exon containing an inefficient translation region or a PTC followed by an alternative start codon, and the targeted portion is upstream (in the 5′ direction) of the 5′ splice site (or 3′ end) of the exon. In some embodiments, the targeted portion is within the region about −4 to about −270 relative to the 5′ splice site (or 3′end) of the exon. In some embodiments, the targeted portion is within the region between nucleotides −1 and −40,000 relative to the 5′ splice site (or 3′ end) of the exon. In some aspects, the ASOs are complementary to a targeted portion that is within the region about −1 to about −40,000, about −1 to about −30,000, about −1 to about −20,000, about −1 to about −15,000, about −1 to about −10,000, about −1 to about −5,000, about −1 to about −4,000, about −1 to about −3,000, about −1 to about −2,000, about −1 to about −1,000, about −1 to about −500, about −1 to about −490, about −1 to about −480, about −1 to about −470, about −1 to about −460, about −1 to about −450, about −1 to about −440, about −1 to about −430, about −1 to about −420, about −1 to about −410, about −1 to about −400, about −1 to about −390, about −1 to about −380, about −1 to about −370, about −1 to about −360, about −1 to about −350, about −1 to about −340, about −1 to about −330, about −1 to about −320, about −1 to about −310, about −1 to about −300, about −1 to about −290, about −1 to about −280, about −1 to about −270, about −1 to about −260, about −1 to about −250, about −1 to about −240, about −1 to about −230, about −1 to about −220, about −1 to about −210, about −1 to about −200, about −1 to about −190, about −1 to about −180, about −1 to about −170, about −1 to about −160, about −1 to about −150, about −1 to about −140, about −1 to about −130, about −1 to about −120, about −1 to about −110, about −1 to about −100, about −1 to about −90, about −1 to about −80, about −1 to about −70, about −1 to about −60, about −1 to about −50, about −1 to about −40, about −1 to about −30, or about −1 to about −20 relative to 5′ splice site (or 3′ end) of the exon.

[0349] In some embodiments, the ASOs are complementary to (and bind to) a targeted portion of a pre-mRNA that that comprises an exon containing an inefficient translation region or a PTC followed by an alternative start codon, and the targeted portion is that is upstream (in the 5′ direction) of the 3′ splice site (or 5′ end) of the exon. In some embodiments, the targeted portion is within the region about −1 to about −500 relative to the 3′ splice site (or 5′ end) of the exon. In some embodiments, the ASOs are complementary to a targeted portion that is within the region −1 to −40,000 relative to the 3′ splice site of the included exon. In some aspects, the ASOs are complementary to a targeted portion that is within the region about −1 to about −40,000, about −1 to about −30,000, −1 to about −20,000, about −1 to about −15,000, about −1 to about −10,000, about −1 to about −5,000, about −1 to about −4,000, about −1 to about −3,000, about −1 to about −2,000, about −1 to about −1,000, about −1 to about −500, about −1 to about −490, about −1 to about −480, about −1 to about −470, about −1 to about −460, about −1 to about −450, about −1 to about −440, about −1 to about −430, about −1 to about −420, about −1 to about −410, about −1 to about −400, about −1 to about −390, about −1 to about −380, about −1 to about −370, about −1 to about −360, about −1 to about −350, about −1 to about −340, about −1 to about −330, about −1 to about −320, about −1 to about −310, about −1 to about −300, about −1 to about −290, about −1 to about −280, about −1 to about −270, about −1 to about −260, about −1 to about −250, about −1 to about −240, about −1 to about −230, about −1 to about −220, about −1 to about −210, about −1 to about −200, about −1 to about −190, about −1 to about −180, about −1 to about −170, about −1 to about −160, about −1 to about −150, about −1 to about −140, about −1 to about −130, about −1 to about −120, about −1 to about −110, about −1 to about −100, about −1 to about −90, about −1 to about −80, about −1 to about −70, about −1 to about −60, about −1 to about −50, about −1 to about −40, about −1 to about −30, or about −1 to about −20 relative to 3′ splice site of the included exon. In some aspects, the ASOs are complementary to a targeted portion that is within the region from about −1 to about −100, from about −100 to about −200, from about −200 to about −300, from about −300 to about −400, or from about −400 to about −500 relative to 3′ splice site of the included exon.

[0350] In some embodiments, the ASOs are complementary to (and bind to) a targeted portion of a pre-mRNA that that comprises an exon containing an inefficient translation region or a PTC followed by an alternative start codon, and the targeted portion is downstream (in the 3′ direction) of the 3′ splice site (5′ end) of the exon. In some embodiments, the ASOs are complementary to a targeted portion that is within the region of about +1 to about +40,000 relative to the 3′ splice site of the exon. In some aspects, the ASOs are complementary to a targeted portion that is within the region about +1 to about +40,000, about +1 to about +30,000, about +1 to about +20,000, about +1 to about +15,000, about +1 to about +10,000, about +1 to about +5,000, about +1 to about +4,000, about +1 to about +3,000, about +1 to about +2,000, about +1 to about +1,000, about +1 to about +500, about +1 to about +490, about +1 to about +480, about +1 to about +470, about +1 to about +460, about +1 to about +450, about +1 to about +440, about +1 to about +430, about +1 to about +420, about +1 to about +410, about +1 to about +400, about +1 to about +390, about +1 to about +380, about +1 to about +370, about +1 to about +360, about +1 to about +350, about +1 to about +340, about +1 to about +330, about +1 to about +320, about +1 to about +310, about +1 to about +300, about +1 to about +290, about +1 to about +280, about +1 to about +270, about +1 to about +260, about +1 to about +250, about +1 to about +240, about +1 to about +230, about +1 to about +220, about +1 to about +210, about +1 to about +200, about +1 to about +190, about +1 to about +180, about +1 to about +170, about +1 to about +160, about +1 to about +150, about +1 to about +140, about +1 to about +130, about +1 to about +120, about +1 to about +110, about +1 to about +100, about +1 to about +90, about +1 to about +80, about +1 to about +70, about +1 to about +60, about +1 to about +50, about +1 to about +40, about +1 to about +30, or about +1 to about +20, or about +1 to about +10 relative to 3′ splice site of the exon.

[0351] In some embodiments, the targeted portion is within the region +100 relative to the 5′ splice site (3′ end) of the exon to −100 relative to the 3′ splice site (5′ end) of the exon. In some embodiments, the targeted portion is within the exon that contains an inefficient translation region or a PTC followed by an alternative start codon. In some embodiments, the targeted portion comprises an exon and intron boundary.

[0352] The ASOs may be of any length suitable for specific binding and effective enhancement of splicing. In some embodiments, the ASOs consist of 8 to 50 nucleobases. For example, the ASO may be 8, 9, 10, 11, 12, 13, 14, 15, 16, 17, 18, 19, 20, 21, 22, 23, 24, 25, 26, 27, 28, 29, 30, 31, 32, 33, 34, 35, 40, 45, or 50 nucleobases in length. In some embodiments, the ASOs consist of more than 50 nucleobases. In some embodiments, the ASO is from 8 to 50 nucleobases, 8 to 40 nucleobases, 8 to 35 nucleobases, 8 to 30 nucleobases, 8 to 25 nucleobases, 8 to 20 nucleobases, 8 to 15 nucleobases, 9 to 50 nucleobases, 9 to 40 nucleobases, 9 to 35 nucleobases, 9 to 30 nucleobases, 9 to 25 nucleobases, 9 to 20 nucleobases, 9 to 15 nucleobases, 10 to 50 nucleobases, 10 to 40 nucleobases, 10 to 35 nucleobases, 10 to 30 nucleobases, 10 to 25 nucleobases, 10 to 20 nucleobases, 10 to 15 nucleobases, 11 to 50 nucleobases, 11 to 40 nucleobases, 11 to 35 nucleobases, 11 to 30 nucleobases, 11 to 25 nucleobases, 11 to 20 nucleobases, 11 to 15 nucleobases, 12 to 50 nucleobases, 12 to 40 nucleobases, 12 to 35 nucleobases, 12 to 30 nucleobases, 12 to 25 nucleobases, 12 to 20 nucleobases, 12 to 15 nucleobases, 13 to 50 nucleobases, 13 to 40 nucleobases, 13 to 35 nucleobases, 13 to 30 nucleobases, 13 to 25 nucleobases, 13 to 20 nucleobases, 14 to 50 nucleobases, 14 to 40 nucleobases, 14 to 35 nucleobases, 14 to 30 nucleobases, 14 to 25 nucleobases, 14 to 20 nucleobases, 15 to 50 nucleobases, 15 to 40 nucleobases, 15 to 35 nucleobases, 15 to 30 nucleobases, 15 to 25 nucleobases, 15 to 20 nucleobases, 20 to 50 nucleobases, 20 to 40 nucleobases, 20 to 35 nucleobases, 20 to 30 nucleobases, 20 to 25 nucleobases, 25 to 50 nucleobases, 25 to 40 nucleobases, 25 to 35 nucleobases, or 25 to 30 nucleobases in length. In some embodiments, the ASOs are 18 nucleotides in length. In some embodiments, the ASOs are 15 nucleotides in length. In some embodiments, the ASOs are 25 nucleotides in length.

[0353] In some embodiments, two or more ASOs with different chemistries but complementary to the same targeted portion of the pre-mRNA are used. In some embodiments, two or more ASOs that are complementary to different targeted portions of the pre-mRNA are used.

[0354] In some embodiments, the antisense oligonucleotides of the disclosure are chemically linked to one or more moieties or conjugates, e.g., a targeting moiety or other conjugate that enhances the activity or cellular uptake of the oligonucleotide. Such moieties include, but are not limited to, a lipid moiety, e.g., as a cholesterol moiety, a cholesteryl moiety, an aliphatic chain, e.g., dodecandiol or undecyl residues, a polyamine or a polyethylene glycol chain, or adamantane acetic acid. Oligonucleotides comprising lipophilic moieties and preparation methods have been described in the published literature. In embodiments, the antisense oligonucleotide is conjugated with a moiety including, but not limited to, an abasic nucleotide, a polyether, a polyamine, a polyamide, a peptides, a carbohydrate, e.g., N-acetylgalactosamine (GalNAc), N-Ac-Glucosamine (GluNAc), or mannose (e.g., mannose-6-phosphate), a lipid, or a polyhydrocarbon compound. Conjugates can be linked to one or more of any nucleotides comprising the antisense oligonucleotide at any of several positions on the sugar, base or phosphate group, as understood in the art and described in the literature, e.g., using a linker. Linkers can include a bivalent or trivalent branched linker. In embodiments, the conjugate is attached to the 3′ end of the antisense oligonucleotide. Methods of preparing oligonucleotide conjugates are described, e.g., in U.S. Pat. No. 8,450,467, “Carbohydrate conjugates as delivery agents for oligonucleotides,” incorporated by reference herein.

[0355] In some embodiments, the nucleic acid to be targeted by an ASO is a pre-mRNA expressed in a cell, such as a eukaryotic cell. In some embodiments, the term “cell” may refer to a population of cells. In some embodiments, the cell is in a subject. In some embodiments, the cell is isolated from a subject. In some embodiments, the cell is ex vivo. In some embodiments, the cell is a condition or disease-relevant cell or a cell line. In some embodiments, the cell is in vitro (e.g., in cell culture).

### Pharmaceutical Compositions

[0356] Pharmaceutical compositions or formulations comprising the agent, e.g., antisense oligonucleotide, of the described compositions and for use in any of the described methods can be prepared according to conventional techniques well known in the pharmaceutical industry and described in the published literature. In embodiments, a pharmaceutical composition or formulation for treating a subject comprises an effective amount of any antisense oligomer as described herein, or a pharmaceutically acceptable salt, solvate, hydrate or ester thereof. The pharmaceutical formulation comprising an antisense oligomer may further comprise a pharmaceutically acceptable excipient, diluent or carrier.

[0357] Pharmaceutically acceptable salts are suitable for use in contact with the tissues of humans and lower animals without undue toxicity, irritation, allergic response, etc., and are commensurate with a reasonable benefit/risk ratio. (See, e.g., S. M. Berge, et al., J. Pharmaceutical Sciences, 66: 1-19 (1977), incorporated herein by reference for this purpose. The salts can be prepared in situ during the final isolation and purification of the compounds, or separately by reacting the free base form with a suitable organic acid. Examples of pharmaceutically acceptable, nontoxic acid addition salts are salts of an amino group formed with inorganic acids such as hydrochloric acid, hydrobromic acid, phosphoric acid, sulfuric acid and perchloric acid or with organic acids such as acetic acid, oxalic acid, maleic acid, tartaric acid, citric acid, succinic acid or malonic acid or by using other documented methodologies such as ion exchange. Other pharmaceutically acceptable salts include adipate, alginate, ascorbate, aspartate, benzenesulfonate, benzoate, bisulfate, borate, butyrate, camphorate, camphorsulfonate, citrate, cyclopentanepropionate, digluconate, dodecylsulfate, ethanesulfonate, formate, fumarate, glucoheptonate, glycerophosphate, gluconate, hemisulfate, heptanoate, hexanoate, hydroiodide, 2-hydroxy-ethanesulfonate, lactobionate, lactate, laurate, lauryl sulfate, malate, maleate, malonate, methanesulfonate, 2-naphthalenesulfonate, nicotinate, nitrate, oleate, oxalate, palmitate, pamoate, pectinate, persulfate, 3-phenylpropionate, phosphate, picrate, pivalate, propionate, stearate, succinate, sulfate, tartrate, thiocyanate, p-toluenesulfonate, undecanoate, valerate salts, and the like. Representative alkali or alkaline earth metal salts include sodium, lithium, potassium, calcium, magnesium, and the like. Further pharmaceutically acceptable salts include, when appropriate, nontoxic ammonium, quaternary ammonium, and amine cations formed using counterions such as halide, hydroxide, carboxylate, sulfate, phosphate, nitrate, loweralkyl sulfonate and aryl sulfonate.

[0358] In some embodiments, the compositions are formulated into any of many possible dosage forms such as, but not limited to, tablets, capsules, gel capsules, liquid syrups, soft gels, suppositories, and enemas. In embodiments, the compositions are formulated as suspensions in aqueous, non-aqueous or mixed media. Aqueous suspensions may further contain substances that increase the viscosity of the suspension including, for example, sodium carboxymethylcellulose, sorbitol and/or dextran. The suspension may also contain stabilizers. In embodiments, a pharmaceutical formulation or composition of the present disclosure includes, but is not limited to, a solution, emulsion, microemulsion, foam or liposome-containing formulation (e.g., cationic or noncationic liposomes).

[0359] The pharmaceutical composition or formulation described herein may comprise one or more penetration enhancers, carriers, excipients or other active or inactive ingredients as appropriate and well known to those of skill in the art or described in the published literature. In embodiments, liposomes also include sterically stabilized liposomes, e.g., liposomes comprising one or more specialized lipids. These specialized lipids result in liposomes with enhanced circulation lifetimes. In embodiments, a sterically stabilized liposome comprises one or more glycolipids or is derivatized with one or more hydrophilic polymers, such as a polyethylene glycol (PEG) moiety. In some embodiments, a surfactant is included in the pharmaceutical formulation or compositions. The use of surfactants in drug products, formulations and emulsions is well known in the art. In embodiments, the present disclosure employs a penetration enhancer to effect the efficient delivery of the antisense oligonucleotide, e.g., to aid diffusion across cell membranes and/or enhance the permeability of a lipophilic drug. In some embodiments, the penetration enhancers are a surfactant, fatty acid, bile salt, chelating agent, or non-chelating nonsurfactant.

[0360] In some embodiments, the pharmaceutical formulation comprises multiple antisense oligonucleotides. In embodiments, the antisense oligonucleotide is administered in combination with another drug or therapeutic agent.

### Combination Therapies

[0361] In some embodiments, the ASOs disclosed in the present disclosure can be used in combination with one or more additional therapeutic agents. In some embodiments, the one or more additional therapeutic agents can comprise a small molecule. For example, the one or more additional therapeutic agents can comprise a small molecule described in WO2016128343A1, WO2017053982A1, WO2016196386A1, WO201428459A1, WO201524876A2, WO2013119916A2, and WO2014209841A2, which are incorporated by reference herein in their entirety. In some embodiments, the one or more additional therapeutic agents comprise an ASO that can be used to correct intron retention.

### Treatment of Subjects

[0362] Any of the compositions provided herein may be administered to an individual. “Individual” may be used interchangeably with “subject” or “patient.” An individual may be a mammal, for example a human or animal such as a non-human primate, a rodent, a rabbit, a rat, a mouse, a horse, a donkey, a goat, a cat, a dog, a cow, a pig, or a sheep. In embodiments, the individual is a human. In embodiments, the individual is a fetus, an embryo, or a child. In other embodiments, the individual may be another eukaryotic organism, such as a plant. In some embodiments, the compositions provided herein are administered to a cell ex vivo.

[0363] In some embodiments, the compositions provided herein are administered to an individual as a method of treating a disease or disorder. In some embodiments, the individual has a genetic disease, such as any of the diseases described herein. In some embodiments, the individual is at risk of having a disease, such as any of the diseases described herein. In some embodiments, the individual is at increased risk of having a disease or disorder caused by insufficient amount of a protein or insufficient activity of a protein. If an individual is “at an increased risk” of having a disease or disorder caused insufficient amount of a protein or insufficient activity of a protein, the method involves preventative or prophylactic treatment. For example, an individual may be at an increased risk of having such a disease or disorder because of family history of the disease. Typically, individuals at an increased risk of having such a disease or disorder benefit from prophylactic treatment (e.g., by preventing or delaying the onset or progression of the disease or disorder). In embodiments, a fetus is treated in utero, e.g., by administering the ASO composition to the fetus directly or indirectly (e.g., via the mother).

[0364] Suitable routes for administration of ASOs of the present disclosure may vary depending on cell type to which delivery of the ASOs is desired. The ASOs of the present disclosure may be administered to patients parenterally, for example, by intrathecal injection, intracerebroventricular injection, intraperitoneal injection, intramuscular injection, subcutaneous injection, or intravenous injection.

[0365] In embodiments, the antisense oligonucleotide is administered with one or more agents capable of promoting penetration of the subject antisense oligonucleotide across the blood-brain barrier by any method known in the art. For example, delivery of agents by administration of an adenovirus vector to motor neurons in muscle tissue is described in U.S. Pat. No. 6,632,427, “Adenoviral-vector-mediated gene transfer into medullary motor neurons,” incorporated herein by reference. Delivery of vectors directly to the brain, e.g., the striatum, the thalamus, the hippocampus, or the substantia nigra, is described, e.g., in U.S. Pat. No. 6,756,523, “Adenovirus vectors for the transfer of foreign genes into cells of the central nervous system particularly in brain,” incorporated herein by reference.

[0366] In some embodiments, the antisense oligonucleotides are linked or conjugated with agents that provide desirable pharmaceutical or pharmacodynamic properties. In embodiments, the antisense oligonucleotide is coupled to a substance, known in the art to promote penetration or transport across the blood-brain barrier, e.g., an antibody to the transferrin receptor. In embodiments, the antisense oligonucleotide is linked with a viral vector, e.g., to render the antisense compound more effective or increase transport across the blood-brain barrier. In embodiments, osmotic blood brain barrier disruption is assisted by infusion of sugars, e.g., meso erythritol, xylitol, D(+) galactose, D(+) lactose, D(+) xylose, dulcitol, myo-inositol, L(−) fructose, D(−) mannitol, D(+) glucose, D(+) arabinose, D(−) arabinose, cellobiose, D(+) maltose, D(+) raffinose, L(+) rhamnose, D(+) melibiose, D(−) ribose, adonitol, D(+) arabitol, L(−) arabitol, D(+) fucose, L(−) fucose, D(−) lyxose, L(+) lyxose, and L(−) lyxose, or amino acids, e.g., glutamine, lysine, arginine, asparagine, aspartic acid, cysteine, glutamic acid, glycine, histidine, leucine, methionine, phenylalanine, proline, serine, threonine, tyrosine, valine, and taurine. Methods and materials for enhancing blood brain barrier penetration are described, e.g., in U.S. Pat. No. 9,193,969, “Compositions and methods for selective delivery of oligonucleotide molecules to specific neuron types,” U.S. Pat. No. 4,866,042, “Method for the delivery of genetic material across the blood brain barrier,” U.S. Pat. No. 6,294,520, “Material for passage through the blood-brain barrier,” and U.S. Pat. No. 6,936,589, “Parenteral delivery systems,” each incorporated herein by reference.

[0367] In some embodiments, an ASO of the disclosure is coupled to a dopamine reuptake inhibitor (DRI), a selective serotonin reuptake inhibitor (SSRI), a noradrenaline reuptake inhibitor (NRI), a norepinephrine-dopamine reuptake inhibitor (NDRI), and a serotonin-norepinephrine-dopamine reuptake inhibitor (SNDRI), using methods described in, e.g., U.S. Pat. No. 9,193,969, incorporated herein by reference.

[0368] In some embodiments, subjects treated using the methods and compositions are evaluated for improvement in condition using any methods known and described in the art.

### EXAMPLES

[0369] The present disclosure will be more specifically illustrated by the following Examples. However, it should be understood that the present disclosure is not limited by these examples in any manner.

### Example 1: Confirmation of Exon 2 Inclusion Event in MECP2 mRNA Processing

[0370] RT-PCR analysis using cytoplasmic RNA from DMSO-treated or puromycin (Puro) or cycloheximide (CHX)-treated RenCellsVM (Neural progenitor cells) in exons can confirm the presence of a band corresponding to an exon that experiences alternative splicing during mRNA processing. Primers were designed to target exon 1 and exon 3 of MECP2 gene. FIG. 3A shows the bands corresponding to e2 mRNA isoform—having exon 1, 2, and 3, and e1 mRNA isoform—having exon 1 and 3, respectively. Densitometry analysis of the bands was performed to calculate percent exon inclusion of total transcript. Treatment of cells with cycloheximide or puromycin did not lead to a significant change in e2 mRNA isoform, as shown in FIG. 3B.

### Example 2: ASO Walk for Exon 2 Region of MECP2

[0371] An ASO walk was performed for exon 2 region of MCEP2 pre-mRNA with various ASOs targeting sequences immediately upstream of the 3′ splice site, across the 3′splice site, exon 2, across the 5′ splice site, and downstream of the 5′ splice site using 18mer 2′-MOE ASOs, PS backbone. ASOs were designed to cover these regions by shifting 5 nucleotides at a time.

### Example 3: ASO Walk Evaluated by RT-PCR

[0372] ASO walk sequences were evaluated by for example RT-PCR. RT-PCR using RNA from HEK293 cells transfected for 24 hrs with 80 nM ASOs that are depicted in FIG. 4. Primers for the RT-PCR analysis were positioned in exon 1 and 3. Quantification of the RT-PCR products was plotted as percentage of e2 isoform (e2/(e2+e1)*100), as shown in FIG. 5 (N=2).

### Example 4: Exemplary ASO Induces MECP2 Exon 2 Skipping and Increases MeCP2 Protein Expression

[0373] RT-PCR was performed using RNA from HEK293 cells transfected for 24 hrs with 80 nM ASOs (ASO1, 52, or 33) or not transfected (mock). FIG. 6A shows that HEK293 cells treated with ASOs against MECP2 induced either exon 2 inclusion (ASO52) or exon 2 skipping (ASO33). ASO1 targets MECP2 but had no effect on exon 2 splicing. Bar chart represents mean±SE. n=3. FIG. 6B shows that cells treated with exon skipping ASO33 exhibited an isoform switch and increased total MeCP2 protein by western blot, which examined whole cell lysates of cells treated with ASOs 1, 52 and 33, as compared to mock at 72 hr post-transfection. Anti-MeCP2 antibody detects isoforms e1 (top band) & e2 (bottom band). Quantification of bands corresponding to MeCP2 were normalized to TBP (TATA-binding protein) loading control and plotted as fold change over control (Mock).

### Example 5: Quantification of Total MECP2 mRNA (e1+e2)

[0374] RT-PCR products from FIG. 6A were quantified and plotted as the sum of e1+e2 (FIG. 7). ASO treatment does not increase total mRNA levels.

### Example 6. Test of Exemplary ASOs in Murine Cells

[0375] In parallel to screening ASO in human cell lines, ASOs were screened in murine cells. The exonic as well as flanking intronic sequence of MECP2 exon 2 is almost fully conserved between human and mouse. Lead candidates targeting a conserved region of the human transcript can retain their potency in murine cells (mouse embryonic fibroblasts, MEFs). RT-PCR was performed using RNA from MEF cells transfected for 24 hrs with 10, 30, or 80 nM ASOs (NT, ASO1, 52, or 33) or not transfected (mock). FIG. 8 shows that MEF cells treated with ASOs against MECP2 induced either exon 2 inclusion (ASO52) or exon 2 skipping (ASO33) (left panel). ASO1 targets MECP2 but had no effect on exon 2 splicing. FIG. 8 also shows a bar chart that plots the quantification of the RT-PCR assay and represents mean±SD, n=2 (right panel). The effect is dose-responsive.

[0376] ASO microwalk sequences were evaluated by for example RT-PCR. RT-PCR using RNA from ReNcell VM nucleofected for 24 hrs with 80 nM ASOs that span a region around ASOs 31 and 33, and 37 and 38 (FIG. 9), in 1-nt step. Primers for the RT-PCR analysis were positioned in exon 1 and 3. Quantification of the RT-PCR products was plotted as percentage of e2 isoform (e2/(e2+e1)*100), as shown in FIG. 9A (N=2).

### Example 7. Test of Exemplary ASOs in Animal Model of Rett Syndrome

[0377] Select MECP2-targeting ASOs are tested in several mouse models to test the effect of (a) increased MeCP2 expression in wild-type mice; (b) increased MeCP2 expression in heterozygous null mice; and (c) increase of MeCP2 expression in mice carrying the partially functional MECP2 p.A140V variant.

[0378] ASOs are delivered to neonate wild-type mice by bolus intracerebroventricular (icv)-injection. The effect of ASOs on Mecp2 exon 2 skipping and protein expression is assessed 2-14 days later. Once the duration and magnitude of the effect is established, the lead ASOs are tested in functional studies using mouse models of Rett syndrome. There can be concern of inducing MECP2 duplication syndrome using TANGO-ASOs, thus the effect of therapeutic ASOs is compared in wild type and heterozygous null animals (JAX B6.129P2(C)-Mecp2^{tm1.1Bird}/J) using a battery of neurological and behavioral assessments. Studies using heterozygous null animals can also establish whether increase of MeCP2 in a subset of neurons is beneficial and can alleviate the phenotype. Mice lacking Mecp2 expression can recapitulate several disease phenotypes of Rett patients including muscle weakness and neurological phenotypes (PsychoGenics Inc.). Grip strength of 8-12-week-old heterozygous Mecp2-null female mice as well as their latency to fall from a rotarod can be significantly lower compared to wild-type littermates. 16-week-old heterozygous female mice can have breathing abnormalities (breath variance and apnea duration) and show decreased expression of brain-derived neurotrophic factor (BNDF) compared to mice harboring two copies of Mecp2.

[0379] The effect of ASO-mediated increase of MeCP2 expression is also tested in a mouse model expressing MECP2 p.A140V (JAX BT6N.129 Mecp2^{tm1.1Vnar}/J) Hippocampal neurons in female Mecp2^{A140/y} animals can be significantly smaller compared to wild-type control. Furthermore, mTOR signaling can be deregulated as shown by reduced expression of the mTORC2 subunit RICTOR, as well as reduced phosphorylation of mTOR and 4E-BP1. The effect of the ASOs that increase MeCP2 expression is tested on the morphology of hippocampal neurons as well as mTOR signaling in the brain of these mice.

TABLE 3
Sequences of exemplary ASOs.

| | SEQ | | | Genomic Coordinates | | |
|---|---|---|---|---|---|---|
| | ID | | | (GRCh38/hg38) | | |
| ASO# | NO. | ID | Sequence (5′-3′) | Chromosome | Start | End |
| 1 | 35 | MECP2-IVS1-86 | AACACATAGACAAAGTAC | chrX | 154092392 | 154092410 |
| 2 | 36 | MECP2-IVS1-81 | AGATAAACACATAGACAA | chrX | 154092387 | 154092405 |
| 3 | 37 | MECP2-IVS1-76 | TTTGAAGATAAACACATA | chrX | 154092382 | 154092400 |
| 4 | 38 | MECP2-IVS1-71 | GACATTTTGAAGATAAAC | chrX | 154092377 | 154092395 |
| 5 | 39 | MECP2-IVS1-66 | TTTGGGACATTTTGAAGA | chrX | 154092372 | 154092390 |
| 6 | 40 | MECP2-IVS1-61 | GGCTATTTGGGACATTTT | chrX | 154092367 | 154092385 |
| 7 | 41 | MECP2-IVS1-56 | CCCAGGGCTATTTGGGAC | chrX | 154092362 | 154092380 |
| 8 | 42 | MECP2-IVS1-51 | TTTTTCCCAGGGCTATTT | chrX | 154092357 | 154092375 |
| 9 | 43 | MECP2-IVS1-46 | CGACCTTTTTCCCAGGGC | chrX | 154092352 | 154092370 |
| 10 | 44 | MECP2-IVS1-41 | CTGCACGACCTTTTTCCC | chrX | 154092347 | 154092365 |
| 11 | 45 | MECP2-IVS1-36 | TTGAGCTGCACGACCTTT | chrX | 154092342 | 154092360 |
| 12 | 46 | MECP2-IVS1-31 | CCCCATTGAGCTGCACGA | chrX | 154092337 | 154092355 |
| 13 | 47 | MECP2-IVS1-26 | AAAGCCCCCATTGAGCTG | chrX | 154092332 | 154092350 |
| 14 | 48 | MECP2-IVS1-21 | AGTTGAAAGCCCCCATTG | chrX | 154092327 | 154092345 |
| 15 | 49 | MECP2-IVS1-16 | TTGTAAGTTGAAAGCCCC | chrX | 154092322 | 154092340 |
| 16 | 50 | MECP2-IVS1-11 | GAAAATTGTAAGTTGAAA | chrX | 154092317 | 154092335 |
| 17 | 51 | MECP2-IVS1-6 | ACAAAGAAAATTGTAAGT | chrX | 154092312 | 154092330 |
| 18 | 52 | MECP2-IVS1-1 | CTAAAACAAAGAAAATTG | chrX | 154092307 | 154092325 |
| 19 | 53 | MECP2-IVS1-E2+5 | GGAGCCTAAAACAAAGAA | chrX | 154092302 | 154092320 |
| 20 | 54 | MECP2-IVS1- | TTTATGGAGCCTAAAACA | chrX | 154092297 | 154092315 |
| | | E2+10 | | | | |
| 21 | 55 | MECP2-IVS1- | GTATTTTTATGGAGCCTA | chrX | 154092292 | 154092310 |
| | | E2+15 | | | | |
| 22 | 56 | MECP2-E2+1 | TCTGTATTTTTATGGAGC | chrX | 154092289 | 154092307 |
| 23 | 57 | MECP2-E2+6 | GTGAGTCTGTATTTTTAT | chrX | 154092284 | 154092302 |
| 24 | 58 | MECP2-E2+11 | AACTGGTGAGTCTGTATT | chrX | 154092279 | 154092297 |
| 25 | 59 | MECP2-E2+16 | GCAGGAACTGGTGAGTCT | chrX | 154092274 | 154092292 |
| 26 | 60 | MECP2-E2+21 | TCAAAGCAGGAACTGGTG | chrX | 154092269 | 154092287 |
| 27 | 61 | MECP2-E2+26 | TCACATCAAAGCAGGAAC | chrX | 154092264 | 154092282 |
| 28 | 62 | MECP2-E2+31 | ACATGTCACATCAAAGCA | chrX | 154092259 | 154092277 |
| 29 | 63 | MECP2-E2+36 | GAGTCACATGTCACATCA | chrX | 154092254 | 154092272 |
| 30 | 64 | MECP2-E2+41 | CTGGGGAGTCACATGTCA | chrX | 154092249 | 154092267 |
| 31 | 65 | MECP2-E2+46 | GTATTCTGGGGAGTCACA | chrX | 154092244 | 154092262 |
| 32 | 66 | MECP2-E2+51 | AAGGTGTATTCTGGGGAG | chrX | 154092239 | 154092257 |
| 33 | 67 | MECP2-E2-46 | TCTACAGAAGCAAGGTGT | chrX | 154092228 | 154092246 |
| 34 | 68 | MECP2-E2-41 | GCTGGTCTACAGAAGCAA | chrX | 154092223 | 154092241 |
| 35 | 69 | MECP2-E2-36 | TTGGAGCTGGTCTACAGA | chrX | 154092218 | 154092236 |
| 36 | 70 | MECP2-E2-31 | TCCTGTTGGAGCTGGTCT | chrX | 154092213 | 154092231 |
| 37 | 71 | MECP2-E2-26 | TGGAATCCTGTTGGAGCT | chrX | 154092208 | 154092226 |
| 38 | 72 | MECP2-E2-21 | TACCATGGAATCCTGTTG | chrX | 154092203 | 154092221 |
| 39 | 73 | MECP2-E2-16 | CCAGCTACCATGGAATCC | chrX | 154092198 | 154092216 |
| 40 | 74 | MECP2-E2-11 | ACATCCCAGCTACCATGG | chrX | 154092193 | 154092211 |
| 41 | 75 | MECP2-E2-6 | CCCTAACATCCCAGCTAC | chrX | 154092188 | 154092206 |
| 42 | 76 | MECP2-E2-1 | CTGAGCCCTAACATCCCA | chrX | 154092183 | 154092201 |
| 43 | 77 | MECP2-E2-IVS2-15 | TACCTGAGCCCTAACATC | chrX | 154092180 | 154092198 |
| 44 | 78 | MECP2-E2-IVS2-10 | TTACTTACCTGAGCCCTA | chrX | 154092175 | 154092193 |
| 45 | 79 | MECP2-E2-IVS2-5 | GAAGGTTACTTACCTGAG | chrX | 154092170 | 154092188 |
| 46 | 80 | MECP2-IVS2+1 | AAAAGGAAGGTTACTTAC | chrX | 154092165 | 154092183 |
| 47 | 81 | MECP2-IVS2+6 | AAAAAAAAAGGAAGGTTA | chrX | 154092160 | 154092178 |
| 48 | 82 | MECP2-IVS2+11 | TAAAAAAAAAAAAAGGAA | chrX | 154092155 | 154092173 |
| 49 | 83 | MECP2-IVS2+16 | TATACTAAAAAAAAAAAA | chrX | 154092150 | 154092168 |
| 50 | 84 | MECP2-IVS2+21 | GGACATATACTAAAAAAA | chrX | 154092145 | 154092163 |
| 51 | 85 | MECP2-IVS2+26 | AACCAGGACATATACTAA | chrX | 154092140 | 154092158 |
| 52 | 86 | MECP2-IVS2+31 | GGCCAAACCAGGACATAT | chrX | 154092135 | 154092153 |
| 53 | 87 | MECP2-IVS2+36 | CAGATGGCCAAACCAGGA | chrX | 154092130 | 154092148 |
| 54 | 88 | MECP2-IVS2+41 | AAAAACAGATGGCCAAAC | chrX | 154092125 | 154092143 |
| 55 | 89 | MECP2-IVS2+46 | AAAAAAAAAACAGATGGC | chrX | 154092120 | 154092138 |
| 56 | 90 | MECP2-IVS2+51 | TAAAAAAAAAAAAAACAG | chrX | 154092115 | 154092133 |
| 57 | 91 | MECP2-IVS2+56 | TTTTTTAAAAAAAAAAAA | chrX | 154092110 | 154092128 |
| 58 | 92 | MECP2-IVS2+61 | TTTTTTTTTTTAAAAAAA | chrX | 154092105 | 154092123 |
| 59 | 93 | MECP2-IVS2+66 | TTTTTTTTTTTTTTTTAA | chrX | 154092100 | 154092118 |
| 60 | 94 | MECP2-IVS2+71 | TTTCCTTTTTTTTTTTTT | chrX | 154092095 | 154092113 |
| 61 | 95 | MECP2-IVS2+76 | CCTCTTTTCCTTTTTTTT | chrX | 154092090 | 154092108 |
| 62 | 96 | MECP2-IVS2+81 | TTTTTCCTCTTTTCCTTT | chrX | 154092085 | 154092103 |
| 63 | 97 | MECP2-IVS2+86 | ATATTTTTTTCCTCTTTT | chrX | 154092080 | 154092098 |
| 64 | 98 | MECP2-E2+32 | CACATGTCACATCAAAGC | chrX | 154092259 | 154092276 |
| 65 | 99 | MECP2-E2+33 | TCACATGTCACATCAAAG | chrX | 154092258 | 154092275 |
| 66 | 100 | MECP2-E2+34 | GTCACATGTCACATCAAA | chrX | 154092257 | 154092274 |
| 67 | 101 | MECP2-E2+35 | AGTCACATGTCACATCAA | chrX | 154092256 | 154092273 |
| 68 | 102 | MECP2-E2+37 | GGAGTCACATGTCACATC | chrX | 154092254 | 154092271 |
| 69 | 103 | MECP2-E2+38 | GGGAGTCACATGTCACAT | chrX | 154092253 | 154092270 |
| 70 | 104 | MECP2-E2+39 | GGGGAGTCACATGTCACA | chrX | 154092252 | 154092269 |
| 71 | 105 | MECP2-E2+40 | TGGGGAGTCACATGTCAC | chrX | 154092251 | 154092268 |
| 72 | 106 | MECP2-E2+42 | TCTGGGGAGTCACATGTC | chrX | 154092249 | 154092266 |
| 73 | 107 | MECP2-E2+43 | TTCTGGGGAGTCACATGT | chrX | 154092248 | 154092265 |
| 74 | 108 | MECP2-E2+44 | ATTCTGGGGAGTCACATG | chrX | 154092247 | 154092264 |
| 75 | 109 | MECP2-E2+45 | TATTCTGGGGAGTCACAT | chrX | 154092246 | 154092263 |
| 76 | 110 | MECP2-E2+47 | TGTATTCTGGGGAGTCAC | chrX | 154092244 | 154092261 |
| 77 | 111 | MECP2-E2+48 | GTGTATTCTGGGGAGTCA | chrX | 154092243 | 154092260 |
| 78 | 112 | MECP2-E2+49 | GGTGTATTCTGGGGAGTC | chrX | 154092242 | 154092259 |
| 79 | 113 | MECP2-E2+50 | AGGTGTATTCTGGGGAGT | chrX | 154092241 | 154092258 |
| 80 | 114 | MECP2-E2+52 | CAAGGTGTATTCTGGGGA | chrX | 154092239 | 154092256 |
| 81 | 115 | MECP2-E2+53 | GCAAGGTGTATTCTGGGG | chrX | 154092238 | 154092255 |
| 82 | 116 | MECP2-E2+54 | AGCAAGGTGTATTCTGGG | chrX | 154092237 | 154092254 |
| 83 | 117 | MECP2-E2+55 | AAGCAAGGTGTATTCTGG | chrX | 154092236 | 154092253 |
| 84 | 118 | MECP2-E2-50 | CAGAAGCAAGGTGTATTC | chrX | 154092233 | 154092250 |
| 85 | 119 | MECP2-E2-49 | ACAGAAGCAAGGTGTATT | chrX | 154092232 | 154092249 |
| 86 | 120 | MECP2-E2-48 | TACAGAAGCAAGGTGTAT | chrX | 154092231 | 154092248 |
| 87 | 121 | MECP2-E2-47 | CTACAGAAGCAAGGTGTA | chrX | 154092230 | 154092247 |
| 88 | 122 | MECP2-E2-45 | GTCTACAGAAGCAAGGTG | chrX | 154092228 | 154092245 |
| 89 | 123 | MECP2-E2-44 | GGTCTACAGAAGCAAGGT | chrX | 154092227 | 154092244 |
| 90 | 124 | MECP2-E2-43 | TGGTCTACAGAAGCAAGG | chrX | 154092226 | 154092243 |
| 91 | 125 | MECP2-E2-42 | CTGGTCTACAGAAGCAAG | chrX | 154092225 | 154092242 |
| 92 | 126 | MECP2-E2-40 | AGCTGGTCTACAGAAGCA | chrX | 154092223 | 154092240 |
| 93 | 127 | MECP2-E2-39 | GAGCTGGTCTACAGAAGC | chrX | 154092222 | 154092239 |
| 94 | 128 | MECP2-E2-38 | GGAGCTGGTCTACAGAAG | chrX | 154092221 | 154092238 |
| 95 | 129 | MECP2-E2-37 | TGGAGCTGGTCTACAGAA | chrX | 154092220 | 154092237 |

TABLE 4
Sequences of exemplary ASOs in microwalk

| | ASO | | |
|---|---|---|---|
| | # | | |
| SEQ | in | | |
| ID | FIG. | | |
| NO. | 9 | Sequence (5′-3′) | Chemistry |
| 129 | 64 | TGGAGCTGGTCTACAGAA | MOE (Phosphorothioate) |
| 128 | 65 | GGAGCTGGTCTACAGAAG | MOE (Phosphorothioate) |
| 127 | 66 | GAGCTGGTCTACAGAAGC | MOE (Phosphorothioate) |
| 126 | 67 | AGCTGGTCTACAGAAGCA | MOE (Phosphorothioate) |
| 125 | 68 | CTGGTCTACAGAAGCAAG | MOE (Phosphorothioate) |
| 124 | 69 | TGGTCTACAGAAGCAAGG | MOE (Phosphorothioate) |
| 123 | 70 | GGTCTACAGAAGCAAGGT | MOE (Phosphorothioate) |
| 122 | 71 | GTCTACAGAAGCAAGGTG | MOE (Phosphorothioate) |
| 121 | 72 | CTACAGAAGCAAGGTGTA | MOE (Phosphorothioate) |
| 120 | 73 | TACAGAAGCAAGGTGTAT | MOE (Phosphorothioate) |
| 119 | 74 | ACAGAAGCAAGGTGTATT | MOE (Phosphorothioate) |
| 118 | 75 | CAGAAGCAAGGTGTATTC | MOE (Phosphorothioate) |
| 117 | 76 | AAGCAAGGTGTATTCTGG | MOE (Phosphorothioate) |
| 116 | 77 | AGCAAGGTGTATTCTGGG | MOE (Phosphorothioate) |
| 115 | | GCAAGGTGTATTCTGGGG | MOE (Phosphorothioate) |
| 114 | | CAAGGTGTATTCTGGGGA | MOE (Phosphorothioate) |
| 113 | | AGGTGTATTCTGGGGAGT | MOE (Phosphorothioate) |
| 112 | | GGTGTATTCTGGGGAGTC | MOE (Phosphorothioate) |
| 111 | | GTGTATTCTGGGGAGTCA | MOE (Phosphorothioate) |
| 110 | | TGTATTCTGGGGAGTCAC | MOE (Phosphorothioate) |
| 109 | | TATTCTGGGGAGTCACAT | MOE (Phosphorothioate) |
| 108 | | ATTCTGGGGAGTCACATG | MOE (Phosphorothioate) |
| 107 | | TTCTGGGGAGTCACATGT | MOE (Phosphorothioate) |
| 106 | | TCTGGGGAGTCACATGTC | MOE (Phosphorothioate) |
| 105 | | TGGGGAGTCACATGTCAC | MOE (Phosphorothioate) |
| 104 | | GGGGAGTCACATGTCACA | MOE (Phosphorothioate) |
| 103 | 78 | GGGAGTCACATGTCACAT | MOE (Phosphorothioate) |
| 102 | 79 | GGAGTCACATGTCACATC | MOE (Phosphorothioate) |
| 101 | 80 | AGTCACATGTCACATCAA | MOE (Phosphorothioate) |
| 100 | 81 | GTCACATGTCACATCAAA | MOE (Phosphorothioate) |
| 99 | 82 | TCACATGTCACATCAAAG | MOE (Phosphorothioate) |
| 98 | 83 | CACATGTCACATCAAAGC | MOE (Phosphorothioate) |

[0380] While preferred embodiments of the present disclosure have been shown and described herein, it will be obvious to those skilled in the art that such embodiments are provided by way of example only. Numerous variations, changes, and substitutions will now occur to those skilled in the art without departing from the disclosure. It should be understood that various alternatives to the embodiments of the disclosure described herein may be employed in practicing the disclosure. It is intended that the following claims define the scope of the disclosure and that methods and structures within the scope of these claims and their equivalents be covered thereby.

The application's sequence listing, which the Patent Office published only in electronic form, follows.

SEQUENCE LISTING (8297 sequences)

SEQ ID NO: 1 - DNA, 76183 bp, Homo sapiens
gcgcgacgtcggccgtgcggggtcccggcgtcggcggcgcgcgcgctccctcctctcggagagagggctgtggtaaaagccgtccggaaaatggccgccgccgccgccgccgcgccgagcggaggaggaggaggaggcgaggaggagagactgtgagtgggaccgccgtggccgcgggcggggacccttgccggggggcgggggtcaggggcgggacgtggcgcgggaggggcccgcggggtcggacgacacggctggcggatggcgtccctcctctctaccctccccctcccgccgccgccggtggcgactctcccctcggcccgtcacccctgctcgcgggtgaccgtcctcggcgcggcctccctggagccgccttcgcctgacgcccctcttcctcccgccctcgacgcgcatcccggcccccggccccgcgggcgcccctgtcgccggggcttcgcctgtcggggctgcgcgcgctcctgcccttctcggggctttgggccgcggcgccgtcgcgcgcccgcggccccggcctctccctggatcgcgctctccccctccctccctcgcgcgccccctctcccgttactcggcccccccaccggcgcgcgtgcgcacttcgcctcccgtcgggagagtgcgccacaagggctcctgagctctcacccccatctctgggctttgcctccccctccttctcgcccattccatgaatttctgccccccgctacccccccgcgagcgagtaggtccaccggctcctttccccatctagcaggaacaagtaggtggggattattatccacaaaagggactagacattgtgttctgggtcccacaactcatcataaagaggtggttatagttcccatcaggagccgtgggtaggggactgtgcgtccagcagcacccgaggctcttcggcgccagaggctctaaggtgcgagcgtgtccccagggtgctcagaggttctttggagtgctgtggcctcggaatgtgagcaccctcccatcctaccctccccttcgccggcgatcttccagttacataagtggagtgggacatagtaggtaacgggctctcatcgccctggagcgctcgggatcaccggtaccagatggggcaagttcatcgcgacgctgtggctcctgttaattgtgcctgaaaggttatcctctgttcagtttggtcatgaccgaatcacccaaactgaaactcagatgacttttatatggcagtggcaatgtttctgtggttttgcactaaagacttaaggtcattatgaagagtgtaaaaggattgctgtcgcaggggagaccgtttatgacattgctaagtatggaccccgagggggaaaaagctcattctggaattgctctgtggcggttgcttctgttgcgagtgtgttcgggtgtgggttggtcacagcagaaatgggctccaccacaaaattgatattcctgactcatggtcaggcagatgtgtgcttctggttatttttccaggaacaggaatgggctctgccgagcctttcacacgttgtgtctctgctgtgcgggatcagtaccccagactgtgagataacaggatcgaattcaggggttggttggtgatccaggaaccatacctacttggatgtgatactgagtggcctagacgttgtaggactctcataagttttagacattttgttatactgtaaaaatgaagcatatacggcctcagtagtaacattgcactaataggtaattattactctagagaattttgggttccatggctggaatgttcatcagtatctcagcaatttcagttaataaccagattaagctgacctcttgagtcttttgaaatctgctgggtccctataataagacagggtctggattttttaatcttttgggaatttccaccaaggatttagggaaataggcttttatgggcttttcaggatttctatttcaaatcccaatgaggaagtctaggaaacacttgcttttattttcttgcctgaatatgtcagaaccttaaatcacccaatcaatctagaagtactacagttgattaaagtaagtcaccacaggtcacccattcgtggcaggtcagctaggtggctgatcactggaatacagtcatatccccaggcatacacacgagcctcacttgacgatcccaaagtttgtacatctgagcttgagacgtgacaagttgaggtctctgctttgttcttcatagttggcagtttgtctcctcgggtgcccctccggttagctgtttatcatacgtctagccctatcaacagtgcaggcagcttccagagtatagttttctctgcaaagtgcctggtggaggggtacctccttttccattgtcctaatggctccactgggcttccataccagccctttccagtgtcttaacagctcaaagaaacccatctgtggctttcttgttagcactggcctatcacaccttcctattgcctgttaactaaaattttgcctggaatgctttaagcttagagtactgggtctttgtttcacccgattgataggagagtgtcatgcagtcagccgaactccgacttctgtgctgtttaaatccttaggtaggtctggggcaaggcacaaaccactgtgtattcaaagggttatggtgcttgcattctgtgtgtatatgtttgtaatttccaaccagagtcgtttcccgtgcctgccctgcctctgtgcaatctagtctagtagggtagggaggcaagctgtggagtttgaaaaaaaaaaaaaaaagctagatgagtttaataggctgttaccccctccagaacattcctcccatgtggagatgaaacgagaagttcatttctttaacctaaaataaagaacaacagagataaaattgttagttccttattggagcctggtttccattgctaatgtacctgcttgggactctgcatgataaatgacgtgtcctggaacctgaaatcttttataaaggttaatatcagcagaaatcttttaattagctaagagcagcttgttctcaagctgcccgagttatcttggaggagagaatcacaggaaatgtttgatatttctagtaaccagtgttttcagtgcgtggggtaaagcacactcctagactggccagtcccaaagagtgtggcaggacacctgcttgttttccctgccctctgctatggtgacatccttgcagaccagtcttgcgtggctggcagacgcaatctttttttcttgggtagagcattatcaccgctgcgatggaaggaccttgtcctcggtgcctccataccagccctttccagtgaaactactgctgtcccggcaagcccctgtgcgtgtgcatcattccgggtaggacaagatgtgaacaggtccctcttctttgggcttaagtagaagttgtgctcttctgcttttacctgtgtgctcttctgcttttacctgttctcttctgcctttctcttgcaagaaacctgtcgaaagcttgctttgcatgccattgcttaaatactttgatggtatgtatggtatgtgggataactgagtgggagccggaattggggggtgggcagggcatccccacccccacccccacatcaaagggggaatgaccatttcgttagagaataaagcctgagtcttataacttcttcaagcacatgtatgctgggtctcctggcgtgtgaatgtgttcccgctgtgctgtgtggctgttttgcagttactgtagacactgtagtctgggctctcattattgcctctgaagttgacaggaccaagccttagtaaggatgcacttgtcttcctagcccaagagctaggggtgttttatatatatattaactttcttttttagatttcataaactgctctcattttctcttttctttctttctttttttttttttttttttgagacagtctcactctgtcacccatgctggagtgcagtggcacgatctcagctcactgcaacctctgcctcccgggctcaagcagttctctgcctcagcctcccaagtagctgggattacaggcacctgccaccacgcctggctaatttttgtatttttttttttttttttttttttttttagtcgagacggggtttcaccatcttggccacgctggtcttgaactcctgacctcgtgatccacccgcttcagcctcccaaagtgcagggattacaggcgtgagccaccgcacccagcctctggctcttttctttttgacatgaaatcttaagttaattatcttaaactttaagaactagaaggattcttagtccagcaccatcagtttacaaacaaaaaaaacttgtgtccctgagaagttgtgacttttccagggcctcctagccaggataccagtttggtttttattatatagctagccgagtaatactattaacttgacttctgggatttcaaagtattctatgacttgactgtttaagggaattatgaggcctcactgaacctcaaaagataattttaggtaccatcctggtagctgtagagcagcaacagaccagtaaaagacttggttggtgttgcccttcttctgggtttgattacatgagtaattgtgtgaatagtctctaagttgtatgctctgagctttcgtttttagcttataaaagtgctactcttgggccagcatagtatcagaaattagctaattcatatggggcagtttaggctttaactaggaaatgatggttatcttaatgacaaaaaaggtactgacaaaagtccttttttgaacatgtgttcaaaagaaaaagagaaactatcaaactaataactgagtttgttgaacatcgagattgactgatctgagaggcttaaaactgattgccctgaaatagacttgcatgttttggatgatggctttgggtctcccagagcacttggtttcccttggtgctgattttttctctcaggattaaagcccctttatgtgatgttgttacagcagcttattgcaacttcattcagctgcttgaaaaagaagggagactgcctctaggttccatgtgttctttcagggatggtattttgatgttgcgtattctcttgaacatgtattcttccctgagaatttctgtgtgccgtggtagaagaaatacttgccagaaatcgccactcatggtatgcttttgtagtgtcgaagtgtcccctagaggtgacaaggcttgtgatagtgttgattctaacaagcatgaatctttcctttattttagcactgtgtgttacgtgccagtaatttgcagcttatcctttgtttctagctaggtaagctgggaaatagcctagtactttgtctatgtgtttatcttcaaaatgtcccaaatagccctgggaaaaaggtcgtgcagctcaatgggggctttcaacttacaattttctttgttttaggctccataaaaatacagactcaccagttcctgctttgatgtgacatgtgactccccagaatacaccttgcttctgtagaccagctccaacaggattccatggtagctgggatgttagggctcaggtaagtaaccttcctttttttttttttagtatatgtcctggtttggccatctgttttttttttttttaaaaaaaaaaaaaaaaggaaaagaggaaaaaaatatactactcttggacagtataaaagtaccccaaagactaaagacataactgtgccaaactgtgccatataataaaaaaaagtcacttccctgagccctgaaaggtcagtgtgtgtagggttacttggtcgccacagcgtgatctgggggcgggcgtcagattagagccggaactggtgatctgcaacttcagttcaccttgaagcaggtcagctgagctgagagcgcttgcactgagcccttttgcgctgctgctgttgccttagcggtcttcagcatgtgtttgctttggtttggggtaaatggcttagtggtcaacattagtgagcagtggtaatgcattttcagatatgggaactggtatgtggttggttccctagaaggacaccctcctgaaagctgtctcagaacaccgggggccatggctaatgtcatgtgcttgctacactcctcccatggtaactaaagagagtacccagatatacatctggttcttgggactctagaggaggatgagtactttgtaaaaacctgggggccccagtcattctaggtctgacactcaggtgctgtatcagctgcagtttgaactacttggcaccattgtgtggactttagttttgtaaaaatgaatggttccttaatttctcaaccttcaggctcaacatctcaagctgtttgttgttgttgttgttgttgttgttttgttttgtctttttgattagtggtcactccgcatttgatgttttgacatgtggatttcagaacttctgtgtggtaaagcagaatgttccaattgaattttcccattttttttcccctaagcaaaaatgtgagttttcacttatgcggccattgtgattccgactgagaccctaagtcgttctttgttgtctctctagtggtttctgacacctcagtgtgaagctgttgtagacatccataagaaatagcctgcttagggattatgtgagggcaaggtttggctgaaggagaatagaaggtgtggaaggaagcggaagaccagaagagcatcacactgcctcaagtcccaaatttgattctgctcctgatcctgtgactcaaattgtcattctcttttactgctgtggggtgtgctctgggcccagctgacaggacattctttgtactccacgtatttatgctggtgggagttgtatggctagtgctttgtgctttgtctcagaaattgtgtggactaaatgtaatatgggcagtgaatgggtttcttctggaagatgttaggcctggagggtggtttgggtttttacgagtctttttctcagattacagattacgaatggatgttataaaacaggcagtgttgacaccatacagtttctcctaagaaatgtacagagagttcaacctgaggaagctaattgaaaataaacttttaaaaagaaatgtagaaagaggaaatttaaaaagtatcttatgaatgggaaagatgtagccatttgagcttcaaagaacttttgagggaattctcaaaggacagtacccgtctttagtagataaatgcttgatatctatttttcttcttttactttttaaagaattactaaaataatacatggatttatagaaaaatcaaaccacttaaaaattgatcaggtggctgggcaaggtggctcatgcctgtaatcacagcgctttgggaggcctaggcgggtggatcacctgaagtcaggagttcgagaccagcctggctaacacggcgaaaccccatctctattaaaaatacaaaaattagctggccatggtggcttgagcgtgtagtcccagctactcggaaggctgaggcaggagaatcacttgaacctgggaggcggaggttgcagtgagccaagatcacaccactgaactcctgcctgggtgacagagtgagactcggtctcaaaaaaaaaaaaaaaaaaaagtatcaggtaaaaaaatgaaagctccccgcttaatctctgctcccactacccagaataactgctgttaatagcttaatgtagatccttctaagtcttctaagactaaactgtgtactttttgtgttgtaattaacaggagggtttttgttttgttttgttttttctttttttgagatggagtcttgctctgtcatccaggctggagtacagtggcacaatcttggctcactgcaacctccacctcctgggttcaagtgattctcctgcctcagcctcctgagtagctgggattacaggcgcctgccaccacacccagctaatttttgtatttttagtagagatgggtttcaccatgttggccaggctggtgtcgaactcctgacctcaggcgatccacctgccttggcctcccaaagtgctgggattacaggcgtgagccaccgtgcctggcctcaggatggtgttatatatacatattctgcatttttccatctcatatattcatctctgcctcatttcttttaaatagcagtgtagtccagggctgacttaccgtcatgcatttcgttgtctctctatgttattaaaaatgctacaggattgaaattcctcatgtgccagtcattttgaagaatggctgcctagacttggaatttctggtggataccaccacatcactgtccaaaatggctatcccagttcccacaacagtctgagaaagtgccattttcccatatcgtcccagaattggatatacatcttttaaattggtgccgcttggattattactgaggctaaacctcaataatcattgtcatagctcttaatgtattaaagatgttaactctttgtcatgcagatattttcctgttttgtcttacgtcttgattcttgtctttctgatatataaaatttatgttatgatttattcttttgctttcatacttaggaaatccttttttactcttttttttttttttttttttttttttgagacggagtctcgctctgtcgcccaggttggagtgcaatggcgtgatcttggctcactgcaagctccatctcccgggttcattccattctcctgcctcagcctcccgagtagctgggactacaggcgcccgccaccacgcctggctaatttttttgtatttgtgagacagggtttcaccatgttagccaggctggtctcgatctcctgaccttgtgatccgcccgtctctgcctcccaaagtgctgggattacaggcgtgagccaccgcgccccgccaggaaatcctttcctactcttaacaacagatcaatagtcatctatattttcttcctaaaaaacctgatgatgtattatattcatacatacgtatttaatacatacaaaagggccagatgcggtggctcatgcctgtaatcccagcactttgggaggctgaggcgggtggatcacctgaggtcaagagttcaagaccagcctggccaagatggtgaaatcccgtctctactaaaaatacaaaaattagccaggcgtggtggcgggcacctgtaatctcaactactggggtgactgaggcaggagaatcgcttgaacccaggaggcagaagtttcggtgagccaagatcacgccactgcactcctgcctgggcgatagagtgaggctctgtctcaaaaataaaaaataaaaataataattttatagttaagttgccctgtgtttttcctgtgattaaaaaaaaaaatacctgttttgtatttaactttggggtgggataaggtatagcccacttagtcagttgtgtctaagccacttgatgaaccagtcaatccagtcttcacctttaacaaatgctgatttcttcaagtgagcaaaatatctcttaaactttttcctattttctctataaagttgcttttttctgaattttttctttatgaggcttgatgggcagccctatcagcagacaatcattcattcacccaacaaatatttgagtatctgcttcaagccaggggcagtgctaagccctggaagtggtatcttctccttatccgggagtggggctacagtgttcattccagaagactcaagaaaatagcagatcatcacaaaagtaggttttacataaatgaggaggaatccacagggttgtgtatatgtgtgtgtattttaaattctgacataagttggagctttagggtagactgtgacataagagtagtttgttttccaactcatgtaattgccggctgatttttgtcttgaattatgataatggtaacttctgttgaaacaattctgtattcatcttagcttggttgggatgcaataaaagttttgtactggtaaaaatgataattttcttccatgatgattttgaagcttttctgtaacacctgataaaaatagaggggccaggcatggtggctcatgcctgtagtcccagctactcgggaggatgaggtgagaggatcccatgagcccaggagttttaggctacagtgagccatcatcacaccactgtactcctgtactctagcctgggcagcctcgttctttagagtaagacactgtctctttaaaaaaaaaaaaaaagaaaaaagaaaaaaagaaaaggcttttagtgaatatatttttagggtagcaagtgtaatttttataaattgcattatttgaatctaataaataccctcaaagctgaagtcgaattctgattttgattgaaaatattttttacttaaaggaagagggatagaataaatgacacgattaaggaaaagacttcttgtataaggccggggttttttaaatgattttttgaatagttagatggacaatacggaattaaaaaggtggtgtaaaaagttatacggggctgggcacagtgactcacgcctgcaatcccagtactttgggaggccgaggtgggtggatcacctgaggtcaggagttcgagaccagcctagccaacatgacgaaacatcatttctactaaaaatacaaaaattagctgggcttggtggtatgcacctgtaatccagctactcgggaggctgaggcagaagaatcgtttgaacccaggaggcagaggttgcagtgagccaagatcgtgccattgcactccagcctgggcgacagagtgagactccatctcagaaaaataataatagaaaaaagttatatggggctgggcatggtggctcatgcctgtaatcccagcagtttgggaggctgaggcagcttgatcacttgaggtcaggaattcgagactagcctggccaacatggtgaaactccgtctccactaaaaatacaaaaattagccaagcgtggtggtgcgtgcctgtagtcccagctacttgggaagctgaggcaggagaatcgcctgaacctgggaggcagaggttgcagtgagccaagatcatgccgttgcactccagcctggacgacaagagcggaactccgtctcaaaaaaaaaaaaaaaagagttatattgtaaagtatctctgctaccctgccccaaacattcatttctttccctggaggcagccactattacctgtttctttaaaaaaaaaaaaaaattgtggccgggcacggtggctcacgcctgtaatcctagcactttgggaggtggaggtgggtggatcatgaggtcaagagatcgagaccatcttggccaacatggtaaaaccccatctctactaaaaatacaaaaaattagccgggcatggtggcgggcacctgtagtcccagctactcgggaggctgaggcaggagaatcgcttgaacctgggaggcagaggttgcagtgaactgagatcacgccgctgcactccagcctggcaacagaatgagactccatctcaaaaaaaaaagcgtgtgtgtacccgtgtgttaaatttttattataaaatatatataacaggctgggcgtggtggctcacgcctgtaatcccagcactttgggaggccgaggcaggctgatcacgaggtcaggagatcgagaccatcctggcgagcacggtgaaacctcgtctttactaaaaatacaaaaaattagccgggcatggtggcgggcgcctgtagtcccagctactctgagagcctgaggcaggagaatggcgtgaacccaggaggcggagcttgcagtgagccgagatcgcgtcactgcactccagcctgggcgacagaccgagactccgtctcaaaaaatatatatcgatatatataacaatttacagttttaatcatcttaactgtacagttcagtggcactgagtacattcacattgttgtacagccattactaccatccatctctacaacctttcgtcttgcaaaactgaaatttcatacctattaaacactaactcccacttctcccctttcccccaccccaccctctggcaactactattctactctttgtctctattggacatatttttgtgtgtttaggtttgtgtatatattttacatgtgtgtataaatacacaagggtatgtgggcgttgtgtttttacacatactataaaatattgtgcacatttgtttattttaatgtatcctgtagattatttagaatcggttcatacagagccgtatcattccttttaagggttgggtttaaatagtctgttatggatgtaccacaatttatttaaccagtttttaaattttttacttattttttttaatgtttttttagagacaggatcccactccatcacccagactggagtgcaacagcatgatcatagcttactgcagccttgaactccggggctgatgtgatcctcccacctcaggctctcttgtagctgggactacagggatgtgccgccatgcctggctaaattttttatttttatttttatttttatttttggtagacacggggtttcactgtgttgcccaggctggtcttgaactccttgggcttgagtaatcctcctgccttggcctcccaaagtgccgagattacaaccatgagccatggagcccgacaagagtagccttttatttgcagaccattagagaaaaagttgcgtgtaagtagataagcatacgaatttatcactgcaatactgtttgtagagatcacagagctgttaggctaggaagaagtttttagcagttagcactagaaagcaaaactttggaaacttccatttcatcaaaagtgacctcatctgagtagggcatgtgagggaaggacctttttactcgacaaggggaacttgcccagttcttgtttgtgaaccttgaagaaagtggagcatttttattttgggaccattctaggttgtggtagttccttggtactcggggttggagaatctccctctgctgctggaccttctgcctcctcatgctgtaatatgcataagaggtgtcctagaagtattcaggaacaggctgtggttgctttgttgttctgtgactgttgaactctttatatagcagtacttttttaagctgtactaattgagcatttattatgtgtcagttactgtgctagctgctggaaactatcctaccctcagcagtcttctggtctaatgggaggtacagacaggcaaatgggctatgactttacaagaggctaacttctgtgatggagagaagttccagccactaagggagcacataaaaatcagaggagatcctaccaagaattgggaggtaggtcagggaggagacttctttgaaaaatggcatctaagacctgaacagcaaggaaacattagctaggtcaaggacaaagcatcagtggggagagatgcatgagtcttttggaaggaccagcatgtgtagaggctctgacaggagagaatctctcaggcccattcagagagtccactgtgtgaagacgaggcatgaacaaccagccaggacatgtggagaggagcatttttctttttttcttttttctttctttttttttttttttttttttgagacgtctttctctgtcacccaggctggagtgcaatggcatgatctcggctcactgcaacccccacttccagggttcaagcaattcttctgccttagcctcccaagcagctaggattacaggcacccgccaccatgcccggttaatttttgtatttttagtagagacggagtttcaccatgttggcctcaaactcctgaccttaggtgatctacccgtctcggcctcccagagtgctgggattacaggtgagagcccccacgcccggccaggctcggctttctttccaggccccgtcacactcttagatgttccctgggccccagaaggcagcgtgaggtgctctgcccatctatgctgtccttttccaccccaccctatccactgggcccctggggctcccactccactccaggtctcttcatggacccttctttcccttcacttctgtcccaggagacctgggagactcatgggaacaggcatcatcttctccagcacagttcattgtctaatgcacgaaagtgctgggctgtgagaaggtcaggagcttacatggaatgggagtcagctgtggtacaaagtacgctgcttagttctactgattttttattttttatttttacataagactttgatggtaaaggaagcagtgtgtgagcaagctgactcctgtcttgtcaagtaccaggtccactctgatgagcccctgtggacagcactgctgtaactccccaagcctgggctcaggaggtgggccctaagcgctgttcccagctcttcctccatgctgtcagctcttccaccattcttcctggcgtcattctaaggtcctgtcttcccccgccctcttccttcctggcttctacgctcagctcaagtagtagctgtttgggtacttttcacccagacttaggaaatgttatcagttggtcgtattcctgtcagccctcttactatggaactcaaataggacagattcagctgaattcccagccctgtggttgcactctttgtctgccctgcttccccaaggtagcctgctccctaaaggtcaccgagatactccccatgcaaggtttttgttgtattacacatgacaacatggaataaagtgttttgcaaatttactggatgatatcctactatgtggaacatcctacaacttactcttttcactcaacatttgacttttgaacctggtctgtactgctccgtgcagaccaatgttcattcatttgatatgtctccttgtgccatagaaatagttttacaatagaagcctgtccagagccatgagggagaaggggattgtagagaaacaaggattggcatctggtttatgtttacatcctttagtcctgttaaccgagaagaagatatttttatttccatgtttgcgaaagctttccacaaaaaaagcatccattttctagacttattaatagggcagtccaaaggttttatttttagatttgaaagaaagcaaagtaggcttctgagatatgcacatttccctgtgtccctgtctcttttgcaacattccacattgctgctaaaacttgaacatgagcactttcaagcatgtgcttactttctatgtatgactcattttttaaaacattaaagcattttcggccgggtgtggtggctcacgcctatattcctagcactttagaaggccgaggcgggtagatcacttgaggtcaggagttcaagaccagcctagccaatatagtgaaaccccatctccactaaaaatacaaaaattagccgggcatggtggcgggcgcctgtaatcccagctactcgggaggctgaggcaggagaattgcttgaacccaggaggtggaggttgcagtgagcagagatcgagccactgcactctagcctaggtgacagagcgagactctgtctcaaaaaaataaaaataaagcattaaagcactttgtctggtggtatgtaagttttggcattacttagataagttgtattttaagtctttctacacacaataacttatttttaaaatacaagtttctgtgtacttccgggttttgtgtttttgtaaacagcagaaggtattagtccatattaagtactaatttgttctaatattttcagctgtttttggaattacacttggcaaaaaaatagacaaatgtctgcagttgtgacagtttgtttttttgttctttttaactccagaataaataattctagtgagtttttttcttggcttgtaagaacatgggaatgattagagtcatcataacacttaagtagttatagaaggttgaacatctgtagtcagttgtataaaatttcctagtcatccttccaggttgtttaagacaaacaaatacatagtatttattaagctcttataaattttaattgtaaaacatcattgtacaaaactttgaaaatgcgtataggtacaaagataaaaaattaggccaggcatgccatggctcacgcctgtaatcccagcactttgggaggccaaggtgggaggatcttttgagcccaggagttcaagaccagcctgagcaacatattgagaccctatctctacaaaaatatcataaaacaaaatagaatcactctggcgattccactatccaaaaaaaaaaaaaactgctgttaatatttggtatgtatctttctagaccaaggcctccaactttggttgagaattcagccgggtctgtgaccttggatgggaaaaacattcactctttattttcactaatgtctctgaaaacccagatttttagctgggcatggtggctcgtgcctgtaatcccagtgctttggaagcccgtggagggcagatcacttgagcccaggagtttgagaccagcctgggcaacatagcaagaccctgtcttttaaaaaaaaaaaaaatccagccgggtgtggtggctcatgcctgtaatcccagcactttgagaggctgaggcaggcagatcacctgaggtcaggagtttgagaccagcctgaccaacatggtgaaatcctgtctctactaaaaatacaaaaatcagccgggcatggtggtgggcgcctgtaatcccagctactccggaggctgaggcaggagaatcacttgaacccggaaggtagaggttgcagtgagccaagatcacaccattgcactccagcctgggcgacagagcgagactctgtctcaaaaaaaaaaaaaaaaatccacattttcttcaatgacaattgtaagcaacagatcatggtagtattagaatagcagtgactgtcaccagtagagatcaaagatactttcatatcatattatagttgttacagatattttgaaatatatatgtccatcactgcttcaaacttaaggtaattattagacccatctctagatctggttatttaatgatttactgaagaagcacatattatttgagaacgaactcttgaaatatgttgttaatttctgtgcattttacacatttcaaaacattcttctgaggaggggtccagaaggccaaaagggtccatggcagaaaaaggttaagaacacctgttctgtactttgtaccatgtggctacaaatataaaaacagacgttaagccgggtatggtgatgcacacctgtagttccacctacttgggaggctgaggtgggaaaatcacttgagcccaggagtttgaggccagcctgggcaacagagcaagaccccatctcttaaaaaccagtcagcacttgactagtcagttagtgggggaaaacacaggtacagtaaaaggagtcaaaattacacttaaacttaggtcatcttattatatcaaacatttattaacatgtttagtgttttgtgtatattatgcaaagtgtaatgcaactaaaactgtttaacacttctcgatatcacataaatttgttggtgcataatagcctaaaagttacttttgctgttggcattttattttattacttacttatttatttatttatttatttattttgagacagagtcacactgtcgccaggctggagtgcagtggtgcgatctcagctcactgcaacctctgcctccctggttcaagcgattctcccgcctcagcctcctgactagctgggactacaggtgcgcgccaccatgcccagctaatttttgtatttttagtagagatagggtttcgccatgttggccaggatggtcttcatctcttgaccttgtgatctgcccacctcggcctcccaaagtgctaggattacaggcatgagccaccacgctgggcctgctgttggcattttaaacatccttctagagtctttcttatttgcctgtaagcacgtacacatgttgttgttgttttgagacaaggtctgtcgcccaagctggagcacagtggtgcaatcacagctcactacagcttcgacctcttgggtgcaagtgatcctcccaatcagcctcccaagtaggtgggactacaggtgtccgctaccatgcccagctaatttttgtattttttttgtagagacggagtttcaccatgttgcccagactggtctcaaactcctttgctcaaacgatccttccgcctcggcctcccaaagtgccgggattacaagtgtgcacctctgtgcctggcccacatgttgttttagatgaatgagatcatatatgtacttttgtaacttgctacctttcctcaacaaaatgttgtaaatatccatgtccataaaaatagacgtatatcttcacttttccctaaaatgaaaataacttaacttgcattttcttttttgtttttgtttttgttttgagacaggctcttgctctgttgctcaggctggagtgcagtgatgtcacagctcactacagcctccacctccagtttcaagtattccacctacctcagcctccaagatagctaagactacaggcacatgtcacgacgcctggctaatttttaaaatattttttgcagaaatgggatttcactatgttgcccaggctggcctcaaactgctggcctcaagtgatcttcctgccttggcctcccaaagtgctgggattacagtcgtgagccactgtgcccagcctgcattttcttattataaaagtaatacatgttcaatggacaaaaaattttcagaaaatatgcaaagatgaaaagtaaaaattgtccataaatctgtcatctacagataaagataacttctggataatgtttttctaccatcatttttagtaatcacataacatttcgttgtatgtctatgccttcatttaattaagaggcatttccattatttctgcatgttcatgactctgaatgatgatatgtctgcctgctgatggctacaaccctgtttctgcatttcaaacctctctcttgagctccagatttgatggcctcgtcagcatttacttgagttgctcataagtgtctcaaatttaacaagtcccagtcttgatttttttcccccttcaaacctattcctcatgttgtctctatttcagtaaacaatatcaacatccacccagttactcagtccaaaattctaggagtcatccttgattctgctctttctttttttttttttttttgagacggagtctcgctctgtcgcccaggccggactgcggactgcagtggcgcgatctcggctcactgcaagctccgcttcccgggttcacgccattctcctgcctcagcctcccgagtagctgggactacaggcgcccgccaccgcgcccggctaattttttgtatttttagtagagacggggtttcaccttgttagccaggatggtctcgatctcctgacctcatgatccacccgcctcggcctcccaaagtgctgggattacaggcgtgagccaccgcgcccggcctcttttttttttttgatacggagtctcattctcgtcatccaggctggagtgcagtggtgcaatcttggctcactgcaacctccgcctcccgggttcaagcaattcttctgccccaacctcctgagtagctgggcctggctaattttttgtatttttagtagagatggggtttcaccatgttggccaggctggtcctgaactcctgaccttgtgatccgcccacctcagcctcccaaagtgctgggattacaggcgtgagccactgcacccgccctgattctgctctttctctcatcatccctgatctgtcagcaagtcctgttaggccaaccacttctcagcatctgcactgccagtatgctagtccaagccacaaaacacctctcagaggtacgcaacaggactttgttgttgttgtgtgtgtgtgtgtttttttttttttacggtagaattattttataacttgaagtgtagggatgaccttccttttaaaattttatttattttcttaattttttattcccatagattttaggggaacaggtggtatttggtgacatgagtaagttctttaatggtgatttctgagattttggtgcacccatcacccgagcagtgtacactgaacccaatttgtagtcttttatccctcaccccctcccaccctttccctcaagtccccaaagtccattgtatcattctgatgcctttgcatcctcatagcttagctcccacttatgagtgagaacatacagtgtttggttttccattcctgagttacttcacttagaataatagtctctagttccatccaggttgctgtgaatgccattaagtcattcctttttatggctgagtagtattcctttgtatatatatgccacaatttctctattcactttctgattgatgggcatttgggctggttctatatttttgtaattgtgaattgtgctgctataagcatgcgtgtgcaagtatcattatgcaacgggacttcggatgacatattgaacaacttcctcactgatatccttgtgaaacgctacatatttcatgggtctgtttgttataccaacactcaattctgaatgatggaattatttcacatttagtctctttttcatctagccattatagtttagtttaaacaccaagttccattcctgctgcatgctgaaggatttgcagtacatcaggctatagtccatcaattcattccacaattgagtaagtaaggtatctatagtacctcaggccctgtgttaggcagggatggggtaacctagacagatttggtacctgtcctcatggagcttgactttagcggcagagacagatcttagataattgtaccagtacttaagtgttcagaaggacaagtatggaggtgggagccactccagtcctctacagtcacgtgctgcacaacaacgtttcaaccgacaacagagcacacatacagtggtgttcccataagattagaatgccatatttttactgtaccttttctatgtttagatatacaaatacttaccattgtgttccagtgatctacagtattcagtatagtaccatgctgtacagttttatagcccaggagcaataggctatataccgtatagcctaggtgtgtagtatgctacaccatctagatttgtgtaagaacactctctgatgttagcacaaataaatcgcccaatgacacatttctcagaacatatccctgttgttgagcgactcatgactgtacaatgggggaacagctcagcctgccttccccaaggaggcaacgccgatgcagggaaccgagggttgaacagaagtgggcaaggtgcagagaggaaaaaggctttccagatggagaagagcatgtgtgaaggccctcagtctggcaagagcttagtcctgtgtggcaggagctgaacgaggggttaggggagagtggcaaagggtccgggccatcagagaggtcaacaggggctggatcatgcaggattttgaatgttaacatcagagcgatagaaaacatgaagggtaaggtggtttgggttttgaatttttatcaaaatattgcaactactcggcaacaagttagatataacaaaagaggtcatcgtaaaaacagcagtctaccccttccccttcccttccctgactcagacatgacagcttttaactgtttctgattttagttcctttgatggttacctccaaaattaaatcatatgcttatacatctttcttgatttgccaactttagggaactgtgttaactccctgaaatgaaagagaatgacttagcttacgttacctccccatgttgaaattcatattcacatttctctgtaattttttttttgagatggagtctcactctgtcgcccaggctggagtgcagtgatgtgatctcggctcactgaaacctctgcctcccgggttcaagcaattctcgtgcctcagcctcctgagtagctgggactacaggcgcacaccagtgcactgggctaatttttgtatttttagtagaggcggggtttcaccatgttggccaggctggtcttaaactcctgacctcaggtgatctgcctgccttggcctcccaaagtgctgggattacaggtgtgagctaccatgccaagcccacatttctctgtaaattttaaacagtattttagtccatatgtcagttcccctctgtttaagataaggatattaataaccctacttttccttccactttccctccttaacttctgcgtcttaaaagctgtacttgaccatacccattcttgcatttgttaacatgtgtgttctgccctgcaaccacagccaagttgtagcttaattctaaagtcgaaaataacattatttacattattacacatgtgagtattgttcttggcgagaccaaataatgaatgtgcccaggattacatttccttctttacagatctggaccactcaaaggagaatgaccaatcaaggtcaaatggattcccttttcttagactctgtcacctgcttaaaatccttgctaggatttaatctacttcatattcaaaccttggcttgcttatatagctctttgttttgcccaccatttctagttgcctttttattttgtttactattcctccttgattatgttgtaaaatgctattagcagtgctgtttatttcgtacgattcggctttttccccactgaagacctttctcttggaaggcctctgcccttctgcaatctgggcaagtatctgctctttgatttaaggttgcatatacagctgtacctggaccttctcctcactgggctcttgggttggagcccgtgtcttaaaacccatatcttcctttcacatggtttactccctcgttttctggactgcatccttaaataatgtgctcagatagagtgcatggggagtaaactgtagtggataccgttgtcacctaccccatatccatttcttctttgcccattcctaacagaatcctgatattattcacctttctaccttattcccaacttcagaaaggatccttaagtcattccacacattgcattcctttggcaactgttactggtcaaggatggacatacgatctaagttggttcactcagactgaagggaaggacttccatggcacgttcagggaagactttctctttttctctcactggagtaagtgagaaaggtgttgctgggggctcttctgtaacctcagactgagggacaaagcctgaggataaagcctgctcaccaaggaaggcggagcagagaaacgggaagaacctgggtcttgatgccgttgcttagctggtgattgcactgtggctggggcctgtcctacctgagctagggactcagataggatggactttcttactgaatgagccagcttcagttttcttttctgttacttgtaaccaaaagcattgtaacagataggtcttctgagtcactgcatgcctgaaatacctttcttctactcttacacttgattggctgagtatagggttccaagttgaaaatcattttttctcctaactttggaggcatctcttctagtatgcagagtaacaaatgcaacaaatgcctgatgccaatcttattatggttcttttgtaggtgcccttcttttctcttccttccctggaagtttttaggatttcgtctccttatttttagtgtcctgaaatctcatgagaatatgtctagagttgtgtcttgttcactcgttgtactgtggtcattcaatctgaatacttttgtcaactcttttttttaaaaaaaaattactaatttacatgctttcattttctctatggggactactgtttaactttggacctcttatattggtcttctgtcttctctcatatttttcatttattgggcggtggggggtgctctgaattttggaagatctcctgcatttattttctttttccttttttctttttttttgaggcagagtcttgctctgtcacccaggctggagtgcagtagcctgatctcggctcactgcaacctctgccttccaggttcaagcaattctgcctctgcctcccacgtagctgggattacagacctgcaccaccacgcccggctaatttttgtatttttaatagagatggggtttcaccatgttgccaggctggtctcgaactcctgacctcaagtgatccgcccgcctcagcctcccaaagtggtgtgagccaccgcacccagcctcctgactttattttctatcccttctgttaaattctttatttcagccaaacctttttttttttttttttaacttactgtgaagcctgtgtgcctactgcctagattagacaattgttaacattttggcgtattttcctggtctgtatagatagggtgcatttttatacctttttgctcaccatttaaaaggaactcacagatgtcacgacatttcacccctaagtacttcagtatacatctcctaaaaataaggacattttccaatataagcacaataccccgatcacatctttaaaagttaacaataattctctaatgttatcaggcacccactttaaattcagatttcctccaaatgtctcttatcgctgttgaggggctccaaagcaattaagatttatacattgcatttgaatatgcttcctttgtctcttatttatttatttattttattttgagacagagtctcgctgtctcccaggctggagtgcagtggtgtgatctcagctcactgcaacctccgccttccaggttcaagcgattctcctgcctcagcctcccaaatagctgggattacaggtacgcaccaccacgcccagctaacttttttgtatttttagtagagacagggtttctactaaaccatgttggccaggctggttttgaactcctgacctcaagtgatctgcccgcctcggcctcccaaagttctaggattataggcgtgagccaccatgcccagcccctttgtctcttttaacaagaacagcctacccacctctccttcacttgtgatactgactttttgaagcagtcagcccaattgtcatctagaagggcccacattttaagatacatatttttagagatggcgtgtcactatgttgcctaggctggccttgaactcctggcctcaagtaatcctcctgcctcagcctcccaggtagctgggactacaggcttgtgccaccacgactagctggcccacattttagatgtctctcttttcttgtgatataatttaacttgtttgtccatatatattacttgtagacaagaagttaggtctacaggcatgttcaggttaaacattttgggcaagaatatttcataggcagtactgtgtacttcatatagcatcagctcaccaggcacttaatggttggttaccctgtggtttgtgatgctacgttttaacacttgattaaagaaggaggtgactgccaaatctccccattgtagacatacagttttcctgtggtaattgatatataatctgtgatgtgatgctttggcaccatacaaatatcctattgcccaacagccatttgcataattattttagcattcattgatccttgcctgaaaccattattacattgggggttgcaaaatgatagtttttttaattgtcacctcttctacatttagtactgtcattcctctgtaatgaattttccctcatcaaataaggaggcattatatttcctcctaaaaagacagtatagatgcttaatctttgcctttattacatttcagagtaaggagttggtagaataatcacctcaaatggtggcaaaatatttgctgttgtgtttccttttctctttcatgtcaatatggactcatagggatttatttattaaatgttttacaattcaaattgggtcaacaagagtcccttcatgttggttcctatattctcctggcataccctcattaattagtctttgagcaatttcttgttttctggcacaagatattccatcccaatatgtgcttttcgtgtcctagaactgattccaaggagctctggttccttatagtggcaacggtatttagaatccaacatgtgggtactaaatgtgctgattcttactggggtaacattatatctaggcactttcagaggacatcgctagaaaatatattcagtttttattttttatttttaatttttttgtagagacaaggtctcactatgttgcccaagctggtttcgaactgagctcaagcgatcctcccacctcagcctcccaaagtgctgggattacatctgtcagggcaaactgctggtaaatattttcacaaaagaaaaataaaaaaaccaaagtgctgggattacagatgtgagccactgtgccctccattttttttttaagtcataaatacataatgatgtcttctatggcaatttaacattacagggttcttccttaacttttttttttttttttcttttttttgaggcagggtcttgctctattgcccaggctggagtggtgcagtggtacaatcctaattcactgcagcttcaaatgcctaggcttcaaacaatcctcctccctcagcctcccgagtagctaagactacaggtgcatatcaccatgcccagctaatttttaaaaattttttgtagagatggggggtctcgttgcgttgcccaggctggtctcgaactcctggcctcaagtgatcctcccatctcgatttcccaaagtgctgggattacaggtgtgagccaccatgcctggccaacttttatttgatctgtatatatcttttccttacactgaaaatgttgggtcttactaatgttaacatagttacttatttgctttatcttgtaatagacataaaattacaaaattataataccaatattacgataaatagctgggcatggcggcgctcgcctgtagtcccagctactcaggaagctgaggtggagggactgcttgaacctaagagtttgaagctgcagtgagctgtggttgtgccactgtactcctacccggacaacagagtgagtggggggaaaaaaaagaaataatggaagatccagagaaagccccaaatatttaaaaattaaacaatacactttgcagcttcctcacctctctcagccttcatagaattgaagagagttagggccttgcactagattaggctttgccttaaggaaatgttgtgtttgatttgatcttttatccagaccattaaaacttccttaacgtttattagtaataaggctatttcactttcatatcatttgtgtgttcactggagtagcacttttagtttccttcaagaactttgattcacaacttggctaactttggtacaagaggcctagcttttggcttctcggctttcaacatgcctctcactaagcctgatcatttggtttttggtttaaagagaaagacatatgactcttccttttacttgaatgcttagaggccattgtagggttattaattggcctaatttcagtactgtcttgtccaagggaatagggaggcccaaggagagagagagagatgggggaacagctgattggtggagtagtcagaatatacacatttatcacttaagttttgccatcttttctttttctttttcttttttttttttgagacagtcttgctctgtcacccaggctggcatgcagtggcatgatctcagttcactgcaacctctgcctcctgggctcaagcaattctcctgcctcaacctcccgagtagctggtattacaagcgtgcgccaccatacccagctaatttttatattttttagtagagacagggtttgccatgttggccaggctggtctcgaattcctgacctcaagtgatccacccgccttggcctcccaaagtgcggggattacaggcgtaagccactgccgcctggccaagtttgccaccttttttattttttttattttttgagatggagtctcactccatcacccaggctggagtgcagtgatgcaatctcggctcactgcagtctctgcctcctggattcaagcgattctcctgcctcagcctcccgagtagctgggactacaggcatgtgccagcacgcccagcttgttttttgtatttttagtagagacggggtttcaccatgttggccaggctggtctccaactcctgacctcaggtgatctgcccggctcagcctcccaaagtgctgggattacaggcgtgagccaccccgcccggccaagtttgccatcttttatgggtgcagtttgtggtgccgcaaaatgatgatagtagtaacatcagagagcattgatcacagatcaccataacaaatataataatgagaaatttgaaacattgtgaaaattaccaaaatgtgacagagacatgaagtaagcacatgctattggaaaaatggcactggtaaacttgcttgatgcagggttgccacacaccttcaatttgttaaaaactcagtatctgcgaagtacagtaaagcaaagcacaatcaaatgaggtgcgcctgcatattacaaccaagaggcttttcgcagaaacacgagtgtgcttcaacattcaaaaatcagttggtgtaattcaccacattaagataataaaggaggccgggtgcggtggctcacacctgtaatcccagcactttcagaagccgaggtggacagatcacttgaggccaggagtttgagagcagcctggccaacatagtgaaatcctgtctctactaaaaatagaaaaattagccgggcagggtggcacgcacctttagtcccagctattcgggaggctgaggcaggtgaatccttgaaaccaagaggcggaggttgcagtaagctgagatcacgccaatgcattctagcctgggcaacagtgagacccagtatcaaaaaaaaaaaaaaaaaaaaaaaaagataataaaggagaaaaaccatatagtctattcaataaatacagaaaacgcatctgacaaaattcagtgccctttcatgataaaaattcagcagattagaaatagaggaagtgcatgtatgaaagagctacagatagattgtacttaattgtgaaatattgaacatgttaccccgaaaatcaggaaaaaggcaaagatgtccactctaaccacttctattcaacattatactagaggtcatagccagtataatgaggcaagaaaaaacataagaggcattaatatttaaaggaagtaaaactgtttctatttgtaggtaatgtcgaaaatgtgaaagaaactatcagaacctgctagaactaaaaagtgaattcagcaaggtctcagggtacgagatcattcaaaaactaatcagaaatgaaatttcaaatgcaatatcgttaggaataatttaataagaaatgtacaagatttacacgctgaaactgaaaatgttgctgaaagaaattaaagacctaaataaatggaatgttgtaccatgttcatcagctgaaagactaagtgtctttacagtgtcagttctcccttcattgaactgtagattcataaccccagtcataactgcagggttttttttgtagaaattgattgtaaaatgtatatggaagctgggcacggtggcttatgcctgtaaaccagcactttgggaggctgaggcagacagatgacttgaggtcaggaatttgagaccagcctggctaacatgacgaaaccccgtctctacaaaaaatacaaaaattagccagacatggtggcacacacctgtaatcccagctacttgggaggctgaggcatgagaatcacttgaacccggaggtggaggttgcagtgagccaagatcatgccactgcacgcccgcctgggcaacagagtgagactttgcctcaaataaataaataaataaaacgtatatggaaatgcaaaggacctagaacatccaaagtaaacttgaaagagaacaaaattaaggggcttatgtgatgtgactttatagtcatttgatttttaacagaggcaccagaacagtccggtgcgggaaaggaaagtcttttagcacgtgccggatgatggcaaatgacatccataccagacaaaaatgaaccttgaccttaccctaaatattagtttcttagagttgccacaaactaggtggcttaaaaccacagaaatttggctgggtgcggtggctgacgcctgtaatcccggcctttgggaggccgagtcgggcagatcacctgaggtcaggagtgcaagactagcctggccaacgtggtgaaactttgtctctactaaaaatacaaaaaacttagtcaggtgtagtggtgcacacatataatcccagctagccaggaggctgaggcaggagaattgcatgaacctgggaggttgcactgagccaagattgcaccactgcactccagcctgggtgacagagtgagactccgtctcaaaacaaaaccacagaaatttgctgtctcataattccagagtctagaagtccaaaatcaactgtcatcagggccatggtctctgtgaaacctgtaggggagtccttccttgcctcttcctagcttccagtggttggcaacctttggcattctttgatttgcagctgcattacttcaatatctgtcttcctcatcacacagcattctccatgtatgtctctgtctttacatggcctccttcttgtaagaacaacagtaatattggattggggcctgccctactccagtgtgacctcaccttaactaattacacctgcaacaacgctgtttccaactaaggtctcagtgtgaggtactgagggttaggacttcaacatatcttttttgggggacatagtccaacccatgacactacttcacaccatacataaaaattaattcatgagagattatagacctaaatgttttaaaagctaaaaatataaagcttctgcaagaaaacataggagaatatctgtgcagtccaaagaataaggttttttttaaacacaatttcactctgttgcccaggctggagtgcagtggtgcgatctcagctcactgcaacctctgcctcccgagttcaagcgattcccatgcctcagccttccaagtagctgggattacaggtgtgcgccaccatgcctggctaatttttgtatttttagtagaggcagggttttgccatgttggccaggctggtctcaaactcctgacctcaagtgatctgcctgcctcggcctcccaaagtgctgggattacaggtatgagccaccgtgccaggccaaaaaaagatttattaggatacatgaagcaatagctattaaaagaaaaaataaattggacttcattaaaatttaaaacttttggtcctcaaaagataccattaagaaaatgaaaagacagagctgggcgtggtgaggcttgcctgtagtcactactgggtacttgagaggctgaggcaggaggatcacttgagcccaggagttctaggccaacataggcaatatagtgagacagtgtctcttaaaaaaaaaaagaaaaagaaaaaacaaaagaaaataggctgagagctgtggctcatgcttgtaatcccagcactttgggagtacaaggcagatggattgcttgagctcaggagttcaagaccagcctgggcaacagtgaaatcccatctctacaaaagatacaaaaaattagccaaccatggtggcgtgcacccgtagtccatagtcccagctactcgggaagcagaggcaggaggattgcttgatcccaaggaggtcaaggctgcagtgagctgaggtcgcgccaccgcaccccagcctgggtgactgagtgagaccctgtctcaaagaaaatgaaaagacaagtccaccaagaaaacagttgagaccagtcatagaaaaaatagaaagtcatatctgacaaaggatttgtattcagaagaattcctataactcggtaataaaaagacaacctgatttttaaagggtgaaaatattttaatggatacttttttttttttttttgagacagagtctcactgtgtcacctaggctggagtgcagtggtgccatcatacatagctcactgcagactcgaactcctgggctcaagtggtcttcctgcctcagcctcctgcgtagctaggactacaagcacgtgccactatgcctggctaatttttaaattttttgtagacatgggctggtgtgtgtctgtgttgtctaggctggtcttgaactcctgggctcaagtgatcctcccacctctgccccccaaagtgctgggccaccacgcctggtgtggtgtcaccagagatgagccaccatgccctgcctgatacttttcttttatcatctgtttatttcttgtttatgggtgtttctgttctgattttatgactattctgtattctaagatttctctgagaatattatttgtttcctctaaggacagacttggtctctcttccatggggctggttcttgagccgccagggatggggggaggacctgggtagctgctgcgctgccccttctctgctgtggtggagtggcccgttgcctgcggggtctgtctctgaagggtggtttggagaagttctgtggaggcgaggcaggggtcagctcttgccccatggaccctcagagactgggaaaaggtaggcatcacctgggctgctgccagccacatcaagagcctttggggtgggtggggtgggggccggggaagggaaggttctagctgttgatttagaaaagacccattgatttcttgcctgagggaagaagtggcaccttgccactccaagtttgctctgctcaccagccccaacagcatcagcctcacctgggagcttattgaaggtgccctgccccaaagcttgtgggtcgggatctggcagtcagcagcccccaggtgttgcacacatgacagcactgcttgcccctcctctcgtctggtctggtctggtctggtctggtctggtctgagagcttctttggggctctgacaggtatacaggctctcatctgctctacagctctcttgtagtacattcctctctgttccattagtcaacatgttcttgcctacttccagcatctagaaatttgctgagtgtatcttatccgttcagaggtcctctcctgctattgcctctgttagaaatttcttccctttcatatgtctgtacttcggtttctttgaggtttgaagggtcaagtggcaattacatgtaggcagttggccatcctctggtgaaggctttaaagcccaggaataacaagatccattatgtctaaaactagcaaaaaccctacctgtcacatggtgaactgaattagaggtgatggggacagaagccagattggagtgagtggaaggtgagggagtggagattgggtatagacaactctctttaagaagttttgttgtgatggtgaccagaaaaataggagtggggtagagggggatgagggtgtttttcacgtgggtgaatatgagagcatgtttacatccttctgggaatggcccaggagagaggggagcgtgagaaggaggaaatggggacctggaggagcagactccttgtgtggaggggggaagcggcatctagagctgttgcaggaggtgggctttgagtaaatgcttcctctttggtaaagacggggaacgggaacggtagaagttgcacggaccctttgttaaagctcagaagctgagcgagaattagagcttaagtttatggagtagtcagaataaagtacccctaactgtattcttgcacagtgcaggaagccaggggtctgaaatcaagatgttgcagggctccattccccccagagcctctagcatggatccttccttgcctcttccagcttttggtggctgcctggcagtcctagactttccttggcttgcagttgcattgctccattctctgcttgtgtcttcacatggccttctctgtgtccccgtattcttctctggatgcttgtcactgtattaggcccaccctaaatccaggatgatctcatatcaagatccttcacttaattacagaagcaaagaccttccaaataaggtcagagccacagggtctgggggttaagacatacacctaactattcggggctaccatcgaacccctgtagaagcctgtccatttccaggatagcagagcccaaggaagggccagaagtccccccaaaacagttgtttgcattcaccagattctaagctataagcagatgggcagtggcagtcggtcctaatccatataccattggcaacaatagtttagttcactgtagacataatgagatgcttatcttctgctaagtagtcctcatggtaacagccatattactcctggctttgagtgacagcgctgtgctcttgtctggtgcccatatacttcagcagctggaaacaagacagtgctcatgattcaccggaaagtttctgtagttaaaatcaagtgatcccttgagtctattctaatatttgtctgtaccatgttctgtgacgagacatggaaacaaaacattaagaagtgaaagtatctttgattatgctcttgaagacaactttttgtttgtttgttttgtttgagacggagtttcactcttgttgcccaggctggagtgcaatggtgtgatctcggctcactgcaacctccgcattcccgggttcaagcgattctcctgcctcagcctcccaagtagccaggattacaggcatgcaccaccacgcctggctaattttttttattttagtagagacggggtttcaccatgctagtcagactggtctcaaactcctgacctcaggtgatccgcctgcctctgcctcccaaagtgccgggattacaggtgtgagccaccgtgcctggccgaagacaactttttaaagatgcatatgctctgggctgggtgtggtggctcacacctgtaatcccagcactttgggaggccaaggcgggcagatcacctgaggtcaggggttcaagaccagcctggccaacatggtgaaacaccgtctctactaaaagtataaaaattagccgggtgtggtggcgggtgcctgtaatcacagctactcaggaggctgaggcaggagaatcgcttgaaccccagaggcggaggttgcagtgaattgagactgtgccactgcactccagcctgggcgacagagtgagacttggtctcaataaataaaataaaataaagatgcatatatgctctgaaggctggctacattttattttttctcaaacaacttttacagtggatagtgctgtaaaagttgtttagctctggtcattttatcttttttgtgatctgcaaaaggagatccttttccttttcactgcctctaatacccaactccaatactcctttgacctcacaggcacttagaatccatcagtggctccatcttttctcagacttcacctccttcgtatccttattcctctcctttgtagcttcagtgccagtcagacgtcgttactccctggcacactacctcagcccttcggcactttcttgctttgttatattcagtcgacaaagccccagcctcatgaaattcagtcatgtctgccccatgcctgctccgtcctgaagctgaatgtgactccttcattgattccccctttaagttcatgtctaccccaggtaaacttcttgccgccaagcccacctgcatactgcagttccccggtctctcctagcccctcccaccctcctcatcagctgtcacacctccttgcagctgatatcttagttcccagagagcacagaagcaagctcaagagagtgtctacaggccagcgtctactccttcgctctgcctccctcatgctgtcacggagcgcctgtcccaggccctcactcctgttctaaggcatctctccagtcctctactgcactctcccccatcagagattcctccctcgcctgccctagaaacttgttgctacttctcccaccttgacaaaagctgctcccaaccccccacctgtctagcatctctgttttcctttaccagcaagactccagtccctgtctccacaccctcttcaaccttctccagttgttcctttgctgccacagctctgccaagctgctccatgaggtctccagtgatgaccttcatgttgttaaatctgggagctgcttgtcacttcttttcccagagctgtcgtcgtcagttaaccccaatacccatacgagacaatcctttccctcccttgagtctctgcactgatgtgcaccttctcagtgcaaaccacagcttttgtctctttctagctgaatacatgactgactgtgcttatcttagctgtcacccctgctggagcagaagctccacaggacaggattgtctccttgattcacagatgtagctcaagctcctagaacagtgcctggtgtctgtgggtcctcaggaagtcctaggtgagtgtgtgaatgtctgtcctcctcggtcttttctgtttcgcatgtgatgttggaaggcctcaggttcaggcttttcttctccaccctcactcccgaagtgattccgtccagcctcatggctcccaaatttatgtctccaggctgactgggtcacgggaactccttatcctccctagaccttctctttccctggtcttctcctttccagtaaacagcaactccaactcctgctcctcaggccagaaacctggcgctggttacctcatttgttcacaaatactgttactccacctgcaagatggatacaaaatctcatgagttcccctgcctccatggcccccaccctggtccaggtgtccagcttccctgcctctgcccttgccccctggttctttgtttagtcctgcaatattgtgctcttctgttcagaaccctccagtgggtccctgcttgctcagagtcacagcccaacaggatcacctctcttgccactctcccaccactcatgcactgcggcctcactggcctcctggctcctccctggaccctccaagtatgcccctgcctcaaggccttgacctctcctctgccctctgtcccaggtatcacacatgtctgctcaagtgtcaccttcccaatgtggccttccccgagcacacccatgtctgtaagtcaggcagcctgcctctgccccaccagttccccctgcctagcataggacttgtcaccatctgccacaagctgtgttactgcttggttttgtttgtgctctcccactcccttcccctccctccctctccccacccctatagaatctgagtcccatgaggacagagatttttttttttgcctcttcctcaatatatccccagtgcctagaatcatgcatattttaatttattgagtgaattaacaaataaattctgcagtgggacattgctctaaggttttgtcttataagagggacagaagaacatgcagcctgctctgctgttggctccttagcttctccatggctaacaggaacaatattgtttatgagataatcaaagccatagtcatgagttagaaggtacatataaaggcaaatatgtggagattgagttactttggcgggggcggaggggtgtgtagttatctgaaaacatggaacaaatcaatgagagtctaaatagcacccacatatttgcccctcttttaaaacatacctcctttatgagtgtagaatttaacagcacagtttcccagtgcagctttgcgaaacaagagaaatgaattttaaaggctgtcaggtgcctttgcaatctgtggcttagtatttgtgtaacaacatttgtgttttgccaacagatgtactgcttaaagtacccatgagaatggcctctgtggttttctactttctcggatggaaccttaggaactgattattgagaagaggctgatactgcccacctcagctcccaggcaggcttcagggccttggttactactcctttgggccctcactgacccttgcagacgtcttttgcaacctctgtagccagaagagacaactgctttctggcatgttgctctttccctaatggctttatgagcttcttgaacaccaaagcatgtgtgacttcctcacgccttcccctgtatagtatagcacccctaactgtatgtgtaaggagaaggagtgagcaattgatggcgtccccctggatctccaagggaatgggaaggggcagggtttctggattcagtcatgtggaatctggtcgttggtgtctaaatgtgcctgttacttgtgcccaatgtccaggttcaccaggaggcttagcctgctcatttccctgctagtagctatattttgggagagcattttttatgctctaattgaactttgtgggtctcagcaatttgaacaatgttttgtttttcttctggtcaggttacaaaggaaagaaaaggaatctggtgttgtaggaggtggtgtgttgtgtaattacttgttttttttttttaagtttttttatatttttgcaacaaggcaagttttctttgaataaataatgctgggagcttatcacatagaaggcatatgtgttgtactcagtacattctgaattatctgggtttatttttatctcttgaattcacttataaacaattcaaaggctgcttttttagctaacagaaataggaagagaatctcagaatctgttttgtcattttttcaatgggttgagttatagtgattatgctaactcggtggaaaagcagtgtagtgagtaaaccccacatacggcatatcatgaacattttgttgcttttttggcttctgaccatcttcatacctttttttgtgttaaaagtctccccattgtgtatatcttagtaagaggcaggtggaccctagtttctacctaagaaaacctgaagatggggttgggggcctgtggtgtacttccttctcatgctgtccatgaccactgcagtggctttgtaaggatccaggacccagggcccctcagtgggtgtcttccatttctcaagattgcctcttggttgtgagatgacggttgctgctctagtcattgcatccactcctccaggtaggaagaaagaggtcataggggaaaggcaaaatggcacttgacatcttaacttctaggcccattcaatatttccatttccatcttcacacccatcatcttgtcctagggaacaaacagcaccagcagctcagtagctataacagcaattattatttctcacacatgggtctgggtcagctgcaagatgggattcagatctgttctcaagcctgtcgttccaggacccaggagggagaagcagctgccaggggaagtctcttcgtaggcggaggtcaggagtccaagaggagtgagcagagtcacagaagcctcttaaagcctcttcttcccccatcccatcaacacgtgagcaagcccagagtcagtgggtgggaggtgtgctccgcccatagtcagtagaacaagagcaagcttgaaagagaacgatgaacaggagtgcactcggccactgtctccttagccataacgtagtcccatggtctgctgggaagcggggaataactctccttagctgagcgcagggtctcattagtaaggcagatggagaacatggatgttgggggacaactggcagtgcctgccacaggggaatggatatattccctccccttgctctctggaaactaggggatggcgatgaagcctaggtttggccaaacccattctgccttcagggactttgactcttgagggacagtgagggattagtcatggtggtggcagttgagtcacaaaaccagcagtggtggctaatgtccagtgatgacatgcaacagtgcccagggtgggtgtcccaaccagcaggtccctgcagtataaccttggctgtgtttgcagtggtgcagcctctattcctgctgcttttctgagcctagttctctagttctctctccatttccagatctgctgcccaagaactcctttgtgattgaatttaaccagagttgatttctgttgcttgaaactcaggaccttgatgcagtgtgcagggtctgggcaaggtaaaaacacactttcatgatttcgcctcaagtatagtagatgagcttaggctttttgagccaggtagccttgggattaattctcagctcttgcacctagcaggtgacctcagcaatcaagtcacttgccctccttgagcctcagtgttgccctcagttaaacattgctctcgtgtgttgctgagcattcagtgagattgtatataaagtgatcattgtgaaggtattgggacataatttgggaaagcgtcctggtctaagcttttgattggctctccatcatttgggtaatgggatagtgatttaggagtatcatagcagctcaaggggcccttctggaaagggtatgaggaaggtcagggacaagtctgaaatgaatcatcctaggcttaatgcctgtgactgggcagtgggtacaattatctcaggctagtcagtagtcatttattgtgagaatacatgggcagattttttaatttccttctcagtctagacttgaatgcaaacagttcttattgctaacttaccactagtcaccactaatgaacaaagactatgaacaggaaattcataaaagaagagatacagatggccaatgaagataggaaaagagttctgcctgctggtaatcaaagagatgcaaacgagaacaaaaatgatgccttttcacctaccaaatttgtcaagattaaaaagaaagcaaagagccagcgtcagctgatgttcatacctgcacctgctcggtagcttgctaatgttctgcctgctccacacgccaggccagcctccacggcgcagccaggtgaggcctttccttgtatacaggcacgtttggattcactgttgcataagtgagacatgtgcatgcttcacaattcaggaagtgcaaactccagagtgatgcaaggtctgagtgtccctgctgccctggtctcccagctgcctaggcctctcttcagggaacggctgcatccagggtcttgtctgtgtcttttgaggtgttctatgtacacgcagacacatctaaacctatttttattttccctgcacctgcttgggctactgtaagctgttaaatttttttttctaggaatttgtccattttgtctgactagcataaagttgttcatgttatagtttatacatttgcaacatctgtaattatgtctgctttttcattcctagtgtttgttgtttacttgtaccttctcccgtttttccttgtcttggtaaaagctcattaggttcattggtcttacaagaagcagacatgtaggcattattgccctgtattactctgtgtctcttttctagttcattaaattctgcttttgcttttatctttattattttttctatggtcttagagtacattctctgtgttttgttgttgttgttgttgttgtttgttttttgttttgagagagagagtcttgctctgtcgcccaggctggagtgcagtagtgcaatctcagctcactgcaacctccacctcctgggttcaagtgattctcgtgcctcaacctcccgagtagctgagatttacaggcatttgccccacacccggcaaattttttgtatttttagtagagatggggttttggcatgttgaccaggcgggtctcgaactgctgacgccaggtgctccacccgccttggcctcccaaagtgctgggattacaggcatgagccaccacgcctggccctaacttcttaagttataaatttggttcattgatttttctacccttttttcaaatgtaaacatttaaggctaaccctctggaactacttcaactgtatctagcaagttctgatagtattgtcactttaagttagcccaaagatattttaaattttctttgtttcttcctttgactcacatattattttaaaatgtgtttttcaatttccaagcacatggctttgggtttgttttttttttttcctagttgctctagaaaaaaaaattgactgcatgaggtggctcatgcctgtaatcccagcactttgggaggccgaggcgggcagatcacctgaggtcaggagttcgagaccagcctggccaacatgccaaaacctcgtctctactaaaaatacaaaattagccgggcatggtggcacacacctgtagttccagctactcgggaggctgaggcaggagaatcacttgaaccgggaggcagtggtcacagtgagccaagattgtgccagtgtactccagcctgggcaacaagagcaatactccgtctcaaaaaaaaaaaagaaaaaaagaaaaaatcaacttctaactaaatggcactgtgatcaaagaacttggtctgtgtgacaccagttcttgcagttggttgagaagtgctccatgacacattatccacaaccagtggacagaatatgtcaccaccaagcatgggtgcaggattctacatatattcattacctctgtcttatccgtttgttgtgaaagtattttctcttcttactgtcattttgtttacttgatttatcaactgatggaatacgtgttaaaacctactgtggtgatggacacatcagtttctccacagagtttggtcattttcattttattatttattttgaggccacattttcagttttagatacagtttcacattcctggtgtattgaaccctttggtattatgaagcgaccatactaatatgttatttttttttaaattattatttattttatttatttttctttcttttttttttttttgagacagggtctccctctgtcacccagtctggagtgcagtggtgcaatctcagctcactgcaacctccgcctcctgggctcaagtggtcctcccacctcagcctcctgagtagctgggattacaggcttgcaccagcgcgcctggctaagtttttgtatttttagtagagacagggttttgccatgttgcccagactggtctcaaactcctgggctcaagcagttcaccagccttggcctctaaaagtgttgggattacaggtgtgagccaccacgcccggccatcccagttttttattttcctcctttctgtgtctttatgcatcagtgaggtggagcttttgaaaatgtcagatagctagattttttttttttgagacggagttttgctcttgttgcccaggctggagtgcaatggcgtgatctcggctcactgcaacctccacctcccaggttcaaaacaattctcctgccgcagcctcctgagtagctgggactacaggcacgtgccaccacacccggctaattttgtatttttagtagagatgtggtttcaccatgttggccaggctggtctcaaactcctcacctcagctgatcacccgcctcagcctcccaaagtgttggaattacagacgtgagccaccatgcccagctgatagctagattttttttttttttttttttttgagacggagtcttgctctgtcgcccaggctggagtgcggtggcgcgatctcggctcactgcaagctccgccccccgggttcatgccattctcctgcttcagcctccagagtagctgggactacaggtgcccgccaccacgcgtggctgattttttttttttttttttttttgtatttttagtagagacggggtttcaccgtgtcagccaggatggtctcgatctcctgacctcgtgatccgcccgcctcagcctcccaaagtgctgggattacaggcgtgagccaccgcacccggcctcgagattttttaaaaaatccattgtctgtttcgtcctttaacatctatttgatttctgatgtatttagattcatttatagcatatttgtgcattctatttttccatattttctgttcttttaaattttccttctcctttcttgccttctcttagacttttaaaaaaattgtagtaaaatacacatcacctaaaatttaccatttttaaatgtacagttcagtggcattaaatacaaattggaggccaggcatggtggctcatgcctggaatcccagcactttgagaggctgaggtgggaggattgcttgaacctggaggtcgaggttgcagtgaggtgtgatcacactactgctatagcccaggcaacagagtgagaacctatctaaaaaaacaaacaaacaaacaaacaaacagattggcatcacacagtgtgtgtgctgctgtgctgtgctgttatcatttaacattaaaacataaacatcagcactgttatggactgaatgtttgtgtcccccaaaattccagtgttgaagctcaaacctccaatgtgatgttatttggagatggggtatttgagaggtggttaggtttagatgaaatcaggagggagggtgggtttcgcatgatgagattagtgtccttataacaagagacagcagagagcttgctttctccaccatgtgagtatgcaatgagaaggcagccatctccaagtcagaaagagagccctcaccaggggctgaatgtgctgacaccttgatcttggacttctagcctccagaactgtgagaaatttcagttgaataggccccccagtctgtactattttgttatagcttgagcagactaatacacccatgttatgaaaagctataaacatccctttaaaggccacctaacgcgtcgtattacctcatgcatcttctctgctgagctttccaaaagagtggcttaggctgggcctggtggctcatgcctgtaatcccagcactttgggaggccaaggcaggtggatcacctgaggtcaggagttcaagaccagcctgaccaacatggagaaatcccgtccctactaaaaatacaaaattagctgggcgtggtggcgcatgcctgtaatcccagctacttgggaggctgagccaggagaatcacttgaacctgggagatggagggtgcagtgagccgagatcgtgccattgcattccagcccggccaacaagagcgaaactccatctcaaaaaaaaagagtggctggccgggcgcagtggctcacgcctgtaatccccgcactgtgggaggccgaggtgggtggatcacgaggtcaggagttcaaaaccagcctggccgagatggtgaaaccccgtctctactaaaaatagaaaaactagccaggcgcagtggcaggcgcctgtaatcccagctacttgggtggctgaggcaggagaatcgcttgaacctggggggcggaggttgcagtgagccaagatggtgccactgcactccagcctgggtgacacagtgagaccccgtctcaaaaaaaaaaaaaaaaaaaaaaaaagtggcgtatgttcccggtctccacctctcattcgccagcccctgtgaccaaacccctgggattagatctccatcgggtccctcccctcaccctaacctcacatgcagtggttcctgagaagctgctgtttatctgatcacgggatccagcaggatctgagggctcattcactgaatctgtactacccaacaaggcaggcttgtccttacccacacttttcaggtgaaaacttaatcagattcaagcgtttatcttagtggcctcttcgtggtgtgtgatttccttcttgcagctctttactggctaaaactcttcactgggagttaaaccaggtgtggtccttgaccctcatcattttgtcccatctcctatgctgggctctgtatccttgtctccaagcagtctcgtgtgacagggaagttacctattattgtatggtcccctcttcttgtcacctctggtgtggcacttgttccatttcttgttcaatgaatgtgatttgtgaatgtgccacatctgtgggaggaaggcagttcgcagcaagagttgtagttcccttgctttgccctgagggccaggactttacactagatttttttgttgcattcctgcactcataaagtacacgtaaacttagaggtggtgtgttaaatgctagaacttaaaactgagttcagctaggctcaagtgccccacaatttttgtcccaccagacaatttcatgaatatctacagattgttccctcaatatgcctcaatattgaggcatattgatttggggagcacagacaagtcaaggttgatgtgcatccgctgaacatgatcttaagttgttgaagtaggtattattaatgaacgaacgtctattttagctccaagagcccctggtcttccagaagagactcccaatgatcttccagaagcagctgggcttcttttggtcctcccccacccaggtgcagtcccgttctccctgcctgggtgagtttgattcctctgccgtggaataggctaggctgctacctcttgagcctcttccaccaggccatccattaggtggcgacagagagcactaaaaggaactactatggaaataaaacttgttttgcttcttggggggaaaaaaaaagaaaaaggcttgtggggcgtgtgtgcattttagtcagattttactgtgcaaaacatttgagagatttctgccctctttctcccttccattcttctcaacccactgggcgccctaccacccctgtctccttcaagataaggtagatcagaagaccaaatagacaaatgccatgtccactgttttctgtcacagttgatagccataccagtcacccaagctggaaacccaacaggcccctgcccttcactgcccacatccaagggagccaccaagtcccacaaattgttcctttaactgtttgtccctcttttgtcttctgtcatcccttctaccgctgtcctggttcaatccctcatcttgctctgggactcccatgataacttatgatctttcctccacctctctatcttccacacaatccctatcatcaatctcattcccctgctttaaacccaagagtggcaccctgtgtttgagtgacatcagggcccctcatgtggctcctgcttctctttgtggccccttctgttgctgctgcttttcttatggacatagccctcagcagtccaggactgcttgtagttcctcccaggtaccatgtttcttgcactcctggcctttgtcattggctcccctgcccaagtccccttctcttctcctttccttcccctgtggccttgccttgtcgtgcttatccttgaagaccctgtcaggtatctcttccccaaagagccctgcctaaccaccgcccccctcccccccgcgacacacacacctgggttaggccctgcctctccacgcctgtgcctcctgccaagtcctcagaggtctctgatcccatgtgcctccaggcatggcatagggggactgtgacacagcctctcggcccacagacccctgattgtgggcttgctcactgccccagtcagtcctcttattgaggattccgtgccagttcctgactccagcacacacacgcatgtaggccgccctcctagtgcctggctccttccctgtctcttctgccactcattcccatggtcgtatcctggagttggtcatctctggaactccacccacggagttctaacttagctctgcctatgatgaggacttactgtcttcccagcttgcagtgtcaaccactgtttgatgcccctgggactccattggtcttccctcctcttgtgaactgtgcccatcaccagacgaacttgttttagaatttaccatcgtaactgagctcccttcagcgcatacctccttggctcctgctcagtctctgtttctccttttagccaaactctctaagagttctctccactcatgggccctcttccttgcctgctgctccttgctcagcttgctccatgaacacttgcttttccacattccatgaaataatcttaacagtcatcagtggctgtcactccttctcagccctttccttgtgtctcttctggtacctcatactctccaggtggccatctcacctcacatcttgaaccctctgggtttgggagaattctcacctcacgagttgatgggaggcctggcgacctctgattgtagtcactgcaaatgccagatgcttatttgcctagcttccctttcggtcagggcagcagttggcaaacggtatctcaagggccaagtccggcccactgcctgttttcgtaaatgaagctttaccaggacccagttccaccccgtcctttgtgcattgtccaagactgctctcctgtacaacagcaggtgggctggttgtgacagatactgtctggcccacaaggtggaaaatactatctggccccttacagaaagaaattacctgagttctacacgagggtgtaggtatgtaccctggcctctgccagtcagactcacatgctaggaggagcagggccaggcaggagagccgtgtctcctggcattggggctgcaggaaagacgagctcctaggccacagtgccagtggccagtgctgctgccttgcagggtcgcacaggcagtgctggctgtttggactggcttggcagaaggatttgaagtattgttcctagccaactggactcaaacctgttcctccaaccctctagggattctcttatcacccagtagccttttccccctagttttaaaaattgcagtaaaatacacaaaagataaaatgtactgccttaaccatttttaagtgtacaattctgtggtattgagcacatttatattgtgcaaccatcaccacatgcatcttcaatagcttttcatcagtccttgtctgcataaatcagctagagttggtttctattgattgccaccaataatcttgacagatatgtctgatcttccttctctgcactgactcctctttctctgtctcctctgctgattctttctcctcatcacaactccaaatagcagggggagggttgtttacacttatattcagcacgccctcacgcactcgcctggctcttcagacctctcccctgaactccagattcatacatccagctgccctttaggcctctagaaagctaaatacctcagtatcaaaaacatgagaaacggaagccagagtcctggatctctcgccctttcgctgtcccggtgcccatgcccttcagggatggcacctagaccagctccctgcatccctgcctagactctgcagtagtctcacgtggcagacccggaggtcactctcctctctggatgccctgcggacactccggttagcctcagctgcaagagcctcctcacccaaggtcacgccatttccaggacagcaccctggtgactgagcgaggtaagggtacaaggcccttatagggccttctctttgacttcttcccacctccctttatggatgtcagttcctgatgaacatcttacacctcaaaccgtgacccaacatctgcttctgcagagcccccctgtggcatcttgtgccctcctgccccactccctctactctatatcttcccatagttagaatgggctttttttttttttttttgagataaggtctccctttgtcacccaggctggaatgcaatggcacagtcacgactcactgcagcctcaacctcctgggctcaagcagtcctcccacctcagcctcccaagtagctgagactacaggtatgcaccaccacacctggctaatttttatattttttgtagagactggggtctccctatgttgcccgggctggtctcgaactcccaggctcaagcaatcctcccgccttggcctcccaaaatgcaggattacaggcgtgtaccagtgtgcccagcctcagatgggctctttgaaaaatgtttattagatcaggttactcccttgagaaaaaccctctcagaataaaacccgaagtccattacttgaaagcagagccagcttcatgggcctttgtaactgcccatgggcttgctggaacccaggcttggtttaatactctactctcaccatctcaaaattcttaatttttgaacaagaggccctgcattttcattttgcaccaggctccacaaattgtgtaactgggcctgcctcagcagccacatggaacatgatccctccttgcctatttgagctcattctctaccattctctcccttgctcacctggctcccactgctcttgctcttcctggaacttgccataatgttgctagagtcagagccttggctcttgctgctcctcattggctggacccctctttacttgacctgctccctcaccactcacttccttcagatctgtgttcagatttcgtcttctcagagaggcttttggcccctgtccatctctctgaatttacctctgacctctcccccaccaccactgcgctaagctgcctcagaactttgtagacattctgtctggtcttctgatgtttcccccttggaagaatcccaaggtgcctgaagaatgctttctttatccttgaagttgagtaggttgactagagtctggcttgctattgagcattctttatcaaattgtcctgggaacatggtgtattctttcagtctgcagatgtagtcgttgctgtttcaggtcagctctcttatggatctttgacagcatcttctgttccatttgttgagttctgtacttcagggacacaaattcctcatgttggattgtctttgtctctcttccaatgctattagctttgccgtaattggtttagcttttgtctttttcatctgcattcactttgtctaatttgattttcagctatgtatattctgtttctggctgtttttcaatgtatttattagtttcataatgatgtgttttggtctgcagtttgtttctctaggttggaaatttgtcttttcatcttattctgttttatcatcccatctttgaactcttttattgggaacatgttcttatgaagttgtggggaatttttttcccttccttgtgtattctcttcttggtgggagactttgcctttctcgtgccatctccctccctgggcctcttttttttcttctggccataatatgtttgcctagttaccatgtcacttcttttcgtcttggctcaggcttggatggctctgcatagtcgttctgtttgctttgagacagtggaggaattcttggctctctcttcccagtttcttggcatcttctcttgctgttttcccctctgagctatcgcgtgcaggcttgttatcttgtatccggagagaatttgcacgctggagggagctgcagccatgtagtcttcagccctatctggattcttctctttgttctaagaactgtgttggatgtcttactaaggctcactctagctgcacgagggatgtgtgtgccatttccatggggatagggggcacctcagtctctgggtggttccataatctgtgtatacctaagagcagttgcttcccacagagctgggctggctcactgggcactttgccatttctcctgcacctcccagctggagtttctgggtctaaaaggaaaaagtgaaggactcccacttggttgcttctctccagcttactgactgcaaattcccagggcgttgcccgctccctagggtggtttctgggggacggggcaggagcctggctttgctgctgctttgtcctctggagtcttttctcagactgctttgaattacacccctttcctttgtgtgctgaaatcttcccttcacactctccttccctgcctttcttttgtgtcttatcttactaggactggaagagggcagttgtgcaggaggtctgcatctaattccctaatccatgtgagagtgctcctgttgtgtgctttgtgacatgatggtgagaaatactccctagagcagtggctaccagaaggaagccatccccccccctgcacacacacacacacacacacacacacacacacacacacacacacactccttctggctgtcctcagatgcctattctaggtaaatgtcagattccaaagaaaatccagttgagatcttttttctttttttgagacgagagtcttgctgtgttgcccaggctggagtgcagtggcacaatctcggctcactgtaacctccgcctcctgggttcaagcgattctcctgcctcagcctcccaagtagctgggactacaggcgcgcaccaccacaccaggctaaaatttttttgtatttttagtagagacagggtttcactgtgttggccaggctggtctcgaactcctgacctcgtgttctgcccgcctcagcctcccagagtgctgggattacaggcttgagccatcgcgcccggcctccagttgggatcttgactggaatgactggtgttcaatcattatagtttccacctaatttgtatttgtacacaggacagttactaatttgttggtacttgtttgatccccagtccctagagttgtttatggggtggagcttcagtccctgctgcttcccctgtggcagcagctggagtcagggtggggacccagggtgctgctggcagattcttgagacaggtagaatctcctctatattggtgtctctctctgtcccagcagtgcccaggaaaacctggccagcctgtcactgacctctccacctagggcactggtggttcaggtccttctatttgccaccggcaaaccgtacttctgccagtctggctcttaggcccagtttctctgatcttgcagattttcttgggctctgctacggaatcctcatacctccggcaggtccctcctttgcccatgtgtttaactgtggtggaatcgtgtgagagctgcttctctcgcatggatcccagccacaccacattctacagcggttcctctgaaggcattgatagagatatttcctcctgttttgcatttcgttggtcatttcagtagaatcagggtgaaataaacatgggggctcagatgtcagcattacgaaccaagtacgtcaggcaggctgatgtggactgacctacactagtgagacgcaagatgacgaaaacaagggcactcactccaagttactgatgagatgtttggatcaaatgagccagtccttaagcagagttctctagtaaaagagatctcctttctgccctttcttgttccccaaaatgtgttgccttcatggtgaaaatttattttggcagattttctcttctttgataaaagcagccaacactttgttaaaagtctgtgaaacttatttacatgaagtatgtaaaggtaagaaaaaaacattatcaacaagaaatggagaaagccagcagctgaggacagaaaagtcatgcacagtgtcagtgtctatggaaacaggccacttggaccttgaggactaggtatttggaattggaggtgagcttggcctggtgagtctctaaccacttgtgtgtaggatcagtgtgagaaccctgctagaatatagtggcagagatgcaaggggaaatcattggagaagttaccagggaatgatgagctaatctgaaaaaaatacatgtttctaagttgggcgtggtagctcatctgtagtcccagctacttgagagcctgaggcaggaggatcgcttgagcccagcctgggcagcacagcgagaccctatctccctaaaaaaaactttttcgttgtttagttttgggatttttttttttcctggtcttttttccccctttttgtgaataacgggatctcactatgttgcccaggcagatctcgaactcctgggcccaagcaatcctcctgcctctgccttcctaagattacaggtatgagccactgtgttaagcaaaaaaacttttttaaatgaaaatcattttttaaaagacaggctttccaggggagggtattattccacttatatgaagtgtcaacagtaggcagatttgtggagacaaatagattagtggttaccaggggctgagaggagtgggagtggggagcaactgcttaatgggtaaagggttgtctttggaactagagagtagtgatggtcgcatgacattgtgaatgtactaaatgctattaatgataaattttatgttatgtgtattttaccacaattaaaaaaaaaagatcaaatgtcctcagaatagccaacaaccttccacttggctaaatgcctactcattaaacttcttgaactaaattcctttctgattgtcatggttattgtgtcctgggcttcagagtttcacattcaggttggcttggtccagtctgtcatgtatcactataggtccccacattggcctcttcctcagacggacagcccatctatctgccggggctctgtgccacagccagatagacttgctctgagacagctgtgtgggctctgagcactggccaggcatcacaaaacctatctttatgatttagaataattggtggtcagctgctgttttaatgttgttgttttttttaatttagatataattcacataccatgaaatttactcatttaaagtgtacaattcattcttcagtataattcataggctcacagaaaaaattgtttaaaaataaaatgtgcaattcagtgtcttttagtacattcacagagttgtgcaaccatcgcctctgtgtcattccagaacactttcagcacccaaaagaaaccccagacacaggagcagtcacctcttattacccgcagcccctggcaacaactcatccacttcctgtctctatggatttgcctattctggacatttcctataaatggaattatgcactatttggccttttgtgtctggcctctttcactgagcgtaatgtcctcaaggttcatctgcattgtagcatgtgtcagaatttctttcctttttgaggctgaatgatattatatcctatagataatgaggttttgattatccacccatcccttgggaatgcatatttgggttgcccccaccatttggctgttgtaaactgtgctgccatgaacactggtgtacggatatctgtttggttactggttttggttttttgtttgtttgttttggttttttgagacaaggtcttgctctgtcgcccaggctggattacagtggcacgatctctgctcactgcaacctccacctcccaggttcaagcaattctcctgcctcagtctcctgagtagctgggactacaggtagcactcaccaccatgcccggctaaatttttttgtatttttagtagagacaaggtttcgccatattggccaggctggtctcaaactcctgacctcaggtgatccacccacctcagcctcccaaagtgctgggattacagacgtgagccaccgcacccggcatagttgtggctttttgagagtgtatggctaggagtaaaattgccaggtcatatggtaactccatgtttaacatttgagaaactgccaaactgttctccacagcaggaattttttaacctgtatgtggtgggcttgtgtttcggttttcattttacacatctataaagatgagatttgctgtatggcactggttgcctgtatttggggagggttctgcttttggttggcaagaactgcattttatttaagcttagcaaaacataactggtttctcgcatcttctcaaaagtggaggattaagaaatggactgcgaattcagagcagggcagctgaacctcaggctccacccttgtagccttcaagctgaacctcattctctcttgctccctggagaccactgagacactctgcctgtgccagtttgatttctcacatttttaaagggccaaagcttgtgtctcaaagtgctatagcctttattgattcatgcagagaagcctccttgattccgtaattctgcagctaatactggaagtagaaagaattggaaacaccatctggatgacactttagggtggaagcagccagtacaagggggggctcattatttcctctggtcccagactgttcacctggagctgtagccaccaccctgcccttaggttaactgcctcgagtggtagtttagctctttgtgctgtgccgagggataactggaagtgaaaggtgctgagaaatgccatctcctgaaagtggcgagcatgagtgaatttacgaaaggttgggatattgctggggctctggaagtttctctggagctcactccaggggacagggagggggctggattccaattcaagtgaaaaatacctttcatctgccttgttcacctggcttttttgcctttttgtaaaatctgaaaacctcagggattgagtagtctttccttaactgcagttgcctgtctggccacacctgccagctgttgcttgtacccctgtaatttgcacggccttccgggcctttctcacaagatcactgcaggtcacattcatgaggaaaatgcaggcagttcctgccatcagacccctcaggatgtcatggtttggcctgaaaacaagattcctgcaactctaattttcctttgctagatcaaatgaaggatttgatctaatgtttgcattctagcagcaaaatcattgaatattttatttcttaagagccttacttcatattttgtaggtattttaagattttgtaaaggcctttctgcttcaacgtgtgatgtgtgcattcttagaaaaagatcttgtgttctgtaaatcacacaataaaaacatgagttcgtgcaggaaaaactggggcggggtggatcactccaaacttgtgtggtgtggtaactggagctcactgatgaaaccatgaacagttctggctgaaagaaccccacagtacactgaggtctgttggcatcgccgccagcaccgccccggtccctttgtgcgcgccaccacacctggctaattttttatttttagtagagagggggtttcaccatgttggtcaggatggcctcgaactgacctcgtgatccgcccacctcagcctcccaaagtgctgggattacaggtgtgagcctccgtgcccagccttcagctttttttcttaatgtctttgtgtaatatgaaggcattctctttaattgttaaaaagcttgcctaccactgcttcaaaatattactgtcagttggcatagcttctgattatattgatgtcatctcccttcttttaaacatgttaccatattggcactgtatttcccctagcccattgatcacttgagagttagtcatagtcctcgtgctgtttcactcctaaacgtttaagcatgcctttcctaagagcagacagtacagttaagacactcaggaagtttagcaatgagctaacacagaaccttacatttctccacataccccataaatgccttttttagagcctttgagcctggaatgcagagtccaggactgtgtgttgtattcgattgtgtcatcccttcagtctcctttatcagaaatgttcccccacccccttgttttctctcatcatcttgagtccagaccgtggttgcatggcacgccctctctggactcttcctgctgtctcctcacggtaagcttcagtctcctactcgtgatgctggttcatctcagcagcactgaggggcctgagctcagtttggtcgtgtgttaaggtggtgcctgccagatttctccacagaaaagggccccgtacttttatttgctcttcagcctgtgtattccttcctttcttgccagcttgtgggtggcttctctagcagcttctgtaagatactcagtttggcagttgtagttgtttcagcaggagaggtgtctgcatacctgaccaccacatggctagaagtcgatccatcctctggcgtaaccatcctccatgctactgtccctggggcactgaggccctcctcagtgacttcctccacctcatcttccgccatctccaagccaccagtgtccaacggactactgatatgtcccaaactcatcatttgtttattcaccaattcagagcccacctttttttcagcactgagctagcctctccttgctagaagcttacggtcgaaggtctccagccatcagaagaagcacgtggagcgctgcgtccgtgttgtggttattcatccagcatgtgttgagtaagggttgcacctgtgcctggcattatgcattgagcggggagatgggggttggcacgcacagtggggtgttctaagtacactgagggctcgggtgccctggctcatagagcagggagggaggcaggagcagggaaggtgtctcagaagtgccatctttttttttttttttttgggaagtggaatcttgttctatcgcctggtctggagtgcaatggcactatctcaactcactgcagcctccgcctcccaggttcaagcgattctcatgcctcagtccccgagtagctgggaccacaggcgcacaccaccacacccggcaaatattttgtatttttagtagaggcggagttttgccatgttggccaggctggtcttaaactcctggcctcaagtgatctgctcacctcggcctcctaaggtgttgggattacaggcatgagccactgcgcccggtctagaagtgccatcctaactgaacctgaaagatgaaagttctccagatgaacctgaaagttctccaaatgaaaaggtgggagggggtgacagggttaggcccagagcctctggtgacacagggtgggcatcattggtcactttttcctcgagggaggggcgtcacacgggtgatagggtgggagctataaccatgttgatagtgccgcctctgcccatctggcctggcatgccctgagccctctgtcccacctgtggaactcataagccctgacagcccactcactcctgattcattatccacacccctgtgcttccgctgtgcctggagcaagctttcttcagggggaagggaggctggaactatgttgtagttacctatttgtcctcccttccaaactgtgagttcttggaggtggaaggatgctgcaggatctggctcaggacgaaggcagttggtgaacagacacgtgtgtttttgactcacggtgatctcagacaagttcctctgtctagtcgaacttctttttttccatctgtaacactcaggagttgaataggtggtttttctgaggatacttcaactgtaaaatgtatgaacttgtgaactagctatttagttctcctcataatcaagattgtgtgtgtgtggggggttctgattagagggaggatgaagagaggtgtatggggttttttttgttttgttttctgtttgtttgtttgtttttgagatggagtctcactctgtcacccaggctggagtgcagtggcacgatttcggttcactgcaacctctgcctcctgggttcaagtgattctcctgcctcagcctcctgagtaactgggattacaggcatgcaccaccatgcccagctaatttttgtatttttaatagagatggggttttcgccatgttggccaggctggtctcgaactcctgacctcaggtgatccacctgcctcggcctcccaaagtgctgggattataggcatgagccaccacacctggcaggtttctttgaaaaagtttgtgtttcggcaaacaccataaaccccctgggggacagccttggggagtcacctggcaccctagcccagcctccctcccttgggtcctgcagtgaaggcttagtgagggtgtgcaaatgcccaggtcaccctgggactgggcaggccctctgggctaagggtaaactcatttggaatacctgttttctatcattgttttttatttgttaaatttaaagggtacaagtgcagttttgttgcgtggatatattgtatagtagtgaagtctgagctttcagtgtaaccatcacctgaatagtggacattgtacccgttaagtaatgtctcatccctcaccccctcccacccttcccagtctctccagtgtctgccattcctcactctgtccatgtgcacatgctattcagctcctgcttctaagtgagaacgtacggtatttgactttctgtgtctgagctgtgtcactgaagacaatggactccagctccatccacgttttttatcatttttacctgcactccacacccagcacaatccaggcttctttgtgggttttttgaaatttgtctttaattataaaagtagcagccagcaaattaacaaacacccatgtgcctttcattgcacagaattgaaaatcatcatactatatttgcttcaagtaatttccattagaaagaactagaatattacagtagagttaaagaccctttatttcccatcttcagtgctcttaaaagttcatttagggccaggcatggtggctcacacctataatcccagcactttgagaggcccaggtgggtggatcacctgaggtcaggagttcaagaccagcctggccaacatggcgaaaccccatctctactaaaaatacaaaaattagctgggcgtggtggtgcgcatctgtaatctcagctactcgggaggctgaggcaggagaatcgcttgaactcaggagggaggcagagcctgtatgcagtaagccgagattgcgccaccacaccccagcatgggtgacagagcaagactccgtctcaaaaaaaaaaaaaaaaaagttcattcattgtacacttagaaatagttaaaaaggtaaactttgttttgtgtgtgtgtgtatatatatatatatatatatatatatatatatatatatatatgtatttttttttgagacatatatgtgtctggtttgttcgcccaggcaggagtgcagtggcatgatcaacggctcactgcagcctcaacttcctaggctcaagtgatcctcctgcctcagcctcccgagtagctaggattacaggcacacaccaccatgcccagctaattttttttttttttttttttttttgtagagacagggttttgctatgttgcccaggctggtctcaaactcctgagctcaagcgatccacctgcctcacctcccaaagtgctgggattacaagtgtaagccaccacacctgacctgttttgtatattttaccacaataaaaagcctttaaaaccccaagcagacagttcattttcattcaggcccaactcagaatctgatcacagcggggtttcccccctttctagcgagtagctgaagaactgttttctctccttgatggtataactgtctctgtgggtgttgctcccctgccgctccagtggttttgtttttgtttttgtttttttgagacggagtcttgcgatctcagctcactgcgacctctgcctcctgggttcaggcgattcttctccctcagccttccatgtagctgggacttacaggcacctgccaccacgcccggctcatttttgtatttttagtagagacggagtttcaccatgttggccaggttgggctcgaactccagacctcaggtgatccacctgcctcagcctcccacagtgctgggattacaggtgagagccactgcacccagccggcccctcagtcttttccttctcaatcagtggcaccaccatcttcccaggctttggacatggtccctgactcacccttgcccctcacccccacactaatccacctgcgagctctgttgcttcaccacctagaccagccccaaatcctcaactgcccccaccctgggccacacctggaccactgctagaggcctctcatgggccctccctgtttttctcttgcactccccgggctttctggcacaagatgccccagaagcagaatcacatatctctcctgggagccaatctagtgtgtttactgcccctggagtgttattgttggccttagaatatgtcccactacaggtttgcagagcactgtagtcaaaagtcatttgaaataaatcttttctctgtggtatattgtcaatttgatatagaattaaatttgtttcttttcttttttcttttctttttttttttttttaagagacagggtcttggccaggcgtggtgtctcatgcctgtaatcccggcactttgggaagccaaggtgggtggatcgcctgaggtcaggaattcaagaccaacctggccagcatggtgaaaccccgtctctgctaaaaatacaaaaattagccgggcgtgatggcaggtacctgtaatcccagctactcgggaagctgaggcaggagaaggcttgaactcaggagtcggaggttgcagtgagccaagatcacgccatggcactctagcaagactctgtctcaaaaaaaaaaaaagagagagagagagacagggtcttgctctgtcactcaggctggagtgcagtgatgtagtcatggctcactgcagcctcatactcctgacctcaggtgatcgacccgcctcggcctcccaaagtgctgggatcgtaggctgaagccaccatgcctggcccgaactcatttgtttttatttgcattaagtgtaataaggttttgttacttttagtttgaattttattttgggtaatataaacatttacatgattcagaagtcagaattacactgaggcatgttcagctaggcctcactcctgtgcctgtacccttacctttttccccctaccccatgcagggaatcaatttcattagttcctggtgtgtccttccttaatacccccccttctttctttggtagaatgcagtagatatgtttgcgctttgctccctttgcttcacagtggatcctggaaatgactccatcgcagttcttagagctcttgtttagtccctttggatctgcacagtactccagtgtgtgggcgcaccataagtttattcagcaagtgccctggtgatagggatcgggggtattggaagcctttggctggtaaaaataatgttgtagcaaataacatcatgcatatgttctttgagatttctggaggtgtctctttagcatagatttctagaaggcattccttacgtcacgtttaggtttatagtttgacctcatggtgattaaggtatttgggaaatgcaaatgagagtttcgaagaagccagatctttcccattagttcactgtttttctctgacattaggaccgtccgggttctagggagcagccctggcgttaggcagtgccatgatggattgtgtagaagtagcgattcccatctgtctgctttcttggcccactctgctggtggctccccttccctccctcctttatggggagctggggagctgcctaggggtccattctcaaaggctgatctctggtgggcaacaggccacacctagctttccagggttcttcgtcatttcccattgagagctgtaagactcagagacatgaaaaggaagctctggctgggcacggtggctcacgcctgtaatcccagcactttgggaggctgaggcgggtcgatcacctgaggtcaggagttcgagaccagcctgcccaacatggtgaaaccccgtctccactaaacatacaaaaattagcctggcgtggtagcacacgcctgtgatcccagctactccggaggctgaggcaggagaataacttgaacccggcaggcggaggttgcgatgagccgatattatgccatcggcaacagagcgagactccatctcaaaaaaaaaacaaaaaacaaaacaaggcgagctctgtgctgggacagattagggacccctctttacagcaagaaagactgctctgtgggttgtaggatgcctttgtgtatgcagtggctctaggtgactctggcagccacactctgggccctaaacttctggaggaagatacaggatagggaggaactcaggggtgagtcatggtggggacaagacattccctcactctaagaccttgtcactagattggaacatctcttgcctccctacacctgacctgatggttctggagagatacgtccttgcagcttctgagtcccagcactaagcagcctttggtaacttccctacatcatttgagttctggtttcctaaggatgcttgccagtgagtgccatggtgccctcattgcacagtctgtgcagtgtagacaagaggggaagtctcttggggtagaccagccgcaaggcggtgactagcactgatgtgaaccacatgggacaggggagttgtggggctgagaacacggagggtgggagtagtcatgctcttttccagaatgaactgctaacgaagggactcgcaggtggctgctgcttctttccaagctgcccctgttgttgcagaggctctggagtcctaggaggtttcacggtggcatactcgacagagtactagagcatcatggccagatagtgatgctggggtgtggggcctcacggtggccatttctgacgagaccccaccgggccaaagtgatgtgtagagaaggagctgcttcggtcaccagaaaagaacggggaagcctcccacactagaataggtagggtgctcttctccaccggcaggaaggggatgtatggctctgcctggaccacacctttttccttgctcttccctccgcatctgctgtggccgaggccattcctcatcagggaacatgtgttagaggctcacgccacctgggaccacttgtcttatcacccccaggaccctaggcggtagtttcctgtggcctgagttagctgatatttatatagtgccattgtgccttttctcctgtgatgctcacagtaaggatgcctagatggggttacctgttgtcaagataaggaaactgaagcacagaatgctgaggtcatttgctgggttcatgtttggaaagcggcaaaggatttcagtgcaggttggctggctccaaacctgtgtgtgctttccatgacactgtactgtgtgcctcattgagcctcattctagaaaaccaaaaacacacccaaggcccggccttcacaaaggagacccctcccccatttggctccctttccagcagtcgacggcctcttgtcagccatcgagcccagagtcccttgaagtgcgactcatgctggggtggtatgctcaggagccgcagtgtttccgctcagaggaaagggctctgattctcctgcagtgctaggagacttgtgggtggccacagtgcaggtcaggcacaccggccagcaccacccacagcccaaattcctaaagaaatatttgggtcccagcttggcccgagtctctgttgtcctggggaaggacatcaagatctgagtgtatgatggcctggggccttgcatgtggtgggggtccaagcctgcctctgctcacttgttctgcagactggcatgttctctgtgatacttacatacttgtttaacacttcagggaagaaaagtcagaagaccaggacctccagggcctcaaggacaaacccctcaagtttaaaaaggtgaagaaagataagaaagaagagaaagagggcaagcatgagcccgtgcagccatcagcccaccactctgctgagcccgcagaggcaggcaaagcagagacatcagaagggtcaggctccgccccggctgtgccggaagcttctgcctcccccaaacagcggcgctccatcatccgtgaccggggacccatgtatgatgaccccaccctgcctgaaggctggacacggaagcttaagcaaaggaaatctggccgctctgctgggaagtatgatgtgtatttgatcaagtaagtaagagcaactcctatctctacagggcagggagggcagggacaaggatccctcatggagcaggaaaatgtatgtgcccagggtggggtcggggggaacataaacaatgaacactgagaccaggtgtgcttgaaatgaccgtgtacagaggtcgctgccctgagtgggaagttctcaaggtagcaggccctctatcctctccacacctcaagtctttatctggggatggaatagctgcggaagcagaggaacttgcagagctaggggttcagaggggtgaagaagcatgtttcagttctgccttttaaatgatcccaaaaaggttagcagttttcaaatgacatttgcagacagcctcatttaattccatgagaagggtgagcaaaggattatcttgttgaaactgattcctggagagactgagcaccgtacctgagttcaaacttgggaatgttctagatggtgactcaggcccaggcaccaaccagcagaatgggcctcagcctgacaacccttctgtaccaggcctgactctttggttgctgaactttggagaggcctgggggggtcagcggcaggcagacgagtgagtggctttggtgacaggtcctcaggggcagccaggcagtgtgactctcgttcaatagtaacgtttgtcagagcgttgtcaccaccatccgctctgccctatctctgacattgctatggagagcctctaattgttccttgtgtctttctgtttgtccccacagtccccagggaaaagcctttcgctctaaagtggagttgattgcgtacttcgaaaaggtaggcgacacatccctggaccctaatgattttgacttcacggtaactgggagagggagcccctcccggcgagagcagaaaccacctaagaagcccaaatctcccaaagctccaggaactggcagaggccggggacgccccaaagggagcggcaccacgagacccaaggcggccacgtcagagggtgtgcaggtgaaaagggtcctggagaaaagtcctgggaagctccttgtcaagatgccttttcaaacttcgccagggggcaaggctgaggggggtggggccaccacatccacccaggtcatggtgatcaaacgccccggcaggaagcgaaaagctgaggccgaccctcaggccattcccaagaaacggggccgaaagccggggagtgtggtggcagccgctgccgccgaggccaaaaagaaagccgtgaaggagtcttctatccgatctgtgcaggagaccgtactccccatcaagaagcgcaagacccgggagacggtcagcatcgaggtcaaggaagtggtgaagcccctgctggtgtccaccctcggtgagaagagcgggaaaggactgaagacctgtaagagccctgggcggaaaagcaaggagagcagccccaaggggcgcagcagcagcgcctcctcaccccccaagaaggagcaccaccaccatcaccaccactcagagtccccaaaggcccccgtgccactgctcccacccctgcccccacctccacctgagcccgagagctccgaggaccccaccagcccccctgagccccaggacttgagcagcagcgtctgcaaagaggagaagatgcccagaggaggctcactggagagcgacggctgccccaaggagccagctaagactcagcccgcggttgccaccgccgccacggccgcagaaaagtacaaacaccgaggggagggagagcgcaaagacattgtttcatcctccatgccaaggccaaacagagaggagcctgtggacagccggacgcccgtgaccgagagagttagctgactttacacggagcggattgcaaagcaaaccaacaagaataaaggcagctgttgtctcttctccttatgggtagggctctgacaaagcttcccgattaactgaaataaaaaatatttttttttctttcagtaaacttagagtttcgtggcttcagggtgggagtagttggagcattggggatgtttttcttaccgacaagcacagtcaggttgaagacctaaccagggccagaagtagctttgcacttttctaaactaggctccttcaacaaggcttgctgcagatactactgaccagacaagctgttgaccaggcacctcccctcccgcccaaacctttcccccatgtggtcgttagagacagagcgacagagcagttgagaggacactcccgttttcggtgccatcagtgccccgtctacagctcccccagctccccccacctcccccactcccaaccacgttgggacagggaggtgtgaggcaggagagacagttggattctttagagaagatggatatgaccagtggctatggcctgtgcgatcccacccgtggtggctcaagtctggccccacaccagccccaatccaaaactggcaaggacgcttcacaggacaggaaagtggcacctgtctgctccagctctggcatggctaggaggggggagtcccttgaactactgggtgtagactggcctgaaccacaggagaggatggcccagggtgaggtggcatggtccattctcaagggacgtcctccaacgggtggcgctagaggccatggaggcagtaggacaaggtgcaggcaggctggcctggggtcaggccgggcagagcacagcggggtgagagggattcctaatcactcagagcagtctgtgacttagtggacaggggagggggcaaagggggaggagaagaaaatgttcttccagttactttccaattctcctttagggacagcttagaattatttgcactattgagtcttcatgttcccacttcaaaacaaacagatgctctgagagcaaactggcttgaattggtgacatttagtccctcaagccaccagatgtgacagtgttgagaactacctggatttgtatatatacctgcgcttgttttaaagtgggctcagcacatagggttcccacgaagctccgaaactctaagtgtttgctgcaattttataaggacttcctgattggtttctcttctccccttccatttctgccttttgttcatttcatcctttcacttctttcccttcctccatcctcctccttcctagttcatcccttctcttccaggcagccgcggtgcccaaccacacttgtcggctccagtccccagaactctgcctgccctttgtcctcctgctgccagtaccagccccaccctgttttgagccctgaggaggccttgggctctgctgagtccgacctggcctgtctgtgaagagcaagagagcagcaaggtcttgctctcctaggtagccccctcttccctggtaagaaaaagcaaaaggcatttcccaccctgaacaacgagccttttcacccttctactctagagaagtggactggaggagctgggcccgatttggtagttgaggaaagcacagaggcctcctgtggcctgccagtcatcgagtggcccaacaggggctccatgccagccgaccttgacctcactcagaagtccagagtctagcgtagtgcagcagggcagtagcggtaccaatgcagaactcccaagacccgagctgggaccagtacctgggtccccagcccttcctctgctcccccttttccctcggagttcttcttgaatggcaatgttttgcttttgctcgatgcagacagggggccagaacaccacacatttcactgtctgtctggtccatagctgtggtgtaggggcttagaggcatgggcttgctgtgggtttttaattgatcagttttcatgtgggatcccatctttttaacctctgttcaggaagtccttatctagctgcatatcttcatcatattggtatatccttttctgtgtttacagagatgtctcttatatctaaatctgtccaactgagaagtaccttatcaaagtagcaaatgagacagcagtcttatgcttccagaaacacccacaggcatgtcccatgtgagctgctgccatgaactgtcaagtgtgtgttgtcttgtgtatttcagttattgtccctggcttccttactatggtgtaatcatgaaggagtgaaacatcatagaaactgtctagcacttccttgccagtctttagtgatcaggaaccatagttgacagttccaatcagtagcttaagaaaaaaccgtgtttgtctcttctggaatggttagaagtgagggagtttgccccgttctgtttgtagagtctcatagttggactttctagcatatatgtgtccatttccttatgctgtaaaagcaagtcctgcaaccaaactcccatcagcccaatccctgatccctgatcccttccacctgctctgctgatgacccccccagcttcacttctgactcttccccaggaagggaaggggggtcagaagagagggtgagtcctccagaactcttcctccaaggacagaaggctcctgcccccatagtggcctcgaactcctggcactaccaaaggacacttatccacgagagcgcagcatccgaccaggttgtcactgagaagatgtttattttggtcagttgggtttttatgtattatacttagtcaaatgtaatgtggcttctggaatcattgtccagagctgcttccccgtcacctgggcgtcatctggtcctggtaagaggagtgcgtggcccaccaggcccccctgtcacccatgacagttcattcagggccgatggggcagtcgtggttgggaacacagcatttcaagcgtcactttatttcattcgggccccacctgcagctccctcaaagaggcagttgcccagcctctttcccttccagtttattccagagctgccagtggggcctgaggctccttagggttttctctctatttccccctttcttcctcattccctcgtctttcccaaaggcatcacgagtcagtcgcctttcagcaggcagccttggcggtttatcgccctggcaggcaggggccctgcagctctcatgctgcccctgccttggggtcaggttgacaggaggttggagggaaagccttaagctgcaggattctcaccagctgtgtccggcccagttttggggtgtgacctcaatttcaattttgtctgtacttgaacattatgaagatgggggcctctttcagtgaatttgtgaacagcagaattgaccgacagctttccagtacccatggggctaggtcattaaggccacatccacagtctcccccacccttgttccagttgttagttactacctcctctcctgacaatactgtatgtcgtcgagctccccccaggtctacccctcccggccctgcctgctggtgggcttgtcatagccagtgggattgccggtcttgacagctcagtgagctggagatacttggtcacagccaggcgctagcacagctcccttctgttgatgctgtattcccatatcaaaagacacaggggacacccagaaacgccacatcccccaatccatcagtgccaaactagccaacggccccagcttctcagctcgctggatggcggaagctgctactcgtgagcgccagtgcgggtgcagacaatcttctgttgggtggcatcattccaggcccgaagcatgaacagtgcacctgggacagggagcagccccaaattgtcacctgcttctctgcccagcttttcattgctgtgacagtgatggcgaaagagggtaataaccagacacaaactgccaagttgggtggagaaaggagtttctttagctgacagaatctctgaattttaaatcacttagtaagcggctcaagcccaggagggagcagagggatacgagcggagtcccctgcgcgggaccatctggaattggtttagcccaagtggagcctgacagccagaactctgtgtcccccgtctaaccacagctccttttccagagcattccagtcaggctctctgggctgactgggccaggggaggttacaggtaccagttctttaagaagatctttgggcatatacatttttagcctgtgtcattgccccaaatggattcctgtttcaagttcacacctgcagattctaggacctgtgtcctagacttcagggagtcagctgtttctagagttcctaccatggagtgggtctggaggacctgcccggtgggggggcagagccctgctccctccgggtcttcctactcttctctctgctctgacgggatttgttgattctctccattttggtgtctttctcttttagatattgtatcaatctttagaaaaggcatagtctacttgttataaatcgttaggatactgcctcccccagggtctaaaattacatattagaggggaaaagctgaacactgaagtcagttctcaacaatttagaaggaaaacctagaaaacatttggcagaaaattacatttcgatgtttttgaatgaatacgagcaagcttttacaacagtgctgatctaaaaatacttagcacttggcctgagatgcctggtgagcattacaggcaaggggaatctggaggtagccgacctgaggacatggcttctgaacctgtcttttgggagtggtatggaaggtggagcgttcaccagtgacctggaaggcccagcaccaccctccttcccactcttctcatcttgacagagcctgccccagcgctgacgtgtcaggaaaacacccagggaactaggaaggcacttctgcctgaggggcagcctgccttgcccactcctgctctgctcgcctcggatcagctgagccttctgagctggcctctcactgcctccccaaggccccctgcctgccctgtcaggaggcagaaggaagcaggtgtgagggcagtgcaaggagggagcacaacccccagctcccgctccgggctccgacttgtgcacaggcagagcccagaccctggaggaaatcctacctttgaattcaagaacatttggggaatttggaaatctctttgcccccaaacccccattctgtcctacctttaatcaggtcctgctcagcagtgagagcagatgaggtgaaaaggccaagaggtttggctcctgcccactgatagcccctctccccgcagtgtttgtgtgtcaagtggcaaagctgttcttcctggtgaccctgattatatccagtaacacatagactgtgcgcataggcctgctttgtctcctctatcctgggcttttgttttgctttttagttttgcttttagtttttctgtcccttttatttaacgcaccgactagacacacaaagcagttgaatttttatatatatatctgtatattgcacaattataaactcattttgcttgtggctccacacacacaaaaaaagacctgttaaaattatacctgttgcttaattacaatatttctgataaccatagcataggacaagggaaaataaaaaaagaaaaaaaagaaaaaaaaacgacaaatctgtctgctggtcacttcttctgtccaagcagattcgtggtcttttcctcgcttctttcaagggctttcctgtgccaggtgaaggaggctccaggcagcacccaggttttgcactcttgtttctcccgtgcttgtgaaagaggtcccaaggttctgggtgcaggagcgctcccttgacctgctgaagtccggaacgtagtcggcacagcctggtcgccttccacctctgggagctggagtccactggggtggcctgactcccccagtccccttcccgtgacctggtcagggtgagcccatgtggagtcagcctcgcaggcctccctgccagtagggtccgagtgtgtttcatccttcccactctgtcgagcctgggggctggagcggagacgggaggcctggcctgtctcggaacctgtgagctgcaccaggtagaacgccagggaccccagaatcatgtgcgtcagtccaaggggtcccctccaggagtagtgaagactccagaaatgtccctttcttctcccccatcctacgagtaattgcatttgcttttgtaattcttaatgagcaatatctgctagagagtttagctgtaacagttctttttgatcatctttttttaataattagaaacaccaaaaaaatccagaaacttgttcttccaaagcagagagcattataatcaccagggccaaaagcttccctccctgctgtcattgcttcttctgaggcctgaatccaaaagaaaaacagccataggccctttcagtggccgggctacccgtgagcccttcggaggaccagggctggggcagcctctgggcccacatccggggccagctccggcgtgtgttcagtgttagcagtgggtcatgatgctctttcccacccagcctgggataggggcagaggaggcgaggaggccgttgccgctgatgtttggccgtgaacaggtgggtgtctgcgtgcgtccacgtgcgtgttttctgactgacatgaaatcgacgcccgagttagcctcacccggtgacctctagccctgcccggatggagcggggcccacccggttcagtgtttctggggagctggacagtggagtgcaaaaggcttgcagaacttgaagcctgctccttcccttgctaccacggcctcctttccgtttgatttgtcactgcttcaatcaataacagccgctccagagtcagtagtcaatgaatatatgaccaaatatcaccaggactgttactcaatgtgtgccgagcccttgcccatgctgggctcccgtgtatctggacactgtaacgtgtgctgtgtttgctccccttccccttccttctttgccctttacttgtctttctggggtttttctgtttgggtttggtttggtttttatttctccttttgtgttccaaacatgaggttctctctactggtcctcttaactgtggtgttgaggcttatatttgtgtaatttttggtgggtgaaaggaattttgctaagtaaatctcttctgtgtttgaactgaagtctgtattgtaactatgtttaaagtaattgttccagagacaaatatttctagacactttttctttacaaacaaaagcattcggagggagggggatggtgactgagatgagaggggagagctgaacagatgacccctgcccagatcagccagaagccacccaaagcagtggagcccaggagtcccactccaagccagcaagccgaatagctgatgtgttgccactttccaagtcactgcaaaaccaggttttgttccgcccagtggattcttgttttgcttcccctccccccgagattattaccaccatcccgtgcttttaaggaaaggcaagattgatgtttccttgaggggagccaggaggggatgtgtgtgtgcagagctgaagagctggggagaatggggctgggcccacccaagcaggaggctgggacgctctgctgtgggcacaggtcaggctaatgttggcagatgcagctcttcctggacaggccaggtggtgggcattctctctccaaggtgtgccccgtgggcattactgtttaagacacttccgtcacatcccaccccatcctccagggctcaacactgtgacatctctattccccaccctccccttcccagggcaataaaatgaccatggagggggcttgcactctcttggctgtcacccgatcgccagcaaaacttagatgtgagaaaaccccttcccattccatggcgaaaacatctccttagaaaagccattaccctcattaggcatggttttgggctcccaaaacacctgacagcccctccctcctctgagaggcggagagtgctgactgtagtgaccattgcatgccgggtgcagcatctggaagagctaggcagggtgtctgccccctcctgagttgaagtcatgctcccctgtgccagcccagaggccgagagctatggacagcattgccagtaacacaggccaccctgtgcagaagggagctggctccagcctggaaacctgtctgaggttgggagaggtgcacttggggcacagggagaggccgggacacacttagctggagatgtctctaaaagccctgtatcgtattcaccttcagtttttgtgttttgggacaattactttagaaaataagtaggtcgttttaaaaacaaaaattattgattgcttttttgtagtgttcagaaaaaaggttctttgtgtatagccaaatgactgaaagcactgatatatttaaaaacaaaaggcaatttattaaggaaatttgtaccatttcagtaaacctgtctgaatgtacctgtatacgtttcaaaaacaccccccccccactgaatccctgtaacctatttattatataaagagtttgccttataaatttacataaaaatgtccgtttgtgtcttttgttgtaaaaatcaagtgattttttcataaggttcttttactattggaaaagatgggcagcacgcagttttattttatttttgtaagttttttaatacatgtgaaagcaaagaatactcagcatgcctttctaagtgacgcgtttgcaccttttgttgggaagtactgtatcctgtgctgttagcattctcgataaatctctctgtgaaagtga

SEQ ID NO: 2 - DNA, 76183 bp, Homo sapiens; identical to SEQ ID NO: 1

SEQ ID NO: 3 - DNA, 67531 bp, Homo sapiens
gagggcggggcgcgacgtcggccgtgcggggtcccggcgtcggcggcgcgcgcgctccctcctctcggagagagggctgtggtaaaagccgtccggaaaatggccgccgccgccgccgccgcgccgagcggaggaggaggaggaggcgaggaggagagactgtgagtgggaccgccgtggccgcgggcggggacccttgccggggggcgggggtcaggggcgggacgtggcgcgggaggggcccgcggggtcggacgacacggctggcggatggcgtccctcctctctaccctccccctcccgccgccgccggtggcgactctcccctcggcccgtcacccctgctcgcgggtgaccgtcctcggcgcggcctccctggagccgccttcgcctgacgcccctcttcctcccgccctcgacgcgcatcccggcccccggccccgcgggcgcccctgtcgccggggcttcgcctgtcggggctgcgcgcgctcctgcccttctcggggctttgggccgcggcgccgtcgcgcgcccgcggccccggcctctccctggatcgcgctctccccctccctccctcgcgcgccccctctcccgttactcggcccccccaccggcgcgcgtgcgcacttcgcctcccgtcgggagagtgcgccacaagggctcctgagctctcacccccatctctgggctttgcctccccctccttctcgcccattccatgaatttctgccccccgctacccccccgcgagcgagtaggtccaccggctcctttccccatctagcaggaacaagtaggtggggattattatccacaaaagggactagacattgtgttctgggtcccacaactcatcataaagaggtggttatagttcccatcaggagccgtgggtaggggactgtgcgtccagcagcacccgaggctcttcggcgccagaggctctaaggtgcgagcgtgtccccagggtgctcagaggttctttggagtgctgtggcctcggaatgtgagcaccctcccatcctaccctccccttcgccggcgatcttccagttacataagtggagtgggacatagtaggtaacgggctctcatcgccctggagcgctcgggatcaccggtaccagatggggcaagttcatcgcgacgctgtggctcctgttaattgtgcctgaaaggttatcctctgttcagtttggtcatgaccgaatcacccaaactgaaactcagatgacttttatatggcagtggcaatgtttctgtggttttgcactaaagacttaaggtcattatgaagagtgtaaaaggattgctgtcgcaggggagaccgtttatgacattgctaagtatggaccccgagggggaaaaagctcattctggaattgctctgtggcggttgcttctgttgcgagtgtgttcgggtgtgggttggtcacagcagaaatgggctccaccacaaaattgatattcctgactcatggtcaggcagatgtgtgcttctggttatttttccaggaacaggaatgggctctgccgagcctttcacacgttgtgtctctgctgtgcgggatcagtaccccagactgtgagataacaggatcgaattcaggggttggttggtgatccaggaaccatacctacttggatgtgatactgagtggcctagacgttgtaggactctcataagttttagacattttgttatactgtaaaaatgaagcatatacggcctcagtagtaacattgcactaataggtaattattactctagagaattttgggttccatggctggaatgttcatcagtatctcagcaatttcagttaataaccagattaagctgacctcttgagtcttttgaaatctgctgggtccctataataagacagggtctggattttttaatcttttgggaatttccaccaaggatttagggaaataggcttttatgggcttttcaggatttctatttcaaatcccaatgaggaagtctaggaaacacttgcttttattttcttgcctgaatatgtcagaaccttaaatcacccaatcaatctagaagtactacagttgattaaagtaagtcaccacaggtcacccattcgtggcaggtcagctaggtggctgatcactggaatacagtcatatccccaggcatacacacgagcctcacttgacgatcccaaagtttgtacatctgagcttgagacgtgacaagttgaggtctctgctttgttcttcatagttggcagtttgtctcctcgggtgcccctccggttagctgtttatcatacgtctagccctatcaacagtgcaggcagcttccagagtatagttttctctgcaaagtgcctggtggaggggtacctccttttccattgtcctaatggctccactgggcttccataccagccctttccagtgtcttaacagctcaaagaaacccatctgtggctttcttgttagcactggcctatcacaccttcctattgcctgttaactaaaattttgcctggaatgctttaagcttagagtactgggtctttgtttcacccgattgataggagagtgtcatgcagtcagccgaactccgacttctgtgctgtttaaatccttaggtaggtctggggcaaggcacaaaccactgtgtattcaaagggttatggtgcttgcattctgtgtgtatatgtttgtaatttccaaccagagtcgtttcccgtgcctgccctgcctctgtgcaatctagtctagtagggtagggaggcaagctgtggagtttgaaaaaaaaaaaaaaaagctagatgagtttaataggctgttaccccctccagaacattcctcccatgtggagatgaaacgagaagttcatttctttaacctaaaataaagaacaacagagataaaattgttagttccttattggagcctggtttccattgctaatgtacctgcttgggactctgcatgataaatgacgtgtcctggaacctgaaatcttttataaaggttaatatcagcagaaatcttttaattagctaagagcagcttgttctcaagctgcccgagttatcttggaggagagaatcacaggaaatgtttgatatttctagtaaccagtgttttcagtgcgtggggtaaagcacactcctagactggccagtcccaaagagtgtggcaggacacctgcttgttttccctgccctctgctatggtgacatccttgcagaccagtcttgcgtggctggcagacgcaatctttttttcttgggtagagcattatcaccgctgcgatggaaggaccttgtcctcggtgcctccataccagccctttccagtgaaactactgctgtcccggcaagcccctgtgcgtgtgcatcattccgggtaggacaagatgtgaacaggtccctcttctttgggcttaagtagaagttgtgctcttctgcttttacctgtgtgctcttctgcttttacctgttctcttctgcctttctcttgcaagaaacctgtcgaaagcttgctttgcatgccattgcttaaatactttgatggtatgtatggtatgtgggataactgagtgggagccggaattggggggtgggcagggcatccccacccccacccccacatcaaagggggaatgaccatttcgttagagaataaagcctgagtcttataacttcttcaagcacatgtatgctgggtctcctggcgtgtgaatgtgttcccgctgtgctgtgtggctgttttgcagttactgtagacactgtagtctgggctctcattattgcctctgaagttgacaggaccaagccttagtaaggatgcacttgtcttcctagcccaagagctaggggtgttttatatatatattaactttcttttttagatttcataaactgctctcattttctcttttctttctttctttttttttttttttttttgagacagtctcactctgtcacccatgctggagtgcagtggcacgatctcagctcactgcaacctctgcctcccgggctcaagcagttctctgcctcagcctcccaagtagctgggattacaggcacctgccaccacgcctggctaatttttgtatttttttttttttttttttttttttttagtcgagacggggtttcaccatcttggccacgctggtcttgaactcctgacctcgtgatccacccgcttcagcctcccaaagtgcagggattacaggcgtgagccaccgcacccagcctctggctcttttctttttgacatgaaatcttaagttaattatcttaaactttaagaactagaaggattcttagtccagcaccatcagtttacaaacaaaaaaaacttgtgtccctgagaagttgtgacttttccagggcctcctagccaggataccagtttggtttttattatatagctagccgagtaatactattaacttgacttctgggatttcaaagtattctatgacttgactgtttaagggaattatgaggcctcactgaacctcaaaagataattttaggtaccatcctggtagctgtagagcagcaacagaccagtaaaagacttggttggtgttgcccttcttctgggtttgattacatgagtaattgtgtgaatagtctctaagttgtatgctctgagctttcgtttttagcttataaaagtgctactcttgggccagcatagtatcagaaattagctaattcatatggggcagtttaggctttaactaggaaatgatggttatcttaatgacaaaaaaggtactgacaaaagtccttttttgaacatgtgttcaaaagaaaaagagaaactatcaaactaataactgagtttgttgaacatcgagattgactgatctgagaggcttaaaactgattgccctgaaatagacttgcatgttttggatgatggctttgggtctcccagagcacttggtttcccttggtgctgattttttctctcaggattaaagcccctttatgtgatgttgttacagcagcttattgcaacttcattcagctgcttgaaaaagaagggagactgcctctaggttccatgtgttctttcagggatggtattttgatgttgcgtattctcttgaacatgtattcttccctgagaatttctgtgtgccgtggtagaagaaatacttgccagaaatcgccactcatggtatgcttttgtagtgtcgaagtgtcccctagaggtgacaaggcttgtgatagtgttgattctaacaagcatgaatctttcctttattttagcactgtgtgttacgtgccagtaatttgcagcttatcctttgtttctagctaggtaagctgggaaatagcctagtactttgtctatgtgtttatcttcaaaatgtcccaaatagccctgggaaaaaggtcgtgcagctcaatgggggctttcaacttacaattttctttgttttaggctccataaaaatacagactcaccagttcctgctttgatgtgacatgtgactccccagaatacaccttgcttctgtagaccagctccaacaggattccatggtagctgggatgttagggctcaggtaagtaaccttcctttttttttttttagtatatgtcctggtttggccatctgttttttttttttttaaaaaaaaaaaaaaaaggaaaagaggaaaaaaatatactactcttggacagtataaaagtaccccaaagactaaagacataactgtgccaaactgtgccatataataaaaaaaagtcacttccctgagccctgaaaggtcagtgtgtgtagggttacttggtcgccacagcgtgatctgggggcgggcgtcagattagagccggaactggtgatctgcaacttcagttcaccttgaagcaggtcagctgagctgagagcgcttgcactgagcccttttgcgctgctgctgttgccttagcggtcttcagcatgtgtttgctttggtttggggtaaatggcttagtggtcaacattagtgagcagtggtaatgcattttcagatatgggaactggtatgtggttggttccctagaaggacaccctcctgaaagctgtctcagaacaccgggggccatggctaatgtcatgtgcttgctacactcctcccatggtaactaaagagagtacccagatatacatctggttcttgggactctagaggaggatgagtactttgtaaaaacctgggggccccagtcattctaggtctgacactcaggtgctgtatcagctgcagtttgaactacttggcaccattgtgtggactttagttttgtaaaaatgaatggttccttaatttctcaaccttcaggctcaacatctcaagctgtttgttgttgttgttgttgttgttgttttgttttgtctttttgattagtggtcactccgcatttgatgttttgacatgtggatttcagaacttctgtgtggtaaagcagaatgttccaattgaattttcccattttttttcccctaagcaaaaatgtgagttttcacttatgcggccattgtgattccgactgagaccctaagtcgttctttgttgtctctctagtggtttctgacacctcagtgtgaagctgttgtagacatccataagaaatagcctgcttagggattatgtgagggcaaggtttggctgaaggagaatagaaggtgtggaaggaagcggaagaccagaagagcatcacactgcctcaagtcccaaatttgattctgctcctgatcctgtgactcaaattgtcattctcttttactgctgtggggtgtgctctgggcccagctgacaggacattctttgtactccacgtatttatgctggtgggagttgtatggctagtgctttgtgctttgtctcagaaattgtgtggactaaatgtaatatgggcagtgaatgggtttcttctggaagatgttaggcctggagggtggtttgggtttttacgagtctttttctcagattacagattacgaatggatgttataaaacaggcagtgttgacaccatacagtttctcctaagaaatgtacagagagttcaacctgaggaagctaattgaaaataaacttttaaaaagaaatgtagaaagaggaaatttaaaaagtatcttatgaatgggaaagatgtagccatttgagcttcaaagaacttttgagggaattctcaaaggacagtacccgtctttagtagataaatgcttgatatctatttttcttcttttactttttaaagaattactaaaataatacatggatttatagaaaaatcaaaccacttaaaaattgatcaggtggctgggcaaggtggctcatgcctgtaatcacagcgctttgggaggcctaggcgggtggatcacctgaagtcaggagttcgagaccagcctggctaacacggcgaaaccccatctctattaaaaatacaaaaattagctggccatggtggcttgagcgtgtagtcccagctactcggaaggctgaggcaggagaatcacttgaacctgggaggcggaggttgcagtgagccaagatcacaccactgaactcctgcctgggtgacagagtgagactcggtctcaaaaaaaaaaaaaaaaaaaagtatcaggtaaaaaaatgaaagctccccgcttaatctctgctcccactacccagaataactgctgttaatagcttaatgtagatccttctaagtcttctaagactaaactgtgtactttttgtgttgtaattaacaggagggtttttgttttgttttgttttttctttttttgagatggagtcttgctctgtcatccaggctggagtacagtggcacaatcttggctcactgcaacctccacctcctgggttcaagtgattctcctgcctcagcctcctgagtagctgggattacaggcgcctgccaccacacccagctaatttttgtatttttagtagagatgggtttcaccatgttggccaggctggtgtcgaactcctgacctcaggcgatccacctgccttggcctcccaaagtgctgggattacaggcgtgagccaccgtgcctggcctcaggatggtgttatatatacatattctgcatttttccatctcatatattcatctctgcctcatttcttttaaatagcagtgtagtccagggctgacttaccgtcatgcatttcgttgtctctctatgttattaaaaatgctacaggattgaaattcctcatgtgccagtcattttgaagaatggctgcctagacttggaatttctggtggataccaccacatcactgtccaaaatggctatcccagttcccacaacagtctgagaaagtgccattttcccatatcgtcccagaattggatatacatcttttaaattggtgccgcttggattattactgaggctaaacctcaataatcattgtcatagctcttaatgtattaaagatgttaactctttgtcatgcagatattttcctgttttgtcttacgtcttgattcttgtctttctgatatataaaatttatgttatgatttattcttttgctttcatacttaggaaatccttttttactcttttttttttttttttttttttttttgagacggagtctcgctctgtcgcccaggttggagtgcaatggcgtgatcttggctcactgcaagctccatctcccgggttcattccattctcctgcctcagcctcccgagtagctgggactacaggcgcccgccaccacgcctggctaatttttttgtatttgtgagacagggtttcaccatgttagccaggctggtctcgatctcctgaccttgtgatccgcccgtctctgcctcccaaagtgctgggattacaggcgtgagccaccgcgccccgccaggaaatcctttcctactcttaacaacagatcaatagtcatctatattttcttcctaaaaaacctgatgatgtattatattcatacatacgtatttaatacatacaaaagggccagatgcggtggctcatgcctgtaatcccagcactttgggaggctgaggcgggtggatcacctgaggtcaagagttcaagaccagcctggccaagatggtgaaatcccgtctctactaaaaatacaaaaattagccaggcgtggtggcgggcacctgtaatctcaactactggggtgactgaggcaggagaatcgcttgaacccaggaggcagaagtttcggtgagccaagatcacgccactgcactcctgcctgggcgatagagtgaggctctgtctcaaaaataaaaaataaaaataataattttatagttaagttgccctgtgtttttcctgtgattaaaaaaaaaaatacctgttttgtatttaactttggggtgggataaggtatagcccacttagtcagttgtgtctaagccacttgatgaaccagtcaatccagtcttcacctttaacaaatgctgatttcttcaagtgagcaaaatatctcttaaactttttcctattttctctataaagttgcttttttctgaattttttctttatgaggcttgatgggcagccctatcagcagacaatcattcattcacccaacaaatatttgagtatctgcttcaagccaggggcagtgctaagccctggaagtggtatcttctccttatccgggagtggggctacagtgttcattccagaagactcaagaaaatagcagatcatcacaaaagtaggttttacataaatgaggaggaatccacagggttgtgtatatgtgtgtgtattttaaattctgacataagttggagctttagggtagactgtgacataagagtagtttgttttccaactcatgtaattgccggctgatttttgtcttgaattatgataatggtaacttctgttgaaacaattctgtattcatcttagcttggttgggatgcaataaaagttttgtactggtaaaaatgataattttcttccatgatgattttgaagcttttctgtaacacctgataaaaatagaggggccaggcatggtggctcatgcctgtagtcccagctactcgggaggatgaggtgagaggatcccatgagcccaggagttttaggctacagtgagccatcatcacaccactgtactcctgtactctagcctgggcagcctcgttctttagagtaagacactgtctctttaaaaaaaaaaaaaaagaaaaaagaaaaaaagaaaaggcttttagtgaatatatttttagggtagcaagtgtaatttttataaattgcattatttgaatctaataaataccctcaaagctgaagtcgaattctgattttgattgaaaatattttttacttaaaggaagagggatagaataaatgacacgattaaggaaaagacttcttgtataaggccggggttttttaaatgattttttgaatagttagatggacaatacggaattaaaaaggtggtgtaaaaagttatacggggctgggcacagtgactcacgcctgcaatcccagtactttgggaggccgaggtgggtggatcacctgaggtcaggagttcgagaccagcctagccaacatgacgaaacatcatttctactaaaaatacaaaaattagctgggcttggtggtatgcacctgtaatccagctactcgggaggctgaggcagaagaatcgtttgaacccaggaggcagaggttgcagtgagccaagatcgtgccattgcactccagcctgggcgacagagtgagactccatctcagaaaaataataatagaaaaaagttatatggggctgggcatggtggctcatgcctgtaatcccagcagtttgggaggctgaggcagcttgatcacttgaggtcaggaattcgagactagcctggccaacatggtgaaactccgtctccactaaaaatacaaaaattagccaagcgtggtggtgcgtgcctgtagtcccagctacttgggaagctgaggcaggagaatcgcctgaacctgggaggcagaggttgcagtgagccaagatcatgccgttgcactccagcctggacgacaagagcggaactccgtctcaaaaaaaaaaaaaaaagagttatattgtaaagtatctctgctaccctgccccaaacattcatttctttccctggaggcagccactattacctgtttctttaaaaaaaaaaaaaaattgtggccgggcacggtggctcacgcctgtaatcctagcactttgggaggtggaggtgggtggatcatgaggtcaagagatcgagaccatcttggccaacatggtaaaaccccatctctactaaaaatacaaaaaattagccgggcatggtggcgggcacctgtagtcccagctactcgggaggctgaggcaggagaatcgcttgaacctgggaggcagaggttgcagtgaactgagatcacgccgctgcactccagcctggcaacagaatgagactccatctcaaaaaaaaaagcgtgtgtgtacccgtgtgttaaatttttattataaaatatatataacaggctgggcgtggtggctcacgcctgtaatcccagcactttgggaggccgaggcaggctgatcacgaggtcaggagatcgagaccatcctggcgagcacggtgaaacctcgtctttactaaaaatacaaaaaattagccgggcatggtggcgggcgcctgtagtcccagctactctgagagcctgaggcaggagaatggcgtgaacccaggaggcggagcttgcagtgagccgagatcgcgtcactgcactccagcctgggcgacagaccgagactccgtctcaaaaaatatatatcgatatatataacaatttacagttttaatcatcttaactgtacagttcagtggcactgagtacattcacattgttgtacagccattactaccatccatctctacaacctttcgtcttgcaaaactgaaatttcatacctattaaacactaactcccacttctcccctttcccccaccccaccctctggcaactactattctactctttgtctctattggacatatttttgtgtgtttaggtttgtgtatatattttacatgtgtgtataaatacacaagggtatgtgggcgttgtgtttttacacatactataaaatattgtgcacatttgtttattttaatgtatcctgtagattatttagaatcggttcatacagagccgtatcattccttttaagggttgggtttaaatagtctgttatggatgtaccacaatttatttaaccagtttttaaattttttacttattttttttaatgtttttttagagacaggatcccactccatcacccagactggagtgcaacagcatgatcatagcttactgcagccttgaactccggggctgatgtgatcctcccacctcaggctctcttgtagctgggactacagggatgtgccgccatgcctggctaaattttttatttttatttttatttttatttttggtagacacggggtttcactgtgttgcccaggctggtcttgaactccttgggcttgagtaatcctcctgccttggcctcccaaagtgccgagattacaaccatgagccatggagcccgacaagagtagccttttatttgcagaccattagagaaaaagttgcgtgtaagtagataagcatacgaatttatcactgcaatactgtttgtagagatcacagagctgttaggctaggaagaagtttttagcagttagcactagaaagcaaaactttggaaacttccatttcatcaaaagtgacctcatctgagtagggcatgtgagggaaggacctttttactcgacaaggggaacttgcccagttcttgtttgtgaaccttgaagaaagtggagcatttttattttgggaccattctaggttgtggtagttccttggtactcggggttggagaatctccctctgctgctggaccttctgcctcctcatgctgtaatatgcataagaggtgtcctagaagtattcaggaacaggctgtggttgctttgttgttctgtgactgttgaactctttatatagcagtacttttttaagctgtactaattgagcatttattatgtgtcagttactgtgctagctgctggaaactatcctaccctcagcagtcttctggtctaatgggaggtacagacaggcaaatgggctatgactttacaagaggctaacttctgtgatggagagaagttccagccactaagggagcacataaaaatcagaggagatcctaccaagaattgggaggtaggtcagggaggagacttctttgaaaaatggcatctaagacctgaacagcaaggaaacattagctaggtcaaggacaaagcatcagtggggagagatgcatgagtcttttggaaggaccagcatgtgtagaggctctgacaggagagaatctctcaggcccattcagagagtccactgtgtgaagacgaggcatgaacaaccagccaggacatgtggagaggagcatttttctttttttcttttttctttctttttttttttttttttttttgagacgtctttctctgtcacccaggctggagtgcaatggcatgatctcggctcactgcaacccccacttccagggttcaagcaattcttctgccttagcctcccaagcagctaggattacaggcacccgccaccatgcccggttaatttttgtatttttagtagagacggagtttcaccatgttggcctcaaactcctgaccttaggtgatctacccgtctcggcctcccagagtgctgggattacaggtgagagcccccacgcccggccaggctcggctttctttccaggccccgtcacactcttagatgttccctgggccccagaaggcagcgtgaggtgctctgcccatctatgctgtccttttccaccccaccctatccactgggcccctggggctcccactccactccaggtctcttcatggacccttctttcccttcacttctgtcccaggagacctgggagactcatgggaacaggcatcatcttctccagcacagttcattgtctaatgcacgaaagtgctgggctgtgagaaggtcaggagcttacatggaatgggagtcagctgtggtacaaagtacgctgcttagttctactgattttttattttttatttttacataagactttgatggtaaaggaagcagtgtgtgagcaagctgactcctgtcttgtcaagtaccaggtccactctgatgagcccctgtggacagcactgctgtaactccccaagcctgggctcaggaggtgggccctaagcgctgttcccagctcttcctccatgctgtcagctcttccaccattcttcctggcgtcattctaaggtcctgtcttcccccgccctcttccttcctggcttctacgctcagctcaagtagtagctgtttgggtacttttcacccagacttaggaaatgttatcagttggtcgtattcctgtcagccctcttactatggaactcaaataggacagattcagctgaattcccagccctgtggttgcactctttgtctgccctgcttccccaaggtagcctgctccctaaaggtcaccgagatactccccatgcaaggtttttgttgtattacacatgacaacatggaataaagtgttttgcaaatttactggatgatatcctactatgtggaacatcctacaacttactcttttcactcaacatttgacttttgaacctggtctgtactgctccgtgcagaccaatgttcattcatttgatatgtctccttgtgccatagaaatagttttacaatagaagcctgtccagagccatgagggagaaggggattgtagagaaacaaggattggcatctggtttatgtttacatcctttagtcctgttaaccgagaagaagatatttttatttccatgtttgcgaaagctttccacaaaaaaagcatccattttctagacttattaatagggcagtccaaaggttttatttttagatttgaaagaaagcaaagtaggcttctgagatatgcacatttccctgtgtccctgtctcttttgcaacattccacattgctgctaaaacttgaacatgagcactttcaagcatgtgcttactttctatgtatgactcattttttaaaacattaaagcattttcggccgggtgtggtggctcacgcctatattcctagcactttagaaggccgaggcgggtagatcacttgaggtcaggagttcaagaccagcctagccaatatagtgaaaccccatctccactaaaaatacaaaaattagccgggcatggtggcgggcgcctgtaatcccagctactcgggaggctgaggcaggagaattgcttgaacccaggaggtggaggttgcagtgagcagagatcgagccactgcactctagcctaggtgacagagcgagactctgtctcaaaaaaataaaaataaagcattaaagcactttgtctggtggtatgtaagttttggcattacttagataagttgtattttaagtctttctacacacaataacttatttttaaaatacaagtttctgtgtacttccgggttttgtgtttttgtaaacagcagaaggtattagtccatattaagtactaatttgttctaatattttcagctgtttttggaattacacttggcaaaaaaatagacaaatgtctgcagttgtgacagtttgtttttttgttctttttaactccagaataaataattctagtgagtttttttcttggcttgtaagaacatgggaatgattagagtcatcataacacttaagtagttatagaaggttgaacatctgtagtcagttgtataaaatttcctagtcatccttccaggttgtttaagacaaacaaatacatagtatttattaagctcttataaattttaattgtaaaacatcattgtacaaaactttgaaaatgcgtataggtacaaagataaaaaattaggccaggcatgccatggctcacgcctgtaatcccagcactttgggaggccaaggtgggaggatcttttgagcccaggagttcaagaccagcctgagcaacatattgagaccctatctctacaaaaatatcataaaacaaaatagaatcactctggcgattccactatccaaaaaaaaaaaaaactgctgttaatatttggtatgtatctttctagaccaaggcctccaactttggttgagaattcagccgggtctgtgaccttggatgggaaaaacattcactctttattttcactaatgtctctgaaaacccagatttttagctgggcatggtggctcgtgcctgtaatcccagtgctttggaagcccgtggagggcagatcacttgagcccaggagtttgagaccagcctgggcaacatagcaagaccctgtcttttaaaaaaaaaaaaaatccagccgggtgtggtggctcatgcctgtaatcccagcactttgagaggctgaggcaggcagatcacctgaggtcaggagtttgagaccagcctgaccaacatggtgaaatcctgtctctactaaaaatacaaaaatcagccgggcatggtggtgggcgcctgtaatcccagctactccggaggctgaggcaggagaatcacttgaacccggaaggtagaggttgcagtgagccaagatcacaccattgcactccagcctgggcgacagagcgagactctgtctcaaaaaaaaaaaaaaaaatccacattttcttcaatgacaattgtaagcaacagatcatggtagtattagaatagcagtgactgtcaccagtagagatcaaagatactttcatatcatattatagttgttacagatattttgaaatatatatgtccatcactgcttcaaacttaaggtaattattagacccatctctagatctggttatttaatgatttactgaagaagcacatattatttgagaacgaactcttgaaatatgttgttaatttctgtgcattttacacatttcaaaacattcttctgaggaggggtccagaaggccaaaagggtccatggcagaaaaaggttaagaacacctgttctgtactttgtaccatgtggctacaaatataaaaacagacgttaagccgggtatggtgatgcacacctgtagttccacctacttgggaggctgaggtgggaaaatcacttgagcccaggagtttgaggccagcctgggcaacagagcaagaccccatctcttaaaaaccagtcagcacttgactagtcagttagtgggggaaaacacaggtacagtaaaaggagtcaaaattacacttaaacttaggtcatcttattatatcaaacatttattaacatgtttagtgttttgtgtatattatgcaaagtgtaatgcaactaaaactgtttaacacttctcgatatcacataaatttgttggtgcataatagcctaaaagttacttttgctgttggcattttattttattacttacttatttatttatttatttatttattttgagacagagtcacactgtcgccaggctggagtgcagtggtgcgatctcagctcactgcaacctctgcctccctggttcaagcgattctcccgcctcagcctcctgactagctgggactacaggtgcgcgccaccatgcccagctaatttttgtatttttagtagagatagggtttcgccatgttggccaggatggtcttcatctcttgaccttgtgatctgcccacctcggcctcccaaagtgctaggattacaggcatgagccaccacgctgggcctgctgttggcattttaaacatccttctagagtctttcttatttgcctgtaagcacgtacacatgttgttgttgttttgagacaaggtctgtcgcccaagctggagcacagtggtgcaatcacagctcactacagcttcgacctcttgggtgcaagtgatcctcccaatcagcctcccaagtaggtgggactacaggtgtccgctaccatgcccagctaatttttgtattttttttgtagagacggagtttcaccatgttgcccagactggtctcaaactcctttgctcaaacgatccttccgcctcggcctcccaaagtgccgggattacaagtgtgcacctctgtgcctggcccacatgttgttttagatgaatgagatcatatatgtacttttgtaacttgctacctttcctcaacaaaatgttgtaaatatccatgtccataaaaatagacgtatatcttcacttttccctaaaatgaaaataacttaacttgcattttcttttttgtttttgtttttgttttgagacaggctcttgctctgttgctcaggctggagtgcagtgatgtcacagctcactacagcctccacctccagtttcaagtattccacctacctcagcctccaagatagctaagactacaggcacatgtcacgacgcctggctaatttttaaaatattttttgcagaaatgggatttcactatgttgcccaggctggcctcaaactgctggcctcaagtgatcttcctgccttggcctcccaaagtgctgggattacagtcgtgagccactgtgcccagcctgcattttcttattataaaagtaatacatgttcaatggacaaaaaattttcagaaaatatgcaaagatgaaaagtaaaaattgtccataaatctgtcatctacagataaagataacttctggataatgtttttctaccatcatttttagtaatcacataacatttcgttgtatgtctatgccttcatttaattaagaggcatttccattatttctgcatgttcatgactctgaatgatgatatgtctgcctgctgatggctacaaccctgtttctgcatttcaaacctctctcttgagctccagatttgatggcctcgtcagcatttacttgagttgctcataagtgtctcaaatttaacaagtcccagtcttgatttttttcccccttcaaacctattcctcatgttgtctctatttcagtaaacaatatcaacatccacccagttactcagtccaaaattctaggagtcatccttgattctgctctttctttttttttttttttttgagacggagtctcgctctgtcgcccaggccggactgcggactgcagtggcgcgatctcggctcactgcaagctccgcttcccgggttcacgccattctcctgcctcagcctcccgagtagctgggactacaggcgcccgccaccgcgcccggctaattttttgtatttttagtagagacggggtttcaccttgttagccaggatggtctcgatctcctgacctcatgatccacccgcctcggcctcccaaagtgctgggattacaggcgtgagccaccgcgcccggcctcttttttttttttgatacggagtctcattctcgtcatccaggctggagtgcagtggtgcaatcttggctcactgcaacctccgcctcccgggttcaagcaattcttctgccccaacctcctgagtagctgggcctggctaattttttgtatttttagtagagatggggtttcaccatgttggccaggctggtcctgaactcctgaccttgtgatccgcccacctcagcctcccaaagtgctgggattacaggcgtgagccactgcacccgccctgattctgctctttctctcatcatccctgatctgtcagcaagtcctgttaggccaaccacttctcagcatctgcactgccagtatgctagtccaagccacaaaacacctctcagaggtacgcaacaggactttgttgttgttgtgtgtgtgtgtgtttttttttttttacggtagaattattttataacttgaagtgtagggatgaccttccttttaaaattttatttattttcttaattttttattcccatagattttaggggaacaggtggtatttggtgacatgagtaagttctttaatggtgatttctgagattttggtgcacccatcacccgagcagtgtacactgaacccaatttgtagtcttttatccctcaccccctcccaccctttccctcaagtccccaaagtccattgtatcattctgatgcctttgcatcctcatagcttagctcccacttatgagtgagaacatacagtgtttggttttccattcctgagttacttcacttagaataatagtctctagttccatccaggttgctgtgaatgccattaagtcattcctttttatggctgagtagtattcctttgtatatatatgccacaatttctctattcactttctgattgatgggcatttgggctggttctatatttttgtaattgtgaattgtgctgctataagcatgcgtgtgcaagtatcattatgcaacgggacttcggatgacatattgaacaacttcctcactgatatccttgtgaaacgctacatatttcatgggtctgtttgttataccaacactcaattctgaatgatggaattatttcacatttagtctctttttcatctagccattatagtttagtttaaacaccaagttccattcctgctgcatgctgaaggatttgcagtacatcaggctatagtccatcaattcattccacaattgagtaagtaaggtatctatagtacctcaggccctgtgttaggcagggatggggtaacctagacagatttggtacctgtcctcatggagcttgactttagcggcagagacagatcttagataattgtaccagtacttaagtgttcagaaggacaagtatggaggtgggagccactccagtcctctacagtcacgtgctgcacaacaacgtttcaaccgacaacagagcacacatacagtggtgttcccataagattagaatgccatatttttactgtaccttttctatgtttagatatacaaatacttaccattgtgttccagtgatctacagtattcagtatagtaccatgctgtacagttttatagcccaggagcaataggctatataccgtatagcctaggtgtgtagtatgctacaccatctagatttgtgtaagaacactctctgatgttagcacaaataaatcgcccaatgacacatttctcagaacatatccctgttgttgagcgactcatgactgtacaatgggggaacagctcagcctgccttccccaaggaggcaacgccgatgcagggaaccgagggttgaacagaagtgggcaaggtgcagagaggaaaaaggctttccagatggagaagagcatgtgtgaaggccctcagtctggcaagagcttagtcctgtgtggcaggagctgaacgaggggttaggggagagtggcaaagggtccgggccatcagagaggtcaacaggggctggatcatgcaggattttgaatgttaacatcagagcgatagaaaacatgaagggtaaggtggtttgggttttgaatttttatcaaaatattgcaactactcggcaacaagttagatataacaaaagaggtcatcgtaaaaacagcagtctaccccttccccttcccttccctgactcagacatgacagcttttaactgtttctgattttagttcctttgatggttacctccaaaattaaatcatatgcttatacatctttcttgatttgccaactttagggaactgtgttaactccctgaaatgaaagagaatgacttagcttacgttacctccccatgttgaaattcatattcacatttctctgtaattttttttttgagatggagtctcactctgtcgcccaggctggagtgcagtgatgtgatctcggctcactgaaacctctgcctcccgggttcaagcaattctcgtgcctcagcctcctgagtagctgggactacaggcgcacaccagtgcactgggctaatttttgtatttttagtagaggcggggtttcaccatgttggccaggctggtcttaaactcctgacctcaggtgatctgcctgccttggcctcccaaagtgctgggattacaggtgtgagctaccatgccaagcccacatttctctgtaaattttaaacagtattttagtccatatgtcagttcccctctgtttaagataaggatattaataaccctacttttccttccactttccctccttaacttctgcgtcttaaaagctgtacttgaccatacccattcttgcatttgttaacatgtgtgttctgccctgcaaccacagccaagttgtagcttaattctaaagtcgaaaataacattatttacattattacacatgtgagtattgttcttggcgagaccaaataatgaatgtgcccaggattacatttccttctttacagatctggaccactcaaaggagaatgaccaatcaaggtcaaatggattcccttttcttagactctgtcacctgcttaaaatccttgctaggatttaatctacttcatattcaaaccttggcttgcttatatagctctttgttttgcccaccatttctagttgcctttttattttgtttactattcctccttgattatgttgtaaaatgctattagcagtgctgtttatttcgtacgattcggctttttccccactgaagacctttctcttggaaggcctctgcccttctgcaatctgggcaagtatctgctctttgatttaaggttgcatatacagctgtacctggaccttctcctcactgggctcttgggttggagcccgtgtcttaaaacccatatcttcctttcacatggtttactccctcgttttctggactgcatccttaaataatgtgctcagatagagtgcatggggagtaaactgtagtggataccgttgtcacctaccccatatccatttcttctttgcccattcctaacagaatcctgatattattcacctttctaccttattcccaacttcagaaaggatccttaagtcattccacacattgcattcctttggcaactgttactggtcaaggatggacatacgatctaagttggttcactcagactgaagggaaggacttccatggcacgttcagggaagactttctctttttctctcactggagtaagtgagaaaggtgttgctgggggctcttctgtaacctcagactgagggacaaagcctgaggataaagcctgctcaccaaggaaggcggagcagagaaacgggaagaacctgggtcttgatgccgttgcttagctggtgattgcactgtggctggggcctgtcctacctgagctagggactcagataggatggactttcttactgaatgagccagcttcagttttcttttctgttacttgtaaccaaaagcattgtaacagataggtcttctgagtcactgcatgcctgaaatacctttcttctactcttacacttgattggctgagtatagggttccaagttgaaaatcattttttctcctaactttggaggcatctcttctagtatgcagagtaacaaatgcaacaaatgcctgatgccaatcttattatggttcttttgtaggtgcccttcttttctcttccttccctggaagtttttaggatttcgtctccttatttttagtgtcctgaaatctcatgagaatatgtctagagttgtgtcttgttcactcgttgtactgtggtcattcaatctgaatacttttgtcaactcttttttttaaaaaaaaattactaatttacatgctttcattttctctatggggactactgtttaactttggacctcttatattggtcttctgtcttctctcatatttttcatttattgggcggtggggggtgctctgaattttggaagatctcctgcatttattttctttttccttttttctttttttttgaggcagagtcttgctctgtcacccaggctggagtgcagtagcctgatctcggctcactgcaacctctgccttccaggttcaagcaattctgcctctgcctcccacgtagctgggattacagacctgcaccaccacgcccggctaatttttgtatttttaatagagatggggtttcaccatgttgccaggctggtctcgaactcctgacctcaagtgatccgcccgcctcagcctcccaaagtggtgtgagccaccgcacccagcctcctgactttattttctatcccttctgttaaattctttatttcagccaaacctttttttttttttttttaacttactgtgaagcctgtgtgcctactgcctagattagacaattgttaacattttggcgtattttcctggtctgtatagatagggtgcatttttatacctttttgctcaccatttaaaaggaactcacagatgtcacgacatttcacccctaagtacttcagtatacatctcctaaaaataaggacattttccaatataagcacaataccccgatcacatctttaaaagttaacaataattctctaatgttatcaggcacccactttaaattcagatttcctccaaatgtctcttatcgctgttgaggggctccaaagcaattaagatttatacattgcatttgaatatgcttcctttgtctcttatttatttatttattttattttgagacagagtctcgctgtctcccaggctggagtgcagtggtgtgatctcagctcactgcaacctccgccttccaggttcaagcgattctcctgcctcagcctcccaaatagctgggattacaggtacgcaccaccacgcccagctaacttttttgtatttttagtagagacagggtttctactaaaccatgttggccaggctggttttgaactcctgacctcaagtgatctgcccgcctcggcctcccaaagttctaggattataggcgtgagccaccatgcccagcccctttgtctcttttaacaagaacagcctacccacctctccttcacttgtgatactgactttttgaagcagtcagcccaattgtcatctagaagggcccacattttaagatacatatttttagagatggcgtgtcactatgttgcctaggctggccttgaactcctggcctcaagtaatcctcctgcctcagcctcccaggtagctgggactacaggcttgtgccaccacgactagctggcccacattttagatgtctctcttttcttgtgatataatttaacttgtttgtccatatatattacttgtagacaagaagttaggtctacaggcatgttcaggttaaacattttgggcaagaatatttcataggcagtactgtgtacttcatatagcatcagctcaccaggcacttaatggttggttaccctgtggtttgtgatgctacgttttaacacttgattaaagaaggaggtgactgccaaatctccccattgtagacatacagttttcctgtggtaattgatatataatctgtgatgtgatgctttggcaccatacaaatatcctattgcccaacagccatttgcataattattttagcattcattgatccttgcctgaaaccattattacattgggggttgcaaaatgatagtttttttaattgtcacctcttctacatttagtactgtcattcctctgtaatgaattttccctcatcaaataaggaggcattatatttcctcctaaaaagacagtatagatgcttaatctttgcctttattacatttcagagtaaggagttggtagaataatcacctcaaatggtggcaaaatatttgctgttgtgtttccttttctctttcatgtcaatatggactcatagggatttatttattaaatgttttacaattcaaattgggtcaacaagagtcccttcatgttggttcctatattctcctggcataccctcattaattagtctttgagcaatttcttgttttctggcacaagatattccatcccaatatgtgcttttcgtgtcctagaactgattccaaggagctctggttccttatagtggcaacggtatttagaatccaacatgtgggtactaaatgtgctgattcttactggggtaacattatatctaggcactttcagaggacatcgctagaaaatatattcagtttttattttttatttttaatttttttgtagagacaaggtctcactatgttgcccaagctggtttcgaactgagctcaagcgatcctcccacctcagcctcccaaagtgctgggattacatctgtcagggcaaactgctggtaaatattttcacaaaagaaaaataaaaaaaccaaagtgctgggattacagatgtgagccactgtgccctccattttttttttaagtcataaatacataatgatgtcttctatggcaatttaacattacagggttcttccttaacttttttttttttttttcttttttttgaggcagggtcttgctctattgcccaggctggagtggtgcagtggtacaatcctaattcactgcagcttcaaatgcctaggcttcaaacaatcctcctccctcagcctcccgagtagctaagactacaggtgcatatcaccatgcccagctaatttttaaaaattttttgtagagatggggggtctcgttgcgttgcccaggctggtctcgaactcctggcctcaagtgatcctcccatctcgatttcccaaagtgctgggattacaggtgtgagccaccatgcctggccaacttttatttgatctgtatatatcttttccttacactgaaaatgttgggtcttactaatgttaacatagttacttatttgctttatcttgtaatagacataaaattacaaaattataataccaatattacgataaatagctgggcatggcggcgctcgcctgtagtcccagctactcaggaagctgaggtggagggactgcttgaacctaagagtttgaagctgcagtgagctgtggttgtgccactgtactcctacccggacaacagagtgagtggggggaaaaaaaagaaataatggaagatccagagaaagccccaaatatttaaaaattaaacaatacactttgcagcttcctcacctctctcagccttcatagaattgaagagagttagggccttgcactagattaggctttgccttaaggaaatgttgtgtttgatttgatcttttatccagaccattaaaacttccttaacgtttattagtaataaggctatttcactttcatatcatttgtgtgttcactggagtagcacttttagtttccttcaagaactttgattcacaacttggctaactttggtacaagaggcctagcttttggcttctcggctttcaacatgcctctcactaagcctgatcatttggtttttggtttaaagagaaagacatatgactcttccttttacttgaatgcttagaggccattgtagggttattaattggcctaatttcagtactgtcttgtccaagggaatagggaggcccaaggagagagagagagatgggggaacagctgattggtggagtagtcagaatatacacatttatcacttaagttttgccatcttttctttttctttttcttttttttttttgagacagtcttgctctgtcacccaggctggcatgcagtggcatgatctcagttcactgcaacctctgcctcctgggctcaagcaattctcctgcctcaacctcccgagtagctggtattacaagcgtgcgccaccatacccagctaatttttatattttttagtagagacagggtttgccatgttggccaggctggtctcgaattcctgacctcaagtgatccacccgccttggcctcccaaagtgcggggattacaggcgtaagccactgccgcctggccaagtttgccaccttttttattttttttattttttgagatggagtctcactccatcacccaggctggagtgcagtgatgcaatctcggctcactgcagtctctgcctcctggattcaagcgattctcctgcctcagcctcccgagtagctgggactacaggcatgtgccagcacgcccagcttgttttttgtatttttagtagagacggggtttcaccatgttggccaggctggtctccaactcctgacctcaggtgatctgcccggctcagcctcccaaagtgctgggattacaggcgtgagccaccccgcccggccaagtttgccatcttttatgggtgcagtttgtggtgccgcaaaatgatgatagtagtaacatcagagagcattgatcacagatcaccataacaaatataataatgagaaatttgaaacattgtgaaaattaccaaaatgtgacagagacatgaagtaagcacatgctattggaaaaatggcactggtaaacttgcttgatgcagggttgccacacaccttcaatttgttaaaaactcagtatctgcgaagtacagtaaagcaaagcacaatcaaatgaggtgcgcctgcatattacaaccaagaggcttttcgcagaaacacgagtgtgcttcaacattcaaaaatcagttggtgtaattcaccacattaagataataaaggaggccgggtgcggtggctcacacctgtaatcccagcactttcagaagccgaggtggacagatcacttgaggccaggagtttgagagcagcctggccaacatagtgaaatcctgtctctactaaaaatagaaaaattagccgggcagggtggcacgcacctttagtcccagctattcgggaggctgaggcaggtgaatccttgaaaccaagaggcggaggttgcagtaagctgagatcacgccaatgcattctagcctgggcaacagtgagacccagtatcaaaaaaaaaaaaaaaaaaaaaaaaagataataaaggagaaaaaccatatagtctattcaataaatacagaaaacgcatctgacaaaattcagtgccctttcatgataaaaattcagcagattagaaatagaggaagtgcatgtatgaaagagctacagatagattgtacttaattgtgaaatattgaacatgttaccccgaaaatcaggaaaaaggcaaagatgtccactctaaccacttctattcaacattatactagaggtcatagccagtataatgaggcaagaaaaaacataagaggcattaatatttaaaggaagtaaaactgtttctatttgtaggtaatgtcgaaaatgtgaaagaaactatcagaacctgctagaactaaaaagtgaattcagcaaggtctcagggtacgagatcattcaaaaactaatcagaaatgaaatttcaaatgcaatatcgttaggaataatttaataagaaatgtacaagatttacacgctgaaactgaaaatgttgctgaaagaaattaaagacctaaataaatggaatgttgtaccatgttcatcagctgaaagactaagtgtctttacagtgtcagttctcccttcattgaactgtagattcataaccccagtcataactgcagggttttttttgtagaaattgattgtaaaatgtatatggaagctgggcacggtggcttatgcctgtaaaccagcactttgggaggctgaggcagacagatgacttgaggtcaggaatttgagaccagcctggctaacatgacgaaaccccgtctctacaaaaaatacaaaaattagccagacatggtggcacacacctgtaatcccagctacttgggaggctgaggcatgagaatcacttgaacccggaggtggaggttgcagtgagccaagatcatgccactgcacgcccgcctgggcaacagagtgagactttgcctcaaataaataaataaataaaacgtatatggaaatgcaaaggacctagaacatccaaagtaaacttgaaagagaacaaaattaaggggcttatgtgatgtgactttatagtcatttgatttttaacagaggcaccagaacagtccggtgcgggaaaggaaagtcttttagcacgtgccggatgatggcaaatgacatccataccagacaaaaatgaaccttgaccttaccctaaatattagtttcttagagttgccacaaactaggtggcttaaaaccacagaaatttggctgggtgcggtggctgacgcctgtaatcccggcctttgggaggccgagtcgggcagatcacctgaggtcaggagtgcaagactagcctggccaacgtggtgaaactttgtctctactaaaaatacaaaaaacttagtcaggtgtagtggtgcacacatataatcccagctagccaggaggctgaggcaggagaattgcatgaacctgggaggttgcactgagccaagattgcaccactgcactccagcctgggtgacagagtgagactccgtctcaaaacaaaaccacagaaatttgctgtctcataattccagagtctagaagtccaaaatcaactgtcatcagggccatggtctctgtgaaacctgtaggggagtccttccttgcctcttcctagcttccagtggttggcaacctttggcattctttgatttgcagctgcattacttcaatatctgtcttcctcatcacacagcattctccatgtatgtctctgtctttacatggcctccttcttgtaagaacaacagtaatattggattggggcctgccctactccagtgtgacctcaccttaactaattacacctgcaacaacgctgtttccaactaaggtctcagtgtgaggtactgagggttaggacttcaacatatcttttttgggggacatagtccaacccatgacactacttcacaccatacataaaaattaattcatgagagattatagacctaaatgttttaaaagctaaaaatataaagcttctgcaagaaaacataggagaatatctgtgcagtccaaagaataaggttttttttaaacacaatttcactctgttgcccaggctggagtgcagtggtgcgatctcagctcactgcaacctctgcctcccgagttcaagcgattcccatgcctcagccttccaagtagctgggattacaggtgtgcgccaccatgcctggctaatttttgtatttttagtagaggcagggttttgccatgttggccaggctggtctcaaactcctgacctcaagtgatctgcctgcctcggcctcccaaagtgctgggattacaggtatgagccaccgtgccaggccaaaaaaagatttattaggatacatgaagcaatagctattaaaagaaaaaataaattggacttcattaaaatttaaaacttttggtcctcaaaagataccattaagaaaatgaaaagacagagctgggcgtggtgaggcttgcctgtagtcactactgggtacttgagaggctgaggcaggaggatcacttgagcccaggagttctaggccaacataggcaatatagtgagacagtgtctcttaaaaaaaaaaagaaaaagaaaaaacaaaagaaaataggctgagagctgtggctcatgcttgtaatcccagcactttgggagtacaaggcagatggattgcttgagctcaggagttcaagaccagcctgggcaacagtgaaatcccatctctacaaaagatacaaaaaattagccaaccatggtggcgtgcacccgtagtccatagtcccagctactcgggaagcagaggcaggaggattgcttgatcccaaggaggtcaaggctgcagtgagctgaggtcgcgccaccgcaccccagcctgggtgactgagtgagaccctgtctcaaagaaaatgaaaagacaagtccaccaagaaaacagttgagaccagtcatagaaaaaatagaaagtcatatctgacaaaggatttgtattcagaagaattcctataactcggtaataaaaagacaacctgatttttaaagggtgaaaatattttaatggatacttttttttttttttttgagacagagtctcactgtgtcacctaggctggagtgcagtggtgccatcatacatagctcactgcagactcgaactcctgggctcaagtggtcttcctgcctcagcctcctgcgtagctaggactacaagcacgtgccactatgcctggctaatttttaaattttttgtagacatgggctggtgtgtgtctgtgttgtctaggctggtcttgaactcctgggctcaagtgatcctcccacctctgccccccaaagtgctgggccaccacgcctggtgtggtgtcaccagagatgagccaccatgccctgcctgatacttttcttttatcatctgtttatttcttgtttatgggtgtttctgttctgattttatgactattctgtattctaagatttctctgagaatattatttgtttcctctaaggacagacttggtctctcttccatggggctggttcttgagccgccagggatggggggaggacctgggtagctgctgcgctgccccttctctgctgtggtggagtggcccgttgcctgcggggtctgtctctgaagggtggtttggagaagttctgtggaggcgaggcaggggtcagctcttgccccatggaccctcagagactgggaaaaggtaggcatcacctgggctgctgccagccacatcaagagcctttggggtgggtggggtgggggccggggaagggaaggttctagctgttgatttagaaaagacccattgatttcttgcctgagggaagaagtggcaccttgccactccaagtttgctctgctcaccagccccaacagcatcagcctcacctgggagcttattgaaggtgccctgccccaaagcttgtgggtcgggatctggcagtcagcagcccccaggtgttgcacacatgacagcactgcttgcccctcctctcgtctggtctggtctggtctggtctggtctggtctgagagcttctttggggctctgacaggtatacaggctctcatctgctctacagctctcttgtagtacattcctctctgttccattagtcaacatgttcttgcctacttccagcatctagaaatttgctgagtgtatcttatccgttcagaggtcctctcctgctattgcctctgttagaaatttcttccctttcatatgtctgtacttcggtttctttgaggtttgaagggtcaagtggcaattacatgtaggcagttggccatcctctggtgaaggctttaaagcccaggaataacaagatccattatgtctaaaactagcaaaaaccctacctgtcacatggtgaactgaattagaggtgatggggacagaagccagattggagtgagtggaaggtgagggagtggagattgggtatagacaactctctttaagaagttttgttgtgatggtgaccagaaaaataggagtggggtagagggggatgagggtgtttttcacgtgggtgaatatgagagcatgtttacatccttctgggaatggcccaggagagaggggagcgtgagaaggaggaaatggggacctggaggagcagactccttgtgtggaggggggaagcggcatctagagctgttgcaggaggtgggctttgagtaaatgcttcctctttggtaaagacggggaacgggaacggtagaagttgcacggaccctttgttaaagctcagaagctgagcgagaattagagcttaagtttatggagtagtcagaataaagtacccctaactgtattcttgcacagtgcaggaagccaggggtctgaaatcaagatgttgcagggctccattccccccagagcctctagcatggatccttccttgcctcttccagcttttggtggctgcctggcagtcctagactttccttggcttgcagttgcattgctccattctctgcttgtgtcttcacatggccttctctgtgtccccgtattcttctctggatgcttgtcactgtattaggcccaccctaaatccaggatgatctcatatcaagatccttcacttaattacagaagcaaagaccttccaaataaggtcagagccacagggtctgggggttaagacatacacctaactattcggggctaccatcgaacccctgtagaagcctgtccatttccaggatagcagagcccaaggaagggccagaagtccccccaaaacagttgtttgcattcaccagattctaagctataagcagatgggcagtggcagtcggtcctaatccatataccattggcaacaatagtttagttcactgtagacataatgagatgcttatcttctgctaagtagtcctcatggtaacagccatattactcctggctttgagtgacagcgctgtgctcttgtctggtgcccatatacttcagcagctggaaacaagacagtgctcatgattcaccggaaagtttctgtagttaaaatcaagtgatcccttgagtctattctaatatttgtctgtaccatgttctgtgacgagacatggaaacaaaacattaagaagtgaaagtatctttgattatgctcttgaagacaactttttgtttgtttgttttgtttgagacggagtttcactcttgttgcccaggctggagtgcaatggtgtgatctcggctcactgcaacctccgcattcccgggttcaagcgattctcctgcctcagcctcccaagtagccaggattacaggcatgcaccaccacgcctggctaattttttttattttagtagagacggggtttcaccatgctagtcagactggtctcaaactcctgacctcaggtgatccgcctgcctctgcctcccaaagtgccgggattacaggtgtgagccaccgtgcctggccgaagacaactttttaaagatgcatatgctctgggctgggtgtggtggctcacacctgtaatcccagcactttgggaggccaaggcgggcagatcacctgaggtcaggggttcaagaccagcctggccaacatggtgaaacaccgtctctactaaaagtataaaaattagccgggtgtggtggcgggtgcctgtaatcacagctactcaggaggctgaggcaggagaatcgcttgaaccccagaggcggaggttgcagtgaattgagactgtgccactgcactccagcctgggcgacagagtgagacttggtctcaataaataaaataaaataaagatgcatatatgctctgaaggctggctacattttattttttctcaaacaacttttacagtggatagtgctgtaaaagttgtttagctctggtcattttatcttttttgtgatctgcaaaaggagatccttttccttttcactgcctctaatacccaactccaatactcctttgacctcacaggcacttagaatccatcagtggctccatcttttctcagacttcacctccttcgtatccttattcctctcctttgtagcttcagtgccagtcagacgtcgttactccctggcacactacctcagcccttcggcactttcttgctttgttatattcagtcgacaaagccccagcctcatgaaattcagtcatgtctgccccatgcctgctccgtcctgaagctgaatgtgactccttcattgattccccctttaagttcatgtctaccccaggtaaacttcttgccgccaagcccacctgcatactgcagttccccggtctctcctagcccctcccaccctcctcatcagctgtcacacctccttgcagctgatatcttagttcccagagagcacagaagcaagctcaagagagtgtctacaggccagcgtctactccttcgctctgcctccctcatgctgtcacggagcgcctgtcccaggccctcactcctgttctaaggcatctctccagtcctctactgcactctcccccatcagagattcctccctcgcctgccctagaaacttgttgctacttctcccaccttgacaaaagctgctcccaaccccccacctgtctagcatctctgttttcctttaccagcaagactccagtccctgtctccacaccctcttcaaccttctccagttgttcctttgctgccacagctctgccaagctgctccatgaggtctccagtgatgaccttcatgttgttaaatctgggagctgcttgtcacttcttttcccagagctgtcgtcgtcagttaaccccaatacccatacgagacaatcctttccctcccttgagtctctgcactgatgtgcaccttctcagtgcaaaccacagcttttgtctctttctagctgaatacatgactgactgtgcttatcttagctgtcacccctgctggagcagaagctccacaggacaggattgtctccttgattcacagatgtagctcaagctcctagaacagtgcctggtgtctgtgggtcctcaggaagtcctaggtgagtgtgtgaatgtctgtcctcctcggtcttttctgtttcgcatgtgatgttggaaggcctcaggttcaggcttttcttctccaccctcactcccgaagtgattccgtccagcctcatggctcccaaatttatgtctccaggctgactgggtcacgggaactccttatcctccctagaccttctctttccctggtcttctcctttccagtaaacagcaactccaactcctgctcctcaggccagaaacctggcgctggttacctcatttgttcacaaatactgttactccacctgcaagatggatacaaaatctcatgagttcccctgcctccatggcccccaccctggtccaggtgtccagcttccctgcctctgcccttgccccctggttctttgtttagtcctgcaatattgtgctcttctgttcagaaccctccagtgggtccctgcttgctcagagtcacagcccaacaggatcacctctcttgccactctcccaccactcatgcactgcggcctcactggcctcctggctcctccctggaccctccaagtatgcccctgcctcaaggccttgacctctcctctgccctctgtcccaggtatcacacatgtctgctcaagtgtcaccttcccaatgtggccttccccgagcacacccatgtctgtaagtcaggcagcctgcctctgccccaccagttccccctgcctagcataggacttgtcaccatctgccacaagctgtgttactgcttggttttgtttgtgctctcccactcccttcccctccctccctctccccacccctatagaatctgagtcccatgaggacagagatttttttttttgcctcttcctcaatatatccccagtgcctagaatcatgcatattttaatttattgagtgaattaacaaataaattctgcagtgggacattgctctaaggttttgtcttataagagggacagaagaacatgcagcctgctctgctgttggctccttagcttctccatggctaacaggaacaatattgtttatgagataatcaaagccatagtcatgagttagaaggtacatataaaggcaaatatgtggagattgagttactttggcgggggcggaggggtgtgtagttatctgaaaacatggaacaaatcaatgagagtctaaatagcacccacatatttgcccctcttttaaaacatacctcctttatgagtgtagaatttaacagcacagtttcccagtgcagctttgcgaaacaagagaaatgaattttaaaggctgtcaggtgcctttgcaatctgtggcttagtatttgtgtaacaacatttgtgttttgccaacagatgtactgcttaaagtacccatgagaatggcctctgtggttttctactttctcggatggaaccttaggaactgattattgagaagaggctgatactgcccacctcagctcccaggcaggcttcagggccttggttactactcctttgggccctcactgacccttgcagacgtcttttgcaacctctgtagccagaagagacaactgctttctggcatgttgctctttccctaatggctttatgagcttcttgaacaccaaagcatgtgtgacttcctcacgccttcccctgtatagtatagcacccctaactgtatgtgtaaggagaaggagtgagcaattgatggcgtccccctggatctccaagggaatgggaaggggcagggtttctggattcagtcatgtggaatctggtcgttggtgtctaaatgtgcctgttacttgtgcccaatgtccaggttcaccaggaggcttagcctgctcatttccctgctagtagctatattttgggagagcattttttatgctctaattgaactttgtgggtctcagcaatttgaacaatgttttgtttttcttctggtcaggttacaaaggaaagaaaaggaatctggtgttgtaggaggtggtgtgttgtgtaattacttgttttttttttttaagtttttttatatttttgcaacaaggcaagttttctttgaataaataatgctgggagcttatcacatagaaggcatatgtgttgtactcagtacattctgaattatctgggtttatttttatctcttgaattcacttataaacaattcaaaggctgcttttttagctaacagaaataggaagagaatctcagaatctgttttgtcattttttcaatgggttgagttatagtgattatgctaactcggtggaaaagcagtgtagtgagtaaaccccacatacggcatatcatgaacattttgttgcttttttggcttctgaccatcttcatacctttttttgtgttaaaagtctccccattgtgtatatcttagtaagaggcaggtggaccctagtttctacctaagaaaacctgaagatggggttgggggcctgtggtgtacttccttctcatgctgtccatgaccactgcagtggctttgtaaggatccaggacccagggcccctcagtgggtgtcttccatttctcaagattgcctcttggttgtgagatgacggttgctgctctagtcattgcatccactcctccaggtaggaagaaagaggtcataggggaaaggcaaaatggcacttgacatcttaacttctaggcccattcaatatttccatttccatcttcacacccatcatcttgtcctagggaacaaacagcaccagcagctcagtagctataacagcaattattatttctcacacatgggtctgggtcagctgcaagatgggattcagatctgttctcaagcctgtcgttccaggacccaggagggagaagcagctgccaggggaagtctcttcgtaggcggaggtcaggagtccaagaggagtgagcagagtcacagaagcctcttaaagcctcttcttcccccatcccatcaacacgtgagcaagcccagagtcagtgggtgggaggtgtgctccgcccatagtcagtagaacaagagcaagcttgaaagagaacgatgaacaggagtgcactcggccactgtctccttagccataacgtagtcccatggtctgctgggaagcggggaataactctccttagctgagcgcagggtctcattagtaaggcagatggagaacatggatgttgggggacaactggcagtgcctgccacaggggaatggatatattccctccccttgctctctggaaactaggggatggcgatgaagcctaggtttggccaaacccattctgccttcagggactttgactcttgagggacagtgagggattagtcatggtggtggcagttgagtcacaaaaccagcagtggtggctaatgtccagtgatgacatgcaacagtgcccagggtgggtgtcccaaccagcaggtccctgcagtataaccttggctgtgtttgcagtggtgcagcctctattcctgctgcttttctgagcctagttctctagttctctctccatttccagatctgctgcccaagaactcctttgtgattgaatttaaccagagttgatttctgttgcttgaaactcaggaccttgatgcagtgtgcagggtctgggcaaggtaaaaacacactttcatgatttcgcctcaagtatagtagatgagcttaggctttttgagccaggtagccttgggattaattctcagctcttgcacctagcaggtgacctcagcaatcaagtcacttgccctccttgagcctcagtgttgccctcagttaaacattgctctcgtgtgttgctgagcattcagtgagattgtatataaagtgatcattgtgaaggtattgggacataatttgggaaagcgtcctggtctaagcttttgattggctctccatcatttgggtaatgggatagtgatttaggagtatcatagcagctcaaggggcccttctggaaagggtatgaggaaggtcagggacaagtctgaaatgaatcatcctaggcttaatgcctgtgactgggcagtgggtacaattatctcaggctagtcagtagtcatttattgtgagaatacatgggcagattttttaatttccttctcagtctagacttgaatgcaaacagttcttattgctaacttaccactagtcaccactaatgaacaaagactatgaacaggaaattcataaaagaagagatacagatggccaatgaagataggaaaagagttctgcctgctggtaatcaaagagatgcaaacgagaacaaaaatgatgccttttcacctaccaaatttgtcaagattaaaaagaaagcaaagagccagcgtcagctgatgttcatacctgcacctgctcggtagcttgctaatgttctgcctgctccacacgccaggccagcctccacggcgcagccaggtgaggcctttccttgtatacaggcacgtttggattcactgttgcataagtgagacatgtgcatgcttcacaattcaggaagtgcaaactccagagtgatgcaaggtctgagtgtccctgctgccctggtctcccagctgcctaggcctctcttcagggaacggctgcatccagggtcttgtctgtgtcttttgaggtgttctatgtacacgcagacacatctaaacctatttttattttccctgcacctgcttgggctactgtaagctgttaaatttttttttctaggaatttgtccattttgtctgactagcataaagttgttcatgttatagtttatacatttgcaacatctgtaattatgtctgctttttcattcctagtgtttgttgtttacttgtaccttctcccgtttttccttgtcttggtaaaagctcattaggttcattggtcttacaagaagcagacatgtaggcattattgccctgtattactctgtgtctcttttctagttcattaaattctgcttttgcttttatctttattattttttctatggtcttagagtacattctctgtgttttgttgttgttgttgttgttgtttgttttttgttttgagagagagagtcttgctctgtcgcccaggctggagtgcagtagtgcaatctcagctcactgcaacctccacctcctgggttcaagtgattctcgtgcctcaacctcccgagtagctgagatttacaggcatttgccccacacccggcaaattttttgtatttttagtagagatggggttttggcatgttgaccaggcgggtctcgaactgctgacgccaggtgctccacccgccttggcctcccaaagtgctgggattacaggcatgagccaccacgcctggccctaacttcttaagttataaatttggttcattgatttttctacccttttttcaaatgtaaacatttaaggctaaccctctggaactacttcaactgtatctagcaagttctgatagtattgtcactttaagttagcccaaagatattttaaattttctttgtttcttcctttgactcacatattattttaaaatgtgtttttcaatttccaagcacatggctttgggtttgttttttttttttcctagttgctctagaaaaaaaaattgactgcatgaggtggctcatgcctgtaatcccagcactttgggaggccgaggcgggcagatcacctgaggtcaggagttcgagaccagcctggccaacatgccaaaacctcgtctctactaaaaatacaaaattagccgggcatggtggcacacacctgtagttccagctactcgggaggctgaggcaggagaatcacttgaaccgggaggcagtggtcacagtgagccaagattgtgccagtgtactccagcctgggcaacaagagcaatactccgtctcaaaaaaaaaaaagaaaaaaagaaaaaatcaacttctaactaaatggcactgtgatcaaagaacttggtctgtgtgacaccagttcttgcagttggttgagaagtgctccatgacacattatccacaaccagtggacagaatatgtcaccaccaagcatgggtgcaggattctacatatattcattacctctgtcttatccgtttgttgtgaaagtattttctcttcttactgtcattttgtttacttgatttatcaactgatggaatacgtgttaaaacctactgtggtgatggacacatcagtttctccacagagtttggtcattttcattttattatttattttgaggccacattttcagttttagatacagtttcacattcctggtgtattgaaccctttggtattatgaagcgaccatactaatatgttatttttttttaaattattatttattttatttatttttctttcttttttttttttttgagacagggtctccctctgtcacccagtctggagtgcagtggtgcaatctcagctcactgcaacctccgcctcctgggctcaagtggtcctcccacctcagcctcctgagtagctgggattacaggcttgcaccagcgcgcctggctaagtttttgtatttttagtagagacagggttttgccatgttgcccagactggtctcaaactcctgggctcaagcagttcaccagccttggcctctaaaagtgttgggattacaggtgtgagccaccacgcccggccatcccagttttttattttcctcctttctgtgtctttatgcatcagtgaggtggagcttttgaaaatgtcagatagctagattttttttttttgagacggagttttgctcttgttgcccaggctggagtgcaatggcgtgatctcggctcactgcaacctccacctcccaggttcaaaacaattctcctgccgcagcctcctgagtagctgggactacaggcacgtgccaccacacccggctaattttgtatttttagtagagatgtggtttcaccatgttggccaggctggtctcaaactcctcacctcagctgatcacccgcctcagcctcccaaagtgttggaattacagacgtgagccaccatgcccagctgatagctagattttttttttttttttttttttgagacggagtcttgctctgtcgcccaggctggagtgcggtggcgcgatctcggctcactgcaagctccgccccccgggttcatgccattctcctgcttcagcctccagagtagctgggactacaggtgcccgccaccacgcgtggctgattttttttttttttttttttttgtatttttagtagagacggggtttcaccgtgtcagccaggatggtctcgatctcctgacctcgtgatccgcccgcctcagcctcccaaagtgctgggattacaggcgtgagccaccgcacccggcctcgagattttttaaaaaatccattgtctgtttcgtcctttaacatctatttgatttctgatgtatttagattcatttatagcatatttgtgcattctatttttccatattttctgttcttttaaattttccttctcctttcttgccttctcttagacttttaaaaaaattgtagtaaaatacacatcacctaaaatttaccatttttaaatgtacagttcagtggcattaaatacaaattggaggccaggcatggtggctcatgcctggaatcccagcactttgagaggctgaggtgggaggattgcttgaacctggaggtcgaggttgcagtgaggtgtgatcacactactgctatagcccaggcaacagagtgagaacctatctaaaaaaacaaacaaacaaacaaacaaacagattggcatcacacagtgtgtgtgctgctgtgctgtgctgttatcatttaacattaaaacataaacatcagcactgttatggactgaatgtttgtgtcccccaaaattccagtgttgaagctcaaacctccaatgtgatgttatttggagatggggtatttgagaggtggttaggtttagatgaaatcaggagggagggtgggtttcgcatgatgagattagtgtccttataacaagagacagcagagagcttgctttctccaccatgtgagtatgcaatgagaaggcagccatctccaagtcagaaagagagccctcaccaggggctgaatgtgctgacaccttgatcttggacttctagcctccagaactgtgagaaatttcagttgaataggccccccagtctgtactattttgttatagcttgagcagactaatacacccatgttatgaaaagctataaacatccctttaaaggccacctaacgcgtcgtattacctcatgcatcttctctgctgagctttccaaaagagtggcttaggctgggcctggtggctcatgcctgtaatcccagcactttgggaggccaaggcaggtggatcacctgaggtcaggagttcaagaccagcctgaccaacatggagaaatcccgtccctactaaaaatacaaaattagctgggcgtggtggcgcatgcctgtaatcccagctacttgggaggctgagccaggagaatcacttgaacctgggagatggagggtgcagtgagccgagatcgtgccattgcattccagcccggccaacaagagcgaaactccatctcaaaaaaaaagagtggctggccgggcgcagtggctcacgcctgtaatccccgcactgtgggaggccgaggtgggtggatcacgaggtcaggagttcaaaaccagcctggccgagatggtgaaaccccgtctctactaaaaatagaaaaactagccaggcgcagtggcaggcgcctgtaatcccagctacttgggtggctgaggcaggagaatcgcttgaacctggggggcggaggttgcagtgagccaagatggtgccactgcactccagcctgggtgacacagtgagaccccgtctcaaaaaaaaaaaaaaaaaaaaaaaaagtggcgtatgttcccggtctccacctctcattcgccagcccctgtgaccaaacccctgggattagatctccatcgggtccctcccctcaccctaacctcacatgcagtggttcctgagaagctgctgtttatctgatcacgggatccagcaggatctgagggctcattcactgaatctgtactacccaacaaggcaggcttgtccttacccacacttttcaggtgaaaacttaatcagattcaagcgtttatcttagtggcctcttcgtggtgtgtgatttccttcttgcagctctttactggctaaaactcttcactgggagttaaaccaggtgtggtccttgaccctcatcattttgtcccatctcctatgctgggctctgtatccttgtctccaagcagtctcgtgtgacagggaagttacctattattgtatggtcccctcttcttgtcacctctggtgtggcacttgttccatttcttgttcaatgaatgtgatttgtgaatgtgccacatctgtgggaggaaggcagttcgcagcaagagttgtagttcccttgctttgccctgagggccaggactttacactagatttttttgttgcattcctgcactcataaagtacacgtaaacttagaggtggtgtgttaaatgctagaacttaaaactgagttcagctaggctcaagtgccccacaatttttgtcccaccagacaatttcatgaatatctacagattgttccctcaatatgcctcaatattgaggcatattgatttggggagcacagacaagtcaaggttgatgtgcatccgctgaacatgatcttaagttgttgaagtaggtattattaatgaacgaacgtctattttagctccaagagcccctggtcttccagaagagactcccaatgatcttccagaagcagctgggcttcttttggtcctcccccacccaggtgcagtcccgttctccctgcctgggtgagtttgattcctctgccgtggaataggctaggctgctacctcttgagcctcttccaccaggccatccattaggtggcgacagagagcactaaaaggaactactatggaaataaaacttgttttgcttcttggggggaaaaaaaaagaaaaaggcttgtggggcgtgtgtgcattttagtcagattttactgtgcaaaacatttgagagatttctgccctctttctcccttccattcttctcaacccactgggcgccctaccacccctgtctccttcaagataaggtagatcagaagaccaaatagacaaatgccatgtccactgttttctgtcacagttgatagccataccagtcacccaagctggaaacccaacaggcccctgcccttcactgcccacatccaagggagccaccaagtcccacaaattgttcctttaactgtttgtccctcttttgtcttctgtcatcccttctaccgctgtcctggttcaatccctcatcttgctctgggactcccatgataacttatgatctttcctccacctctctatcttccacacaatccctatcatcaatctcattcccctgctttaaacccaagagtggcaccctgtgtttgagtgacatcagggcccctcatgtggctcctgcttctctttgtggccccttctgttgctgctgcttttcttatggacatagccctcagcagtccaggactgcttgtagttcctcccaggtaccatgtttcttgcactcctggcctttgtcattggctcccctgcccaagtccccttctcttctcctttccttcccctgtggccttgccttgtcgtgcttatccttgaagaccctgtcaggtatctcttccccaaagagccctgcctaaccaccgcccccctcccccccgcgacacacacacctgggttaggccctgcctctccacgcctgtgcctcctgccaagtcctcagaggtctctgatcccatgtgcctccaggcatggcatagggggactgtgacacagcctctcggcccacagacccctgattgtgggcttgctcactgccccagtcagtcctcttattgaggattccgtgccagttcctgactccagcacacacacgcatgtaggccgccctcctagtgcctggctccttccctgtctcttctgccactcattcccatggtcgtatcctggagttggtcatctctggaactccacccacggagttctaacttagctctgcctatgatgaggacttactgtcttcccagcttgcagtgtcaaccactgtttgatgcccctgggactccattggtcttccctcctcttgtgaactgtgcccatcaccagacgaacttgttttagaatttaccatcgtaactgagctcccttcagcgcatacctccttggctcctgctcagtctctgtttctccttttagccaaactctctaagagttctctccactcatgggccctcttccttgcctgctgctccttgctcagcttgctccatgaacacttgcttttccacattccatgaaataatcttaacagtcatcagtggctgtcactccttctcagccctttccttgtgtctcttctggtacctcatactctccaggtggccatctcacctcacatcttgaaccctctgggtttgggagaattctcacctcacgagttgatgggaggcctggcgacctctgattgtagtcactgcaaatgccagatgcttatttgcctagcttccctttcggtcagggcagcagttggcaaacggtatctcaagggccaagtccggcccactgcctgttttcgtaaatgaagctttaccaggacccagttccaccccgtcctttgtgcattgtccaagactgctctcctgtacaacagcaggtgggctggttgtgacagatactgtctggcccacaaggtggaaaatactatctggccccttacagaaagaaattacctgagttctacacgagggtgtaggtatgtaccctggcctctgccagtcagactcacatgctaggaggagcagggccaggcaggagagccgtgtctcctggcattggggctgcaggaaagacgagctcctaggccacagtgccagtggccagtgctgctgccttgcagggtcgcacaggcagtgctggctgtttggactggcttggcagaaggatttgaagtattgttcctagccaactggactcaaacctgttcctccaaccctctagggattctcttatcacccagtagccttttccccctagttttaaaaattgcagtaaaatacacaaaagataaaatgtactgccttaaccatttttaagtgtacaattctgtggtattgagcacatttatattgtgcaaccatcaccacatgcatcttcaatagcttttcatcagtccttgtctgcataaatcagctagagttggtttctattgattgccaccaataatcttgacagatatgtctgatcttccttctctgcactgactcctctttctctgtctcctctgctgattctttctcctcatcacaactccaaatagcagggggagggttgtttacacttatattcagcacgccctcacgcactcgcctggctcttcagacctctcccctgaactccagattcatacatccagctgccctttaggcctctagaaagctaaatacctcagtatcaaaaacatgagaaacggaagccagagtcctggatctctcgccctttcgctgtcccggtgcccatgcccttcagggatggcacctagaccagctccctgcatccctgcctagactctgcagtagtctcacgtggcagacccggaggtcactctcctctctggatgccctgcggacactccggttagcctcagctgcaagagcctcctcacccaaggtcacgccatttccaggacagcaccctggtgactgagcgaggtaagggtacaaggcccttatagggccttctctttgacttcttcccacctccctttatggatgtcagttcctgatgaacatcttacacctcaaaccgtgacccaacatctgcttctgcagagcccccctgtggcatcttgtgccctcctgccccactccctctactctatatcttcccatagttagaatgggctttttttttttttttttgagataaggtctccctttgtcacccaggctggaatgcaatggcacagtcacgactcactgcagcctcaacctcctgggctcaagcagtcctcccacctcagcctcccaagtagctgagactacaggtatgcaccaccacacctggctaatttttatattttttgtagagactggggtctccctatgttgcccgggctggtctcgaactcccaggctcaagcaatcctcccgccttggcctcccaaaatgcaggattacaggcgtgtaccagtgtgcccagcctcagatgggctctttgaaaaatgtttattagatcaggttactcccttgagaaaaaccctctcagaataaaacccgaagtccattacttgaaagcagagccagcttcatgggcctttgtaactgcccatgggcttgctggaacccaggcttggtttaatactctactctcaccatctcaaaattcttaatttttgaacaagaggccctgcattttcattttgcaccaggctccacaaattgtgtaactgggcctgcctcagcagccacatggaacatgatccctccttgcctatttgagctcattctctaccattctctcccttgctcacctggctcccactgctcttgctcttcctggaacttgccataatgttgctagagtcagagccttggctcttgctgctcctcattggctggacccctctttacttgacctgctccctcaccactcacttccttcagatctgtgttcagatttcgtcttctcagagaggcttttggcccctgtccatctctctgaatttacctctgacctctcccccaccaccactgcgctaagctgcctcagaactttgtagacattctgtctggtcttctgatgtttcccccttggaagaatcccaaggtgcctgaagaatgctttctttatccttgaagttgagtaggttgactagagtctggcttgctattgagcattctttatcaaattgtcctgggaacatggtgtattctttcagtctgcagatgtagtcgttgctgtttcaggtcagctctcttatggatctttgacagcatcttctgttccatttgttgagttctgtacttcagggacacaaattcctcatgttggattgtctttgtctctcttccaatgctattagctttgccgtaattggtttagcttttgtctttttcatctgcattcactttgtctaatttgattttcagctatgtatattctgtttctggctgtttttcaatgtatttattagtttcataatgatgtgttttggtctgcagtttgtttctctaggttggaaatttgtcttttcatcttattctgttttatcatcccatctttgaactcttttattgggaacatgttcttatgaagttgtggggaatttttttcccttccttgtgtattctcttcttggtgggagactttgcctttctcgtgccatctccctccctgggcctcttttttttcttctggccataatatgtttgcctagttaccatgtcacttcttttcgtcttggctcaggcttggatggctctgcatagtcgttctgtttgctttgagacagtggaggaattcttggctctctcttcccagtttcttggcatcttctcttgctgttttcccctctgagctatcgcgtgcaggcttgttatcttgtatccggagagaatttgcacgctggagggagctgcagccatgtagtcttcagccctatctggattcttctctttgttctaagaactgtgttggatgtcttactaaggctcactctagctgcacgagggatgtgtgtgccatttccatggggatagggggcacctcagtctctgggtggttccataatctgtgtatacctaagagcagttgcttcccacagagctgggctggctcactgggcactttgccatttctcctgcacctcccagctggagtttctgggtctaaaaggaaaaagtgaaggactcccacttggttgcttctctccagcttactgactgcaaattcccagggcgttgcccgctccctagggtggtttctgggggacggggcaggagcctggctttgctgctgctttgtcctctggagtcttttctcagactgctttgaattacacccctttcctttgtgtgctgaaatcttcccttcacactctccttccctgcctttcttttgtgtcttatcttactaggactggaagagggcagttgtgcaggaggtctgcatctaattccctaatccatgtgagagtgctcctgttgtgtgctttgtgacatgatggtgagaaatactccctagagcagtggctaccagaaggaagccatccccccccctgcacacacacacacacacacacacacacacacacacacacacacacactccttctggctgtcctcagatgcctattctaggtaaatgtcagattccaaagaaaatccagttgagatcttttttctttttttgagacgagagtcttgctgtgttgcccaggctggagtgcagtggcacaatctcggctcactgtaacctccgcctcctgggttcaagcgattctcctgcctcagcctcccaagtagctgggactacaggcgcgcaccaccacaccaggctaaaatttttttgtatttttagtagagacagggtttcactgtgttggccaggctggtctcgaactcctgacctcgtgttctgcccgcctcagcctcccagagtgctgggattacaggcttgagccatcgcgcccggcctccagttgggatcttgactggaatgactggtgttcaatcattatagtttccacctaatttgtatttgtacacaggacagttactaatttgttggtacttgtttgatccccagtccctagagttgtttatggggtggagcttcagtccctgctgcttcccctgtggcagcagctggagtcagggtggggacccagggtgctgctggcagattcttgagacaggtagaatctcctctatattggtgtctctctctgtcccagcagtgcccaggaaaacctggccagcctgtcactgacctctccacctagggcactggtggttcaggtccttctatttgccaccggcaaaccgtacttctgccagtctggctcttaggcccagtttctctgatcttgcagattttcttgggctctgctacggaatcctcatacctccggcaggtccctcctttgcccatgtgtttaactgtggtggaatcgtgtgagagctgcttctctcgcatggatcccagccacaccacattctacagcggttcctctgaaggcattgatagagatatttcctcctgttttgcatttcgttggtcatttcagtagaatcagggtgaaataaacatgggggctcagatgtcagcattacgaaccaagtacgtcaggcaggctgatgtggactgacctacactagtgagacgcaagatgacgaaaacaagggcactcactccaagttactgatgagatgtttggatcaaatgagccagtccttaagcagagttctctagtaaaagagatctcctttctgccctttcttgttccccaaaatgtgttgccttcatggtgaaaatttattttggcagattttctcttctttgataaaagcagccaacactttgttaaaagtctgtgaaacttatttacatgaagtatgtaaaggtaagaaaaaaacattatcaacaagaaatggagaaagccagcagctgaggacagaaaagtcatgcacagtgtcagtgtctatggaaacaggccacttggaccttgaggactaggtatttggaattggaggtgagcttggcctggtgagtctctaaccacttgtgtgtaggatcagtgtgagaaccctgctagaatatagtggcagagatgcaaggggaaatcattggagaagttaccagggaatgatgagctaatctgaaaaaaatacatgtttctaagttgggcgtggtagctcatctgtagtcccagctacttgagagcctgaggcaggaggatcgcttgagcccagcctgggcagcacagcgagaccctatctccctaaaaaaaactttttcgttgtttagttttgggatttttttttttcctggtcttttttccccctttttgtgaataacgggatctcactatgttgcccaggcagatctcgaactcctgggcccaagcaatcctcctgcctctgccttcctaagattacaggtatgagccactgtgttaagcaaaaaaacttttttaaatgaaaatcattttttaaaagacaggctttccaggggagggtattattccacttatatgaagtgtcaacagtaggcagatttgtggagacaaatagattagtggttaccaggggctgagaggagtgggagtggggagcaactgcttaatgggtaaagggttgtctttggaactagagagtagtgatggtcgcatgacattgtgaatgtactaaatgctattaatgataaattttatgttatgtgtattttaccacaattaaaaaaaaaagatcaaatgtcctcagaatagccaacaaccttccacttggctaaatgcctactcattaaacttcttgaactaaattcctttctgattgtcatggttattgtgtcctgggcttcagagtttcacattcaggttggcttggtccagtctgtcatgtatcactataggtccccacattggcctcttcctcagacggacagcccatctatctgccggggctctgtgccacagccagatagacttgctctgagacagctgtgtgggctctgagcactggccaggcatcacaaaacctatctttatgatttagaataattggtggtcagctgctgttttaatgttgttgttttttttaatttagatataattcacataccatgaaatttactcatttaaagtgtacaattcattcttcagtataattcataggctcacagaaaaaattgtttaaaaataaaatgtgcaattcagtgtcttttagtacattcacagagttgtgcaaccatcgcctctgtgtcattccagaacactttcagcacccaaaagaaaccccagacacaggagcagtcacctcttattacccgcagcccctggcaacaactcatccacttcctgtctctatggatttgcctattctggacatttcctataaatggaattatgcactatttggccttttgtgtctggcctctttcactgagcgtaatgtcctcaaggttcatctgcattgtagcatgtgtcagaatttctttcctttttgaggctgaatgatattatatcctatagataatgaggttttgattatccacccatcccttgggaatgcatatttgggttgcccccaccatttggctgttgtaaactgtgctgccatgaacactggtgtacggatatctgtttggttactggttttggttttttgtttgtttgttttggttttttgagacaaggtcttgctctgtcgcccaggctggattacagtggcacgatctctgctcactgcaacctccacctcccaggttcaagcaattctcctgcctcagtctcctgagtagctgggactacaggtagcactcaccaccatgcccggctaaatttttttgtatttttagtagagacaaggtttcgccatattggccaggctggtctcaaactcctgacctcaggtgatccacccacctcagcctcccaaagtgctgggattacagacgtgagccaccgcacccggcatagttgtggctttttgagagtgtatggctaggagtaaaattgccaggtcatatggtaactccatgtttaacatttgagaaactgccaaactgttctccacagcaggaattttttaacctgtatgtggtgggcttgtgtttcggttttcattttacacatctataaagatgagatttgctgtatggcactggttgcctgtatttggggagggttctgcttttggttggcaagaactgcattttatttaagcttagcaaaacataactggtttctcgcatcttctcaaaagtggaggattaagaaatggactgcgaattcagagcagggcagctgaacctcaggctccacccttgtagccttcaagctgaacctcattctctcttgctccctggagaccactgagacactctgcctgtgccagtttgatttctcacatttttaaagggccaaagcttgtgtctcaaagtgctatagcctttattgattcatgcagagaagcctccttgattccgtaattctgcagctaatactggaagtagaaagaattggaaacaccatctggatgacactttagggtggaagcagccagtacaagggggggctcattatttcctctggtcccagactgttcacctggagctgtagccaccaccctgcccttaggttaactgcctcgagtggtagtttagctctttgtgctgtgccgagggataactggaagtgaaaggtgctgagaaatgccatctcctgaaagtggcgagcatgagtgaatttacgaaaggttgggatattgctggggctctggaagtttctctggagctcactccaggggacagggagggggctggattccaattcaagtgaaaaatacctttcatctgccttgttcacctggcttttttgcctttttgtaaaatctgaaaacctcagggattgagtagtctttccttaactgcagttgcctgtctggccacacctgccagctgttgcttgtacccctgtaatttgcacggccttccgggcctttctcacaagatcactgcaggtcacattcatgaggaaaatgcaggcagttcctgccatcagacccctcaggatgtcatggtttggcctgaaaacaagattcctgcaactctaattttcctttgctagatcaaatgaaggatttgatctaatgtttgcattctagcagcaaaatcattgaatattttatttcttaagagccttacttcatattttgtaggtattttaagattttgtaaaggcctttctgcttcaacgtgtgatgtgtgcattcttagaaaaagatcttgtgttctgtaaatcacacaataaaaacatgagttcgtgcaggaaaaactggggcggggtggatcactccaaacttgtgtggtgtggtaactggagctcactgatgaaaccatgaacagttctggctgaaagaaccccacagtacactgaggtctgttggcatcgccgccagcaccgccccggtccctttgtgcgcgccaccacacctggctaattttttatttttagtagagagggggtttcaccatgttggtcaggatggcctcgaactgacctcgtgatccgcccacctcagcctcccaaagtgctgggattacaggtgtgagcctccgtgcccagccttcagctttttttcttaatgtctttgtgtaatatgaaggcattctctttaattgttaaaaagcttgcctaccactgcttcaaaatattactgtcagttggcatagcttctgattatattgatgtcatctcccttcttttaaacatgttaccatattggcactgtatttcccctagcccattgatcacttgagagttagtcatagtcctcgtgctgtttcactcctaaacgtttaagcatgcctttcctaagagcagacagtacagttaagacactcaggaagtttagcaatgagctaacacagaaccttacatttctccacataccccataaatgccttttttagagcctttgagcctggaatgcagagtccaggactgtgtgttgtattcgattgtgtcatcccttcagtctcctttatcagaaatgttcccccacccccttgttttctctcatcatcttgagtccagaccgtggttgcatggcacgccctctctggactcttcctgctgtctcctcacggtaagcttcagtctcctactcgtgatgctggttcatctcagcagcactgaggggcctgagctcagtttggtcgtgtgttaaggtggtgcctgccagatttctccacagaaaagggccccgtacttttatttgctcttcagcctgtgtattccttcctttcttgccagcttgtgggtggcttctctagcagcttctgtaagatactcagtttggcagttgtagttgtttcagcaggagaggtgtctgcatacctgaccaccacatggctagaagtcgatccatcctctggcgtaaccatcctccatgctactgtccctggggcactgaggccctcctcagtgacttcctccacctcatcttccgccatctccaagccaccagtgtccaacggactactgatatgtcccaaactcatcatttgtttattcaccaattcagagcccacctttttttcagcactgagctagcctctccttgctagaagcttacggtcgaaggtctccagccatcagaagaagcacgtggagcgctgcgtccgtgttgtggttattcatccagcatgtgttgagtaagggttgcacctgtgcctggcattatgcattgagcggggagatgggggttggcacgcacagtggggtgttctaagtacactgagggctcgggtgccctggctcatagagcagggagggaggcaggagcagggaaggtgtctcagaagtgccatctttttttttttttttttgggaagtggaatcttgttctatcgcctggtctggagtgcaatggcactatctcaactcactgcagcctccgcctcccaggttcaagcgattctcatgcctcagtccccgagtagctgggaccacaggcgcacaccaccacacccggcaaatattttgtatttttagtagaggcggagttttgccatgttggccaggctggtcttaaactcctggcctcaagtgatctgctcacctcggcctcctaaggtgttgggattacaggcatgagccactgcgcccggtctagaagtgccatcctaactgaacctgaaagatgaaagttctccagatgaacctgaaagttctccaaatgaaaaggtgggagggggtgacagggttaggcccagagcctctggtgacacagggtgggcatcattggtcactttttcctcgagggaggggcgtcacacgggtgatagggtgggagctataaccatgttgatagtgccgcctctgcccatctggcctggcatgccctgagccctctgtcccacctgtggaactcataagccctgacagcccactcactcctgattcattatccacacccctgtgcttccgctgtgcctggagcaagctttcttcagggggaagggaggctggaactatgttgtagttacctatttgtcctcccttccaaactgtgagttcttggaggtggaaggatgctgcaggatctggctcaggacgaaggcagttggtgaacagacacgtgtgtttttgactcacggtgatctcagacaagttcctctgtctagtcgaacttctttttttccatctgtaacactcaggagttgaataggtggtttttctgaggatacttcaactgtaaaatgtatgaacttgtgaactagctatttagttctcctcataatcaagattgtgtgtgtgtggggggttctgattagagggaggatgaagagaggtgtatggggttttttttgttttgttttctgtttgtttgtttgtttttgagatggagtctcactctgtcacccaggctggagtgcagtggcacgatttcggttcactgcaacctctgcctcctgggttcaagtgattctcctgcctcagcctcctgagtaactgggattacaggcatgcaccaccatgcccagctaatttttgtatttttaatagagatggggttttcgccatgttggccaggctggtctcgaactcctgacctcaggtgatccacctgcctcggcctcccaaagtgctgggattataggcatgagccaccacacctggcaggtttctttgaaaaagtttgtgtttcggcaaacaccataaaccccctgggggacagccttggggagtcacctggcaccctagcccagcctccctcccttgggtcctgcagtgaaggcttagtgagggtgtgcaaatgcccaggtcaccctgggactgggcaggccctctgggctaagggtaaactcatttggaatacctgttttctatcattgttttttatttgttaaatttaaagggtacaagtgcagttttgttgcgtggatatattgtatagtagtgaagtctgagctttcagtgtaaccatcacctgaatagtggacattgtacccgttaagtaatgtctcatccctcaccccctcccacccttcccagtctctccagtgtctgccattcctcactctgtccatgtgcacatgctattcagctcctgcttctaagtgagaacgtacggtatttgactttctgtgtctgagctgtgtcactgaagacaatggactccagctccatccacgttttttatcatttttacctgcactccacacccagcacaatccaggcttctttgtgggttttttgaaatttgtctttaattataaaagtagcagccagcaaattaacaaacacccatgtgcctttcattgcacagaattgaaaatcatcatactatatttgcttcaagtaatttccattagaaagaactagaatattacagtagagttaaagaccctttatttcccatcttcagtgctcttaaaagttcatttagggccaggcatggtggctcacacctataatcccagcactttgagaggcccaggtgggtggatcacctgaggtcaggagttcaagaccagcctggccaacatggcgaaaccccatctctactaaaaatacaaaaattagctgggcgtggtggtgcgcatctgtaatctcagctactcgggaggctgaggcaggagaatcgcttgaactcaggagggaggcagagcctgtatgcagtaagccgagattgcgccaccacaccccagcatgggtgacagagcaagactccgtctcaaaaaaaaaaaaaaaaaagttcattcattgtacacttagaaatagttaaaaaggtaaactttgttttgtgtgtgtgtgtatatatatatatatatatatatatatatatatatatatatatgtatttttttttgagacatatatgtgtctggtttgttcgcccaggcaggagtgcagtggcatgatcaacggctcactgcagcctcaacttcctaggctcaagtgatcctcctgcctcagcctcccgagtagctaggattacaggcacacaccaccatgcccagctaattttttttttttttttttttttttgtagagacagggttttgctatgttgcccaggctggtctcaaactcctgagctcaagcgatccacctgcctcacctcccaaagtgctgggattacaagtgtaagccaccacacctgacctgttttgtatattttaccacaataaaaagcctttaaaaccccaagcagacagttcattttcattcaggcccaactcagaatctgatcacagcggggtttcccccctttctagcgagtagctgaagaactgttttctctccttgatggtataactgtctctgtgggtgttgctcccctgccgctccagtggttttgtttttgtttttgtttttttgagacggagtcttgcgatctcagctcactgcgacctctgcctcctgggttcaggcgattcttctccctcagccttccatgtagctgggacttacaggcacctgccaccacgcccggctcatttttgtatttttagtagagacggagtttcaccatgttggccaggttgggctcgaactccagacctcaggtgatccacctgcctcagcctcccacagtgctgggattacaggtgagagccactgcacccagccggcccctcagtcttttccttctcaatcagtggcaccaccatcttcccaggctttggacatggtccctgactcacccttgcccctcacccccacactaatccacctgcgagctctgttgcttcaccacctagaccagccccaaatcctcaactgcccccaccctgggccacacctggaccactgctagaggcctctcatgggccctccctgtttttctcttgcactccccgggctttctggcacaagatgccccagaagcagaatcacatatctctcctgggagccaatctagtgtgtttactgcccctggagtgttattgttggccttagaatatgtcccactacaggtttgcagagcactgtagtcaaaagtcatttgaaataaatcttttctctgtggtatattgtcaatttgatatagaattaaatttgtttcttttcttttttcttttctttttttttttttttaagagacagggtcttggccaggcgtggtgtctcatgcctgtaatcccggcactttgggaagccaaggtgggtggatcgcctgaggtcaggaattcaagaccaacctggccagcatggtgaaaccccgtctctgctaaaaatacaaaaattagccgggcgtgatggcaggtacctgtaatcccagctactcgggaagctgaggcaggagaaggcttgaactcaggagtcggaggttgcagtgagccaagatcacgccatggcactctagcaagactctgtctcaaaaaaaaaaaaagagagagagagagacagggtcttgctctgtcactcaggctggagtgcagtgatgtagtcatggctcactgcagcctcatactcctgacctcaggtgatcgacccgcctcggcctcccaaagtgctgggatcgtaggctgaagccaccatgcctggcccgaactcatttgtttttatttgcattaagtgtaataaggttttgttacttttagtttgaattttattttgggtaatataaacatttacatgattcagaagtcagaattacactgaggcatgttcagctaggcctcactcctgtgcctgtacccttacctttttccccctaccccatgcagggaatcaatttcattagttcctggtgtgtccttccttaatacccccccttctttctttggtagaatgcagtagatatgtttgcgctttgctccctttgcttcacagtggatcctggaaatgactccatcgcagttcttagagctcttgtttagtccctttggatctgcacagtactccagtgtgtgggcgcaccataagtttattcagcaagtgccctggtgatagggatcgggggtattggaagcctttggctggtaaaaataatgttgtagcaaataacatcatgcatatgttctttgagatttctggaggtgtctctttagcatagatttctagaaggcattccttacgtcacgtttaggtttatagtttgacctcatggtgattaaggtatttgggaaatgcaaatgagagtttcgaagaagccagatctttcccattagttcactgtttttctctgacattaggaccgtccgggttctagggagcagccctggcgttaggcagtgccatgatggattgtgtagaagtagcgattcccatctgtctgctttcttggcccactctgctggtggctccccttccctccctcctttatggggagctggggagctgcctaggggtccattctcaaaggctgatctctggtgggcaacaggccacacctagctttccagggttcttcgtcatttcccattgagagctgtaagactcagagacatgaaaaggaagctctggctgggcacggtggctcacgcctgtaatcccagcactttgggaggctgaggcgggtcgatcacctgaggtcaggagttcgagaccagcctgcccaacatggtgaaaccccgtctccactaaacatacaaaaattagcctggcgtggtagcacacgcctgtgatcccagctactccggaggctgaggcaggagaataacttgaacccggcaggcggaggttgcgatgagccgatattatgccatcggcaacagagcgagactccatctcaaaaaaaaaacaaaaaacaaaacaaggcgagctctgtgctgggacagattagggacccctctttacagcaagaaagactgctctgtgggttgtaggatgcctttgtgtatgcagtggctctaggtgactctggcagccacactctgggccctaaacttctggaggaagatacaggatagggaggaactcaggggtgagtcatggtggggacaagacattccctcactctaagaccttgtcactagattggaacatctcttgcctccctacacctgacctgatggttctggagagatacgtccttgcagcttctgagtcccagcactaagcagcctttggtaacttccctacatcatttgagttctggtttcctaaggatgcttgccagtgagtgccatggtgccctcattgcacagtctgtgcagtgtagacaagaggggaagtctcttggggtagaccagccgcaaggcggtgactagcactgatgtgaaccacatgggacaggggagttgtggggctgagaacacggagggtgggagtagtcatgctcttttccagaatgaactgctaacgaagggactcgcaggtggctgctgcttctttccaagctgcccctgttgttgcagaggctctggagtcctaggaggtttcacggtggcatactcgacagagtactagagcatcatggccagatagtgatgctggggtgtggggcctcacggtggccatttctgacgagaccccaccgggccaaagtgatgtgtagagaaggagctgcttcggtcaccagaaaagaacggggaagcctcccacactagaataggtagggtgctcttctccaccggcaggaaggggatgtatggctctgcctggaccacacctttttccttgctcttccctccgcatctgctgtggccgaggccattcctcatcagggaacatgtgttagaggctcacgccacctgggaccacttgtcttatcacccccaggaccctaggcggtagtttcctgtggcctgagttagctgatatttatatagtgccattgtgccttttctcctgtgatgctcacagtaaggatgcctagatggggttacctgttgtcaagataaggaaactgaagcacagaatgctgaggtcatttgctgggttcatgtttggaaagcggcaaaggatttcagtgcaggttggctggctccaaacctgtgtgtgctttccatgacactgtactgtgtgcctcattgagcctcattctagaaaaccaaaaacacacccaaggcccggccttcacaaaggagacccctcccccatttggctccctttccagcagtcgacggcctcttgtcagccatcgagcccagagtcccttgaagtgcgactcatgctggggtggtatgctcaggagccgcagtgtttccgctcagaggaaagggctctgattctcctgcagtgctaggagacttgtgggtggccacagtgcaggtcaggcacaccggccagcaccacccacagcccaaattcctaaagaaatatttgggtcccagcttggcccgagtctctgttgtcctggggaaggacatcaagatctgagtgtatgatggcctggggccttgcatgtggtgggggtccaagcctgcctctgctcacttgttctgcagactggcatgttctctgtgatacttacatacttgtttaacacttcagggaagaaaagtcagaagaccaggacctccagggcctcaaggacaaacccctcaagtttaaaaaggtgaagaaagataagaaagaagagaaagagggcaagcatgagcccgtgcagccatcagcccaccactctgctgagcccgcagaggcaggcaaagcagagacatcagaagggtcaggctccgccccggctgtgccggaagcttctgcctcccccaaacagcggcgctccatcatccgtgaccggggacccatgtatgatgaccccaccctgcctgaaggctggacacggaagcttaagcaaaggaaatctggccgctctgctgggaagtatgatgtgtatttgatcaagtaagtaagagcaactcctatctctacagggcagggagggcagggacaaggatccctcatggagcaggaaaatgtatgtgcccagggtggggtcggggggaacataaacaatgaacactgagaccaggtgtgcttgaaatgaccgtgtacagaggtcgctgccctgagtgggaagttctcaaggtagcaggccctctatcctctccacacctcaagtctttatctggggatggaatagctgcggaagcagaggaacttgcagagctaggggttcagaggggtgaagaagcatgtttcagttctgccttttaaatgatcccaaaaaggttagcagttttcaaatgacatttgcagacagcctcatttaattccatgagaagggtgagcaaaggattatcttgttgaaactgattcctggagagactgagcaccgtacctgagttcaaacttgggaatgttctagatggtgactcaggcccaggcaccaaccagcagaatgggcctcagcctgacaacccttctgtaccaggcctgactctttggttgctgaactttggagaggcctgggggggtcagcggcaggcagacgagtgagtggctttggtgacaggtcctcaggggcagccaggcagtgtgactctcgttcaatagtaacgtttgtcagagcgttgtcaccaccatccgctctgccctatctctgacattgctatggagagcctctaattgttccttgtgtctttctgtttgtccccacagtccccagggaaaagcctttcgctctaaagtggagttgattgcgtacttcgaaaaggtaggcgacacatccctggaccctaatgattttgacttcacggtaactgggagagggagcccctcccggcgagagcagaaaccacctaagaagcccaaatctcccaaagctccaggaactggcagaggccggggacgccccaaagggagcggcaccacgagacccaaggcggccacgtcagagggtgtgcaggtgaaaagggtcctggagaaaagtcctgggaagctccttgtcaagatgccttttcaaacttcgccagggggcaaggctgaggggggtggggccaccacatccacccaggtcatggtgatcaaacgccccggcaggaagcgaaaagctgaggccgaccctcaggccattcccaagaaacggggccgaaagccggggagtgtggtggcagccgctgccgccgaggccaaaaagaaagccgtgaaggagtcttctatccgatctgtgcaggagaccgtactccccatcaagaagcgcaagacccgggagacggtcagcatcgaggtcaaggaagtggtgaagcccctgctggtgtccaccctcggtgagaagagcgggaaaggactgaagacctgtaagagccctgggcggaaaagcaaggagagcagccccaaggggcgcagcagcagcgcctcctcaccccccaagaaggagcaccaccaccatcaccaccactcagagtccccaaaggcccccgtgccactgctcccacccctgcccccacctccacctgagcccgagagctccgaggaccccaccagcccccctgagccccaggacttgagcagcagcgtctgcaaagaggagaagatgcccagaggaggctcactggagagcgacggctgccccaaggagccagctaagactcagcccgcggttgccaccgccgccacggccgcagaaaagtacaaacaccgaggggagggagagcgcaaagacattgtttcatcctccatgccaaggccaaacagagaggagcctgtggacagccggacgcccgtgaccgagagagttagctgactttacacggagcggattgcaaagcaaaccaacaagaataaaggcagctgttgtctcttctccttatgggtagggctctgacaaagcttcccgattaactgaaataaaaaatatttttttttctttcagtaaa

SEQ ID NO: 4 - DNA, 67499 bp, Homo sapiens
ggggtcccggcgtcggcggcgcgcgcgctccctcctctcggagagagggctgtggtaaaagccgtccggaaaatggccgccgccgccgccgccgcgccgagcggaggaggaggaggaggcgaggaggagagactgtgagtgggaccgccgtggccgcgggcggggacccttgccggggggcgggggtcaggggcgggacgtggcgcgggaggggcccgcggggtcggacgacacggctggcggatggcgtccctcctctctaccctccccctcccgccgccgccggtggcgactctcccctcggcccgtcacccctgctcgcgggtgaccgtcctcggcgcggcctccctggagccgccttcgcctgacgcccctcttcctcccgccctcgacgcgcatcccggcccccggccccgcgggcgcccctgtcgccggggcttcgcctgtcggggctgcgcgcgctcctgcccttctcggggctttgggccgcggcgccgtcgcgcgcccgcggccccggcctctccctggatcgcgctctccccctccctccctcgcgcgccccctctcccgttactcggcccccccaccggcgcgcgtgcgcacttcgcctcccgtcgggagagtgcgccacaagggctcctgagctctcacccccatctctgggctttgcctccccctccttctcgcccattccatgaatttctgccccccgctacccccccgcgagcgagtaggtccaccggctcctttccccatctagcaggaacaagtaggtggggattattatccacaaaagggactagacattgtgttctgggtcccacaactcatcataaagaggtggttatagttcccatcaggagccgtgggtaggggactgtgcgtccagcagcacccgaggctcttcggcgccagaggctctaaggtgcgagcgtgtccccagggtgctcagaggttctttggagtgctgtggcctcggaatgtgagcaccctcccatcctaccctccccttcgccggcgatcttccagttacataagtggagtgggacatagtaggtaacgggctctcatcgccctggagcgctcgggatcaccggtaccagatggggcaagttcatcgcgacgctgtggctcctgttaattgtgcctgaaaggttatcctctgttcagtttggtcatgaccgaatcacccaaactgaaactcagatgacttttatatggcagtggcaatgtttctgtggttttgcactaaagacttaaggtcattatgaagagtgtaaaaggattgctgtcgcaggggagaccgtttatgacattgctaagtatggaccccgagggggaaaaagctcattctggaattgctctgtggcggttgcttctgttgcgagtgtgttcgggtgtgggttggtcacagcagaaatgggctccaccacaaaattgatattcctgactcatggtcaggcagatgtgtgcttctggttatttttccaggaacaggaatgggctctgccgagcctttcacacgttgtgtctctgctgtgcgggatcagtaccccagactgtgagataacaggatcgaattcaggggttggttggtgatccaggaaccatacctacttggatgtgatactgagtggcctagacgttgtaggactctcataagttttagacattttgttatactgtaaaaatgaagcatatacggcctcagtagtaacattgcactaataggtaattattactctagagaattttgggttccatggctggaatgttcatcagtatctcagcaatttcagttaataaccagattaagctgacctcttgagtcttttgaaatctgctgggtccctataataagacagggtctggattttttaatcttttgggaatttccaccaaggatttagggaaataggcttttatgggcttttcaggatttctatttcaaatcccaatgaggaagtctaggaaacacttgcttttattttcttgcctgaatatgtcagaaccttaaatcacccaatcaatctagaagtactacagttgattaaagtaagtcaccacaggtcacccattcgtggcaggtcagctaggtggctgatcactggaatacagtcatatccccaggcatacacacgagcctcacttgacgatcccaaagtttgtacatctgagcttgagacgtgacaagttgaggtctctgctttgttcttcatagttggcagtttgtctcctcgggtgcccctccggttagctgtttatcatacgtctagccctatcaacagtgcaggcagcttccagagtatagttttctctgcaaagtgcctggtggaggggtacctccttttccattgtcctaatggctccactgggcttccataccagccctttccagtgtcttaacagctcaaagaaacccatctgtggctttcttgttagcactggcctatcacaccttcctattgcctgttaactaaaattttgcctggaatgctttaagcttagagtactgggtctttgtttcacccgattgataggagagtgtcatgcagtcagccgaactccgacttctgtgctgtttaaatccttaggtaggtctggggcaaggcacaaaccactgtgtattcaaagggttatggtgcttgcattctgtgtgtatatgtttgtaatttccaaccagagtcgtttcccgtgcctgccctgcctctgtgcaatctagtctagtagggtagggaggcaagctgtggagtttgaaaaaaaaaaaaaaaagctagatgagtttaataggctgttaccccctccagaacattcctcccatgtggagatgaaacgagaagttcatttctttaacctaaaataaagaacaacagagataaaattgttagttccttattggagcctggtttccattgctaatgtacctgcttgggactctgcatgataaatgacgtgtcctggaacctgaaatcttttataaaggttaatatcagcagaaatcttttaattagctaagagcagcttgttctcaagctgcccgagttatcttggaggagagaatcacaggaaatgtttgatatttctagtaaccagtgttttcagtgcgtggggtaaagcacactcctagactggccagtcccaaagagtgtggcaggacacctgcttgttttccctgccctctgctatggtgacatccttgcagaccagtcttgcgtggctggcagacgcaatctttttttcttgggtagagcattatcaccgctgcgatggaaggaccttgtcctcggtgcctccataccagccctttccagtgaaactactgctgtcccggcaagcccctgtgcgtgtgcatcattccgggtaggacaagatgtgaacaggtccctcttctttgggcttaagtagaagttgtgctcttctgcttttacctgtgtgctcttctgcttttacctgttctcttctgcctttctcttgcaagaaacctgtcgaaagcttgctttgcatgccattgcttaaatactttgatggtatgtatggtatgtgggataactgagtgggagccggaattggggggtgggcagggcatccccacccccacccccacatcaaagggggaatgaccatttcgttagagaataaagcctgagtcttataacttcttcaagcacatgtatgctgggtctcctggcgtgtgaatgtgttcccgctgtgctgtgtggctgttttgcagttactgtagacactgtagtctgggctctcattattgcctctgaagttgacaggaccaagccttagtaaggatgcacttgtcttcctagcccaagagctaggggtgttttatatatatattaactttcttttttagatttcataaactgctctcattttctcttttctttctttctttttttttttttttttttgagacagtctcactctgtcacccatgctggagtgcagtggcacgatctcagctcactgcaacctctgcctcccgggctcaagcagttctctgcctcagcctcccaagtagctgggattacaggcacctgccaccacgcctggctaatttttgtatttttttttttttttttttttttttttagtcgagacggggtttcaccatcttggccacgctggtcttgaactcctgacctcgtgatccacccgcttcagcctcccaaagtgcagggattacaggcgtgagccaccgcacccagcctctggctcttttctttttgacatgaaatcttaagttaattatcttaaactttaagaactagaaggattcttagtccagcaccatcagtttacaaacaaaaaaaacttgtgtccctgagaagttgtgacttttccagggcctcctagccaggataccagtttggtttttattatatagctagccgagtaatactattaacttgacttctgggatttcaaagtattctatgacttgactgtttaagggaattatgaggcctcactgaacctcaaaagataattttaggtaccatcctggtagctgtagagcagcaacagaccagtaaaagacttggttggtgttgcccttcttctgggtttgattacatgagtaattgtgtgaatagtctctaagttgtatgctctgagctttcgtttttagcttataaaagtgctactcttgggccagcatagtatcagaaattagctaattcatatggggcagtttaggctttaactaggaaatgatggttatcttaatgacaaaaaaggtactgacaaaagtccttttttgaacatgtgttcaaaagaaaaagagaaactatcaaactaataactgagtttgttgaacatcgagattgactgatctgagaggcttaaaactgattgccctgaaatagacttgcatgttttggatgatggctttgggtctcccagagcacttggtttcccttggtgctgattttttctctcaggattaaagcccctttatgtgatgttgttacagcagcttattgcaacttcattcagctgcttgaaaaagaagggagactgcctctaggttccatgtgttctttcagggatggtattttgatgttgcgtattctcttgaacatgtattcttccctgagaatttctgtgtgccgtggtagaagaaatacttgccagaaatcgccactcatggtatgcttttgtagtgtcgaagtgtcccctagaggtgacaaggcttgtgatagtgttgattctaacaagcatgaatctttcctttattttagcactgtgtgttacgtgccagtaatttgcagcttatcctttgtttctagctaggtaagctgggaaatagcctagtactttgtctatgtgtttatcttcaaaatgtcccaaatagccctgggaaaaaggtcgtgcagctcaatgggggctttcaacttacaattttctttgttttaggctccataaaaatacagactcaccagttcctgctttgatgtgacatgtgactccccagaatacaccttgcttctgtagaccagctccaacaggattccatggtagctgggatgttagggctcaggtaagtaaccttcctttttttttttttagtatatgtcctggtttggccatctgttttttttttttttaaaaaaaaaaaaaaaaggaaaagaggaaaaaaatatactactcttggacagtataaaagtaccccaaagactaaagacataactgtgccaaactgtgccatataataaaaaaaagtcacttccctgagccctgaaaggtcagtgtgtgtagggttacttggtcgccacagcgtgatctgggggcgggcgtcagattagagccggaactggtgatctgcaacttcagttcaccttgaagcaggtcagctgagctgagagcgcttgcactgagcccttttgcgctgctgctgttgccttagcggtcttcagcatgtgtttgctttggtttggggtaaatggcttagtggtcaacattagtgagcagtggtaatgcattttcagatatgggaactggtatgtggttggttccctagaaggacaccctcctgaaagctgtctcagaacaccgggggccatggctaatgtcatgtgcttgctacactcctcccatggtaactaaagagagtacccagatatacatctggttcttgggactctagaggaggatgagtactttgtaaaaacctgggggccccagtcattctaggtctgacactcaggtgctgtatcagctgcagtttgaactacttggcaccattgtgtggactttagttttgtaaaaatgaatggttccttaatttctcaaccttcaggctcaacatctcaagctgtttgttgttgttgttgttgttgttgttttgttttgtctttttgattagtggtcactccgcatttgatgttttgacatgtggatttcagaacttctgtgtggtaaagcagaatgttccaattgaattttcccattttttttcccctaagcaaaaatgtgagttttcacttatgcggccattgtgattccgactgagaccctaagtcgttctttgttgtctctctagtggtttctgacacctcagtgtgaagctgttgtagacatccataagaaatagcctgcttagggattatgtgagggcaaggtttggctgaaggagaatagaaggtgtggaaggaagcggaagaccagaagagcatcacactgcctcaagtcccaaatttgattctgctcctgatcctgtgactcaaattgtcattctcttttactgctgtggggtgtgctctgggcccagctgacaggacattctttgtactccacgtatttatgctggtgggagttgtatggctagtgctttgtgctttgtctcagaaattgtgtggactaaatgtaatatgggcagtgaatgggtttcttctggaagatgttaggcctggagggtggtttgggtttttacgagtctttttctcagattacagattacgaatggatgttataaaacaggcagtgttgacaccatacagtttctcctaagaaatgtacagagagttcaacctgaggaagctaattgaaaataaacttttaaaaagaaatgtagaaagaggaaatttaaaaagtatcttatgaatgggaaagatgtagccatttgagcttcaaagaacttttgagggaattctcaaaggacagtacccgtctttagtagataaatgcttgatatctatttttcttcttttactttttaaagaattactaaaataatacatggatttatagaaaaatcaaaccacttaaaaattgatcaggtggctgggcaaggtggctcatgcctgtaatcacagcgctttgggaggcctaggcgggtggatcacctgaagtcaggagttcgagaccagcctggctaacacggcgaaaccccatctctattaaaaatacaaaaattagctggccatggtggcttgagcgtgtagtcccagctactcggaaggctgaggcaggagaatcacttgaacctgggaggcggaggttgcagtgagccaagatcacaccactgaactcctgcctgggtgacagagtgagactcggtctcaaaaaaaaaaaaaaaaaaaagtatcaggtaaaaaaatgaaagctccccgcttaatctctgctcccactacccagaataactgctgttaatagcttaatgtagatccttctaagtcttctaagactaaactgtgtactttttgtgttgtaattaacaggagggtttttgttttgttttgttttttctttttttgagatggagtcttgctctgtcatccaggctggagtacagtggcacaatcttggctcactgcaacctccacctcctgggttcaagtgattctcctgcctcagcctcctgagtagctgggattacaggcgcctgccaccacacccagctaatttttgtatttttagtagagatgggtttcaccatgttggccaggctggtgtcgaactcctgacctcaggcgatccacctgccttggcctcccaaagtgctgggattacaggcgtgagccaccgtgcctggcctcaggatggtgttatatatacatattctgcatttttccatctcatatattcatctctgcctcatttcttttaaatagcagtgtagtccagggctgacttaccgtcatgcatttcgttgtctctctatgttattaaaaatgctacaggattgaaattcctcatgtgccagtcattttgaagaatggctgcctagacttggaatttctggtggataccaccacatcactgtccaaaatggctatcccagttcccacaacagtctgagaaagtgccattttcccatatcgtcccagaattggatatacatcttttaaattggtgccgcttggattattactgaggctaaacctcaataatcattgtcatagctcttaatgtattaaagatgttaactctttgtcatgcagatattttcctgttttgtcttacgtcttgattcttgtctttctgatatataaaatttatgttatgatttattcttttgctttcatacttaggaaatccttttttactcttttttttttttttttttttttttttgagacggagtctcgctctgtcgcccaggttggagtgcaatggcgtgatcttggctcactgcaagctccatctcccgggttcattccattctcctgcctcagcctcccgagtagctgggactacaggcgcccgccaccacgcctggctaatttttttgtatttgtgagacagggtttcaccatgttagccaggctggtctcgatctcctgaccttgtgatccgcccgtctctgcctcccaaagtgctgggattacaggcgtgagccaccgcgccccgccaggaaatcctttcctactcttaacaacagatcaatagtcatctatattttcttcctaaaaaacctgatgatgtattatattcatacatacgtatttaatacatacaaaagggccagatgcggtggctcatgcctgtaatcccagcactttgggaggctgaggcgggtggatcacctgaggtcaagagttcaagaccagcctggccaagatggtgaaatcccgtctctactaaaaatacaaaaattagccaggcgtggtggcgggcacctgtaatctcaactactggggtgactgaggcaggagaatcgcttgaacccaggaggcagaagtttcggtgagccaagatcacgccactgcactcctgcctgggcgatagagtgaggctctgtctcaaaaataaaaaataaaaataataattttatagttaagttgccctgtgtttttcctgtgattaaaaaaaaaaatacctgttttgtatttaactttggggtgggataaggtatagcccacttagtcagttgtgtctaagccacttgatgaaccagtcaatccagtcttcacctttaacaaatgctgatttcttcaagtgagcaaaatatctcttaaactttttcctattttctctataaagttgcttttttctgaattttttctttatgaggcttgatgggcagccctatcagcagacaatcattcattcacccaacaaatatttgagtatctgcttcaagccaggggcagtgctaagccctggaagtggtatcttctccttatccgggagtggggctacagtgttcattccagaagactcaagaaaatagcagatcatcacaaaagtaggttttacataaatgaggaggaatccacagggttgtgtatatgtgtgtgtattttaaattctgacataagttggagctttagggtagactgtgacataagagtagtttgttttccaactcatgtaattgccggctgatttttgtcttgaattatgataatggtaacttctgttgaaacaattctgtattcatcttagcttggttgggatgcaataaaagttttgtactggtaaaaatgataattttcttccatgatgattttgaagcttttctgtaacacctgataaaaatagaggggccaggcatggtggctcatgcctgtagtcccagctactcgggaggatgaggtgagaggatcccatgagcccaggagttttaggctacagtgagccatcatcacaccactgtactcctgtactctagcctgggcagcctcgttctttagagtaagacactgtctctttaaaaaaaaaaaaaaagaaaaaagaaaaaaagaaaaggcttttagtgaatatatttttagggtagcaagtgtaatttttataaattgcattatttgaatctaataaataccctcaaagctgaagtcgaattctgattttgattgaaaatattttttacttaaaggaagagggatagaataaatgacacgattaaggaaaagacttcttgtataaggccggggttttttaaatgattttttgaatagttagatggacaatacggaattaaaaaggtggtgtaaaaagttatacggggctgggcacagtgactcacgcctgcaatcccagtactttgggaggccgaggtgggtggatcacctgaggtcaggagttcgagaccagcctagccaacatgacgaaacatcatttctactaaaaatacaaaaattagctgggcttggtggtatgcacctgtaatccagctactcgggaggctgaggcagaagaatcgtttgaacccaggaggcagaggttgcagtgagccaagatcgtgccattgcactccagcctgggcgacagagtgagactccatctcagaaaaataataatagaaaaaagttatatggggctgggcatggtggctcatgcctgtaatcccagcagtttgggaggctgaggcagcttgatcacttgaggtcaggaattcgagactagcctggccaacatggtgaaactccgtctccactaaaaatacaaaaattagccaagcgtggtggtgcgtgcctgtagtcccagctacttgggaagctgaggcaggagaatcgcctgaacctgggaggcagaggttgcagtgagccaagatcatgccgttgcactccagcctggacgacaagagcggaactccgtctcaaaaaaaaaaaaaaaagagttatattgtaaagtatctctgctaccctgccccaaacattcatttctttccctggaggcagccactattacctgtttctttaaaaaaaaaaaaaaattgtggccgggcacggtggctcacgcctgtaatcctagcactttgggaggtggaggtgggtggatcatgaggtcaagagatcgagaccatcttggccaacatggtaaaaccccatctctactaaaaatacaaaaaattagccgggcatggtggcgggcacctgtagtcccagctactcgggaggctgaggcaggagaatcgcttgaacctgggaggcagaggttgcagtgaactgagatcacgccgctgcactccagcctggcaacagaatgagactccatctcaaaaaaaaaagcgtgtgtgtacccgtgtgttaaatttttattataaaatatatataacaggctgggcgtggtggctcacgcctgtaatcccagcactttgggaggccgaggcaggctgatcacgaggtcaggagatcgagaccatcctggcgagcacggtgaaacctcgtctttactaaaaatacaaaaaattagccgggcatggtggcgggcgcctgtagtcccagctactctgagagcctgaggcaggagaatggcgtgaacccaggaggcggagcttgcagtgagccgagatcgcgtcactgcactccagcctgggcgacagaccgagactccgtctcaaaaaatatatatcgatatatataacaatttacagttttaatcatcttaactgtacagttcagtggcactgagtacattcacattgttgtacagccattactaccatccatctctacaacctttcgtcttgcaaaactgaaatttcatacctattaaacactaactcccacttctcccctttcccccaccccaccctctggcaactactattctactctttgtctctattggacatatttttgtgtgtttaggtttgtgtatatattttacatgtgtgtataaatacacaagggtatgtgggcgttgtgtttttacacatactataaaatattgtgcacatttgtttattttaatgtatcctgtagattatttagaatcggttcatacagagccgtatcattccttttaagggttgggtttaaatagtctgttatggatgtaccacaatttatttaaccagtttttaaattttttacttattttttttaatgtttttttagagacaggatcccactccatcacccagactggagtgcaacagcatgatcatagcttactgcagccttgaactccggggctgatgtgatcctcccacctcaggctctcttgtagctgggactacagggatgtgccgccatgcctggctaaattttttatttttatttttatttttatttttggtagacacggggtttcactgtgttgcccaggctggtcttgaactccttgggcttgagtaatcctcctgccttggcctcccaaagtgccgagattacaaccatgagccatggagcccgacaagagtagccttttatttgcagaccattagagaaaaagttgcgtgtaagtagataagcatacgaatttatcactgcaatactgtttgtagagatcacagagctgttaggctaggaagaagtttttagcagttagcactagaaagcaaaactttggaaacttccatttcatcaaaagtgacctcatctgagtagggcatgtgagggaaggacctttttactcgacaaggggaacttgcccagttcttgtttgtgaaccttgaagaaagtggagcatttttattttgggaccattctaggttgtggtagttccttggtactcggggttggagaatctccctctgctgctggaccttctgcctcctcatgctgtaatatgcataagaggtgtcctagaagtattcaggaacaggctgtggttgctttgttgttctgtgactgttgaactctttatatagcagtacttttttaagctgtactaattgagcatttattatgtgtcagttactgtgctagctgctggaaactatcctaccctcagcagtcttctggtctaatgggaggtacagacaggcaaatgggctatgactttacaagaggctaacttctgtgatggagagaagttccagccactaagggagcacataaaaatcagaggagatcctaccaagaattgggaggtaggtcagggaggagacttctttgaaaaatggcatctaagacctgaacagcaaggaaacattagctaggtcaaggacaaagcatcagtggggagagatgcatgagtcttttggaaggaccagcatgtgtagaggctctgacaggagagaatctctcaggcccattcagagagtccactgtgtgaagacgaggcatgaacaaccagccaggacatgtggagaggagcatttttctttttttcttttttctttctttttttttttttttttttttgagacgtctttctctgtcacccaggctggagtgcaatggcatgatctcggctcactgcaacccccacttccagggttcaagcaattcttctgccttagcctcccaagcagctaggattacaggcacccgccaccatgcccggttaatttttgtatttttagtagagacggagtttcaccatgttggcctcaaactcctgaccttaggtgatctacccgtctcggcctcccagagtgctgggattacaggtgagagcccccacgcccggccaggctcggctttctttccaggccccgtcacactcttagatgttccctgggccccagaaggcagcgtgaggtgctctgcccatctatgctgtccttttccaccccaccctatccactgggcccctggggctcccactccactccaggtctcttcatggacccttctttcccttcacttctgtcccaggagacctgggagactcatgggaacaggcatcatcttctccagcacagttcattgtctaatgcacgaaagtgctgggctgtgagaaggtcaggagcttacatggaatgggagtcagctgtggtacaaagtacgctgcttagttctactgattttttattttttatttttacataagactttgatggtaaaggaagcagtgtgtgagcaagctgactcctgtcttgtcaagtaccaggtccactctgatgagcccctgtggacagcactgctgtaactccccaagcctgggctcaggaggtgggccctaagcgctgttcccagctcttcctccatgctgtcagctcttccaccattcttcctggcgtcattctaaggtcctgtcttcccccgccctcttccttcctggcttctacgctcagctcaagtagtagctgtttgggtacttttcacccagacttaggaaatgttatcagttggtcgtattcctgtcagccctcttactatggaactcaaataggacagattcagctgaattcccagccctgtggttgcactctttgtctgccctgcttccccaaggtagcctgctccctaaaggtcaccgagatactccccatgcaaggtttttgttgtattacacatgacaacatggaataaagtgttttgcaaatttactggatgatatcctactatgtggaacatcctacaacttactcttttcactcaacatttgacttttgaacctggtctgtactgctccgtgcagaccaatgttcattcatttgatatgtctccttgtgccatagaaatagttttacaatagaagcctgtccagagccatgagggagaaggggattgtagagaaacaaggattggcatctggtttatgtttacatcctttagtcctgttaaccgagaagaagatatttttatttccatgtttgcgaaagctttccacaaaaaaagcatccattttctagacttattaatagggcagtccaaaggttttatttttagatttgaaagaaagcaaagtaggcttctgagatatgcacatttccctgtgtccctgtctcttttgcaacattccacattgctgctaaaacttgaacatgagcactttcaagcatgtgcttactttctatgtatgactcattttttaaaacattaaagcattttcggccgggtgtggtggctcacgcctatattcctagcactttagaaggccgaggcgggtagatcacttgaggtcaggagttcaagaccagcctagccaatatagtgaaaccccatctccactaaaaatacaaaaattagccgggcatggtggcgggcgcctgtaatcccagctactcgggaggctgaggcaggagaattgcttgaacccaggaggtggaggttgcagtgagcagagatcgagccactgcactctagcctaggtgacagagcgagactctgtctcaaaaaaataaaaataaagcattaaagcactttgtctggtggtatgtaagttttggcattacttagataagttgtattttaagtctttctacacacaataacttatttttaaaatacaagtttctgtgtacttccgggttttgtgtttttgtaaacagcagaaggtattagtccatattaagtactaatttgttctaatattttcagctgtttttggaattacacttggcaaaaaaatagacaaatgtctgcagttgtgacagtttgtttttttgttctttttaactccagaataaataattctagtgagtttttttcttggcttgtaagaacatgggaatgattagagtcatcataacacttaagtagttatagaaggttgaacatctgtagtcagttgtataaaatttcctagtcatccttccaggttgtttaagacaaacaaatacatagtatttattaagctcttataaattttaattgtaaaacatcattgtacaaaactttgaaaatgcgtataggtacaaagataaaaaattaggccaggcatgccatggctcacgcctgtaatcccagcactttgggaggccaaggtgggaggatcttttgagcccaggagttcaagaccagcctgagcaacatattgagaccctatctctacaaaaatatcataaaacaaaatagaatcactctggcgattccactatccaaaaaaaaaaaaaactgctgttaatatttggtatgtatctttctagaccaaggcctccaactttggttgagaattcagccgggtctgtgaccttggatgggaaaaacattcactctttattttcactaatgtctctgaaaacccagatttttagctgggcatggtggctcgtgcctgtaatcccagtgctttggaagcccgtggagggcagatcacttgagcccaggagtttgagaccagcctgggcaacatagcaagaccctgtcttttaaaaaaaaaaaaaatccagccgggtgtggtggctcatgcctgtaatcccagcactttgagaggctgaggcaggcagatcacctgaggtcaggagtttgagaccagcctgaccaacatggtgaaatcctgtctctactaaaaatacaaaaatcagccgggcatggtggtgggcgcctgtaatcccagctactccggaggctgaggcaggagaatcacttgaacccggaaggtagaggttgcagtgagccaagatcacaccattgcactccagcctgggcgacagagcgagactctgtctcaaaaaaaaaaaaaaaaatccacattttcttcaatgacaattgtaagcaacagatcatggtagtattagaatagcagtgactgtcaccagtagagatcaaagatactttcatatcatattatagttgttacagatattttgaaatatatatgtccatcactgcttcaaacttaaggtaattattagacccatctctagatctggttatttaatgatttactgaagaagcacatattatttgagaacgaactcttgaaatatgttgttaatttctgtgcattttacacatttcaaaacattcttctgaggaggggtccagaaggccaaaagggtccatggcagaaaaaggttaagaacacctgttctgtactttgtaccatgtggctacaaatataaaaacagacgttaagccgggtatggtgatgcacacctgtagttccacctacttgggaggctgaggtgggaaaatcacttgagcccaggagtttgaggccagcctgggcaacagagcaagaccccatctcttaaaaaccagtcagcacttgactagtcagttagtgggggaaaacacaggtacagtaaaaggagtcaaaattacacttaaacttaggtcatcttattatatcaaacatttattaacatgtttagtgttttgtgtatattatgcaaagtgtaatgcaactaaaactgtttaacacttctcgatatcacataaatttgttggtgcataatagcctaaaagttacttttgctgttggcattttattttattacttacttatttatttatttatttatttattttgagacagagtcacactgtcgccaggctggagtgcagtggtgcgatctcagctcactgcaacctctgcctccctggttcaagcgattctcccgcctcagcctcctgactagctgggactacaggtgcgcgccaccatgcccagctaatttttgtatttttagtagagatagggtttcgccatgttggccaggatggtcttcatctcttgaccttgtgatctgcccacctcggcctcccaaagtgctaggattacaggcatgagccaccacgctgggcctgctgttggcattttaaacatccttctagagtctttcttatttgcctgtaagcacgtacacatgttgttgttgttttgagacaaggtctgtcgcccaagctggagcacagtggtgcaatcacagctcactacagcttcgacctcttgggtgcaagtgatcctcccaatcagcctcccaagtaggtgggactacaggtgtccgctaccatgcccagctaatttttgtattttttttgtagagacggagtttcaccatgttgcccagactggtctcaaactcctttgctcaaacgatccttccgcctcggcctcccaaagtgccgggattacaagtgtgcacctctgtgcctggcccacatgttgttttagatgaatgagatcatatatgtacttttgtaacttgctacctttcctcaacaaaatgttgtaaatatccatgtccataaaaatagacgtatatcttcacttttccctaaaatgaaaataacttaacttgcattttcttttttgtttttgtttttgttttgagacaggctcttgctctgttgctcaggctggagtgcagtgatgtcacagctcactacagcctccacctccagtttcaagtattccacctacctcagcctccaagatagctaagactacaggcacatgtcacgacgcctggctaatttttaaaatattttttgcagaaatgggatttcactatgttgcccaggctggcctcaaactgctggcctcaagtgatcttcctgccttggcctcccaaagtgctgggattacagtcgtgagccactgtgcccagcctgcattttcttattataaaagtaatacatgttcaatggacaaaaaattttcagaaaatatgcaaagatgaaaagtaaaaattgtccataaatctgtcatctacagataaagataacttctggataatgtttttctaccatcatttttagtaatcacataacatttcgttgtatgtctatgccttcatttaattaagaggcatttccattatttctgcatgttcatgactctgaatgatgatatgtctgcctgctgatggctacaaccctgtttctgcatttcaaacctctctcttgagctccagatttgatggcctcgtcagcatttacttgagttgctcataagtgtctcaaatttaacaagtcccagtcttgatttttttcccccttcaaacctattcctcatgttgtctctatttcagtaaacaatatcaacatccacccagttactcagtccaaaattctaggagtcatccttgattctgctctttctttttttttttttttttgagacggagtctcgctctgtcgcccaggccggactgcggactgcagtggcgcgatctcggctcactgcaagctccgcttcccgggttcacgccattctcctgcctcagcctcccgagtagctgggactacaggcgcccgccaccgcgcccggctaattttttgtatttttagtagagacggggtttcaccttgttagccaggatggtctcgatctcctgacctcatgatccacccgcctcggcctcccaaagtgctgggattacaggcgtgagccaccgcgcccggcctcttttttttttttgatacggagtctcattctcgtcatccaggctggagtgcagtggtgcaatcttggctcactgcaacctccgcctcccgggttcaagcaattcttctgccccaacctcctgagtagctgggcctggctaattttttgtatttttagtagagatggggtttcaccatgttggccaggctggtcctgaactcctgaccttgtgatccgcccacctcagcctcccaaagtgctgggattacaggcgtgagccactgcacccgccctgattctgctctttctctcatcatccctgatctgtcagcaagtcctgttaggccaaccacttctcagcatctgcactgccagtatgctagtccaagccacaaaacacctctcagaggtacgcaacaggactttgttgttgttgtgtgtgtgtgtgtttttttttttttacggtagaattattttataacttgaagtgtagggatgaccttccttttaaaattttatttattttcttaattttttattcccatagattttaggggaacaggtggtatttggtgacatgagtaagttctttaatggtgatttctgagattttggtgcacccatcacccgagcagtgtacactgaacccaatttgtagtcttttatccctcaccccctcccaccctttccctcaagtccccaaagtccattgtatcattctgatgcctttgcatcctcatagcttagctcccacttatgagtgagaacatacagtgtttggttttccattcctgagttacttcacttagaataatagtctctagttccatccaggttgctgtgaatgccattaagtcattcctttttatggctgagtagtattcctttgtatatatatgccacaatttctctattcactttctgattgatgggcatttgggctggttctatatttttgtaattgtgaattgtgctgctataagcatgcgtgtgcaagtatcattatgcaacgggacttcggatgacatattgaacaacttcctcactgatatccttgtgaaacgctacatatttcatgggtctgtttgttataccaacactcaattctgaatgatggaattatttcacatttagtctctttttcatctagccattatagtttagtttaaacaccaagttccattcctgctgcatgctgaaggatttgcagtacatcaggctatagtccatcaattcattccacaattgagtaagtaaggtatctatagtacctcaggccctgtgttaggcagggatggggtaacctagacagatttggtacctgtcctcatggagcttgactttagcggcagagacagatcttagataattgtaccagtacttaagtgttcagaaggacaagtatggaggtgggagccactccagtcctctacagtcacgtgctgcacaacaacgtttcaaccgacaacagagcacacatacagtggtgttcccataagattagaatgccatatttttactgtaccttttctatgtttagatatacaaatacttaccattgtgttccagtgatctacagtattcagtatagtaccatgctgtacagttttatagcccaggagcaataggctatataccgtatagcctaggtgtgtagtatgctacaccatctagatttgtgtaagaacactctctgatgttagcacaaataaatcgcccaatgacacatttctcagaacatatccctgttgttgagcgactcatgactgtacaatgggggaacagctcagcctgccttccccaaggaggcaacgccgatgcagggaaccgagggttgaacagaagtgggcaaggtgcagagaggaaaaaggctttccagatggagaagagcatgtgtgaaggccctcagtctggcaagagcttagtcctgtgtggcaggagctgaacgaggggttaggggagagtggcaaagggtccgggccatcagagaggtcaacaggggctggatcatgcaggattttgaatgttaacatcagagcgatagaaaacatgaagggtaaggtggtttgggttttgaatttttatcaaaatattgcaactactcggcaacaagttagatataacaaaagaggtcatcgtaaaaacagcagtctaccccttccccttcccttccctgactcagacatgacagcttttaactgtttctgattttagttcctttgatggttacctccaaaattaaatcatatgcttatacatctttcttgatttgccaactttagggaactgtgttaactccctgaaatgaaagagaatgacttagcttacgttacctccccatgttgaaattcatattcacatttctctgtaattttttttttgagatggagtctcactctgtcgcccaggctggagtgcagtgatgtgatctcggctcactgaaacctctgcctcccgggttcaagcaattctcgtgcctcagcctcctgagtagctgggactacaggcgcacaccagtgcactgggctaatttttgtatttttagtagaggcggggtttcaccatgttggccaggctggtcttaaactcctgacctcaggtgatctgcctgccttggcctcccaaagtgctgggattacaggtgtgagctaccatgccaagcccacatttctctgtaaattttaaacagtattttagtccatatgtcagttcccctctgtttaagataaggatattaataaccctacttttccttccactttccctccttaacttctgcgtcttaaaagctgtacttgaccatacccattcttgcatttgttaacatgtgtgttctgccctgcaaccacagccaagttgtagcttaattctaaagtcgaaaataacattatttacattattacacatgtgagtattgttcttggcgagaccaaataatgaatgtgcccaggattacatttccttctttacagatctggaccactcaaaggagaatgaccaatcaaggtcaaatggattcccttttcttagactctgtcacctgcttaaaatccttgctaggatttaatctacttcatattcaaaccttggcttgcttatatagctctttgttttgcccaccatttctagttgcctttttattttgtttactattcctccttgattatgttgtaaaatgctattagcagtgctgtttatttcgtacgattcggctttttccccactgaagacctttctcttggaaggcctctgcccttctgcaatctgggcaagtatctgctctttgatttaaggttgcatatacagctgtacctggaccttctcctcactgggctcttgggttggagcccgtgtcttaaaacccatatcttcctttcacatggtttactccctcgttttctggactgcatccttaaataatgtgctcagatagagtgcatggggagtaaactgtagtggataccgttgtcacctaccccatatccatttcttctttgcccattcctaacagaatcctgatattattcacctttctaccttattcccaacttcagaaaggatccttaagtcattccacacattgcattcctttggcaactgttactggtcaaggatggacatacgatctaagttggttcactcagactgaagggaaggacttccatggcacgttcagggaagactttctctttttctctcactggagtaagtgagaaaggtgttgctgggggctcttctgtaacctcagactgagggacaaagcctgaggataaagcctgctcaccaaggaaggcggagcagagaaacgggaagaacctgggtcttgatgccgttgcttagctggtgattgcactgtggctggggcctgtcctacctgagctagggactcagataggatggactttcttactgaatgagccagcttcagttttcttttctgttacttgtaaccaaaagcattgtaacagataggtcttctgagtcactgcatgcctgaaatacctttcttctactcttacacttgattggctgagtatagggttccaagttgaaaatcattttttctcctaactttggaggcatctcttctagtatgcagagtaacaaatgcaacaaatgcctgatgccaatcttattatggttcttttgtaggtgcccttcttttctcttccttccctggaagtttttaggatttcgtctccttatttttagtgtcctgaaatctcatgagaatatgtctagagttgtgtcttgttcactcgttgtactgtggtcattcaatctgaatacttttgtcaactcttttttttaaaaaaaaattactaatttacatgctttcattttctctatggggactactgtttaactttggacctcttatattggtcttctgtcttctctcatatttttcatttattgggcggtggggggtgctctgaattttggaagatctcctgcatttattttctttttccttttttctttttttttgaggcagagtcttgctctgtcacccaggctggagtgcagtagcctgatctcggctcactgcaacctctgccttccaggttcaagcaattctgcctctgcctcccacgtagctgggattacagacctgcaccaccacgcccggctaatttttgtatttttaatagagatggggtttcaccatgttgccaggctggtctcgaactcctgacctcaagtgatccgcccgcctcagcctcccaaagtggtgtgagccaccgcacccagcctcctgactttattttctatcccttctgttaaattctttatttcagccaaacctttttttttttttttttaacttactgtgaagcctgtgtgcctactgcctagattagacaattgttaacattttggcgtattttcctggtctgtatagatagggtgcatttttatacctttttgctcaccatttaaaaggaactcacagatgtcacgacatttcacccctaagtacttcagtatacatctcctaaaaataaggacattttccaatataagcacaataccccgatcacatctttaaaagttaacaataattctctaatgttatcaggcacccactttaaattcagatttcctccaaatgtctcttatcgctgttgaggggctccaaagcaattaagatttatacattgcatttgaatatgcttcctttgtctcttatttatttatttattttattttgagacagagtctcgctgtctcccaggctggagtgcagtggtgtgatctcagctcactgcaacctccgccttccaggttcaagcgattctcctgcctcagcctcccaaatagctgggattacaggtacgcaccaccacgcccagctaacttttttgtatttttagtagagacagggtttctactaaaccatgttggccaggctggttttgaactcctgacctcaagtgatctgcccgcctcggcctcccaaagttctaggattataggcgtgagccaccatgcccagcccctttgtctcttttaacaagaacagcctacccacctctccttcacttgtgatactgactttttgaagcagtcagcccaattgtcatctagaagggcccacattttaagatacatatttttagagatggcgtgtcactatgttgcctaggctggccttgaactcctggcctcaagtaatcctcctgcctcagcctcccaggtagctgggactacaggcttgtgccaccacgactagctggcccacattttagatgtctctcttttcttgtgatataatttaacttgtttgtccatatatattacttgtagacaagaagttaggtctacaggcatgttcaggttaaacattttgggcaagaatatttcataggcagtactgtgtacttcatatagcatcagctcaccaggcacttaatggttggttaccctgtggtttgtgatgctacgttttaacacttgattaaagaaggaggtgactgccaaatctccccattgtagacatacagttttcctgtggtaattgatatataatctgtgatgtgatgctttggcaccatacaaatatcctattgcccaacagccatttgcataattattttagcattcattgatccttgcctgaaaccattattacattgggggttgcaaaatgatagtttttttaattgtcacctcttctacatttagtactgtcattcctctgtaatgaattttccctcatcaaataaggaggcattatatttcctcctaaaaagacagtatagatgcttaatctttgcctttattacatttcagagtaaggagttggtagaataatcacctcaaatggtggcaaaatatttgctgttgtgtttccttttctctttcatgtcaatatggactcatagggatttatttattaaatgttttacaattcaaattgggtcaacaagagtcccttcatgttggttcctatattctcctggcataccctcattaattagtctttgagcaatttcttgttttctggcacaagatattccatcccaatatgtgcttttcgtgtcctagaactgattccaaggagctctggttccttatagtggcaacggtatttagaatccaacatgtgggtactaaatgtgctgattcttactggggtaacattatatctaggcactttcagaggacatcgctagaaaatatattcagtttttattttttatttttaatttttttgtagagacaaggtctcactatgttgcccaagctggtttcgaactgagctcaagcgatcctcccacctcagcctcccaaagtgctgggattacatctgtcagggcaaactgctggtaaatattttcacaaaagaaaaataaaaaaaccaaagtgctgggattacagatgtgagccactgtgccctccattttttttttaagtcataaatacataatgatgtcttctatggcaatttaacattacagggttcttccttaacttttttttttttttttcttttttttgaggcagggtcttgctctattgcccaggctggagtggtgcagtggtacaatcctaattcactgcagcttcaaatgcctaggcttcaaacaatcctcctccctcagcctcccgagtagctaagactacaggtgcatatcaccatgcccagctaatttttaaaaattttttgtagagatggggggtctcgttgcgttgcccaggctggtctcgaactcctggcctcaagtgatcctcccatctcgatttcccaaagtgctgggattacaggtgtgagccaccatgcctggccaacttttatttgatctgtatatatcttttccttacactgaaaatgttgggtcttactaatgttaacatagttacttatttgctttatcttgtaatagacataaaattacaaaattataataccaatattacgataaatagctgggcatggcggcgctcgcctgtagtcccagctactcaggaagctgaggtggagggactgcttgaacctaagagtttgaagctgcagtgagctgtggttgtgccactgtactcctacccggacaacagagtgagtggggggaaaaaaaagaaataatggaagatccagagaaagccccaaatatttaaaaattaaacaatacactttgcagcttcctcacctctctcagccttcatagaattgaagagagttagggccttgcactagattaggctttgccttaaggaaatgttgtgtttgatttgatcttttatccagaccattaaaacttccttaacgtttattagtaataaggctatttcactttcatatcatttgtgtgttcactggagtagcacttttagtttccttcaagaactttgattcacaacttggctaactttggtacaagaggcctagcttttggcttctcggctttcaacatgcctctcactaagcctgatcatttggtttttggtttaaagagaaagacatatgactcttccttttacttgaatgcttagaggccattgtagggttattaattggcctaatttcagtactgtcttgtccaagggaatagggaggcccaaggagagagagagagatgggggaacagctgattggtggagtagtcagaatatacacatttatcacttaagttttgccatcttttctttttctttttcttttttttttttgagacagtcttgctctgtcacccaggctggcatgcagtggcatgatctcagttcactgcaacctctgcctcctgggctcaagcaattctcctgcctcaacctcccgagtagctggtattacaagcgtgcgccaccatacccagctaatttttatattttttagtagagacagggtttgccatgttggccaggctggtctcgaattcctgacctcaagtgatccacccgccttggcctcccaaagtgcggggattacaggcgtaagccactgccgcctggccaagtttgccaccttttttattttttttattttttgagatggagtctcactccatcacccaggctggagtgcagtgatgcaatctcggctcactgcagtctctgcctcctggattcaagcgattctcctgcctcagcctcccgagtagctgggactacaggcatgtgccagcacgcccagcttgttttttgtatttttagtagagacggggtttcaccatgttggccaggctggtctccaactcctgacctcaggtgatctgcccggctcagcctcccaaagtgctgggattacaggcgtgagccaccccgcccggccaagtttgccatcttttatgggtgcagtttgtggtgccgcaaaatgatgatagtagtaacatcagagagcattgatcacagatcaccataacaaatataataatgagaaatttgaaacattgtgaaaattaccaaaatgtgacagagacatgaagtaagcacatgctattggaaaaatggcactggtaaacttgcttgatgcagggttgccacacaccttcaatttgttaaaaactcagtatctgcgaagtacagtaaagcaaagcacaatcaaatgaggtgcgcctgcatattacaaccaagaggcttttcgcagaaacacgagtgtgcttcaacattcaaaaatcagttggtgtaattcaccacattaagataataaaggaggccgggtgcggtggctcacacctgtaatcccagcactttcagaagccgaggtggacagatcacttgaggccaggagtttgagagcagcctggccaacatagtgaaatcctgtctctactaaaaatagaaaaattagccgggcagggtggcacgcacctttagtcccagctattcgggaggctgaggcaggtgaatccttgaaaccaagaggcggaggttgcagtaagctgagatcacgccaatgcattctagcctgggcaacagtgagacccagtatcaaaaaaaaaaaaaaaaaaaaaaaaagataataaaggagaaaaaccatatagtctattcaataaatacagaaaacgcatctgacaaaattcagtgccctttcatgataaaaattcagcagattagaaatagaggaagtgcatgtatgaaagagctacagatagattgtacttaattgtgaaatattgaacatgttaccccgaaaatcaggaaaaaggcaaagatgtccactctaaccacttctattcaacattatactagaggtcatagccagtataatgaggcaagaaaaaacataagaggcattaatatttaaaggaagtaaaactgtttctatttgtaggtaatgtcgaaaatgtgaaagaaactatcagaacctgctagaactaaaaagtgaattcagcaaggtctcagggtacgagatcattcaaaaactaatcagaaatgaaatttcaaatgcaatatcgttaggaataatttaataagaaatgtacaagatttacacgctgaaactgaaaatgttgctgaaagaaattaaagacctaaataaatggaatgttgtaccatgttcatcagctgaaagactaagtgtctttacagtgtcagttctcccttcattgaactgtagattcataaccccagtcataactgcagggttttttttgtagaaattgattgtaaaatgtatatggaagctgggcacggtggcttatgcctgtaaaccagcactttgggaggctgaggcagacagatgacttgaggtcaggaatttgagaccagcctggctaacatgacgaaaccccgtctctacaaaaaatacaaaaattagccagacatggtggcacacacctgtaatcccagctacttgggaggctgaggcatgagaatcacttgaacccggaggtggaggttgcagtgagccaagatcatgccactgcacgcccgcctgggcaacagagtgagactttgcctcaaataaataaataaataaaacgtatatggaaatgcaaaggacctagaacatccaaagtaaacttgaaagagaacaaaattaaggggcttatgtgatgtgactttatagtcatttgatttttaacagaggcaccagaacagtccggtgcgggaaaggaaagtcttttagcacgtgccggatgatggcaaatgacatccataccagacaaaaatgaaccttgaccttaccctaaatattagtttcttagagttgccacaaactaggtggcttaaaaccacagaaatttggctgggtgcggtggctgacgcctgtaatcccggcctttgggaggccgagtcgggcagatcacctgaggtcaggagtgcaagactagcctggccaacgtggtgaaactttgtctctactaaaaatacaaaaaacttagtcaggtgtagtggtgcacacatataatcccagctagccaggaggctgaggcaggagaattgcatgaacctgggaggttgcactgagccaagattgcaccactgcactccagcctgggtgacagagtgagactccgtctcaaaacaaaaccacagaaatttgctgtctcataattccagagtctagaagtccaaaatcaactgtcatcagggccatggtctctgtgaaacctgtaggggagtccttccttgcctcttcctagcttccagtggttggcaacctttggcattctttgatttgcagctgcattacttcaatatctgtcttcctcatcacacagcattctccatgtatgtctctgtctttacatggcctccttcttgtaagaacaacagtaatattggattggggcctgccctactccagtgtgacctcaccttaactaattacacctgcaacaacgctgtttccaactaaggtctcagtgtgaggtactgagggttaggacttcaacatatcttttttgggggacatagtccaacccatgacactacttcacaccatacataaaaattaattcatgagagattatagacctaaatgttttaaaagctaaaaatataaagcttctgcaagaaaacataggagaatatctgtgcagtccaaagaataaggttttttttaaacacaatttcactctgttgcccaggctggagtgcagtggtgcgatctcagctcactgcaacctctgcctcccgagttcaagcgattcccatgcctcagccttccaagtagctgggattacaggtgtgcgccaccatgcctggctaatttttgtatttttagtagaggcagggttttgccatgttggccaggctggtctcaaactcctgacctcaagtgatctgcctgcctcggcctcccaaagtgctgggattacaggtatgagccaccgtgccaggccaaaaaaagatttattaggatacatgaagcaatagctattaaaagaaaaaataaattggacttcattaaaatttaaaacttttggtcctcaaaagataccattaagaaaatgaaaagacagagctgggcgtggtgaggcttgcctgtagtcactactgggtacttgagaggctgaggcaggaggatcacttgagcccaggagttctaggccaacataggcaatatagtgagacagtgtctcttaaaaaaaaaaagaaaaagaaaaaacaaaagaaaataggctgagagctgtggctcatgcttgtaatcccagcactttgggagtacaaggcagatggattgcttgagctcaggagttcaagaccagcctgggcaacagtgaaatcccatctctacaaaagatacaaaaaattagccaaccatggtggcgtgcacccgtagtccatagtcccagctactcgggaagcagaggcaggaggattgcttgatcccaaggaggtcaaggctgcagtgagctgaggtcgcgccaccgcaccccagcctgggtgactgagtgagaccctgtctcaaagaaaatgaaaagacaagtccaccaagaaaacagttgagaccagtcatagaaaaaatagaaagtcatatctgacaaaggatttgtattcagaagaattcctataactcggtaataaaaagacaacctgatttttaaagggtgaaaatattttaatggatacttttttttttttttttgagacagagtctcactgtgtcacctaggctggagtgcagtggtgccatcatacatagctcactgcagactcgaactcctgggctcaagtggtcttcctgcctcagcctcctgcgtagctaggactacaagcacgtgccactatgcctggctaatttttaaattttttgtagacatgggctggtgtgtgtctgtgttgtctaggctggtcttgaactcctgggctcaagtgatcctcccacctctgccccccaaagtgctgggccaccacgcctggtgtggtgtcaccagagatgagccaccatgccctgcctgatacttttcttttatcatctgtttatttcttgtttatgggtgtttctgttctgattttatgactattctgtattctaagatttctctgagaatattatttgtttcctctaaggacagacttggtctctcttccatggggctggttcttgagccgccagggatggggggaggacctgggtagctgctgcgctgccccttctctgctgtggtggagtggcccgttgcctgcggggtctgtctctgaagggtggtttggagaagttctgtggaggcgaggcaggggtcagctcttgccccatggaccctcagagactgggaaaaggtaggcatcacctgggctgctgccagccacatcaagagcctttggggtgggtggggtgggggccggggaagggaaggttctagctgttgatttagaaaagacccattgatttcttgcctgagggaagaagtggcaccttgccactccaagtttgctctgctcaccagccccaacagcatcagcctcacctgggagcttattgaaggtgccctgccccaaagcttgtgggtcgggatctggcagtcagcagcccccaggtgttgcacacatgacagcactgcttgcccctcctctcgtctggtctggtctggtctggtctggtctggtctgagagcttctttggggctctgacaggtatacaggctctcatctgctctacagctctcttgtagtacattcctctctgttccattagtcaacatgttcttgcctacttccagcatctagaaatttgctgagtgtatcttatccgttcagaggtcctctcctgctattgcctctgttagaaatttcttccctttcatatgtctgtacttcggtttctttgaggtttgaagggtcaagtggcaattacatgtaggcagttggccatcctctggtgaaggctttaaagcccaggaataacaagatccattatgtctaaaactagcaaaaaccctacctgtcacatggtgaactgaattagaggtgatggggacagaagccagattggagtgagtggaaggtgagggagtggagattgggtatagacaactctctttaagaagttttgttgtgatggtgaccagaaaaataggagtggggtagagggggatgagggtgtttttcacgtgggtgaatatgagagcatgtttacatccttctgggaatggcccaggagagaggggagcgtgagaaggaggaaatggggacctggaggagcagactccttgtgtggaggggggaagcggcatctagagctgttgcaggaggtgggctttgagtaaatgcttcctctttggtaaagacggggaacgggaacggtagaagttgcacggaccctttgttaaagctcagaagctgagcgagaattagagcttaagtttatggagtagtcagaataaagtacccctaactgtattcttgcacagtgcaggaagccaggggtctgaaatcaagatgttgcagggctccattccccccagagcctctagcatggatccttccttgcctcttccagcttttggtggctgcctggcagtcctagactttccttggcttgcagttgcattgctccattctctgcttgtgtcttcacatggccttctctgtgtccccgtattcttctctggatgcttgtcactgtattaggcccaccctaaatccaggatgatctcatatcaagatccttcacttaattacagaagcaaagaccttccaaataaggtcagagccacagggtctgggggttaagacatacacctaactattcggggctaccatcgaacccctgtagaagcctgtccatttccaggatagcagagcccaaggaagggccagaagtccccccaaaacagttgtttgcattcaccagattctaagctataagcagatgggcagtggcagtcggtcctaatccatataccattggcaacaatagtttagttcactgtagacataatgagatgcttatcttctgctaagtagtcctcatggtaacagccatattactcctggctttgagtgacagcgctgtgctcttgtctggtgcccatatacttcagcagctggaaacaagacagtgctcatgattcaccggaaagtttctgtagttaaaatcaagtgatcccttgagtctattctaatatttgtctgtaccatgttctgtgacgagacatggaaacaaaacattaagaagtgaaagtatctttgattatgctcttgaagacaactttttgtttgtttgttttgtttgagacggagtttcactcttgttgcccaggctggagtgcaatggtgtgatctcggctcactgcaacctccgcattcccgggttcaagcgattctcctgcctcagcctcccaagtagccaggattacaggcatgcaccaccacgcctggctaattttttttattttagtagagacggggtttcaccatgctagtcagactggtctcaaactcctgacctcaggtgatccgcctgcctctgcctcccaaagtgccgggattacaggtgtgagccaccgtgcctggccgaagacaactttttaaagatgcatatgctctgggctgggtgtggtggctcacacctgtaatcccagcactttgggaggccaaggcgggcagatcacctgaggtcaggggttcaagaccagcctggccaacatggtgaaacaccgtctctactaaaagtataaaaattagccgggtgtggtggcgggtgcctgtaatcacagctactcaggaggctgaggcaggagaatcgcttgaaccccagaggcggaggttgcagtgaattgagactgtgccactgcactccagcctgggcgacagagtgagacttggtctcaataaataaaataaaataaagatgcatatatgctctgaaggctggctacattttattttttctcaaacaacttttacagtggatagtgctgtaaaagttgtttagctctggtcattttatcttttttgtgatctgcaaaaggagatccttttccttttcactgcctctaatacccaactccaatactcctttgacctcacaggcacttagaatccatcagtggctccatcttttctcagacttcacctccttcgtatccttattcctctcctttgtagcttcagtgccagtcagacgtcgttactccctggcacactacctcagcccttcggcactttcttgctttgttatattcagtcgacaaagccccagcctcatgaaattcagtcatgtctgccccatgcctgctccgtcctgaagctgaatgtgactccttcattgattccccctttaagttcatgtctaccccaggtaaacttcttgccgccaagcccacctgcatactgcagttccccggtctctcctagcccctcccaccctcctcatcagctgtcacacctccttgcagctgatatcttagttcccagagagcacagaagcaagctcaagagagtgtctacaggccagcgtctactccttcgctctgcctccctcatgctgtcacggagcgcctgtcccaggccctcactcctgttctaaggcatctctccagtcctctactgcactctcccccatcagagattcctccctcgcctgccctagaaacttgttgctacttctcccaccttgacaaaagctgctcccaaccccccacctgtctagcatctctgttttcctttaccagcaagactccagtccctgtctccacaccctcttcaaccttctccagttgttcctttgctgccacagctctgccaagctgctccatgaggtctccagtgatgaccttcatgttgttaaatctgggagctgcttgtcacttcttttcccagagctgtcgtcgtcagttaaccccaatacccatacgagacaatcctttccctcccttgagtctctgcactgatgtgcaccttctcagtgcaaaccacagcttttgtctctttctagctgaatacatgactgactgtgcttatcttagctgtcacccctgctggagcagaagctccacaggacaggattgtctccttgattcacagatgtagctcaagctcctagaacagtgcctggtgtctgtgggtcctcaggaagtcctaggtgagtgtgtgaatgtctgtcctcctcggtcttttctgtttcgcatgtgatgttggaaggcctcaggttcaggcttttcttctccaccctcactcccgaagtgattccgtccagcctcatggctcccaaatttatgtctccaggctgactgggtcacgggaactccttatcctccctagaccttctctttccctggtcttctcctttccagtaaacagcaactccaactcctgctcctcaggccagaaacctggcgctggttacctcatttgttcacaaatactgttactccacctgcaagatggatacaaaatctcatgagttcccctgcctccatggcccccaccctggtccaggtgtccagcttccctgcctctgcccttgccccctggttctttgtttagtcctgcaatattgtgctcttctgttcagaaccctccagtgggtccctgcttgctcagagtcacagcccaacaggatcacctctcttgccactctcccaccactcatgcactgcggcctcactggcctcctggctcctccctggaccctccaagtatgcccctgcctcaaggccttgacctctcctctgccctctgtcccaggtatcacacatgtctgctcaagtgtcaccttcccaatgtggccttccccgagcacacccatgtctgtaagtcaggcagcctgcctctgccccaccagttccccctgcctagcataggacttgtcaccatctgccacaagctgtgttactgcttggttttgtttgtgctctcccactcccttcccctccctccctctccccacccctatagaatctgagtcccatgaggacagagatttttttttttgcctcttcctcaatatatccccagtgcctagaatcatgcatattttaatttattgagtgaattaacaaataaattctgcagtgggacattgctctaaggttttgtcttataagagggacagaagaacatgcagcctgctctgctgttggctccttagcttctccatggctaacaggaacaatattgtttatgagataatcaaagccatagtcatgagttagaaggtacatataaaggcaaatatgtggagattgagttactttggcgggggcggaggggtgtgtagttatctgaaaacatggaacaaatcaatgagagtctaaatagcacccacatatttgcccctcttttaaaacatacctcctttatgagtgtagaatttaacagcacagtttcccagtgcagctttgcgaaacaagagaaatgaattttaaaggctgtcaggtgcctttgcaatctgtggcttagtatttgtgtaacaacatttgtgttttgccaacagatgtactgcttaaagtacccatgagaatggcctctgtggttttctactttctcggatggaaccttaggaactgattattgagaagaggctgatactgcccacctcagctcccaggcaggcttcagggccttggttactactcctttgggccctcactgacccttgcagacgtcttttgcaacctctgtagccagaagagacaactgctttctggcatgttgctctttccctaatggctttatgagcttcttgaacaccaaagcatgtgtgacttcctcacgccttcccctgtatagtatagcacccctaactgtatgtgtaaggagaaggagtgagcaattgatggcgtccccctggatctccaagggaatgggaaggggcagggtttctggattcagtcatgtggaatctggtcgttggtgtctaaatgtgcctgttacttgtgcccaatgtccaggttcaccaggaggcttagcctgctcatttccctgctagtagctatattttgggagagcattttttatgctctaattgaactttgtgggtctcagcaatttgaacaatgttttgtttttcttctggtcaggttacaaaggaaagaaaaggaatctggtgttgtaggaggtggtgtgttgtgtaattacttgttttttttttttaagtttttttatatttttgcaacaaggcaagttttctttgaataaataatgctgggagcttatcacatagaaggcatatgtgttgtactcagtacattctgaattatctgggtttatttttatctcttgaattcacttataaacaattcaaaggctgcttttttagctaacagaaataggaagagaatctcagaatctgttttgtcattttttcaatgggttgagttatagtgattatgctaactcggtggaaaagcagtgtagtgagtaaaccccacatacggcatatcatgaacattttgttgcttttttggcttctgaccatcttcatacctttttttgtgttaaaagtctccccattgtgtatatcttagtaagaggcaggtggaccctagtttctacctaagaaaacctgaagatggggttgggggcctgtggtgtacttccttctcatgctgtccatgaccactgcagtggctttgtaaggatccaggacccagggcccctcagtgggtgtcttccatttctcaagattgcctcttggttgtgagatgacggttgctgctctagtcattgcatccactcctccaggtaggaagaaagaggtcataggggaaaggcaaaatggcacttgacatcttaacttctaggcccattcaatatttccatttccatcttcacacccatcatcttgtcctagggaacaaacagcaccagcagctcagtagctataacagcaattattatttctcacacatgggtctgggtcagctgcaagatgggattcagatctgttctcaagcctgtcgttccaggacccaggagggagaagcagctgccaggggaagtctcttcgtaggcggaggtcaggagtccaagaggagtgagcagagtcacagaagcctcttaaagcctcttcttcccccatcccatcaacacgtgagcaagcccagagtcagtgggtgggaggtgtgctccgcccatagtcagtagaacaagagcaagcttgaaagagaacgatgaacaggagtgcactcggccactgtctccttagccataacgtagtcccatggtctgctgggaagcggggaataactctccttagctgagcgcagggtctcattagtaaggcagatggagaacatggatgttgggggacaactggcagtgcctgccacaggggaatggatatattccctccccttgctctctggaaactaggggatggcgatgaagcctaggtttggccaaacccattctgccttcagggactttgactcttgagggacagtgagggattagtcatggtggtggcagttgagtcacaaaaccagcagtggtggctaatgtccagtgatgacatgcaacagtgcccagggtgggtgtcccaaccagcaggtccctgcagtataaccttggctgtgtttgcagtggtgcagcctctattcctgctgcttttctgagcctagttctctagttctctctccatttccagatctgctgcccaagaactcctttgtgattgaatttaaccagagttgatttctgttgcttgaaactcaggaccttgatgcagtgtgcagggtctgggcaaggtaaaaacacactttcatgatttcgcctcaagtatagtagatgagcttaggctttttgagccaggtagccttgggattaattctcagctcttgcacctagcaggtgacctcagcaatcaagtcacttgccctccttgagcctcagtgttgccctcagttaaacattgctctcgtgtgttgctgagcattcagtgagattgtatataaagtgatcattgtgaaggtattgggacataatttgggaaagcgtcctggtctaagcttttgattggctctccatcatttgggtaatgggatagtgatttaggagtatcatagcagctcaaggggcccttctggaaagggtatgaggaaggtcagggacaagtctgaaatgaatcatcctaggcttaatgcctgtgactgggcagtgggtacaattatctcaggctagtcagtagtcatttattgtgagaatacatgggcagattttttaatttccttctcagtctagacttgaatgcaaacagttcttattgctaacttaccactagtcaccactaatgaacaaagactatgaacaggaaattcataaaagaagagatacagatggccaatgaagataggaaaagagttctgcctgctggtaatcaaagagatgcaaacgagaacaaaaatgatgccttttcacctaccaaatttgtcaagattaaaaagaaagcaaagagccagcgtcagctgatgttcatacctgcacctgctcggtagcttgctaatgttctgcctgctccacacgccaggccagcctccacggcgcagccaggtgaggcctttccttgtatacaggcacgtttggattcactgttgcataagtgagacatgtgcatgcttcacaattcaggaagtgcaaactccagagtgatgcaaggtctgagtgtccctgctgccctggtctcccagctgcctaggcctctcttcagggaacggctgcatccagggtcttgtctgtgtcttttgaggtgttctatgtacacgcagacacatctaaacctatttttattttccctgcacctgcttgggctactgtaagctgttaaatttttttttctaggaatttgtccattttgtctgactagcataaagttgttcatgttatagtttatacatttgcaacatctgtaattatgtctgctttttcattcctagtgtttgttgtttacttgtaccttctcccgtttttccttgtcttggtaaaagctcattaggttcattggtcttacaagaagcagacatgtaggcattattgccctgtattactctgtgtctcttttctagttcattaaattctgcttttgcttttatctttattattttttctatggtcttagagtacattctctgtgttttgttgttgttgttgttgttgtttgttttttgttttgagagagagagtcttgctctgtcgcccaggctggagtgcagtagtgcaatctcagctcactgcaacctccacctcctgggttcaagtgattctcgtgcctcaacctcccgagtagctgagatttacaggcatttgccccacacccggcaaattttttgtatttttagtagagatggggttttggcatgttgaccaggcgggtctcgaactgctgacgccaggtgctccacccgccttggcctcccaaagtgctgggattacaggcatgagccaccacgcctggccctaacttcttaagttataaatttggttcattgatttttctacccttttttcaaatgtaaacatttaaggctaaccctctggaactacttcaactgtatctagcaagttctgatagtattgtcactttaagttagcccaaagatattttaaattttctttgtttcttcctttgactcacatattattttaaaatgtgtttttcaatttccaagcacatggctttgggtttgttttttttttttcctagttgctctagaaaaaaaaattgactgcatgaggtggctcatgcctgtaatcccagcactttgggaggccgaggcgggcagatcacctgaggtcaggagttcgagaccagcctggccaacatgccaaaacctcgtctctactaaaaatacaaaattagccgggcatggtggcacacacctgtagttccagctactcgggaggctgaggcaggagaatcacttgaaccgggaggcagtggtcacagtgagccaagattgtgccagtgtactccagcctgggcaacaagagcaatactccgtctcaaaaaaaaaaaagaaaaaaagaaaaaatcaacttctaactaaatggcactgtgatcaaagaacttggtctgtgtgacaccagttcttgcagttggttgagaagtgctccatgacacattatccacaaccagtggacagaatatgtcaccaccaagcatgggtgcaggattctacatatattcattacctctgtcttatccgtttgttgtgaaagtattttctcttcttactgtcattttgtttacttgatttatcaactgatggaatacgtgttaaaacctactgtggtgatggacacatcagtttctccacagagtttggtcattttcattttattatttattttgaggccacattttcagttttagatacagtttcacattcctggtgtattgaaccctttggtattatgaagcgaccatactaatatgttatttttttttaaattattatttattttatttatttttctttcttttttttttttttgagacagggtctccctctgtcacccagtctggagtgcagtggtgcaatctcagctcactgcaacctccgcctcctgggctcaagtggtcctcccacctcagcctcctgagtagctgggattacaggcttgcaccagcgcgcctggctaagtttttgtatttttagtagagacagggttttgccatgttgcccagactggtctcaaactcctgggctcaagcagttcaccagccttggcctctaaaagtgttgggattacaggtgtgagccaccacgcccggccatcccagttttttattttcctcctttctgtgtctttatgcatcagtgaggtggagcttttgaaaatgtcagatagctagattttttttttttgagacggagttttgctcttgttgcccaggctggagtgcaatggcgtgatctcggctcactgcaacctccacctcccaggttcaaaacaattctcctgccgcagcctcctgagtagctgggactacaggcacgtgccaccacacccggctaattttgtatttttagtagagatgtggtttcaccatgttggccaggctggtctcaaactcctcacctcagctgatcacccgcctcagcctcccaaagtgttggaattacagacgtgagccaccatgcccagctgatagctagattttttttttttttttttttttgagacggagtcttgctctgtcgcccaggctggagtgcggtggcgcgatctcggctcactgcaagctccgccccccgggttcatgccattctcctgcttcagcctccagagtagctgggactacaggtgcccgccaccacgcgtggctgattttttttttttttttttttttgtatttttagtagagacggggtttcaccgtgtcagccaggatggtctcgatctcctgacctcgtgatccgcccgcctcagcctcccaaagtgctgggattacaggcgtgagccaccgcacccggcctcgagattttttaaaaaatccattgtctgtttcgtcctttaacatctatttgatttctgatgtatttagattcatttatagcatatttgtgcattctatttttccatattttctgttcttttaaattttccttctcctttcttgccttctcttagacttttaaaaaaattgtagtaaaatacacatcacctaaaatttaccatttttaaatgtacagttcagtggcattaaatacaaattggaggccaggcatggtggctcatgcctggaatcccagcactttgagaggctgaggtgggaggattgcttgaacctggaggtcgaggttgcagtgaggtgtgatcacactactgctatagcccaggcaacagagtgagaacctatctaaaaaaacaaacaaacaaacaaacaaacagattggcatcacacagtgtgtgtgctgctgtgctgtgctgttatcatttaacattaaaacataaacatcagcactgttatggactgaatgtttgtgtcccccaaaattccagtgttgaagctcaaacctccaatgtgatgttatttggagatggggtatttgagaggtggttaggtttagatgaaatcaggagggagggtgggtttcgcatgatgagattagtgtccttataacaagagacagcagagagcttgctttctccaccatgtgagtatgcaatgagaaggcagccatctccaagtcagaaagagagccctcaccaggggctgaatgtgctgacaccttgatcttggacttctagcctccagaactgtgagaaatttcagttgaataggccccccagtctgtactattttgttatagcttgagcagactaatacacccatgttatgaaaagctataaacatccctttaaaggccacctaacgcgtcgtattacctcatgcatcttctctgctgagctttccaaaagagtggcttaggctgggcctggtggctcatgcctgtaatcccagcactttgggaggccaaggcaggtggatcacctgaggtcaggagttcaagaccagcctgaccaacatggagaaatcccgtccctactaaaaatacaaaattagctgggcgtggtggcgcatgcctgtaatcccagctacttgggaggctgagccaggagaatcacttgaacctgggagatggagggtgcagtgagccgagatcgtgccattgcattccagcccggccaacaagagcgaaactccatctcaaaaaaaaagagtggctggccgggcgcagtggctcacgcctgtaatccccgcactgtgggaggccgaggtgggtggatcacgaggtcaggagttcaaaaccagcctggccgagatggtgaaaccccgtctctactaaaaatagaaaaactagccaggcgcagtggcaggcgcctgtaatcccagctacttgggtggctgaggcaggagaatcgcttgaacctggggggcggaggttgcagtgagccaagatggtgccactgcactccagcctgggtgacacagtgagaccccgtctcaaaaaaaaaaaaaaaaaaaaaaaaagtggcgtatgttcccggtctccacctctcattcgccagcccctgtgaccaaacccctgggattagatctccatcgggtccctcccctcaccctaacctcacatgcagtggttcctgagaagctgctgtttatctgatcacgggatccagcaggatctgagggctcattcactgaatctgtactacccaacaaggcaggcttgtccttacccacacttttcaggtgaaaacttaatcagattcaagcgtttatcttagtggcctcttcgtggtgtgtgatttccttcttgcagctctttactggctaaaactcttcactgggagttaaaccaggtgtggtccttgaccctcatcattttgtcccatctcctatgctgggctctgtatccttgtctccaagcagtctcgtgtgacagggaagttacctattattgtatggtcccctcttcttgtcacctctggtgtggcacttgttccatttcttgttcaatgaatgtgatttgtgaatgtgccacatctgtgggaggaaggcagttcgcagcaagagttgtagttcccttgctttgccctgagggccaggactttacactagatttttttgttgcattcctgcactcataaagtacacgtaaacttagaggtggtgtgttaaatgctagaacttaaaactgagttcagctaggctcaagtgccccacaatttttgtcccaccagacaatttcatgaatatctacagattgttccctcaatatgcctcaatattgaggcatattgatttggggagcacagacaagtcaaggttgatgtgcatccgctgaacatgatcttaagttgttgaagtaggtattattaatgaacgaacgtctattttagctccaagagcccctggtcttccagaagagactcccaatgatcttccagaagcagctgggcttcttttggtcctcccccacccaggtgcagtcccgttctccctgcctgggtgagtttgattcctctgccgtggaataggctaggctgctacctcttgagcctcttccaccaggccatccattaggtggcgacagagagcactaaaaggaactactatggaaataaaacttgttttgcttcttggggggaaaaaaaaagaaaaaggcttgtggggcgtgtgtgcattttagtcagattttactgtgcaaaacatttgagagatttctgccctctttctcccttccattcttctcaacccactgggcgccctaccacccctgtctccttcaagataaggtagatcagaagaccaaatagacaaatgccatgtccactgttttctgtcacagttgatagccataccagtcacccaagctggaaacccaacaggcccctgcccttcactgcccacatccaagggagccaccaagtcccacaaattgttcctttaactgtttgtccctcttttgtcttctgtcatcccttctaccgctgtcctggttcaatccctcatcttgctctgggactcccatgataacttatgatctttcctccacctctctatcttccacacaatccctatcatcaatctcattcccctgctttaaacccaagagtggcaccctgtgtttgagtgacatcagggcccctcatgtggctcctgcttctctttgtggccccttctgttgctgctgcttttcttatggacatagccctcagcagtccaggactgcttgtagttcctcccaggtaccatgtttcttgcactcctggcctttgtcattggctcccctgcccaagtccccttctcttctcctttccttcccctgtggccttgccttgtcgtgcttatccttgaagaccctgtcaggtatctcttccccaaagagccctgcctaaccaccgcccccctcccccccgcgacacacacacctgggttaggccctgcctctccacgcctgtgcctcctgccaagtcctcagaggtctctgatcccatgtgcctccaggcatggcatagggggactgtgacacagcctctcggcccacagacccctgattgtgggcttgctcactgccccagtcagtcctcttattgaggattccgtgccagttcctgactccagcacacacacgcatgtaggccgccctcctagtgcctggctccttccctgtctcttctgccactcattcccatggtcgtatcctggagttggtcatctctggaactccacccacggagttctaacttagctctgcctatgatgaggacttactgtcttcccagcttgcagtgtcaaccactgtttgatgcccctgggactccattggtcttccctcctcttgtgaactgtgcccatcaccagacgaacttgttttagaatttaccatcgtaactgagctcccttcagcgcatacctccttggctcctgctcagtctctgtttctccttttagccaaactctctaagagttctctccactcatgggccctcttccttgcctgctgctccttgctcagcttgctccatgaacacttgcttttccacattccatgaaataatcttaacagtcatcagtggctgtcactccttctcagccctttccttgtgtctcttctggtacctcatactctccaggtggccatctcacctcacatcttgaaccctctgggtttgggagaattctcacctcacgagttgatgggaggcctggcgacctctgattgtagtcactgcaaatgccagatgcttatttgcctagcttccctttcggtcagggcagcagttggcaaacggtatctcaagggccaagtccggcccactgcctgttttcgtaaatgaagctttaccaggacccagttccaccccgtcctttgtgcattgtccaagactgctctcctgtacaacagcaggtgggctggttgtgacagatactgtctggcccacaaggtggaaaatactatctggccccttacagaaagaaattacctgagttctacacgagggtgtaggtatgtaccctggcctctgccagtcagactcacatgctaggaggagcagggccaggcaggagagccgtgtctcctggcattggggctgcaggaaagacgagctcctaggccacagtgccagtggccagtgctgctgccttgcagggtcgcacaggcagtgctggctgtttggactggcttggcagaaggatttgaagtattgttcctagccaactggactcaaacctgttcctccaaccctctagggattctcttatcacccagtagccttttccccctagttttaaaaattgcagtaaaatacacaaaagataaaatgtactgccttaaccatttttaagtgtacaattctgtggtattgagcacatttatattgtgcaaccatcaccacatgcatcttcaatagcttttcatcagtccttgtctgcataaatcagctagagttggtttctattgattgccaccaataatcttgacagatatgtctgatcttccttctctgcactgactcctctttctctgtctcctctgctgattctttctcctcatcacaactccaaatagcagggggagggttgtttacacttatattcagcacgccctcacgcactcgcctggctcttcagacctctcccctgaactccagattcatacatccagctgccctttaggcctctagaaagctaaatacctcagtatcaaaaacatgagaaacggaagccagagtcctggatctctcgccctttcgctgtcccggtgcccatgcccttcagggatggcacctagaccagctccctgcatccctgcctagactctgcagtagtctcacgtggcagacccggaggtcactctcctctctggatgccctgcggacactccggttagcctcagctgcaagagcctcctcacccaaggtcacgccatttccaggacagcaccctggtgactgagcgaggtaagggtacaaggcccttatagggccttctctttgacttcttcccacctccctttatggatgtcagttcctgatgaacatcttacacctcaaaccgtgacccaacatctgcttctgcagagcccccctgtggcatcttgtgccctcctgccccactccctctactctatatcttcccatagttagaatgggctttttttttttttttttgagataaggtctccctttgtcacccaggctggaatgcaatggcacagtcacgactcactgcagcctcaacctcctgggctcaagcagtcctcccacctcagcctcccaagtagctgagactacaggtatgcaccaccacacctggctaatttttatattttttgtagagactggggtctccctatgttgcccgggctggtctcgaactcccaggctcaagcaatcctcccgccttggcctcccaaaatgcaggattacaggcgtgtaccagtgtgcccagcctcagatgggctctttgaaaaatgtttattagatcaggttactcccttgagaaaaaccctctcagaataaaacccgaagtccattacttgaaagcagagccagcttcatgggcctttgtaactgcccatgggcttgctggaacccaggcttggtttaatactctactctcaccatctcaaaattcttaatttttgaacaagaggccctgcattttcattttgcaccaggctccacaaattgtgtaactgggcctgcctcagcagccacatggaacatgatccctccttgcctatttgagctcattctctaccattctctcccttgctcacctggctcccactgctcttgctcttcctggaacttgccataatgttgctagagtcagagccttggctcttgctgctcctcattggctggacccctctttacttgacctgctccctcaccactcacttccttcagatctgtgttcagatttcgtcttctcagagaggcttttggcccctgtccatctctctgaatttacctctgacctctcccccaccaccactgcgctaagctgcctcagaactttgtagacattctgtctggtcttctgatgtttcccccttggaagaatcccaaggtgcctgaagaatgctttctttatccttgaagttgagtaggttgactagagtctggcttgctattgagcattctttatcaaattgtcctgggaacatggtgtattctttcagtctgcagatgtagtcgttgctgtttcaggtcagctctcttatggatctttgacagcatcttctgttccatttgttgagttctgtacttcagggacacaaattcctcatgttggattgtctttgtctctcttccaatgctattagctttgccgtaattggtttagcttttgtctttttcatctgcattcactttgtctaatttgattttcagctatgtatattctgtttctggctgtttttcaatgtatttattagtttcataatgatgtgttttggtctgcagtttgtttctctaggttggaaatttgtcttttcatcttattctgttttatcatcccatctttgaactcttttattgggaacatgttcttatgaagttgtggggaatttttttcccttccttgtgtattctcttcttggtgggagactttgcctttctcgtgccatctccctccctgggcctcttttttttcttctggccataatatgtttgcctagttaccatgtcacttcttttcgtcttggctcaggcttggatggctctgcatagtcgttctgtttgctttgagacagtggaggaattcttggctctctcttcccagtttcttggcatcttctcttgctgttttcccctctgagctatcgcgtgcaggcttgttatcttgtatccggagagaatttgcacgctggagggagctgcagccatgtagtcttcagccctatctggattcttctctttgttctaagaactgtgttggatgtcttactaaggctcactctagctgcacgagggatgtgtgtgccatttccatggggatagggggcacctcagtctctgggtggttccataatctgtgtatacctaagagcagttgcttcccacagagctgggctggctcactgggcactttgccatttctcctgcacctcccagctggagtttctgggtctaaaaggaaaaagtgaaggactcccacttggttgcttctctccagcttactgactgcaaattcccagggcgttgcccgctccctagggtggtttctgggggacggggcaggagcctggctttgctgctgctttgtcctctggagtcttttctcagactgctttgaattacacccctttcctttgtgtgctgaaatcttcccttcacactctccttccctgcctttcttttgtgtcttatcttactaggactggaagagggcagttgtgcaggaggtctgcatctaattccctaatccatgtgagagtgctcctgttgtgtgctttgtgacatgatggtgagaaatactccctagagcagtggctaccagaaggaagccatccccccccctgcacacacacacacacacacacacacacacacacacacacacacacactccttctggctgtcctcagatgcctattctaggtaaatgtcagattccaaagaaaatccagttgagatcttttttctttttttgagacgagagtcttgctgtgttgcccaggctggagtgcagtggcacaatctcggctcactgtaacctccgcctcctgggttcaagcgattctcctgcctcagcctcccaagtagctgggactacaggcgcgcaccaccacaccaggctaaaatttttttgtatttttagtagagacagggtttcactgtgttggccaggctggtctcgaactcctgacctcgtgttctgcccgcctcagcctcccagagtgctgggattacaggcttgagccatcgcgcccggcctccagttgggatcttgactggaatgactggtgttcaatcattatagtttccacctaatttgtatttgtacacaggacagttactaatttgttggtacttgtttgatccccagtccctagagttgtttatggggtggagcttcagtccctgctgcttcccctgtggcagcagctggagtcagggtggggacccagggtgctgctggcagattcttgagacaggtagaatctcctctatattggtgtctctctctgtcccagcagtgcccaggaaaacctggccagcctgtcactgacctctccacctagggcactggtggttcaggtccttctatttgccaccggcaaaccgtacttctgccagtctggctcttaggcccagtttctctgatcttgcagattttcttgggctctgctacggaatcctcatacctccggcaggtccctcctttgcccatgtgtttaactgtggtggaatcgtgtgagagctgcttctctcgcatggatcccagccacaccacattctacagcggttcctctgaaggcattgatagagatatttcctcctgttttgcatttcgttggtcatttcagtagaatcagggtgaaataaacatgggggctcagatgtcagcattacgaaccaagtacgtcaggcaggctgatgtggactgacctacactagtgagacgcaagatgacgaaaacaagggcactcactccaagttactgatgagatgtttggatcaaatgagccagtccttaagcagagttctctagtaaaagagatctcctttctgccctttcttgttccccaaaatgtgttgccttcatggtgaaaatttattttggcagattttctcttctttgataaaagcagccaacactttgttaaaagtctgtgaaacttatttacatgaagtatgtaaaggtaagaaaaaaacattatcaacaagaaatggagaaagccagcagctgaggacagaaaagtcatgcacagtgtcagtgtctatggaaacaggccacttggaccttgaggactaggtatttggaattggaggtgagcttggcctggtgagtctctaaccacttgtgtgtaggatcagtgtgagaaccctgctagaatatagtggcagagatgcaaggggaaatcattggagaagttaccagggaatgatgagctaatctgaaaaaaatacatgtttctaagttgggcgtggtagctcatctgtagtcccagctacttgagagcctgaggcaggaggatcgcttgagcccagcctgggcagcacagcgagaccctatctccctaaaaaaaactttttcgttgtttagttttgggatttttttttttcctggtcttttttccccctttttgtgaataacgggatctcactatgttgcccaggcagatctcgaactcctgggcccaagcaatcctcctgcctctgccttcctaagattacaggtatgagccactgtgttaagcaaaaaaacttttttaaatgaaaatcattttttaaaagacaggctttccaggggagggtattattccacttatatgaagtgtcaacagtaggcagatttgtggagacaaatagattagtggttaccaggggctgagaggagtgggagtggggagcaactgcttaatgggtaaagggttgtctttggaactagagagtagtgatggtcgcatgacattgtgaatgtactaaatgctattaatgataaattttatgttatgtgtattttaccacaattaaaaaaaaaagatcaaatgtcctcagaatagccaacaaccttccacttggctaaatgcctactcattaaacttcttgaactaaattcctttctgattgtcatggttattgtgtcctgggcttcagagtttcacattcaggttggcttggtccagtctgtcatgtatcactataggtccccacattggcctcttcctcagacggacagcccatctatctgccggggctctgtgccacagccagatagacttgctctgagacagctgtgtgggctctgagcactggccaggcatcacaaaacctatctttatgatttagaataattggtggtcagctgctgttttaatgttgttgttttttttaatttagatataattcacataccatgaaatttactcatttaaagtgtacaattcattcttcagtataattcataggctcacagaaaaaattgtttaaaaataaaatgtgcaattcagtgtcttttagtacattcacagagttgtgcaaccatcgcctctgtgtcattccagaacactttcagcacccaaaagaaaccccagacacaggagcagtcacctcttattacccgcagcccctggcaacaactcatccacttcctgtctctatggatttgcctattctggacatttcctataaatggaattatgcactatttggccttttgtgtctggcctctttcactgagcgtaatgtcctcaaggttcatctgcattgtagcatgtgtcagaatttctttcctttttgaggctgaatgatattatatcctatagataatgaggttttgattatccacccatcccttgggaatgcatatttgggttgcccccaccatttggctgttgtaaactgtgctgccatgaacactggtgtacggatatctgtttggttactggttttggttttttgtttgtttgttttggttttttgagacaaggtcttgctctgtcgcccaggctggattacagtggcacgatctctgctcactgcaacctccacctcccaggttcaagcaattctcctgcctcagtctcctgagtagctgggactacaggtagcactcaccaccatgcccggctaaatttttttgtatttttagtagagacaaggtttcgccatattggccaggctggtctcaaactcctgacctcaggtgatccacccacctcagcctcccaaagtgctgggattacagacgtgagccaccgcacccggcatagttgtggctttttgagagtgtatggctaggagtaaaattgccaggtcatatggtaactccatgtttaacatttgagaaactgccaaactgttctccacagcaggaattttttaacctgtatgtggtgggcttgtgtttcggttttcattttacacatctataaagatgagatttgctgtatggcactggttgcctgtatttggggagggttctgcttttggttggcaagaactgcattttatttaagcttagcaaaacataactggtttctcgcatcttctcaaaagtggaggattaagaaatggactgcgaattcagagcagggcagctgaacctcaggctccacccttgtagccttcaagctgaacctcattctctcttgctccctggagaccactgagacactctgcctgtgccagtttgatttctcacatttttaaagggccaaagcttgtgtctcaaagtgctatagcctttattgattcatgcagagaagcctccttgattccgtaattctgcagctaatactggaagtagaaagaattggaaacaccatctggatgacactttagggtggaagcagccagtacaagggggggctcattatttcctctggtcccagactgttcacctggagctgtagccaccaccctgcccttaggttaactgcctcgagtggtagtttagctctttgtgctgtgccgagggataactggaagtgaaaggtgctgagaaatgccatctcctgaaagtggcgagcatgagtgaatttacgaaaggttgggatattgctggggctctggaagtttctctggagctcactccaggggacagggagggggctggattccaattcaagtgaaaaatacctttcatctgccttgttcacctggcttttttgcctttttgtaaaatctgaaaacctcagggattgagtagtctttccttaactgcagttgcctgtctggccacacctgccagctgttgcttgtacccctgtaatttgcacggccttccgggcctttctcacaagatcactgcaggtcacattcatgaggaaaatgcaggcagttcctgccatcagacccctcaggatgtcatggtttggcctgaaaacaagattcctgcaactctaattttcctttgctagatcaaatgaaggatttgatctaatgtttgcattctagcagcaaaatcattgaatattttatttcttaagagccttacttcatattttgtaggtattttaagattttgtaaaggcctttctgcttcaacgtgtgatgtgtgcattcttagaaaaagatcttgtgttctgtaaatcacacaataaaaacatgagttcgtgcaggaaaaactggggcggggtggatcactccaaacttgtgtggtgtggtaactggagctcactgatgaaaccatgaacagttctggctgaaagaaccccacagtacactgaggtctgttggcatcgccgccagcaccgccccggtccctttgtgcgcgccaccacacctggctaattttttatttttagtagagagggggtttcaccatgttggtcaggatggcctcgaactgacctcgtgatccgcccacctcagcctcccaaagtgctgggattacaggtgtgagcctccgtgcccagccttcagctttttttcttaatgtctttgtgtaatatgaaggcattctctttaattgttaaaaagcttgcctaccactgcttcaaaatattactgtcagttggcatagcttctgattatattgatgtcatctcccttcttttaaacatgttaccatattggcactgtatttcccctagcccattgatcacttgagagttagtcatagtcctcgtgctgtttcactcctaaacgtttaagcatgcctttcctaagagcagacagtacagttaagacactcaggaagtttagcaatgagctaacacagaaccttacatttctccacataccccataaatgccttttttagagcctttgagcctggaatgcagagtccaggactgtgtgttgtattcgattgtgtcatcccttcagtctcctttatcagaaatgttcccccacccccttgttttctctcatcatcttgagtccagaccgtggttgcatggcacgccctctctggactcttcctgctgtctcctcacggtaagcttcagtctcctactcgtgatgctggttcatctcagcagcactgaggggcctgagctcagtttggtcgtgtgttaaggtggtgcctgccagatttctccacagaaaagggccccgtacttttatttgctcttcagcctgtgtattccttcctttcttgccagcttgtgggtggcttctctagcagcttctgtaagatactcagtttggcagttgtagttgtttcagcaggagaggtgtctgcatacctgaccaccacatggctagaagtcgatccatcctctggcgtaaccatcctccatgctactgtccctggggcactgaggccctcctcagtgacttcctccacctcatcttccgccatctccaagccaccagtgtccaacggactactgatatgtcccaaactcatcatttgtttattcaccaattcagagcccacctttttttcagcactgagctagcctctccttgctagaagcttacggtcgaaggtctccagccatcagaagaagcacgtggagcgctgcgtccgtgttgtggttattcatccagcatgtgttgagtaagggttgcacctgtgcctggcattatgcattgagcggggagatgggggttggcacgcacagtggggtgttctaagtacactgagggctcgggtgccctggctcatagagcagggagggaggcaggagcagggaaggtgtctcagaagtgccatctttttttttttttttttgggaagtggaatcttgttctatcgcctggtctggagtgcaatggcactatctcaactcactgcagcctccgcctcccaggttcaagcgattctcatgcctcagtccccgagtagctgggaccacaggcgcacaccaccacacccggcaaatattttgtatttttagtagaggcggagttttgccatgttggccaggctggtcttaaactcctggcctcaagtgatctgctcacctcggcctcctaaggtgttgggattacaggcatgagccactgcgcccggtctagaagtgccatcctaactgaacctgaaagatgaaagttctccagatgaacctgaaagttctccaaatgaaaaggtgggagggggtgacagggttaggcccagagcctctggtgacacagggtgggcatcattggtcactttttcctcgagggaggggcgtcacacgggtgatagggtgggagctataaccatgttgatagtgccgcctctgcccatctggcctggcatgccctgagccctctgtcccacctgtggaactcataagccctgacagcccactcactcctgattcattatccacacccctgtgcttccgctgtgcctggagcaagctttcttcagggggaagggaggctggaactatgttgtagttacctatttgtcctcccttccaaactgtgagttcttggaggtggaaggatgctgcaggatctggctcaggacgaaggcagttggtgaacagacacgtgtgtttttgactcacggtgatctcagacaagttcctctgtctagtcgaacttctttttttccatctgtaacactcaggagttgaataggtggtttttctgaggatacttcaactgtaaaatgtatgaacttgtgaactagctatttagttctcctcataatcaagattgtgtgtgtgtggggggttctgattagagggaggatgaagagaggtgtatggggttttttttgttttgttttctgtttgtttgtttgtttttgagatggagtctcactctgtcacccaggctggagtgcagtggcacgatttcggttcactgcaacctctgcctcctgggttcaagtgattctcctgcctcagcctcctgagtaactgggattacaggcatgcaccaccatgcccagctaatttttgtatttttaatagagatggggttttcgccatgttggccaggctggtctcgaactcctgacctcaggtgatccacctgcctcggcctcccaaagtgctgggattataggcatgagccaccacacctggcaggtttctttgaaaaagtttgtgtttcggcaaacaccataaaccccctgggggacagccttggggagtcacctggcaccctagcccagcctccctcccttgggtcctgcagtgaaggcttagtgagggtgtgcaaatgcccaggtcaccctgggactgggcaggccctctgggctaagggtaaactcatttggaatacctgttttctatcattgttttttatttgttaaatttaaagggtacaagtgcagttttgttgcgtggatatattgtatagtagtgaagtctgagctttcagtgtaaccatcacctgaatagtggacattgtacccgttaagtaatgtctcatccctcaccccctcccacccttcccagtctctccagtgtctgccattcctcactctgtccatgtgcacatgctattcagctcctgcttctaagtgagaacgtacggtatttgactttctgtgtctgagctgtgtcactgaagacaatggactccagctccatccacgttttttatcatttttacctgcactccacacccagcacaatccaggcttctttgtgggttttttgaaatttgtctttaattataaaagtagcagccagcaaattaacaaacacccatgtgcctttcattgcacagaattgaaaatcatcatactatatttgcttcaagtaatttccattagaaagaactagaatattacagtagagttaaagaccctttatttcccatcttcagtgctcttaaaagttcatttagggccaggcatggtggctcacacctataatcccagcactttgagaggcccaggtgggtggatcacctgaggtcaggagttcaagaccagcctggccaacatggcgaaaccccatctctactaaaaatacaaaaattagctgggcgtggtggtgcgcatctgtaatctcagctactcgggaggctgaggcaggagaatcgcttgaactcaggagggaggcagagcctgtatgcagtaagccgagattgcgccaccacaccccagcatgggtgacagagcaagactccgtctcaaaaaaaaaaaaaaaaaagttcattcattgtacacttagaaatagttaaaaaggtaaactttgttttgtgtgtgtgtgtatatatatatatatatatatatatatatatatatatatatatgtatttttttttgagacatatatgtgtctggtttgttcgcccaggcaggagtgcagtggcatgatcaacggctcactgcagcctcaacttcctaggctcaagtgatcctcctgcctcagcctcccgagtagctaggattacaggcacacaccaccatgcccagctaattttttttttttttttttttttttgtagagacagggttttgctatgttgcccaggctggtctcaaactcctgagctcaagcgatccacctgcctcacctcccaaagtgctgggattacaagtgtaagccaccacacctgacctgttttgtatattttaccacaataaaaagcctttaaaaccccaagcagacagttcattttcattcaggcccaactcagaatctgatcacagcggggtttcccccctttctagcgagtagctgaagaactgttttctctccttgatggtataactgtctctgtgggtgttgctcccctgccgctccagtggttttgtttttgtttttgtttttttgagacggagtcttgcgatctcagctcactgcgacctctgcctcctgggttcaggcgattcttctccctcagccttccatgtagctgggacttacaggcacctgccaccacgcccggctcatttttgtatttttagtagagacggagtttcaccatgttggccaggttgggctcgaactccagacctcaggtgatccacctgcctcagcctcccacagtgctgggattacaggtgagagccactgcacccagccggcccctcagtcttttccttctcaatcagtggcaccaccatcttcccaggctttggacatggtccctgactcacccttgcccctcacccccacactaatccacctgcgagctctgttgcttcaccacctagaccagccccaaatcctcaactgcccccaccctgggccacacctggaccactgctagaggcctctcatgggccctccctgtttttctcttgcactccccgggctttctggcacaagatgccccagaagcagaatcacatatctctcctgggagccaatctagtgtgtttactgcccctggagtgttattgttggccttagaatatgtcccactacaggtttgcagagcactgtagtcaaaagtcatttgaaataaatcttttctctgtggtatattgtcaatttgatatagaattaaatttgtttcttttcttttttcttttctttttttttttttttaagagacagggtcttggccaggcgtggtgtctcatgcctgtaatcccggcactttgggaagccaaggtgggtggatcgcctgaggtcaggaattcaagaccaacctggccagcatggtgaaaccccgtctctgctaaaaatacaaaaattagccgggcgtgatggcaggtacctgtaatcccagctactcgggaagctgaggcaggagaaggcttgaactcaggagtcggaggttgcagtgagccaagatcacgccatggcactctagcaagactctgtctcaaaaaaaaaaaaagagagagagagagacagggtcttgctctgtcactcaggctggagtgcagtgatgtagtcatggctcactgcagcctcatactcctgacctcaggtgatcgacccgcctcggcctcccaaagtgctgggatcgtaggctgaagccaccatgcctggcccgaactcatttgtttttatttgcattaagtgtaataaggttttgttacttttagtttgaattttattttgggtaatataaacatttacatgattcagaagtcagaattacactgaggcatgttcagctaggcctcactcctgtgcctgtacccttacctttttccccctaccccatgcagggaatcaatttcattagttcctggtgtgtccttccttaatacccccccttctttctttggtagaatgcagtagatatgtttgcgctttgctccctttgcttcacagtggatcctggaaatgactccatcgcagttcttagagctcttgtttagtccctttggatctgcacagtactccagtgtgtgggcgcaccataagtttattcagcaagtgccctggtgatagggatcgggggtattggaagcctttggctggtaaaaataatgttgtagcaaataacatcatgcatatgttctttgagatttctggaggtgtctctttagcatagatttctagaaggcattccttacgtcacgtttaggtttatagtttgacctcatggtgattaaggtatttgggaaatgcaaatgagagtttcgaagaagccagatctttcccattagttcactgtttttctctgacattaggaccgtccgggttctagggagcagccctggcgttaggcagtgccatgatggattgtgtagaagtagcgattcccatctgtctgctttcttggcccactctgctggtggctccccttccctccctcctttatggggagctggggagctgcctaggggtccattctcaaaggctgatctctggtgggcaacaggccacacctagctttccagggttcttcgtcatttcccattgagagctgtaagactcagagacatgaaaaggaagctctggctgggcacggtggctcacgcctgtaatcccagcactttgggaggctgaggcgggtcgatcacctgaggtcaggagttcgagaccagcctgcccaacatggtgaaaccccgtctccactaaacatacaaaaattagcctggcgtggtagcacacgcctgtgatcccagctactccggaggctgaggcaggagaataacttgaacccggcaggcggaggttgcgatgagccgatattatgccatcggcaacagagcgagactccatctcaaaaaaaaaacaaaaaacaaaacaaggcgagctctgtgctgggacagattagggacccctctttacagcaagaaagactgctctgtgggttgtaggatgcctttgtgtatgcagtggctctaggtgactctggcagccacactctgggccctaaacttctggaggaagatacaggatagggaggaactcaggggtgagtcatggtggggacaagacattccctcactctaagaccttgtcactagattggaacatctcttgcctccctacacctgacctgatggttctggagagatacgtccttgcagcttctgagtcccagcactaagcagcctttggtaacttccctacatcatttgagttctggtttcctaaggatgcttgccagtgagtgccatggtgccctcattgcacagtctgtgcagtgtagacaagaggggaagtctcttggggtagaccagccgcaaggcggtgactagcactgatgtgaaccacatgggacaggggagttgtggggctgagaacacggagggtgggagtagtcatgctcttttccagaatgaactgctaacgaagggactcgcaggtggctgctgcttctttccaagctgcccctgttgttgcagaggctctggagtcctaggaggtttcacggtggcatactcgacagagtactagagcatcatggccagatagtgatgctggggtgtggggcctcacggtggccatttctgacgagaccccaccgggccaaagtgatgtgtagagaaggagctgcttcggtcaccagaaaagaacggggaagcctcccacactagaataggtagggtgctcttctccaccggcaggaaggggatgtatggctctgcctggaccacacctttttccttgctcttccctccgcatctgctgtggccgaggccattcctcatcagggaacatgtgttagaggctcacgccacctgggaccacttgtcttatcacccccaggaccctaggcggtagtttcctgtggcctgagttagctgatatttatatagtgccattgtgccttttctcctgtgatgctcacagtaaggatgcctagatggggttacctgttgtcaagataaggaaactgaagcacagaatgctgaggtcatttgctgggttcatgtttggaaagcggcaaaggatttcagtgcaggttggctggctccaaacctgtgtgtgctttccatgacactgtactgtgtgcctcattgagcctcattctagaaaaccaaaaacacacccaaggcccggccttcacaaaggagacccctcccccatttggctccctttccagcagtcgacggcctcttgtcagccatcgagcccagagtcccttgaagtgcgactcatgctggggtggtatgctcaggagccgcagtgtttccgctcagaggaaagggctctgattctcctgcagtgctaggagacttgtgggtggccacagtgcaggtcaggcacaccggccagcaccacccacagcccaaattcctaaagaaatatttgggtcccagcttggcccgagtctctgttgtcctggggaaggacatcaagatctgagtgtatgatggcctggggccttgcatgtggtgggggtccaagcctgcctctgctcacttgttctgcagactggcatgttctctgtgatacttacatacttgtttaacacttcagggaagaaaagtcagaagaccaggacctccagggcctcaaggacaaacccctcaagtttaaaaaggtgaagaaagataagaaagaagagaaagagggcaagcatgagcccgtgcagccatcagcccaccactctgctgagcccgcagaggcaggcaaagcagagacatcagaagggtcaggctccgccccggctgtgccggaagcttctgcctcccccaaacagcggcgctccatcatccgtgaccggggacccatgtatgatgaccccaccctgcctgaaggctggacacggaagcttaagcaaaggaaatctggccgctctgctgggaagtatgatgtgtatttgatcaagtaagtaagagcaactcctatctctacagggcagggagggcagggacaaggatccctcatggagcaggaaaatgtatgtgcccagggtggggtcggggggaacataaacaatgaacactgagaccaggtgtgcttgaaatgaccgtgtacagaggtcgctgccctgagtgggaagttctcaaggtagcaggccctctatcctctccacacctcaagtctttatctggggatggaatagctgcggaagcagaggaacttgcagagctaggggttcagaggggtgaagaagcatgtttcagttctgccttttaaatgatcccaaaaaggttagcagttttcaaatgacatttgcagacagcctcatttaattccatgagaagggtgagcaaaggattatcttgttgaaactgattcctggagagactgagcaccgtacctgagttcaaacttgggaatgttctagatggtgactcaggcccaggcaccaaccagcagaatgggcctcagcctgacaacccttctgtaccaggcctgactctttggttgctgaactttggagaggcctgggggggtcagcggcaggcagacgagtgagtggctttggtgacaggtcctcaggggcagccaggcagtgtgactctcgttcaatagtaacgtttgtcagagcgttgtcaccaccatccgctctgccctatctctgacattgctatggagagcctctaattgttccttgtgtctttctgtttgtccccacagtccccagggaaaagcctttcgctctaaagtggagttgattgcgtacttcgaaaaggtaggcgacacatccctggaccctaatgattttgacttcacggtaactgggagagggagcccctcccggcgagagcagaaaccacctaagaagcccaaatctcccaaagctccaggaactggcagaggccggggacgccccaaagggagcggcaccacgagacccaaggcggccacgtcagagggtgtgcaggtgaaaagggtcctggagaaaagtcctgggaagctccttgtcaagatgccttttcaaacttcgccagggggcaaggctgaggggggtggggccaccacatccacccaggtcatggtgatcaaacgccccggcaggaagcgaaaagctgaggccgaccctcaggccattcccaagaaacggggccgaaagccggggagtgtggtggcagccgctgccgccgaggccaaaaagaaagccgtgaaggagtcttctatccgatctgtgcaggagaccgtactccccatcaagaagcgcaagacccgggagacggtcagcatcgaggtcaaggaagtggtgaagcccctgctggtgtccaccctcggtgagaagagcgggaaaggactgaagacctgtaagagccctgggcggaaaagcaaggagagcagccccaaggggcgcagcagcagcgcctcctcaccccccaagaaggagcaccaccaccatcaccaccactcagagtccccaaaggcccccgtgccactgctcccacccctgcccccacctccacctgagcccgagagctccgaggaccccaccagcccccctgagccccaggacttgagcagcagcgtctgcaaagaggagaagatgcccagaggaggctcactggagagcgacggctgccccaaggagccagctaagactcagcccgcggttgccaccgccgccacggccgcagaaaagtacaaacaccgaggggagggagagcgcaaagacattgtttcatcctccatgccaaggccaaacagagaggagcctgtggacagccggacgcccgtgaccgagagagttagctgactttacacggagcggattgcaaagcaaaccaacaagaataaaggcagctgttgtctcttctccttatgggtagggctctgacaaagcttcccgattaactgaaataaaaaatatttttttttctttca

SEQ ID NO: 5 - DNA, 67085 bp, Homo sapiens
gctgtggtaaaagccgtccggaaaatggccgccgccgccgccgccgcgccgagcggaggaggaggaggaggcgaggaggagagactgtgagtgggaccgccgtggccgcgggcggggacccttgccggggggcgggggtcaggggcgggacgtggcgcgggaggggcccgcggggtcggacgacacggctggcggatggcgtccctcctctctaccctccccctcccgccgccgccggtggcgactctcccctcggcccgtcacccctgctcgcgggtgaccgtcctcggcgcggcctccctggagccgccttcgcctgacgcccctcttcctcccgccctcgacgcgcatcccggcccccggccccgcgggcgcccctgtcgccggggcttcgcctgtcggggctgcgcgcgctcctgcccttctcggggctttgggccgcggcgccgtcgcgcgcccgcggccccggcctctccctggatcgcgctctccccctccctccctcgcgcgccccctctcccgttactcggcccccccaccggcgcgcgtgcgcacttcgcctcccgtcgggagagtgcgccacaagggctcctgagctctcacccccatctctgggctttgcctccccctccttctcgcccattccatgaatttctgccccccgctacccccccgcgagcgagtaggtccaccggctcctttccccatctagcaggaacaagtaggtggggattattatccacaaaagggactagacattgtgttctgggtcccacaactcatcataaagaggtggttatagttcccatcaggagccgtgggtaggggactgtgcgtccagcagcacccgaggctcttcggcgccagaggctctaaggtgcgagcgtgtccccagggtgctcagaggttctttggagtgctgtggcctcggaatgtgagcaccctcccatcctaccctccccttcgccggcgatcttccagttacataagtggagtgggacatagtaggtaacgggctctcatcgccctggagcgctcgggatcaccggtaccagatggggcaagttcatcgcgacgctgtggctcctgttaattgtgcctgaaaggttatcctctgttcagtttggtcatgaccgaatcacccaaactgaaactcagatgacttttatatggcagtggcaatgtttctgtggttttgcactaaagacttaaggtcattatgaagagtgtaaaaggattgctgtcgcaggggagaccgtttatgacattgctaagtatggaccccgagggggaaaaagctcattctggaattgctctgtggcggttgcttctgttgcgagtgtgttcgggtgtgggttggtcacagcagaaatgggctccaccacaaaattgatattcctgactcatggtcaggcagatgtgtgcttctggttatttttccaggaacaggaatgggctctgccgagcctttcacacgttgtgtctctgctgtgcgggatcagtaccccagactgtgagataacaggatcgaattcaggggttggttggtgatccaggaaccatacctacttggatgtgatactgagtggcctagacgttgtaggactctcataagttttagacattttgttatactgtaaaaatgaagcatatacggcctcagtagtaacattgcactaataggtaattattactctagagaattttgggttccatggctggaatgttcatcagtatctcagcaatttcagttaataaccagattaagctgacctcttgagtcttttgaaatctgctgggtccctataataagacagggtctggattttttaatcttttgggaatttccaccaaggatttagggaaataggcttttatgggcttttcaggatttctatttcaaatcccaatgaggaagtctaggaaacacttgcttttattttcttgcctgaatatgtcagaaccttaaatcacccaatcaatctagaagtactacagttgattaaagtaagtcaccacaggtcacccattcgtggcaggtcagctaggtggctgatcactggaatacagtcatatccccaggcatacacacgagcctcacttgacgatcccaaagtttgtacatctgagcttgagacgtgacaagttgaggtctctgctttgttcttcatagttggcagtttgtctcctcgggtgcccctccggttagctgtttatcatacgtctagccctatcaacagtgcaggcagcttccagagtatagttttctctgcaaagtgcctggtggaggggtacctccttttccattgtcctaatggctccactgggcttccataccagccctttccagtgtcttaacagctcaaagaaacccatctgtggctttcttgttagcactggcctatcacaccttcctattgcctgttaactaaaattttgcctggaatgctttaagcttagagtactgggtctttgtttcacccgattgataggagagtgtcatgcagtcagccgaactccgacttctgtgctgtttaaatccttaggtaggtctggggcaaggcacaaaccactgtgtattcaaagggttatggtgcttgcattctgtgtgtatatgtttgtaatttccaaccagagtcgtttcccgtgcctgccctgcctctgtgcaatctagtctagtagggtagggaggcaagctgtggagtttgaaaaaaaaaaaaaaaagctagatgagtttaataggctgttaccccctccagaacattcctcccatgtggagatgaaacgagaagttcatttctttaacctaaaataaagaacaacagagataaaattgttagttccttattggagcctggtttccattgctaatgtacctgcttgggactctgcatgataaatgacgtgtcctggaacctgaaatcttttataaaggttaatatcagcagaaatcttttaattagctaagagcagcttgttctcaagctgcccgagttatcttggaggagagaatcacaggaaatgtttgatatttctagtaaccagtgttttcagtgcgtggggtaaagcacactcctagactggccagtcccaaagagtgtggcaggacacctgcttgttttccctgccctctgctatggtgacatccttgcagaccagtcttgcgtggctggcagacgcaatctttttttcttgggtagagcattatcaccgctgcgatggaaggaccttgtcctcggtgcctccataccagccctttccagtgaaactactgctgtcccggcaagcccctgtgcgtgtgcatcattccgggtaggacaagatgtgaacaggtccctcttctttgggcttaagtagaagttgtgctcttctgcttttacctgtgtgctcttctgcttttacctgttctcttctgcctttctcttgcaagaaacctgtcgaaagcttgctttgcatgccattgcttaaatactttgatggtatgtatggtatgtgggataactgagtgggagccggaattggggggtgggcagggcatccccacccccacccccacatcaaagggggaatgaccatttcgttagagaataaagcctgagtcttataacttcttcaagcacatgtatgctgggtctcctggcgtgtgaatgtgttcccgctgtgctgtgtggctgttttgcagttactgtagacactgtagtctgggctctcattattgcctctgaagttgacaggaccaagccttagtaaggatgcacttgtcttcctagcccaagagctaggggtgttttatatatatattaactttcttttttagatttcataaactgctctcattttctcttttctttctttctttttttttttttttttttgagacagtctcactctgtcacccatgctggagtgcagtggcacgatctcagctcactgcaacctctgcctcccgggctcaagcagttctctgcctcagcctcccaagtagctgggattacaggcacctgccaccacgcctggctaatttttgtatttttttttttttttttttttttttttagtcgagacggggtttcaccatcttggccacgctggtcttgaactcctgacctcgtgatccacccgcttcagcctcccaaagtgcagggattacaggcgtgagccaccgcacccagcctctggctcttttctttttgacatgaaatcttaagttaattatcttaaactttaagaactagaaggattcttagtccagcaccatcagtttacaaacaaaaaaaacttgtgtccctgagaagttgtgacttttccagggcctcctagccaggataccagtttggtttttattatatagctagccgagtaatactattaacttgacttctgggatttcaaagtattctatgacttgactgtttaagggaattatgaggcctcactgaacctcaaaagataattttaggtaccatcctggtagctgtagagcagcaacagaccagtaaaagacttggttggtgttgcccttcttctgggtttgattacatgagtaattgtgtgaatagtctctaagttgtatgctctgagctttcgtttttagcttataaaagtgctactcttgggccagcatagtatcagaaattagctaattcatatggggcagtttaggctttaactaggaaatgatggttatcttaatgacaaaaaaggtactgacaaaagtccttttttgaacatgtgttcaaaagaaaaagagaaactatcaaactaataactgagtttgttgaacatcgagattgactgatctgagaggcttaaaactgattgccctgaaatagacttgcatgttttggatgatggctttgggtctcccagagcacttggtttcccttggtgctgattttttctctcaggattaaagcccctttatgtgatgttgttacagcagcttattgcaacttcattcagctgcttgaaaaagaagggagactgcctctaggttccatgtgttctttcagggatggtattttgatgttgcgtattctcttgaacatgtattcttccctgagaatttctgtgtgccgtggtagaagaaatacttgccagaaatcgccactcatggtatgcttttgtagtgtcgaagtgtcccctagaggtgacaaggcttgtgatagtgttgattctaacaagcatgaatctttcctttattttagcactgtgtgttacgtgccagtaatttgcagcttatcctttgtttctagctaggtaagctgggaaatagcctagtactttgtctatgtgtttatcttcaaaatgtcccaaatagccctgggaaaaaggtcgtgcagctcaatgggggctttcaacttacaattttctttgttttaggctccataaaaatacagactcaccagttcctgctttgatgtgacatgtgactccccagaatacaccttgcttctgtagaccagctccaacaggattccatggtagctgggatgttagggctcaggtaagtaaccttcctttttttttttttagtatatgtcctggtttggccatctgttttttttttttttaaaaaaaaaaaaaaaaggaaaagaggaaaaaaatatactactcttggacagtataaaagtaccccaaagactaaagacataactgtgccaaactgtgccatataataaaaaaaagtcacttccctgagccctgaaaggtcagtgtgtgtagggttacttggtcgccacagcgtgatctgggggcgggcgtcagattagagccggaactggtgatctgcaacttcagttcaccttgaagcaggtcagctgagctgagagcgcttgcactgagcccttttgcgctgctgctgttgccttagcggtcttcagcatgtgtttgctttggtttggggtaaatggcttagtggtcaacattagtgagcagtggtaatgcattttcagatatgggaactggtatgtggttggttccctagaaggacaccctcctgaaagctgtctcagaacaccgggggccatggctaatgtcatgtgcttgctacactcctcccatggtaactaaagagagtacccagatatacatctggttcttgggactctagaggaggatgagtactttgtaaaaacctgggggccccagtcattctaggtctgacactcaggtgctgtatcagctgcagtttgaactacttggcaccattgtgtggactttagttttgtaaaaatgaatggttccttaatttctcaaccttcaggctcaacatctcaagctgtttgttgttgttgttgttgttgttgttttgttttgtctttttgattagtggtcactccgcatttgatgttttgacatgtggatttcagaacttctgtgtggtaaagcagaatgttccaattgaattttcccattttttttcccctaagcaaaaatgtgagttttcacttatgcggccattgtgattccgactgagaccctaagtcgttctttgttgtctctctagtggtttctgacacctcagtgtgaagctgttgtagacatccataagaaatagcctgcttagggattatgtgagggcaaggtttggctgaaggagaatagaaggtgtggaaggaagcggaagaccagaagagcatcacactgcctcaagtcccaaatttgattctgctcctgatcctgtgactcaaattgtcattctcttttactgctgtggggtgtgctctgggcccagctgacaggacattctttgtactccacgtatttatgctggtgggagttgtatggctagtgctttgtgctttgtctcagaaattgtgtggactaaatgtaatatgggcagtgaatgggtttcttctggaagatgttaggcctggagggtggtttgggtttttacgagtctttttctcagattacagattacgaatggatgttataaaacaggcagtgttgacaccatacagtttctcctaagaaatgtacagagagttcaacctgaggaagctaattgaaaataaacttttaaaaagaaatgtagaaagaggaaatttaaaaagtatcttatgaatgggaaagatgtagccatttgagcttcaaagaacttttgagggaattctcaaaggacagtacccgtctttagtagataaatgcttgatatctatttttcttcttttactttttaaagaattactaaaataatacatggatttatagaaaaatcaaaccacttaaaaattgatcaggtggctgggcaaggtggctcatgcctgtaatcacagcgctttgggaggcctaggcgggtggatcacctgaagtcaggagttcgagaccagcctggctaacacggcgaaaccccatctctattaaaaatacaaaaattagctggccatggtggcttgagcgtgtagtcccagctactcggaaggctgaggcaggagaatcacttgaacctgggaggcggaggttgcagtgagccaagatcacaccactgaactcctgcctgggtgacagagtgagactcggtctcaaaaaaaaaaaaaaaaaaaagtatcaggtaaaaaaatgaaagctccccgcttaatctctgctcccactacccagaataactgctgttaatagcttaatgtagatccttctaagtcttctaagactaaactgtgtactttttgtgttgtaattaacaggagggtttttgttttgttttgttttttctttttttgagatggagtcttgctctgtcatccaggctggagtacagtggcacaatcttggctcactgcaacctccacctcctgggttcaagtgattctcctgcctcagcctcctgagtagctgggattacaggcgcctgccaccacacccagctaatttttgtatttttagtagagatgggtttcaccatgttggccaggctggtgtcgaactcctgacctcaggcgatccacctgccttggcctcccaaagtgctgggattacaggcgtgagccaccgtgcctggcctcaggatggtgttatatatacatattctgcatttttccatctcatatattcatctctgcctcatttcttttaaatagcagtgtagtccagggctgacttaccgtcatgcatttcgttgtctctctatgttattaaaaatgctacaggattgaaattcctcatgtgccagtcattttgaagaatggctgcctagacttggaatttctggtggataccaccacatcactgtccaaaatggctatcccagttcccacaacagtctgagaaagtgccattttcccatatcgtcccagaattggatatacatcttttaaattggtgccgcttggattattactgaggctaaacctcaataatcattgtcatagctcttaatgtattaaagatgttaactctttgtcatgcagatattttcctgttttgtcttacgtcttgattcttgtctttctgatatataaaatttatgttatgatttattcttttgctttcatacttaggaaatccttttttactcttttttttttttttttttttttttttgagacggagtctcgctctgtcgcccaggttggagtgcaatggcgtgatcttggctcactgcaagctccatctcccgggttcattccattctcctgcctcagcctcccgagtagctgggactacaggcgcccgccaccacgcctggctaatttttttgtatttgtgagacagggtttcaccatgttagccaggctggtctcgatctcctgaccttgtgatccgcccgtctctgcctcccaaagtgctgggattacaggcgtgagccaccgcgccccgccaggaaatcctttcctactcttaacaacagatcaatagtcatctatattttcttcctaaaaaacctgatgatgtattatattcatacatacgtatttaatacatacaaaagggccagatgcggtggctcatgcctgtaatcccagcactttgggaggctgaggcgggtggatcacctgaggtcaagagttcaagaccagcctggccaagatggtgaaatcccgtctctactaaaaatacaaaaattagccaggcgtggtggcgggcacctgtaatctcaactactggggtgactgaggcaggagaatcgcttgaacccaggaggcagaagtttcggtgagccaagatcacgccactgcactcctgcctgggcgatagagtgaggctctgtctcaaaaataaaaaataaaaataataattttatagttaagttgccctgtgtttttcctgtgattaaaaaaaaaaatacctgttttgtatttaactttggggtgggataaggtatagcccacttagtcagttgtgtctaagccacttgatgaaccagtcaatccagtcttcacctttaacaaatgctgatttcttcaagtgagcaaaatatctcttaaactttttcctattttctctataaagttgcttttttctgaattttttctttatgaggcttgatgggcagccctatcagcagacaatcattcattcacccaacaaatatttgagtatctgcttcaagccaggggcagtgctaagccctggaagtggtatcttctccttatccgggagtggggctacagtgttcattccagaagactcaagaaaatagcagatcatcacaaaagtaggttttacataaatgaggaggaatccacagggttgtgtatatgtgtgtgtattttaaattctgacataagttggagctttagggtagactgtgacataagagtagtttgttttccaactcatgtaattgccggctgatttttgtcttgaattatgataatggtaacttctgttgaaacaattctgtattcatcttagcttggttgggatgcaataaaagttttgtactggtaaaaatgataattttcttccatgatgattttgaagcttttctgtaacacctgataaaaatagaggggccaggcatggtggctcatgcctgtagtcccagctactcgggaggatgaggtgagaggatcccatgagcccaggagttttaggctacagtgagccatcatcacaccactgtactcctgtactctagcctgggcagcctcgttctttagagtaagacactgtctctttaaaaaaaaaaaaaaagaaaaaagaaaaaaagaaaaggcttttagtgaatatatttttagggtagcaagtgtaatttttataaattgcattatttgaatctaataaataccctcaaagctgaagtcgaattctgattttgattgaaaatattttttacttaaaggaagagggatagaataaatgacacgattaaggaaaagacttcttgtataaggccggggttttttaaatgattttttgaatagttagatggacaatacggaattaaaaaggtggtgtaaaaagttatacggggctgggcacagtgactcacgcctgcaatcccagtactttgggaggccgaggtgggtggatcacctgaggtcaggagttcgagaccagcctagccaacatgacgaaacatcatttctactaaaaatacaaaaattagctgggcttggtggtatgcacctgtaatccagctactcgggaggctgaggcagaagaatcgtttgaacccaggaggcagaggttgcagtgagccaagatcgtgccattgcactccagcctgggcgacagagtgagactccatctcagaaaaataataatagaaaaaagttatatggggctgggcatggtggctcatgcctgtaatcccagcagtttgggaggctgaggcagcttgatcacttgaggtcaggaattcgagactagcctggccaacatggtgaaactccgtctccactaaaaatacaaaaattagccaagcgtggtggtgcgtgcctgtagtcccagctacttgggaagctgaggcaggagaatcgcctgaacctgggaggcagaggttgcagtgagccaagatcatgccgttgcactccagcctggacgacaagagcggaactccgtctcaaaaaaaaaaaaaaaagagttatattgtaaagtatctctgctaccctgccccaaacattcatttctttccctggaggcagccactattacctgtttctttaaaaaaaaaaaaaaattgtggccgggcacggtggctcacgcctgtaatcctagcactttgggaggtggaggtgggtggatcatgaggtcaagagatcgagaccatcttggccaacatggtaaaaccccatctctactaaaaatacaaaaaattagccgggcatggtggcgggcacctgtagtcccagctactcgggaggctgaggcaggagaatcgcttgaacctgggaggcagaggttgcagtgaactgagatcacgccgctgcactccagcctggcaacagaatgagactccatctcaaaaaaaaaagcgtgtgtgtacccgtgtgttaaatttttattataaaatatatataacaggctgggcgtggtggctcacgcctgtaatcccagcactttgggaggccgaggcaggctgatcacgaggtcaggagatcgagaccatcctggcgagcacggtgaaacctcgtctttactaaaaatacaaaaaattagccgggcatggtggcgggcgcctgtagtcccagctactctgagagcctgaggcaggagaatggcgtgaacccaggaggcggagcttgcagtgagccgagatcgcgtcactgcactccagcctgggcgacagaccgagactccgtctcaaaaaatatatatcgatatatataacaatttacagttttaatcatcttaactgtacagttcagtggcactgagtacattcacattgttgtacagccattactaccatccatctctacaacctttcgtcttgcaaaactgaaatttcatacctattaaacactaactcccacttctcccctttcccccaccccaccctctggcaactactattctactctttgtctctattggacatatttttgtgtgtttaggtttgtgtatatattttacatgtgtgtataaatacacaagggtatgtgggcgttgtgtttttacacatactataaaatattgtgcacatttgtttattttaatgtatcctgtagattatttagaatcggttcatacagagccgtatcattccttttaagggttgggtttaaatagtctgttatggatgtaccacaatttatttaaccagtttttaaattttttacttattttttttaatgtttttttagagacaggatcccactccatcacccagactggagtgcaacagcatgatcatagcttactgcagccttgaactccggggctgatgtgatcctcccacctcaggctctcttgtagctgggactacagggatgtgccgccatgcctggctaaattttttatttttatttttatttttatttttggtagacacggggtttcactgtgttgcccaggctggtcttgaactccttgggcttgagtaatcctcctgccttggcctcccaaagtgccgagattacaaccatgagccatggagcccgacaagagtagccttttatttgcagaccattagagaaaaagttgcgtgtaagtagataagcatacgaatttatcactgcaatactgtttgtagagatcacagagctgttaggctaggaagaagtttttagcagttagcactagaaagcaaaactttggaaacttccatttcatcaaaagtgacctcatctgagtagggcatgtgagggaaggacctttttactcgacaaggggaacttgcccagttcttgtttgtgaaccttgaagaaagtggagcatttttattttgggaccattctaggttgtggtagttccttggtactcggggttggagaatctccctctgctgctggaccttctgcctcctcatgctgtaatatgcataagaggtgtcctagaagtattcaggaacaggctgtggttgctttgttgttctgtgactgttgaactctttatatagcagtacttttttaagctgtactaattgagcatttattatgtgtcagttactgtgctagctgctggaaactatcctaccctcagcagtcttctggtctaatgggaggtacagacaggcaaatgggctatgactttacaagaggctaacttctgtgatggagagaagttccagccactaagggagcacataaaaatcagaggagatcctaccaagaattgggaggtaggtcagggaggagacttctttgaaaaatggcatctaagacctgaacagcaaggaaacattagctaggtcaaggacaaagcatcagtggggagagatgcatgagtcttttggaaggaccagcatgtgtagaggctctgacaggagagaatctctcaggcccattcagagagtccactgtgtgaagacgaggcatgaacaaccagccaggacatgtggagaggagcatttttctttttttcttttttctttctttttttttttttttttttttgagacgtctttctctgtcacccaggctggagtgcaatggcatgatctcggctcactgcaacccccacttccagggttcaagcaattcttctgccttagcctcccaagcagctaggattacaggcacccgccaccatgcccggttaatttttgtatttttagtagagacggagtttcaccatgttggcctcaaactcctgaccttaggtgatctacccgtctcggcctcccagagtgctgggattacaggtgagagcccccacgcccggccaggctcggctttctttccaggccccgtcacactcttagatgttccctgggccccagaaggcagcgtgaggtgctctgcccatctatgctgtccttttccaccccaccctatccactgggcccctggggctcccactccactccaggtctcttcatggacccttctttcccttcacttctgtcccaggagacctgggagactcatgggaacaggcatcatcttctccagcacagttcattgtctaatgcacgaaagtgctgggctgtgagaaggtcaggagcttacatggaatgggagtcagctgtggtacaaagtacgctgcttagttctactgattttttattttttatttttacataagactttgatggtaaaggaagcagtgtgtgagcaagctgactcctgtcttgtcaagtaccaggtccactctgatgagcccctgtggacagcactgctgtaactccccaagcctgggctcaggaggtgggccctaagcgctgttcccagctcttcctccatgctgtcagctcttccaccattcttcctggcgtcattctaaggtcctgtcttcccccgccctcttccttcctggcttctacgctcagctcaagtagtagctgtttgggtacttttcacccagacttaggaaatgttatcagttggtcgtattcctgtcagccctcttactatggaactcaaataggacagattcagctgaattcccagccctgtggttgcactctttgtctgccctgcttccccaaggtagcctgctccctaaaggtcaccgagatactccccatgcaaggtttttgttgtattacacatgacaacatggaataaagtgttttgcaaatttactggatgatatcctactatgtggaacatcctacaacttactcttttcactcaacatttgacttttgaacctggtctgtactgctccgtgcagaccaatgttcattcatttgatatgtctccttgtgccatagaaatagttttacaatagaagcctgtccagagccatgagggagaaggggattgtagagaaacaaggattggcatctggtttatgtttacatcctttagtcctgttaaccgagaagaagatatttttatttccatgtttgcgaaagctttccacaaaaaaagcatccattttctagacttattaatagggcagtccaaaggttttatttttagatttgaaagaaagcaaagtaggcttctgagatatgcacatttccctgtgtccctgtctcttttgcaacattccacattgctgctaaaacttgaacatgagcactttcaagcatgtgcttactttctatgtatgactcattttttaaaacattaaagcattttcggccgggtgtggtggctcacgcctatattcctagcactttagaaggccgaggcgggtagatcacttgaggtcaggagttcaagaccagcctagccaatatagtgaaaccccatctccactaaaaatacaaaaattagccgggcatggtggcgggcgcctgtaatcccagctactcgggaggctgaggcaggagaattgcttgaacccaggaggtggaggttgcagtgagcagagatcgagccactgcactctagcctaggtgacagagcgagactctgtctcaaaaaaataaaaataaagcattaaagcactttgtctggtggtatgtaagttttggcattacttagataagttgtattttaagtctttctacacacaataacttatttttaaaatacaagtttctgtgtacttccgggttttgtgtttttgtaaacagcagaaggtattagtccatattaagtactaatttgttctaatattttcagctgtttttggaattacacttggcaaaaaaatagacaaatgtctgcagttgtgacagtttgtttttttgttctttttaactccagaataaataattctagtgagtttttttcttggcttgtaagaacatgggaatgattagagtcatcataacacttaagtagttatagaaggttgaacatctgtagtcagttgtataaaatttcctagtcatccttccaggttgtttaagacaaacaaatacatagtatttattaagctcttataaattttaattgtaaaacatcattgtacaaaactttgaaaatgcgtataggtacaaagataaaaaattaggccaggcatgccatggctcacgcctgtaatcccagcactttgggaggccaaggtgggaggatcttttgagcccaggagttcaagaccagcctgagcaacatattgagaccctatctctacaaaaatatcataaaacaaaatagaatcactctggcgattccactatccaaaaaaaaaaaaaactgctgttaatatttggtatgtatctttctagaccaaggcctccaactttggttgagaattcagccgggtctgtgaccttggatgggaaaaacattcactctttattttcactaatgtctctgaaaacccagatttttagctgggcatggtggctcgtgcctgtaatcccagtgctttggaagcccgtggagggcagatcacttgagcccaggagtttgagaccagcctgggcaacatagcaagaccctgtcttttaaaaaaaaaaaaaatccagccgggtgtggtggctcatgcctgtaatcccagcactttgagaggctgaggcaggcagatcacctgaggtcaggagtttgagaccagcctgaccaacatggtgaaatcctgtctctactaaaaatacaaaaatcagccgggcatggtggtgggcgcctgtaatcccagctactccggaggctgaggcaggagaatcacttgaacccggaaggtagaggttgcagtgagccaagatcacaccattgcactccagcctgggcgacagagcgagactctgtctcaaaaaaaaaaaaaaaaatccacattttcttcaatgacaattgtaagcaacagatcatggtagtattagaatagcagtgactgtcaccagtagagatcaaagatactttcatatcatattatagttgttacagatattttgaaatatatatgtccatcactgcttcaaacttaaggtaattattagacccatctctagatctggttatttaatgatttactgaagaagcacatattatttgagaacgaactcttgaaatatgttgttaatttctgtgcattttacacatttcaaaacattcttctgaggaggggtccagaaggccaaaagggtccatggcagaaaaaggttaagaacacctgttctgtactttgtaccatgtggctacaaatataaaaacagacgttaagccgggtatggtgatgcacacctgtagttccacctacttgggaggctgaggtgggaaaatcacttgagcccaggagtttgaggccagcctgggcaacagagcaagaccccatctcttaaaaaccagtcagcacttgactagtcagttagtgggggaaaacacaggtacagtaaaaggagtcaaaattacacttaaacttaggtcatcttattatatcaaacatttattaacatgtttagtgttttgtgtatattatgcaaagtgtaatgcaactaaaactgtttaacacttctcgatatcacataaatttgttggtgcataatagcctaaaagttacttttgctgttggcattttattttattacttacttatttatttatttatttatttattttgagacagagtcacactgtcgccaggctggagtgcagtggtgcgatctcagctcactgcaacctctgcctccctggttcaagcgattctcccgcctcagcctcctgactagctgggactacaggtgcgcgccaccatgcccagctaatttttgtatttttagtagagatagggtttcgccatgttggccaggatggtcttcatctcttgaccttgtgatctgcccacctcggcctcccaaagtgctaggattacaggcatgagccaccacgctgggcctgctgttggcattttaaacatccttctagagtctttcttatttgcctgtaagcacgtacacatgttgttgttgttttgagacaaggtctgtcgcccaagctggagcacagtggtgcaatcacagctcactacagcttcgacctcttgggtgcaagtgatcctcccaatcagcctcccaagtaggtgggactacaggtgtccgctaccatgcccagctaatttttgtattttttttgtagagacggagtttcaccatgttgcccagactggtctcaaactcctttgctcaaacgatccttccgcctcggcctcccaaagtgccgggattacaagtgtgcacctctgtgcctggcccacatgttgttttagatgaatgagatcatatatgtacttttgtaacttgctacctttcctcaacaaaatgttgtaaatatccatgtccataaaaatagacgtatatcttcacttttccctaaaatgaaaataacttaacttgcattttcttttttgtttttgtttttgttttgagacaggctcttgctctgttgctcaggctggagtgcagtgatgtcacagctcactacagcctccacctccagtttcaagtattccacctacctcagcctccaagatagctaagactacaggcacatgtcacgacgcctggctaatttttaaaatattttttgcagaaatgggatttcactatgttgcccaggctggcctcaaactgctggcctcaagtgatcttcctgccttggcctcccaaagtgctgggattacagtcgtgagccactgtgcccagcctgcattttcttattataaaagtaatacatgttcaatggacaaaaaattttcagaaaatatgcaaagatgaaaagtaaaaattgtccataaatctgtcatctacagataaagataacttctggataatgtttttctaccatcatttttagtaatcacataacatttcgttgtatgtctatgccttcatttaattaagaggcatttccattatttctgcatgttcatgactctgaatgatgatatgtctgcctgctgatggctacaaccctgtttctgcatttcaaacctctctcttgagctccagatttgatggcctcgtcagcatttacttgagttgctcataagtgtctcaaatttaacaagtcccagtcttgatttttttcccccttcaaacctattcctcatgttgtctctatttcagtaaacaatatcaacatccacccagttactcagtccaaaattctaggagtcatccttgattctgctctttctttttttttttttttttgagacggagtctcgctctgtcgcccaggccggactgcggactgcagtggcgcgatctcggctcactgcaagctccgcttcccgggttcacgccattctcctgcctcagcctcccgagtagctgggactacaggcgcccgccaccgcgcccggctaattttttgtatttttagtagagacggggtttcaccttgttagccaggatggtctcgatctcctgacctcatgatccacccgcctcggcctcccaaagtgctgggattacaggcgtgagccaccgcgcccggcctcttttttttttttgatacggagtctcattctcgtcatccaggctggagtgcagtggtgcaatcttggctcactgcaacctccgcctcccgggttcaagcaattcttctgccccaacctcctgagtagctgggcctggctaattttttgtatttttagtagagatggggtttcaccatgttggccaggctggtcctgaactcctgaccttgtgatccgcccacctcagcctcccaaagtgctgggattacaggcgtgagccactgcacccgccctgattctgctctttctctcatcatccctgatctgtcagcaagtcctgttaggccaaccacttctcagcatctgcactgccagtatgctagtccaagccacaaaacacctctcagaggtacgcaacaggactttgttgttgttgtgtgtgtgtgtgtttttttttttttacggtagaattattttataacttgaagtgtagggatgaccttccttttaaaattttatttattttcttaattttttattcccatagattttaggggaacaggtggtatttggtgacatgagtaagttctttaatggtgatttctgagattttggtgcacccatcacccgagcagtgtacactgaacccaatttgtagtcttttatccctcaccccctcccaccctttccctcaagtccccaaagtccattgtatcattctgatgcctttgcatcctcatagcttagctcccacttatgagtgagaacatacagtgtttggttttccattcctgagttacttcacttagaataatagtctctagttccatccaggttgctgtgaatgccattaagtcattcctttttatggctgagtagtattcctttgtatatatatgccacaatttctctattcactttctgattgatgggcatttgggctggttctatatttttgtaattgtgaattgtgctgctataagcatgcgtgtgcaagtatcattatgcaacgggacttcggatgacatattgaacaacttcctcactgatatccttgtgaaacgctacatatttcatgggtctgtttgttataccaacactcaattctgaatgatggaattatttcacatttagtctctttttcatctagccattatagtttagtttaaacaccaagttccattcctgctgcatgctgaaggatttgcagtacatcaggctatagtccatcaattcattccacaattgagtaagtaaggtatctatagtacctcaggccctgtgttaggcagggatggggtaacctagacagatttggtacctgtcctcatggagcttgactttagcggcagagacagatcttagataattgtaccagtacttaagtgttcagaaggacaagtatggaggtgggagccactccagtcctctacagtcacgtgctgcacaacaacgtttcaaccgacaacagagcacacatacagtggtgttcccataagattagaatgccatatttttactgtaccttttctatgtttagatatacaaatacttaccattgtgttccagtgatctacagtattcagtatagtaccatgctgtacagttttatagcccaggagcaataggctatataccgtatagcctaggtgtgtagtatgctacaccatctagatttgtgtaagaacactctctgatgttagcacaaataaatcgcccaatgacacatttctcagaacatatccctgttgttgagcgactcatgactgtacaatgggggaacagctcagcctgccttccccaaggaggcaacgccgatgcagggaaccgagggttgaacagaagtgggcaaggtgcagagaggaaaaaggctttccagatggagaagagcatgtgtgaaggccctcagtctggcaagagcttagtcctgtgtggcaggagctgaacgaggggttaggggagagtggcaaagggtccgggccatcagagaggtcaacaggggctggatcatgcaggattttgaatgttaacatcagagcgatagaaaacatgaagggtaaggtggtttgggttttgaatttttatcaaaatattgcaactactcggcaacaagttagatataacaaaagaggtcatcgtaaaaacagcagtctaccccttccccttcccttccctgactcagacatgacagcttttaactgtttctgattttagttcctttgatggttacctccaaaattaaatcatatgcttatacatctttcttgatttgccaactttagggaactgtgttaactccctgaaatgaaagagaatgacttagcttacgttacctccccatgttgaaattcatattcacatttctctgtaattttttttttgagatggagtctcactctgtcgcccaggctggagtgcagtgatgtgatctcggctcactgaaacctctgcctcccgggttcaagcaattctcgtgcctcagcctcctgagtagctgggactacaggcgcacaccagtgcactgggctaatttttgtatttttagtagaggcggggtttcaccatgttggccaggctggtcttaaactcctgacctcaggtgatctgcctgccttggcctcccaaagtgctgggattacaggtgtgagctaccatgccaagcccacatttctctgtaaattttaaacagtattttagtccatatgtcagttcccctctgtttaagataaggatattaataaccctacttttccttccactttccctccttaacttctgcgtcttaaaagctgtacttgaccatacccattcttgcatttgttaacatgtgtgttctgccctgcaaccacagccaagttgtagcttaattctaaagtcgaaaataacattatttacattattacacatgtgagtattgttcttggcgagaccaaataatgaatgtgcccaggattacatttccttctttacagatctggaccactcaaaggagaatgaccaatcaaggtcaaatggattcccttttcttagactctgtcacctgcttaaaatccttgctaggatttaatctacttcatattcaaaccttggcttgcttatatagctctttgttttgcccaccatttctagttgcctttttattttgtttactattcctccttgattatgttgtaaaatgctattagcagtgctgtttatttcgtacgattcggctttttccccactgaagacctttctcttggaaggcctctgcccttctgcaatctgggcaagtatctgctctttgatttaaggttgcatatacagctgtacctggaccttctcctcactgggctcttgggttggagcccgtgtcttaaaacccatatcttcctttcacatggtttactccctcgttttctggactgcatccttaaataatgtgctcagatagagtgcatggggagtaaactgtagtggataccgttgtcacctaccccatatccatttcttctttgcccattcctaacagaatcctgatattattcacctttctaccttattcccaacttcagaaaggatccttaagtcattccacacattgcattcctttggcaactgttactggtcaaggatggacatacgatctaagttggttcactcagactgaagggaaggacttccatggcacgttcagggaagactttctctttttctctcactggagtaagtgagaaaggtgttgctgggggctcttctgtaacctcagactgagggacaaagcctgaggataaagcctgctcaccaaggaaggcggagcagagaaacgggaagaacctgggtcttgatgccgttgcttagctggtgattgcactgtggctggggcctgtcctacctgagctagggactcagataggatggactttcttactgaatgagccagcttcagttttcttttctgttacttgtaaccaaaagcattgtaacagataggtcttctgagtcactgcatgcctgaaatacctttcttctactcttacacttgattggctgagtatagggttccaagttgaaaatcattttttctcctaactttggaggcatctcttctagtatgcagagtaacaaatgcaacaaatgcctgatgccaatcttattatggttcttttgtaggtgcccttcttttctcttccttccctggaagtttttaggatttcgtctccttatttttagtgtcctgaaatctcatgagaatatgtctagagttgtgtcttgttcactcgttgtactgtggtcattcaatctgaatacttttgtcaactcttttttttaaaaaaaaattactaatttacatgctttcattttctctatggggactactgtttaactttggacctcttatattggtcttctgtcttctctcatatttttcatttattgggcggtggggggtgctctgaattttggaagatctcctgcatttattttctttttccttttttctttttttttgaggcagagtcttgctctgtcacccaggctggagtgcagtagcctgatctcggctcactgcaacctctgccttccaggttcaagcaattctgcctctgcctcccacgtagctgggattacagacctgcaccaccacgcccggctaatttttgtatttttaatagagatggggtttcaccatgttgccaggctggtctcgaactcctgacctcaagtgatccgcccgcctcagcctcccaaagtggtgtgagccaccgcacccagcctcctgactttattttctatcccttctgttaaattctttatttcagccaaacctttttttttttttttttaacttactgtgaagcctgtgtgcctactgcctagattagacaattgttaacattttggcgtattttcctggtctgtatagatagggtgcatttttatacctttttgctcaccatttaaaaggaactcacagatgtcacgacatttcacccctaagtacttcagtatacatctcctaaaaataaggacattttccaatataagcacaataccccgatcacatctttaaaagttaacaataattctctaatgttatcaggcacccactttaaattcagatttcctccaaatgtctcttatcgctgttgaggggctccaaagcaattaagatttatacattgcatttgaatatgcttcctttgtctcttatttatttatttattttattttgagacagagtctcgctgtctcccaggctggagtgcagtggtgtgatctcagctcactgcaacctccgccttccaggttcaagcgattctcctgcctcagcctcccaaatagctgggattacaggtacgcaccaccacgcccagctaacttttttgtatttttagtagagacagggtttctactaaaccatgttggccaggctggttttgaactcctgacctcaagtgatctgcccgcctcggcctcccaaagttctaggattataggcgtgagccaccatgcccagcccctttgtctcttttaacaagaacagcctacccacctctccttcacttgtgatactgactttttgaagcagtcagcccaattgtcatctagaagggcccacattttaagatacatatttttagagatggcgtgtcactatgttgcctaggctggccttgaactcctggcctcaagtaatcctcctgcctcagcctcccaggtagctgggactacaggcttgtgccaccacgactagctggcccacattttagatgtctctcttttcttgtgatataatttaacttgtttgtccatatatattacttgtagacaagaagttaggtctacaggcatgttcaggttaaacattttgggcaagaatatttcataggcagtactgtgtacttcatatagcatcagctcaccaggcacttaatggttggttaccctgtggtttgtgatgctacgttttaacacttgattaaagaaggaggtgactgccaaatctccccattgtagacatacagttttcctgtggtaattgatatataatctgtgatgtgatgctttggcaccatacaaatatcctattgcccaacagccatttgcataattattttagcattcattgatccttgcctgaaaccattattacattgggggttgcaaaatgatagtttttttaattgtcacctcttctacatttagtactgtcattcctctgtaatgaattttccctcatcaaataaggaggcattatatttcctcctaaaaagacagtatagatgcttaatctttgcctttattacatttcagagtaaggagttggtagaataatcacctcaaatggtggcaaaatatttgctgttgtgtttccttttctctttcatgtcaatatggactcatagggatttatttattaaatgttttacaattcaaattgggtcaacaagagtcccttcatgttggttcctatattctcctggcataccctcattaattagtctttgagcaatttcttgttttctggcacaagatattccatcccaatatgtgcttttcgtgtcctagaactgattccaaggagctctggttccttatagtggcaacggtatttagaatccaacatgtgggtactaaatgtgctgattcttactggggtaacattatatctaggcactttcagaggacatcgctagaaaatatattcagtttttattttttatttttaatttttttgtagagacaaggtctcactatgttgcccaagctggtttcgaactgagctcaagcgatcctcccacctcagcctcccaaagtgctgggattacatctgtcagggcaaactgctggtaaatattttcacaaaagaaaaataaaaaaaccaaagtgctgggattacagatgtgagccactgtgccctccattttttttttaagtcataaatacataatgatgtcttctatggcaatttaacattacagggttcttccttaacttttttttttttttttcttttttttgaggcagggtcttgctctattgcccaggctggagtggtgcagtggtacaatcctaattcactgcagcttcaaatgcctaggcttcaaacaatcctcctccctcagcctcccgagtagctaagactacaggtgcatatcaccatgcccagctaatttttaaaaattttttgtagagatggggggtctcgttgcgttgcccaggctggtctcgaactcctggcctcaagtgatcctcccatctcgatttcccaaagtgctgggattacaggtgtgagccaccatgcctggccaacttttatttgatctgtatatatcttttccttacactgaaaatgttgggtcttactaatgttaacatagttacttatttgctttatcttgtaatagacataaaattacaaaattataataccaatattacgataaatagctgggcatggcggcgctcgcctgtagtcccagctactcaggaagctgaggtggagggactgcttgaacctaagagtttgaagctgcagtgagctgtggttgtgccactgtactcctacccggacaacagagtgagtggggggaaaaaaaagaaataatggaagatccagagaaagccccaaatatttaaaaattaaacaatacactttgcagcttcctcacctctctcagccttcatagaattgaagagagttagggccttgcactagattaggctttgccttaaggaaatgttgtgtttgatttgatcttttatccagaccattaaaacttccttaacgtttattagtaataaggctatttcactttcatatcatttgtgtgttcactggagtagcacttttagtttccttcaagaactttgattcacaacttggctaactttggtacaagaggcctagcttttggcttctcggctttcaacatgcctctcactaagcctgatcatttggtttttggtttaaagagaaagacatatgactcttccttttacttgaatgcttagaggccattgtagggttattaattggcctaatttcagtactgtcttgtccaagggaatagggaggcccaaggagagagagagagatgggggaacagctgattggtggagtagtcagaatatacacatttatcacttaagttttgccatcttttctttttctttttcttttttttttttgagacagtcttgctctgtcacccaggctggcatgcagtggcatgatctcagttcactgcaacctctgcctcctgggctcaagcaattctcctgcctcaacctcccgagtagctggtattacaagcgtgcgccaccatacccagctaatttttatattttttagtagagacagggtttgccatgttggccaggctggtctcgaattcctgacctcaagtgatccacccgccttggcctcccaaagtgcggggattacaggcgtaagccactgccgcctggccaagtttgccaccttttttattttttttattttttgagatggagtctcactccatcacccaggctggagtgcagtgatgcaatctcggctcactgcagtctctgcctcctggattcaagcgattctcctgcctcagcctcccgagtagctgggactacaggcatgtgccagcacgcccagcttgttttttgtatttttagtagagacggggtttcaccatgttggccaggctggtctccaactcctgacctcaggtgatctgcccggctcagcctcccaaagtgctgggattacaggcgtgagccaccccgcccggccaagtttgccatcttttatgggtgcagtttgtggtgccgcaaaatgatgatagtagtaacatcagagagcattgatcacagatcaccataacaaatataataatgagaaatttgaaacattgtgaaaattaccaaaatgtgacagagacatgaagtaagcacatgctattggaaaaatggcactggtaaacttgcttgatgcagggttgccacacaccttcaatttgttaaaaactcagtatctgcgaagtacagtaaagcaaagcacaatcaaatgaggtgcgcctgcatattacaaccaagaggcttttcgcagaaacacgagtgtgcttcaacattcaaaaatcagttggtgtaattcaccacattaagataataaaggaggccgggtgcggtggctcacacctgtaatcccagcactttcagaagccgaggtggacagatcacttgaggccaggagtttgagagcagcctggccaacatagtgaaatcctgtctctactaaaaatagaaaaattagccgggcagggtggcacgcacctttagtcccagctattcgggaggctgaggcaggtgaatccttgaaaccaagaggcggaggttgcagtaagctgagatcacgccaatgcattctagcctgggcaacagtgagacccagtatcaaaaaaaaaaaaaaaaaaaaaaaaagataataaaggagaaaaaccatatagtctattcaataaatacagaaaacgcatctgacaaaattcagtgccctttcatgataaaaattcagcagattagaaatagaggaagtgcatgtatgaaagagctacagatagattgtacttaattgtgaaatattgaacatgttaccccgaaaatcaggaaaaaggcaaagatgtccactctaaccacttctattcaacattatactagaggtcatagccagtataatgaggcaagaaaaaacataagaggcattaatatttaaaggaagtaaaactgtttctatttgtaggtaatgtcgaaaatgtgaaagaaactatcagaacctgctagaactaaaaagtgaattcagcaaggtctcagggtacgagatcattcaaaaactaatcagaaatgaaatttcaaatgcaatatcgttaggaataatttaataagaaatgtacaagatttacacgctgaaactgaaaatgttgctgaaagaaattaaagacctaaataaatggaatgttgtaccatgttcatcagctgaaagactaagtgtctttacagtgtcagttctcccttcattgaactgtagattcataaccccagtcataactgcagggttttttttgtagaaattgattgtaaaatgtatatggaagctgggcacggtggcttatgcctgtaaaccagcactttgggaggctgaggcagacagatgacttgaggtcaggaatttgagaccagcctggctaacatgacgaaaccccgtctctacaaaaaatacaaaaattagccagacatggtggcacacacctgtaatcccagctacttgggaggctgaggcatgagaatcacttgaacccggaggtggaggttgcagtgagccaagatcatgccactgcacgcccgcctgggcaacagagtgagactttgcctcaaataaataaataaataaaacgtatatggaaatgcaaaggacctagaacatccaaagtaaacttgaaagagaacaaaattaaggggcttatgtgatgtgactttatagtcatttgatttttaacagaggcaccagaacagtccggtgcgggaaaggaaagtcttttagcacgtgccggatgatggcaaatgacatccataccagacaaaaatgaaccttgaccttaccctaaatattagtttcttagagttgccacaaactaggtggcttaaaaccacagaaatttggctgggtgcggtggctgacgcctgtaatcccggcctttgggaggccgagtcgggcagatcacctgaggtcaggagtgcaagactagcctggccaacgtggtgaaactttgtctctactaaaaatacaaaaaacttagtcaggtgtagtggtgcacacatataatcccagctagccaggaggctgaggcaggagaattgcatgaacctgggaggttgcactgagccaagattgcaccactgcactccagcctgggtgacagagtgagactccgtctcaaaacaaaaccacagaaatttgctgtctcataattccagagtctagaagtccaaaatcaactgtcatcagggccatggtctctgtgaaacctgtaggggagtccttccttgcctcttcctagcttccagtggttggcaacctttggcattctttgatttgcagctgcattacttcaatatctgtcttcctcatcacacagcattctccatgtatgtctctgtctttacatggcctccttcttgtaagaacaacagtaatattggattggggcctgccctactccagtgtgacctcaccttaactaattacacctgcaacaacgctgtttccaactaaggtctcagtgtgaggtactgagggttaggacttcaacatatcttttttgggggacatagtccaacccatgacactacttcacaccatacataaaaattaattcatgagagattatagacctaaatgttttaaaagctaaaaatataaagcttctgcaagaaaacataggagaatatctgtgcagtccaaagaataaggttttttttaaacacaatttcactctgttgcccaggctggagtgcagtggtgcgatctcagctcactgcaacctctgcctcccgagttcaagcgattcccatgcctcagccttccaagtagctgggattacaggtgtgcgccaccatgcctggctaatttttgtatttttagtagaggcagggttttgccatgttggccaggctggtctcaaactcctgacctcaagtgatctgcctgcctcggcctcccaaagtgctgggattacaggtatgagccaccgtgccaggccaaaaaaagatttattaggatacatgaagcaatagctattaaaagaaaaaataaattggacttcattaaaatttaaaacttttggtcctcaaaagataccattaagaaaatgaaaagacagagctgggcgtggtgaggcttgcctgtagtcactactgggtacttgagaggctgaggcaggaggatcacttgagcccaggagttctaggccaacataggcaatatagtgagacagtgtctcttaaaaaaaaaaagaaaaagaaaaaacaaaagaaaataggctgagagctgtggctcatgcttgtaatcccagcactttgggagtacaaggcagatggattgcttgagctcaggagttcaagaccagcctgggcaacagtgaaatcccatctctacaaaagatacaaaaaattagccaaccatggtggcgtgcacccgtagtccatagtcccagctactcgggaagcagaggcaggaggattgcttgatcccaaggaggtcaaggctgcagtgagctgaggtcgcgccaccgcaccccagcctgggtgactgagtgagaccctgtctcaaagaaaatgaaaagacaagtccaccaagaaaacagttgagaccagtcatagaaaaaatagaaagtcatatctgacaaaggatttgtattcagaagaattcctataactcggtaataaaaagacaacctgatttttaaagggtgaaaatattttaatggatacttttttttttttttttgagacagagtctcactgtgtcacctaggctggagtgcagtggtgccatcatacatagctcactgcagactcgaactcctgggctcaagtggtcttcctgcctcagcctcctgcgtagctaggactacaagcacgtgccactatgcctggctaatttttaaattttttgtagacatgggctggtgtgtgtctgtgttgtctaggctggtcttgaactcctgggctcaagtgatcctcccacctctgccccccaaagtgctgggccaccacgcctggtgtggtgtcaccagagatgagccaccatgccctgcctgatacttttcttttatcatctgtttatttcttgtttatgggtgtttctgttctgattttatgactattctgtattctaagatttctctgagaatattatttgtttcctctaaggacagacttggtctctcttccatggggctggttcttgagccgccagggatggggggaggacctgggtagctgctgcgctgccccttctctgctgtggtggagtggcccgttgcctgcggggtctgtctctgaagggtggtttggagaagttctgtggaggcgaggcaggggtcagctcttgccccatggaccctcagagactgggaaaaggtaggcatcacctgggctgctgccagccacatcaagagcctttggggtgggtggggtgggggccggggaagggaaggttctagctgttgatttagaaaagacccattgatttcttgcctgagggaagaagtggcaccttgccactccaagtttgctctgctcaccagccccaacagcatcagcctcacctgggagcttattgaaggtgccctgccccaaagcttgtgggtcgggatctggcagtcagcagcccccaggtgttgcacacatgacagcactgcttgcccctcctctcgtctggtctggtctggtctggtctggtctggtctgagagcttctttggggctctgacaggtatacaggctctcatctgctctacagctctcttgtagtacattcctctctgttccattagtcaacatgttcttgcctacttccagcatctagaaatttgctgagtgtatcttatccgttcagaggtcctctcctgctattgcctctgttagaaatttcttccctttcatatgtctgtacttcggtttctttgaggtttgaagggtcaagtggcaattacatgtaggcagttggccatcctctggtgaaggctttaaagcccaggaataacaagatccattatgtctaaaactagcaaaaaccctacctgtcacatggtgaactgaattagaggtgatggggacagaagccagattggagtgagtggaaggtgagggagtggagattgggtatagacaactctctttaagaagttttgttgtgatggtgaccagaaaaataggagtggggtagagggggatgagggtgtttttcacgtgggtgaatatgagagcatgtttacatccttctgggaatggcccaggagagaggggagcgtgagaaggaggaaatggggacctggaggagcagactccttgtgtggaggggggaagcggcatctagagctgttgcaggaggtgggctttgagtaaatgcttcctctttggtaaagacggggaacgggaacggtagaagttgcacggaccctttgttaaagctcagaagctgagcgagaattagagcttaagtttatggagtagtcagaataaagtacccctaactgtattcttgcacagtgcaggaagccaggggtctgaaatcaagatgttgcagggctccattccccccagagcctctagcatggatccttccttgcctcttccagcttttggtggctgcctggcagtcctagactttccttggcttgcagttgcattgctccattctctgcttgtgtcttcacatggccttctctgtgtccccgtattcttctctggatgcttgtcactgtattaggcccaccctaaatccaggatgatctcatatcaagatccttcacttaattacagaagcaaagaccttccaaataaggtcagagccacagggtctgggggttaagacatacacctaactattcggggctaccatcgaacccctgtagaagcctgtccatttccaggatagcagagcccaaggaagggccagaagtccccccaaaacagttgtttgcattcaccagattctaagctataagcagatgggcagtggcagtcggtcctaatccatataccattggcaacaatagtttagttcactgtagacataatgagatgcttatcttctgctaagtagtcctcatggtaacagccatattactcctggctttgagtgacagcgctgtgctcttgtctggtgcccatatacttcagcagctggaaacaagacagtgctcatgattcaccggaaagtttctgtagttaaaatcaagtgatcccttgagtctattctaatatttgtctgtaccatgttctgtgacgagacatggaaacaaaacattaagaagtgaaagtatctttgattatgctcttgaagacaactttttgtttgtttgttttgtttgagacggagtttcactcttgttgcccaggctggagtgcaatggtgtgatctcggctcactgcaacctccgcattcccgggttcaagcgattctcctgcctcagcctcccaagtagccaggattacaggcatgcaccaccacgcctggctaattttttttattttagtagagacggggtttcaccatgctagtcagactggtctcaaactcctgacctcaggtgatccgcctgcctctgcctcccaaagtgccgggattacaggtgtgagccaccgtgcctggccgaagacaactttttaaagatgcatatgctctgggctgggtgtggtggctcacacctgtaatcccagcactttgggaggccaaggcgggcagatcacctgaggtcaggggttcaagaccagcctggccaacatggtgaaacaccgtctctactaaaagtataaaaattagccgggtgtggtggcgggtgcctgtaatcacagctactcaggaggctgaggcaggagaatcgcttgaaccccagaggcggaggttgcagtgaattgagactgtgccactgcactccagcctgggcgacagagtgagacttggtctcaataaataaaataaaataaagatgcatatatgctctgaaggctggctacattttattttttctcaaacaacttttacagtggatagtgctgtaaaagttgtttagctctggtcattttatcttttttgtgatctgcaaaaggagatccttttccttttcactgcctctaatacccaactccaatactcctttgacctcacaggcacttagaatccatcagtggctccatcttttctcagacttcacctccttcgtatccttattcctctcctttgtagcttcagtgccagtcagacgtcgttactccctggcacactacctcagcccttcggcactttcttgctttgttatattcagtcgacaaagccccagcctcatgaaattcagtcatgtctgccccatgcctgctccgtcctgaagctgaatgtgactccttcattgattccccctttaagttcatgtctaccccaggtaaacttcttgccgccaagcccacctgcatactgcagttccccggtctctcctagcccctcccaccctcctcatcagctgtcacacctccttgcagctgatatcttagttcccagagagcacagaagcaagctcaagagagtgtctacaggccagcgtctactccttcgctctgcctccctcatgctgtcacggagcgcctgtcccaggccctcactcctgttctaaggcatctctccagtcctctactgcactctcccccatcagagattcctccctcgcctgccctagaaacttgttgctacttctcccaccttgacaaaagctgctcccaaccccccacctgtctagcatctctgttttcctttaccagcaagactccagtccctgtctccacaccctcttcaaccttctccagttgttcctttgctgccacagctctgccaagctgctccatgaggtctccagtgatgaccttcatgttgttaaatctgggagctgcttgtcacttcttttcccagagctgtcgtcgtcagttaaccccaatacccatacgagacaatcctttccctcccttgagtctctgcactgatgtgcaccttctcagtgcaaaccacagcttttgtctctttctagctgaatacatgactgactgtgcttatcttagctgtcacccctgctggagcagaagctccacaggacaggattgtctccttgattcacagatgtagctcaagctcctagaacagtgcctggtgtctgtgggtcctcaggaagtcctaggtgagtgtgtgaatgtctgtcctcctcggtcttttctgtttcgcatgtgatgttggaaggcctcaggttcaggcttttcttctccaccctcactcccgaagtgattccgtccagcctcatggctcccaaatttatgtctccaggctgactgggtcacgggaactccttatcctccctagaccttctctttccctggtcttctcctttccagtaaacagcaactccaactcctgctcctcaggccagaaacctggcgctggttacctcatttgttcacaaatactgttactccacctgcaagatggatacaaaatctcatgagttcccctgcctccatggcccccaccctggtccaggtgtccagcttccctgcctctgcccttgccccctggttctttgtttagtcctgcaatattgtgctcttctgttcagaaccctccagtgggtccctgcttgctcagagtcacagcccaacaggatcacctctcttgccactctcccaccactcatgcactgcggcctcactggcctcctggctcctccctggaccctccaagtatgcccctgcctcaaggccttgacctctcctctgccctctgtcccaggtatcacacatgtctgctcaagtgtcaccttcccaatgtggccttccccgagcacacccatgtctgtaagtcaggcagcctgcctctgccccaccagttccccctgcctagcataggacttgtcaccatctgccacaagctgtgttactgcttggttttgtttgtgctctcccactcccttcccctccctccctctccccacccctatagaatctgagtcccatgaggacagagatttttttttttgcctcttcctcaatatatccccagtgcctagaatcatgcatattttaatttattgagtgaattaacaaataaattctgcagtgggacattgctctaaggttttgtcttataagagggacagaagaacatgcagcctgctctgctgttggctccttagcttctccatggctaacaggaacaatattgtttatgagataatcaaagccatagtcatgagttagaaggtacatataaaggcaaatatgtggagattgagttactttggcgggggcggaggggtgtgtagttatctgaaaacatggaacaaatcaatgagagtctaaatagcacccacatatttgcccctcttttaaaacatacctcctttatgagtgtagaatttaacagcacagtttcccagtgcagctttgcgaaacaagagaaatgaattttaaaggctgtcaggtgcctttgcaatctgtggcttagtatttgtgtaacaacatttgtgttttgccaacagatgtactgcttaaagtacccatgagaatggcctctgtggttttctactttctcggatggaaccttaggaactgattattgagaagaggctgatactgcccacctcagctcccaggcaggcttcagggccttggttactactcctttgggccctcactgacccttgcagacgtcttttgcaacctctgtagccagaagagacaactgctttctggcatgttgctctttccctaatggctttatgagcttcttgaacaccaaagcatgtgtgacttcctcacgccttcccctgtatagtatagcacccctaactgtatgtgtaaggagaaggagtgagcaattgatggcgtccccctggatctccaagggaatgggaaggggcagggtttctggattcagtcatgtggaatctggtcgttggtgtctaaatgtgcctgttacttgtgcccaatgtccaggttcaccaggaggcttagcctgctcatttccctgctagtagctatattttgggagagcattttttatgctctaattgaactttgtgggtctcagcaatttgaacaatgttttgtttttcttctggtcaggttacaaaggaaagaaaaggaatctggtgttgtaggaggtggtgtgttgtgtaattacttgttttttttttttaagtttttttatatttttgcaacaaggcaagttttctttgaataaataatgctgggagcttatcacatagaaggcatatgtgttgtactcagtacattctgaattatctgggtttatttttatctcttgaattcacttataaacaattcaaaggctgcttttttagctaacagaaataggaagagaatctcagaatctgttttgtcattttttcaatgggttgagttatagtgattatgctaactcggtggaaaagcagtgtagtgagtaaaccccacatacggcatatcatgaacattttgttgcttttttggcttctgaccatcttcatacctttttttgtgttaaaagtctccccattgtgtatatcttagtaagaggcaggtggaccctagtttctacctaagaaaacctgaagatggggttgggggcctgtggtgtacttccttctcatgctgtccatgaccactgcagtggctttgtaaggatccaggacccagggcccctcagtgggtgtcttccatttctcaagattgcctcttggttgtgagatgacggttgctgctctagtcattgcatccactcctccaggtaggaagaaagaggtcataggggaaaggcaaaatggcacttgacatcttaacttctaggcccattcaatatttccatttccatcttcacacccatcatcttgtcctagggaacaaacagcaccagcagctcagtagctataacagcaattattatttctcacacatgggtctgggtcagctgcaagatgggattcagatctgttctcaagcctgtcgttccaggacccaggagggagaagcagctgccaggggaagtctcttcgtaggcggaggtcaggagtccaagaggagtgagcagagtcacagaagcctcttaaagcctcttcttcccccatcccatcaacacgtgagcaagcccagagtcagtgggtgggaggtgtgctccgcccatagtcagtagaacaagagcaagcttgaaagagaacgatgaacaggagtgcactcggccactgtctccttagccataacgtagtcccatggtctgctgggaagcggggaataactctccttagctgagcgcagggtctcattagtaaggcagatggagaacatggatgttgggggacaactggcagtgcctgccacaggggaatggatatattccctccccttgctctctggaaactaggggatggcgatgaagcctaggtttggccaaacccattctgccttcagggactttgactcttgagggacagtgagggattagtcatggtggtggcagttgagtcacaaaaccagcagtggtggctaatgtccagtgatgacatgcaacagtgcccagggtgggtgtcccaaccagcaggtccctgcagtataaccttggctgtgtttgcagtggtgcagcctctattcctgctgcttttctgagcctagttctctagttctctctccatttccagatctgctgcccaagaactcctttgtgattgaatttaaccagagttgatttctgttgcttgaaactcaggaccttgatgcagtgtgcagggtctgggcaaggtaaaaacacactttcatgatttcgcctcaagtatagtagatgagcttaggctttttgagccaggtagccttgggattaattctcagctcttgcacctagcaggtgacctcagcaatcaagtcacttgccctccttgagcctcagtgttgccctcagttaaacattgctctcgtgtgttgctgagcattcagtgagattgtatataaagtgatcattgtgaaggtattgggacataatttgggaaagcgtcctggtctaagcttttgattggctctccatcatttgggtaatgggatagtgatttaggagtatcatagcagctcaaggggcccttctggaaagggtatgaggaaggtcagggacaagtctgaaatgaatcatcctaggcttaatgcctgtgactgggcagtgggtacaattatctcaggctagtcagtagtcatttattgtgagaatacatgggcagattttttaatttccttctcagtctagacttgaatgcaaacagttcttattgctaacttaccactagtcaccactaatgaacaaagactatgaacaggaaattcataaaagaagagatacagatggccaatgaagataggaaaagagttctgcctgctggtaatcaaagagatgcaaacgagaacaaaaatgatgccttttcacctaccaaatttgtcaagattaaaaagaaagcaaagagccagcgtcagctgatgttcatacctgcacctgctcggtagcttgctaatgttctgcctgctccacacgccaggccagcctccacggcgcagccaggtgaggcctttccttgtatacaggcacgtttggattcactgttgcataagtgagacatgtgcatgcttcacaattcaggaagtgcaaactccagagtgatgcaaggtctgagtgtccctgctgccctggtctcccagctgcctaggcctctcttcagggaacggctgcatccagggtcttgtctgtgtcttttgaggtgttctatgtacacgcagacacatctaaacctatttttattttccctgcacctgcttgggctactgtaagctgttaaatttttttttctaggaatttgtccattttgtctgactagcataaagttgttcatgttatagtttatacatttgcaacatctgtaattatgtctgctttttcattcctagtgtttgttgtttacttgtaccttctcccgtttttccttgtcttggtaaaagctcattaggttcattggtcttacaagaagcagacatgtaggcattattgccctgtattactctgtgtctcttttctagttcattaaattctgcttttgcttttatctttattattttttctatggtcttagagtacattctctgtgttttgttgttgttgttgttgttgtttgttttttgttttgagagagagagtcttgctctgtcgcccaggctggagtgcagtagtgcaatctcagctcactgcaacctccacctcctgggttcaagtgattctcgtgcctcaacctcccgagtagctgagatttacaggcatttgccccacacccggcaaattttttgtatttttagtagagatggggttttggcatgttgaccaggcgggtctcgaactgctgacgccaggtgctccacccgccttggcctcccaaagtgctgggattacaggcatgagccaccacgcctggccctaacttcttaagttataaatttggttcattgatttttctacccttttttcaaatgtaaacatttaaggctaaccctctggaactacttcaactgtatctagcaagttctgatagtattgtcactttaagttagcccaaagatattttaaattttctttgtttcttcctttgactcacatattattttaaaatgtgtttttcaatttccaagcacatggctttgggtttgttttttttttttcctagttgctctagaaaaaaaaattgactgcatgaggtggctcatgcctgtaatcccagcactttgggaggccgaggcgggcagatcacctgaggtcaggagttcgagaccagcctggccaacatgccaaaacctcgtctctactaaaaatacaaaattagccgggcatggtggcacacacctgtagttccagctactcgggaggctgaggcaggagaatcacttgaaccgggaggcagtggtcacagtgagccaagattgtgccagtgtactccagcctgggcaacaagagcaatactccgtctcaaaaaaaaaaaagaaaaaaagaaaaaatcaacttctaactaaatggcactgtgatcaaagaacttggtctgtgtgacaccagttcttgcagttggttgagaagtgctccatgacacattatccacaaccagtggacagaatatgtcaccaccaagcatgggtgcaggattctacatatattcattacctctgtcttatccgtttgttgtgaaagtattttctcttcttactgtcattttgtttacttgatttatcaactgatggaatacgtgttaaaacctactgtggtgatggacacatcagtttctccacagagtttggtcattttcattttattatttattttgaggccacattttcagttttagatacagtttcacattcctggtgtattgaaccctttggtattatgaagcgaccatactaatatgttatttttttttaaattattatttattttatttatttttctttcttttttttttttttgagacagggtctccctctgtcacccagtctggagtgcagtggtgcaatctcagctcactgcaacctccgcctcctgggctcaagtggtcctcccacctcagcctcctgagtagctgggattacaggcttgcaccagcgcgcctggctaagtttttgtatttttagtagagacagggttttgccatgttgcccagactggtctcaaactcctgggctcaagcagttcaccagccttggcctctaaaagtgttgggattacaggtgtgagccaccacgcccggccatcccagttttttattttcctcctttctgtgtctttatgcatcagtgaggtggagcttttgaaaatgtcagatagctagattttttttttttgagacggagttttgctcttgttgcccaggctggagtgcaatggcgtgatctcggctcactgcaacctccacctcccaggttcaaaacaattctcctgccgcagcctcctgagtagctgggactacaggcacgtgccaccacacccggctaattttgtatttttagtagagatgtggtttcaccatgttggccaggctggtctcaaactcctcacctcagctgatcacccgcctcagcctcccaaagtgttggaattacagacgtgagccaccatgcccagctgatagctagattttttttttttttttttttttgagacggagtcttgctctgtcgcccaggctggagtgcggtggcgcgatctcggctcactgcaagctccgccccccgggttcatgccattctcctgcttcagcctccagagtagctgggactacaggtgcccgccaccacgcgtggctgattttttttttttttttttttttgtatttttagtagagacggggtttcaccgtgtcagccaggatggtctcgatctcctgacctcgtgatccgcccgcctcagcctcccaaagtgctgggattacaggcgtgagccaccgcacccggcctcgagattttttaaaaaatccattgtctgtttcgtcctttaacatctatttgatttctgatgtatttagattcatttatagcatatttgtgcattctatttttccatattttctgttcttttaaattttccttctcctttcttgccttctcttagacttttaaaaaaattgtagtaaaatacacatcacctaaaatttaccatttttaaatgtacagttcagtggcattaaatacaaattggaggccaggcatggtggctcatgcctggaatcccagcactttgagaggctgaggtgggaggattgcttgaacctggaggtcgaggttgcagtgaggtgtgatcacactactgctatagcccaggcaacagagtgagaacctatctaaaaaaacaaacaaacaaacaaacaaacagattggcatcacacagtgtgtgtgctgctgtgctgtgctgttatcatttaacattaaaacataaacatcagcactgttatggactgaatgtttgtgtcccccaaaattccagtgttgaagctcaaacctccaatgtgatgttatttggagatggggtatttgagaggtggttaggtttagatgaaatcaggagggagggtgggtttcgcatgatgagattagtgtccttataacaagagacagcagagagcttgctttctccaccatgtgagtatgcaatgagaaggcagccatctccaagtcagaaagagagccctcaccaggggctgaatgtgctgacaccttgatcttggacttctagcctccagaactgtgagaaatttcagttgaataggccccccagtctgtactattttgttatagcttgagcagactaatacacccatgttatgaaaagctataaacatccctttaaaggccacctaacgcgtcgtattacctcatgcatcttctctgctgagctttccaaaagagtggcttaggctgggcctggtggctcatgcctgtaatcccagcactttgggaggccaaggcaggtggatcacctgaggtcaggagttcaagaccagcctgaccaacatggagaaatcccgtccctactaaaaatacaaaattagctgggcgtggtggcgcatgcctgtaatcccagctacttgggaggctgagccaggagaatcacttgaacctgggagatggagggtgcagtgagccgagatcgtgccattgcattccagcccggccaacaagagcgaaactccatctcaaaaaaaaagagtggctggccgggcgcagtggctcacgcctgtaatccccgcactgtgggaggccgaggtgggtggatcacgaggtcaggagttcaaaaccagcctggccgagatggtgaaaccccgtctctactaaaaatagaaaaactagccaggcgcagtggcaggcgcctgtaatcccagctacttgggtggctgaggcaggagaatcgcttgaacctggggggcggaggttgcagtgagccaagatggtgccactgcactccagcctgggtgacacagtgagaccccgtctcaaaaaaaaaaaaaaaaaaaaaaaaagtggcgtatgttcccggtctccacctctcattcgccagcccctgtgaccaaacccctgggattagatctccatcgggtccctcccctcaccctaacctcacatgcagtggttcctgagaagctgctgtttatctgatcacgggatccagcaggatctgagggctcattcactgaatctgtactacccaacaaggcaggcttgtccttacccacacttttcaggtgaaaacttaatcagattcaagcgtttatcttagtggcctcttcgtggtgtgtgatttccttcttgcagctctttactggctaaaactcttcactgggagttaaaccaggtgtggtccttgaccctcatcattttgtcccatctcctatgctgggctctgtatccttgtctccaagcagtctcgtgtgacagggaagttacctattattgtatggtcccctcttcttgtcacctctggtgtggcacttgttccatttcttgttcaatgaatgtgatttgtgaatgtgccacatctgtgggaggaaggcagttcgcagcaagagttgtagttcccttgctttgccctgagggccaggactttacactagatttttttgttgcattcctgcactcataaagtacacgtaaacttagaggtggtgtgttaaatgctagaacttaaaactgagttcagctaggctcaagtgccccacaatttttgtcccaccagacaatttcatgaatatctacagattgttccctcaatatgcctcaatattgaggcatattgatttggggagcacagacaagtcaaggttgatgtgcatccgctgaacatgatcttaagttgttgaagtaggtattattaatgaacgaacgtctattttagctccaagagcccctggtcttccagaagagactcccaatgatcttccagaagcagctgggcttcttttggtcctcccccacccaggtgcagtcccgttctccctgcctgggtgagtttgattcctctgccgtggaataggctaggctgctacctcttgagcctcttccaccaggccatccattaggtggcgacagagagcactaaaaggaactactatggaaataaaacttgttttgcttcttggggggaaaaaaaaagaaaaaggcttgtggggcgtgtgtgcattttagtcagattttactgtgcaaaacatttgagagatttctgccctctttctcccttccattcttctcaacccactgggcgccctaccacccctgtctccttcaagataaggtagatcagaagaccaaatagacaaatgccatgtccactgttttctgtcacagttgatagccataccagtcacccaagctggaaacccaacaggcccctgcccttcactgcccacatccaagggagccaccaagtcccacaaattgttcctttaactgtttgtccctcttttgtcttctgtcatcccttctaccgctgtcctggttcaatccctcatcttgctctgggactcccatgataacttatgatctttcctccacctctctatcttccacacaatccctatcatcaatctcattcccctgctttaaacccaagagtggcaccctgtgtttgagtgacatcagggcccctcatgtggctcctgcttctctttgtggccccttctgttgctgctgcttttcttatggacatagccctcagcagtccaggactgcttgtagttcctcccaggtaccatgtttcttgcactcctggcctttgtcattggctcccctgcccaagtccccttctcttctcctttccttcccctgtggccttgccttgtcgtgcttatccttgaagaccctgtcaggtatctcttccccaaagagccctgcctaaccaccgcccccctcccccccgcgacacacacacctgggttaggccctgcctctccacgcctgtgcctcctgccaagtcctcagaggtctctgatcccatgtgcctccaggcatggcatagggggactgtgacacagcctctcggcccacagacccctgattgtgggcttgctcactgccccagtcagtcctcttattgaggattccgtgccagttcctgactccagcacacacacgcatgtaggccgccctcctagtgcctggctccttccctgtctcttctgccactcattcccatggtcgtatcctggagttggtcatctctggaactccacccacggagttctaacttagctctgcctatgatgaggacttactgtcttcccagcttgcagtgtcaaccactgtttgatgcccctgggactccattggtcttccctcctcttgtgaactgtgcccatcaccagacgaacttgttttagaatttaccatcgtaactgagctcccttcagcgcatacctccttggctcctgctcagtctctgtttctccttttagccaaactctctaagagttctctccactcatgggccctcttccttgcctgctgctccttgctcagcttgctccatgaacacttgcttttccacattccatgaaataatcttaacagtcatcagtggctgtcactccttctcagccctttccttgtgtctcttctggtacctcatactctccaggtggccatctcacctcacatcttgaaccctctgggtttgggagaattctcacctcacgagttgatgggaggcctggcgacctctgattgtagtcactgcaaatgccagatgcttatttgcctagcttccctttcggtcagggcagcagttggcaaacggtatctcaagggccaagtccggcccactgcctgttttcgtaaatgaagctttaccaggacccagttccaccccgtcctttgtgcattgtccaagactgctctcctgtacaacagcaggtgggctggttgtgacagatactgtctggcccacaaggtggaaaatactatctggccccttacagaaagaaattacctgagttctacacgagggtgtaggtatgtaccctggcctctgccagtcagactcacatgctaggaggagcagggccaggcaggagagccgtgtctcctggcattggggctgcaggaaagacgagctcctaggccacagtgccagtggccagtgctgctgccttgcagggtcgcacaggcagtgctggctgtttggactggcttggcagaaggatttgaagtattgttcctagccaactggactcaaacctgttcctccaaccctctagggattctcttatcacccagtagccttttccccctagttttaaaaattgcagtaaaatacacaaaagataaaatgtactgccttaaccatttttaagtgtacaattctgtggtattgagcacatttatattgtgcaaccatcaccacatgcatcttcaatagcttttcatcagtccttgtctgcataaatcagctagagttggtttctattgattgccaccaataatcttgacagatatgtctgatcttccttctctgcactgactcctctttctctgtctcctctgctgattctttctcctcatcacaactccaaatagcagggggagggttgtttacacttatattcagcacgccctcacgcactcgcctggctcttcagacctctcccctgaactccagattcatacatccagctgccctttaggcctctagaaagctaaatacctcagtatcaaaaacatgagaaacggaagccagagtcctggatctctcgccctttcgctgtcccggtgcccatgcccttcagggatggcacctagaccagctccctgcatccctgcctagactctgcagtagtctcacgtggcagacccggaggtcactctcctctctggatgccctgcggacactccggttagcctcagctgcaagagcctcctcacccaaggtcacgccatttccaggacagcaccctggtgactgagcgaggtaagggtacaaggcccttatagggccttctctttgacttcttcccacctccctttatggatgtcagttcctgatgaacatcttacacctcaaaccgtgacccaacatctgcttctgcagagcccccctgtggcatcttgtgccctcctgccccactccctctactctatatcttcccatagttagaatgggctttttttttttttttttgagataaggtctccctttgtcacccaggctggaatgcaatggcacagtcacgactcactgcagcctcaacctcctgggctcaagcagtcctcccacctcagcctcccaagtagctgagactacaggtatgcaccaccacacctggctaatttttatattttttgtagagactggggtctccctatgttgcccgggctggtctcgaactcccaggctcaagcaatcctcccgccttggcctcccaaaatgcaggattacaggcgtgtaccagtgtgcccagcctcagatgggctctttgaaaaatgtttattagatcaggttactcccttgagaaaaaccctctcagaataaaacccgaagtccattacttgaaagcagagccagcttcatgggcctttgtaactgcccatgggcttgctggaacccaggcttggtttaatactctactctcaccatctcaaaattcttaatttttgaacaagaggccctgcattttcattttgcaccaggctccacaaattgtgtaactgggcctgcctcagcagccacatggaacatgatccctccttgcctatttgagctcattctctaccattctctcccttgctcacctggctcccactgctcttgctcttcctggaacttgccataatgttgctagagtcagagccttggctcttgctgctcctcattggctggacccctctttacttgacctgctccctcaccactcacttccttcagatctgtgttcagatttcgtcttctcagagaggcttttggcccctgtccatctctctgaatttacctctgacctctcccccaccaccactgcgctaagctgcctcagaactttgtagacattctgtctggtcttctgatgtttcccccttggaagaatcccaaggtgcctgaagaatgctttctttatccttgaagttgagtaggttgactagagtctggcttgctattgagcattctttatcaaattgtcctgggaacatggtgtattctttcagtctgcagatgtagtcgttgctgtttcaggtcagctctcttatggatctttgacagcatcttctgttccatttgttgagttctgtacttcagggacacaaattcctcatgttggattgtctttgtctctcttccaatgctattagctttgccgtaattggtttagcttttgtctttttcatctgcattcactttgtctaatttgattttcagctatgtatattctgtttctggctgtttttcaatgtatttattagtttcataatgatgtgttttggtctgcagtttgtttctctaggttggaaatttgtcttttcatcttattctgttttatcatcccatctttgaactcttttattgggaacatgttcttatgaagttgtggggaatttttttcccttccttgtgtattctcttcttggtgggagactttgcctttctcgtgccatctccctccctgggcctcttttttttcttctggccataatatgtttgcctagttaccatgtcacttcttttcgtcttggctcaggcttggatggctctgcatagtcgttctgtttgctttgagacagtggaggaattcttggctctctcttcccagtttcttggcatcttctcttgctgttttcccctctgagctatcgcgtgcaggcttgttatcttgtatccggagagaatttgcacgctggagggagctgcagccatgtagtcttcagccctatctggattcttctctttgttctaagaactgtgttggatgtcttactaaggctcactctagctgcacgagggatgtgtgtgccatttccatggggatagggggcacctcagtctctgggtggttccataatctgtgtatacctaagagcagttgcttcccacagagctgggctggctcactgggcactttgccatttctcctgcacctcccagctggagtttctgggtctaaaaggaaaaagtgaaggactcccacttggttgcttctctccagcttactgactgcaaattcccagggcgttgcccgctccctagggtggtttctgggggacggggcaggagcctggctttgctgctgctttgtcctctggagtcttttctcagactgctttgaattacacccctttcctttgtgtgctgaaatcttcccttcacactctccttccctgcctttcttttgtgtcttatcttactaggactggaagagggcagttgtgcaggaggtctgcatctaattccctaatccatgtgagagtgctcctgttgtgtgctttgtgacatgatggtgagaaatactccctagagcagtggctaccagaaggaagccatccccccccctgcacacacacacacacacacacacacacacacacacacacacacacactccttctggctgtcctcagatgcctattctaggtaaatgtcagattccaaagaaaatccagttgagatcttttttctttttttgagacgagagtcttgctgtgttgcccaggctggagtgcagtggcacaatctcggctcactgtaacctccgcctcctgggttcaagcgattctcctgcctcagcctcccaagtagctgggactacaggcgcgcaccaccacaccaggctaaaatttttttgtatttttagtagagacagggtttcactgtgttggccaggctggtctcgaactcctgacctcgtgttctgcccgcctcagcctcccagagtgctgggattacaggcttgagccatcgcgcccggcctccagttgggatcttgactggaatgactggtgttcaatcattatagtttccacctaatttgtatttgtacacaggacagttactaatttgttggtacttgtttgatccccagtccctagagttgtttatggggtggagcttcagtccctgctgcttcccctgtggcagcagctggagtcagggtggggacccagggtgctgctggcagattcttgagacaggtagaatctcctctatattggtgtctctctctgtcccagcagtgcccaggaaaacctggccagcctgtcactgacctctccacctagggcactggtggttcaggtccttctatttgccaccggcaaaccgtacttctgccagtctggctcttaggcccagtttctctgatcttgcagattttcttgggctctgctacggaatcctcatacctccggcaggtccctcctttgcccatgtgtttaactgtggtggaatcgtgtgagagctgcttctctcgcatggatcccagccacaccacattctacagcggttcctctgaaggcattgatagagatatttcctcctgttttgcatttcgttggtcatttcagtagaatcagggtgaaataaacatgggggctcagatgtcagcattacgaaccaagtacgtcaggcaggctgatgtggactgacctacactagtgagacgcaagatgacgaaaacaagggcactcactccaagttactgatgagatgtttggatcaaatgagccagtccttaagcagagttctctagtaaaagagatctcctttctgccctttcttgttccccaaaatgtgttgccttcatggtgaaaatttattttggcagattttctcttctttgataaaagcagccaacactttgttaaaagtctgtgaaacttatttacatgaagtatgtaaaggtaagaaaaaaacattatcaacaagaaatggagaaagccagcagctgaggacagaaaagtcatgcacagtgtcagtgtctatggaaacaggccacttggaccttgaggactaggtatttggaattggaggtgagcttggcctggtgagtctctaaccacttgtgtgtaggatcagtgtgagaaccctgctagaatatagtggcagagatgcaaggggaaatcattggagaagttaccagggaatgatgagctaatctgaaaaaaatacatgtttctaagttgggcgtggtagctcatctgtagtcccagctacttgagagcctgaggcaggaggatcgcttgagcccagcctgggcagcacagcgagaccctatctccctaaaaaaaactttttcgttgtttagttttgggatttttttttttcctggtcttttttccccctttttgtgaataacgggatctcactatgttgcccaggcagatctcgaactcctgggcccaagcaatcctcctgcctctgccttcctaagattacaggtatgagccactgtgttaagcaaaaaaacttttttaaatgaaaatcattttttaaaagacaggctttccaggggagggtattattccacttatatgaagtgtcaacagtaggcagatttgtggagacaaatagattagtggttaccaggggctgagaggagtgggagtggggagcaactgcttaatgggtaaagggttgtctttggaactagagagtagtgatggtcgcatgacattgtgaatgtactaaatgctattaatgataaattttatgttatgtgtattttaccacaattaaaaaaaaaagatcaaatgtcctcagaatagccaacaaccttccacttggctaaatgcctactcattaaacttcttgaactaaattcctttctgattgtcatggttattgtgtcctgggcttcagagtttcacattcaggttggcttggtccagtctgtcatgtatcactataggtccccacattggcctcttcctcagacggacagcccatctatctgccggggctctgtgccacagccagatagacttgctctgagacagctgtgtgggctctgagcactggccaggcatcacaaaacctatctttatgatttagaataattggtggtcagctgctgttttaatgttgttgttttttttaatttagatataattcacataccatgaaatttactcatttaaagtgtacaattcattcttcagtataattcataggctcacagaaaaaattgtttaaaaataaaatgtgcaattcagtgtcttttagtacattcacagagttgtgcaaccatcgcctctgtgtcattccagaacactttcagcacccaaaagaaaccccagacacaggagcagtcacctcttattacccgcagcccctggcaacaactcatccacttcctgtctctatggatttgcctattctggacatttcctataaatggaattatgcactatttggccttttgtgtctggcctctttcactgagcgtaatgtcctcaaggttcatctgcattgtagcatgtgtcagaatttctttcctttttgaggctgaatgatattatatcctatagataatgaggttttgattatccacccatcccttgggaatgcatatttgggttgcccccaccatttggctgttgtaaactgtgctgccatgaacactggtgtacggatatctgtttggttactggttttggttttttgtttgtttgttttggttttttgagacaaggtcttgctctgtcgcccaggctggattacagtggcacgatctctgctcactgcaacctccacctcccaggttcaagcaattctcctgcctcagtctcctgagtagctgggactacaggtagcactcaccaccatgcccggctaaatttttttgtatttttagtagagacaaggtttcgccatattggccaggctggtctcaaactcctgacctcaggtgatccacccacctcagcctcccaaagtgctgggattacagacgtgagccaccgcacccggcatagttgtggctttttgagagtgtatggctaggagtaaaattgccaggtcatatggtaactccatgtttaacatttgagaaactgccaaactgttctccacagcaggaattttttaacctgtatgtggtgggcttgtgtttcggttttcattttacacatctataaagatgagatttgctgtatggcactggttgcctgtatttggggagggttctgcttttggttggcaagaactgcattttatttaagcttagcaaaacataactggtttctcgcatcttctcaaaagtggaggattaagaaatggactgcgaattcagagcagggcagctgaacctcaggctccacccttgtagccttcaagctgaacctcattctctcttgctccctggagaccactgagacactctgcctgtgccagtttgatttctcacatttttaaagggccaaagcttgtgtctcaaagtgctatagcctttattgattcatgcagagaagcctccttgattccgtaattctgcagctaatactggaagtagaaagaattggaaacaccatctggatgacactttagggtggaagcagccagtacaagggggggctcattatttcctctggtcccagactgttcacctggagctgtagccaccaccctgcccttaggttaactgcctcgagtggtagtttagctctttgtgctgtgccgagggataactggaagtgaaaggtgctgagaaatgccatctcctgaaagtggcgagcatgagtgaatttacgaaaggttgggatattgctggggctctggaagtttctctggagctcactccaggggacagggagggggctggattccaattcaagtgaaaaatacctttcatctgccttgttcacctggcttttttgcctttttgtaaaatctgaaaacctcagggattgagtagtctttccttaactgcagttgcctgtctggccacacctgccagctgttgcttgtacccctgtaatttgcacggccttccgggcctttctcacaagatcactgcaggtcacattcatgaggaaaatgcaggcagttcctgccatcagacccctcaggatgtcatggtttggcctgaaaacaagattcctgcaactctaattttcctttgctagatcaaatgaaggatttgatctaatgtttgcattctagcagcaaaatcattgaatattttatttcttaagagccttacttcatattttgtaggtattttaagattttgtaaaggcctttctgcttcaacgtgtgatgtgtgcattcttagaaaaagatcttgtgttctgtaaatcacacaataaaaacatgagttcgtgcaggaaaaactggggcggggtggatcactccaaacttgtgtggtgtggtaactggagctcactgatgaaaccatgaacagttctggctgaaagaaccccacagtacactgaggtctgttggcatcgccgccagcaccgccccggtccctttgtgcgcgccaccacacctggctaattttttatttttagtagagagggggtttcaccatgttggtcaggatggcctcgaactgacctcgtgatccgcccacctcagcctcccaaagtgctgggattacaggtgtgagcctccgtgcccagccttcagctttttttcttaatgtctttgtgtaatatgaaggcattctctttaattgttaaaaagcttgcctaccactgcttcaaaatattactgtcagttggcatagcttctgattatattgatgtcatctcccttcttttaaacatgttaccatattggcactgtatttcccctagcccattgatcacttgagagttagtcatagtcctcgtgctgtttcactcctaaacgtttaagcatgcctttcctaagagcagacagtacagttaagacactcaggaagtttagcaatgagctaacacagaaccttacatttctccacataccccataaatgccttttttagagcctttgagcctggaatgcagagtccaggactgtgtgttgtattcgattgtgtcatcccttcagtctcctttatcagaaatgttcccccacccccttgttttctctcatcatcttgagtccagaccgtggttgcatggcacgccctctctggactcttcctgctgtctcctcacggtaagcttcagtctcctactcgtgatgctggttcatctcagcagcactgaggggcctgagctcagtttggtcgtgtgttaaggtggtgcctgccagatttctccacagaaaagggccccgtacttttatttgctcttcagcctgtgtattccttcctttcttgccagcttgtgggtggcttctctagcagcttctgtaagatactcagtttggcagttgtagttgtttcagcaggagaggtgtctgcatacctgaccaccacatggctagaagtcgatccatcctctggcgtaaccatcctccatgctactgtccctggggcactgaggccctcctcagtgacttcctccacctcatcttccgccatctccaagccaccagtgtccaacggactactgatatgtcccaaactcatcatttgtttattcaccaattcagagcccacctttttttcagcactgagctagcctctccttgctagaagcttacggtcgaaggtctccagccatcagaagaagcacgtggagcgctgcgtccgtgttgtggttattcatccagcatgtgttgagtaagggttgcacctgtgcctggcattatgcattgagcggggagatgggggttggcacgcacagtggggtgttctaagtacactgagggctcgggtgccctggctcatagagcagggagggaggcaggagcagggaaggtgtctcagaagtgccatctttttttttttttttttgggaagtggaatcttgttctatcgcctggtctggagtgcaatggcactatctcaactcactgcagcctccgcctcccaggttcaagcgattctcatgcctcagtccccgagtagctgggaccacaggcgcacaccaccacacccggcaaatattttgtatttttagtagaggcggagttttgccatgttggccaggctggtcttaaactcctggcctcaagtgatctgctcacctcggcctcctaaggtgttgggattacaggcatgagccactgcgcccggtctagaagtgccatcctaactgaacctgaaagatgaaagttctccagatgaacctgaaagttctccaaatgaaaaggtgggagggggtgacagggttaggcccagagcctctggtgacacagggtgggcatcattggtcactttttcctcgagggaggggcgtcacacgggtgatagggtgggagctataaccatgttgatagtgccgcctctgcccatctggcctggcatgccctgagccctctgtcccacctgtggaactcataagccctgacagcccactcactcctgattcattatccacacccctgtgcttccgctgtgcctggagcaagctttcttcagggggaagggaggctggaactatgttgtagttacctatttgtcctcccttccaaactgtgagttcttggaggtggaaggatgctgcaggatctggctcaggacgaaggcagttggtgaacagacacgtgtgtttttgactcacggtgatctcagacaagttcctctgtctagtcgaacttctttttttccatctgtaacactcaggagttgaataggtggtttttctgaggatacttcaactgtaaaatgtatgaacttgtgaactagctatttagttctcctcataatcaagattgtgtgtgtgtggggggttctgattagagggaggatgaagagaggtgtatggggttttttttgttttgttttctgtttgtttgtttgtttttgagatggagtctcactctgtcacccaggctggagtgcagtggcacgatttcggttcactgcaacctctgcctcctgggttcaagtgattctcctgcctcagcctcctgagtaactgggattacaggcatgcaccaccatgcccagctaatttttgtatttttaatagagatggggttttcgccatgttggccaggctggtctcgaactcctgacctcaggtgatccacctgcctcggcctcccaaagtgctgggattataggcatgagccaccacacctggcaggtttctttgaaaaagtttgtgtttcggcaaacaccataaaccccctgggggacagccttggggagtcacctggcaccctagcccagcctccctcccttgggtcctgcagtgaaggcttagtgagggtgtgcaaatgcccaggtcaccctgggactgggcaggccctctgggctaagggtaaactcatttggaatacctgttttctatcattgttttttatttgttaaatttaaagggtacaagtgcagttttgttgcgtggatatattgtatagtagtgaagtctgagctttcagtgtaaccatcacctgaatagtggacattgtacccgttaagtaatgtctcatccctcaccccctcccacccttcccagtctctccagtgtctgccattcctcactctgtccatgtgcacatgctattcagctcctgcttctaagtgagaacgtacggtatttgactttctgtgtctgagctgtgtcactgaagacaatggactccagctccatccacgttttttatcatttttacctgcactccacacccagcacaatccaggcttctttgtgggttttttgaaatttgtctttaattataaaagtagcagccagcaaattaacaaacacccatgtgcctttcattgcacagaattgaaaatcatcatactatatttgcttcaagtaatttccattagaaagaactagaatattacagtagagttaaagaccctttatttcccatcttcagtgctcttaaaagttcatttagggccaggcatggtggctcacacctataatcccagcactttgagaggcccaggtgggtggatcacctgaggtcaggagttcaagaccagcctggccaacatggcgaaaccccatctctactaaaaatacaaaaattagctgggcgtggtggtgcgcatctgtaatctcagctactcgggaggctgaggcaggagaatcgcttgaactcaggagggaggcagagcctgtatgcagtaagccgagattgcgccaccacaccccagcatgggtgacagagcaagactccgtctcaaaaaaaaaaaaaaaaaagttcattcattgtacacttagaaatagttaaaaaggtaaactttgttttgtgtgtgtgtgtatatatatatatatatatatatatatatatatatatatatatgtatttttttttgagacatatatgtgtctggtttgttcgcccaggcaggagtgcagtggcatgatcaacggctcactgcagcctcaacttcctaggctcaagtgatcctcctgcctcagcctcccgagtagctaggattacaggcacacaccaccatgcccagctaattttttttttttttttttttttttgtagagacagggttttgctatgttgcccaggctggtctcaaactcctgagctcaagcgatccacctgcctcacctcccaaagtgctgggattacaagtgtaagccaccacacctgacctgttttgtatattttaccacaataaaaagcctttaaaaccccaagcagacagttcattttcattcaggcccaactcagaatctgatcacagcggggtttcccccctttctagcgagtagctgaagaactgttttctctccttgatggtataactgtctctgtgggtgttgctcccctgccgctccagtggttttgtttttgtttttgtttttttgagacggagtcttgcgatctcagctcactgcgacctctgcctcctgggttcaggcgattcttctccctcagccttccatgtagctgggacttacaggcacctgccaccacgcccggctcatttttgtatttttagtagagacggagtttcaccatgttggccaggttgggctcgaactccagacctcaggtgatccacctgcctcagcctcccacagtgctgggattacaggtgagagccactgcacccagccggcccctcagtcttttccttctcaatcagtggcaccaccatcttcccaggctttggacatggtccctgactcacccttgcccctcacccccacactaatccacctgcgagctctgttgcttcaccacctagaccagccccaaatcctcaactgcccccaccctgggccacacctggaccactgctagaggcctctcatgggccctccctgtttttctcttgcactccccgggctttctggcacaagatgccccagaagcagaatcacatatctctcctgggagccaatctagtgtgtttactgcccctggagtgttattgttggccttagaatatgtcccactacaggtttgcagagcactgtagtcaaaagtcatttgaaataaatcttttctctgtggtatattgtcaatttgatatagaattaaatttgtttcttttcttttttcttttctttttttttttttttaagagacagggtcttggccaggcgtggtgtctcatgcctgtaatcccggcactttgggaagccaaggtgggtggatcgcctgaggtcaggaattcaagaccaacctggccagcatggtgaaaccccgtctctgctaaaaatacaaaaattagccgggcgtgatggcaggtacctgtaatcccagctactcgggaagctgaggcaggagaaggcttgaactcaggagtcggaggttgcagtgagccaagatcacgccatggcactctagcaagactctgtctcaaaaaaaaaaaaagagagagagagagacagggtcttgctctgtcactcaggctggagtgcagtgatgtagtcatggctcactgcagcctcatactcctgacctcaggtgatcgacccgcctcggcctcccaaagtgctgggatcgtaggctgaagccaccatgcctggcccgaactcatttgtttttatttgcattaagtgtaataaggttttgttacttttagtttgaattttattttgggtaatataaacatttacatgattcagaagtcagaattacactgaggcatgttcagctaggcctcactcctgtgcctgtacccttacctttttccccctaccccatgcagggaatcaatttcattagttcctggtgtgtccttccttaatacccccccttctttctttggtagaatgcagtagatatgtttgcgctttgctccctttgcttcacagtggatcctggaaatgactccatcgcagttcttagagctcttgtttagtccctttggatctgcacagtactccagtgtgtgggcgcaccataagtttattcagcaagtgccctggtgatagggatcgggggtattggaagcctttggctggtaaaaataatgttgtagcaaataacatcatgcatatgttctttgagatttctggaggtgtctctttagcatagatttctagaaggcattccttacgtcacgtttaggtttatagtttgacctcatggtgattaaggtatttgggaaatgcaaatgagagtttcgaagaagccagatctttcccattagttcactgtttttctctgacattaggaccgtccgggttctagggagcagccctggcgttaggcagtgccatgatggattgtgtagaagtagcgattcccatctgtctgctttcttggcccactctgctggtggctccccttccctccctcctttatggggagctggggagctgcctaggggtccattctcaaaggctgatctctggtgggcaacaggccacacctagctttccagggttcttcgtcatttcccattgagagctgtaagactcagagacatgaaaaggaagctctggctgggcacggtggctcacgcctgtaatcccagcactttgggaggctgaggcgggtcgatcacctgaggtcaggagttcgagaccagcctgcccaacatggtgaaaccccgtctccactaaacatacaaaaattagcctggcgtggtagcacacgcctgtgatcccagctactccggaggctgaggcaggagaataacttgaacccggcaggcggaggttgcgatgagccgatattatgccatcggcaacagagcgagactccatctcaaaaaaaaaacaaaaaacaaaacaaggcgagctctgtgctgggacagattagggacccctctttacagcaagaaagactgctctgtgggttgtaggatgcctttgtgtatgcagtggctctaggtgactctggcagccacactctgggccctaaacttctggaggaagatacaggatagggaggaactcaggggtgagtcatggtggggacaagacattccctcactctaagaccttgtcactagattggaacatctcttgcctccctacacctgacctgatggttctggagagatacgtccttgcagcttctgagtcccagcactaagcagcctttggtaacttccctacatcatttgagttctggtttcctaaggatgcttgccagtgagtgccatggtgccctcattgcacagtctgtgcagtgtagacaagaggggaagtctcttggggtagaccagccgcaaggcggtgactagcactgatgtgaaccacatgggacaggggagttgtggggctgagaacacggagggtgggagtagtcatgctcttttccagaatgaactgctaacgaagggactcgcaggtggctgctgcttctttccaagctgcccctgttgttgcagaggctctggagtcctaggaggtttcacggtggcatactcgacagagtactagagcatcatggccagatagtgatgctggggtgtggggcctcacggtggccatttctgacgagaccccaccgggccaaagtgatgtgtagagaaggagctgcttcggtcaccagaaaagaacggggaagcctcccacactagaataggtagggtgctcttctccaccggcaggaaggggatgtatggctctgcctggaccacacctttttccttgctcttccctccgcatctgctgtggccgaggccattcctcatcagggaacatgtgttagaggctcacgccacctgggaccacttgtcttatcacccccaggaccctaggcggtagtttcctgtggcctgagttagctgatatttatatagtgccattgtgccttttctcctgtgatgctcacagtaaggatgcctagatggggttacctgttgtcaagataaggaaactgaagcacagaatgctgaggtcatttgctgggttcatgtttggaaagcggcaaaggatttcagtgcaggttggctggctccaaacctgtgtgtgctttccatgacactgtactgtgtgcctcattgagcctcattctagaaaaccaaaaacacacccaaggcccggccttcacaaaggagacccctcccccatttggctccctttccagcagtcgacggcctcttgtcagccatcgagcccagagtcccttgaagtgcgactcatgctggggtggtatgctcaggagccgcagtgtttccgctcagaggaaagggctctgattctcctgcagtgctaggagacttgtgggtggccacagtgcaggtcaggcacaccggccagcaccacccacagcccaaattcctaaagaaatatttgggtcccagcttggcccgagtctctgttgtcctggggaaggacatcaagatctgagtgtatgatggcctggggccttgcatgtggtgggggtccaagcctgcctctgctcacttgttctgcagactggcatgttctctgtgatacttacatacttgtttaacacttcagggaagaaaagtcagaagaccaggacctccagggcctcaaggacaaacccctcaagtttaaaaaggtgaagaaagataagaaagaagagaaagagggcaagcatgagcccgtgcagccatcagcccaccactctgctgagcccgcagaggcaggcaaagcagagacatcagaagggtcaggctccgccccggctgtgccggaagcttctgcctcccccaaacagcggcgctccatcatccgtgaccggggacccatgtatgatgaccccaccctgcctgaaggctggacacggaagcttaagcaaaggaaatctggccgctctgctgggaagtatgatgtgtatttgatcaagtaagtaagagcaactcctatctctacagggcagggagggcagggacaaggatccctcatggagcaggaaaatgtatgtgcccagggtggggtcggggggaacataaacaatgaacactgagaccaggtgtgcttgaaatgaccgtgtacagaggtcgctgccctgagtgggaagttctcaaggtagcaggccctctatcctctccacacctcaagtctttatctggggatggaatagctgcggaagcagaggaacttgcagagctaggggttcagaggggtgaagaagcatgtttcagttctgccttttaaatgatcccaaaaaggttagcagttttcaaatgacatttgcagacagcctcatttaattccatgagaagggtgagcaaaggattatcttgttgaaactgattcctggagagactgagcaccgtacctgagttcaaacttgggaatgttctagatggtgactcaggcccaggcaccaaccagcagaatgggcctcagcctgacaacccttctgtaccaggcctgactctttggttgctgaactttggagaggcctgggggggtcagcggcaggcagacgagtgagtggctttggtgacaggtcctcaggggcagccaggcagtgtgactctcgttcaatagtaacgtttgtcagagcgttgtcaccaccatccgctctgccctatctctgacattgctatggagagcctctaattgttccttgtgtctttctgtttgtccccacagtccccagggaaaagcctttcgctctaaagtggagttgattgcgtacttcgaaaaggtaggcgacacatccctggaccctaatgattttgacttcacggtaactgggagagggagcccctcccggcgagagcagaaaccacctaagaagcccaaatctcccaaagctccaggaactggcagaggccggggacgccccaaagggagcggcaccacgagacccaaggcggccacgtcagagggtgtgcaggtgaaaagggtcctggagaaaagtcctgggaagctccttgtcaagatgccttttcaaacttcgccagggggcaaggctgaggggggtggggccaccacatccacccaggtcatggtgatcaaacgccccggcaggaagcgaaaagctgaggccgaccctcaggccattcccaagaaacggggccgaaagccggggagtgtggtggcagccgctgccgccgaggccaaaaagaaagccgtgaaggagtcttctatccgatctgtgcaggagaccgtactccccatcaagaagcgcaagacccgggagacggtcagcatcgaggtcaaggaagtggtgaagcccctgctggtgtccaccctcggtgagaagagcgggaaaggactgaagacctgtaagagccctgggcggaaaagcaaggagagcagccccaaggggcgcagcagcagcgcctcctcaccccccaagaaggagcaccaccaccatcaccaccactcagagtccccaaaggcccccgtgccactgctcccacccctgcccccacctccacctgagcccgagagctccgaggaccccaccagcccccctgagccccaggactt

SEQ ID NO: 6 - DNA, 61688 bp, Homo sapiens
cagactcaccagttcctgctttgatgtgacatgtgactccccagaatacaccttgcttctgtagaccagctccaacaggattccatggtagctgggatgttagggctcaggtaagtaaccttcctttttttttttttagtatatgtcctggtttggccatctgttttttttttttttaaaaaaaaaaaaaaaaggaaaagaggaaaaaaatatactactcttggacagtataaaagtaccccaaagactaaagacataactgtgccaaactgtgccatataataaaaaaaagtcacttccctgagccctgaaaggtcagtgtgtgtagggttacttggtcgccacagcgtgatctgggggcgggcgtcagattagagccggaactggtgatctgcaacttcagttcaccttgaagcaggtcagctgagctgagagcgcttgcactgagcccttttgcgctgctgctgttgccttagcggtcttcagcatgtgtttgctttggtttggggtaaatggcttagtggtcaacattagtgagcagtggtaatgcattttcagatatgggaactggtatgtggttggttccctagaaggacaccctcctgaaagctgtctcagaacaccgggggccatggctaatgtcatgtgcttgctacactcctcccatggtaactaaagagagtacccagatatacatctggttcttgggactctagaggaggatgagtactttgtaaaaacctgggggccccagtcattctaggtctgacactcaggtgctgtatcagctgcagtttgaactacttggcaccattgtgtggactttagttttgtaaaaatgaatggttccttaatttctcaaccttcaggctcaacatctcaagctgtttgttgttgttgttgttgttgttgttttgttttgtctttttgattagtggtcactccgcatttgatgttttgacatgtggatttcagaacttctgtgtggtaaagcagaatgttccaattgaattttcccattttttttcccctaagcaaaaatgtgagttttcacttatgcggccattgtgattccgactgagaccctaagtcgttctttgttgtctctctagtggtttctgacacctcagtgtgaagctgttgtagacatccataagaaatagcctgcttagggattatgtgagggcaaggtttggctgaaggagaatagaaggtgtggaaggaagcggaagaccagaagagcatcacactgcctcaagtcccaaatttgattctgctcctgatcctgtgactcaaattgtcattctcttttactgctgtggggtgtgctctgggcccagctgacaggacattctttgtactccacgtatttatgctggtgggagttgtatggctagtgctttgtgctttgtctcagaaattgtgtggactaaatgtaatatgggcagtgaatgggtttcttctggaagatgttaggcctggagggtggtttgggtttttacgagtctttttctcagattacagattacgaatggatgttataaaacaggcagtgttgacaccatacagtttctcctaagaaatgtacagagagttcaacctgaggaagctaattgaaaataaacttttaaaaagaaatgtagaaagaggaaatttaaaaagtatcttatgaatgggaaagatgtagccatttgagcttcaaagaacttttgagggaattctcaaaggacagtacccgtctttagtagataaatgcttgatatctatttttcttcttttactttttaaagaattactaaaataatacatggatttatagaaaaatcaaaccacttaaaaattgatcaggtggctgggcaaggtggctcatgcctgtaatcacagcgctttgggaggcctaggcgggtggatcacctgaagtcaggagttcgagaccagcctggctaacacggcgaaaccccatctctattaaaaatacaaaaattagctggccatggtggcttgagcgtgtagtcccagctactcggaaggctgaggcaggagaatcacttgaacctgggaggcggaggttgcagtgagccaagatcacaccactgaactcctgcctgggtgacagagtgagactcggtctcaaaaaaaaaaaaaaaaaaaagtatcaggtaaaaaaatgaaagctccccgcttaatctctgctcccactacccagaataactgctgttaatagcttaatgtagatccttctaagtcttctaagactaaactgtgtactttttgtgttgtaattaacaggagggtttttgttttgttttgttttttctttttttgagatggagtcttgctctgtcatccaggctggagtacagtggcacaatcttggctcactgcaacctccacctcctgggttcaagtgattctcctgcctcagcctcctgagtagctgggattacaggcgcctgccaccacacccagctaatttttgtatttttagtagagatgggtttcaccatgttggccaggctggtgtcgaactcctgacctcaggcgatccacctgccttggcctcccaaagtgctgggattacaggcgtgagccaccgtgcctggcctcaggatggtgttatatatacatattctgcatttttccatctcatatattcatctctgcctcatttcttttaaatagcagtgtagtccagggctgacttaccgtcatgcatttcgttgtctctctatgttattaaaaatgctacaggattgaaattcctcatgtgccagtcattttgaagaatggctgcctagacttggaatttctggtggataccaccacatcactgtccaaaatggctatcccagttcccacaacagtctgagaaagtgccattttcccatatcgtcccagaattggatatacatcttttaaattggtgccgcttggattattactgaggctaaacctcaataatcattgtcatagctcttaatgtattaaagatgttaactctttgtcatgcagatattttcctgttttgtcttacgtcttgattcttgtctttctgatatataaaatttatgttatgatttattcttttgctttcatacttaggaaatccttttttactcttttttttttttttttttttttttttgagacggagtctcgctctgtcgcccaggttggagtgcaatggcgtgatcttggctcactgcaagctccatctcccgggttcattccattctcctgcctcagcctcccgagtagctgggactacaggcgcccgccaccacgcctggctaatttttttgtatttgtgagacagggtttcaccatgttagccaggctggtctcgatctcctgaccttgtgatccgcccgtctctgcctcccaaagtgctgggattacaggcgtgagccaccgcgccccgccaggaaatcctttcctactcttaacaacagatcaatagtcatctatattttcttcctaaaaaacctgatgatgtattatattcatacatacgtatttaatacatacaaaagggccagatgcggtggctcatgcctgtaatcccagcactttgggaggctgaggcgggtggatcacctgaggtcaagagttcaagaccagcctggccaagatggtgaaatcccgtctctactaaaaatacaaaaattagccaggcgtggtggcgggcacctgtaatctcaactactggggtgactgaggcaggagaatcgcttgaacccaggaggcagaagtttcggtgagccaagatcacgccactgcactcctgcctgggcgatagagtgaggctctgtctcaaaaataaaaaataaaaataataattttatagttaagttgccctgtgtttttcctgtgattaaaaaaaaaaatacctgttttgtatttaactttggggtgggataaggtatagcccacttagtcagttgtgtctaagccacttgatgaaccagtcaatccagtcttcacctttaacaaatgctgatttcttcaagtgagcaaaatatctcttaaactttttcctattttctctataaagttgcttttttctgaattttttctttatgaggcttgatgggcagccctatcagcagacaatcattcattcacccaacaaatatttgagtatctgcttcaagccaggggcagtgctaagccctggaagtggtatcttctccttatccgggagtggggctacagtgttcattccagaagactcaagaaaatagcagatcatcacaaaagtaggttttacataaatgaggaggaatccacagggttgtgtatatgtgtgtgtattttaaattctgacataagttggagctttagggtagactgtgacataagagtagtttgttttccaactcatgtaattgccggctgatttttgtcttgaattatgataatggtaacttctgttgaaacaattctgtattcatcttagcttggttgggatgcaataaaagttttgtactggtaaaaatgataattttcttccatgatgattttgaagcttttctgtaacacctgataaaaatagaggggccaggcatggtggctcatgcctgtagtcccagctactcgggaggatgaggtgagaggatcccatgagcccaggagttttaggctacagtgagccatcatcacaccactgtactcctgtactctagcctgggcagcctcgttctttagagtaagacactgtctctttaaaaaaaaaaaaaaagaaaaaagaaaaaaagaaaaggcttttagtgaatatatttttagggtagcaagtgtaatttttataaattgcattatttgaatctaataaataccctcaaagctgaagtcgaattctgattttgattgaaaatattttttacttaaaggaagagggatagaataaatgacacgattaaggaaaagacttcttgtataaggccggggttttttaaatgattttttgaatagttagatggacaatacggaattaaaaaggtggtgtaaaaagttatacggggctgggcacagtgactcacgcctgcaatcccagtactttgggaggccgaggtgggtggatcacctgaggtcaggagttcgagaccagcctagccaacatgacgaaacatcatttctactaaaaatacaaaaattagctgggcttggtggtatgcacctgtaatccagctactcgggaggctgaggcagaagaatcgtttgaacccaggaggcagaggttgcagtgagccaagatcgtgccattgcactccagcctgggcgacagagtgagactccatctcagaaaaataataatagaaaaaagttatatggggctgggcatggtggctcatgcctgtaatcccagcagtttgggaggctgaggcagcttgatcacttgaggtcaggaattcgagactagcctggccaacatggtgaaactccgtctccactaaaaatacaaaaattagccaagcgtggtggtgcgtgcctgtagtcccagctacttgggaagctgaggcaggagaatcgcctgaacctgggaggcagaggttgcagtgagccaagatcatgccgttgcactccagcctggacgacaagagcggaactccgtctcaaaaaaaaaaaaaaaagagttatattgtaaagtatctctgctaccctgccccaaacattcatttctttccctggaggcagccactattacctgtttctttaaaaaaaaaaaaaaattgtggccgggcacggtggctcacgcctgtaatcctagcactttgggaggtggaggtgggtggatcatgaggtcaagagatcgagaccatcttggccaacatggtaaaaccccatctctactaaaaatacaaaaaattagccgggcatggtggcgggcacctgtagtcccagctactcgggaggctgaggcaggagaatcgcttgaacctgggaggcagaggttgcagtgaactgagatcacgccgctgcactccagcctggcaacagaatgagactccatctcaaaaaaaaaagcgtgtgtgtacccgtgtgttaaatttttattataaaatatatataacaggctgggcgtggtggctcacgcctgtaatcccagcactttgggaggccgaggcaggctgatcacgaggtcaggagatcgagaccatcctggcgagcacggtgaaacctcgtctttactaaaaatacaaaaaattagccgggcatggtggcgggcgcctgtagtcccagctactctgagagcctgaggcaggagaatggcgtgaacccaggaggcggagcttgcagtgagccgagatcgcgtcactgcactccagcctgggcgacagaccgagactccgtctcaaaaaatatatatcgatatatataacaatttacagttttaatcatcttaactgtacagttcagtggcactgagtacattcacattgttgtacagccattactaccatccatctctacaacctttcgtcttgcaaaactgaaatttcatacctattaaacactaactcccacttctcccctttcccccaccccaccctctggcaactactattctactctttgtctctattggacatatttttgtgtgtttaggtttgtgtatatattttacatgtgtgtataaatacacaagggtatgtgggcgttgtgtttttacacatactataaaatattgtgcacatttgtttattttaatgtatcctgtagattatttagaatcggttcatacagagccgtatcattccttttaagggttgggtttaaatagtctgttatggatgtaccacaatttatttaaccagtttttaaattttttacttattttttttaatgtttttttagagacaggatcccactccatcacccagactggagtgcaacagcatgatcatagcttactgcagccttgaactccggggctgatgtgatcctcccacctcaggctctcttgtagctgggactacagggatgtgccgccatgcctggctaaattttttatttttatttttatttttatttttggtagacacggggtttcactgtgttgcccaggctggtcttgaactccttgggcttgagtaatcctcctgccttggcctcccaaagtgccgagattacaaccatgagccatggagcccgacaagagtagccttttatttgcagaccattagagaaaaagttgcgtgtaagtagataagcatacgaatttatcactgcaatactgtttgtagagatcacagagctgttaggctaggaagaagtttttagcagttagcactagaaagcaaaactttggaaacttccatttcatcaaaagtgacctcatctgagtagggcatgtgagggaaggacctttttactcgacaaggggaacttgcccagttcttgtttgtgaaccttgaagaaagtggagcatttttattttgggaccattctaggttgtggtagttccttggtactcggggttggagaatctccctctgctgctggaccttctgcctcctcatgctgtaatatgcataagaggtgtcctagaagtattcaggaacaggctgtggttgctttgttgttctgtgactgttgaactctttatatagcagtacttttttaagctgtactaattgagcatttattatgtgtcagttactgtgctagctgctggaaactatcctaccctcagcagtcttctggtctaatgggaggtacagacaggcaaatgggctatgactttacaagaggctaacttctgtgatggagagaagttccagccactaagggagcacataaaaatcagaggagatcctaccaagaattgggaggtaggtcagggaggagacttctttgaaaaatggcatctaagacctgaacagcaaggaaacattagctaggtcaaggacaaagcatcagtggggagagatgcatgagtcttttggaaggaccagcatgtgtagaggctctgacaggagagaatctctcaggcccattcagagagtccactgtgtgaagacgaggcatgaacaaccagccaggacatgtggagaggagcatttttctttttttcttttttctttctttttttttttttttttttttgagacgtctttctctgtcacccaggctggagtgcaatggcatgatctcggctcactgcaacccccacttccagggttcaagcaattcttctgccttagcctcccaagcagctaggattacaggcacccgccaccatgcccggttaatttttgtatttttagtagagacggagtttcaccatgttggcctcaaactcctgaccttaggtgatctacccgtctcggcctcccagagtgctgggattacaggtgagagcccccacgcccggccaggctcggctttctttccaggccccgtcacactcttagatgttccctgggccccagaaggcagcgtgaggtgctctgcccatctatgctgtccttttccaccccaccctatccactgggcccctggggctcccactccactccaggtctcttcatggacccttctttcccttcacttctgtcccaggagacctgggagactcatgggaacaggcatcatcttctccagcacagttcattgtctaatgcacgaaagtgctgggctgtgagaaggtcaggagcttacatggaatgggagtcagctgtggtacaaagtacgctgcttagttctactgattttttattttttatttttacataagactttgatggtaaaggaagcagtgtgtgagcaagctgactcctgtcttgtcaagtaccaggtccactctgatgagcccctgtggacagcactgctgtaactccccaagcctgggctcaggaggtgggccctaagcgctgttcccagctcttcctccatgctgtcagctcttccaccattcttcctggcgtcattctaaggtcctgtcttcccccgccctcttccttcctggcttctacgctcagctcaagtagtagctgtttgggtacttttcacccagacttaggaaatgttatcagttggtcgtattcctgtcagccctcttactatggaactcaaataggacagattcagctgaattcccagccctgtggttgcactctttgtctgccctgcttccccaaggtagcctgctccctaaaggtcaccgagatactccccatgcaaggtttttgttgtattacacatgacaacatggaataaagtgttttgcaaatttactggatgatatcctactatgtggaacatcctacaacttactcttttcactcaacatttgacttttgaacctggtctgtactgctccgtgcagaccaatgttcattcatttgatatgtctccttgtgccatagaaatagttttacaatagaagcctgtccagagccatgagggagaaggggattgtagagaaacaaggattggcatctggtttatgtttacatcctttagtcctgttaaccgagaagaagatatttttatttccatgtttgcgaaagctttccacaaaaaaagcatccattttctagacttattaatagggcagtccaaaggttttatttttagatttgaaagaaagcaaagtaggcttctgagatatgcacatttccctgtgtccctgtctcttttgcaacattccacattgctgctaaaacttgaacatgagcactttcaagcatgtgcttactttctatgtatgactcattttttaaaacattaaagcattttcggccgggtgtggtggctcacgcctatattcctagcactttagaaggccgaggcgggtagatcacttgaggtcaggagttcaagaccagcctagccaatatagtgaaaccccatctccactaaaaatacaaaaattagccgggcatggtggcgggcgcctgtaatcccagctactcgggaggctgaggcaggagaattgcttgaacccaggaggtggaggttgcagtgagcagagatcgagccactgcactctagcctaggtgacagagcgagactctgtctcaaaaaaataaaaataaagcattaaagcactttgtctggtggtatgtaagttttggcattacttagataagttgtattttaagtctttctacacacaataacttatttttaaaatacaagtttctgtgtacttccgggttttgtgtttttgtaaacagcagaaggtattagtccatattaagtactaatttgttctaatattttcagctgtttttggaattacacttggcaaaaaaatagacaaatgtctgcagttgtgacagtttgtttttttgttctttttaactccagaataaataattctagtgagtttttttcttggcttgtaagaacatgggaatgattagagtcatcataacacttaagtagttatagaaggttgaacatctgtagtcagttgtataaaatttcctagtcatccttccaggttgtttaagacaaacaaatacatagtatttattaagctcttataaattttaattgtaaaacatcattgtacaaaactttgaaaatgcgtataggtacaaagataaaaaattaggccaggcatgccatggctcacgcctgtaatcccagcactttgggaggccaaggtgggaggatcttttgagcccaggagttcaagaccagcctgagcaacatattgagaccctatctctacaaaaatatcataaaacaaaatagaatcactctggcgattccactatccaaaaaaaaaaaaaactgctgttaatatttggtatgtatctttctagaccaaggcctccaactttggttgagaattcagccgggtctgtgaccttggatgggaaaaacattcactctttattttcactaatgtctctgaaaacccagatttttagctgggcatggtggctcgtgcctgtaatcccagtgctttggaagcccgtggagggcagatcacttgagcccaggagtttgagaccagcctgggcaacatagcaagaccctgtcttttaaaaaaaaaaaaaatccagccgggtgtggtggctcatgcctgtaatcccagcactttgagaggctgaggcaggcagatcacctgaggtcaggagtttgagaccagcctgaccaacatggtgaaatcctgtctctactaaaaatacaaaaatcagccgggcatggtggtgggcgcctgtaatcccagctactccggaggctgaggcaggagaatcacttgaacccggaaggtagaggttgcagtgagccaagatcacaccattgcactccagcctgggcgacagagcgagactctgtctcaaaaaaaaaaaaaaaaatccacattttcttcaatgacaattgtaagcaacagatcatggtagtattagaatagcagtgactgtcaccagtagagatcaaagatactttcatatcatattatagttgttacagatattttgaaatatatatgtccatcactgcttcaaacttaaggtaattattagacccatctctagatctggttatttaatgatttactgaagaagcacatattatttgagaacgaactcttgaaatatgttgttaatttctgtgcattttacacatttcaaaacattcttctgaggaggggtccagaaggccaaaagggtccatggcagaaaaaggttaagaacacctgttctgtactttgtaccatgtggctacaaatataaaaacagacgttaagccgggtatggtgatgcacacctgtagttccacctacttgggaggctgaggtgggaaaatcacttgagcccaggagtttgaggccagcctgggcaacagagcaagaccccatctcttaaaaaccagtcagcacttgactagtcagttagtgggggaaaacacaggtacagtaaaaggagtcaaaattacacttaaacttaggtcatcttattatatcaaacatttattaacatgtttagtgttttgtgtatattatgcaaagtgtaatgcaactaaaactgtttaacacttctcgatatcacataaatttgttggtgcataatagcctaaaagttacttttgctgttggcattttattttattacttacttatttatttatttatttatttattttgagacagagtcacactgtcgccaggctggagtgcagtggtgcgatctcagctcactgcaacctctgcctccctggttcaagcgattctcccgcctcagcctcctgactagctgggactacaggtgcgcgccaccatgcccagctaatttttgtatttttagtagagatagggtttcgccatgttggccaggatggtcttcatctcttgaccttgtgatctgcccacctcggcctcccaaagtgctaggattacaggcatgagccaccacgctgggcctgctgttggcattttaaacatccttctagagtctttcttatttgcctgtaagcacgtacacatgttgttgttgttttgagacaaggtctgtcgcccaagctggagcacagtggtgcaatcacagctcactacagcttcgacctcttgggtgcaagtgatcctcccaatcagcctcccaagtaggtgggactacaggtgtccgctaccatgcccagctaatttttgtattttttttgtagagacggagtttcaccatgttgcccagactggtctcaaactcctttgctcaaacgatccttccgcctcggcctcccaaagtgccgggattacaagtgtgcacctctgtgcctggcccacatgttgttttagatgaatgagatcatatatgtacttttgtaacttgctacctttcctcaacaaaatgttgtaaatatccatgtccataaaaatagacgtatatcttcacttttccctaaaatgaaaataacttaacttgcattttcttttttgtttttgtttttgttttgagacaggctcttgctctgttgctcaggctggagtgcagtgatgtcacagctcactacagcctccacctccagtttcaagtattccacctacctcagcctccaagatagctaagactacaggcacatgtcacgacgcctggctaatttttaaaatattttttgcagaaatgggatttcactatgttgcccaggctggcctcaaactgctggcctcaagtgatcttcctgccttggcctcccaaagtgctgggattacagtcgtgagccactgtgcccagcctgcattttcttattataaaagtaatacatgttcaatggacaaaaaattttcagaaaatatgcaaagatgaaaagtaaaaattgtccataaatctgtcatctacagataaagataacttctggataatgtttttctaccatcatttttagtaatcacataacatttcgttgtatgtctatgccttcatttaattaagaggcatttccattatttctgcatgttcatgactctgaatgatgatatgtctgcctgctgatggctacaaccctgtttctgcatttcaaacctctctcttgagctccagatttgatggcctcgtcagcatttacttgagttgctcataagtgtctcaaatttaacaagtcccagtcttgatttttttcccccttcaaacctattcctcatgttgtctctatttcagtaaacaatatcaacatccacccagttactcagtccaaaattctaggagtcatccttgattctgctctttctttttttttttttttttgagacggagtctcgctctgtcgcccaggccggactgcggactgcagtggcgcgatctcggctcactgcaagctccgcttcccgggttcacgccattctcctgcctcagcctcccgagtagctgggactacaggcgcccgccaccgcgcccggctaattttttgtatttttagtagagacggggtttcaccttgttagccaggatggtctcgatctcctgacctcatgatccacccgcctcggcctcccaaagtgctgggattacaggcgtgagccaccgcgcccggcctcttttttttttttgatacggagtctcattctcgtcatccaggctggagtgcagtggtgcaatcttggctcactgcaacctccgcctcccgggttcaagcaattcttctgccccaacctcctgagtagctgggcctggctaattttttgtatttttagtagagatggggtttcaccatgttggccaggctggtcctgaactcctgaccttgtgatccgcccacctcagcctcccaaagtgctgggattacaggcgtgagccactgcacccgccctgattctgctctttctctcatcatccctgatctgtcagcaagtcctgttaggccaaccacttctcagcatctgcactgccagtatgctagtccaagccacaaaacacctctcagaggtacgcaacaggactttgttgttgttgtgtgtgtgtgtgtttttttttttttacggtagaattattttataacttgaagtgtagggatgaccttccttttaaaattttatttattttcttaattttttattcccatagattttaggggaacaggtggtatttggtgacatgagtaagttctttaatggtgatttctgagattttggtgcacccatcacccgagcagtgtacactgaacccaatttgtagtcttttatccctcaccccctcccaccctttccctcaagtccccaaagtccattgtatcattctgatgcctttgcatcctcatagcttagctcccacttatgagtgagaacatacagtgtttggttttccattcctgagttacttcacttagaataatagtctctagttccatccaggttgctgtgaatgccattaagtcattcctttttatggctgagtagtattcctttgtatatatatgccacaatttctctattcactttctgattgatgggcatttgggctggttctatatttttgtaattgtgaattgtgctgctataagcatgcgtgtgcaagtatcattatgcaacgggacttcggatgacatattgaacaacttcctcactgatatccttgtgaaacgctacatatttcatgggtctgtttgttataccaacactcaattctgaatgatggaattatttcacatttagtctctttttcatctagccattatagtttagtttaaacaccaagttccattcctgctgcatgctgaaggatttgcagtacatcaggctatagtccatcaattcattccacaattgagtaagtaaggtatctatagtacctcaggccctgtgttaggcagggatggggtaacctagacagatttggtacctgtcctcatggagcttgactttagcggcagagacagatcttagataattgtaccagtacttaagtgttcagaaggacaagtatggaggtgggagccactccagtcctctacagtcacgtgctgcacaacaacgtttcaaccgacaacagagcacacatacagtggtgttcccataagattagaatgccatatttttactgtaccttttctatgtttagatatacaaatacttaccattgtgttccagtgatctacagtattcagtatagtaccatgctgtacagttttatagcccaggagcaataggctatataccgtatagcctaggtgtgtagtatgctacaccatctagatttgtgtaagaacactctctgatgttagcacaaataaatcgcccaatgacacatttctcagaacatatccctgttgttgagcgactcatgactgtacaatgggggaacagctcagcctgccttccccaaggaggcaacgccgatgcagggaaccgagggttgaacagaagtgggcaaggtgcagagaggaaaaaggctttccagatggagaagagcatgtgtgaaggccctcagtctggcaagagcttagtcctgtgtggcaggagctgaacgaggggttaggggagagtggcaaagggtccgggccatcagagaggtcaacaggggctggatcatgcaggattttgaatgttaacatcagagcgatagaaaacatgaagggtaaggtggtttgggttttgaatttttatcaaaatattgcaactactcggcaacaagttagatataacaaaagaggtcatcgtaaaaacagcagtctaccccttccccttcccttccctgactcagacatgacagcttttaactgtttctgattttagttcctttgatggttacctccaaaattaaatcatatgcttatacatctttcttgatttgccaactttagggaactgtgttaactccctgaaatgaaagagaatgacttagcttacgttacctccccatgttgaaattcatattcacatttctctgtaattttttttttgagatggagtctcactctgtcgcccaggctggagtgcagtgatgtgatctcggctcactgaaacctctgcctcccgggttcaagcaattctcgtgcctcagcctcctgagtagctgggactacaggcgcacaccagtgcactgggctaatttttgtatttttagtagaggcggggtttcaccatgttggccaggctggtcttaaactcctgacctcaggtgatctgcctgccttggcctcccaaagtgctgggattacaggtgtgagctaccatgccaagcccacatttctctgtaaattttaaacagtattttagtccatatgtcagttcccctctgtttaagataaggatattaataaccctacttttccttccactttccctccttaacttctgcgtcttaaaagctgtacttgaccatacccattcttgcatttgttaacatgtgtgttctgccctgcaaccacagccaagttgtagcttaattctaaagtcgaaaataacattatttacattattacacatgtgagtattgttcttggcgagaccaaataatgaatgtgcccaggattacatttccttctttacagatctggaccactcaaaggagaatgaccaatcaaggtcaaatggattcccttttcttagactctgtcacctgcttaaaatccttgctaggatttaatctacttcatattcaaaccttggcttgcttatatagctctttgttttgcccaccatttctagttgcctttttattttgtttactattcctccttgattatgttgtaaaatgctattagcagtgctgtttatttcgtacgattcggctttttccccactgaagacctttctcttggaaggcctctgcccttctgcaatctgggcaagtatctgctctttgatttaaggttgcatatacagctgtacctggaccttctcctcactgggctcttgggttggagcccgtgtcttaaaacccatatcttcctttcacatggtttactccctcgttttctggactgcatccttaaataatgtgctcagatagagtgcatggggagtaaactgtagtggataccgttgtcacctaccccatatccatttcttctttgcccattcctaacagaatcctgatattattcacctttctaccttattcccaacttcagaaaggatccttaagtcattccacacattgcattcctttggcaactgttactggtcaaggatggacatacgatctaagttggttcactcagactgaagggaaggacttccatggcacgttcagggaagactttctctttttctctcactggagtaagtgagaaaggtgttgctgggggctcttctgtaacctcagactgagggacaaagcctgaggataaagcctgctcaccaaggaaggcggagcagagaaacgggaagaacctgggtcttgatgccgttgcttagctggtgattgcactgtggctggggcctgtcctacctgagctagggactcagataggatggactttcttactgaatgagccagcttcagttttcttttctgttacttgtaaccaaaagcattgtaacagataggtcttctgagtcactgcatgcctgaaatacctttcttctactcttacacttgattggctgagtatagggttccaagttgaaaatcattttttctcctaactttggaggcatctcttctagtatgcagagtaacaaatgcaacaaatgcctgatgccaatcttattatggttcttttgtaggtgcccttcttttctcttccttccctggaagtttttaggatttcgtctccttatttttagtgtcctgaaatctcatgagaatatgtctagagttgtgtcttgttcactcgttgtactgtggtcattcaatctgaatacttttgtcaactcttttttttaaaaaaaaattactaatttacatgctttcattttctctatggggactactgtttaactttggacctcttatattggtcttctgtcttctctcatatttttcatttattgggcggtggggggtgctctgaattttggaagatctcctgcatttattttctttttccttttttctttttttttgaggcagagtcttgctctgtcacccaggctggagtgcagtagcctgatctcggctcactgcaacctctgccttccaggttcaagcaattctgcctctgcctcccacgtagctgggattacagacctgcaccaccacgcccggctaatttttgtatttttaatagagatggggtttcaccatgttgccaggctggtctcgaactcctgacctcaagtgatccgcccgcctcagcctcccaaagtggtgtgagccaccgcacccagcctcctgactttattttctatcccttctgttaaattctttatttcagccaaacctttttttttttttttttaacttactgtgaagcctgtgtgcctactgcctagattagacaattgttaacattttggcgtattttcctggtctgtatagatagggtgcatttttatacctttttgctcaccatttaaaaggaactcacagatgtcacgacatttcacccctaagtacttcagtatacatctcctaaaaataaggacattttccaatataagcacaataccccgatcacatctttaaaagttaacaataattctctaatgttatcaggcacccactttaaattcagatttcctccaaatgtctcttatcgctgttgaggggctccaaagcaattaagatttatacattgcatttgaatatgcttcctttgtctcttatttatttatttattttattttgagacagagtctcgctgtctcccaggctggagtgcagtggtgtgatctcagctcactgcaacctccgccttccaggttcaagcgattctcctgcctcagcctcccaaatagctgggattacaggtacgcaccaccacgcccagctaacttttttgtatttttagtagagacagggtttctactaaaccatgttggccaggctggttttgaactcctgacctcaagtgatctgcccgcctcggcctcccaaagttctaggattataggcgtgagccaccatgcccagcccctttgtctcttttaacaagaacagcctacccacctctccttcacttgtgatactgactttttgaagcagtcagcccaattgtcatctagaagggcccacattttaagatacatatttttagagatggcgtgtcactatgttgcctaggctggccttgaactcctggcctcaagtaatcctcctgcctcagcctcccaggtagctgggactacaggcttgtgccaccacgactagctggcccacattttagatgtctctcttttcttgtgatataatttaacttgtttgtccatatatattacttgtagacaagaagttaggtctacaggcatgttcaggttaaacattttgggcaagaatatttcataggcagtactgtgtacttcatatagcatcagctcaccaggcacttaatggttggttaccctgtggtttgtgatgctacgttttaacacttgattaaagaaggaggtgactgccaaatctccccattgtagacatacagttttcctgtggtaattgatatataatctgtgatgtgatgctttggcaccatacaaatatcctattgcccaacagccatttgcataattattttagcattcattgatccttgcctgaaaccattattacattgggggttgcaaaatgatagtttttttaattgtcacctcttctacatttagtactgtcattcctctgtaatgaattttccctcatcaaataaggaggcattatatttcctcctaaaaagacagtatagatgcttaatctttgcctttattacatttcagagtaaggagttggtagaataatcacctcaaatggtggcaaaatatttgctgttgtgtttccttttctctttcatgtcaatatggactcatagggatttatttattaaatgttttacaattcaaattgggtcaacaagagtcccttcatgttggttcctatattctcctggcataccctcattaattagtctttgagcaatttcttgttttctggcacaagatattccatcccaatatgtgcttttcgtgtcctagaactgattccaaggagctctggttccttatagtggcaacggtatttagaatccaacatgtgggtactaaatgtgctgattcttactggggtaacattatatctaggcactttcagaggacatcgctagaaaatatattcagtttttattttttatttttaatttttttgtagagacaaggtctcactatgttgcccaagctggtttcgaactgagctcaagcgatcctcccacctcagcctcccaaagtgctgggattacatctgtcagggcaaactgctggtaaatattttcacaaaagaaaaataaaaaaaccaaagtgctgggattacagatgtgagccactgtgccctccattttttttttaagtcataaatacataatgatgtcttctatggcaatttaacattacagggttcttccttaacttttttttttttttttcttttttttgaggcagggtcttgctctattgcccaggctggagtggtgcagtggtacaatcctaattcactgcagcttcaaatgcctaggcttcaaacaatcctcctccctcagcctcccgagtagctaagactacaggtgcatatcaccatgcccagctaatttttaaaaattttttgtagagatggggggtctcgttgcgttgcccaggctggtctcgaactcctggcctcaagtgatcctcccatctcgatttcccaaagtgctgggattacaggtgtgagccaccatgcctggccaacttttatttgatctgtatatatcttttccttacactgaaaatgttgggtcttactaatgttaacatagttacttatttgctttatcttgtaatagacataaaattacaaaattataataccaatattacgataaatagctgggcatggcggcgctcgcctgtagtcccagctactcaggaagctgaggtggagggactgcttgaacctaagagtttgaagctgcagtgagctgtggttgtgccactgtactcctacccggacaacagagtgagtggggggaaaaaaaagaaataatggaagatccagagaaagccccaaatatttaaaaattaaacaatacactttgcagcttcctcacctctctcagccttcatagaattgaagagagttagggccttgcactagattaggctttgccttaaggaaatgttgtgtttgatttgatcttttatccagaccattaaaacttccttaacgtttattagtaataaggctatttcactttcatatcatttgtgtgttcactggagtagcacttttagtttccttcaagaactttgattcacaacttggctaactttggtacaagaggcctagcttttggcttctcggctttcaacatgcctctcactaagcctgatcatttggtttttggtttaaagagaaagacatatgactcttccttttacttgaatgcttagaggccattgtagggttattaattggcctaatttcagtactgtcttgtccaagggaatagggaggcccaaggagagagagagagatgggggaacagctgattggtggagtagtcagaatatacacatttatcacttaagttttgccatcttttctttttctttttcttttttttttttgagacagtcttgctctgtcacccaggctggcatgcagtggcatgatctcagttcactgcaacctctgcctcctgggctcaagcaattctcctgcctcaacctcccgagtagctggtattacaagcgtgcgccaccatacccagctaatttttatattttttagtagagacagggtttgccatgttggccaggctggtctcgaattcctgacctcaagtgatccacccgccttggcctcccaaagtgcggggattacaggcgtaagccactgccgcctggccaagtttgccaccttttttattttttttattttttgagatggagtctcactccatcacccaggctggagtgcagtgatgcaatctcggctcactgcagtctctgcctcctggattcaagcgattctcctgcctcagcctcccgagtagctgggactacaggcatgtgccagcacgcccagcttgttttttgtatttttagtagagacggggtttcaccatgttggccaggctggtctccaactcctgacctcaggtgatctgcccggctcagcctcccaaagtgctgggattacaggcgtgagccaccccgcccggccaagtttgccatcttttatgggtgcagtttgtggtgccgcaaaatgatgatagtagtaacatcagagagcattgatcacagatcaccataacaaatataataatgagaaatttgaaacattgtgaaaattaccaaaatgtgacagagacatgaagtaagcacatgctattggaaaaatggcactggtaaacttgcttgatgcagggttgccacacaccttcaatttgttaaaaactcagtatctgcgaagtacagtaaagcaaagcacaatcaaatgaggtgcgcctgcatattacaaccaagaggcttttcgcagaaacacgagtgtgcttcaacattcaaaaatcagttggtgtaattcaccacattaagataataaaggaggccgggtgcggtggctcacacctgtaatcccagcactttcagaagccgaggtggacagatcacttgaggccaggagtttgagagcagcctggccaacatagtgaaatcctgtctctactaaaaatagaaaaattagccgggcagggtggcacgcacctttagtcccagctattcgggaggctgaggcaggtgaatccttgaaaccaagaggcggaggttgcagtaagctgagatcacgccaatgcattctagcctgggcaacagtgagacccagtatcaaaaaaaaaaaaaaaaaaaaaaaaagataataaaggagaaaaaccatatagtctattcaataaatacagaaaacgcatctgacaaaattcagtgccctttcatgataaaaattcagcagattagaaatagaggaagtgcatgtatgaaagagctacagatagattgtacttaattgtgaaatattgaacatgttaccccgaaaatcaggaaaaaggcaaagatgtccactctaaccacttctattcaacattatactagaggtcatagccagtataatgaggcaagaaaaaacataagaggcattaatatttaaaggaagtaaaactgtttctatttgtaggtaatgtcgaaaatgtgaaagaaactatcagaacctgctagaactaaaaagtgaattcagcaaggtctcagggtacgagatcattcaaaaactaatcagaaatgaaatttcaaatgcaatatcgttaggaataatttaataagaaatgtacaagatttacacgctgaaactgaaaatgttgctgaaagaaattaaagacctaaataaatggaatgttgtaccatgttcatcagctgaaagactaagtgtctttacagtgtcagttctcccttcattgaactgtagattcataaccccagtcataactgcagggttttttttgtagaaattgattgtaaaatgtatatggaagctgggcacggtggcttatgcctgtaaaccagcactttgggaggctgaggcagacagatgacttgaggtcaggaatttgagaccagcctggctaacatgacgaaaccccgtctctacaaaaaatacaaaaattagccagacatggtggcacacacctgtaatcccagctacttgggaggctgaggcatgagaatcacttgaacccggaggtggaggttgcagtgagccaagatcatgccactgcacgcccgcctgggcaacagagtgagactttgcctcaaataaataaataaataaaacgtatatggaaatgcaaaggacctagaacatccaaagtaaacttgaaagagaacaaaattaaggggcttatgtgatgtgactttatagtcatttgatttttaacagaggcaccagaacagtccggtgcgggaaaggaaagtcttttagcacgtgccggatgatggcaaatgacatccataccagacaaaaatgaaccttgaccttaccctaaatattagtttcttagagttgccacaaactaggtggcttaaaaccacagaaatttggctgggtgcggtggctgacgcctgtaatcccggcctttgggaggccgagtcgggcagatcacctgaggtcaggagtgcaagactagcctggccaacgtggtgaaactttgtctctactaaaaatacaaaaaacttagtcaggtgtagtggtgcacacatataatcccagctagccaggaggctgaggcaggagaattgcatgaacctgggaggttgcactgagccaagattgcaccactgcactccagcctgggtgacagagtgagactccgtctcaaaacaaaaccacagaaatttgctgtctcataattccagagtctagaagtccaaaatcaactgtcatcagggccatggtctctgtgaaacctgtaggggagtccttccttgcctcttcctagcttccagtggttggcaacctttggcattctttgatttgcagctgcattacttcaatatctgtcttcctcatcacacagcattctccatgtatgtctctgtctttacatggcctccttcttgtaagaacaacagtaatattggattggggcctgccctactccagtgtgacctcaccttaactaattacacctgcaacaacgctgtttccaactaaggtctcagtgtgaggtactgagggttaggacttcaacatatcttttttgggggacatagtccaacccatgacactacttcacaccatacataaaaattaattcatgagagattatagacctaaatgttttaaaagctaaaaatataaagcttctgcaagaaaacataggagaatatctgtgcagtccaaagaataaggttttttttaaacacaatttcactctgttgcccaggctggagtgcagtggtgcgatctcagctcactgcaacctctgcctcccgagttcaagcgattcccatgcctcagccttccaagtagctgggattacaggtgtgcgccaccatgcctggctaatttttgtatttttagtagaggcagggttttgccatgttggccaggctggtctcaaactcctgacctcaagtgatctgcctgcctcggcctcccaaagtgctgggattacaggtatgagccaccgtgccaggccaaaaaaagatttattaggatacatgaagcaatagctattaaaagaaaaaataaattggacttcattaaaatttaaaacttttggtcctcaaaagataccattaagaaaatgaaaagacagagctgggcgtggtgaggcttgcctgtagtcactactgggtacttgagaggctgaggcaggaggatcacttgagcccaggagttctaggccaacataggcaatatagtgagacagtgtctcttaaaaaaaaaaagaaaaagaaaaaacaaaagaaaataggctgagagctgtggctcatgcttgtaatcccagcactttgggagtacaaggcagatggattgcttgagctcaggagttcaagaccagcctgggcaacagtgaaatcccatctctacaaaagatacaaaaaattagccaaccatggtggcgtgcacccgtagtccatagtcccagctactcgggaagcagaggcaggaggattgcttgatcccaaggaggtcaaggctgcagtgagctgaggtcgcgccaccgcaccccagcctgggtgactgagtgagaccctgtctcaaagaaaatgaaaagacaagtccaccaagaaaacagttgagaccagtcatagaaaaaatagaaagtcatatctgacaaaggatttgtattcagaagaattcctataactcggtaataaaaagacaacctgatttttaaagggtgaaaatattttaatggatacttttttttttttttttgagacagagtctcactgtgtcacctaggctggagtgcagtggtgccatcatacatagctcactgcagactcgaactcctgggctcaagtggtcttcctgcctcagcctcctgcgtagctaggactacaagcacgtgccactatgcctggctaatttttaaattttttgtagacatgggctggtgtgtgtctgtgttgtctaggctggtcttgaactcctgggctcaagtgatcctcccacctctgccccccaaagtgctgggccaccacgcctggtgtggtgtcaccagagatgagccaccatgccctgcctgatacttttcttttatcatctgtttatttcttgtttatgggtgtttctgttctgattttatgactattctgtattctaagatttctctgagaatattatttgtttcctctaaggacagacttggtctctcttccatggggctggttcttgagccgccagggatggggggaggacctgggtagctgctgcgctgccccttctctgctgtggtggagtggcccgttgcctgcggggtctgtctctgaagggtggtttggagaagttctgtggaggcgaggcaggggtcagctcttgccccatggaccctcagagactgggaaaaggtaggcatcacctgggctgctgccagccacatcaagagcctttggggtgggtggggtgggggccggggaagggaaggttctagctgttgatttagaaaagacccattgatttcttgcctgagggaagaagtggcaccttgccactccaagtttgctctgctcaccagccccaacagcatcagcctcacctgggagcttattgaaggtgccctgccccaaagcttgtgggtcgggatctggcagtcagcagcccccaggtgttgcacacatgacagcactgcttgcccctcctctcgtctggtctggtctggtctggtctggtctggtctgagagcttctttggggctctgacaggtatacaggctctcatctgctctacagctctcttgtagtacattcctctctgttccattagtcaacatgttcttgcctacttccagcatctagaaatttgctgagtgtatcttatccgttcagaggtcctctcctgctattgcctctgttagaaatttcttccctttcatatgtctgtacttcggtttctttgaggtttgaagggtcaagtggcaattacatgtaggcagttggccatcctctggtgaaggctttaaagcccaggaataacaagatccattatgtctaaaactagcaaaaaccctacctgtcacatggtgaactgaattagaggtgatggggacagaagccagattggagtgagtggaaggtgagggagtggagattgggtatagacaactctctttaagaagttttgttgtgatggtgaccagaaaaataggagtggggtagagggggatgagggtgtttttcacgtgggtgaatatgagagcatgtttacatccttctgggaatggcccaggagagaggggagcgtgagaaggaggaaatggggacctggaggagcagactccttgtgtggaggggggaagcggcatctagagctgttgcaggaggtgggctttgagtaaatgcttcctctttggtaaagacggggaacgggaacggtagaagttgcacggaccctttgttaaagctcagaagctgagcgagaattagagcttaagtttatggagtagtcagaataaagtacccctaactgtattcttgcacagtgcaggaagccaggggtctgaaatcaagatgttgcagggctccattccccccagagcctctagcatggatccttccttgcctcttccagcttttggtggctgcctggcagtcctagactttccttggcttgcagttgcattgctccattctctgcttgtgtcttcacatggccttctctgtgtccccgtattcttctctggatgcttgtcactgtattaggcccaccctaaatccaggatgatctcatatcaagatccttcacttaattacagaagcaaagaccttccaaataaggtcagagccacagggtctgggggttaagacatacacctaactattcggggctaccatcgaacccctgtagaagcctgtccatttccaggatagcagagcccaaggaagggccagaagtccccccaaaacagttgtttgcattcaccagattctaagctataagcagatgggcagtggcagtcggtcctaatccatataccattggcaacaatagtttagttcactgtagacataatgagatgcttatcttctgctaagtagtcctcatggtaacagccatattactcctggctttgagtgacagcgctgtgctcttgtctggtgcccatatacttcagcagctggaaacaagacagtgctcatgattcaccggaaagtttctgtagttaaaatcaagtgatcccttgagtctattctaatatttgtctgtaccatgttctgtgacgagacatggaaacaaaacattaagaagtgaaagtatctttgattatgctcttgaagacaactttttgtttgtttgttttgtttgagacggagtttcactcttgttgcccaggctggagtgcaatggtgtgatctcggctcactgcaacctccgcattcccgggttcaagcgattctcctgcctcagcctcccaagtagccaggattacaggcatgcaccaccacgcctggctaattttttttattttagtagagacggggtttcaccatgctagtcagactggtctcaaactcctgacctcaggtgatccgcctgcctctgcctcccaaagtgccgggattacaggtgtgagccaccgtgcctggccgaagacaactttttaaagatgcatatgctctgggctgggtgtggtggctcacacctgtaatcccagcactttgggaggccaaggcgggcagatcacctgaggtcaggggttcaagaccagcctggccaacatggtgaaacaccgtctctactaaaagtataaaaattagccgggtgtggtggcgggtgcctgtaatcacagctactcaggaggctgaggcaggagaatcgcttgaaccccagaggcggaggttgcagtgaattgagactgtgccactgcactccagcctgggcgacagagtgagacttggtctcaataaataaaataaaataaagatgcatatatgctctgaaggctggctacattttattttttctcaaacaacttttacagtggatagtgctgtaaaagttgtttagctctggtcattttatcttttttgtgatctgcaaaaggagatccttttccttttcactgcctctaatacccaactccaatactcctttgacctcacaggcacttagaatccatcagtggctccatcttttctcagacttcacctccttcgtatccttattcctctcctttgtagcttcagtgccagtcagacgtcgttactccctggcacactacctcagcccttcggcactttcttgctttgttatattcagtcgacaaagccccagcctcatgaaattcagtcatgtctgccccatgcctgctccgtcctgaagctgaatgtgactccttcattgattccccctttaagttcatgtctaccccaggtaaacttcttgccgccaagcccacctgcatactgcagttccccggtctctcctagcccctcccaccctcctcatcagctgtcacacctccttgcagctgatatcttagttcccagagagcacagaagcaagctcaagagagtgtctacaggccagcgtctactccttcgctctgcctccctcatgctgtcacggagcgcctgtcccaggccctcactcctgttctaaggcatctctccagtcctctactgcactctcccccatcagagattcctccctcgcctgccctagaaacttgttgctacttctcccaccttgacaaaagctgctcccaaccccccacctgtctagcatctctgttttcctttaccagcaagactccagtccctgtctccacaccctcttcaaccttctccagttgttcctttgctgccacagctctgccaagctgctccatgaggtctccagtgatgaccttcatgttgttaaatctgggagctgcttgtcacttcttttcccagagctgtcgtcgtcagttaaccccaatacccatacgagacaatcctttccctcccttgagtctctgcactgatgtgcaccttctcagtgcaaaccacagcttttgtctctttctagctgaatacatgactgactgtgcttatcttagctgtcacccctgctggagcagaagctccacaggacaggattgtctccttgattcacagatgtagctcaagctcctagaacagtgcctggtgtctgtgggtcctcaggaagtcctaggtgagtgtgtgaatgtctgtcctcctcggtcttttctgtttcgcatgtgatgttggaaggcctcaggttcaggcttttcttctccaccctcactcccgaagtgattccgtccagcctcatggctcccaaatttatgtctccaggctgactgggtcacgggaactccttatcctccctagaccttctctttccctggtcttctcctttccagtaaacagcaactccaactcctgctcctcaggccagaaacctggcgctggttacctcatttgttcacaaatactgttactccacctgcaagatggatacaaaatctcatgagttcccctgcctccatggcccccaccctggtccaggtgtccagcttccctgcctctgcccttgccccctggttctttgtttagtcctgcaatattgtgctcttctgttcagaaccctccagtgggtccctgcttgctcagagtcacagcccaacaggatcacctctcttgccactctcccaccactcatgcactgcggcctcactggcctcctggctcctccctggaccctccaagtatgcccctgcctcaaggccttgacctctcctctgccctctgtcccaggtatcacacatgtctgctcaagtgtcaccttcccaatgtggccttccccgagcacacccatgtctgtaagtcaggcagcctgcctctgccccaccagttccccctgcctagcataggacttgtcaccatctgccacaagctgtgttactgcttggttttgtttgtgctctcccactcccttcccctccctccctctccccacccctatagaatctgagtcccatgaggacagagatttttttttttgcctcttcctcaatatatccccagtgcctagaatcatgcatattttaatttattgagtgaattaacaaataaattctgcagtgggacattgctctaaggttttgtcttataagagggacagaagaacatgcagcctgctctgctgttggctccttagcttctccatggctaacaggaacaatattgtttatgagataatcaaagccatagtcatgagttagaaggtacatataaaggcaaatatgtggagattgagttactttggcgggggcggaggggtgtgtagttatctgaaaacatggaacaaatcaatgagagtctaaatagcacccacatatttgcccctcttttaaaacatacctcctttatgagtgtagaatttaacagcacagtttcccagtgcagctttgcgaaacaagagaaatgaattttaaaggctgtcaggtgcctttgcaatctgtggcttagtatttgtgtaacaacatttgtgttttgccaacagatgtactgcttaaagtacccatgagaatggcctctgtggttttctactttctcggatggaaccttaggaactgattattgagaagaggctgatactgcccacctcagctcccaggcaggcttcagggccttggttactactcctttgggccctcactgacccttgcagacgtcttttgcaacctctgtagccagaagagacaactgctttctggcatgttgctctttccctaatggctttatgagcttcttgaacaccaaagcatgtgtgacttcctcacgccttcccctgtatagtatagcacccctaactgtatgtgtaaggagaaggagtgagcaattgatggcgtccccctggatctccaagggaatgggaaggggcagggtttctggattcagtcatgtggaatctggtcgttggtgtctaaatgtgcctgttacttgtgcccaatgtccaggttcaccaggaggcttagcctgctcatttccctgctagtagctatattttgggagagcattttttatgctctaattgaactttgtgggtctcagcaatttgaacaatgttttgtttttcttctggtcaggttacaaaggaaagaaaaggaatctggtgttgtaggaggtggtgtgttgtgtaattacttgttttttttttttaagtttttttatatttttgcaacaaggcaagttttctttgaataaataatgctgggagcttatcacatagaaggcatatgtgttgtactcagtacattctgaattatctgggtttatttttatctcttgaattcacttataaacaattcaaaggctgcttttttagctaacagaaataggaagagaatctcagaatctgttttgtcattttttcaatgggttgagttatagtgattatgctaactcggtggaaaagcagtgtagtgagtaaaccccacatacggcatatcatgaacattttgttgcttttttggcttctgaccatcttcatacctttttttgtgttaaaagtctccccattgtgtatatcttagtaagaggcaggtggaccctagtttctacctaagaaaacctgaagatggggttgggggcctgtggtgtacttccttctcatgctgtccatgaccactgcagtggctttgtaaggatccaggacccagggcccctcagtgggtgtcttccatttctcaagattgcctcttggttgtgagatgacggttgctgctctagtcattgcatccactcctccaggtaggaagaaagaggtcataggggaaaggcaaaatggcacttgacatcttaacttctaggcccattcaatatttccatttccatcttcacacccatcatcttgtcctagggaacaaacagcaccagcagctcagtagctataacagcaattattatttctcacacatgggtctgggtcagctgcaagatgggattcagatctgttctcaagcctgtcgttccaggacccaggagggagaagcagctgccaggggaagtctcttcgtaggcggaggtcaggagtccaagaggagtgagcagagtcacagaagcctcttaaagcctcttcttcccccatcccatcaacacgtgagcaagcccagagtcagtgggtgggaggtgtgctccgcccatagtcagtagaacaagagcaagcttgaaagagaacgatgaacaggagtgcactcggccactgtctccttagccataacgtagtcccatggtctgctgggaagcggggaataactctccttagctgagcgcagggtctcattagtaaggcagatggagaacatggatgttgggggacaactggcagtgcctgccacaggggaatggatatattccctccccttgctctctggaaactaggggatggcgatgaagcctaggtttggccaaacccattctgccttcagggactttgactcttgagggacagtgagggattagtcatggtggtggcagttgagtcacaaaaccagcagtggtggctaatgtccagtgatgacatgcaacagtgcccagggtgggtgtcccaaccagcaggtccctgcagtataaccttggctgtgtttgcagtggtgcagcctctattcctgctgcttttctgagcctagttctctagttctctctccatttccagatctgctgcccaagaactcctttgtgattgaatttaaccagagttgatttctgttgcttgaaactcaggaccttgatgcagtgtgcagggtctgggcaaggtaaaaacacactttcatgatttcgcctcaagtatagtagatgagcttaggctttttgagccaggtagccttgggattaattctcagctcttgcacctagcaggtgacctcagcaatcaagtcacttgccctccttgagcctcagtgttgccctcagttaaacattgctctcgtgtgttgctgagcattcagtgagattgtatataaagtgatcattgtgaaggtattgggacataatttgggaaagcgtcctggtctaagcttttgattggctctccatcatttgggtaatgggatagtgatttaggagtatcatagcagctcaaggggcccttctggaaagggtatgaggaaggtcagggacaagtctgaaatgaatcatcctaggcttaatgcctgtgactgggcagtgggtacaattatctcaggctagtcagtagtcatttattgtgagaatacatgggcagattttttaatttccttctcagtctagacttgaatgcaaacagttcttattgctaacttaccactagtcaccactaatgaacaaagactatgaacaggaaattcataaaagaagagatacagatggccaatgaagataggaaaagagttctgcctgctggtaatcaaagagatgcaaacgagaacaaaaatgatgccttttcacctaccaaatttgtcaagattaaaaagaaagcaaagagccagcgtcagctgatgttcatacctgcacctgctcggtagcttgctaatgttctgcctgctccacacgccaggccagcctccacggcgcagccaggtgaggcctttccttgtatacaggcacgtttggattcactgttgcataagtgagacatgtgcatgcttcacaattcaggaagtgcaaactccagagtgatgcaaggtctgagtgtccctgctgccctggtctcccagctgcctaggcctctcttcagggaacggctgcatccagggtcttgtctgtgtcttttgaggtgttctatgtacacgcagacacatctaaacctatttttattttccctgcacctgcttgggctactgtaagctgttaaatttttttttctaggaatttgtccattttgtctgactagcataaagttgttcatgttatagtttatacatttgcaacatctgtaattatgtctgctttttcattcctagtgtttgttgtttacttgtaccttctcccgtttttccttgtcttggtaaaagctcattaggttcattggtcttacaagaagcagacatgtaggcattattgccctgtattactctgtgtctcttttctagttcattaaattctgcttttgcttttatctttattattttttctatggtcttagagtacattctctgtgttttgttgttgttgttgttgttgtttgttttttgttttgagagagagagtcttgctctgtcgcccaggctggagtgcagtagtgcaatctcagctcactgcaacctccacctcctgggttcaagtgattctcgtgcctcaacctcccgagtagctgagatttacaggcatttgccccacacccggcaaattttttgtatttttagtagagatggggttttggcatgttgaccaggcgggtctcgaactgctgacgccaggtgctccacccgccttggcctcccaaagtgctgggattacaggcatgagccaccacgcctggccctaacttcttaagttataaatttggttcattgatttttctacccttttttcaaatgtaaacatttaaggctaaccctctggaactacttcaactgtatctagcaagttctgatagtattgtcactttaagttagcccaaagatattttaaattttctttgtttcttcctttgactcacatattattttaaaatgtgtttttcaatttccaagcacatggctttgggtttgttttttttttttcctagttgctctagaaaaaaaaattgactgcatgaggtggctcatgcctgtaatcccagcactttgggaggccgaggcgggcagatcacctgaggtcaggagttcgagaccagcctggccaacatgccaaaacctcgtctctactaaaaatacaaaattagccgggcatggtggcacacacctgtagttccagctactcgggaggctgaggcaggagaatcacttgaaccgggaggcagtggtcacagtgagccaagattgtgccagtgtactccagcctgggcaacaagagcaatactccgtctcaaaaaaaaaaaagaaaaaaagaaaaaatcaacttctaactaaatggcactgtgatcaaagaacttggtctgtgtgacaccagttcttgcagttggttgagaagtgctccatgacacattatccacaaccagtggacagaatatgtcaccaccaagcatgggtgcaggattctacatatattcattacctctgtcttatccgtttgttgtgaaagtattttctcttcttactgtcattttgtttacttgatttatcaactgatggaatacgtgttaaaacctactgtggtgatggacacatcagtttctccacagagtttggtcattttcattttattatttattttgaggccacattttcagttttagatacagtttcacattcctggtgtattgaaccctttggtattatgaagcgaccatactaatatgttatttttttttaaattattatttattttatttatttttctttcttttttttttttttgagacagggtctccctctgtcacccagtctggagtgcagtggtgcaatctcagctcactgcaacctccgcctcctgggctcaagtggtcctcccacctcagcctcctgagtagctgggattacaggcttgcaccagcgcgcctggctaagtttttgtatttttagtagagacagggttttgccatgttgcccagactggtctcaaactcctgggctcaagcagttcaccagccttggcctctaaaagtgttgggattacaggtgtgagccaccacgcccggccatcccagttttttattttcctcctttctgtgtctttatgcatcagtgaggtggagcttttgaaaatgtcagatagctagattttttttttttgagacggagttttgctcttgttgcccaggctggagtgcaatggcgtgatctcggctcactgcaacctccacctcccaggttcaaaacaattctcctgccgcagcctcctgagtagctgggactacaggcacgtgccaccacacccggctaattttgtatttttagtagagatgtggtttcaccatgttggccaggctggtctcaaactcctcacctcagctgatcacccgcctcagcctcccaaagtgttggaattacagacgtgagccaccatgcccagctgatagctagattttttttttttttttttttttgagacggagtcttgctctgtcgcccaggctggagtgcggtggcgcgatctcggctcactgcaagctccgccccccgggttcatgccattctcctgcttcagcctccagagtagctgggactacaggtgcccgccaccacgcgtggctgattttttttttttttttttttttgtatttttagtagagacggggtttcaccgtgtcagccaggatggtctcgatctcctgacctcgtgatccgcccgcctcagcctcccaaagtgctgggattacaggcgtgagccaccgcacccggcctcgagattttttaaaaaatccattgtctgtttcgtcctttaacatctatttgatttctgatgtatttagattcatttatagcatatttgtgcattctatttttccatattttctgttcttttaaattttccttctcctttcttgccttctcttagacttttaaaaaaattgtagtaaaatacacatcacctaaaatttaccatttttaaatgtacagttcagtggcattaaatacaaattggaggccaggcatggtggctcatgcctggaatcccagcactttgagaggctgaggtgggaggattgcttgaacctggaggtcgaggttgcagtgaggtgtgatcacactactgctatagcccaggcaacagagtgagaacctatctaaaaaaacaaacaaacaaacaaacaaacagattggcatcacacagtgtgtgtgctgctgtgctgtgctgttatcatttaacattaaaacataaacatcagcactgttatggactgaatgtttgtgtcccccaaaattccagtgttgaagctcaaacctccaatgtgatgttatttggagatggggtatttgagaggtggttaggtttagatgaaatcaggagggagggtgggtttcgcatgatgagattagtgtccttataacaagagacagcagagagcttgctttctccaccatgtgagtatgcaatgagaaggcagccatctccaagtcagaaagagagccctcaccaggggctgaatgtgctgacaccttgatcttggacttctagcctccagaactgtgagaaatttcagttgaataggccccccagtctgtactattttgttatagcttgagcagactaatacacccatgttatgaaaagctataaacatccctttaaaggccacctaacgcgtcgtattacctcatgcatcttctctgctgagctttccaaaagagtggcttaggctgggcctggtggctcatgcctgtaatcccagcactttgggaggccaaggcaggtggatcacctgaggtcaggagttcaagaccagcctgaccaacatggagaaatcccgtccctactaaaaatacaaaattagctgggcgtggtggcgcatgcctgtaatcccagctacttgggaggctgagccaggagaatcacttgaacctgggagatggagggtgcagtgagccgagatcgtgccattgcattccagcccggccaacaagagcgaaactccatctcaaaaaaaaagagtggctggccgggcgcagtggctcacgcctgtaatccccgcactgtgggaggccgaggtgggtggatcacgaggtcaggagttcaaaaccagcctggccgagatggtgaaaccccgtctctactaaaaatagaaaaactagccaggcgcagtggcaggcgcctgtaatcccagctacttgggtggctgaggcaggagaatcgcttgaacctggggggcggaggttgcagtgagccaagatggtgccactgcactccagcctgggtgacacagtgagaccccgtctcaaaaaaaaaaaaaaaaaaaaaaaaagtggcgtatgttcccggtctccacctctcattcgccagcccctgtgaccaaacccctgggattagatctccatcgggtccctcccctcaccctaacctcacatgcagtggttcctgagaagctgctgtttatctgatcacgggatccagcaggatctgagggctcattcactgaatctgtactacccaacaaggcaggcttgtccttacccacacttttcaggtgaaaacttaatcagattcaagcgtttatcttagtggcctcttcgtggtgtgtgatttccttcttgcagctctttactggctaaaactcttcactgggagttaaaccaggtgtggtccttgaccctcatcattttgtcccatctcctatgctgggctctgtatccttgtctccaagcagtctcgtgtgacagggaagttacctattattgtatggtcccctcttcttgtcacctctggtgtggcacttgttccatttcttgttcaatgaatgtgatttgtgaatgtgccacatctgtgggaggaaggcagttcgcagcaagagttgtagttcccttgctttgccctgagggccaggactttacactagatttttttgttgcattcctgcactcataaagtacacgtaaacttagaggtggtgtgttaaatgctagaacttaaaactgagttcagctaggctcaagtgccccacaatttttgtcccaccagacaatttcatgaatatctacagattgttccctcaatatgcctcaatattgaggcatattgatttggggagcacagacaagtcaaggttgatgtgcatccgctgaacatgatcttaagttgttgaagtaggtattattaatgaacgaacgtctattttagctccaagagcccctggtcttccagaagagactcccaatgatcttccagaagcagctgggcttcttttggtcctcccccacccaggtgcagtcccgttctccctgcctgggtgagtttgattcctctgccgtggaataggctaggctgctacctcttgagcctcttccaccaggccatccattaggtggcgacagagagcactaaaaggaactactatggaaataaaacttgttttgcttcttggggggaaaaaaaaagaaaaaggcttgtggggcgtgtgtgcattttagtcagattttactgtgcaaaacatttgagagatttctgccctctttctcccttccattcttctcaacccactgggcgccctaccacccctgtctccttcaagataaggtagatcagaagaccaaatagacaaatgccatgtccactgttttctgtcacagttgatagccataccagtcacccaagctggaaacccaacaggcccctgcccttcactgcccacatccaagggagccaccaagtcccacaaattgttcctttaactgtttgtccctcttttgtcttctgtcatcccttctaccgctgtcctggttcaatccctcatcttgctctgggactcccatgataacttatgatctttcctccacctctctatcttccacacaatccctatcatcaatctcattcccctgctttaaacccaagagtggcaccctgtgtttgagtgacatcagggcccctcatgtggctcctgcttctctttgtggccccttctgttgctgctgcttttcttatggacatagccctcagcagtccaggactgcttgtagttcctcccaggtaccatgtttcttgcactcctggcctttgtcattggctcccctgcccaagtccccttctcttctcctttccttcccctgtggccttgccttgtcgtgcttatccttgaagaccctgtcaggtatctcttccccaaagagccctgcctaaccaccgcccccctcccccccgcgacacacacacctgggttaggccctgcctctccacgcctgtgcctcctgccaagtcctcagaggtctctgatcccatgtgcctccaggcatggcatagggggactgtgacacagcctctcggcccacagacccctgattgtgggcttgctcactgccccagtcagtcctcttattgaggattccgtgccagttcctgactccagcacacacacgcatgtaggccgccctcctagtgcctggctccttccctgtctcttctgccactcattcccatggtcgtatcctggagttggtcatctctggaactccacccacggagttctaacttagctctgcctatgatgaggacttactgtcttcccagcttgcagtgtcaaccactgtttgatgcccctgggactccattggtcttccctcctcttgtgaactgtgcccatcaccagacgaacttgttttagaatttaccatcgtaactgagctcccttcagcgcatacctccttggctcctgctcagtctctgtttctccttttagccaaactctctaagagttctctccactcatgggccctcttccttgcctgctgctccttgctcagcttgctccatgaacacttgcttttccacattccatgaaataatcttaacagtcatcagtggctgtcactccttctcagccctttccttgtgtctcttctggtacctcatactctccaggtggccatctcacctcacatcttgaaccctctgggtttgggagaattctcacctcacgagttgatgggaggcctggcgacctctgattgtagtcactgcaaatgccagatgcttatttgcctagcttccctttcggtcagggcagcagttggcaaacggtatctcaagggccaagtccggcccactgcctgttttcgtaaatgaagctttaccaggacccagttccaccccgtcctttgtgcattgtccaagactgctctcctgtacaacagcaggtgggctggttgtgacagatactgtctggcccacaaggtggaaaatactatctggccccttacagaaagaaattacctgagttctacacgagggtgtaggtatgtaccctggcctctgccagtcagactcacatgctaggaggagcagggccaggcaggagagccgtgtctcctggcattggggctgcaggaaagacgagctcctaggccacagtgccagtggccagtgctgctgccttgcagggtcgcacaggcagtgctggctgtttggactggcttggcagaaggatttgaagtattgttcctagccaactggactcaaacctgttcctccaaccctctagggattctcttatcacccagtagccttttccccctagttttaaaaattgcagtaaaatacacaaaagataaaatgtactgccttaaccatttttaagtgtacaattctgtggtattgagcacatttatattgtgcaaccatcaccacatgcatcttcaatagcttttcatcagtccttgtctgcataaatcagctagagttggtttctattgattgccaccaataatcttgacagatatgtctgatcttccttctctgcactgactcctctttctctgtctcctctgctgattctttctcctcatcacaactccaaatagcagggggagggttgtttacacttatattcagcacgccctcacgcactcgcctggctcttcagacctctcccctgaactccagattcatacatccagctgccctttaggcctctagaaagctaaatacctcagtatcaaaaacatgagaaacggaagccagagtcctggatctctcgccctttcgctgtcccggtgcccatgcccttcagggatggcacctagaccagctccctgcatccctgcctagactctgcagtagtctcacgtggcagacccggaggtcactctcctctctggatgccctgcggacactccggttagcctcagctgcaagagcctcctcacccaaggtcacgccatttccaggacagcaccctggtgactgagcgaggtaagggtacaaggcccttatagggccttctctttgacttcttcccacctccctttatggatgtcagttcctgatgaacatcttacacctcaaaccgtgacccaacatctgcttctgcagagcccccctgtggcatcttgtgccctcctgccccactccctctactctatatcttcccatagttagaatgggctttttttttttttttttgagataaggtctccctttgtcacccaggctggaatgcaatggcacagtcacgactcactgcagcctcaacctcctgggctcaagcagtcctcccacctcagcctcccaagtagctgagactacaggtatgcaccaccacacctggctaatttttatattttttgtagagactggggtctccctatgttgcccgggctggtctcgaactcccaggctcaagcaatcctcccgccttggcctcccaaaatgcaggattacaggcgtgtaccagtgtgcccagcctcagatgggctctttgaaaaatgtttattagatcaggttactcccttgagaaaaaccctctcagaataaaacccgaagtccattacttgaaagcagagccagcttcatgggcctttgtaactgcccatgggcttgctggaacccaggcttggtttaatactctactctcaccatctcaaaattcttaatttttgaacaagaggccctgcattttcattttgcaccaggctccacaaattgtgtaactgggcctgcctcagcagccacatggaacatgatccctccttgcctatttgagctcattctctaccattctctcccttgctcacctggctcccactgctcttgctcttcctggaacttgccataatgttgctagagtcagagccttggctcttgctgctcctcattggctggacccctctttacttgacctgctccctcaccactcacttccttcagatctgtgttcagatttcgtcttctcagagaggcttttggcccctgtccatctctctgaatttacctctgacctctcccccaccaccactgcgctaagctgcctcagaactttgtagacattctgtctggtcttctgatgtttcccccttggaagaatcccaaggtgcctgaagaatgctttctttatccttgaagttgagtaggttgactagagtctggcttgctattgagcattctttatcaaattgtcctgggaacatggtgtattctttcagtctgcagatgtagtcgttgctgtttcaggtcagctctcttatggatctttgacagcatcttctgttccatttgttgagttctgtacttcagggacacaaattcctcatgttggattgtctttgtctctcttccaatgctattagctttgccgtaattggtttagcttttgtctttttcatctgcattcactttgtctaatttgattttcagctatgtatattctgtttctggctgtttttcaatgtatttattagtttcataatgatgtgttttggtctgcagtttgtttctctaggttggaaatttgtcttttcatcttattctgttttatcatcccatctttgaactcttttattgggaacatgttcttatgaagttgtggggaatttttttcccttccttgtgtattctcttcttggtgggagactttgcctttctcgtgccatctccctccctgggcctcttttttttcttctggccataatatgtttgcctagttaccatgtcacttcttttcgtcttggctcaggcttggatggctctgcatagtcgttctgtttgctttgagacagtggaggaattcttggctctctcttcccagtttcttggcatcttctcttgctgttttcccctctgagctatcgcgtgcaggcttgttatcttgtatccggagagaatttgcacgctggagggagctgcagccatgtagtcttcagccctatctggattcttctctttgttctaagaactgtgttggatgtcttactaaggctcactctagctgcacgagggatgtgtgtgccatttccatggggatagggggcacctcagtctctgggtggttccataatctgtgtatacctaagagcagttgcttcccacagagctgggctggctcactgggcactttgccatttctcctgcacctcccagctggagtttctgggtctaaaaggaaaaagtgaaggactcccacttggttgcttctctccagcttactgactgcaaattcccagggcgttgcccgctccctagggtggtttctgggggacggggcaggagcctggctttgctgctgctttgtcctctggagtcttttctcagactgctttgaattacacccctttcctttgtgtgctgaaatcttcccttcacactctccttccctgcctttcttttgtgtcttatcttactaggactggaagagggcagttgtgcaggaggtctgcatctaattccctaatccatgtgagagtgctcctgttgtgtgctttgtgacatgatggtgagaaatactccctagagcagtggctaccagaaggaagccatccccccccctgcacacacacacacacacacacacacacacacacacacacacacacactccttctggctgtcctcagatgcctattctaggtaaatgtcagattccaaagaaaatccagttgagatcttttttctttttttgagacgagagtcttgctgtgttgcccaggctggagtgcagtggcacaatctcggctcactgtaacctccgcctcctgggttcaagcgattctcctgcctcagcctcccaagtagctgggactacaggcgcgcaccaccacaccaggctaaaatttttttgtatttttagtagagacagggtttcactgtgttggccaggctggtctcgaactcctgacctcgtgttctgcccgcctcagcctcccagagtgctgggattacaggcttgagccatcgcgcccggcctccagttgggatcttgactggaatgactggtgttcaatcattatagtttccacctaatttgtatttgtacacaggacagttactaatttgttggtacttgtttgatccccagtccctagagttgtttatggggtggagcttcagtccctgctgcttcccctgtggcagcagctggagtcagggtggggacccagggtgctgctggcagattcttgagacaggtagaatctcctctatattggtgtctctctctgtcccagcagtgcccaggaaaacctggccagcctgtcactgacctctccacctagggcactggtggttcaggtccttctatttgccaccggcaaaccgtacttctgccagtctggctcttaggcccagtttctctgatcttgcagattttcttgggctctgctacggaatcctcatacctccggcaggtccctcctttgcccatgtgtttaactgtggtggaatcgtgtgagagctgcttctctcgcatggatcccagccacaccacattctacagcggttcctctgaaggcattgatagagatatttcctcctgttttgcatttcgttggtcatttcagtagaatcagggtgaaataaacatgggggctcagatgtcagcattacgaaccaagtacgtcaggcaggctgatgtggactgacctacactagtgagacgcaagatgacgaaaacaagggcactcactccaagttactgatgagatgtttggatcaaatgagccagtccttaagcagagttctctagtaaaagagatctcctttctgccctttcttgttccccaaaatgtgttgccttcatggtgaaaatttattttggcagattttctcttctttgataaaagcagccaacactttgttaaaagtctgtgaaacttatttacatgaagtatgtaaaggtaagaaaaaaacattatcaacaagaaatggagaaagccagcagctgaggacagaaaagtcatgcacagtgtcagtgtctatggaaacaggccacttggaccttgaggactaggtatttggaattggaggtgagcttggcctggtgagtctctaaccacttgtgtgtaggatcagtgtgagaaccctgctagaatatagtggcagagatgcaaggggaaatcattggagaagttaccagggaatgatgagctaatctgaaaaaaatacatgtttctaagttgggcgtggtagctcatctgtagtcccagctacttgagagcctgaggcaggaggatcgcttgagcccagcctgggcagcacagcgagaccctatctccctaaaaaaaactttttcgttgtttagttttgggatttttttttttcctggtcttttttccccctttttgtgaataacgggatctcactatgttgcccaggcagatctcgaactcctgggcccaagcaatcctcctgcctctgccttcctaagattacaggtatgagccactgtgttaagcaaaaaaacttttttaaatgaaaatcattttttaaaagacaggctttccaggggagggtattattccacttatatgaagtgtcaacagtaggcagatttgtggagacaaatagattagtggttaccaggggctgagaggagtgggagtggggagcaactgcttaatgggtaaagggttgtctttggaactagagagtagtgatggtcgcatgacattgtgaatgtactaaatgctattaatgataaattttatgttatgtgtattttaccacaattaaaaaaaaaagatcaaatgtcctcagaatagccaacaaccttccacttggctaaatgcctactcattaaacttcttgaactaaattcctttctgattgtcatggttattgtgtcctgggcttcagagtttcacattcaggttggcttggtccagtctgtcatgtatcactataggtccccacattggcctcttcctcagacggacagcccatctatctgccggggctctgtgccacagccagatagacttgctctgagacagctgtgtgggctctgagcactggccaggcatcacaaaacctatctttatgatttagaataattggtggtcagctgctgttttaatgttgttgttttttttaatttagatataattcacataccatgaaatttactcatttaaagtgtacaattcattcttcagtataattcataggctcacagaaaaaattgtttaaaaataaaatgtgcaattcagtgtcttttagtacattcacagagttgtgcaaccatcgcctctgtgtcattccagaacactttcagcacccaaaagaaaccccagacacaggagcagtcacctcttattacccgcagcccctggcaacaactcatccacttcctgtctctatggatttgcctattctggacatttcctataaatggaattatgcactatttggccttttgtgtctggcctctttcactgagcgtaatgtcctcaaggttcatctgcattgtagcatgtgtcagaatttctttcctttttgaggctgaatgatattatatcctatagataatgaggttttgattatccacccatcccttgggaatgcatatttgggttgcccccaccatttggctgttgtaaactgtgctgccatgaacactggtgtacggatatctgtttggttactggttttggttttttgtttgtttgttttggttttttgagacaaggtcttgctctgtcgcccaggctggattacagtggcacgatctctgctcactgcaacctccacctcccaggttcaagcaattctcctgcctcagtctcctgagtagctgggactacaggtagcactcaccaccatgcccggctaaatttttttgtatttttagtagagacaaggtttcgccatattggccaggctggtctcaaactcctgacctcaggtgatccacccacctcagcctcccaaagtgctgggattacagacgtgagccaccgcacccggcatagttgtggctttttgagagtgtatggctaggagtaaaattgccaggtcatatggtaactccatgtttaacatttgagaaactgccaaactgttctccacagcaggaattttttaacctgtatgtggtgggcttgtgtttcggttttcattttacacatctataaagatgagatttgctgtatggcactggttgcctgtatttggggagggttctgcttttggttggcaagaactgcattttatttaagcttagcaaaacataactggtttctcgcatcttctcaaaagtggaggattaagaaatggactgcgaattcagagcagggcagctgaacctcaggctccacccttgtagccttcaagctgaacctcattctctcttgctccctggagaccactgagacactctgcctgtgccagtttgatttctcacatttttaaagggccaaagcttgtgtctcaaagtgctatagcctttattgattcatgcagagaagcctccttgattccgtaattctgcagctaatactggaagtagaaagaattggaaacaccatctggatgacactttagggtggaagcagccagtacaagggggggctcattatttcctctggtcccagactgttcacctggagctgtagccaccaccctgcccttaggttaactgcctcgagtggtagtttagctctttgtgctgtgccgagggataactggaagtgaaaggtgctgagaaatgccatctcctgaaagtggcgagcatgagtgaatttacgaaaggttgggatattgctggggctctggaagtttctctggagctcactccaggggacagggagggggctggattccaattcaagtgaaaaatacctttcatctgccttgttcacctggcttttttgcctttttgtaaaatctgaaaacctcagggattgagtagtctttccttaactgcagttgcctgtctggccacacctgccagctgttgcttgtacccctgtaatttgcacggccttccgggcctttctcacaagatcactgcaggtcacattcatgaggaaaatgcaggcagttcctgccatcagacccctcaggatgtcatggtttggcctgaaaacaagattcctgcaactctaattttcctttgctagatcaaatgaaggatttgatctaatgtttgcattctagcagcaaaatcattgaatattttatttcttaagagccttacttcatattttgtaggtattttaagattttgtaaaggcctttctgcttcaacgtgtgatgtgtgcattcttagaaaaagatcttgtgttctgtaaatcacacaataaaaacatgagttcgtgcaggaaaaactggggcggggtggatcactccaaacttgtgtggtgtggtaactggagctcactgatgaaaccatgaacagttctggctgaaagaaccccacagtacactgaggtctgttggcatcgccgccagcaccgccccggtccctttgtgcgcgccaccacacctggctaattttttatttttagtagagagggggtttcaccatgttggtcaggatggcctcgaactgacctcgtgatccgcccacctcagcctcccaaagtgctgggattacaggtgtgagcctccgtgcccagccttcagctttttttcttaatgtctttgtgtaatatgaaggcattctctttaattgttaaaaagcttgcctaccactgcttcaaaatattactgtcagttggcatagcttctgattatattgatgtcatctcccttcttttaaacatgttaccatattggcactgtatttcccctagcccattgatcacttgagagttagtcatagtcctcgtgctgtttcactcctaaacgtttaagcatgcctttcctaagagcagacagtacagttaagacactcaggaagtttagcaatgagctaacacagaaccttacatttctccacataccccataaatgccttttttagagcctttgagcctggaatgcagagtccaggactgtgtgttgtattcgattgtgtcatcccttcagtctcctttatcagaaatgttcccccacccccttgttttctctcatcatcttgagtccagaccgtggttgcatggcacgccctctctggactcttcctgctgtctcctcacggtaagcttcagtctcctactcgtgatgctggttcatctcagcagcactgaggggcctgagctcagtttggtcgtgtgttaaggtggtgcctgccagatttctccacagaaaagggccccgtacttttatttgctcttcagcctgtgtattccttcctttcttgccagcttgtgggtggcttctctagcagcttctgtaagatactcagtttggcagttgtagttgtttcagcaggagaggtgtctgcatacctgaccaccacatggctagaagtcgatccatcctctggcgtaaccatcctccatgctactgtccctggggcactgaggccctcctcagtgacttcctccacctcatcttccgccatctccaagccaccagtgtccaacggactactgatatgtcccaaactcatcatttgtttattcaccaattcagagcccacctttttttcagcactgagctagcctctccttgctagaagcttacggtcgaaggtctccagccatcagaagaagcacgtggagcgctgcgtccgtgttgtggttattcatccagcatgtgttgagtaagggttgcacctgtgcctggcattatgcattgagcggggagatgggggttggcacgcacagtggggtgttctaagtacactgagggctcgggtgccctggctcatagagcagggagggaggcaggagcagggaaggtgtctcagaagtgccatctttttttttttttttttgggaagtggaatcttgttctatcgcctggtctggagtgcaatggcactatctcaactcactgcagcctccgcctcccaggttcaagcgattctcatgcctcagtccccgagtagctgggaccacaggcgcacaccaccacacccggcaaatattttgtatttttagtagaggcggagttttgccatgttggccaggctggtcttaaactcctggcctcaagtgatctgctcacctcggcctcctaaggtgttgggattacaggcatgagccactgcgcccggtctagaagtgccatcctaactgaacctgaaagatgaaagttctccagatgaacctgaaagttctccaaatgaaaaggtgggagggggtgacagggttaggcccagagcctctggtgacacagggtgggcatcattggtcactttttcctcgagggaggggcgtcacacgggtgatagggtgggagctataaccatgttgatagtgccgcctctgcccatctggcctggcatgccctgagccctctgtcccacctgtggaactcataagccctgacagcccactcactcctgattcattatccacacccctgtgcttccgctgtgcctggagcaagctttcttcagggggaagggaggctggaactatgttgtagttacctatttgtcctcccttccaaactgtgagttcttggaggtggaaggatgctgcaggatctggctcaggacgaaggcagttggtgaacagacacgtgtgtttttgactcacggtgatctcagacaagttcctctgtctagtcgaacttctttttttccatctgtaacactcaggagttgaataggtggtttttctgaggatacttcaactgtaaaatgtatgaacttgtgaactagctatttagttctcctcataatcaagattgtgtgtgtgtggggggttctgattagagggaggatgaagagaggtgtatggggttttttttgttttgttttctgtttgtttgtttgtttttgagatggagtctcactctgtcacccaggctggagtgcagtggcacgatttcggttcactgcaacctctgcctcctgggttcaagtgattctcctgcctcagcctcctgagtaactgggattacaggcatgcaccaccatgcccagctaatttttgtatttttaatagagatggggttttcgccatgttggccaggctggtctcgaactcctgacctcaggtgatccacctgcctcggcctcccaaagtgctgggattataggcatgagccaccacacctggcaggtttctttgaaaaagtttgtgtttcggcaaacaccataaaccccctgggggacagccttggggagtcacctggcaccctagcccagcctccctcccttgggtcctgcagtgaaggcttagtgagggtgtgcaaatgcccaggtcaccctgggactgggcaggccctctgggctaagggtaaactcatttggaatacctgttttctatcattgttttttatttgttaaatttaaagggtacaagtgcagttttgttgcgtggatatattgtatagtagtgaagtctgagctttcagtgtaaccatcacctgaatagtggacattgtacccgttaagtaatgtctcatccctcaccccctcccacccttcccagtctctccagtgtctgccattcctcactctgtccatgtgcacatgctattcagctcctgcttctaagtgagaacgtacggtatttgactttctgtgtctgagctgtgtcactgaagacaatggactccagctccatccacgttttttatcatttttacctgcactccacacccagcacaatccaggcttctttgtgggttttttgaaatttgtctttaattataaaagtagcagccagcaaattaacaaacacccatgtgcctttcattgcacagaattgaaaatcatcatactatatttgcttcaagtaatttccattagaaagaactagaatattacagtagagttaaagaccctttatttcccatcttcagtgctcttaaaagttcatttagggccaggcatggtggctcacacctataatcccagcactttgagaggcccaggtgggtggatcacctgaggtcaggagttcaagaccagcctggccaacatggcgaaaccccatctctactaaaaatacaaaaattagctgggcgtggtggtgcgcatctgtaatctcagctactcgggaggctgaggcaggagaatcgcttgaactcaggagggaggcagagcctgtatgcagtaagccgagattgcgccaccacaccccagcatgggtgacagagcaagactccgtctcaaaaaaaaaaaaaaaaaagttcattcattgtacacttagaaatagttaaaaaggtaaactttgttttgtgtgtgtgtgtatatatatatatatatatatatatatatatatatatatatatgtatttttttttgagacatatatgtgtctggtttgttcgcccaggcaggagtgcagtggcatgatcaacggctcactgcagcctcaacttcctaggctcaagtgatcctcctgcctcagcctcccgagtagctaggattacaggcacacaccaccatgcccagctaattttttttttttttttttttttttgtagagacagggttttgctatgttgcccaggctggtctcaaactcctgagctcaagcgatccacctgcctcacctcccaaagtgctgggattacaagtgtaagccaccacacctgacctgttttgtatattttaccacaataaaaagcctttaaaaccccaagcagacagttcattttcattcaggcccaactcagaatctgatcacagcggggtttcccccctttctagcgagtagctgaagaactgttttctctccttgatggtataactgtctctgtgggtgttgctcccctgccgctccagtggttttgtttttgtttttgtttttttgagacggagtcttgcgatctcagctcactgcgacctctgcctcctgggttcaggcgattcttctccctcagccttccatgtagctgggacttacaggcacctgccaccacgcccggctcatttttgtatttttagtagagacggagtttcaccatgttggccaggttgggctcgaactccagacctcaggtgatccacctgcctcagcctcccacagtgctgggattacaggtgagagccactgcacccagccggcccctcagtcttttccttctcaatcagtggcaccaccatcttcccaggctttggacatggtccctgactcacccttgcccctcacccccacactaatccacctgcgagctctgttgcttcaccacctagaccagccccaaatcctcaactgcccccaccctgggccacacctggaccactgctagaggcctctcatgggccctccctgtttttctcttgcactccccgggctttctggcacaagatgccccagaagcagaatcacatatctctcctgggagccaatctagtgtgtttactgcccctggagtgttattgttggccttagaatatgtcccactacaggtttgcagagcactgtagtcaaaagtcatttgaaataaatcttttctctgtggtatattgtcaatttgatatagaattaaatttgtttcttttcttttttcttttctttttttttttttttaagagacagggtcttggccaggcgtggtgtctcatgcctgtaatcccggcactttgggaagccaaggtgggtggatcgcctgaggtcaggaattcaagaccaacctggccagcatggtgaaaccccgtctctgctaaaaatacaaaaattagccgggcgtgatggcaggtacctgtaatcccagctactcgggaagctgaggcaggagaaggcttgaactcaggagtcggaggttgcagtgagccaagatcacgccatggcactctagcaagactctgtctcaaaaaaaaaaaaagagagagagagagacagggtcttgctctgtcactcaggctggagtgcagtgatgtagtcatggctcactgcagcctcatactcctgacctcaggtgatcgacccgcctcggcctcccaaagtgctgggatcgtaggctgaagccaccatgcctggcccgaactcatttgtttttatttgcattaagtgtaataaggttttgttacttttagtttgaattttattttgggtaatataaacatttacatgattcagaagtcagaattacactgaggcatgttcagctaggcctcactcctgtgcctgtacccttacctttttccccctaccccatgcagggaatcaatttcattagttcctggtgtgtccttccttaatacccccccttctttctttggtagaatgcagtagatatgtttgcgctttgctccctttgcttcacagtggatcctggaaatgactccatcgcagttcttagagctcttgtttagtccctttggatctgcacagtactccagtgtgtgggcgcaccataagtttattcagcaagtgccctggtgatagggatcgggggtattggaagcctttggctggtaaaaataatgttgtagcaaataacatcatgcatatgttctttgagatttctggaggtgtctctttagcatagatttctagaaggcattccttacgtcacgtttaggtttatagtttgacctcatggtgattaaggtatttgggaaatgcaaatgagagtttcgaagaagccagatctttcccattagttcactgtttttctctgacattaggaccgtccgggttctagggagcagccctggcgttaggcagtgccatgatggattgtgtagaagtagcgattcccatctgtctgctttcttggcccactctgctggtggctccccttccctccctcctttatggggagctggggagctgcctaggggtccattctcaaaggctgatctctggtgggcaacaggccacacctagctttccagggttcttcgtcatttcccattgagagctgtaagactcagagacatgaaaaggaagctctggctgggcacggtggctcacgcctgtaatcccagcactttgggaggctgaggcgggtcgatcacctgaggtcaggagttcgagaccagcctgcccaacatggtgaaaccccgtctccactaaacatacaaaaattagcctggcgtggtagcacacgcctgtgatcccagctactccggaggctgaggcaggagaataacttgaacccggcaggcggaggttgcgatgagccgatattatgccatcggcaacagagcgagactccatctcaaaaaaaaaacaaaaaacaaaacaaggcgagctctgtgctgggacagattagggacccctctttacagcaagaaagactgctctgtgggttgtaggatgcctttgtgtatgcagtggctctaggtgactctggcagccacactctgggccctaaacttctggaggaagatacaggatagggaggaactcaggggtgagtcatggtggggacaagacattccctcactctaagaccttgtcactagattggaacatctcttgcctccctacacctgacctgatggttctggagagatacgtccttgcagcttctgagtcccagcactaagcagcctttggtaacttccctacatcatttgagttctggtttcctaaggatgcttgccagtgagtgccatggtgccctcattgcacagtctgtgcagtgtagacaagaggggaagtctcttggggtagaccagccgcaaggcggtgactagcactgatgtgaaccacatgggacaggggagttgtggggctgagaacacggagggtgggagtagtcatgctcttttccagaatgaactgctaacgaagggactcgcaggtggctgctgcttctttccaagctgcccctgttgttgcagaggctctggagtcctaggaggtttcacggtggcatactcgacagagtactagagcatcatggccagatagtgatgctggggtgtggggcctcacggtggccatttctgacgagaccccaccgggccaaagtgatgtgtagagaaggagctgcttcggtcaccagaaaagaacggggaagcctcccacactagaataggtagggtgctcttctccaccggcaggaaggggatgtatggctctgcctggaccacacctttttccttgctcttccctccgcatctgctgtggccgaggccattcctcatcagggaacatgtgttagaggctcacgccacctgggaccacttgtcttatcacccccaggaccctaggcggtagtttcctgtggcctgagttagctgatatttatatagtgccattgtgccttttctcctgtgatgctcacagtaaggatgcctagatggggttacctgttgtcaagataaggaaactgaagcacagaatgctgaggtcatttgctgggttcatgtttggaaagcggcaaaggatttcagtgcaggttggctggctccaaacctgtgtgtgctttccatgacactgtactgtgtgcctcattgagcctcattctagaaaaccaaaaacacacccaaggcccggccttcacaaaggagacccctcccccatttggctccctttccagcagtcgacggcctcttgtcagccatcgagcccagagtcccttgaagtgcgactcatgctggggtggtatgctcaggagccgcagtgtttccgctcagaggaaagggctctgattctcctgcagtgctaggagacttgtgggtggccacagtgcaggtcaggcacaccggccagcaccacccacagcccaaattcctaaagaaatatttgggtcccagcttggcccgagtctctgttgtcctggggaaggacatcaagatctgagtgtatgatggcctggggccttgcatgtggtgggggtccaagcctgcctctgctcacttgttctgcagactggcatgttctctgtgatacttacatacttgtttaacacttcagggaagaaaagtcagaagaccaggacctccagggcctcaaggacaaacccctcaagtttaaaaaggtgaagaaagataagaaagaagagaaagagggcaagcatgagcccgtgcagccatcagcccaccactctgctgagcccgcagaggcaggcaaagcagagacatcagaagggtcaggctccgccccggctgtgccggaagcttctgcctcccccaaacagcggcgctccatcatccgtgaccggggacccatgtatgatgaccccaccctgcctgaaggctggacacggaagcttaagcaaaggaaatctggccgctctgctgggaagtatgatgtgtatttgatcaagtaagtaagagcaactcctatctctacagggcagggagggcagggacaaggatccctcatggagcaggaaaatgtatgtgcccagggtggggtcggggggaacataaacaatgaacactgagaccaggtgtgcttgaaatgaccgtgtacagaggtcgctgccctgagtgggaagttctcaaggtagcaggccctctatcctctccacacctcaagtctttatctggggatggaatagctgcggaagcagaggaacttgcagagctaggggttcagaggggtgaagaagcatgtttcagttctgccttttaaatgatcccaaaaaggttagcagttttcaaatgacatttgcagacagcctcatttaattccatgagaagggtgagcaaaggattatcttgttgaaactgattcctggagagactgagcaccgtacctgagttcaaacttgggaatgttctagatggtgactcaggcccaggcaccaaccagcagaatgggcctcagcctgacaacccttctgtaccaggcctgactctttggttgctgaactttggagaggcctgggggggtcagcggcaggcagacgagtgagtggctttggtgacaggtcctcaggggcagccaggcagtgtgactctcgttcaatagtaacgtttgtcagagcgttgtcaccaccatccgctctgccctatctctgacattgctatggagagcctctaattgttccttgtgtctttctgtttgtccccacagtccccagggaaaagcctttcgctctaaagtggagttgattgcgtacttcgaaaaggtaggcgacacatccctggaccctaatgattttgacttcacggtaactgggagagggagcccctcccggcgagagcagaaaccacctaagaagcccaaatctcccaaagctccaggaactggcagaggccggggacgccccaaagggagcggcaccacgagacccaaggcggccacgtcagagggtgtgcaggtgaaaagggtcctggagaaaagtcctgggaagctccttgtcaagatgccttttcaaacttcgccagggggcaaggctgaggggggtggggccaccacatccacccaggtcatggtgatcaaacgccccggcaggaagcgaaaagctgaggccgaccctcaggccattcccaagaaacggggccgaaagccggggagtgtggtggcagccgctgccgccgaggccaaaaagaaagccgtgaaggagtcttctatccgatctgtgcaggagaccgtactccccatcaagaagcgcaagacccgggagacggtcagcatcgaggtcaaggaagtggtgaagcccctgctggtgtccaccctcggtgagaagagcgggaaaggactgaagacctgtaagagccctgggcggaaaagcaaggagagcagccccaaggggcgcagcagcagcgcctcctcaccccccaagaaggagcaccaccaccatcaccaccactcagagtccccaaaggcccccgtgccactgctcccacccctgcccccacctccacctgagcccgagagctccgaggaccccaccagcccccctgagccccaggact

SEQ ID NO: 7 - DNA, 61455 bp, Homo sapiens
cagactcaccagttcctgctttgatgtgacatgtgactccccagaatacaccttgcttctgtagaccagctccaacaggattccatggtagctgggatgttagggctcaggtaagtaaccttcctttttttttttttagtatatgtcctggtttggccatctgttttttttttttttaaaaaaaaaaaaaaaaggaaaagaggaaaaaaatatactactcttggacagtataaaagtaccccaaagactaaagacataactgtgccaaactgtgccatataataaaaaaaagtcacttccctgagccctgaaaggtcagtgtgtgtagggttacttggtcgccacagcgtgatctgggggcgggcgtcagattagagccggaactggtgatctgcaacttcagttcaccttgaagcaggtcagctgagctgagagcgcttgcactgagcccttttgcgctgctgctgttgccttagcggtcttcagcatgtgtttgctttggtttggggtaaatggcttagtggtcaacattagtgagcagtggtaatgcattttcagatatgggaactggtatgtggttggttccctagaaggacaccctcctgaaagctgtctcagaacaccgggggccatggctaatgtcatgtgcttgctacactcctcccatggtaactaaagagagtacccagatatacatctggttcttgggactctagaggaggatgagtactttgtaaaaacctgggggccccagtcattctaggtctgacactcaggtgctgtatcagctgcagtttgaactacttggcaccattgtgtggactttagttttgtaaaaatgaatggttccttaatttctcaaccttcaggctcaacatctcaagctgtttgttgttgttgttgttgttgttgttttgttttgtctttttgattagtggtcactccgcatttgatgttttgacatgtggatttcagaacttctgtgtggtaaagcagaatgttccaattgaattttcccattttttttcccctaagcaaaaatgtgagttttcacttatgcggccattgtgattccgactgagaccctaagtcgttctttgttgtctctctagtggtttctgacacctcagtgtgaagctgttgtagacatccataagaaatagcctgcttagggattatgtgagggcaaggtttggctgaaggagaatagaaggtgtggaaggaagcggaagaccagaagagcatcacactgcctcaagtcccaaatttgattctgctcctgatcctgtgactcaaattgtcattctcttttactgctgtggggtgtgctctgggcccagctgacaggacattctttgtactccacgtatttatgctggtgggagttgtatggctagtgctttgtgctttgtctcagaaattgtgtggactaaatgtaatatgggcagtgaatgggtttcttctggaagatgttaggcctggagggtggtttgggtttttacgagtctttttctcagattacagattacgaatggatgttataaaacaggcagtgttgacaccatacagtttctcctaagaaatgtacagagagttcaacctgaggaagctaattgaaaataaacttttaaaaagaaatgtagaaagaggaaatttaaaaagtatcttatgaatgggaaagatgtagccatttgagcttcaaagaacttttgagggaattctcaaaggacagtacccgtctttagtagataaatgcttgatatctatttttcttcttttactttttaaagaattactaaaataatacatggatttatagaaaaatcaaaccacttaaaaattgatcaggtggctgggcaaggtggctcatgcctgtaatcacagcgctttgggaggcctaggcgggtggatcacctgaagtcaggagttcgagaccagcctggctaacacggcgaaaccccatctctattaaaaatacaaaaattagctggccatggtggcttgagcgtgtagtcccagctactcggaaggctgaggcaggagaatcacttgaacctgggaggcggaggttgcagtgagccaagatcacaccactgaactcctgcctgggtgacagagtgagactcggtctcaaaaaaaaaaaaaaaaaaaagtatcaggtaaaaaaatgaaagctccccgcttaatctctgctcccactacccagaataactgctgttaatagcttaatgtagatccttctaagtcttctaagactaaactgtgtactttttgtgttgtaattaacaggagggtttttgttttgttttgttttttctttttttgagatggagtcttgctctgtcatccaggctggagtacagtggcacaatcttggctcactgcaacctccacctcctgggttcaagtgattctcctgcctcagcctcctgagtagctgggattacaggcgcctgccaccacacccagctaatttttgtatttttagtagagatgggtttcaccatgttggccaggctggtgtcgaactcctgacctcaggcgatccacctgccttggcctcccaaagtgctgggattacaggcgtgagccaccgtgcctggcctcaggatggtgttatatatacatattctgcatttttccatctcatatattcatctctgcctcatttcttttaaatagcagtgtagtccagggctgacttaccgtcatgcatttcgttgtctctctatgttattaaaaatgctacaggattgaaattcctcatgtgccagtcattttgaagaatggctgcctagacttggaatttctggtggataccaccacatcactgtccaaaatggctatcccagttcccacaacagtctgagaaagtgccattttcccatatcgtcccagaattggatatacatcttttaaattggtgccgcttggattattactgaggctaaacctcaataatcattgtcatagctcttaatgtattaaagatgttaactctttgtcatgcagatattttcctgttttgtcttacgtcttgattcttgtctttctgatatataaaatttatgttatgatttattcttttgctttcatacttaggaaatccttttttactcttttttttttttttttttttttttttgagacggagtctcgctctgtcgcccaggttggagtgcaatggcgtgatcttggctcactgcaagctccatctcccgggttcattccattctcctgcctcagcctcccgagtagctgggactacaggcgcccgccaccacgcctggctaatttttttgtatttgtgagacagggtttcaccatgttagccaggctggtctcgatctcctgaccttgtgatccgcccgtctctgcctcccaaagtgctgggattacaggcgtgagccaccgcgccccgccaggaaatcctttcctactcttaacaacagatcaatagtcatctatattttcttcctaaaaaacctgatgatgtattatattcatacatacgtatttaatacatacaaaagggccagatgcggtggctcatgcctgtaatcccagcactttgggaggctgaggcgggtggatcacctgaggtcaagagttcaagaccagcctggccaagatggtgaaatcccgtctctactaaaaatacaaaaattagccaggcgtggtggcgggcacctgtaatctcaactactggggtgactgaggcaggagaatcgcttgaacccaggaggcagaagtttcggtgagccaagatcacgccactgcactcctgcctgggcgatagagtgaggctctgtctcaaaaataaaaaataaaaataataattttatagttaagttgccctgtgtttttcctgtgattaaaaaaaaaaatacctgttttgtatttaactttggggtgggataaggtatagcccacttagtcagttgtgtctaagccacttgatgaaccagtcaatccagtcttcacctttaacaaatgctgatttcttcaagtgagcaaaatatctcttaaactttttcctattttctctataaagttgcttttttctgaattttttctttatgaggcttgatgggcagccctatcagcagacaatcattcattcacccaacaaatatttgagtatctgcttcaagccaggggcagtgctaagccctggaagtggtatcttctccttatccgggagtggggctacagtgttcattccagaagactcaagaaaatagcagatcatcacaaaagtaggttttacataaatgaggaggaatccacagggttgtgtatatgtgtgtgtattttaaattctgacataagttggagctttagggtagactgtgacataagagtagtttgttttccaactcatgtaattgccggctgatttttgtcttgaattatgataatggtaacttctgttgaaacaattctgtattcatcttagcttggttgggatgcaataaaagttttgtactggtaaaaatgataattttcttccatgatgattttgaagcttttctgtaacacctgataaaaatagaggggccaggcatggtggctcatgcctgtagtcccagctactcgggaggatgaggtgagaggatcccatgagcccaggagttttaggctacagtgagccatcatcacaccactgtactcctgtactctagcctgggcagcctcgttctttagagtaagacactgtctctttaaaaaaaaaaaaaaagaaaaaagaaaaaaagaaaaggcttttagtgaatatatttttagggtagcaagtgtaatttttataaattgcattatttgaatctaataaataccctcaaagctgaagtcgaattctgattttgattgaaaatattttttacttaaaggaagagggatagaataaatgacacgattaaggaaaagacttcttgtataaggccggggttttttaaatgattttttgaatagttagatggacaatacggaattaaaaaggtggtgtaaaaagttatacggggctgggcacagtgactcacgcctgcaatcccagtactttgggaggccgaggtgggtggatcacctgaggtcaggagttcgagaccagcctagccaacatgacgaaacatcatttctactaaaaatacaaaaattagctgggcttggtggtatgcacctgtaatccagctactcgggaggctgaggcagaagaatcgtttgaacccaggaggcagaggttgcagtgagccaagatcgtgccattgcactccagcctgggcgacagagtgagactccatctcagaaaaataataatagaaaaaagttatatggggctgggcatggtggctcatgcctgtaatcccagcagtttgggaggctgaggcagcttgatcacttgaggtcaggaattcgagactagcctggccaacatggtgaaactccgtctccactaaaaatacaaaaattagccaagcgtggtggtgcgtgcctgtagtcccagctacttgggaagctgaggcaggagaatcgcctgaacctgggaggcagaggttgcagtgagccaagatcatgccgttgcactccagcctggacgacaagagcggaactccgtctcaaaaaaaaaaaaaaaagagttatattgtaaagtatctctgctaccctgccccaaacattcatttctttccctggaggcagccactattacctgtttctttaaaaaaaaaaaaaaattgtggccgggcacggtggctcacgcctgtaatcctagcactttgggaggtggaggtgggtggatcatgaggtcaagagatcgagaccatcttggccaacatggtaaaaccccatctctactaaaaatacaaaaaattagccgggcatggtggcgggcacctgtagtcccagctactcgggaggctgaggcaggagaatcgcttgaacctgggaggcagaggttgcagtgaactgagatcacgccgctgcactccagcctggcaacagaatgagactccatctcaaaaaaaaaagcgtgtgtgtacccgtgtgttaaatttttattataaaatatatataacaggctgggcgtggtggctcacgcctgtaatcccagcactttgggaggccgaggcaggctgatcacgaggtcaggagatcgagaccatcctggcgagcacggtgaaacctcgtctttactaaaaatacaaaaaattagccgggcatggtggcgggcgcctgtagtcccagctactctgagagcctgaggcaggagaatggcgtgaacccaggaggcggagcttgcagtgagccgagatcgcgtcactgcactccagcctgggcgacagaccgagactccgtctcaaaaaatatatatcgatatatataacaatttacagttttaatcatcttaactgtacagttcagtggcactgagtacattcacattgttgtacagccattactaccatccatctctacaacctttcgtcttgcaaaactgaaatttcatacctattaaacactaactcccacttctcccctttcccccaccccaccctctggcaactactattctactctttgtctctattggacatatttttgtgtgtttaggtttgtgtatatattttacatgtgtgtataaatacacaagggtatgtgggcgttgtgtttttacacatactataaaatattgtgcacatttgtttattttaatgtatcctgtagattatttagaatcggttcatacagagccgtatcattccttttaagggttgggtttaaatagtctgttatggatgtaccacaatttatttaaccagtttttaaattttttacttattttttttaatgtttttttagagacaggatcccactccatcacccagactggagtgcaacagcatgatcatagcttactgcagccttgaactccggggctgatgtgatcctcccacctcaggctctcttgtagctgggactacagggatgtgccgccatgcctggctaaattttttatttttatttttatttttatttttggtagacacggggtttcactgtgttgcccaggctggtcttgaactccttgggcttgagtaatcctcctgccttggcctcccaaagtgccgagattacaaccatgagccatggagcccgacaagagtagccttttatttgcagaccattagagaaaaagttgcgtgtaagtagataagcatacgaatttatcactgcaatactgtttgtagagatcacagagctgttaggctaggaagaagtttttagcagttagcactagaaagcaaaactttggaaacttccatttcatcaaaagtgacctcatctgagtagggcatgtgagggaaggacctttttactcgacaaggggaacttgcccagttcttgtttgtgaaccttgaagaaagtggagcatttttattttgggaccattctaggttgtggtagttccttggtactcggggttggagaatctccctctgctgctggaccttctgcctcctcatgctgtaatatgcataagaggtgtcctagaagtattcaggaacaggctgtggttgctttgttgttctgtgactgttgaactctttatatagcagtacttttttaagctgtactaattgagcatttattatgtgtcagttactgtgctagctgctggaaactatcctaccctcagcagtcttctggtctaatgggaggtacagacaggcaaatgggctatgactttacaagaggctaacttctgtgatggagagaagttccagccactaagggagcacataaaaatcagaggagatcctaccaagaattgggaggtaggtcagggaggagacttctttgaaaaatggcatctaagacctgaacagcaaggaaacattagctaggtcaaggacaaagcatcagtggggagagatgcatgagtcttttggaaggaccagcatgtgtagaggctctgacaggagagaatctctcaggcccattcagagagtccactgtgtgaagacgaggcatgaacaaccagccaggacatgtggagaggagcatttttctttttttcttttttctttctttttttttttttttttttttgagacgtctttctctgtcacccaggctggagtgcaatggcatgatctcggctcactgcaacccccacttccagggttcaagcaattcttctgccttagcctcccaagcagctaggattacaggcacccgccaccatgcccggttaatttttgtatttttagtagagacggagtttcaccatgttggcctcaaactcctgaccttaggtgatctacccgtctcggcctcccagagtgctgggattacaggtgagagcccccacgcccggccaggctcggctttctttccaggccccgtcacactcttagatgttccctgggccccagaaggcagcgtgaggtgctctgcccatctatgctgtccttttccaccccaccctatccactgggcccctggggctcccactccactccaggtctcttcatggacccttctttcccttcacttctgtcccaggagacctgggagactcatgggaacaggcatcatcttctccagcacagttcattgtctaatgcacgaaagtgctgggctgtgagaaggtcaggagcttacatggaatgggagtcagctgtggtacaaagtacgctgcttagttctactgattttttattttttatttttacataagactttgatggtaaaggaagcagtgtgtgagcaagctgactcctgtcttgtcaagtaccaggtccactctgatgagcccctgtggacagcactgctgtaactccccaagcctgggctcaggaggtgggccctaagcgctgttcccagctcttcctccatgctgtcagctcttccaccattcttcctggcgtcattctaaggtcctgtcttcccccgccctcttccttcctggcttctacgctcagctcaagtagtagctgtttgggtacttttcacccagacttaggaaatgttatcagttggtcgtattcctgtcagccctcttactatggaactcaaataggacagattcagctgaattcccagccctgtggttgcactctttgtctgccctgcttccccaaggtagcctgctccctaaaggtcaccgagatactccccatgcaaggtttttgttgtattacacatgacaacatggaataaagtgttttgcaaatttactggatgatatcctactatgtggaacatcctacaacttactcttttcactcaacatttgacttttgaacctggtctgtactgctccgtgcagaccaatgttcattcatttgatatgtctccttgtgccatagaaatagttttacaatagaagcctgtccagagccatgagggagaaggggattgtagagaaacaaggattggcatctggtttatgtttacatcctttagtcctgttaaccgagaagaagatatttttatttccatgtttgcgaaagctttccacaaaaaaagcatccattttctagacttattaatagggcagtccaaaggttttatttttagatttgaaagaaagcaaagtaggcttctgagatatgcacatttccctgtgtccctgtctcttttgcaacattccacattgctgctaaaacttgaacatgagcactttcaagcatgtgcttactttctatgtatgactcattttttaaaacattaaagcattttcggccgggtgtggtggctcacgcctatattcctagcactttagaaggccgaggcgggtagatcacttgaggtcaggagttcaagaccagcctagccaatatagtgaaaccccatctccactaaaaatacaaaaattagccgggcatggtggcgggcgcctgtaatcccagctactcgggaggctgaggcaggagaattgcttgaacccaggaggtggaggttgcagtgagcagagatcgagccactgcactctagcctaggtgacagagcgagactctgtctcaaaaaaataaaaataaagcattaaagcactttgtctggtggtatgtaagttttggcattacttagataagttgtattttaagtctttctacacacaataacttatttttaaaatacaagtttctgtgtacttccgggttttgtgtttttgtaaacagcagaaggtattagtccatattaagtactaatttgttctaatattttcagctgtttttggaattacacttggcaaaaaaatagacaaatgtctgcagttgtgacagtttgtttttttgttctttttaactccagaataaataattctagtgagtttttttcttggcttgtaagaacatgggaatgattagagtcatcataacacttaagtagttatagaaggttgaacatctgtagtcagttgtataaaatttcctagtcatccttccaggttgtttaagacaaacaaatacatagtatttattaagctcttataaattttaattgtaaaacatcattgtacaaaactttgaaaatgcgtataggtacaaagataaaaaattaggccaggcatgccatggctcacgcctgtaatcccagcactttgggaggccaaggtgggaggatcttttgagcccaggagttcaagaccagcctgagcaacatattgagaccctatctctacaaaaatatcataaaacaaaatagaatcactctggcgattccactatccaaaaaaaaaaaaaactgctgttaatatttggtatgtatctttctagaccaaggcctccaactttggttgagaattcagccgggtctgtgaccttggatgggaaaaacattcactctttattttcactaatgtctctgaaaacccagatttttagctgggcatggtggctcgtgcctgtaatcccagtgctttggaagcccgtggagggcagatcacttgagcccaggagtttgagaccagcctgggcaacatagcaagaccctgtcttttaaaaaaaaaaaaaatccagccgggtgtggtggctcatgcctgtaatcccagcactttgagaggctgaggcaggcagatcacctgaggtcaggagtttgagaccagcctgaccaacatggtgaaatcctgtctctactaaaaatacaaaaatcagccgggcatggtggtgggcgcctgtaatcccagctactccggaggctgaggcaggagaatcacttgaacccggaaggtagaggttgcagtgagccaagatcacaccattgcactccagcctgggcgacagagcgagactctgtctcaaaaaaaaaaaaaaaaatccacattttcttcaatgacaattgtaagcaacagatcatggtagtattagaatagcagtgactgtcaccagtagagatcaaagatactttcatatcatattatagttgttacagatattttgaaatatatatgtccatcactgcttcaaacttaaggtaattattagacccatctctagatctggttatttaatgatttactgaagaagcacatattatttgagaacgaactcttgaaatatgttgttaatttctgtgcattttacacatttcaaaacattcttctgaggaggggtccagaaggccaaaagggtccatggcagaaaaaggttaagaacacctgttctgtactttgtaccatgtggctacaaatataaaaacagacgttaagccgggtatggtgatgcacacctgtagttccacctacttgggaggctgaggtgggaaaatcacttgagcccaggagtttgaggccagcctgggcaacagagcaagaccccatctcttaaaaaccagtcagcacttgactagtcagttagtgggggaaaacacaggtacagtaaaaggagtcaaaattacacttaaacttaggtcatcttattatatcaaacatttattaacatgtttagtgttttgtgtatattatgcaaagtgtaatgcaactaaaactgtttaacacttctcgatatcacataaatttgttggtgcataatagcctaaaagttacttttgctgttggcattttattttattacttacttatttatttatttatttatttattttgagacagagtcacactgtcgccaggctggagtgcagtggtgcgatctcagctcactgcaacctctgcctccctggttcaagcgattctcccgcctcagcctcctgactagctgggactacaggtgcgcgccaccatgcccagctaatttttgtatttttagtagagatagggtttcgccatgttggccaggatggtcttcatctcttgaccttgtgatctgcccacctcggcctcccaaagtgctaggattacaggcatgagccaccacgctgggcctgctgttggcattttaaacatccttctagagtctttcttatttgcctgtaagcacgtacacatgttgttgttgttttgagacaaggtctgtcgcccaagctggagcacagtggtgcaatcacagctcactacagcttcgacctcttgggtgcaagtgatcctcccaatcagcctcccaagtaggtgggactacaggtgtccgctaccatgcccagctaatttttgtattttttttgtagagacggagtttcaccatgttgcccagactggtctcaaactcctttgctcaaacgatccttccgcctcggcctcccaaagtgccgggattacaagtgtgcacctctgtgcctggcccacatgttgttttagatgaatgagatcatatatgtacttttgtaacttgctacctttcctcaacaaaatgttgtaaatatccatgtccataaaaatagacgtatatcttcacttttccctaaaatgaaaataacttaacttgcattttcttttttgtttttgtttttgttttgagacaggctcttgctctgttgctcaggctggagtgcagtgatgtcacagctcactacagcctccacctccagtttcaagtattccacctacctcagcctccaagatagctaagactacaggcacatgtcacgacgcctggctaatttttaaaatattttttgcagaaatgggatttcactatgttgcccaggctggcctcaaactgctggcctcaagtgatcttcctgccttggcctcccaaagtgctgggattacagtcgtgagccactgtgcccagcctgcattttcttattataaaagtaatacatgttcaatggacaaaaaattttcagaaaatatgcaaagatgaaaagtaaaaattgtccataaatctgtcatctacagataaagataacttctggataatgtttttctaccatcatttttagtaatcacataacatttcgttgtatgtctatgccttcatttaattaagaggcatttccattatttctgcatgttcatgactctgaatgatgatatgtctgcctgctgatggctacaaccctgtttctgcatttcaaacctctctcttgagctccagatttgatggcctcgtcagcatttacttgagttgctcataagtgtctcaaatttaacaagtcccagtcttgatttttttcccccttcaaacctattcctcatgttgtctctatttcagtaaacaatatcaacatccacccagttactcagtccaaaattctaggagtcatccttgattctgctctttctttttttttttttttttgagacggagtctcgctctgtcgcccaggccggactgcggactgcagtggcgcgatctcggctcactgcaagctccgcttcccgggttcacgccattctcctgcctcagcctcccgagtagctgggactacaggcgcccgccaccgcgcccggctaattttttgtatttttagtagagacggggtttcaccttgttagccaggatggtctcgatctcctgacctcatgatccacccgcctcggcctcccaaagtgctgggattacaggcgtgagccaccgcgcccggcctcttttttttttttgatacggagtctcattctcgtcatccaggctggagtgcagtggtgcaatcttggctcactgcaacctccgcctcccgggttcaagcaattcttctgccccaacctcctgagtagctgggcctggctaattttttgtatttttagtagagatggggtttcaccatgttggccaggctggtcctgaactcctgaccttgtgatccgcccacctcagcctcccaaagtgctgggattacaggcgtgagccactgcacccgccctgattctgctctttctctcatcatccctgatctgtcagcaagtcctgttaggccaaccacttctcagcatctgcactgccagtatgctagtccaagccacaaaacacctctcagaggtacgcaacaggactttgttgttgttgtgtgtgtgtgtgtttttttttttttacggtagaattattttataacttgaagtgtagggatgaccttccttttaaaattttatttattttcttaattttttattcccatagattttaggggaacaggtggtatttggtgacatgagtaagttctttaatggtgatttctgagattttggtgcacccatcacccgagcagtgtacactgaacccaatttgtagtcttttatccctcaccccctcccaccctttccctcaagtccccaaagtccattgtatcattctgatgcctttgcatcctcatagcttagctcccacttatgagtgagaacatacagtgtttggttttccattcctgagttacttcacttagaataatagtctctagttccatccaggttgctgtgaatgccattaagtcattcctttttatggctgagtagtattcctttgtatatatatgccacaatttctctattcactttctgattgatgggcatttgggctggttctatatttttgtaattgtgaattgtgctgctataagcatgcgtgtgcaagtatcattatgcaacgggacttcggatgacatattgaacaacttcctcactgatatccttgtgaaacgctacatatttcatgggtctgtttgttataccaacactcaattctgaatgatggaattatttcacatttagtctctttttcatctagccattatagtttagtttaaacaccaagttccattcctgctgcatgctgaaggatttgcagtacatcaggctatagtccatcaattcattccacaattgagtaagtaaggtatctatagtacctcaggccctgtgttaggcagggatggggtaacctagacagatttggtacctgtcctcatggagcttgactttagcggcagagacagatcttagataattgtaccagtacttaagtgttcagaaggacaagtatggaggtgggagccactccagtcctctacagtcacgtgctgcacaacaacgtttcaaccgacaacagagcacacatacagtggtgttcccataagattagaatgccatatttttactgtaccttttctatgtttagatatacaaatacttaccattgtgttccagtgatctacagtattcagtatagtaccatgctgtacagttttatagcccaggagcaataggctatataccgtatagcctaggtgtgtagtatgctacaccatctagatttgtgtaagaacactctctgatgttagcacaaataaatcgcccaatgacacatttctcagaacatatccctgttgttgagcgactcatgactgtacaatgggggaacagctcagcctgccttccccaaggaggcaacgccgatgcagggaaccgagggttgaacagaagtgggcaaggtgcagagaggaaaaaggctttccagatggagaagagcatgtgtgaaggccctcagtctggcaagagcttagtcctgtgtggcaggagctgaacgaggggttaggggagagtggcaaagggtccgggccatcagagaggtcaacaggggctggatcatgcaggattttgaatgttaacatcagagcgatagaaaacatgaagggtaaggtggtttgggttttgaatttttatcaaaatattgcaactactcggcaacaagttagatataacaaaagaggtcatcgtaaaaacagcagtctaccccttccccttcccttccctgactcagacatgacagcttttaactgtttctgattttagttcctttgatggttacctccaaaattaaatcatatgcttatacatctttcttgatttgccaactttagggaactgtgttaactccctgaaatgaaagagaatgacttagcttacgttacctccccatgttgaaattcatattcacatttctctgtaattttttttttgagatggagtctcactctgtcgcccaggctggagtgcagtgatgtgatctcggctcactgaaacctctgcctcccgggttcaagcaattctcgtgcctcagcctcctgagtagctgggactacaggcgcacaccagtgcactgggctaatttttgtatttttagtagaggcggggtttcaccatgttggccaggctggtcttaaactcctgacctcaggtgatctgcctgccttggcctcccaaagtgctgggattacaggtgtgagctaccatgccaagcccacatttctctgtaaattttaaacagtattttagtccatatgtcagttcccctctgtttaagataaggatattaataaccctacttttccttccactttccctccttaacttctgcgtcttaaaagctgtacttgaccatacccattcttgcatttgttaacatgtgtgttctgccctgcaaccacagccaagttgtagcttaattctaaagtcgaaaataacattatttacattattacacatgtgagtattgttcttggcgagaccaaataatgaatgtgcccaggattacatttccttctttacagatctggaccactcaaaggagaatgaccaatcaaggtcaaatggattcccttttcttagactctgtcacctgcttaaaatccttgctaggatttaatctacttcatattcaaaccttggcttgcttatatagctctttgttttgcccaccatttctagttgcctttttattttgtttactattcctccttgattatgttgtaaaatgctattagcagtgctgtttatttcgtacgattcggctttttccccactgaagacctttctcttggaaggcctctgcccttctgcaatctgggcaagtatctgctctttgatttaaggttgcatatacagctgtacctggaccttctcctcactgggctcttgggttggagcccgtgtcttaaaacccatatcttcctttcacatggtttactccctcgttttctggactgcatccttaaataatgtgctcagatagagtgcatggggagtaaactgtagtggataccgttgtcacctaccccatatccatttcttctttgcccattcctaacagaatcctgatattattcacctttctaccttattcccaacttcagaaaggatccttaagtcattccacacattgcattcctttggcaactgttactggtcaaggatggacatacgatctaagttggttcactcagactgaagggaaggacttccatggcacgttcagggaagactttctctttttctctcactggagtaagtgagaaaggtgttgctgggggctcttctgtaacctcagactgagggacaaagcctgaggataaagcctgctcaccaaggaaggcggagcagagaaacgggaagaacctgggtcttgatgccgttgcttagctggtgattgcactgtggctggggcctgtcctacctgagctagggactcagataggatggactttcttactgaatgagccagcttcagttttcttttctgttacttgtaaccaaaagcattgtaacagataggtcttctgagtcactgcatgcctgaaatacctttcttctactcttacacttgattggctgagtatagggttccaagttgaaaatcattttttctcctaactttggaggcatctcttctagtatgcagagtaacaaatgcaacaaatgcctgatgccaatcttattatggttcttttgtaggtgcccttcttttctcttccttccctggaagtttttaggatttcgtctccttatttttagtgtcctgaaatctcatgagaatatgtctagagttgtgtcttgttcactcgttgtactgtggtcattcaatctgaatacttttgtcaactcttttttttaaaaaaaaattactaatttacatgctttcattttctctatggggactactgtttaactttggacctcttatattggtcttctgtcttctctcatatttttcatttattgggcggtggggggtgctctgaattttggaagatctcctgcatttattttctttttccttttttctttttttttgaggcagagtcttgctctgtcacccaggctggagtgcagtagcctgatctcggctcactgcaacctctgccttccaggttcaagcaattctgcctctgcctcccacgtagctgggattacagacctgcaccaccacgcccggctaatttttgtatttttaatagagatggggtttcaccatgttgccaggctggtctcgaactcctgacctcaagtgatccgcccgcctcagcctcccaaagtggtgtgagccaccgcacccagcctcctgactttattttctatcccttctgttaaattctttatttcagccaaacctttttttttttttttttaacttactgtgaagcctgtgtgcctactgcctagattagacaattgttaacattttggcgtattttcctggtctgtatagatagggtgcatttttatacctttttgctcaccatttaaaaggaactcacagatgtcacgacatttcacccctaagtacttcagtatacatctcctaaaaataaggacattttccaatataagcacaataccccgatcacatctttaaaagttaacaataattctctaatgttatcaggcacccactttaaattcagatttcctccaaatgtctcttatcgctgttgaggggctccaaagcaattaagatttatacattgcatttgaatatgcttcctttgtctcttatttatttatttattttattttgagacagagtctcgctgtctcccaggctggagtgcagtggtgtgatctcagctcactgcaacctccgccttccaggttcaagcgattctcctgcctcagcctcccaaatagctgggattacaggtacgcaccaccacgcccagctaacttttttgtatttttagtagagacagggtttctactaaaccatgttggccaggctggttttgaactcctgacctcaagtgatctgcccgcctcggcctcccaaagttctaggattataggcgtgagccaccatgcccagcccctttgtctcttttaacaagaacagcctacccacctctccttcacttgtgatactgactttttgaagcagtcagcccaattgtcatctagaagggcccacattttaagatacatatttttagagatggcgtgtcactatgttgcctaggctggccttgaactcctggcctcaagtaatcctcctgcctcagcctcccaggtagctgggactacaggcttgtgccaccacgactagctggcccacattttagatgtctctcttttcttgtgatataatttaacttgtttgtccatatatattacttgtagacaagaagttaggtctacaggcatgttcaggttaaacattttgggcaagaatatttcataggcagtactgtgtacttcatatagcatcagctcaccaggcacttaatggttggttaccctgtggtttgtgatgctacgttttaacacttgattaaagaaggaggtgactgccaaatctccccattgtagacatacagttttcctgtggtaattgatatataatctgtgatgtgatgctttggcaccatacaaatatcctattgcccaacagccatttgcataattattttagcattcattgatccttgcctgaaaccattattacattgggggttgcaaaatgatagtttttttaattgtcacctcttctacatttagtactgtcattcctctgtaatgaattttccctcatcaaataaggaggcattatatttcctcctaaaaagacagtatagatgcttaatctttgcctttattacatttcagagtaaggagttggtagaataatcacctcaaatggtggcaaaatatttgctgttgtgtttccttttctctttcatgtcaatatggactcatagggatttatttattaaatgttttacaattcaaattgggtcaacaagagtcccttcatgttggttcctatattctcctggcataccctcattaattagtctttgagcaatttcttgttttctggcacaagatattccatcccaatatgtgcttttcgtgtcctagaactgattccaaggagctctggttccttatagtggcaacggtatttagaatccaacatgtgggtactaaatgtgctgattcttactggggtaacattatatctaggcactttcagaggacatcgctagaaaatatattcagtttttattttttatttttaatttttttgtagagacaaggtctcactatgttgcccaagctggtttcgaactgagctcaagcgatcctcccacctcagcctcccaaagtgctgggattacatctgtcagggcaaactgctggtaaatattttcacaaaagaaaaataaaaaaaccaaagtgctgggattacagatgtgagccactgtgccctccattttttttttaagtcataaatacataatgatgtcttctatggcaatttaacattacagggttcttccttaacttttttttttttttttcttttttttgaggcagggtcttgctctattgcccaggctggagtggtgcagtggtacaatcctaattcactgcagcttcaaatgcctaggcttcaaacaatcctcctccctcagcctcccgagtagctaagactacaggtgcatatcaccatgcccagctaatttttaaaaattttttgtagagatggggggtctcgttgcgttgcccaggctggtctcgaactcctggcctcaagtgatcctcccatctcgatttcccaaagtgctgggattacaggtgtgagccaccatgcctggccaacttttatttgatctgtatatatcttttccttacactgaaaatgttgggtcttactaatgttaacatagttacttatttgctttatcttgtaatagacataaaattacaaaattataataccaatattacgataaatagctgggcatggcggcgctcgcctgtagtcccagctactcaggaagctgaggtggagggactgcttgaacctaagagtttgaagctgcagtgagctgtggttgtgccactgtactcctacccggacaacagagtgagtggggggaaaaaaaagaaataatggaagatccagagaaagccccaaatatttaaaaattaaacaatacactttgcagcttcctcacctctctcagccttcatagaattgaagagagttagggccttgcactagattaggctttgccttaaggaaatgttgtgtttgatttgatcttttatccagaccattaaaacttccttaacgtttattagtaataaggctatttcactttcatatcatttgtgtgttcactggagtagcacttttagtttccttcaagaactttgattcacaacttggctaactttggtacaagaggcctagcttttggcttctcggctttcaacatgcctctcactaagcctgatcatttggtttttggtttaaagagaaagacatatgactcttccttttacttgaatgcttagaggccattgtagggttattaattggcctaatttcagtactgtcttgtccaagggaatagggaggcccaaggagagagagagagatgggggaacagctgattggtggagtagtcagaatatacacatttatcacttaagttttgccatcttttctttttctttttcttttttttttttgagacagtcttgctctgtcacccaggctggcatgcagtggcatgatctcagttcactgcaacctctgcctcctgggctcaagcaattctcctgcctcaacctcccgagtagctggtattacaagcgtgcgccaccatacccagctaatttttatattttttagtagagacagggtttgccatgttggccaggctggtctcgaattcctgacctcaagtgatccacccgccttggcctcccaaagtgcggggattacaggcgtaagccactgccgcctggccaagtttgccaccttttttattttttttattttttgagatggagtctcactccatcacccaggctggagtgcagtgatgcaatctcggctcactgcagtctctgcctcctggattcaagcgattctcctgcctcagcctcccgagtagctgggactacaggcatgtgccagcacgcccagcttgttttttgtatttttagtagagacggggtttcaccatgttggccaggctggtctccaactcctgacctcaggtgatctgcccggctcagcctcccaaagtgctgggattacaggcgtgagccaccccgcccggccaagtttgccatcttttatgggtgcagtttgtggtgccgcaaaatgatgatagtagtaacatcagagagcattgatcacagatcaccataacaaatataataatgagaaatttgaaacattgtgaaaattaccaaaatgtgacagagacatgaagtaagcacatgctattggaaaaatggcactggtaaacttgcttgatgcagggttgccacacaccttcaatttgttaaaaactcagtatctgcgaagtacagtaaagcaaagcacaatcaaatgaggtgcgcctgcatattacaaccaagaggcttttcgcagaaacacgagtgtgcttcaacattcaaaaatcagttggtgtaattcaccacattaagataataaaggaggccgggtgcggtggctcacacctgtaatcccagcactttcagaagccgaggtggacagatcacttgaggccaggagtttgagagcagcctggccaacatagtgaaatcctgtctctactaaaaatagaaaaattagccgggcagggtggcacgcacctttagtcccagctattcgggaggctgaggcaggtgaatccttgaaaccaagaggcggaggttgcagtaagctgagatcacgccaatgcattctagcctgggcaacagtgagacccagtatcaaaaaaaaaaaaaaaaaaaaaaaaagataataaaggagaaaaaccatatagtctattcaataaatacagaaaacgcatctgacaaaattcagtgccctttcatgataaaaattcagcagattagaaatagaggaagtgcatgtatgaaagagctacagatagattgtacttaattgtgaaatattgaacatgttaccccgaaaatcaggaaaaaggcaaagatgtccactctaaccacttctattcaacattatactagaggtcatagccagtataatgaggcaagaaaaaacataagaggcattaatatttaaaggaagtaaaactgtttctatttgtaggtaatgtcgaaaatgtgaaagaaactatcagaacctgctagaactaaaaagtgaattcagcaaggtctcagggtacgagatcattcaaaaactaatcagaaatgaaatttcaaatgcaatatcgttaggaataatttaataagaaatgtacaagatttacacgctgaaactgaaaatgttgctgaaagaaattaaagacctaaataaatggaatgttgtaccatgttcatcagctgaaagactaagtgtctttacagtgtcagttctcccttcattgaactgtagattcataaccccagtcataactgcagggttttttttgtagaaattgattgtaaaatgtatatggaagctgggcacggtggcttatgcctgtaaaccagcactttgggaggctgaggcagacagatgacttgaggtcaggaatttgagaccagcctggctaacatgacgaaaccccgtctctacaaaaaatacaaaaattagccagacatggtggcacacacctgtaatcccagctacttgggaggctgaggcatgagaatcacttgaacccggaggtggaggttgcagtgagccaagatcatgccactgcacgcccgcctgggcaacagagtgagactttgcctcaaataaataaataaataaaacgtatatggaaatgcaaaggacctagaacatccaaagtaaacttgaaagagaacaaaattaaggggcttatgtgatgtgactttatagtcatttgatttttaacagaggcaccagaacagtccggtgcgggaaaggaaagtcttttagcacgtgccggatgatggcaaatgacatccataccagacaaaaatgaaccttgaccttaccctaaatattagtttcttagagttgccacaaactaggtggcttaaaaccacagaaatttggctgggtgcggtggctgacgcctgtaatcccggcctttgggaggccgagtcgggcagatcacctgaggtcaggagtgcaagactagcctggccaacgtggtgaaactttgtctctactaaaaatacaaaaaacttagtcaggtgtagtggtgcacacatataatcccagctagccaggaggctgaggcaggagaattgcatgaacctgggaggttgcactgagccaagattgcaccactgcactccagcctgggtgacagagtgagactccgtctcaaaacaaaaccacagaaatttgctgtctcataattccagagtctagaagtccaaaatcaactgtcatcagggccatggtctctgtgaaacctgtaggggagtccttccttgcctcttcctagcttccagtggttggcaacctttggcattctttgatttgcagctgcattacttcaatatctgtcttcctcatcacacagcattctccatgtatgtctctgtctttacatggcctccttcttgtaagaacaacagtaatattggattggggcctgccctactccagtgtgacctcaccttaactaattacacctgcaacaacgctgtttccaactaaggtctcagtgtgaggtactgagggttaggacttcaacatatcttttttgggggacatagtccaacccatgacactacttcacaccatacataaaaattaattcatgagagattatagacctaaatgttttaaaagctaaaaatataaagcttctgcaagaaaacataggagaatatctgtgcagtccaaagaataaggttttttttaaacacaatttcactctgttgcccaggctggagtgcagtggtgcgatctcagctcactgcaacctctgcctcccgagttcaagcgattcccatgcctcagccttccaagtagctgggattacaggtgtgcgccaccatgcctggctaatttttgtatttttagtagaggcagggttttgccatgttggccaggctggtctcaaactcctgacctcaagtgatctgcctgcctcggcctcccaaagtgctgggattacaggtatgagccaccgtgccaggccaaaaaaagatttattaggatacatgaagcaatagctattaaaagaaaaaataaattggacttcattaaaatttaaaacttttggtcctcaaaagataccattaagaaaatgaaaagacagagctgggcgtggtgaggcttgcctgtagtcactactgggtacttgagaggctgaggcaggaggatcacttgagcccaggagttctaggccaacataggcaatatagtgagacagtgtctcttaaaaaaaaaaagaaaaagaaaaaacaaaagaaaataggctgagagctgtggctcatgcttgtaatcccagcactttgggagtacaaggcagatggattgcttgagctcaggagttcaagaccagcctgggcaacagtgaaatcccatctctacaaaagatacaaaaaattagccaaccatggtggcgtgcacccgtagtccatagtcccagctactcgggaagcagaggcaggaggattgcttgatcccaaggaggtcaaggctgcagtgagctgaggtcgcgccaccgcaccccagcctgggtgactgagtgagaccctgtctcaaagaaaatgaaaagacaagtccaccaagaaaacagttgagaccagtcatagaaaaaatagaaagtcatatctgacaaaggatttgtattcagaagaattcctataactcggtaataaaaagacaacctgatttttaaagggtgaaaatattttaatggatacttttttttttttttttgagacagagtctcactgtgtcacctaggctggagtgcagtggtgccatcatacatagctcactgcagactcgaactcctgggctcaagtggtcttcctgcctcagcctcctgcgtagctaggactacaagcacgtgccactatgcctggctaatttttaaattttttgtagacatgggctggtgtgtgtctgtgttgtctaggctggtcttgaactcctgggctcaagtgatcctcccacctctgccccccaaagtgctgggccaccacgcctggtgtggtgtcaccagagatgagccaccatgccctgcctgatacttttcttttatcatctgtttatttcttgtttatgggtgtttctgttctgattttatgactattctgtattctaagatttctctgagaatattatttgtttcctctaaggacagacttggtctctcttccatggggctggttcttgagccgccagggatggggggaggacctgggtagctgctgcgctgccccttctctgctgtggtggagtggcccgttgcctgcggggtctgtctctgaagggtggtttggagaagttctgtggaggcgaggcaggggtcagctcttgccccatggaccctcagagactgggaaaaggtaggcatcacctgggctgctgccagccacatcaagagcctttggggtgggtggggtgggggccggggaagggaaggttctagctgttgatttagaaaagacccattgatttcttgcctgagggaagaagtggcaccttgccactccaagtttgctctgctcaccagccccaacagcatcagcctcacctgggagcttattgaaggtgccctgccccaaagcttgtgggtcgggatctggcagtcagcagcccccaggtgttgcacacatgacagcactgcttgcccctcctctcgtctggtctggtctggtctggtctggtctggtctgagagcttctttggggctctgacaggtatacaggctctcatctgctctacagctctcttgtagtacattcctctctgttccattagtcaacatgttcttgcctacttccagcatctagaaatttgctgagtgtatcttatccgttcagaggtcctctcctgctattgcctctgttagaaatttcttccctttcatatgtctgtacttcggtttctttgaggtttgaagggtcaagtggcaattacatgtaggcagttggccatcctctggtgaaggctttaaagcccaggaataacaagatccattatgtctaaaactagcaaaaaccctacctgtcacatggtgaactgaattagaggtgatggggacagaagccagattggagtgagtggaaggtgagggagtggagattgggtatagacaactctctttaagaagttttgttgtgatggtgaccagaaaaataggagtggggtagagggggatgagggtgtttttcacgtgggtgaatatgagagcatgtttacatccttctgggaatggcccaggagagaggggagcgtgagaaggaggaaatggggacctggaggagcagactccttgtgtggaggggggaagcggcatctagagctgttgcaggaggtgggctttgagtaaatgcttcctctttggtaaagacggggaacgggaacggtagaagttgcacggaccctttgttaaagctcagaagctgagcgagaattagagcttaagtttatggagtagtcagaataaagtacccctaactgtattcttgcacagtgcaggaagccaggggtctgaaatcaagatgttgcagggctccattccccccagagcctctagcatggatccttccttgcctcttccagcttttggtggctgcctggcagtcctagactttccttggcttgcagttgcattgctccattctctgcttgtgtcttcacatggccttctctgtgtccccgtattcttctctggatgcttgtcactgtattaggcccaccctaaatccaggatgatctcatatcaagatccttcacttaattacagaagcaaagaccttccaaataaggtcagagccacagggtctgggggttaagacatacacctaactattcggggctaccatcgaacccctgtagaagcctgtccatttccaggatagcagagcccaaggaagggccagaagtccccccaaaacagttgtttgcattcaccagattctaagctataagcagatgggcagtggcagtcggtcctaatccatataccattggcaacaatagtttagttcactgtagacataatgagatgcttatcttctgctaagtagtcctcatggtaacagccatattactcctggctttgagtgacagcgctgtgctcttgtctggtgcccatatacttcagcagctggaaacaagacagtgctcatgattcaccggaaagtttctgtagttaaaatcaagtgatcccttgagtctattctaatatttgtctgtaccatgttctgtgacgagacatggaaacaaaacattaagaagtgaaagtatctttgattatgctcttgaagacaactttttgtttgtttgttttgtttgagacggagtttcactcttgttgcccaggctggagtgcaatggtgtgatctcggctcactgcaacctccgcattcccgggttcaagcgattctcctgcctcagcctcccaagtagccaggattacaggcatgcaccaccacgcctggctaattttttttattttagtagagacggggtttcaccatgctagtcagactggtctcaaactcctgacctcaggtgatccgcctgcctctgcctcccaaagtgccgggattacaggtgtgagccaccgtgcctggccgaagacaactttttaaagatgcatatgctctgggctgggtgtggtggctcacacctgtaatcccagcactttgggaggccaaggcgggcagatcacctgaggtcaggggttcaagaccagcctggccaacatggtgaaacaccgtctctactaaaagtataaaaattagccgggtgtggtggcgggtgcctgtaatcacagctactcaggaggctgaggcaggagaatcgcttgaaccccagaggcggaggttgcagtgaattgagactgtgccactgcactccagcctgggcgacagagtgagacttggtctcaataaataaaataaaataaagatgcatatatgctctgaaggctggctacattttattttttctcaaacaacttttacagtggatagtgctgtaaaagttgtttagctctggtcattttatcttttttgtgatctgcaaaaggagatccttttccttttcactgcctctaatacccaactccaatactcctttgacctcacaggcacttagaatccatcagtggctccatcttttctcagacttcacctccttcgtatccttattcctctcctttgtagcttcagtgccagtcagacgtcgttactccctggcacactacctcagcccttcggcactttcttgctttgttatattcagtcgacaaagccccagcctcatgaaattcagtcatgtctgccccatgcctgctccgtcctgaagctgaatgtgactccttcattgattccccctttaagttcatgtctaccccaggtaaacttcttgccgccaagcccacctgcatactgcagttccccggtctctcctagcccctcccaccctcctcatcagctgtcacacctccttgcagctgatatcttagttcccagagagcacagaagcaagctcaagagagtgtctacaggccagcgtctactccttcgctctgcctccctcatgctgtcacggagcgcctgtcccaggccctcactcctgttctaaggcatctctccagtcctctactgcactctcccccatcagagattcctccctcgcctgccctagaaacttgttgctacttctcccaccttgacaaaagctgctcccaaccccccacctgtctagcatctctgttttcctttaccagcaagactccagtccctgtctccacaccctcttcaaccttctccagttgttcctttgctgccacagctctgccaagctgctccatgaggtctccagtgatgaccttcatgttgttaaatctgggagctgcttgtcacttcttttcccagagctgtcgtcgtcagttaaccccaatacccatacgagacaatcctttccctcccttgagtctctgcactgatgtgcaccttctcagtgcaaaccacagcttttgtctctttctagctgaatacatgactgactgtgcttatcttagctgtcacccctgctggagcagaagctccacaggacaggattgtctccttgattcacagatgtagctcaagctcctagaacagtgcctggtgtctgtgggtcctcaggaagtcctaggtgagtgtgtgaatgtctgtcctcctcggtcttttctgtttcgcatgtgatgttggaaggcctcaggttcaggcttttcttctccaccctcactcccgaagtgattccgtccagcctcatggctcccaaatttatgtctccaggctgactgggtcacgggaactccttatcctccctagaccttctctttccctggtcttctcctttccagtaaacagcaactccaactcctgctcctcaggccagaaacctggcgctggttacctcatttgttcacaaatactgttactccacctgcaagatggatacaaaatctcatgagttcccctgcctccatggcccccaccctggtccaggtgtccagcttccctgcctctgcccttgccccctggttctttgtttagtcctgcaatattgtgctcttctgttcagaaccctccagtgggtccctgcttgctcagagtcacagcccaacaggatcacctctcttgccactctcccaccactcatgcactgcggcctcactggcctcctggctcctccctggaccctccaagtatgcccctgcctcaaggccttgacctctcctctgccctctgtcccaggtatcacacatgtctgctcaagtgtcaccttcccaatgtggccttccccgagcacacccatgtctgtaagtcaggcagcctgcctctgccccaccagttccccctgcctagcataggacttgtcaccatctgccacaagctgtgttactgcttggttttgtttgtgctctcccactcccttcccctccctccctctccccacccctatagaatctgagtcccatgaggacagagatttttttttttgcctcttcctcaatatatccccagtgcctagaatcatgcatattttaatttattgagtgaattaacaaataaattctgcagtgggacattgctctaaggttttgtcttataagagggacagaagaacatgcagcctgctctgctgttggctccttagcttctccatggctaacaggaacaatattgtttatgagataatcaaagccatagtcatgagttagaaggtacatataaaggcaaatatgtggagattgagttactttggcgggggcggaggggtgtgtagttatctgaaaacatggaacaaatcaatgagagtctaaatagcacccacatatttgcccctcttttaaaacatacctcctttatgagtgtagaatttaacagcacagtttcccagtgcagctttgcgaaacaagagaaatgaattttaaaggctgtcaggtgcctttgcaatctgtggcttagtatttgtgtaacaacatttgtgttttgccaacagatgtactgcttaaagtacccatgagaatggcctctgtggttttctactttctcggatggaaccttaggaactgattattgagaagaggctgatactgcccacctcagctcccaggcaggcttcagggccttggttactactcctttgggccctcactgacccttgcagacgtcttttgcaacctctgtagccagaagagacaactgctttctggcatgttgctctttccctaatggctttatgagcttcttgaacaccaaagcatgtgtgacttcctcacgccttcccctgtatagtatagcacccctaactgtatgtgtaaggagaaggagtgagcaattgatggcgtccccctggatctccaagggaatgggaaggggcagggtttctggattcagtcatgtggaatctggtcgttggtgtctaaatgtgcctgttacttgtgcccaatgtccaggttcaccaggaggcttagcctgctcatttccctgctagtagctatattttgggagagcattttttatgctctaattgaactttgtgggtctcagcaatttgaacaatgttttgtttttcttctggtcaggttacaaaggaaagaaaaggaatctggtgttgtaggaggtggtgtgttgtgtaattacttgttttttttttttaagtttttttatatttttgcaacaaggcaagttttctttgaataaataatgctgggagcttatcacatagaaggcatatgtgttgtactcagtacattctgaattatctgggtttatttttatctcttgaattcacttataaacaattcaaaggctgcttttttagctaacagaaataggaagagaatctcagaatctgttttgtcattttttcaatgggttgagttatagtgattatgctaactcggtggaaaagcagtgtagtgagtaaaccccacatacggcatatcatgaacattttgttgcttttttggcttctgaccatcttcatacctttttttgtgttaaaagtctccccattgtgtatatcttagtaagaggcaggtggaccctagtttctacctaagaaaacctgaagatggggttgggggcctgtggtgtacttccttctcatgctgtccatgaccactgcagtggctttgtaaggatccaggacccagggcccctcagtgggtgtcttccatttctcaagattgcctcttggttgtgagatgacggttgctgctctagtcattgcatccactcctccaggtaggaagaaagaggtcataggggaaaggcaaaatggcacttgacatcttaacttctaggcccattcaatatttccatttccatcttcacacccatcatcttgtcctagggaacaaacagcaccagcagctcagtagctataacagcaattattatttctcacacatgggtctgggtcagctgcaagatgggattcagatctgttctcaagcctgtcgttccaggacccaggagggagaagcagctgccaggggaagtctcttcgtaggcggaggtcaggagtccaagaggagtgagcagagtcacagaagcctcttaaagcctcttcttcccccatcccatcaacacgtgagcaagcccagagtcagtgggtgggaggtgtgctccgcccatagtcagtagaacaagagcaagcttgaaagagaacgatgaacaggagtgcactcggccactgtctccttagccataacgtagtcccatggtctgctgggaagcggggaataactctccttagctgagcgcagggtctcattagtaaggcagatggagaacatggatgttgggggacaactggcagtgcctgccacaggggaatggatatattccctccccttgctctctggaaactaggggatggcgatgaagcctaggtttggccaaacccattctgccttcagggactttgactcttgagggacagtgagggattagtcatggtggtggcagttgagtcacaaaaccagcagtggtggctaatgtccagtgatgacatgcaacagtgcccagggtgggtgtcccaaccagcaggtccctgcagtataaccttggctgtgtttgcagtggtgcagcctctattcctgctgcttttctgagcctagttctctagttctctctccatttccagatctgctgcccaagaactcctttgtgattgaatttaaccagagttgatttctgttgcttgaaactcaggaccttgatgcagtgtgcagggtctgggcaaggtaaaaacacactttcatgatttcgcctcaagtatagtagatgagcttaggctttttgagccaggtagccttgggattaattctcagctcttgcacctagcaggtgacctcagcaatcaagtcacttgccctccttgagcctcagtgttgccctcagttaaacattgctctcgtgtgttgctgagcattcagtgagattgtatataaagtgatcattgtgaaggtattgggacataatttgggaaagcgtcctggtctaagcttttgattggctctccatcatttgggtaatgggatagtgatttaggagtatcatagcagctcaaggggcccttctggaaagggtatgaggaaggtcagggacaagtctgaaatgaatcatcctaggcttaatgcctgtgactgggcagtgggtacaattatctcaggctagtcagtagtcatttattgtgagaatacatgggcagattttttaatttccttctcagtctagacttgaatgcaaacagttcttattgctaacttaccactagtcaccactaatgaacaaagactatgaacaggaaattcataaaagaagagatacagatggccaatgaagataggaaaagagttctgcctgctggtaatcaaagagatgcaaacgagaacaaaaatgatgccttttcacctaccaaatttgtcaagattaaaaagaaagcaaagagccagcgtcagctgatgttcatacctgcacctgctcggtagcttgctaatgttctgcctgctccacacgccaggccagcctccacggcgcagccaggtgaggcctttccttgtatacaggcacgtttggattcactgttgcataagtgagacatgtgcatgcttcacaattcaggaagtgcaaactccagagtgatgcaaggtctgagtgtccctgctgccctggtctcccagctgcctaggcctctcttcagggaacggctgcatccagggtcttgtctgtgtcttttgaggtgttctatgtacacgcagacacatctaaacctatttttattttccctgcacctgcttgggctactgtaagctgttaaatttttttttctaggaatttgtccattttgtctgactagcataaagttgttcatgttatagtttatacatttgcaacatctgtaattatgtctgctttttcattcctagtgtttgttgtttacttgtaccttctcccgtttttccttgtcttggtaaaagctcattaggttcattggtcttacaagaagcagacatgtaggcattattgccctgtattactctgtgtctcttttctagttcattaaattctgcttttgcttttatctttattattttttctatggtcttagagtacattctctgtgttttgttgttgttgttgttgttgtttgttttttgttttgagagagagagtcttgctctgtcgcccaggctggagtgcagtagtgcaatctcagctcactgcaacctccacctcctgggttcaagtgattctcgtgcctcaacctcccgagtagctgagatttacaggcatttgccccacacccggcaaattttttgtatttttagtagagatggggttttggcatgttgaccaggcgggtctcgaactgctgacgccaggtgctccacccgccttggcctcccaaagtgctgggattacaggcatgagccaccacgcctggccctaacttcttaagttataaatttggttcattgatttttctacccttttttcaaatgtaaacatttaaggctaaccctctggaactacttcaactgtatctagcaagttctgatagtattgtcactttaagttagcccaaagatattttaaattttctttgtttcttcctttgactcacatattattttaaaatgtgtttttcaatttccaagcacatggctttgggtttgttttttttttttcctagttgctctagaaaaaaaaattgactgcatgaggtggctcatgcctgtaatcccagcactttgggaggccgaggcgggcagatcacctgaggtcaggagttcgagaccagcctggccaacatgccaaaacctcgtctctactaaaaatacaaaattagccgggcatggtggcacacacctgtagttccagctactcgggaggctgaggcaggagaatcacttgaaccgggaggcagtggtcacagtgagccaagattgtgccagtgtactccagcctgggcaacaagagcaatactccgtctcaaaaaaaaaaaagaaaaaaagaaaaaatcaacttctaactaaatggcactgtgatcaaagaacttggtctgtgtgacaccagttcttgcagttggttgagaagtgctccatgacacattatccacaaccagtggacagaatatgtcaccaccaagcatgggtgcaggattctacatatattcattacctctgtcttatccgtttgttgtgaaagtattttctcttcttactgtcattttgtttacttgatttatcaactgatggaatacgtgttaaaacctactgtggtgatggacacatcagtttctccacagagtttggtcattttcattttattatttattttgaggccacattttcagttttagatacagtttcacattcctggtgtattgaaccctttggtattatgaagcgaccatactaatatgttatttttttttaaattattatttattttatttatttttctttcttttttttttttttgagacagggtctccctctgtcacccagtctggagtgcagtggtgcaatctcagctcactgcaacctccgcctcctgggctcaagtggtcctcccacctcagcctcctgagtagctgggattacaggcttgcaccagcgcgcctggctaagtttttgtatttttagtagagacagggttttgccatgttgcccagactggtctcaaactcctgggctcaagcagttcaccagccttggcctctaaaagtgttgggattacaggtgtgagccaccacgcccggccatcccagttttttattttcctcctttctgtgtctttatgcatcagtgaggtggagcttttgaaaatgtcagatagctagattttttttttttgagacggagttttgctcttgttgcccaggctggagtgcaatggcgtgatctcggctcactgcaacctccacctcccaggttcaaaacaattctcctgccgcagcctcctgagtagctgggactacaggcacgtgccaccacacccggctaattttgtatttttagtagagatgtggtttcaccatgttggccaggctggtctcaaactcctcacctcagctgatcacccgcctcagcctcccaaagtgttggaattacagacgtgagccaccatgcccagctgatagctagattttttttttttttttttttttgagacggagtcttgctctgtcgcccaggctggagtgcggtggcgcgatctcggctcactgcaagctccgccccccgggttcatgccattctcctgcttcagcctccagagtagctgggactacaggtgcccgccaccacgcgtggctgattttttttttttttttttttttgtatttttagtagagacggggtttcaccgtgtcagccaggatggtctcgatctcctgacctcgtgatccgcccgcctcagcctcccaaagtgctgggattacaggcgtgagccaccgcacccggcctcgagattttttaaaaaatccattgtctgtttcgtcctttaacatctatttgatttctgatgtatttagattcatttatagcatatttgtgcattctatttttccatattttctgttcttttaaattttccttctcctttcttgccttctcttagacttttaaaaaaattgtagtaaaatacacatcacctaaaatttaccatttttaaatgtacagttcagtggcattaaatacaaattggaggccaggcatggtggctcatgcctggaatcccagcactttgagaggctgaggtgggaggattgcttgaacctggaggtcgaggttgcagtgaggtgtgatcacactactgctatagcccaggcaacagagtgagaacctatctaaaaaaacaaacaaacaaacaaacaaacagattggcatcacacagtgtgtgtgctgctgtgctgtgctgttatcatttaacattaaaacataaacatcagcactgttatggactgaatgtttgtgtcccccaaaattccagtgttgaagctcaaacctccaatgtgatgttatttggagatggggtatttgagaggtggttaggtttagatgaaatcaggagggagggtgggtttcgcatgatgagattagtgtccttataacaagagacagcagagagcttgctttctccaccatgtgagtatgcaatgagaaggcagccatctccaagtcagaaagagagccctcaccaggggctgaatgtgctgacaccttgatcttggacttctagcctccagaactgtgagaaatttcagttgaataggccccccagtctgtactattttgttatagcttgagcagactaatacacccatgttatgaaaagctataaacatccctttaaaggccacctaacgcgtcgtattacctcatgcatcttctctgctgagctttccaaaagagtggcttaggctgggcctggtggctcatgcctgtaatcccagcactttgggaggccaaggcaggtggatcacctgaggtcaggagttcaagaccagcctgaccaacatggagaaatcccgtccctactaaaaatacaaaattagctgggcgtggtggcgcatgcctgtaatcccagctacttgggaggctgagccaggagaatcacttgaacctgggagatggagggtgcagtgagccgagatcgtgccattgcattccagcccggccaacaagagcgaaactccatctcaaaaaaaaagagtggctggccgggcgcagtggctcacgcctgtaatccccgcactgtgggaggccgaggtgggtggatcacgaggtcaggagttcaaaaccagcctggccgagatggtgaaaccccgtctctactaaaaatagaaaaactagccaggcgcagtggcaggcgcctgtaatcccagctacttgggtggctgaggcaggagaatcgcttgaacctggggggcggaggttgcagtgagccaagatggtgccactgcactccagcctgggtgacacagtgagaccccgtctcaaaaaaaaaaaaaaaaaaaaaaaaagtggcgtatgttcccggtctccacctctcattcgccagcccctgtgaccaaacccctgggattagatctccatcgggtccctcccctcaccctaacctcacatgcagtggttcctgagaagctgctgtttatctgatcacgggatccagcaggatctgagggctcattcactgaatctgtactacccaacaaggcaggcttgtccttacccacacttttcaggtgaaaacttaatcagattcaagcgtttatcttagtggcctcttcgtggtgtgtgatttccttcttgcagctctttactggctaaaactcttcactgggagttaaaccaggtgtggtccttgaccctcatcattttgtcccatctcctatgctgggctctgtatccttgtctccaagcagtctcgtgtgacagggaagttacctattattgtatggtcccctcttcttgtcacctctggtgtggcacttgttccatttcttgttcaatgaatgtgatttgtgaatgtgccacatctgtgggaggaaggcagttcgcagcaagagttgtagttcccttgctttgccctgagggccaggactttacactagatttttttgttgcattcctgcactcataaagtacacgtaaacttagaggtggtgtgttaaatgctagaacttaaaactgagttcagctaggctcaagtgccccacaatttttgtcccaccagacaatttcatgaatatctacagattgttccctcaatatgcctcaatattgaggcatattgatttggggagcacagacaagtcaaggttgatgtgcatccgctgaacatgatcttaagttgttgaagtaggtattattaatgaacgaacgtctattttagctccaagagcccctggtcttccagaagagactcccaatgatcttccagaagcagctgggcttcttttggtcctcccccacccaggtgcagtcccgttctccctgcctgggtgagtttgattcctctgccgtggaataggctaggctgctacctcttgagcctcttccaccaggccatccattaggtggcgacagagagcactaaaaggaactactatggaaataaaacttgttttgcttcttggggggaaaaaaaaagaaaaaggcttgtggggcgtgtgtgcattttagtcagattttactgtgcaaaacatttgagagatttctgccctctttctcccttccattcttctcaacccactgggcgccctaccacccctgtctccttcaagataaggtagatcagaagaccaaatagacaaatgccatgtccactgttttctgtcacagttgatagccataccagtcacccaagctggaaacccaacaggcccctgcccttcactgcccacatccaagggagccaccaagtcccacaaattgttcctttaactgtttgtccctcttttgtcttctgtcatcccttctaccgctgtcctggttcaatccctcatcttgctctgggactcccatgataacttatgatctttcctccacctctctatcttccacacaatccctatcatcaatctcattcccctgctttaaacccaagagtggcaccctgtgtttgagtgacatcagggcccctcatgtggctcctgcttctctttgtggccccttctgttgctgctgcttttcttatggacatagccctcagcagtccaggactgcttgtagttcctcccaggtaccatgtttcttgcactcctggcctttgtcattggctcccctgcccaagtccccttctcttctcctttccttcccctgtggccttgccttgtcgtgcttatccttgaagaccctgtcaggtatctcttccccaaagagccctgcctaaccaccgcccccctcccccccgcgacacacacacctgggttaggccctgcctctccacgcctgtgcctcctgccaagtcctcagaggtctctgatcccatgtgcctccaggcatggcatagggggactgtgacacagcctctcggcccacagacccctgattgtgggcttgctcactgccccagtcagtcctcttattgaggattccgtgccagttcctgactccagcacacacacgcatgtaggccgccctcctagtgcctggctccttccctgtctcttctgccactcattcccatggtcgtatcctggagttggtcatctctggaactccacccacggagttctaacttagctctgcctatgatgaggacttactgtcttcccagcttgcagtgtcaaccactgtttgatgcccctgggactccattggtcttccctcctcttgtgaactgtgcccatcaccagacgaacttgttttagaatttaccatcgtaactgagctcccttcagcgcatacctccttggctcctgctcagtctctgtttctccttttagccaaactctctaagagttctctccactcatgggccctcttccttgcctgctgctccttgctcagcttgctccatgaacacttgcttttccacattccatgaaataatcttaacagtcatcagtggctgtcactccttctcagccctttccttgtgtctcttctggtacctcatactctccaggtggccatctcacctcacatcttgaaccctctgggtttgggagaattctcacctcacgagttgatgggaggcctggcgacctctgattgtagtcactgcaaatgccagatgcttatttgcctagcttccctttcggtcagggcagcagttggcaaacggtatctcaagggccaagtccggcccactgcctgttttcgtaaatgaagctttaccaggacccagttccaccccgtcctttgtgcattgtccaagactgctctcctgtacaacagcaggtgggctggttgtgacagatactgtctggcccacaaggtggaaaatactatctggccccttacagaaagaaattacctgagttctacacgagggtgtaggtatgtaccctggcctctgccagtcagactcacatgctaggaggagcagggccaggcaggagagccgtgtctcctggcattggggctgcaggaaagacgagctcctaggccacagtgccagtggccagtgctgctgccttgcagggtcgcacaggcagtgctggctgtttggactggcttggcagaaggatttgaagtattgttcctagccaactggactcaaacctgttcctccaaccctctagggattctcttatcacccagtagccttttccccctagttttaaaaattgcagtaaaatacacaaaagataaaatgtactgccttaaccatttttaagtgtacaattctgtggtattgagcacatttatattgtgcaaccatcaccacatgcatcttcaatagcttttcatcagtccttgtctgcataaatcagctagagttggtttctattgattgccaccaataatcttgacagatatgtctgatcttccttctctgcactgactcctctttctctgtctcctctgctgattctttctcctcatcacaactccaaatagcagggggagggttgtttacacttatattcagcacgccctcacgcactcgcctggctcttcagacctctcccctgaactccagattcatacatccagctgccctttaggcctctagaaagctaaatacctcagtatcaaaaacatgagaaacggaagccagagtcctggatctctcgccctttcgctgtcccggtgcccatgcccttcagggatggcacctagaccagctccctgcatccctgcctagactctgcagtagtctcacgtggcagacccggaggtcactctcctctctggatgccctgcggacactccggttagcctcagctgcaagagcctcctcacccaaggtcacgccatttccaggacagcaccctggtgactgagcgaggtaagggtacaaggcccttatagggccttctctttgacttcttcccacctccctttatggatgtcagttcctgatgaacatcttacacctcaaaccgtgacccaacatctgcttctgcagagcccccctgtggcatcttgtgccctcctgccccactccctctactctatatcttcccatagttagaatgggctttttttttttttttttgagataaggtctccctttgtcacccaggctggaatgcaatggcacagtcacgactcactgcagcctcaacctcctgggctcaagcagtcctcccacctcagcctcccaagtagctgagactacaggtatgcaccaccacacctggctaatttttatattttttgtagagactggggtctccctatgttgcccgggctggtctcgaactcccaggctcaagcaatcctcccgccttggcctcccaaaatgcaggattacaggcgtgtaccagtgtgcccagcctcagatgggctctttgaaaaatgtttattagatcaggttactcccttgagaaaaaccctctcagaataaaacccgaagtccattacttgaaagcagagccagcttcatgggcctttgtaactgcccatgggcttgctggaacccaggcttggtttaatactctactctcaccatctcaaaattcttaatttttgaacaagaggccctgcattttcattttgcaccaggctccacaaattgtgtaactgggcctgcctcagcagccacatggaacatgatccctccttgcctatttgagctcattctctaccattctctcccttgctcacctggctcccactgctcttgctcttcctggaacttgccataatgttgctagagtcagagccttggctcttgctgctcctcattggctggacccctctttacttgacctgctccctcaccactcacttccttcagatctgtgttcagatttcgtcttctcagagaggcttttggcccctgtccatctctctgaatttacctctgacctctcccccaccaccactgcgctaagctgcctcagaactttgtagacattctgtctggtcttctgatgtttcccccttggaagaatcccaaggtgcctgaagaatgctttctttatccttgaagttgagtaggttgactagagtctggcttgctattgagcattctttatcaaattgtcctgggaacatggtgtattctttcagtctgcagatgtagtcgttgctgtttcaggtcagctctcttatggatctttgacagcatcttctgttccatttgttgagttctgtacttcagggacacaaattcctcatgttggattgtctttgtctctcttccaatgctattagctttgccgtaattggtttagcttttgtctttttcatctgcattcactttgtctaatttgattttcagctatgtatattctgtttctggctgtttttcaatgtatttattagtttcataatgatgtgttttggtctgcagtttgtttctctaggttggaaatttgtcttttcatcttattctgttttatcatcccatctttgaactcttttattgggaacatgttcttatgaagttgtggggaatttttttcccttccttgtgtattctcttcttggtgggagactttgcctttctcgtgccatctccctccctgggcctcttttttttcttctggccataatatgtttgcctagttaccatgtcacttcttttcgtcttggctcaggcttggatggctctgcatagtcgttctgtttgctttgagacagtggaggaattcttggctctctcttcccagtttcttggcatcttctcttgctgttttcccctctgagctatcgcgtgcaggcttgttatcttgtatccggagagaatttgcacgctggagggagctgcagccatgtagtcttcagccctatctggattcttctctttgttctaagaactgtgttggatgtcttactaaggctcactctagctgcacgagggatgtgtgtgccatttccatggggatagggggcacctcagtctctgggtggttccataatctgtgtatacctaagagcagttgcttcccacagagctgggctggctcactgggcactttgccatttctcctgcacctcccagctggagtttctgggtctaaaaggaaaaagtgaaggactcccacttggttgcttctctccagcttactgactgcaaattcccagggcgttgcccgctccctagggtggtttctgggggacggggcaggagcctggctttgctgctgctttgtcctctggagtcttttctcagactgctttgaattacacccctttcctttgtgtgctgaaatcttcccttcacactctccttccctgcctttcttttgtgtcttatcttactaggactggaagagggcagttgtgcaggaggtctgcatctaattccctaatccatgtgagagtgctcctgttgtgtgctttgtgacatgatggtgagaaatactccctagagcagtggctaccagaaggaagccatccccccccctgcacacacacacacacacacacacacacacacacacacacacacacactccttctggctgtcctcagatgcctattctaggtaaatgtcagattccaaagaaaatccagttgagatcttttttctttttttgagacgagagtcttgctgtgttgcccaggctggagtgcagtggcacaatctcggctcactgtaacctccgcctcctgggttcaagcgattctcctgcctcagcctcccaagtagctgggactacaggcgcgcaccaccacaccaggctaaaatttttttgtatttttagtagagacagggtttcactgtgttggccaggctggtctcgaactcctgacctcgtgttctgcccgcctcagcctcccagagtgctgggattacaggcttgagccatcgcgcccggcctccagttgggatcttgactggaatgactggtgttcaatcattatagtttccacctaatttgtatttgtacacaggacagttactaatttgttggtacttgtttgatccccagtccctagagttgtttatggggtggagcttcagtccctgctgcttcccctgtggcagcagctggagtcagggtggggacccagggtgctgctggcagattcttgagacaggtagaatctcctctatattggtgtctctctctgtcccagcagtgcccaggaaaacctggccagcctgtcactgacctctccacctagggcactggtggttcaggtccttctatttgccaccggcaaaccgtacttctgccagtctggctcttaggcccagtttctctgatcttgcagattttcttgggctctgctacggaatcctcatacctccggcaggtccctcctttgcccatgtgtttaactgtggtggaatcgtgtgagagctgcttctctcgcatggatcccagccacaccacattctacagcggttcctctgaaggcattgatagagatatttcctcctgttttgcatttcgttggtcatttcagtagaatcagggtgaaataaacatgggggctcagatgtcagcattacgaaccaagtacgtcaggcaggctgatgtggactgacctacactagtgagacgcaagatgacgaaaacaagggcactcactccaagttactgatgagatgtttggatcaaatgagccagtccttaagcagagttctctagtaaaagagatctcctttctgccctttcttgttccccaaaatgtgttgccttcatggtgaaaatttattttggcagattttctcttctttgataaaagcagccaacactttgttaaaagtctgtgaaacttatttacatgaagtatgtaaaggtaagaaaaaaacattatcaacaagaaatggagaaagccagcagctgaggacagaaaagtcatgcacagtgtcagtgtctatggaaacaggccacttggaccttgaggactaggtatttggaattggaggtgagcttggcctggtgagtctctaaccacttgtgtgtaggatcagtgtgagaaccctgctagaatatagtggcagagatgcaaggggaaatcattggagaagttaccagggaatgatgagctaatctgaaaaaaatacatgtttctaagttgggcgtggtagctcatctgtagtcccagctacttgagagcctgaggcaggaggatcgcttgagcccagcctgggcagcacagcgagaccctatctccctaaaaaaaactttttcgttgtttagttttgggatttttttttttcctggtcttttttccccctttttgtgaataacgggatctcactatgttgcccaggcagatctcgaactcctgggcccaagcaatcctcctgcctctgccttcctaagattacaggtatgagccactgtgttaagcaaaaaaacttttttaaatgaaaatcattttttaaaagacaggctttccaggggagggtattattccacttatatgaagtgtcaacagtaggcagatttgtggagacaaatagattagtggttaccaggggctgagaggagtgggagtggggagcaactgcttaatgggtaaagggttgtctttggaactagagagtagtgatggtcgcatgacattgtgaatgtactaaatgctattaatgataaattttatgttatgtgtattttaccacaattaaaaaaaaaagatcaaatgtcctcagaatagccaacaaccttccacttggctaaatgcctactcattaaacttcttgaactaaattcctttctgattgtcatggttattgtgtcctgggcttcagagtttcacattcaggttggcttggtccagtctgtcatgtatcactataggtccccacattggcctcttcctcagacggacagcccatctatctgccggggctctgtgccacagccagatagacttgctctgagacagctgtgtgggctctgagcactggccaggcatcacaaaacctatctttatgatttagaataattggtggtcagctgctgttttaatgttgttgttttttttaatttagatataattcacataccatgaaatttactcatttaaagtgtacaattcattcttcagtataattcataggctcacagaaaaaattgtttaaaaataaaatgtgcaattcagtgtcttttagtacattcacagagttgtgcaaccatcgcctctgtgtcattccagaacactttcagcacccaaaagaaaccccagacacaggagcagtcacctcttattacccgcagcccctggcaacaactcatccacttcctgtctctatggatttgcctattctggacatttcctataaatggaattatgcactatttggccttttgtgtctggcctctttcactgagcgtaatgtcctcaaggttcatctgcattgtagcatgtgtcagaatttctttcctttttgaggctgaatgatattatatcctatagataatgaggttttgattatccacccatcccttgggaatgcatatttgggttgcccccaccatttggctgttgtaaactgtgctgccatgaacactggtgtacggatatctgtttggttactggttttggttttttgtttgtttgttttggttttttgagacaaggtcttgctctgtcgcccaggctggattacagtggcacgatctctgctcactgcaacctccacctcccaggttcaagcaattctcctgcctcagtctcctgagtagctgggactacaggtagcactcaccaccatgcccggctaaatttttttgtatttttagtagagacaaggtttcgccatattggccaggctggtctcaaactcctgacctcaggtgatccacccacctcagcctcccaaagtgctgggattacagacgtgagccaccgcacccggcatagttgtggctttttgagagtgtatggctaggagtaaaattgccaggtcatatggtaactccatgtttaacatttgagaaactgccaaactgttctccacagcaggaattttttaacctgtatgtggtgggcttgtgtttcggttttcattttacacatctataaagatgagatttgctgtatggcactggttgcctgtatttggggagggttctgcttttggttggcaagaactgcattttatttaagcttagcaaaacataactggtttctcgcatcttctcaaaagtggaggattaagaaatggactgcgaattcagagcagggcagctgaacctcaggctccacccttgtagccttcaagctgaacctcattctctcttgctccctggagaccactgagacactctgcctgtgccagtttgatttctcacatttttaaagggccaaagcttgtgtctcaaagtgctatagcctttattgattcatgcagagaagcctccttgattccgtaattctgcagctaatactggaagtagaaagaattggaaacaccatctggatgacactttagggtggaagcagccagtacaagggggggctcattatttcctctggtcccagactgttcacctggagctgtagccaccaccctgcccttaggttaactgcctcgagtggtagtttagctctttgtgctgtgccgagggataactggaagtgaaaggtgctgagaaatgccatctcctgaaagtggcgagcatgagtgaatttacgaaaggttgggatattgctggggctctggaagtttctctggagctcactccaggggacagggagggggctggattccaattcaagtgaaaaatacctttcatctgccttgttcacctggcttttttgcctttttgtaaaatctgaaaacctcagggattgagtagtctttccttaactgcagttgcctgtctggccacacctgccagctgttgcttgtacccctgtaatttgcacggccttccgggcctttctcacaagatcactgcaggtcacattcatgaggaaaatgcaggcagttcctgccatcagacccctcaggatgtcatggtttggcctgaaaacaagattcctgcaactctaattttcctttgctagatcaaatgaaggatttgatctaatgtttgcattctagcagcaaaatcattgaatattttatttcttaagagccttacttcatattttgtaggtattttaagattttgtaaaggcctttctgcttcaacgtgtgatgtgtgcattcttagaaaaagatcttgtgttctgtaaatcacacaataaaaacatgagttcgtgcaggaaaaactggggcggggtggatcactccaaacttgtgtggtgtggtaactggagctcactgatgaaaccatgaacagttctggctgaaagaaccccacagtacactgaggtctgttggcatcgccgccagcaccgccccggtccctttgtgcgcgccaccacacctggctaattttttatttttagtagagagggggtttcaccatgttggtcaggatggcctcgaactgacctcgtgatccgcccacctcagcctcccaaagtgctgggattacaggtgtgagcctccgtgcccagccttcagctttttttcttaatgtctttgtgtaatatgaaggcattctctttaattgttaaaaagcttgcctaccactgcttcaaaatattactgtcagttggcatagcttctgattatattgatgtcatctcccttcttttaaacatgttaccatattggcactgtatttcccctagcccattgatcacttgagagttagtcatagtcctcgtgctgtttcactcctaaacgtttaagcatgcctttcctaagagcagacagtacagttaagacactcaggaagtttagcaatgagctaacacagaaccttacatttctccacataccccataaatgccttttttagagcctttgagcctggaatgcagagtccaggactgtgtgttgtattcgattgtgtcatcccttcagtctcctttatcagaaatgttcccccacccccttgttttctctcatcatcttgagtccagaccgtggttgcatggcacgccctctctggactcttcctgctgtctcctcacggtaagcttcagtctcctactcgtgatgctggttcatctcagcagcactgaggggcctgagctcagtttggtcgtgtgttaaggtggtgcctgccagatttctccacagaaaagggccccgtacttttatttgctcttcagcctgtgtattccttcctttcttgccagcttgtgggtggcttctctagcagcttctgtaagatactcagtttggcagttgtagttgtttcagcaggagaggtgtctgcatacctgaccaccacatggctagaagtcgatccatcctctggcgtaaccatcctccatgctactgtccctggggcactgaggccctcctcagtgacttcctccacctcatcttccgccatctccaagccaccagtgtccaacggactactgatatgtcccaaactcatcatttgtttattcaccaattcagagcccacctttttttcagcactgagctagcctctccttgctagaagcttacggtcgaaggtctccagccatcagaagaagcacgtggagcgctgcgtccgtgttgtggttattcatccagcatgtgttgagtaagggttgcacctgtgcctggcattatgcattgagcggggagatgggggttggcacgcacagtggggtgttctaagtacactgagggctcgggtgccctggctcatagagcagggagggaggcaggagcagggaaggtgtctcagaagtgccatctttttttttttttttttgggaagtggaatcttgttctatcgcctggtctggagtgcaatggcactatctcaactcactgcagcctccgcctcccaggttcaagcgattctcatgcctcagtccccgagtagctgggaccacaggcgcacaccaccacacccggcaaatattttgtatttttagtagaggcggagttttgccatgttggccaggctggtcttaaactcctggcctcaagtgatctgctcacctcggcctcctaaggtgttgggattacaggcatgagccactgcgcccggtctagaagtgccatcctaactgaacctgaaagatgaaagttctccagatgaacctgaaagttctccaaatgaaaaggtgggagggggtgacagggttaggcccagagcctctggtgacacagggtgggcatcattggtcactttttcctcgagggaggggcgtcacacgggtgatagggtgggagctataaccatgttgatagtgccgcctctgcccatctggcctggcatgccctgagccctctgtcccacctgtggaactcataagccctgacagcccactcactcctgattcattatccacacccctgtgcttccgctgtgcctggagcaagctttcttcagggggaagggaggctggaactatgttgtagttacctatttgtcctcccttccaaactgtgagttcttggaggtggaaggatgctgcaggatctggctcaggacgaaggcagttggtgaacagacacgtgtgtttttgactcacggtgatctcagacaagttcctctgtctagtcgaacttctttttttccatctgtaacactcaggagttgaataggtggtttttctgaggatacttcaactgtaaaatgtatgaacttgtgaactagctatttagttctcctcataatcaagattgtgtgtgtgtggggggttctgattagagggaggatgaagagaggtgtatggggttttttttgttttgttttctgtttgtttgtttgtttttgagatggagtctcactctgtcacccaggctggagtgcagtggcacgatttcggttcactgcaacctctgcctcctgggttcaagtgattctcctgcctcagcctcctgagtaactgggattacaggcatgcaccaccatgcccagctaatttttgtatttttaatagagatggggttttcgccatgttggccaggctggtctcgaactcctgacctcaggtgatccacctgcctcggcctcccaaagtgctgggattataggcatgagccaccacacctggcaggtttctttgaaaaagtttgtgtttcggcaaacaccataaaccccctgggggacagccttggggagtcacctggcaccctagcccagcctccctcccttgggtcctgcagtgaaggcttagtgagggtgtgcaaatgcccaggtcaccctgggactgggcaggccctctgggctaagggtaaactcatttggaatacctgttttctatcattgttttttatttgttaaatttaaagggtacaagtgcagttttgttgcgtggatatattgtatagtagtgaagtctgagctttcagtgtaaccatcacctgaatagtggacattgtacccgttaagtaatgtctcatccctcaccccctcccacccttcccagtctctccagtgtctgccattcctcactctgtccatgtgcacatgctattcagctcctgcttctaagtgagaacgtacggtatttgactttctgtgtctgagctgtgtcactgaagacaatggactccagctccatccacgttttttatcatttttacctgcactccacacccagcacaatccaggcttctttgtgggttttttgaaatttgtctttaattataaaagtagcagccagcaaattaacaaacacccatgtgcctttcattgcacagaattgaaaatcatcatactatatttgcttcaagtaatttccattagaaagaactagaatattacagtagagttaaagaccctttatttcccatcttcagtgctcttaaaagttcatttagggccaggcatggtggctcacacctataatcccagcactttgagaggcccaggtgggtggatcacctgaggtcaggagttcaagaccagcctggccaacatggcgaaaccccatctctactaaaaatacaaaaattagctgggcgtggtggtgcgcatctgtaatctcagctactcgggaggctgaggcaggagaatcgcttgaactcaggagggaggcagagcctgtatgcagtaagccgagattgcgccaccacaccccagcatgggtgacagagcaagactccgtctcaaaaaaaaaaaaaaaaaagttcattcattgtacacttagaaatagttaaaaaggtaaactttgttttgtgtgtgtgtgtatatatatatatatatatatatatatatatatatatatatatgtatttttttttgagacatatatgtgtctggtttgttcgcccaggcaggagtgcagtggcatgatcaacggctcactgcagcctcaacttcctaggctcaagtgatcctcctgcctcagcctcccgagtagctaggattacaggcacacaccaccatgcccagctaattttttttttttttttttttttttgtagagacagggttttgctatgttgcccaggctggtctcaaactcctgagctcaagcgatccacctgcctcacctcccaaagtgctgggattacaagtgtaagccaccacacctgacctgttttgtatattttaccacaataaaaagcctttaaaaccccaagcagacagttcattttcattcaggcccaactcagaatctgatcacagcggggtttcccccctttctagcgagtagctgaagaactgttttctctccttgatggtataactgtctctgtgggtgttgctcccctgccgctccagtggttttgtttttgtttttgtttttttgagacggagtcttgcgatctcagctcactgcgacctctgcctcctgggttcaggcgattcttctccctcagccttccatgtagctgggacttacaggcacctgccaccacgcccggctcatttttgtatttttagtagagacggagtttcaccatgttggccaggttgggctcgaactccagacctcaggtgatccacctgcctcagcctcccacagtgctgggattacaggtgagagccactgcacccagccggcccctcagtcttttccttctcaatcagtggcaccaccatcttcccaggctttggacatggtccctgactcacccttgcccctcacccccacactaatccacctgcgagctctgttgcttcaccacctagaccagccccaaatcctcaactgcccccaccctgggccacacctggaccactgctagaggcctctcatgggccctccctgtttttctcttgcactccccgggctttctggcacaagatgccccagaagcagaatcacatatctctcctgggagccaatctagtgtgtttactgcccctggagtgttattgttggccttagaatatgtcccactacaggtttgcagagcactgtagtcaaaagtcatttgaaataaatcttttctctgtggtatattgtcaatttgatatagaattaaatttgtttcttttcttttttcttttctttttttttttttttaagagacagggtcttggccaggcgtggtgtctcatgcctgtaatcccggcactttgggaagccaaggtgggtggatcgcctgaggtcaggaattcaagaccaacctggccagcatggtgaaaccccgtctctgctaaaaatacaaaaattagccgggcgtgatggcaggtacctgtaatcccagctactcgggaagctgaggcaggagaaggcttgaactcaggagtcggaggttgcagtgagccaagatcacgccatggcactctagcaagactctgtctcaaaaaaaaaaaaagagagagagagagacagggtcttgctctgtcactcaggctggagtgcagtgatgtagtcatggctcactgcagcctcatactcctgacctcaggtgatcgacccgcctcggcctcccaaagtgctgggatcgtaggctgaagccaccatgcctggcccgaactcatttgtttttatttgcattaagtgtaataaggttttgttacttttagtttgaattttattttgggtaatataaacatttacatgattcagaagtcagaattacactgaggcatgttcagctaggcctcactcctgtgcctgtacccttacctttttccccctaccccatgcagggaatcaatttcattagttcctggtgtgtccttccttaatacccccccttctttctttggtagaatgcagtagatatgtttgcgctttgctccctttgcttcacagtggatcctggaaatgactccatcgcagttcttagagctcttgtttagtccctttggatctgcacagtactccagtgtgtgggcgcaccataagtttattcagcaagtgccctggtgatagggatcgggggtattggaagcctttggctggtaaaaataatgttgtagcaaataacatcatgcatatgttctttgagatttctggaggtgtctctttagcatagatttctagaaggcattccttacgtcacgtttaggtttatagtttgacctcatggtgattaaggtatttgggaaatgcaaatgagagtttcgaagaagccagatctttcccattagttcactgtttttctctgacattaggaccgtccgggttctagggagcagccctggcgttaggcagtgccatgatggattgtgtagaagtagcgattcccatctgtctgctttcttggcccactctgctggtggctccccttccctccctcctttatggggagctggggagctgcctaggggtccattctcaaaggctgatctctggtgggcaacaggccacacctagctttccagggttcttcgtcatttcccattgagagctgtaagactcagagacatgaaaaggaagctctggctgggcacggtggctcacgcctgtaatcccagcactttgggaggctgaggcgggtcgatcacctgaggtcaggagttcgagaccagcctgcccaacatggtgaaaccccgtctccactaaacatacaaaaattagcctggcgtggtagcacacgcctgtgatcccagctactccggaggctgaggcaggagaataacttgaacccggcaggcggaggttgcgatgagccgatattatgccatcggcaacagagcgagactccatctcaaaaaaaaaacaaaaaacaaaacaaggcgagctctgtgctgggacagattagggacccctctttacagcaagaaagactgctctgtgggttgtaggatgcctttgtgtatgcagtggctctaggtgactctggcagccacactctgggccctaaacttctggaggaagatacaggatagggaggaactcaggggtgagtcatggtggggacaagacattccctcactctaagaccttgtcactagattggaacatctcttgcctccctacacctgacctgatggttctggagagatacgtccttgcagcttctgagtcccagcactaagcagcctttggtaacttccctacatcatttgagttctggtttcctaaggatgcttgccagtgagtgccatggtgccctcattgcacagtctgtgcagtgtagacaagaggggaagtctcttggggtagaccagccgcaaggcggtgactagcactgatgtgaaccacatgggacaggggagttgtggggctgagaacacggagggtgggagtagtcatgctcttttccagaatgaactgctaacgaagggactcgcaggtggctgctgcttctttccaagctgcccctgttgttgcagaggctctggagtcctaggaggtttcacggtggcatactcgacagagtactagagcatcatggccagatagtgatgctggggtgtggggcctcacggtggccatttctgacgagaccccaccgggccaaagtgatgtgtagagaaggagctgcttcggtcaccagaaaagaacggggaagcctcccacactagaataggtagggtgctcttctccaccggcaggaaggggatgtatggctctgcctggaccacacctttttccttgctcttccctccgcatctgctgtggccgaggccattcctcatcagggaacatgtgttagaggctcacgccacctgggaccacttgtcttatcacccccaggaccctaggcggtagtttcctgtggcctgagttagctgatatttatatagtgccattgtgccttttctcctgtgatgctcacagtaaggatgcctagatggggttacctgttgtcaagataaggaaactgaagcacagaatgctgaggtcatttgctgggttcatgtttggaaagcggcaaaggatttcagtgcaggttggctggctccaaacctgtgtgtgctttccatgacactgtactgtgtgcctcattgagcctcattctagaaaaccaaaaacacacccaaggcccggccttcacaaaggagacccctcccccatttggctccctttccagcagtcgacggcctcttgtcagccatcgagcccagagtcccttgaagtgcgactcatgctggggtggtatgctcaggagccgcagtgtttccgctcagaggaaagggctctgattctcctgcagtgctaggagacttgtgggtggccacagtgcaggtcaggcacaccggccagcaccacccacagcccaaattcctaaagaaatatttgggtcccagcttggcccgagtctctgttgtcctggggaaggacatcaagatctgagtgtatgatggcctggggccttgcatgtggtgggggtccaagcctgcctctgctcacttgttctgcagactggcatgttctctgtgatacttacatacttgtttaacacttcagggaagaaaagtcagaagaccaggacctccagggcctcaaggacaaacccctcaagtttaaaaaggtgaagaaagataagaaagaagagaaagagggcaagcatgagcccgtgcagccatcagcccaccactctgctgagcccgcagaggcaggcaaagcagagacatcagaagggtcaggctccgccccggctgtgccggaagcttctgcctcccccaaacagcggcgctccatcatccgtgaccggggacccatgtatgatgaccccaccctgcctgaaggctggacacggaagcttaagcaaaggaaatctggccgctctgctgggaagtatgatgtgtatttgatcaagtaagtaagagcaactcctatctctacagggcagggagggcagggacaaggatccctcatggagcaggaaaatgtatgtgcccagggtggggtcggggggaacataaacaatgaacactgagaccaggtgtgcttgaaatgaccgtgtacagaggtcgctgccctgagtgggaagttctcaaggtagcaggccctctatcctctccacacctcaagtctttatctggggatggaatagctgcggaagcagaggaacttgcagagctaggggttcagaggggtgaagaagcatgtttcagttctgccttttaaatgatcccaaaaaggttagcagttttcaaatgacatttgcagacagcctcatttaattccatgagaagggtgagcaaaggattatcttgttgaaactgattcctggagagactgagcaccgtacctgagttcaaacttgggaatgttctagatggtgactcaggcccaggcaccaaccagcagaatgggcctcagcctgacaacccttctgtaccaggcctgactctttggttgctgaactttggagaggcctgggggggtcagcggcaggcagacgagtgagtggctttggtgacaggtcctcaggggcagccaggcagtgtgactctcgttcaatagtaacgtttgtcagagcgttgtcaccaccatccgctctgccctatctctgacattgctatggagagcctctaattgttccttgtgtctttctgtttgtccccacagtccccagggaaaagcctttcgctctaaagtggagttgattgcgtacttcgaaaaggtaggcgacacatccctggaccctaatgattttgacttcacggtaactgggagagggagcccctcccggcgagagcagaaaccacctaagaagcccaaatctcccaaagctccaggaactggcagaggccggggacgccccaaagggagcggcaccacgagacccaaggcggccacgtcagagggtgtgcaggtgaaaagggtcctggagaaaagtcctgggaagctccttgtcaagatgccttttcaaacttcgccagggggcaaggctgaggggggtggggccaccacatccacccaggtcatggtgatcaaacgccccggcaggaagcgaaaagctgaggccgaccctcaggccattcccaagaaacggggccgaaagccggggagtgtggtggcagccgctgccgccgaggccaaaaagaaagccgtgaaggagtcttctatccgatctgtgcaggagaccgtactccccatcaagaagcgcaagacccgggagacggtcagcatcgaggtcaaggaagtggtgaagcccctgctggtgtccaccctcggtga

SEQ ID NO: 8 - DNA, 1374 bp, Homo sapiens
atttgatcaagtaagtaagagcaactcctatctctacagggcagggagggcagggacaaggatccctcatggagcaggaaaatgtatgtgcccagggtggggtcggggggaacataaacaatgaacactgagaccaggtgtgcttgaaatgaccgtgtacagaggtcgctgccctgagtgggaagttctcaaggtagcaggccctctatcctctccacacctcaagtctttatctggggatggaatagctgcggaagcagaggaacttgcagagctaggggttcagaggggtgaagaagcatgtttcagttctgccttttaaatgatcccaaaaaggttagcagttttcaaatgacatttgcagacagcctcatttaattccatgagaagggtgagcaaaggattatcttgttgaaactgattcctggagagactgagcaccgtacctgagttcaaacttgggaatgttctagatggtgactcaggcccaggcaccaaccagcagaatgggcctcagcctgacaacccttctgtaccaggcctgactctttggttgctgaactttggagaggcctgggggggtcagcggcaggcagacgagtgagtggctttggtgacaggtcctcaggggcagccaggcagtgtgactctcgttcaatagtaacgtttgtcagagcgttgtcaccaccatccgctctgccctatctctgacattgctatggagagcctctaattgttccttgtgtctttctgtttgtccccacagtccccagggaaaagcctttcgctctaaagtggagttgattgcgtacttcgaaaaggtaggcgacacatccctggaccctaatgattttgacttcacggtaactgggagagggagcccctcccggcgagagcagaaaccacctaagaagcccaaatctcccaaagctccaggaactggcagaggccggggacgccccaaagggagcggcaccacgagacccaaggcggccacgtcagagggtgtgcaggtgaaaagggtcctggagaaaagtcctgggaagctccttgtcaagatgccttttcaaacttcgccagggggcaaggctgaggggggtggggccaccacatccacccaggtcatggtgatcaaacgccccggcaggaagcgaaaagctgaggccgaccctcaggccattcccaagaaacggggccgaaagccggggagtgtggtggcagccgctgccgccgaggccaaaaagaaagccgtgaaggagtcttctatccgatctgtgcaggagaccgtactccccatcaagaagcgcaagacccgggagacggtcagcatcgaggtcaaggaagtggtgaagcccctgctggtgtccaccctcg

SEQ ID NO: 9 - DNA, 29090 bp, Homo sapiens
tgctgttggctccttagcttctccatggctaacaggaacaatattgtttatgagataatcaaagccatagtcatgagttagaaggtacatataaaggcaaatatgtggagattgagttactttggcgggggcggaggggtgtgtagttatctgaaaacatggaacaaatcaatgagagtctaaatagcacccacatatttgcccctcttttaaaacatacctcctttatgagtgtagaatttaacagcacagtttcccagtgcagctttgcgaaacaagagaaatgaattttaaaggctgtcaggtgcctttgcaatctgtggcttagtatttgtgtaacaacatttgtgttttgccaacagatgtactgcttaaagtacccatgagaatggcctctgtggttttctactttctcggatggaaccttaggaactgattattgagaagaggctgatactgcccacctcagctcccaggcaggcttcagggccttggttactactcctttgggccctcactgacccttgcagacgtcttttgcaacctctgtagccagaagagacaactgctttctggcatgttgctctttccctaatggctttatgagcttcttgaacaccaaagcatgtgtgacttcctcacgccttcccctgtatagtatagcacccctaactgtatgtgtaaggagaaggagtgagcaattgatggcgtccccctggatctccaagggaatgggaaggggcagggtttctggattcagtcatgtggaatctggtcgttggtgtctaaatgtgcctgttacttgtgcccaatgtccaggttcaccaggaggcttagcctgctcatttccctgctagtagctatattttgggagagcattttttatgctctaattgaactttgtgggtctcagcaatttgaacaatgttttgtttttcttctggtcaggttacaaaggaaagaaaaggaatctggtgttgtaggaggtggtgtgttgtgtaattacttgttttttttttttaagtttttttatatttttgcaacaaggcaagttttctttgaataaataatgctgggagcttatcacatagaaggcatatgtgttgtactcagtacattctgaattatctgggtttatttttatctcttgaattcacttataaacaattcaaaggctgcttttttagctaacagaaataggaagagaatctcagaatctgttttgtcattttttcaatgggttgagttatagtgattatgctaactcggtggaaaagcagtgtagtgagtaaaccccacatacggcatatcatgaacattttgttgcttttttggcttctgaccatcttcatacctttttttgtgttaaaagtctccccattgtgtatatcttagtaagaggcaggtggaccctagtttctacctaagaaaacctgaagatggggttgggggcctgtggtgtacttccttctcatgctgtccatgaccactgcagtggctttgtaaggatccaggacccagggcccctcagtgggtgtcttccatttctcaagattgcctcttggttgtgagatgacggttgctgctctagtcattgcatccactcctccaggtaggaagaaagaggtcataggggaaaggcaaaatggcacttgacatcttaacttctaggcccattcaatatttccatttccatcttcacacccatcatcttgtcctagggaacaaacagcaccagcagctcagtagctataacagcaattattatttctcacacatgggtctgggtcagctgcaagatgggattcagatctgttctcaagcctgtcgttccaggacccaggagggagaagcagctgccaggggaagtctcttcgtaggcggaggtcaggagtccaagaggagtgagcagagtcacagaagcctcttaaagcctcttcttcccccatcccatcaacacgtgagcaagcccagagtcagtgggtgggaggtgtgctccgcccatagtcagtagaacaagagcaagcttgaaagagaacgatgaacaggagtgcactcggccactgtctccttagccataacgtagtcccatggtctgctgggaagcggggaataactctccttagctgagcgcagggtctcattagtaaggcagatggagaacatggatgttgggggacaactggcagtgcctgccacaggggaatggatatattccctccccttgctctctggaaactaggggatggcgatgaagcctaggtttggccaaacccattctgccttcagggactttgactcttgagggacagtgagggattagtcatggtggtggcagttgagtcacaaaaccagcagtggtggctaatgtccagtgatgacatgcaacagtgcccagggtgggtgtcccaaccagcaggtccctgcagtataaccttggctgtgtttgcagtggtgcagcctctattcctgctgcttttctgagcctagttctctagttctctctccatttccagatctgctgcccaagaactcctttgtgattgaatttaaccagagttgatttctgttgcttgaaactcaggaccttgatgcagtgtgcagggtctgggcaaggtaaaaacacactttcatgatttcgcctcaagtatagtagatgagcttaggctttttgagccaggtagccttgggattaattctcagctcttgcacctagcaggtgacctcagcaatcaagtcacttgccctccttgagcctcagtgttgccctcagttaaacattgctctcgtgtgttgctgagcattcagtgagattgtatataaagtgatcattgtgaaggtattgggacataatttgggaaagcgtcctggtctaagcttttgattggctctccatcatttgggtaatgggatagtgatttaggagtatcatagcagctcaaggggcccttctggaaagggtatgaggaaggtcagggacaagtctgaaatgaatcatcctaggcttaatgcctgtgactgggcagtgggtacaattatctcaggctagtcagtagtcatttattgtgagaatacatgggcagattttttaatttccttctcagtctagacttgaatgcaaacagttcttattgctaacttaccactagtcaccactaatgaacaaagactatgaacaggaaattcataaaagaagagatacagatggccaatgaagataggaaaagagttctgcctgctggtaatcaaagagatgcaaacgagaacaaaaatgatgccttttcacctaccaaatttgtcaagattaaaaagaaagcaaagagccagcgtcagctgatgttcatacctgcacctgctcggtagcttgctaatgttctgcctgctccacacgccaggccagcctccacggcgcagccaggtgaggcctttccttgtatacaggcacgtttggattcactgttgcataagtgagacatgtgcatgcttcacaattcaggaagtgcaaactccagagtgatgcaaggtctgagtgtccctgctgccctggtctcccagctgcctaggcctctcttcagggaacggctgcatccagggtcttgtctgtgtcttttgaggtgttctatgtacacgcagacacatctaaacctatttttattttccctgcacctgcttgggctactgtaagctgttaaatttttttttctaggaatttgtccattttgtctgactagcataaagttgttcatgttatagtttatacatttgcaacatctgtaattatgtctgctttttcattcctagtgtttgttgtttacttgtaccttctcccgtttttccttgtcttggtaaaagctcattaggttcattggtcttacaagaagcagacatgtaggcattattgccctgtattactctgtgtctcttttctagttcattaaattctgcttttgcttttatctttattattttttctatggtcttagagtacattctctgtgttttgttgttgttgttgttgttgtttgttttttgttttgagagagagagtcttgctctgtcgcccaggctggagtgcagtagtgcaatctcagctcactgcaacctccacctcctgggttcaagtgattctcgtgcctcaacctcccgagtagctgagatttacaggcatttgccccacacccggcaaattttttgtatttttagtagagatggggttttggcatgttgaccaggcgggtctcgaactgctgacgccaggtgctccacccgccttggcctcccaaagtgctgggattacaggcatgagccaccacgcctggccctaacttcttaagttataaatttggttcattgatttttctacccttttttcaaatgtaaacatttaaggctaaccctctggaactacttcaactgtatctagcaagttctgatagtattgtcactttaagttagcccaaagatattttaaattttctttgtttcttcctttgactcacatattattttaaaatgtgtttttcaatttccaagcacatggctttgggtttgttttttttttttcctagttgctctagaaaaaaaaattgactgcatgaggtggctcatgcctgtaatcccagcactttgggaggccgaggcgggcagatcacctgaggtcaggagttcgagaccagcctggccaacatgccaaaacctcgtctctactaaaaatacaaaattagccgggcatggtggcacacacctgtagttccagctactcgggaggctgaggcaggagaatcacttgaaccgggaggcagtggtcacagtgagccaagattgtgccagtgtactccagcctgggcaacaagagcaatactccgtctcaaaaaaaaaaaagaaaaaaagaaaaaatcaacttctaactaaatggcactgtgatcaaagaacttggtctgtgtgacaccagttcttgcagttggttgagaagtgctccatgacacattatccacaaccagtggacagaatatgtcaccaccaagcatgggtgcaggattctacatatattcattacctctgtcttatccgtttgttgtgaaagtattttctcttcttactgtcattttgtttacttgatttatcaactgatggaatacgtgttaaaacctactgtggtgatggacacatcagtttctccacagagtttggtcattttcattttattatttattttgaggccacattttcagttttagatacagtttcacattcctggtgtattgaaccctttggtattatgaagcgaccatactaatatgttatttttttttaaattattatttattttatttatttttctttcttttttttttttttgagacagggtctccctctgtcacccagtctggagtgcagtggtgcaatctcagctcactgcaacctccgcctcctgggctcaagtggtcctcccacctcagcctcctgagtagctgggattacaggcttgcaccagcgcgcctggctaagtttttgtatttttagtagagacagggttttgccatgttgcccagactggtctcaaactcctgggctcaagcagttcaccagccttggcctctaaaagtgttgggattacaggtgtgagccaccacgcccggccatcccagttttttattttcctcctttctgtgtctttatgcatcagtgaggtggagcttttgaaaatgtcagatagctagattttttttttttgagacggagttttgctcttgttgcccaggctggagtgcaatggcgtgatctcggctcactgcaacctccacctcccaggttcaaaacaattctcctgccgcagcctcctgagtagctgggactacaggcacgtgccaccacacccggctaattttgtatttttagtagagatgtggtttcaccatgttggccaggctggtctcaaactcctcacctcagctgatcacccgcctcagcctcccaaagtgttggaattacagacgtgagccaccatgcccagctgatagctagattttttttttttttttttttttgagacggagtcttgctctgtcgcccaggctggagtgcggtggcgcgatctcggctcactgcaagctccgccccccgggttcatgccattctcctgcttcagcctccagagtagctgggactacaggtgcccgccaccacgcgtggctgattttttttttttttttttttttgtatttttagtagagacggggtttcaccgtgtcagccaggatggtctcgatctcctgacctcgtgatccgcccgcctcagcctcccaaagtgctgggattacaggcgtgagccaccgcacccggcctcgagattttttaaaaaatccattgtctgtttcgtcctttaacatctatttgatttctgatgtatttagattcatttatagcatatttgtgcattctatttttccatattttctgttcttttaaattttccttctcctttcttgccttctcttagacttttaaaaaaattgtagtaaaatacacatcacctaaaatttaccatttttaaatgtacagttcagtggcattaaatacaaattggaggccaggcatggtggctcatgcctggaatcccagcactttgagaggctgaggtgggaggattgcttgaacctggaggtcgaggttgcagtgaggtgtgatcacactactgctatagcccaggcaacagagtgagaacctatctaaaaaaacaaacaaacaaacaaacaaacagattggcatcacacagtgtgtgtgctgctgtgctgtgctgttatcatttaacattaaaacataaacatcagcactgttatggactgaatgtttgtgtcccccaaaattccagtgttgaagctcaaacctccaatgtgatgttatttggagatggggtatttgagaggtggttaggtttagatgaaatcaggagggagggtgggtttcgcatgatgagattagtgtccttataacaagagacagcagagagcttgctttctccaccatgtgagtatgcaatgagaaggcagccatctccaagtcagaaagagagccctcaccaggggctgaatgtgctgacaccttgatcttggacttctagcctccagaactgtgagaaatttcagttgaataggccccccagtctgtactattttgttatagcttgagcagactaatacacccatgttatgaaaagctataaacatccctttaaaggccacctaacgcgtcgtattacctcatgcatcttctctgctgagctttccaaaagagtggcttaggctgggcctggtggctcatgcctgtaatcccagcactttgggaggccaaggcaggtggatcacctgaggtcaggagttcaagaccagcctgaccaacatggagaaatcccgtccctactaaaaatacaaaattagctgggcgtggtggcgcatgcctgtaatcccagctacttgggaggctgagccaggagaatcacttgaacctgggagatggagggtgcagtgagccgagatcgtgccattgcattccagcccggccaacaagagcgaaactccatctcaaaaaaaaagagtggctggccgggcgcagtggctcacgcctgtaatccccgcactgtgggaggccgaggtgggtggatcacgaggtcaggagttcaaaaccagcctggccgagatggtgaaaccccgtctctactaaaaatagaaaaactagccaggcgcagtggcaggcgcctgtaatcccagctacttgggtggctgaggcaggagaatcgcttgaacctggggggcggaggttgcagtgagccaagatggtgccactgcactccagcctgggtgacacagtgagaccccgtctcaaaaaaaaaaaaaaaaaaaaaaaaagtggcgtatgttcccggtctccacctctcattcgccagcccctgtgaccaaacccctgggattagatctccatcgggtccctcccctcaccctaacctcacatgcagtggttcctgagaagctgctgtttatctgatcacgggatccagcaggatctgagggctcattcactgaatctgtactacccaacaaggcaggcttgtccttacccacacttttcaggtgaaaacttaatcagattcaagcgtttatcttagtggcctcttcgtggtgtgtgatttccttcttgcagctctttactggctaaaactcttcactgggagttaaaccaggtgtggtccttgaccctcatcattttgtcccatctcctatgctgggctctgtatccttgtctccaagcagtctcgtgtgacagggaagttacctattattgtatggtcccctcttcttgtcacctctggtgtggcacttgttccatttcttgttcaatgaatgtgatttgtgaatgtgccacatctgtgggaggaaggcagttcgcagcaagagttgtagttcccttgctttgccctgagggccaggactttacactagatttttttgttgcattcctgcactcataaagtacacgtaaacttagaggtggtgtgttaaatgctagaacttaaaactgagttcagctaggctcaagtgccccacaatttttgtcccaccagacaatttcatgaatatctacagattgttccctcaatatgcctcaatattgaggcatattgatttggggagcacagacaagtcaaggttgatgtgcatccgctgaacatgatcttaagttgttgaagtaggtattattaatgaacgaacgtctattttagctccaagagcccctggtcttccagaagagactcccaatgatcttccagaagcagctgggcttcttttggtcctcccccacccaggtgcagtcccgttctccctgcctgggtgagtttgattcctctgccgtggaataggctaggctgctacctcttgagcctcttccaccaggccatccattaggtggcgacagagagcactaaaaggaactactatggaaataaaacttgttttgcttcttggggggaaaaaaaaagaaaaaggcttgtggggcgtgtgtgcattttagtcagattttactgtgcaaaacatttgagagatttctgccctctttctcccttccattcttctcaacccactgggcgccctaccacccctgtctccttcaagataaggtagatcagaagaccaaatagacaaatgccatgtccactgttttctgtcacagttgatagccataccagtcacccaagctggaaacccaacaggcccctgcccttcactgcccacatccaagggagccaccaagtcccacaaattgttcctttaactgtttgtccctcttttgtcttctgtcatcccttctaccgctgtcctggttcaatccctcatcttgctctgggactcccatgataacttatgatctttcctccacctctctatcttccacacaatccctatcatcaatctcattcccctgctttaaacccaagagtggcaccctgtgtttgagtgacatcagggcccctcatgtggctcctgcttctctttgtggccccttctgttgctgctgcttttcttatggacatagccctcagcagtccaggactgcttgtagttcctcccaggtaccatgtttcttgcactcctggcctttgtcattggctcccctgcccaagtccccttctcttctcctttccttcccctgtggccttgccttgtcgtgcttatccttgaagaccctgtcaggtatctcttccccaaagagccctgcctaaccaccgcccccctcccccccgcgacacacacacctgggttaggccctgcctctccacgcctgtgcctcctgccaagtcctcagaggtctctgatcccatgtgcctccaggcatggcatagggggactgtgacacagcctctcggcccacagacccctgattgtgggcttgctcactgccccagtcagtcctcttattgaggattccgtgccagttcctgactccagcacacacacgcatgtaggccgccctcctagtgcctggctccttccctgtctcttctgccactcattcccatggtcgtatcctggagttggtcatctctggaactccacccacggagttctaacttagctctgcctatgatgaggacttactgtcttcccagcttgcagtgtcaaccactgtttgatgcccctgggactccattggtcttccctcctcttgtgaactgtgcccatcaccagacgaacttgttttagaatttaccatcgtaactgagctcccttcagcgcatacctccttggctcctgctcagtctctgtttctccttttagccaaactctctaagagttctctccactcatgggccctcttccttgcctgctgctccttgctcagcttgctccatgaacacttgcttttccacattccatgaaataatcttaacagtcatcagtggctgtcactccttctcagccctttccttgtgtctcttctggtacctcatactctccaggtggccatctcacctcacatcttgaaccctctgggtttgggagaattctcacctcacgagttgatgggaggcctggcgacctctgattgtagtcactgcaaatgccagatgcttatttgcctagcttccctttcggtcagggcagcagttggcaaacggtatctcaagggccaagtccggcccactgcctgttttcgtaaatgaagctttaccaggacccagttccaccccgtcctttgtgcattgtccaagactgctctcctgtacaacagcaggtgggctggttgtgacagatactgtctggcccacaaggtggaaaatactatctggccccttacagaaagaaattacctgagttctacacgagggtgtaggtatgtaccctggcctctgccagtcagactcacatgctaggaggagcagggccaggcaggagagccgtgtctcctggcattggggctgcaggaaagacgagctcctaggccacagtgccagtggccagtgctgctgccttgcagggtcgcacaggcagtgctggctgtttggactggcttggcagaaggatttgaagtattgttcctagccaactggactcaaacctgttcctccaaccctctagggattctcttatcacccagtagccttttccccctagttttaaaaattgcagtaaaatacacaaaagataaaatgtactgccttaaccatttttaagtgtacaattctgtggtattgagcacatttatattgtgcaaccatcaccacatgcatcttcaatagcttttcatcagtccttgtctgcataaatcagctagagttggtttctattgattgccaccaataatcttgacagatatgtctgatcttccttctctgcactgactcctctttctctgtctcctctgctgattctttctcctcatcacaactccaaatagcagggggagggttgtttacacttatattcagcacgccctcacgcactcgcctggctcttcagacctctcccctgaactccagattcatacatccagctgccctttaggcctctagaaagctaaatacctcagtatcaaaaacatgagaaacggaagccagagtcctggatctctcgccctttcgctgtcccggtgcccatgcccttcagggatggcacctagaccagctccctgcatccctgcctagactctgcagtagtctcacgtggcagacccggaggtcactctcctctctggatgccctgcggacactccggttagcctcagctgcaagagcctcctcacccaaggtcacgccatttccaggacagcaccctggtgactgagcgaggtaagggtacaaggcccttatagggccttctctttgacttcttcccacctccctttatggatgtcagttcctgatgaacatcttacacctcaaaccgtgacccaacatctgcttctgcagagcccccctgtggcatcttgtgccctcctgccccactccctctactctatatcttcccatagttagaatgggctttttttttttttttttgagataaggtctccctttgtcacccaggctggaatgcaatggcacagtcacgactcactgcagcctcaacctcctgggctcaagcagtcctcccacctcagcctcccaagtagctgagactacaggtatgcaccaccacacctggctaatttttatattttttgtagagactggggtctccctatgttgcccgggctggtctcgaactcccaggctcaagcaatcctcccgccttggcctcccaaaatgcaggattacaggcgtgtaccagtgtgcccagcctcagatgggctctttgaaaaatgtttattagatcaggttactcccttgagaaaaaccctctcagaataaaacccgaagtccattacttgaaagcagagccagcttcatgggcctttgtaactgcccatgggcttgctggaacccaggcttggtttaatactctactctcaccatctcaaaattcttaatttttgaacaagaggccctgcattttcattttgcaccaggctccacaaattgtgtaactgggcctgcctcagcagccacatggaacatgatccctccttgcctatttgagctcattctctaccattctctcccttgctcacctggctcccactgctcttgctcttcctggaacttgccataatgttgctagagtcagagccttggctcttgctgctcctcattggctggacccctctttacttgacctgctccctcaccactcacttccttcagatctgtgttcagatttcgtcttctcagagaggcttttggcccctgtccatctctctgaatttacctctgacctctcccccaccaccactgcgctaagctgcctcagaactttgtagacattctgtctggtcttctgatgtttcccccttggaagaatcccaaggtgcctgaagaatgctttctttatccttgaagttgagtaggttgactagagtctggcttgctattgagcattctttatcaaattgtcctgggaacatggtgtattctttcagtctgcagatgtagtcgttgctgtttcaggtcagctctcttatggatctttgacagcatcttctgttccatttgttgagttctgtacttcagggacacaaattcctcatgttggattgtctttgtctctcttccaatgctattagctttgccgtaattggtttagcttttgtctttttcatctgcattcactttgtctaatttgattttcagctatgtatattctgtttctggctgtttttcaatgtatttattagtttcataatgatgtgttttggtctgcagtttgtttctctaggttggaaatttgtcttttcatcttattctgttttatcatcccatctttgaactcttttattgggaacatgttcttatgaagttgtggggaatttttttcccttccttgtgtattctcttcttggtgggagactttgcctttctcgtgccatctccctccctgggcctcttttttttcttctggccataatatgtttgcctagttaccatgtcacttcttttcgtcttggctcaggcttggatggctctgcatagtcgttctgtttgctttgagacagtggaggaattcttggctctctcttcccagtttcttggcatcttctcttgctgttttcccctctgagctatcgcgtgcaggcttgttatcttgtatccggagagaatttgcacgctggagggagctgcagccatgtagtcttcagccctatctggattcttctctttgttctaagaactgtgttggatgtcttactaaggctcactctagctgcacgagggatgtgtgtgccatttccatggggatagggggcacctcagtctctgggtggttccataatctgtgtatacctaagagcagttgcttcccacagagctgggctggctcactgggcactttgccatttctcctgcacctcccagctggagtttctgggtctaaaaggaaaaagtgaaggactcccacttggttgcttctctccagcttactgactgcaaattcccagggcgttgcccgctccctagggtggtttctgggggacggggcaggagcctggctttgctgctgctttgtcctctggagtcttttctcagactgctttgaattacacccctttcctttgtgtgctgaaatcttcccttcacactctccttccctgcctttcttttgtgtcttatcttactaggactggaagagggcagttgtgcaggaggtctgcatctaattccctaatccatgtgagagtgctcctgttgtgtgctttgtgacatgatggtgagaaatactccctagagcagtggctaccagaaggaagccatccccccccctgcacacacacacacacacacacacacacacacacacacacacacacactccttctggctgtcctcagatgcctattctaggtaaatgtcagattccaaagaaaatccagttgagatcttttttctttttttgagacgagagtcttgctgtgttgcccaggctggagtgcagtggcacaatctcggctcactgtaacctccgcctcctgggttcaagcgattctcctgcctcagcctcccaagtagctgggactacaggcgcgcaccaccacaccaggctaaaatttttttgtatttttagtagagacagggtttcactgtgttggccaggctggtctcgaactcctgacctcgtgttctgcccgcctcagcctcccagagtgctgggattacaggcttgagccatcgcgcccggcctccagttgggatcttgactggaatgactggtgttcaatcattatagtttccacctaatttgtatttgtacacaggacagttactaatttgttggtacttgtttgatccccagtccctagagttgtttatggggtggagcttcagtccctgctgcttcccctgtggcagcagctggagtcagggtggggacccagggtgctgctggcagattcttgagacaggtagaatctcctctatattggtgtctctctctgtcccagcagtgcccaggaaaacctggccagcctgtcactgacctctccacctagggcactggtggttcaggtccttctatttgccaccggcaaaccgtacttctgccagtctggctcttaggcccagtttctctgatcttgcagattttcttgggctctgctacggaatcctcatacctccggcaggtccctcctttgcccatgtgtttaactgtggtggaatcgtgtgagagctgcttctctcgcatggatcccagccacaccacattctacagcggttcctctgaaggcattgatagagatatttcctcctgttttgcatttcgttggtcatttcagtagaatcagggtgaaataaacatgggggctcagatgtcagcattacgaaccaagtacgtcaggcaggctgatgtggactgacctacactagtgagacgcaagatgacgaaaacaagggcactcactccaagttactgatgagatgtttggatcaaatgagccagtccttaagcagagttctctagtaaaagagatctcctttctgccctttcttgttccccaaaatgtgttgccttcatggtgaaaatttattttggcagattttctcttctttgataaaagcagccaacactttgttaaaagtctgtgaaacttatttacatgaagtatgtaaaggtaagaaaaaaacattatcaacaagaaatggagaaagccagcagctgaggacagaaaagtcatgcacagtgtcagtgtctatggaaacaggccacttggaccttgaggactaggtatttggaattggaggtgagcttggcctggtgagtctctaaccacttgtgtgtaggatcagtgtgagaaccctgctagaatatagtggcagagatgcaaggggaaatcattggagaagttaccagggaatgatgagctaatctgaaaaaaatacatgtttctaagttgggcgtggtagctcatctgtagtcccagctacttgagagcctgaggcaggaggatcgcttgagcccagcctgggcagcacagcgagaccctatctccctaaaaaaaactttttcgttgtttagttttgggatttttttttttcctggtcttttttccccctttttgtgaataacgggatctcactatgttgcccaggcagatctcgaactcctgggcccaagcaatcctcctgcctctgccttcctaagattacaggtatgagccactgtgttaagcaaaaaaacttttttaaatgaaaatcattttttaaaagacaggctttccaggggagggtattattccacttatatgaagtgtcaacagtaggcagatttgtggagacaaatagattagtggttaccaggggctgagaggagtgggagtggggagcaactgcttaatgggtaaagggttgtctttggaactagagagtagtgatggtcgcatgacattgtgaatgtactaaatgctattaatgataaattttatgttatgtgtattttaccacaattaaaaaaaaaagatcaaatgtcctcagaatagccaacaaccttccacttggctaaatgcctactcattaaacttcttgaactaaattcctttctgattgtcatggttattgtgtcctgggcttcagagtttcacattcaggttggcttggtccagtctgtcatgtatcactataggtccccacattggcctcttcctcagacggacagcccatctatctgccggggctctgtgccacagccagatagacttgctctgagacagctgtgtgggctctgagcactggccaggcatcacaaaacctatctttatgatttagaataattggtggtcagctgctgttttaatgttgttgttttttttaatttagatataattcacataccatgaaatttactcatttaaagtgtacaattcattcttcagtataattcataggctcacagaaaaaattgtttaaaaataaaatgtgcaattcagtgtcttttagtacattcacagagttgtgcaaccatcgcctctgtgtcattccagaacactttcagcacccaaaagaaaccccagacacaggagcagtcacctcttattacccgcagcccctggcaacaactcatccacttcctgtctctatggatttgcctattctggacatttcctataaatggaattatgcactatttggccttttgtgtctggcctctttcactgagcgtaatgtcctcaaggttcatctgcattgtagcatgtgtcagaatttctttcctttttgaggctgaatgatattatatcctatagataatgaggttttgattatccacccatcccttgggaatgcatatttgggttgcccccaccatttggctgttgtaaactgtgctgccatgaacactggtgtacggatatctgtttggttactggttttggttttttgtttgtttgttttggttttttgagacaaggtcttgctctgtcgcccaggctggattacagtggcacgatctctgctcactgcaacctccacctcccaggttcaagcaattctcctgcctcagtctcctgagtagctgggactacaggtagcactcaccaccatgcccggctaaatttttttgtatttttagtagagacaaggtttcgccatattggccaggctggtctcaaactcctgacctcaggtgatccacccacctcagcctcccaaagtgctgggattacagacgtgagccaccgcacccggcatagttgtggctttttgagagtgtatggctaggagtaaaattgccaggtcatatggtaactccatgtttaacatttgagaaactgccaaactgttctccacagcaggaattttttaacctgtatgtggtgggcttgtgtttcggttttcattttacacatctataaagatgagatttgctgtatggcactggttgcctgtatttggggagggttctgcttttggttggcaagaactgcattttatttaagcttagcaaaacataactggtttctcgcatcttctcaaaagtggaggattaagaaatggactgcgaattcagagcagggcagctgaacctcaggctccacccttgtagccttcaagctgaacctcattctctcttgctccctggagaccactgagacactctgcctgtgccagtttgatttctcacatttttaaagggccaaagcttgtgtctcaaagtgctatagcctttattgattcatgcagagaagcctccttgattccgtaattctgcagctaatactggaagtagaaagaattggaaacaccatctggatgacactttagggtggaagcagccagtacaagggggggctcattatttcctctggtcccagactgttcacctggagctgtagccaccaccctgcccttaggttaactgcctcgagtggtagtttagctctttgtgctgtgccgagggataactggaagtgaaaggtgctgagaaatgccatctcctgaaagtggcgagcatgagtgaatttacgaaaggttgggatattgctggggctctggaagtttctctggagctcactccaggggacagggagggggctggattccaattcaagtgaaaaatacctttcatctgccttgttcacctggcttttttgcctttttgtaaaatctgaaaacctcagggattgagtagtctttccttaactgcagttgcctgtctggccacacctgccagctgttgcttgtacccctgtaatttgcacggccttccgggcctttctcacaagatcactgcaggtcacattcatgaggaaaatgcaggcagttcctgccatcagacccctcaggatgtcatggtttggcctgaaaacaagattcctgcaactctaattttcctttgctagatcaaatgaaggatttgatctaatgtttgcattctagcagcaaaatcattgaatattttatttcttaagagccttacttcatattttgtaggtattttaagattttgtaaaggcctttctgcttcaacgtgtgatgtgtgcattcttagaaaaagatcttgtgttctgtaaatcacacaataaaaacatgagttcgtgcaggaaaaactggggcggggtggatcactccaaacttgtgtggtgtggtaactggagctcactgatgaaaccatgaacagttctggctgaaagaaccccacagtacactgaggtctgttggcatcgccgccagcaccgccccggtccctttgtgcgcgccaccacacctggctaattttttatttttagtagagagggggtttcaccatgttggtcaggatggcctcgaactgacctcgtgatccgcccacctcagcctcccaaagtgctgggattacaggtgtgagcctccgtgcccagccttcagctttttttcttaatgtctttgtgtaatatgaaggcattctctttaattgttaaaaagcttgcctaccactgcttcaaaatattactgtcagttggcatagcttctgattatattgatgtcatctcccttcttttaaacatgttaccatattggcactgtatttcccctagcccattgatcacttgagagttagtcatagtcctcgtgctgtttcactcctaaacgtttaagcatgcctttcctaagagcagacagtacagttaagacactcaggaagtttagcaatgagctaacacagaaccttacatttctccacataccccataaatgccttttttagagcctttgagcctggaatgcagagtccaggactgtgtgttgtattcgattgtgtcatcccttcagtctcctttatcagaaatgttcccccacccccttgttttctctcatcatcttgagtccagaccgtggttgcatggcacgccctctctggactcttcctgctgtctcctcacggtaagcttcagtctcctactcgtgatgctggttcatctcagcagcactgaggggcctgagctcagtttggtcgtgtgttaaggtggtgcctgccagatttctccacagaaaagggccccgtacttttatttgctcttcagcctgtgtattccttcctttcttgccagcttgtgggtggcttctctagcagcttctgtaagatactcagtttggcagttgtagttgtttcagcaggagaggtgtctgcatacctgaccaccacatggctagaagtcgatccatcctctggcgtaaccatcctccatgctactgtccctggggcactgaggccctcctcagtgacttcctccacctcatcttccgccatctccaagccaccagtgtccaacggactactgatatgtcccaaactcatcatttgtttattcaccaattcagagcccacctttttttcagcactgagctagcctctccttgctagaagcttacggtcgaaggtctccagccatcagaagaagcacgtggagcgctgcgtccgtgttgtggttattcatccagcatgtgttgagtaagggttgcacctgtgcctggcattatgcattgagcggggagatgggggttggcacgcacagtggggtgttctaagtacactgagggctcgggtgccctggctcatagagcagggagggaggcaggagcagggaaggtgtctcagaagtgccatctttttttttttttttttgggaagtggaatcttgttctatcgcctggtctggagtgcaatggcactatctcaactcactgcagcctccgcctcccaggttcaagcgattctcatgcctcagtccccgagtagctgggaccacaggcgcacaccaccacacccggcaaatattttgtatttttagtagaggcggagttttgccatgttggccaggctggtcttaaactcctggcctcaagtgatctgctcacctcggcctcctaaggtgttgggattacaggcatgagccactgcgcccggtctagaagtgccatcctaactgaacctgaaagatgaaagttctccagatgaacctgaaagttctccaaatgaaaaggtgggagggggtgacagggttaggcccagagcctctggtgacacagggtgggcatcattggtcactttttcctcgagggaggggcgtcacacgggtgatagggtgggagctataaccatgttgatagtgccgcctctgcccatctggcctggcatgccctgagccctctgtcccacctgtggaactcataagccctgacagcccactcactcctgattcattatccacacccctgtgcttccgctgtgcctggagcaagctttcttcagggggaagggaggctggaactatgttgtagttacctatttgtcctcccttccaaactgtgagttcttggaggtggaaggatgctgcaggatctggctcaggacgaaggcagttggtgaacagacacgtgtgtttttgactcacggtgatctcagacaagttcctctgtctagtcgaacttctttttttccatctgtaacactcaggagttgaataggtggtttttctgaggatacttcaactgtaaaatgtatgaacttgtgaactagctatttagttctcctcataatcaagattgtgtgtgtgtggggggttctgattagagggaggatgaagagaggtgtatggggttttttttgttttgttttctgtttgtttgtttgtttttgagatggagtctcactctgtcacccaggctggagtgcagtggcacgatttcggttcactgcaacctctgcctcctgggttcaagtgattctcctgcctcagcctcctgagtaactgggattacaggcatgcaccaccatgcccagctaatttttgtatttttaatagagatggggttttcgccatgttggccaggctggtctcgaactcctgacctcaggtgatccacctgcctcggcctcccaaagtgctgggattataggcatgagccaccacacctggcaggtttctttgaaaaagtttgtgtttcggcaaacaccataaaccccctgggggacagccttggggagtcacctggcaccctagcccagcctccctcccttgggtcctgcagtgaaggcttagtgagggtgtgcaaatgcccaggtcaccctgggactgggcaggccctctgggctaagggtaaactcatttggaatacctgttttctatcattgttttttatttgttaaatttaaagggtacaagtgcagttttgttgcgtggatatattgtatagtagtgaagtctgagctttcagtgtaaccatcacctgaatagtggacattgtacccgttaagtaatgtctcatccctcaccccctcccacccttcccagtctctccagtgtctgccattcctcactctgtccatgtgcacatgctattcagctcctgcttctaagtgagaacgtacggtatttgactttctgtgtctgagctgtgtcactgaagacaatggactccagctccatccacgttttttatcatttttacctgcactccacacccagcacaatccaggcttctttgtgggttttttgaaatttgtctttaattataaaagtagcagccagcaaattaacaaacacccatgtgcctttcattgcacagaattgaaaatcatcatactatatttgcttcaagtaatttccattagaaagaactagaatattacagtagagttaaagaccctttatttcccatcttcagtgctcttaaaagttcatttagggccaggcatggtggctcacacctataatcccagcactttgagaggcccaggtgggtggatcacctgaggtcaggagttcaagaccagcctggccaacatggcgaaaccccatctctactaaaaatacaaaaattagctgggcgtggtggtgcgcatctgtaatctcagctactcgggaggctgaggcaggagaatcgcttgaactcaggagggaggcagagcctgtatgcagtaagccgagattgcgccaccacaccccagcatgggtgacagagcaagactccgtctcaaaaaaaaaaaaaaaaaagttcattcattgtacacttagaaatagttaaaaaggtaaactttgttttgtgtgtgtgtgtatatatatatatatatatatatatatatatatatatatatatgtatttttttttgagacatatatgtgtctggtttgttcgcccaggcaggagtgcagtggcatgatcaacggctcactgcagcctcaacttcctaggctcaagtgatcctcctgcctcagcctcccgagtagctaggattacaggcacacaccaccatgcccagctaattttttttttttttttttttttttgtagagacagggttttgctatgttgcccaggctggtctcaaactcctgagctcaagcgatccacctgcctcacctcccaaagtgctgggattacaagtgtaagccaccacacctgacctgttttgtatattttaccacaataaaaagcctttaaaaccccaagcagacagttcattttcattcaggcccaactcagaatctgatcacagcggggtttcccccctttctagcgagtagctgaagaactgttttctctccttgatggtataactgtctctgtgggtgttgctcccctgccgctccagtggttttgtttttgtttttgtttttttgagacggagtcttgcgatctcagctcactgcgacctctgcctcctgggttcaggcgattcttctccctcagccttccatgtagctgggacttacaggcacctgccaccacgcccggctcatttttgtatttttagtagagacggagtttcaccatgttggccaggttgggctcgaactccagacctcaggtgatccacctgcctcagcctcccacagtgctgggattacaggtgagagccactgcacccagccggcccctcagtcttttccttctcaatcagtggcaccaccatcttcccaggctttggacatggtccctgactcacccttgcccctcacccccacactaatccacctgcgagctctgttgcttcaccacctagaccagccccaaatcctcaactgcccccaccctgggccacacctggaccactgctagaggcctctcatgggccctccctgtttttctcttgcactccccgggctttctggcacaagatgccccagaagcagaatcacatatctctcctgggagccaatctagtgtgtttactgcccctggagtgttattgttggccttagaatatgtcccactacaggtttgcagagcactgtagtcaaaagtcatttgaaataaatcttttctctgtggtatattgtcaatttgatatagaattaaatttgtttcttttcttttttcttttctttttttttttttttaagagacagggtcttggccaggcgtggtgtctcatgcctgtaatcccggcactttgggaagccaaggtgggtggatcgcctgaggtcaggaattcaagaccaacctggccagcatggtgaaaccccgtctctgctaaaaatacaaaaattagccgggcgtgatggcaggtacctgtaatcccagctactcgggaagctgaggcaggagaaggcttgaactcaggagtcggaggttgcagtgagccaagatcacgccatggcactctagcaagactctgtctcaaaaaaaaaaaaagagagagagagagacagggtcttgctctgtcactcaggctggagtgcagtgatgtagtcatggctcactgcagcctcatactcctgacctcaggtgatcgacccgcctcggcctcccaaagtgctgggatcgtaggctgaagccaccatgcctggcccgaactcatttgtttttatttgcattaagtgtaataaggttttgttacttttagtttgaattttattttgggtaatataaacatttacatgattcagaagtcagaattacactgaggcatgttcagctaggcctcactcctgtgcctgtacccttacctttttccccctaccccatgcagggaatcaatttcattagttcctggtgtgtccttccttaatacccccccttctttctttggtagaatgcagtagatatgtttgcgctttgctccctttgcttcacagtggatcctggaaatgactccatcgcagttcttagagctcttgtttagtccctttggatctgcacagtactccagtgtgtgggcgcaccataagtttattcagcaagtgccctggtgatagggatcgggggtattggaagcctttggctggtaaaaataatgttgtagcaaataacatcatgcatatgttctttgagatttctggaggtgtctctttagcatagatttctagaaggcattccttacgtcacgtttaggtttatagtttgacctcatggtgattaaggtatttgggaaatgcaaatgagagtttcgaagaagccagatctttcccattagttcactgtttttctctgacattaggaccgtccgggttctagggagcagccctggcgttaggcagtgccatgatggattgtgtagaagtagcgattcccatctgtctgctttcttggcccactctgctggtggctccccttccctccctcctttatggggagctggggagctgcctaggggtccattctcaaaggctgatctctggtgggcaacaggccacacctagctttccagggttcttcgtcatttcccattgagagctgtaagactcagagacatgaaaaggaagctctggctgggcacggtggctcacgcctgtaatcccagcactttgggaggctgaggcgggtcgatcacctgaggtcaggagttcgagaccagcctgcccaacatggtgaaaccccgtctccactaaacatacaaaaattagcctggcgtggtagcacacgcctgtgatcccagctactccggaggctgaggcaggagaataacttgaacccggcaggcggaggttgcgatgagccgatattatgccatcggcaacagagcgagactccatctcaaaaaaaaaacaaaaaacaaaacaaggcgagctctgtgctgggacagattagggacccctctttacagcaagaaagactgctctgtgggttgtaggatgcctttgtgtatgcagtggctctaggtgactctggcagccacactctgggccctaaacttctggaggaagatacaggatagggaggaactcaggggtgagtcatggtggggacaagacattccctcactctaagaccttgtcactagattggaacatctcttgcctccctacacctgacctgatggttctggagagatacgtccttgcagcttctgagtcccagcactaagcagcctttggtaacttccctacatcatttgagttctggtttcctaaggatgcttgccagtgagtgccatggtgccctcattgcacagtctgtgcagtgtagacaagaggggaagtctcttggggtagaccagccgcaaggcggtgactagcactgatgtgaaccacatgggacaggggagttgtggggctgagaacacggagggtgggagtagtcatgctcttttccagaatgaactgctaacgaagggactcgcaggtggctgctgcttctttccaagctgcccctgttgttgcagaggctctggagtcctaggaggtttcacggtggcatactcgacagagtactagagcatcatggccagatagtgatgctggggtgtggggcctcacggtggccatttctgacgagaccccaccgggccaaagtgatgtgtagagaaggagctgcttcggtcaccagaaaagaacggggaagcctcccacactagaataggtagggtgctcttctccaccggcaggaaggggatgtatggctctgcctggaccacacctttttccttgctcttccctccgcatctgctgtggccgaggccattcctcatcagggaacatgtgttagaggctcacgccacctgggaccacttgtcttatcacccccaggaccctaggcggtagtttcctgtggcctgagttagctgatatttatatagtgccattgtgccttttctcctgtgatgctcacagtaaggatgcctagatggggttacctgttgtcaagataaggaaactgaagcacagaatgctgaggtcatttgctgggttcatgtttggaaagcggcaaaggatttcagtgcaggttggctggctccaaacctgtgtgtgctttccatgacactgtactgtgtgcctcattgagcctcattctagaaaaccaaaaacacacccaaggcccggccttcacaaaggagacccctcccccatttggctccctttccagcagtcgacggcctcttgtcagccatcgagcccagagtcccttgaagtgcgactcatgctggggtggtatgctcaggagccgcagtgtttccgctcagaggaaagggctctgattctcctgcagtgctaggagacttgtgggtggccacagtgcaggtcaggcacaccggccagcaccacccacagcccaaattcctaaagaaatatttgggtcccagcttggcccgagtctctgttgtcctggggaaggacatcaagatctgagtgtatgatggcctggggccttgcatgtggtgggggtccaagcctgcctctgctcacttgttctgcagactggcatgttctctgtgatacttacatacttgtttaacacttcagggaagaaaagtcagaagaccaggacctccagggcctcaaggacaaacccctcaagtttaaaaaggtgaagaaagataagaaagaagagaaagagggcaagcatgagcccgtgcagccatcagcccaccactctgctgagcccgcagaggcaggcaaagcagagacatcagaagggtcaggctccgccccggctgtgccggaagcttctgcctcccccaaacagcggcgctccatcatccgtgaccggggacccatgtatgatgaccccaccctgcctgaaggctggacacggaagcttaagcaaaggaaatctggccgctctgctgggaagtatgatgtgtatttgatcaagtaagtaagagcaactcctatctctacagggcagggagggcagggacaaggatccctcatggagcaggaaaatgtatgtgcccagggtggggtcggggggaacataaacaatgaacactgagaccaggtgtgcttgaaatgaccgtgtacagaggtcgctgccctgagtgggaagttctcaaggtagcaggccctctatcctctccacacctcaagtctttatctggggatggaatagctgcggaagcagaggaacttgcagagctaggggttcagaggggtgaagaagcatgtttcagttctgccttttaaatgatcccaaaaaggttagcagttttcaaatgacatttgcagacagcctcatttaattccatgagaagggtgagcaaaggattatcttgttgaaactgattcctggagagactgagcaccgtacctgagttcaaacttgggaatgttctagatggtgactcaggcccaggcaccaaccagcagaatgggcctcagcctgacaacccttctgtaccaggcctgactctttggttgctgaactttggagaggcctgggggggtcagcggcaggcagacgagtgagtggctttggtgacaggtcctcaggggcagccaggcagtgtgactctcgttcaatagtaacgtttgtcagagcgttgtcaccaccatccgctctgccctatctctgacattgctatggagagcctctaattgttccttgtgtctttctgtttgtccccacagtccccagggaaaagcctttcgctctaaagtggagttgattgcgtacttcgaaaaggtaggcgacacatccctggaccctaatgattttgacttcacggtaactgggagagggagcccctcccggcgagagcagaaaccacctaagaagcccaaatctcccaaagctccaggaactggcagag

SEQ ID NO: 10 - DNA, 60987 bp, Homo sapiens
cagactcaccagttcctgctttgatgtgacatgtgactccccagaatacaccttgcttctgtagaccagctccaacaggattccatggtagctgggatgttagggctcaggtaagtaaccttcctttttttttttttagtatatgtcctggtttggccatctgttttttttttttttaaaaaaaaaaaaaaaaggaaaagaggaaaaaaatatactactcttggacagtataaaagtaccccaaagactaaagacataactgtgccaaactgtgccatataataaaaaaaagtcacttccctgagccctgaaaggtcagtgtgtgtagggttacttggtcgccacagcgtgatctgggggcgggcgtcagattagagccggaactggtgatctgcaacttcagttcaccttgaagcaggtcagctgagctgagagcgcttgcactgagcccttttgcgctgctgctgttgccttagcggtcttcagcatgtgtttgctttggtttggggtaaatggcttagtggtcaacattagtgagcagtggtaatgcattttcagatatgggaactggtatgtggttggttccctagaaggacaccctcctgaaagctgtctcagaacaccgggggccatggctaatgtcatgtgcttgctacactcctcccatggtaactaaagagagtacccagatatacatctggttcttgggactctagaggaggatgagtactttgtaaaaacctgggggccccagtcattctaggtctgacactcaggtgctgtatcagctgcagtttgaactacttggcaccattgtgtggactttagttttgtaaaaatgaatggttccttaatttctcaaccttcaggctcaacatctcaagctgtttgttgttgttgttgttgttgttgttttgttttgtctttttgattagtggtcactccgcatttgatgttttgacatgtggatttcagaacttctgtgtggtaaagcagaatgttccaattgaattttcccattttttttcccctaagcaaaaatgtgagttttcacttatgcggccattgtgattccgactgagaccctaagtcgttctttgttgtctctctagtggtttctgacacctcagtgtgaagctgttgtagacatccataagaaatagcctgcttagggattatgtgagggcaaggtttggctgaaggagaatagaaggtgtggaaggaagcggaagaccagaagagcatcacactgcctcaagtcccaaatttgattctgctcctgatcctgtgactcaaattgtcattctcttttactgctgtggggtgtgctctgggcccagctgacaggacattctttgtactccacgtatttatgctggtgggagttgtatggctagtgctttgtgctttgtctcagaaattgtgtggactaaatgtaatatgggcagtgaatgggtttcttctggaagatgttaggcctggagggtggtttgggtttttacgagtctttttctcagattacagattacgaatggatgttataaaacaggcagtgttgacaccatacagtttctcctaagaaatgtacagagagttcaacctgaggaagctaattgaaaataaacttttaaaaagaaatgtagaaagaggaaatttaaaaagtatcttatgaatgggaaagatgtagccatttgagcttcaaagaacttttgagggaattctcaaaggacagtacccgtctttagtagataaatgcttgatatctatttttcttcttttactttttaaagaattactaaaataatacatggatttatagaaaaatcaaaccacttaaaaattgatcaggtggctgggcaaggtggctcatgcctgtaatcacagcgctttgggaggcctaggcgggtggatcacctgaagtcaggagttcgagaccagcctggctaacacggcgaaaccccatctctattaaaaatacaaaaattagctggccatggtggcttgagcgtgtagtcccagctactcggaaggctgaggcaggagaatcacttgaacctgggaggcggaggttgcagtgagccaagatcacaccactgaactcctgcctgggtgacagagtgagactcggtctcaaaaaaaaaaaaaaaaaaaagtatcaggtaaaaaaatgaaagctccccgcttaatctctgctcccactacccagaataactgctgttaatagcttaatgtagatccttctaagtcttctaagactaaactgtgtactttttgtgttgtaattaacaggagggtttttgttttgttttgttttttctttttttgagatggagtcttgctctgtcatccaggctggagtacagtggcacaatcttggctcactgcaacctccacctcctgggttcaagtgattctcctgcctcagcctcctgagtagctgggattacaggcgcctgccaccacacccagctaatttttgtatttttagtagagatgggtttcaccatgttggccaggctggtgtcgaactcctgacctcaggcgatccacctgccttggcctcccaaagtgctgggattacaggcgtgagccaccgtgcctggcctcaggatggtgttatatatacatattctgcatttttccatctcatatattcatctctgcctcatttcttttaaatagcagtgtagtccagggctgacttaccgtcatgcatttcgttgtctctctatgttattaaaaatgctacaggattgaaattcctcatgtgccagtcattttgaagaatggctgcctagacttggaatttctggtggataccaccacatcactgtccaaaatggctatcccagttcccacaacagtctgagaaagtgccattttcccatatcgtcccagaattggatatacatcttttaaattggtgccgcttggattattactgaggctaaacctcaataatcattgtcatagctcttaatgtattaaagatgttaactctttgtcatgcagatattttcctgttttgtcttacgtcttgattcttgtctttctgatatataaaatttatgttatgatttattcttttgctttcatacttaggaaatccttttttactcttttttttttttttttttttttttttgagacggagtctcgctctgtcgcccaggttggagtgcaatggcgtgatcttggctcactgcaagctccatctcccgggttcattccattctcctgcctcagcctcccgagtagctgggactacaggcgcccgccaccacgcctggctaatttttttgtatttgtgagacagggtttcaccatgttagccaggctggtctcgatctcctgaccttgtgatccgcccgtctctgcctcccaaagtgctgggattacaggcgtgagccaccgcgccccgccaggaaatcctttcctactcttaacaacagatcaatagtcatctatattttcttcctaaaaaacctgatgatgtattatattcatacatacgtatttaatacatacaaaagggccagatgcggtggctcatgcctgtaatcccagcactttgggaggctgaggcgggtggatcacctgaggtcaagagttcaagaccagcctggccaagatggtgaaatcccgtctctactaaaaatacaaaaattagccaggcgtggtggcgggcacctgtaatctcaactactggggtgactgaggcaggagaatcgcttgaacccaggaggcagaagtttcggtgagccaagatcacgccactgcactcctgcctgggcgatagagtgaggctctgtctcaaaaataaaaaataaaaataataattttatagttaagttgccctgtgtttttcctgtgattaaaaaaaaaaatacctgttttgtatttaactttggggtgggataaggtatagcccacttagtcagttgtgtctaagccacttgatgaaccagtcaatccagtcttcacctttaacaaatgctgatttcttcaagtgagcaaaatatctcttaaactttttcctattttctctataaagttgcttttttctgaattttttctttatgaggcttgatgggcagccctatcagcagacaatcattcattcacccaacaaatatttgagtatctgcttcaagccaggggcagtgctaagccctggaagtggtatcttctccttatccgggagtggggctacagtgttcattccagaagactcaagaaaatagcagatcatcacaaaagtaggttttacataaatgaggaggaatccacagggttgtgtatatgtgtgtgtattttaaattctgacataagttggagctttagggtagactgtgacataagagtagtttgttttccaactcatgtaattgccggctgatttttgtcttgaattatgataatggtaacttctgttgaaacaattctgtattcatcttagcttggttgggatgcaataaaagttttgtactggtaaaaatgataattttcttccatgatgattttgaagcttttctgtaacacctgataaaaatagaggggccaggcatggtggctcatgcctgtagtcccagctactcgggaggatgaggtgagaggatcccatgagcccaggagttttaggctacagtgagccatcatcacaccactgtactcctgtactctagcctgggcagcctcgttctttagagtaagacactgtctctttaaaaaaaaaaaaaaagaaaaaagaaaaaaagaaaaggcttttagtgaatatatttttagggtagcaagtgtaatttttataaattgcattatttgaatctaataaataccctcaaagctgaagtcgaattctgattttgattgaaaatattttttacttaaaggaagagggatagaataaatgacacgattaaggaaaagacttcttgtataaggccggggttttttaaatgattttttgaatagttagatggacaatacggaattaaaaaggtggtgtaaaaagttatacggggctgggcacagtgactcacgcctgcaatcccagtactttgggaggccgaggtgggtggatcacctgaggtcaggagttcgagaccagcctagccaacatgacgaaacatcatttctactaaaaatacaaaaattagctgggcttggtggtatgcacctgtaatccagctactcgggaggctgaggcagaagaatcgtttgaacccaggaggcagaggttgcagtgagccaagatcgtgccattgcactccagcctgggcgacagagtgagactccatctcagaaaaataataatagaaaaaagttatatggggctgggcatggtggctcatgcctgtaatcccagcagtttgggaggctgaggcagcttgatcacttgaggtcaggaattcgagactagcctggccaacatggtgaaactccgtctccactaaaaatacaaaaattagccaagcgtggtggtgcgtgcctgtagtcccagctacttgggaagctgaggcaggagaatcgcctgaacctgggaggcagaggttgcagtgagccaagatcatgccgttgcactccagcctggacgacaagagcggaactccgtctcaaaaaaaaaaaaaaaagagttatattgtaaagtatctctgctaccctgccccaaacattcatttctttccctggaggcagccactattacctgtttctttaaaaaaaaaaaaaaattgtggccgggcacggtggctcacgcctgtaatcctagcactttgggaggtggaggtgggtggatcatgaggtcaagagatcgagaccatcttggccaacatggtaaaaccccatctctactaaaaatacaaaaaattagccgggcatggtggcgggcacctgtagtcccagctactcgggaggctgaggcaggagaatcgcttgaacctgggaggcagaggttgcagtgaactgagatcacgccgctgcactccagcctggcaacagaatgagactccatctcaaaaaaaaaagcgtgtgtgtacccgtgtgttaaatttttattataaaatatatataacaggctgggcgtggtggctcacgcctgtaatcccagcactttgggaggccgaggcaggctgatcacgaggtcaggagatcgagaccatcctggcgagcacggtgaaacctcgtctttactaaaaatacaaaaaattagccgggcatggtggcgggcgcctgtagtcccagctactctgagagcctgaggcaggagaatggcgtgaacccaggaggcggagcttgcagtgagccgagatcgcgtcactgcactccagcctgggcgacagaccgagactccgtctcaaaaaatatatatcgatatatataacaatttacagttttaatcatcttaactgtacagttcagtggcactgagtacattcacattgttgtacagccattactaccatccatctctacaacctttcgtcttgcaaaactgaaatttcatacctattaaacactaactcccacttctcccctttcccccaccccaccctctggcaactactattctactctttgtctctattggacatatttttgtgtgtttaggtttgtgtatatattttacatgtgtgtataaatacacaagggtatgtgggcgttgtgtttttacacatactataaaatattgtgcacatttgtttattttaatgtatcctgtagattatttagaatcggttcatacagagccgtatcattccttttaagggttgggtttaaatagtctgttatggatgtaccacaatttatttaaccagtttttaaattttttacttattttttttaatgtttttttagagacaggatcccactccatcacccagactggagtgcaacagcatgatcatagcttactgcagccttgaactccggggctgatgtgatcctcccacctcaggctctcttgtagctgggactacagggatgtgccgccatgcctggctaaattttttatttttatttttatttttatttttggtagacacggggtttcactgtgttgcccaggctggtcttgaactccttgggcttgagtaatcctcctgccttggcctcccaaagtgccgagattacaaccatgagccatggagcccgacaagagtagccttttatttgcagaccattagagaaaaagttgcgtgtaagtagataagcatacgaatttatcactgcaatactgtttgtagagatcacagagctgttaggctaggaagaagtttttagcagttagcactagaaagcaaaactttggaaacttccatttcatcaaaagtgacctcatctgagtagggcatgtgagggaaggacctttttactcgacaaggggaacttgcccagttcttgtttgtgaaccttgaagaaagtggagcatttttattttgggaccattctaggttgtggtagttccttggtactcggggttggagaatctccctctgctgctggaccttctgcctcctcatgctgtaatatgcataagaggtgtcctagaagtattcaggaacaggctgtggttgctttgttgttctgtgactgttgaactctttatatagcagtacttttttaagctgtactaattgagcatttattatgtgtcagttactgtgctagctgctggaaactatcctaccctcagcagtcttctggtctaatgggaggtacagacaggcaaatgggctatgactttacaagaggctaacttctgtgatggagagaagttccagccactaagggagcacataaaaatcagaggagatcctaccaagaattgggaggtaggtcagggaggagacttctttgaaaaatggcatctaagacctgaacagcaaggaaacattagctaggtcaaggacaaagcatcagtggggagagatgcatgagtcttttggaaggaccagcatgtgtagaggctctgacaggagagaatctctcaggcccattcagagagtccactgtgtgaagacgaggcatgaacaaccagccaggacatgtggagaggagcatttttctttttttcttttttctttctttttttttttttttttttttgagacgtctttctctgtcacccaggctggagtgcaatggcatgatctcggctcactgcaacccccacttccagggttcaagcaattcttctgccttagcctcccaagcagctaggattacaggcacccgccaccatgcccggttaatttttgtatttttagtagagacggagtttcaccatgttggcctcaaactcctgaccttaggtgatctacccgtctcggcctcccagagtgctgggattacaggtgagagcccccacgcccggccaggctcggctttctttccaggccccgtcacactcttagatgttccctgggccccagaaggcagcgtgaggtgctctgcccatctatgctgtccttttccaccccaccctatccactgggcccctggggctcccactccactccaggtctcttcatggacccttctttcccttcacttctgtcccaggagacctgggagactcatgggaacaggcatcatcttctccagcacagttcattgtctaatgcacgaaagtgctgggctgtgagaaggtcaggagcttacatggaatgggagtcagctgtggtacaaagtacgctgcttagttctactgattttttattttttatttttacataagactttgatggtaaaggaagcagtgtgtgagcaagctgactcctgtcttgtcaagtaccaggtccactctgatgagcccctgtggacagcactgctgtaactccccaagcctgggctcaggaggtgggccctaagcgctgttcccagctcttcctccatgctgtcagctcttccaccattcttcctggcgtcattctaaggtcctgtcttcccccgccctcttccttcctggcttctacgctcagctcaagtagtagctgtttgggtacttttcacccagacttaggaaatgttatcagttggtcgtattcctgtcagccctcttactatggaactcaaataggacagattcagctgaattcccagccctgtggttgcactctttgtctgccctgcttccccaaggtagcctgctccctaaaggtcaccgagatactccccatgcaaggtttttgttgtattacacatgacaacatggaataaagtgttttgcaaatttactggatgatatcctactatgtggaacatcctacaacttactcttttcactcaacatttgacttttgaacctggtctgtactgctccgtgcagaccaatgttcattcatttgatatgtctccttgtgccatagaaatagttttacaatagaagcctgtccagagccatgagggagaaggggattgtagagaaacaaggattggcatctggtttatgtttacatcctttagtcctgttaaccgagaagaagatatttttatttccatgtttgcgaaagctttccacaaaaaaagcatccattttctagacttattaatagggcagtccaaaggttttatttttagatttgaaagaaagcaaagtaggcttctgagatatgcacatttccctgtgtccctgtctcttttgcaacattccacattgctgctaaaacttgaacatgagcactttcaagcatgtgcttactttctatgtatgactcattttttaaaacattaaagcattttcggccgggtgtggtggctcacgcctatattcctagcactttagaaggccgaggcgggtagatcacttgaggtcaggagttcaagaccagcctagccaatatagtgaaaccccatctccactaaaaatacaaaaattagccgggcatggtggcgggcgcctgtaatcccagctactcgggaggctgaggcaggagaattgcttgaacccaggaggtggaggttgcagtgagcagagatcgagccactgcactctagcctaggtgacagagcgagactctgtctcaaaaaaataaaaataaagcattaaagcactttgtctggtggtatgtaagttttggcattacttagataagttgtattttaagtctttctacacacaataacttatttttaaaatacaagtttctgtgtacttccgggttttgtgtttttgtaaacagcagaaggtattagtccatattaagtactaatttgttctaatattttcagctgtttttggaattacacttggcaaaaaaatagacaaatgtctgcagttgtgacagtttgtttttttgttctttttaactccagaataaataattctagtgagtttttttcttggcttgtaagaacatgggaatgattagagtcatcataacacttaagtagttatagaaggttgaacatctgtagtcagttgtataaaatttcctagtcatccttccaggttgtttaagacaaacaaatacatagtatttattaagctcttataaattttaattgtaaaacatcattgtacaaaactttgaaaatgcgtataggtacaaagataaaaaattaggccaggcatgccatggctcacgcctgtaatcccagcactttgggaggccaaggtgggaggatcttttgagcccaggagttcaagaccagcctgagcaacatattgagaccctatctctacaaaaatatcataaaacaaaatagaatcactctggcgattccactatccaaaaaaaaaaaaaactgctgttaatatttggtatgtatctttctagaccaaggcctccaactttggttgagaattcagccgggtctgtgaccttggatgggaaaaacattcactctttattttcactaatgtctctgaaaacccagatttttagctgggcatggtggctcgtgcctgtaatcccagtgctttggaagcccgtggagggcagatcacttgagcccaggagtttgagaccagcctgggcaacatagcaagaccctgtcttttaaaaaaaaaaaaaatccagccgggtgtggtggctcatgcctgtaatcccagcactttgagaggctgaggcaggcagatcacctgaggtcaggagtttgagaccagcctgaccaacatggtgaaatcctgtctctactaaaaatacaaaaatcagccgggcatggtggtgggcgcctgtaatcccagctactccggaggctgaggcaggagaatcacttgaacccggaaggtagaggttgcagtgagccaagatcacaccattgcactccagcctgggcgacagagcgagactctgtctcaaaaaaaaaaaaaaaaatccacattttcttcaatgacaattgtaagcaacagatcatggtagtattagaatagcagtgactgtcaccagtagagatcaaagatactttcatatcatattatagttgttacagatattttgaaatatatatgtccatcactgcttcaaacttaaggtaattattagacccatctctagatctggttatttaatgatttactgaagaagcacatattatttgagaacgaactcttgaaatatgttgttaatttctgtgcattttacacatttcaaaacattcttctgaggaggggtccagaaggccaaaagggtccatggcagaaaaaggttaagaacacctgttctgtactttgtaccatgtggctacaaatataaaaacagacgttaagccgggtatggtgatgcacacctgtagttccacctacttgggaggctgaggtgggaaaatcacttgagcccaggagtttgaggccagcctgggcaacagagcaagaccccatctcttaaaaaccagtcagcacttgactagtcagttagtgggggaaaacacaggtacagtaaaaggagtcaaaattacacttaaacttaggtcatcttattatatcaaacatttattaacatgtttagtgttttgtgtatattatgcaaagtgtaatgcaactaaaactgtttaacacttctcgatatcacataaatttgttggtgcataatagcctaaaagttacttttgctgttggcattttattttattacttacttatttatttatttatttatttattttgagacagagtcacactgtcgccaggctggagtgcagtggtgcgatctcagctcactgcaacctctgcctccctggttcaagcgattctcccgcctcagcctcctgactagctgggactacaggtgcgcgccaccatgcccagctaatttttgtatttttagtagagatagggtttcgccatgttggccaggatggtcttcatctcttgaccttgtgatctgcccacctcggcctcccaaagtgctaggattacaggcatgagccaccacgctgggcctgctgttggcattttaaacatccttctagagtctttcttatttgcctgtaagcacgtacacatgttgttgttgttttgagacaaggtctgtcgcccaagctggagcacagtggtgcaatcacagctcactacagcttcgacctcttgggtgcaagtgatcctcccaatcagcctcccaagtaggtgggactacaggtgtccgctaccatgcccagctaatttttgtattttttttgtagagacggagtttcaccatgttgcccagactggtctcaaactcctttgctcaaacgatccttccgcctcggcctcccaaagtgccgggattacaagtgtgcacctctgtgcctggcccacatgttgttttagatgaatgagatcatatatgtacttttgtaacttgctacctttcctcaacaaaatgttgtaaatatccatgtccataaaaatagacgtatatcttcacttttccctaaaatgaaaataacttaacttgcattttcttttttgtttttgtttttgttttgagacaggctcttgctctgttgctcaggctggagtgcagtgatgtcacagctcactacagcctccacctccagtttcaagtattccacctacctcagcctccaagatagctaagactacaggcacatgtcacgacgcctggctaatttttaaaatattttttgcagaaatgggatttcactatgttgcccaggctggcctcaaactgctggcctcaagtgatcttcctgccttggcctcccaaagtgctgggattacagtcgtgagccactgtgcccagcctgcattttcttattataaaagtaatacatgttcaatggacaaaaaattttcagaaaatatgcaaagatgaaaagtaaaaattgtccataaatctgtcatctacagataaagataacttctggataatgtttttctaccatcatttttagtaatcacataacatttcgttgtatgtctatgccttcatttaattaagaggcatttccattatttctgcatgttcatgactctgaatgatgatatgtctgcctgctgatggctacaaccctgtttctgcatttcaaacctctctcttgagctccagatttgatggcctcgtcagcatttacttgagttgctcataagtgtctcaaatttaacaagtcccagtcttgatttttttcccccttcaaacctattcctcatgttgtctctatttcagtaaacaatatcaacatccacccagttactcagtccaaaattctaggagtcatccttgattctgctctttctttttttttttttttttgagacggagtctcgctctgtcgcccaggccggactgcggactgcagtggcgcgatctcggctcactgcaagctccgcttcccgggttcacgccattctcctgcctcagcctcccgagtagctgggactacaggcgcccgccaccgcgcccggctaattttttgtatttttagtagagacggggtttcaccttgttagccaggatggtctcgatctcctgacctcatgatccacccgcctcggcctcccaaagtgctgggattacaggcgtgagccaccgcgcccggcctcttttttttttttgatacggagtctcattctcgtcatccaggctggagtgcagtggtgcaatcttggctcactgcaacctccgcctcccgggttcaagcaattcttctgccccaacctcctgagtagctgggcctggctaattttttgtatttttagtagagatggggtttcaccatgttggccaggctggtcctgaactcctgaccttgtgatccgcccacctcagcctcccaaagtgctgggattacaggcgtgagccactgcacccgccctgattctgctctttctctcatcatccctgatctgtcagcaagtcctgttaggccaaccacttctcagcatctgcactgccagtatgctagtccaagccacaaaacacctctcagaggtacgcaacaggactttgttgttgttgtgtgtgtgtgtgtttttttttttttacggtagaattattttataacttgaagtgtagggatgaccttccttttaaaattttatttattttcttaattttttattcccatagattttaggggaacaggtggtatttggtgacatgagtaagttctttaatggtgatttctgagattttggtgcacccatcacccgagcagtgtacactgaacccaatttgtagtcttttatccctcaccccctcccaccctttccctcaagtccccaaagtccattgtatcattctgatgcctttgcatcctcatagcttagctcccacttatgagtgagaacatacagtgtttggttttccattcctgagttacttcacttagaataatagtctctagttccatccaggttgctgtgaatgccattaagtcattcctttttatggctgagtagtattcctttgtatatatatgccacaatttctctattcactttctgattgatgggcatttgggctggttctatatttttgtaattgtgaattgtgctgctataagcatgcgtgtgcaagtatcattatgcaacgggacttcggatgacatattgaacaacttcctcactgatatccttgtgaaacgctacatatttcatgggtctgtttgttataccaacactcaattctgaatgatggaattatttcacatttagtctctttttcatctagccattatagtttagtttaaacaccaagttccattcctgctgcatgctgaaggatttgcagtacatcaggctatagtccatcaattcattccacaattgagtaagtaaggtatctatagtacctcaggccctgtgttaggcagggatggggtaacctagacagatttggtacctgtcctcatggagcttgactttagcggcagagacagatcttagataattgtaccagtacttaagtgttcagaaggacaagtatggaggtgggagccactccagtcctctacagtcacgtgctgcacaacaacgtttcaaccgacaacagagcacacatacagtggtgttcccataagattagaatgccatatttttactgtaccttttctatgtttagatatacaaatacttaccattgtgttccagtgatctacagtattcagtatagtaccatgctgtacagttttatagcccaggagcaataggctatataccgtatagcctaggtgtgtagtatgctacaccatctagatttgtgtaagaacactctctgatgttagcacaaataaatcgcccaatgacacatttctcagaacatatccctgttgttgagcgactcatgactgtacaatgggggaacagctcagcctgccttccccaaggaggcaacgccgatgcagggaaccgagggttgaacagaagtgggcaaggtgcagagaggaaaaaggctttccagatggagaagagcatgtgtgaaggccctcagtctggcaagagcttagtcctgtgtggcaggagctgaacgaggggttaggggagagtggcaaagggtccgggccatcagagaggtcaacaggggctggatcatgcaggattttgaatgttaacatcagagcgatagaaaacatgaagggtaaggtggtttgggttttgaatttttatcaaaatattgcaactactcggcaacaagttagatataacaaaagaggtcatcgtaaaaacagcagtctaccccttccccttcccttccctgactcagacatgacagcttttaactgtttctgattttagttcctttgatggttacctccaaaattaaatcatatgcttatacatctttcttgatttgccaactttagggaactgtgttaactccctgaaatgaaagagaatgacttagcttacgttacctccccatgttgaaattcatattcacatttctctgtaattttttttttgagatggagtctcactctgtcgcccaggctggagtgcagtgatgtgatctcggctcactgaaacctctgcctcccgggttcaagcaattctcgtgcctcagcctcctgagtagctgggactacaggcgcacaccagtgcactgggctaatttttgtatttttagtagaggcggggtttcaccatgttggccaggctggtcttaaactcctgacctcaggtgatctgcctgccttggcctcccaaagtgctgggattacaggtgtgagctaccatgccaagcccacatttctctgtaaattttaaacagtattttagtccatatgtcagttcccctctgtttaagataaggatattaataaccctacttttccttccactttccctccttaacttctgcgtcttaaaagctgtacttgaccatacccattcttgcatttgttaacatgtgtgttctgccctgcaaccacagccaagttgtagcttaattctaaagtcgaaaataacattatttacattattacacatgtgagtattgttcttggcgagaccaaataatgaatgtgcccaggattacatttccttctttacagatctggaccactcaaaggagaatgaccaatcaaggtcaaatggattcccttttcttagactctgtcacctgcttaaaatccttgctaggatttaatctacttcatattcaaaccttggcttgcttatatagctctttgttttgcccaccatttctagttgcctttttattttgtttactattcctccttgattatgttgtaaaatgctattagcagtgctgtttatttcgtacgattcggctttttccccactgaagacctttctcttggaaggcctctgcccttctgcaatctgggcaagtatctgctctttgatttaaggttgcatatacagctgtacctggaccttctcctcactgggctcttgggttggagcccgtgtcttaaaacccatatcttcctttcacatggtttactccctcgttttctggactgcatccttaaataatgtgctcagatagagtgcatggggagtaaactgtagtggataccgttgtcacctaccccatatccatttcttctttgcccattcctaacagaatcctgatattattcacctttctaccttattcccaacttcagaaaggatccttaagtcattccacacattgcattcctttggcaactgttactggtcaaggatggacatacgatctaagttggttcactcagactgaagggaaggacttccatggcacgttcagggaagactttctctttttctctcactggagtaagtgagaaaggtgttgctgggggctcttctgtaacctcagactgagggacaaagcctgaggataaagcctgctcaccaaggaaggcggagcagagaaacgggaagaacctgggtcttgatgccgttgcttagctggtgattgcactgtggctggggcctgtcctacctgagctagggactcagataggatggactttcttactgaatgagccagcttcagttttcttttctgttacttgtaaccaaaagcattgtaacagataggtcttctgagtcactgcatgcctgaaatacctttcttctactcttacacttgattggctgagtatagggttccaagttgaaaatcattttttctcctaactttggaggcatctcttctagtatgcagagtaacaaatgcaacaaatgcctgatgccaatcttattatggttcttttgtaggtgcccttcttttctcttccttccctggaagtttttaggatttcgtctccttatttttagtgtcctgaaatctcatgagaatatgtctagagttgtgtcttgttcactcgttgtactgtggtcattcaatctgaatacttttgtcaactcttttttttaaaaaaaaattactaatttacatgctttcattttctctatggggactactgtttaactttggacctcttatattggtcttctgtcttctctcatatttttcatttattgggcggtggggggtgctctgaattttggaagatctcctgcatttattttctttttccttttttctttttttttgaggcagagtcttgctctgtcacccaggctggagtgcagtagcctgatctcggctcactgcaacctctgccttccaggttcaagcaattctgcctctgcctcccacgtagctgggattacagacctgcaccaccacgcccggctaatttttgtatttttaatagagatggggtttcaccatgttgccaggctggtctcgaactcctgacctcaagtgatccgcccgcctcagcctcccaaagtggtgtgagccaccgcacccagcctcctgactttattttctatcccttctgttaaattctttatttcagccaaacctttttttttttttttttaacttactgtgaagcctgtgtgcctactgcctagattagacaattgttaacattttggcgtattttcctggtctgtatagatagggtgcatttttatacctttttgctcaccatttaaaaggaactcacagatgtcacgacatttcacccctaagtacttcagtatacatctcctaaaaataaggacattttccaatataagcacaataccccgatcacatctttaaaagttaacaataattctctaatgttatcaggcacccactttaaattcagatttcctccaaatgtctcttatcgctgttgaggggctccaaagcaattaagatttatacattgcatttgaatatgcttcctttgtctcttatttatttatttattttattttgagacagagtctcgctgtctcccaggctggagtgcagtggtgtgatctcagctcactgcaacctccgccttccaggttcaagcgattctcctgcctcagcctcccaaatagctgggattacaggtacgcaccaccacgcccagctaacttttttgtatttttagtagagacagggtttctactaaaccatgttggccaggctggttttgaactcctgacctcaagtgatctgcccgcctcggcctcccaaagttctaggattataggcgtgagccaccatgcccagcccctttgtctcttttaacaagaacagcctacccacctctccttcacttgtgatactgactttttgaagcagtcagcccaattgtcatctagaagggcccacattttaagatacatatttttagagatggcgtgtcactatgttgcctaggctggccttgaactcctggcctcaagtaatcctcctgcctcagcctcccaggtagctgggactacaggcttgtgccaccacgactagctggcccacattttagatgtctctcttttcttgtgatataatttaacttgtttgtccatatatattacttgtagacaagaagttaggtctacaggcatgttcaggttaaacattttgggcaagaatatttcataggcagtactgtgtacttcatatagcatcagctcaccaggcacttaatggttggttaccctgtggtttgtgatgctacgttttaacacttgattaaagaaggaggtgactgccaaatctccccattgtagacatacagttttcctgtggtaattgatatataatctgtgatgtgatgctttggcaccatacaaatatcctattgcccaacagccatttgcataattattttagcattcattgatccttgcctgaaaccattattacattgggggttgcaaaatgatagtttttttaattgtcacctcttctacatttagtactgtcattcctctgtaatgaattttccctcatcaaataaggaggcattatatttcctcctaaaaagacagtatagatgcttaatctttgcctttattacatttcagagtaaggagttggtagaataatcacctcaaatggtggcaaaatatttgctgttgtgtttccttttctctttcatgtcaatatggactcatagggatttatttattaaatgttttacaattcaaattgggtcaacaagagtcccttcatgttggttcctatattctcctggcataccctcattaattagtctttgagcaatttcttgttttctggcacaagatattccatcccaatatgtgcttttcgtgtcctagaactgattccaaggagctctggttccttatagtggcaacggtatttagaatccaacatgtgggtactaaatgtgctgattcttactggggtaacattatatctaggcactttcagaggacatcgctagaaaatatattcagtttttattttttatttttaatttttttgtagagacaaggtctcactatgttgcccaagctggtttcgaactgagctcaagcgatcctcccacctcagcctcccaaagtgctgggattacatctgtcagggcaaactgctggtaaatattttcacaaaagaaaaataaaaaaaccaaagtgctgggattacagatgtgagccactgtgccctccattttttttttaagtcataaatacataatgatgtcttctatggcaatttaacattacagggttcttccttaacttttttttttttttttcttttttttgaggcagggtcttgctctattgcccaggctggagtggtgcagtggtacaatcctaattcactgcagcttcaaatgcctaggcttcaaacaatcctcctccctcagcctcccgagtagctaagactacaggtgcatatcaccatgcccagctaatttttaaaaattttttgtagagatggggggtctcgttgcgttgcccaggctggtctcgaactcctggcctcaagtgatcctcccatctcgatttcccaaagtgctgggattacaggtgtgagccaccatgcctggccaacttttatttgatctgtatatatcttttccttacactgaaaatgttgggtcttactaatgttaacatagttacttatttgctttatcttgtaatagacataaaattacaaaattataataccaatattacgataaatagctgggcatggcggcgctcgcctgtagtcccagctactcaggaagctgaggtggagggactgcttgaacctaagagtttgaagctgcagtgagctgtggttgtgccactgtactcctacccggacaacagagtgagtggggggaaaaaaaagaaataatggaagatccagagaaagccccaaatatttaaaaattaaacaatacactttgcagcttcctcacctctctcagccttcatagaattgaagagagttagggccttgcactagattaggctttgccttaaggaaatgttgtgtttgatttgatcttttatccagaccattaaaacttccttaacgtttattagtaataaggctatttcactttcatatcatttgtgtgttcactggagtagcacttttagtttccttcaagaactttgattcacaacttggctaactttggtacaagaggcctagcttttggcttctcggctttcaacatgcctctcactaagcctgatcatttggtttttggtttaaagagaaagacatatgactcttccttttacttgaatgcttagaggccattgtagggttattaattggcctaatttcagtactgtcttgtccaagggaatagggaggcccaaggagagagagagagatgggggaacagctgattggtggagtagtcagaatatacacatttatcacttaagttttgccatcttttctttttctttttcttttttttttttgagacagtcttgctctgtcacccaggctggcatgcagtggcatgatctcagttcactgcaacctctgcctcctgggctcaagcaattctcctgcctcaacctcccgagtagctggtattacaagcgtgcgccaccatacccagctaatttttatattttttagtagagacagggtttgccatgttggccaggctggtctcgaattcctgacctcaagtgatccacccgccttggcctcccaaagtgcggggattacaggcgtaagccactgccgcctggccaagtttgccaccttttttattttttttattttttgagatggagtctcactccatcacccaggctggagtgcagtgatgcaatctcggctcactgcagtctctgcctcctggattcaagcgattctcctgcctcagcctcccgagtagctgggactacaggcatgtgccagcacgcccagcttgttttttgtatttttagtagagacggggtttcaccatgttggccaggctggtctccaactcctgacctcaggtgatctgcccggctcagcctcccaaagtgctgggattacaggcgtgagccaccccgcccggccaagtttgccatcttttatgggtgcagtttgtggtgccgcaaaatgatgatagtagtaacatcagagagcattgatcacagatcaccataacaaatataataatgagaaatttgaaacattgtgaaaattaccaaaatgtgacagagacatgaagtaagcacatgctattggaaaaatggcactggtaaacttgcttgatgcagggttgccacacaccttcaatttgttaaaaactcagtatctgcgaagtacagtaaagcaaagcacaatcaaatgaggtgcgcctgcatattacaaccaagaggcttttcgcagaaacacgagtgtgcttcaacattcaaaaatcagttggtgtaattcaccacattaagataataaaggaggccgggtgcggtggctcacacctgtaatcccagcactttcagaagccgaggtggacagatcacttgaggccaggagtttgagagcagcctggccaacatagtgaaatcctgtctctactaaaaatagaaaaattagccgggcagggtggcacgcacctttagtcccagctattcgggaggctgaggcaggtgaatccttgaaaccaagaggcggaggttgcagtaagctgagatcacgccaatgcattctagcctgggcaacagtgagacccagtatcaaaaaaaaaaaaaaaaaaaaaaaaagataataaaggagaaaaaccatatagtctattcaataaatacagaaaacgcatctgacaaaattcagtgccctttcatgataaaaattcagcagattagaaatagaggaagtgcatgtatgaaagagctacagatagattgtacttaattgtgaaatattgaacatgttaccccgaaaatcaggaaaaaggcaaagatgtccactctaaccacttctattcaacattatactagaggtcatagccagtataatgaggcaagaaaaaacataagaggcattaatatttaaaggaagtaaaactgtttctatttgtaggtaatgtcgaaaatgtgaaagaaactatcagaacctgctagaactaaaaagtgaattcagcaaggtctcagggtacgagatcattcaaaaactaatcagaaatgaaatttcaaatgcaatatcgttaggaataatttaataagaaatgtacaagatttacacgctgaaactgaaaatgttgctgaaagaaattaaagacctaaataaatggaatgttgtaccatgttcatcagctgaaagactaagtgtctttacagtgtcagttctcccttcattgaactgtagattcataaccccagtcataactgcagggttttttttgtagaaattgattgtaaaatgtatatggaagctgggcacggtggcttatgcctgtaaaccagcactttgggaggctgaggcagacagatgacttgaggtcaggaatttgagaccagcctggctaacatgacgaaaccccgtctctacaaaaaatacaaaaattagccagacatggtggcacacacctgtaatcccagctacttgggaggctgaggcatgagaatcacttgaacccggaggtggaggttgcagtgagccaagatcatgccactgcacgcccgcctgggcaacagagtgagactttgcctcaaataaataaataaataaaacgtatatggaaatgcaaaggacctagaacatccaaagtaaacttgaaagagaacaaaattaaggggcttatgtgatgtgactttatagtcatttgatttttaacagaggcaccagaacagtccggtgcgggaaaggaaagtcttttagcacgtgccggatgatggcaaatgacatccataccagacaaaaatgaaccttgaccttaccctaaatattagtttcttagagttgccacaaactaggtggcttaaaaccacagaaatttggctgggtgcggtggctgacgcctgtaatcccggcctttgggaggccgagtcgggcagatcacctgaggtcaggagtgcaagactagcctggccaacgtggtgaaactttgtctctactaaaaatacaaaaaacttagtcaggtgtagtggtgcacacatataatcccagctagccaggaggctgaggcaggagaattgcatgaacctgggaggttgcactgagccaagattgcaccactgcactccagcctgggtgacagagtgagactccgtctcaaaacaaaaccacagaaatttgctgtctcataattccagagtctagaagtccaaaatcaactgtcatcagggccatggtctctgtgaaacctgtaggggagtccttccttgcctcttcctagcttccagtggttggcaacctttggcattctttgatttgcagctgcattacttcaatatctgtcttcctcatcacacagcattctccatgtatgtctctgtctttacatggcctccttcttgtaagaacaacagtaatattggattggggcctgccctactccagtgtgacctcaccttaactaattacacctgcaacaacgctgtttccaactaaggtctcagtgtgaggtactgagggttaggacttcaacatatcttttttgggggacatagtccaacccatgacactacttcacaccatacataaaaattaattcatgagagattatagacctaaatgttttaaaagctaaaaatataaagcttctgcaagaaaacataggagaatatctgtgcagtccaaagaataaggttttttttaaacacaatttcactctgttgcccaggctggagtgcagtggtgcgatctcagctcactgcaacctctgcctcccgagttcaagcgattcccatgcctcagccttccaagtagctgggattacaggtgtgcgccaccatgcctggctaatttttgtatttttagtagaggcagggttttgccatgttggccaggctggtctcaaactcctgacctcaagtgatctgcctgcctcggcctcccaaagtgctgggattacaggtatgagccaccgtgccaggccaaaaaaagatttattaggatacatgaagcaatagctattaaaagaaaaaataaattggacttcattaaaatttaaaacttttggtcctcaaaagataccattaagaaaatgaaaagacagagctgggcgtggtgaggcttgcctgtagtcactactgggtacttgagaggctgaggcaggaggatcacttgagcccaggagttctaggccaacataggcaatatagtgagacagtgtctcttaaaaaaaaaaagaaaaagaaaaaacaaaagaaaataggctgagagctgtggctcatgcttgtaatcccagcactttgggagtacaaggcagatggattgcttgagctcaggagttcaagaccagcctgggcaacagtgaaatcccatctctacaaaagatacaaaaaattagccaaccatggtggcgtgcacccgtagtccatagtcccagctactcgggaagcagaggcaggaggattgcttgatcccaaggaggtcaaggctgcagtgagctgaggtcgcgccaccgcaccccagcctgggtgactgagtgagaccctgtctcaaagaaaatgaaaagacaagtccaccaagaaaacagttgagaccagtcatagaaaaaatagaaagtcatatctgacaaaggatttgtattcagaagaattcctataactcggtaataaaaagacaacctgatttttaaagggtgaaaatattttaatggatacttttttttttttttttgagacagagtctcactgtgtcacctaggctggagtgcagtggtgccatcatacatagctcactgcagactcgaactcctgggctcaagtggtcttcctgcctcagcctcctgcgtagctaggactacaagcacgtgccactatgcctggctaatttttaaattttttgtagacatgggctggtgtgtgtctgtgttgtctaggctggtcttgaactcctgggctcaagtgatcctcccacctctgccccccaaagtgctgggccaccacgcctggtgtggtgtcaccagagatgagccaccatgccctgcctgatacttttcttttatcatctgtttatttcttgtttatgggtgtttctgttctgattttatgactattctgtattctaagatttctctgagaatattatttgtttcctctaaggacagacttggtctctcttccatggggctggttcttgagccgccagggatggggggaggacctgggtagctgctgcgctgccccttctctgctgtggtggagtggcccgttgcctgcggggtctgtctctgaagggtggtttggagaagttctgtggaggcgaggcaggggtcagctcttgccccatggaccctcagagactgggaaaaggtaggcatcacctgggctgctgccagccacatcaagagcctttggggtgggtggggtgggggccggggaagggaaggttctagctgttgatttagaaaagacccattgatttcttgcctgagggaagaagtggcaccttgccactccaagtttgctctgctcaccagccccaacagcatcagcctcacctgggagcttattgaaggtgccctgccccaaagcttgtgggtcgggatctggcagtcagcagcccccaggtgttgcacacatgacagcactgcttgcccctcctctcgtctggtctggtctggtctggtctggtctggtctgagagcttctttggggctctgacaggtatacaggctctcatctgctctacagctctcttgtagtacattcctctctgttccattagtcaacatgttcttgcctacttccagcatctagaaatttgctgagtgtatcttatccgttcagaggtcctctcctgctattgcctctgttagaaatttcttccctttcatatgtctgtacttcggtttctttgaggtttgaagggtcaagtggcaattacatgtaggcagttggccatcctctggtgaaggctttaaagcccaggaataacaagatccattatgtctaaaactagcaaaaaccctacctgtcacatggtgaactgaattagaggtgatggggacagaagccagattggagtgagtggaaggtgagggagtggagattgggtatagacaactctctttaagaagttttgttgtgatggtgaccagaaaaataggagtggggtagagggggatgagggtgtttttcacgtgggtgaatatgagagcatgtttacatccttctgggaatggcccaggagagaggggagcgtgagaaggaggaaatggggacctggaggagcagactccttgtgtggaggggggaagcggcatctagagctgttgcaggaggtgggctttgagtaaatgcttcctctttggtaaagacggggaacgggaacggtagaagttgcacggaccctttgttaaagctcagaagctgagcgagaattagagcttaagtttatggagtagtcagaataaagtacccctaactgtattcttgcacagtgcaggaagccaggggtctgaaatcaagatgttgcagggctccattccccccagagcctctagcatggatccttccttgcctcttccagcttttggtggctgcctggcagtcctagactttccttggcttgcagttgcattgctccattctctgcttgtgtcttcacatggccttctctgtgtccccgtattcttctctggatgcttgtcactgtattaggcccaccctaaatccaggatgatctcatatcaagatccttcacttaattacagaagcaaagaccttccaaataaggtcagagccacagggtctgggggttaagacatacacctaactattcggggctaccatcgaacccctgtagaagcctgtccatttccaggatagcagagcccaaggaagggccagaagtccccccaaaacagttgtttgcattcaccagattctaagctataagcagatgggcagtggcagtcggtcctaatccatataccattggcaacaatagtttagttcactgtagacataatgagatgcttatcttctgctaagtagtcctcatggtaacagccatattactcctggctttgagtgacagcgctgtgctcttgtctggtgcccatatacttcagcagctggaaacaagacagtgctcatgattcaccggaaagtttctgtagttaaaatcaagtgatcccttgagtctattctaatatttgtctgtaccatgttctgtgacgagacatggaaacaaaacattaagaagtgaaagtatctttgattatgctcttgaagacaactttttgtttgtttgttttgtttgagacggagtttcactcttgttgcccaggctggagtgcaatggtgtgatctcggctcactgcaacctccgcattcccgggttcaagcgattctcctgcctcagcctcccaagtagccaggattacaggcatgcaccaccacgcctggctaattttttttattttagtagagacggggtttcaccatgctagtcagactggtctcaaactcctgacctcaggtgatccgcctgcctctgcctcccaaagtgccgggattacaggtgtgagccaccgtgcctggccgaagacaactttttaaagatgcatatgctctgggctgggtgtggtggctcacacctgtaatcccagcactttgggaggccaaggcgggcagatcacctgaggtcaggggttcaagaccagcctggccaacatggtgaaacaccgtctctactaaaagtataaaaattagccgggtgtggtggcgggtgcctgtaatcacagctactcaggaggctgaggcaggagaatcgcttgaaccccagaggcggaggttgcagtgaattgagactgtgccactgcactccagcctgggcgacagagtgagacttggtctcaataaataaaataaaataaagatgcatatatgctctgaaggctggctacattttattttttctcaaacaacttttacagtggatagtgctgtaaaagttgtttagctctggtcattttatcttttttgtgatctgcaaaaggagatccttttccttttcactgcctctaatacccaactccaatactcctttgacctcacaggcacttagaatccatcagtggctccatcttttctcagacttcacctccttcgtatccttattcctctcctttgtagcttcagtgccagtcagacgtcgttactccctggcacactacctcagcccttcggcactttcttgctttgttatattcagtcgacaaagccccagcctcatgaaattcagtcatgtctgccccatgcctgctccgtcctgaagctgaatgtgactccttcattgattccccctttaagttcatgtctaccccaggtaaacttcttgccgccaagcccacctgcatactgcagttccccggtctctcctagcccctcccaccctcctcatcagctgtcacacctccttgcagctgatatcttagttcccagagagcacagaagcaagctcaagagagtgtctacaggccagcgtctactccttcgctctgcctccctcatgctgtcacggagcgcctgtcccaggccctcactcctgttctaaggcatctctccagtcctctactgcactctcccccatcagagattcctccctcgcctgccctagaaacttgttgctacttctcccaccttgacaaaagctgctcccaaccccccacctgtctagcatctctgttttcctttaccagcaagactccagtccctgtctccacaccctcttcaaccttctccagttgttcctttgctgccacagctctgccaagctgctccatgaggtctccagtgatgaccttcatgttgttaaatctgggagctgcttgtcacttcttttcccagagctgtcgtcgtcagttaaccccaatacccatacgagacaatcctttccctcccttgagtctctgcactgatgtgcaccttctcagtgcaaaccacagcttttgtctctttctagctgaatacatgactgactgtgcttatcttagctgtcacccctgctggagcagaagctccacaggacaggattgtctccttgattcacagatgtagctcaagctcctagaacagtgcctggtgtctgtgggtcctcaggaagtcctaggtgagtgtgtgaatgtctgtcctcctcggtcttttctgtttcgcatgtgatgttggaaggcctcaggttcaggcttttcttctccaccctcactcccgaagtgattccgtccagcctcatggctcccaaatttatgtctccaggctgactgggtcacgggaactccttatcctccctagaccttctctttccctggtcttctcctttccagtaaacagcaactccaactcctgctcctcaggccagaaacctggcgctggttacctcatttgttcacaaatactgttactccacctgcaagatggatacaaaatctcatgagttcccctgcctccatggcccccaccctggtccaggtgtccagcttccctgcctctgcccttgccccctggttctttgtttagtcctgcaatattgtgctcttctgttcagaaccctccagtgggtccctgcttgctcagagtcacagcccaacaggatcacctctcttgccactctcccaccactcatgcactgcggcctcactggcctcctggctcctccctggaccctccaagtatgcccctgcctcaaggccttgacctctcctctgccctctgtcccaggtatcacacatgtctgctcaagtgtcaccttcccaatgtggccttccccgagcacacccatgtctgtaagtcaggcagcctgcctctgccccaccagttccccctgcctagcataggacttgtcaccatctgccacaagctgtgttactgcttggttttgtttgtgctctcccactcccttcccctccctccctctccccacccctatagaatctgagtcccatgaggacagagatttttttttttgcctcttcctcaatatatccccagtgcctagaatcatgcatattttaatttattgagtgaattaacaaataaattctgcagtgggacattgctctaaggttttgtcttataagagggacagaagaacatgcagcctgctctgctgttggctccttagcttctccatggctaacaggaacaatattgtttatgagataatcaaagccatagtcatgagttagaaggtacatataaaggcaaatatgtggagattgagttactttggcgggggcggaggggtgtgtagttatctgaaaacatggaacaaatcaatgagagtctaaatagcacccacatatttgcccctcttttaaaacatacctcctttatgagtgtagaatttaacagcacagtttcccagtgcagctttgcgaaacaagagaaatgaattttaaaggctgtcaggtgcctttgcaatctgtggcttagtatttgtgtaacaacatttgtgttttgccaacagatgtactgcttaaagtacccatgagaatggcctctgtggttttctactttctcggatggaaccttaggaactgattattgagaagaggctgatactgcccacctcagctcccaggcaggcttcagggccttggttactactcctttgggccctcactgacccttgcagacgtcttttgcaacctctgtagccagaagagacaactgctttctggcatgttgctctttccctaatggctttatgagcttcttgaacaccaaagcatgtgtgacttcctcacgccttcccctgtatagtatagcacccctaactgtatgtgtaaggagaaggagtgagcaattgatggcgtccccctggatctccaagggaatgggaaggggcagggtttctggattcagtcatgtggaatctggtcgttggtgtctaaatgtgcctgttacttgtgcccaatgtccaggttcaccaggaggcttagcctgctcatttccctgctagtagctatattttgggagagcattttttatgctctaattgaactttgtgggtctcagcaatttgaacaatgttttgtttttcttctggtcaggttacaaaggaaagaaaaggaatctggtgttgtaggaggtggtgtgttgtgtaattacttgttttttttttttaagtttttttatatttttgcaacaaggcaagttttctttgaataaataatgctgggagcttatcacatagaaggcatatgtgttgtactcagtacattctgaattatctgggtttatttttatctcttgaattcacttataaacaattcaaaggctgcttttttagctaacagaaataggaagagaatctcagaatctgttttgtcattttttcaatgggttgagttatagtgattatgctaactcggtggaaaagcagtgtagtgagtaaaccccacatacggcatatcatgaacattttgttgcttttttggcttctgaccatcttcatacctttttttgtgttaaaagtctccccattgtgtatatcttagtaagaggcaggtggaccctagtttctacctaagaaaacctgaagatggggttgggggcctgtggtgtacttccttctcatgctgtccatgaccactgcagtggctttgtaaggatccaggacccagggcccctcagtgggtgtcttccatttctcaagattgcctcttggttgtgagatgacggttgctgctctagtcattgcatccactcctccaggtaggaagaaagaggtcataggggaaaggcaaaatggcacttgacatcttaacttctaggcccattcaatatttccatttccatcttcacacccatcatcttgtcctagggaacaaacagcaccagcagctcagtagctataacagcaattattatttctcacacatgggtctgggtcagctgcaagatgggattcagatctgttctcaagcctgtcgttccaggacccaggagggagaagcagctgccaggggaagtctcttcgtaggcggaggtcaggagtccaagaggagtgagcagagtcacagaagcctcttaaagcctcttcttcccccatcccatcaacacgtgagcaagcccagagtcagtgggtgggaggtgtgctccgcccatagtcagtagaacaagagcaagcttgaaagagaacgatgaacaggagtgcactcggccactgtctccttagccataacgtagtcccatggtctgctgggaagcggggaataactctccttagctgagcgcagggtctcattagtaaggcagatggagaacatggatgttgggggacaactggcagtgcctgccacaggggaatggatatattccctccccttgctctctggaaactaggggatggcgatgaagcctaggtttggccaaacccattctgccttcagggactttgactcttgagggacagtgagggattagtcatggtggtggcagttgagtcacaaaaccagcagtggtggctaatgtccagtgatgacatgcaacagtgcccagggtgggtgtcccaaccagcaggtccctgcagtataaccttggctgtgtttgcagtggtgcagcctctattcctgctgcttttctgagcctagttctctagttctctctccatttccagatctgctgcccaagaactcctttgtgattgaatttaaccagagttgatttctgttgcttgaaactcaggaccttgatgcagtgtgcagggtctgggcaaggtaaaaacacactttcatgatttcgcctcaagtatagtagatgagcttaggctttttgagccaggtagccttgggattaattctcagctcttgcacctagcaggtgacctcagcaatcaagtcacttgccctccttgagcctcagtgttgccctcagttaaacattgctctcgtgtgttgctgagcattcagtgagattgtatataaagtgatcattgtgaaggtattgggacataatttgggaaagcgtcctggtctaagcttttgattggctctccatcatttgggtaatgggatagtgatttaggagtatcatagcagctcaaggggcccttctggaaagggtatgaggaaggtcagggacaagtctgaaatgaatcatcctaggcttaatgcctgtgactgggcagtgggtacaattatctcaggctagtcagtagtcatttattgtgagaatacatgggcagattttttaatttccttctcagtctagacttgaatgcaaacagttcttattgctaacttaccactagtcaccactaatgaacaaagactatgaacaggaaattcataaaagaagagatacagatggccaatgaagataggaaaagagttctgcctgctggtaatcaaagagatgcaaacgagaacaaaaatgatgccttttcacctaccaaatttgtcaagattaaaaagaaagcaaagagccagcgtcagctgatgttcatacctgcacctgctcggtagcttgctaatgttctgcctgctccacacgccaggccagcctccacggcgcagccaggtgaggcctttccttgtatacaggcacgtttggattcactgttgcataagtgagacatgtgcatgcttcacaattcaggaagtgcaaactccagagtgatgcaaggtctgagtgtccctgctgccctggtctcccagctgcctaggcctctcttcagggaacggctgcatccagggtcttgtctgtgtcttttgaggtgttctatgtacacgcagacacatctaaacctatttttattttccctgcacctgcttgggctactgtaagctgttaaatttttttttctaggaatttgtccattttgtctgactagcataaagttgttcatgttatagtttatacatttgcaacatctgtaattatgtctgctttttcattcctagtgtttgttgtttacttgtaccttctcccgtttttccttgtcttggtaaaagctcattaggttcattggtcttacaagaagcagacatgtaggcattattgccctgtattactctgtgtctcttttctagttcattaaattctgcttttgcttttatctttattattttttctatggtcttagagtacattctctgtgttttgttgttgttgttgttgttgtttgttttttgttttgagagagagagtcttgctctgtcgcccaggctggagtgcagtagtgcaatctcagctcactgcaacctccacctcctgggttcaagtgattctcgtgcctcaacctcccgagtagctgagatttacaggcatttgccccacacccggcaaattttttgtatttttagtagagatggggttttggcatgttgaccaggcgggtctcgaactgctgacgccaggtgctccacccgccttggcctcccaaagtgctgggattacaggcatgagccaccacgcctggccctaacttcttaagttataaatttggttcattgatttttctacccttttttcaaatgtaaacatttaaggctaaccctctggaactacttcaactgtatctagcaagttctgatagtattgtcactttaagttagcccaaagatattttaaattttctttgtttcttcctttgactcacatattattttaaaatgtgtttttcaatttccaagcacatggctttgggtttgttttttttttttcctagttgctctagaaaaaaaaattgactgcatgaggtggctcatgcctgtaatcccagcactttgggaggccgaggcgggcagatcacctgaggtcaggagttcgagaccagcctggccaacatgccaaaacctcgtctctactaaaaatacaaaattagccgggcatggtggcacacacctgtagttccagctactcgggaggctgaggcaggagaatcacttgaaccgggaggcagtggtcacagtgagccaagattgtgccagtgtactccagcctgggcaacaagagcaatactccgtctcaaaaaaaaaaaagaaaaaaagaaaaaatcaacttctaactaaatggcactgtgatcaaagaacttggtctgtgtgacaccagttcttgcagttggttgagaagtgctccatgacacattatccacaaccagtggacagaatatgtcaccaccaagcatgggtgcaggattctacatatattcattacctctgtcttatccgtttgttgtgaaagtattttctcttcttactgtcattttgtttacttgatttatcaactgatggaatacgtgttaaaacctactgtggtgatggacacatcagtttctccacagagtttggtcattttcattttattatttattttgaggccacattttcagttttagatacagtttcacattcctggtgtattgaaccctttggtattatgaagcgaccatactaatatgttatttttttttaaattattatttattttatttatttttctttcttttttttttttttgagacagggtctccctctgtcacccagtctggagtgcagtggtgcaatctcagctcactgcaacctccgcctcctgggctcaagtggtcctcccacctcagcctcctgagtagctgggattacaggcttgcaccagcgcgcctggctaagtttttgtatttttagtagagacagggttttgccatgttgcccagactggtctcaaactcctgggctcaagcagttcaccagccttggcctctaaaagtgttgggattacaggtgtgagccaccacgcccggccatcccagttttttattttcctcctttctgtgtctttatgcatcagtgaggtggagcttttgaaaatgtcagatagctagattttttttttttgagacggagttttgctcttgttgcccaggctggagtgcaatggcgtgatctcggctcactgcaacctccacctcccaggttcaaaacaattctcctgccgcagcctcctgagtagctgggactacaggcacgtgccaccacacccggctaattttgtatttttagtagagatgtggtttcaccatgttggccaggctggtctcaaactcctcacctcagctgatcacccgcctcagcctcccaaagtgttggaattacagacgtgagccaccatgcccagctgatagctagattttttttttttttttttttttgagacggagtcttgctctgtcgcccaggctggagtgcggtggcgcgatctcggctcactgcaagctccgccccccgggttcatgccattctcctgcttcagcctccagagtagctgggactacaggtgcccgccaccacgcgtggctgattttttttttttttttttttttgtatttttagtagagacggggtttcaccgtgtcagccaggatggtctcgatctcctgacctcgtgatccgcccgcctcagcctcccaaagtgctgggattacaggcgtgagccaccgcacccggcctcgagattttttaaaaaatccattgtctgtttcgtcctttaacatctatttgatttctgatgtatttagattcatttatagcatatttgtgcattctatttttccatattttctgttcttttaaattttccttctcctttcttgccttctcttagacttttaaaaaaattgtagtaaaatacacatcacctaaaatttaccatttttaaatgtacagttcagtggcattaaatacaaattggaggccaggcatggtggctcatgcctggaatcccagcactttgagaggctgaggtgggaggattgcttgaacctggaggtcgaggttgcagtgaggtgtgatcacactactgctatagcccaggcaacagagtgagaacctatctaaaaaaacaaacaaacaaacaaacaaacagattggcatcacacagtgtgtgtgctgctgtgctgtgctgttatcatttaacattaaaacataaacatcagcactgttatggactgaatgtttgtgtcccccaaaattccagtgttgaagctcaaacctccaatgtgatgttatttggagatggggtatttgagaggtggttaggtttagatgaaatcaggagggagggtgggtttcgcatgatgagattagtgtccttataacaagagacagcagagagcttgctttctccaccatgtgagtatgcaatgagaaggcagccatctccaagtcagaaagagagccctcaccaggggctgaatgtgctgacaccttgatcttggacttctagcctccagaactgtgagaaatttcagttgaataggccccccagtctgtactattttgttatagcttgagcagactaatacacccatgttatgaaaagctataaacatccctttaaaggccacctaacgcgtcgtattacctcatgcatcttctctgctgagctttccaaaagagtggcttaggctgggcctggtggctcatgcctgtaatcccagcactttgggaggccaaggcaggtggatcacctgaggtcaggagttcaagaccagcctgaccaacatggagaaatcccgtccctactaaaaatacaaaattagctgggcgtggtggcgcatgcctgtaatcccagctacttgggaggctgagccaggagaatcacttgaacctgggagatggagggtgcagtgagccgagatcgtgccattgcattccagcccggccaacaagagcgaaactccatctcaaaaaaaaagagtggctggccgggcgcagtggctcacgcctgtaatccccgcactgtgggaggccgaggtgggtggatcacgaggtcaggagttcaaaaccagcctggccgagatggtgaaaccccgtctctactaaaaatagaaaaactagccaggcgcagtggcaggcgcctgtaatcccagctacttgggtggctgaggcaggagaatcgcttgaacctggggggcggaggttgcagtgagccaagatggtgccactgcactccagcctgggtgacacagtgagaccccgtctcaaaaaaaaaaaaaaaaaaaaaaaaagtggcgtatgttcccggtctccacctctcattcgccagcccctgtgaccaaacccctgggattagatctccatcgggtccctcccctcaccctaacctcacatgcagtggttcctgagaagctgctgtttatctgatcacgggatccagcaggatctgagggctcattcactgaatctgtactacccaacaaggcaggcttgtccttacccacacttttcaggtgaaaacttaatcagattcaagcgtttatcttagtggcctcttcgtggtgtgtgatttccttcttgcagctctttactggctaaaactcttcactgggagttaaaccaggtgtggtccttgaccctcatcattttgtcccatctcctatgctgggctctgtatccttgtctccaagcagtctcgtgtgacagggaagttacctattattgtatggtcccctcttcttgtcacctctggtgtggcacttgttccatttcttgttcaatgaatgtgatttgtgaatgtgccacatctgtgggaggaaggcagttcgcagcaagagttgtagttcccttgctttgccctgagggccaggactttacactagatttttttgttgcattcctgcactcataaagtacacgtaaacttagaggtggtgtgttaaatgctagaacttaaaactgagttcagctaggctcaagtgccccacaatttttgtcccaccagacaatttcatgaatatctacagattgttccctcaatatgcctcaatattgaggcatattgatttggggagcacagacaagtcaaggttgatgtgcatccgctgaacatgatcttaagttgttgaagtaggtattattaatgaacgaacgtctattttagctccaagagcccctggtcttccagaagagactcccaatgatcttccagaagcagctgggcttcttttggtcctcccccacccaggtgcagtcccgttctccctgcctgggtgagtttgattcctctgccgtggaataggctaggctgctacctcttgagcctcttccaccaggccatccattaggtggcgacagagagcactaaaaggaactactatggaaataaaacttgttttgcttcttggggggaaaaaaaaagaaaaaggcttgtggggcgtgtgtgcattttagtcagattttactgtgcaaaacatttgagagatttctgccctctttctcccttccattcttctcaacccactgggcgccctaccacccctgtctccttcaagataaggtagatcagaagaccaaatagacaaatgccatgtccactgttttctgtcacagttgatagccataccagtcacccaagctggaaacccaacaggcccctgcccttcactgcccacatccaagggagccaccaagtcccacaaattgttcctttaactgtttgtccctcttttgtcttctgtcatcccttctaccgctgtcctggttcaatccctcatcttgctctgggactcccatgataacttatgatctttcctccacctctctatcttccacacaatccctatcatcaatctcattcccctgctttaaacccaagagtggcaccctgtgtttgagtgacatcagggcccctcatgtggctcctgcttctctttgtggccccttctgttgctgctgcttttcttatggacatagccctcagcagtccaggactgcttgtagttcctcccaggtaccatgtttcttgcactcctggcctttgtcattggctcccctgcccaagtccccttctcttctcctttccttcccctgtggccttgccttgtcgtgcttatccttgaagaccctgtcaggtatctcttccccaaagagccctgcctaaccaccgcccccctcccccccgcgacacacacacctgggttaggccctgcctctccacgcctgtgcctcctgccaagtcctcagaggtctctgatcccatgtgcctccaggcatggcatagggggactgtgacacagcctctcggcccacagacccctgattgtgggcttgctcactgccccagtcagtcctcttattgaggattccgtgccagttcctgactccagcacacacacgcatgtaggccgccctcctagtgcctggctccttccctgtctcttctgccactcattcccatggtcgtatcctggagttggtcatctctggaactccacccacggagttctaacttagctctgcctatgatgaggacttactgtcttcccagcttgcagtgtcaaccactgtttgatgcccctgggactccattggtcttccctcctcttgtgaactgtgcccatcaccagacgaacttgttttagaatttaccatcgtaactgagctcccttcagcgcatacctccttggctcctgctcagtctctgtttctccttttagccaaactctctaagagttctctccactcatgggccctcttccttgcctgctgctccttgctcagcttgctccatgaacacttgcttttccacattccatgaaataatcttaacagtcatcagtggctgtcactccttctcagccctttccttgtgtctcttctggtacctcatactctccaggtggccatctcacctcacatcttgaaccctctgggtttgggagaattctcacctcacgagttgatgggaggcctggcgacctctgattgtagtcactgcaaatgccagatgcttatttgcctagcttccctttcggtcagggcagcagttggcaaacggtatctcaagggccaagtccggcccactgcctgttttcgtaaatgaagctttaccaggacccagttccaccccgtcctttgtgcattgtccaagactgctctcctgtacaacagcaggtgggctggttgtgacagatactgtctggcccacaaggtggaaaatactatctggccccttacagaaagaaattacctgagttctacacgagggtgtaggtatgtaccctggcctctgccagtcagactcacatgctaggaggagcagggccaggcaggagagccgtgtctcctggcattggggctgcaggaaagacgagctcctaggccacagtgccagtggccagtgctgctgccttgcagggtcgcacaggcagtgctggctgtttggactggcttggcagaaggatttgaagtattgttcctagccaactggactcaaacctgttcctccaaccctctagggattctcttatcacccagtagccttttccccctagttttaaaaattgcagtaaaatacacaaaagataaaatgtactgccttaaccatttttaagtgtacaattctgtggtattgagcacatttatattgtgcaaccatcaccacatgcatcttcaatagcttttcatcagtccttgtctgcataaatcagctagagttggtttctattgattgccaccaataatcttgacagatatgtctgatcttccttctctgcactgactcctctttctctgtctcctctgctgattctttctcctcatcacaactccaaatagcagggggagggttgtttacacttatattcagcacgccctcacgcactcgcctggctcttcagacctctcccctgaactccagattcatacatccagctgccctttaggcctctagaaagctaaatacctcagtatcaaaaacatgagaaacggaagccagagtcctggatctctcgccctttcgctgtcccggtgcccatgcccttcagggatggcacctagaccagctccctgcatccctgcctagactctgcagtagtctcacgtggcagacccggaggtcactctcctctctggatgccctgcggacactccggttagcctcagctgcaagagcctcctcacccaaggtcacgccatttccaggacagcaccctggtgactgagcgaggtaagggtacaaggcccttatagggccttctctttgacttcttcccacctccctttatggatgtcagttcctgatgaacatcttacacctcaaaccgtgacccaacatctgcttctgcagagcccccctgtggcatcttgtgccctcctgccccactccctctactctatatcttcccatagttagaatgggctttttttttttttttttgagataaggtctccctttgtcacccaggctggaatgcaatggcacagtcacgactcactgcagcctcaacctcctgggctcaagcagtcctcccacctcagcctcccaagtagctgagactacaggtatgcaccaccacacctggctaatttttatattttttgtagagactggggtctccctatgttgcccgggctggtctcgaactcccaggctcaagcaatcctcccgccttggcctcccaaaatgcaggattacaggcgtgtaccagtgtgcccagcctcagatgggctctttgaaaaatgtttattagatcaggttactcccttgagaaaaaccctctcagaataaaacccgaagtccattacttgaaagcagagccagcttcatgggcctttgtaactgcccatgggcttgctggaacccaggcttggtttaatactctactctcaccatctcaaaattcttaatttttgaacaagaggccctgcattttcattttgcaccaggctccacaaattgtgtaactgggcctgcctcagcagccacatggaacatgatccctccttgcctatttgagctcattctctaccattctctcccttgctcacctggctcccactgctcttgctcttcctggaacttgccataatgttgctagagtcagagccttggctcttgctgctcctcattggctggacccctctttacttgacctgctccctcaccactcacttccttcagatctgtgttcagatttcgtcttctcagagaggcttttggcccctgtccatctctctgaatttacctctgacctctcccccaccaccactgcgctaagctgcctcagaactttgtagacattctgtctggtcttctgatgtttcccccttggaagaatcccaaggtgcctgaagaatgctttctttatccttgaagttgagtaggttgactagagtctggcttgctattgagcattctttatcaaattgtcctgggaacatggtgtattctttcagtctgcagatgtagtcgttgctgtttcaggtcagctctcttatggatctttgacagcatcttctgttccatttgttgagttctgtacttcagggacacaaattcctcatgttggattgtctttgtctctcttccaatgctattagctttgccgtaattggtttagcttttgtctttttcatctgcattcactttgtctaatttgattttcagctatgtatattctgtttctggctgtttttcaatgtatttattagtttcataatgatgtgttttggtctgcagtttgtttctctaggttggaaatttgtcttttcatcttattctgttttatcatcccatctttgaactcttttattgggaacatgttcttatgaagttgtggggaatttttttcccttccttgtgtattctcttcttggtgggagactttgcctttctcgtgccatctccctccctgggcctcttttttttcttctggccataatatgtttgcctagttaccatgtcacttcttttcgtcttggctcaggcttggatggctctgcatagtcgttctgtttgctttgagacagtggaggaattcttggctctctcttcccagtttcttggcatcttctcttgctgttttcccctctgagctatcgcgtgcaggcttgttatcttgtatccggagagaatttgcacgctggagggagctgcagccatgtagtcttcagccctatctggattcttctctttgttctaagaactgtgttggatgtcttactaaggctcactctagctgcacgagggatgtgtgtgccatttccatggggatagggggcacctcagtctctgggtggttccataatctgtgtatacctaagagcagttgcttcccacagagctgggctggctcactgggcactttgccatttctcctgcacctcccagctggagtttctgggtctaaaaggaaaaagtgaaggactcccacttggttgcttctctccagcttactgactgcaaattcccagggcgttgcccgctccctagggtggtttctgggggacggggcaggagcctggctttgctgctgctttgtcctctggagtcttttctcagactgctttgaattacacccctttcctttgtgtgctgaaatcttcccttcacactctccttccctgcctttcttttgtgtcttatcttactaggactggaagagggcagttgtgcaggaggtctgcatctaattccctaatccatgtgagagtgctcctgttgtgtgctttgtgacatgatggtgagaaatactccctagagcagtggctaccagaaggaagccatccccccccctgcacacacacacacacacacacacacacacacacacacacacacacactccttctggctgtcctcagatgcctattctaggtaaatgtcagattccaaagaaaatccagttgagatcttttttctttttttgagacgagagtcttgctgtgttgcccaggctggagtgcagtggcacaatctcggctcactgtaacctccgcctcctgggttcaagcgattctcctgcctcagcctcccaagtagctgggactacaggcgcgcaccaccacaccaggctaaaatttttttgtatttttagtagagacagggtttcactgtgttggccaggctggtctcgaactcctgacctcgtgttctgcccgcctcagcctcccagagtgctgggattacaggcttgagccatcgcgcccggcctccagttgggatcttgactggaatgactggtgttcaatcattatagtttccacctaatttgtatttgtacacaggacagttactaatttgttggtacttgtttgatccccagtccctagagttgtttatggggtggagcttcagtccctgctgcttcccctgtggcagcagctggagtcagggtggggacccagggtgctgctggcagattcttgagacaggtagaatctcctctatattggtgtctctctctgtcccagcagtgcccaggaaaacctggccagcctgtcactgacctctccacctagggcactggtggttcaggtccttctatttgccaccggcaaaccgtacttctgccagtctggctcttaggcccagtttctctgatcttgcagattttcttgggctctgctacggaatcctcatacctccggcaggtccctcctttgcccatgtgtttaactgtggtggaatcgtgtgagagctgcttctctcgcatggatcccagccacaccacattctacagcggttcctctgaaggcattgatagagatatttcctcctgttttgcatttcgttggtcatttcagtagaatcagggtgaaataaacatgggggctcagatgtcagcattacgaaccaagtacgtcaggcaggctgatgtggactgacctacactagtgagacgcaagatgacgaaaacaagggcactcactccaagttactgatgagatgtttggatcaaatgagccagtccttaagcagagttctctagtaaaagagatctcctttctgccctttcttgttccccaaaatgtgttgccttcatggtgaaaatttattttggcagattttctcttctttgataaaagcagccaacactttgttaaaagtctgtgaaacttatttacatgaagtatgtaaaggtaagaaaaaaacattatcaacaagaaatggagaaagccagcagctgaggacagaaaagtcatgcacagtgtcagtgtctatggaaacaggccacttggaccttgaggactaggtatttggaattggaggtgagcttggcctggtgagtctctaaccacttgtgtgtaggatcagtgtgagaaccctgctagaatatagtggcagagatgcaaggggaaatcattggagaagttaccagggaatgatgagctaatctgaaaaaaatacatgtttctaagttgggcgtggtagctcatctgtagtcccagctacttgagagcctgaggcaggaggatcgcttgagcccagcctgggcagcacagcgagaccctatctccctaaaaaaaactttttcgttgtttagttttgggatttttttttttcctggtcttttttccccctttttgtgaataacgggatctcactatgttgcccaggcagatctcgaactcctgggcccaagcaatcctcctgcctctgccttcctaagattacaggtatgagccactgtgttaagcaaaaaaacttttttaaatgaaaatcattttttaaaagacaggctttccaggggagggtattattccacttatatgaagtgtcaacagtaggcagatttgtggagacaaatagattagtggttaccaggggctgagaggagtgggagtggggagcaactgcttaatgggtaaagggttgtctttggaactagagagtagtgatggtcgcatgacattgtgaatgtactaaatgctattaatgataaattttatgttatgtgtattttaccacaattaaaaaaaaaagatcaaatgtcctcagaatagccaacaaccttccacttggctaaatgcctactcattaaacttcttgaactaaattcctttctgattgtcatggttattgtgtcctgggcttcagagtttcacattcaggttggcttggtccagtctgtcatgtatcactataggtccccacattggcctcttcctcagacggacagcccatctatctgccggggctctgtgccacagccagatagacttgctctgagacagctgtgtgggctctgagcactggccaggcatcacaaaacctatctttatgatttagaataattggtggtcagctgctgttttaatgttgttgttttttttaatttagatataattcacataccatgaaatttactcatttaaagtgtacaattcattcttcagtataattcataggctcacagaaaaaattgtttaaaaataaaatgtgcaattcagtgtcttttagtacattcacagagttgtgcaaccatcgcctctgtgtcattccagaacactttcagcacccaaaagaaaccccagacacaggagcagtcacctcttattacccgcagcccctggcaacaactcatccacttcctgtctctatggatttgcctattctggacatttcctataaatggaattatgcactatttggccttttgtgtctggcctctttcactgagcgtaatgtcctcaaggttcatctgcattgtagcatgtgtcagaatttctttcctttttgaggctgaatgatattatatcctatagataatgaggttttgattatccacccatcccttgggaatgcatatttgggttgcccccaccatttggctgttgtaaactgtgctgccatgaacactggtgtacggatatctgtttggttactggttttggttttttgtttgtttgttttggttttttgagacaaggtcttgctctgtcgcccaggctggattacagtggcacgatctctgctcactgcaacctccacctcccaggttcaagcaattctcctgcctcagtctcctgagtagctgggactacaggtagcactcaccaccatgcccggctaaatttttttgtatttttagtagagacaaggtttcgccatattggccaggctggtctcaaactcctgacctcaggtgatccacccacctcagcctcccaaagtgctgggattacagacgtgagccaccgcacccggcatagttgtggctttttgagagtgtatggctaggagtaaaattgccaggtcatatggtaactccatgtttaacatttgagaaactgccaaactgttctccacagcaggaattttttaacctgtatgtggtgggcttgtgtttcggttttcattttacacatctataaagatgagatttgctgtatggcactggttgcctgtatttggggagggttctgcttttggttggcaagaactgcattttatttaagcttagcaaaacataactggtttctcgcatcttctcaaaagtggaggattaagaaatggactgcgaattcagagcagggcagctgaacctcaggctccacccttgtagccttcaagctgaacctcattctctcttgctccctggagaccactgagacactctgcctgtgccagtttgatttctcacatttttaaagggccaaagcttgtgtctcaaagtgctatagcctttattgattcatgcagagaagcctccttgattccgtaattctgcagctaatactggaagtagaaagaattggaaacaccatctggatgacactttagggtggaagcagccagtacaagggggggctcattatttcctctggtcccagactgttcacctggagctgtagccaccaccctgcccttaggttaactgcctcgagtggtagtttagctctttgtgctgtgccgagggataactggaagtgaaaggtgctgagaaatgccatctcctgaaagtggcgagcatgagtgaatttacgaaaggttgggatattgctggggctctggaagtttctctggagctcactccaggggacagggagggggctggattccaattcaagtgaaaaatacctttcatctgccttgttcacctggcttttttgcctttttgtaaaatctgaaaacctcagggattgagtagtctttccttaactgcagttgcctgtctggccacacctgccagctgttgcttgtacccctgtaatttgcacggccttccgggcctttctcacaagatcactgcaggtcacattcatgaggaaaatgcaggcagttcctgccatcagacccctcaggatgtcatggtttggcctgaaaacaagattcctgcaactctaattttcctttgctagatcaaatgaaggatttgatctaatgtttgcattctagcagcaaaatcattgaatattttatttcttaagagccttacttcatattttgtaggtattttaagattttgtaaaggcctttctgcttcaacgtgtgatgtgtgcattcttagaaaaagatcttgtgttctgtaaatcacacaataaaaacatgagttcgtgcaggaaaaactggggcggggtggatcactccaaacttgtgtggtgtggtaactggagctcactgatgaaaccatgaacagttctggctgaaagaaccccacagtacactgaggtctgttggcatcgccgccagcaccgccccggtccctttgtgcgcgccaccacacctggctaattttttatttttagtagagagggggtttcaccatgttggtcaggatggcctcgaactgacctcgtgatccgcccacctcagcctcccaaagtgctgggattacaggtgtgagcctccgtgcccagccttcagctttttttcttaatgtctttgtgtaatatgaaggcattctctttaattgttaaaaagcttgcctaccactgcttcaaaatattactgtcagttggcatagcttctgattatattgatgtcatctcccttcttttaaacatgttaccatattggcactgtatttcccctagcccattgatcacttgagagttagtcatagtcctcgtgctgtttcactcctaaacgtttaagcatgcctttcctaagagcagacagtacagttaagacactcaggaagtttagcaatgagctaacacagaaccttacatttctccacataccccataaatgccttttttagagcctttgagcctggaatgcagagtccaggactgtgtgttgtattcgattgtgtcatcccttcagtctcctttatcagaaatgttcccccacccccttgttttctctcatcatcttgagtccagaccgtggttgcatggcacgccctctctggactcttcctgctgtctcctcacggtaagcttcagtctcctactcgtgatgctggttcatctcagcagcactgaggggcctgagctcagtttggtcgtgtgttaaggtggtgcctgccagatttctccacagaaaagggccccgtacttttatttgctcttcagcctgtgtattccttcctttcttgccagcttgtgggtggcttctctagcagcttctgtaagatactcagtttggcagttgtagttgtttcagcaggagaggtgtctgcatacctgaccaccacatggctagaagtcgatccatcctctggcgtaaccatcctccatgctactgtccctggggcactgaggccctcctcagtgacttcctccacctcatcttccgccatctccaagccaccagtgtccaacggactactgatatgtcccaaactcatcatttgtttattcaccaattcagagcccacctttttttcagcactgagctagcctctccttgctagaagcttacggtcgaaggtctccagccatcagaagaagcacgtggagcgctgcgtccgtgttgtggttattcatccagcatgtgttgagtaagggttgcacctgtgcctggcattatgcattgagcggggagatgggggttggcacgcacagtggggtgttctaagtacactgagggctcgggtgccctggctcatagagcagggagggaggcaggagcagggaaggtgtctcagaagtgccatctttttttttttttttttgggaagtggaatcttgttctatcgcctggtctggagtgcaatggcactatctcaactcactgcagcctccgcctcccaggttcaagcgattctcatgcctcagtccccgagtagctgggaccacaggcgcacaccaccacacccggcaaatattttgtatttttagtagaggcggagttttgccatgttggccaggctggtcttaaactcctggcctcaagtgatctgctcacctcggcctcctaaggtgttgggattacaggcatgagccactgcgcccggtctagaagtgccatcctaactgaacctgaaagatgaaagttctccagatgaacctgaaagttctccaaatgaaaaggtgggagggggtgacagggttaggcccagagcctctggtgacacagggtgggcatcattggtcactttttcctcgagggaggggcgtcacacgggtgatagggtgggagctataaccatgttgatagtgccgcctctgcccatctggcctggcatgccctgagccctctgtcccacctgtggaactcataagccctgacagcccactcactcctgattcattatccacacccctgtgcttccgctgtgcctggagcaagctttcttcagggggaagggaggctggaactatgttgtagttacctatttgtcctcccttccaaactgtgagttcttggaggtggaaggatgctgcaggatctggctcaggacgaaggcagttggtgaacagacacgtgtgtttttgactcacggtgatctcagacaagttcctctgtctagtcgaacttctttttttccatctgtaacactcaggagttgaataggtggtttttctgaggatacttcaactgtaaaatgtatgaacttgtgaactagctatttagttctcctcataatcaagattgtgtgtgtgtggggggttctgattagagggaggatgaagagaggtgtatggggttttttttgttttgttttctgtttgtttgtttgtttttgagatggagtctcactctgtcacccaggctggagtgcagtggcacgatttcggttcactgcaacctctgcctcctgggttcaagtgattctcctgcctcagcctcctgagtaactgggattacaggcatgcaccaccatgcccagctaatttttgtatttttaatagagatggggttttcgccatgttggccaggctggtctcgaactcctgacctcaggtgatccacctgcctcggcctcccaaagtgctgggattataggcatgagccaccacacctggcaggtttctttgaaaaagtttgtgtttcggcaaacaccataaaccccctgggggacagccttggggagtcacctggcaccctagcccagcctccctcccttgggtcctgcagtgaaggcttagtgagggtgtgcaaatgcccaggtcaccctgggactgggcaggccctctgggctaagggtaaactcatttggaatacctgttttctatcattgttttttatttgttaaatttaaagggtacaagtgcagttttgttgcgtggatatattgtatagtagtgaagtctgagctttcagtgtaaccatcacctgaatagtggacattgtacccgttaagtaatgtctcatccctcaccccctcccacccttcccagtctctccagtgtctgccattcctcactctgtccatgtgcacatgctattcagctcctgcttctaagtgagaacgtacggtatttgactttctgtgtctgagctgtgtcactgaagacaatggactccagctccatccacgttttttatcatttttacctgcactccacacccagcacaatccaggcttctttgtgggttttttgaaatttgtctttaattataaaagtagcagccagcaaattaacaaacacccatgtgcctttcattgcacagaattgaaaatcatcatactatatttgcttcaagtaatttccattagaaagaactagaatattacagtagagttaaagaccctttatttcccatcttcagtgctcttaaaagttcatttagggccaggcatggtggctcacacctataatcccagcactttgagaggcccaggtgggtggatcacctgaggtcaggagttcaagaccagcctggccaacatggcgaaaccccatctctactaaaaatacaaaaattagctgggcgtggtggtgcgcatctgtaatctcagctactcgggaggctgaggcaggagaatcgcttgaactcaggagggaggcagagcctgtatgcagtaagccgagattgcgccaccacaccccagcatgggtgacagagcaagactccgtctcaaaaaaaaaaaaaaaaaagttcattcattgtacacttagaaatagttaaaaaggtaaactttgttttgtgtgtgtgtgtatatatatatatatatatatatatatatatatatatatatatgtatttttttttgagacatatatgtgtctggtttgttcgcccaggcaggagtgcagtggcatgatcaacggctcactgcagcctcaacttcctaggctcaagtgatcctcctgcctcagcctcccgagtagctaggattacaggcacacaccaccatgcccagctaattttttttttttttttttttttttgtagagacagggttttgctatgttgcccaggctggtctcaaactcctgagctcaagcgatccacctgcctcacctcccaaagtgctgggattacaagtgtaagccaccacacctgacctgttttgtatattttaccacaataaaaagcctttaaaaccccaagcagacagttcattttcattcaggcccaactcagaatctgatcacagcggggtttcccccctttctagcgagtagctgaagaactgttttctctccttgatggtataactgtctctgtgggtgttgctcccctgccgctccagtggttttgtttttgtttttgtttttttgagacggagtcttgcgatctcagctcactgcgacctctgcctcctgggttcaggcgattcttctccctcagccttccatgtagctgggacttacaggcacctgccaccacgcccggctcatttttgtatttttagtagagacggagtttcaccatgttggccaggttgggctcgaactccagacctcaggtgatccacctgcctcagcctcccacagtgctgggattacaggtgagagccactgcacccagccggcccctcagtcttttccttctcaatcagtggcaccaccatcttcccaggctttggacatggtccctgactcacccttgcccctcacccccacactaatccacctgcgagctctgttgcttcaccacctagaccagccccaaatcctcaactgcccccaccctgggccacacctggaccactgctagaggcctctcatgggccctccctgtttttctcttgcactccccgggctttctggcacaagatgccccagaagcagaatcacatatctctcctgggagccaatctagtgtgtttactgcccctggagtgttattgttggccttagaatatgtcccactacaggtttgcagagcactgtagtcaaaagtcatttgaaataaatcttttctctgtggtatattgtcaatttgatatagaattaaatttgtttcttttcttttttcttttctttttttttttttttaagagacagggtcttggccaggcgtggtgtctcatgcctgtaatcccggcactttgggaagccaaggtgggtggatcgcctgaggtcaggaattcaagaccaacctggccagcatggtgaaaccccgtctctgctaaaaatacaaaaattagccgggcgtgatggcaggtacctgtaatcccagctactcgggaagctgaggcaggagaaggcttgaactcaggagtcggaggttgcagtgagccaagatcacgccatggcactctagcaagactctgtctcaaaaaaaaaaaaagagagagagagagacagggtcttgctctgtcactcaggctggagtgcagtgatgtagtcatggctcactgcagcctcatactcctgacctcaggtgatcgacccgcctcggcctcccaaagtgctgggatcgtaggctgaagccaccatgcctggcccgaactcatttgtttttatttgcattaagtgtaataaggttttgttacttttagtttgaattttattttgggtaatataaacatttacatgattcagaagtcagaattacactgaggcatgttcagctaggcctcactcctgtgcctgtacccttacctttttccccctaccccatgcagggaatcaatttcattagttcctggtgtgtccttccttaatacccccccttctttctttggtagaatgcagtagatatgtttgcgctttgctccctttgcttcacagtggatcctggaaatgactccatcgcagttcttagagctcttgtttagtccctttggatctgcacagtactccagtgtgtgggcgcaccataagtttattcagcaagtgccctggtgatagggatcgggggtattggaagcctttggctggtaaaaataatgttgtagcaaataacatcatgcatatgttctttgagatttctggaggtgtctctttagcatagatttctagaaggcattccttacgtcacgtttaggtttatagtttgacctcatggtgattaaggtatttgggaaatgcaaatgagagtttcgaagaagccagatctttcccattagttcactgtttttctctgacattaggaccgtccgggttctagggagcagccctggcgttaggcagtgccatgatggattgtgtagaagtagcgattcccatctgtctgctttcttggcccactctgctggtggctccccttccctccctcctttatggggagctggggagctgcctaggggtccattctcaaaggctgatctctggtgggcaacaggccacacctagctttccagggttcttcgtcatttcccattgagagctgtaagactcagagacatgaaaaggaagctctggctgggcacggtggctcacgcctgtaatcccagcactttgggaggctgaggcgggtcgatcacctgaggtcaggagttcgagaccagcctgcccaacatggtgaaaccccgtctccactaaacatacaaaaattagcctggcgtggtagcacacgcctgtgatcccagctactccggaggctgaggcaggagaataacttgaacccggcaggcggaggttgcgatgagccgatattatgccatcggcaacagagcgagactccatctcaaaaaaaaaacaaaaaacaaaacaaggcgagctctgtgctgggacagattagggacccctctttacagcaagaaagactgctctgtgggttgtaggatgcctttgtgtatgcagtggctctaggtgactctggcagccacactctgggccctaaacttctggaggaagatacaggatagggaggaactcaggggtgagtcatggtggggacaagacattccctcactctaagaccttgtcactagattggaacatctcttgcctccctacacctgacctgatggttctggagagatacgtccttgcagcttctgagtcccagcactaagcagcctttggtaacttccctacatcatttgagttctggtttcctaaggatgcttgccagtgagtgccatggtgccctcattgcacagtctgtgcagtgtagacaagaggggaagtctcttggggtagaccagccgcaaggcggtgactagcactgatgtgaaccacatgggacaggggagttgtggggctgagaacacggagggtgggagtagtcatgctcttttccagaatgaactgctaacgaagggactcgcaggtggctgctgcttctttccaagctgcccctgttgttgcagaggctctggagtcctaggaggtttcacggtggcatactcgacagagtactagagcatcatggccagatagtgatgctggggtgtggggcctcacggtggccatttctgacgagaccccaccgggccaaagtgatgtgtagagaaggagctgcttcggtcaccagaaaagaacggggaagcctcccacactagaataggtagggtgctcttctccaccggcaggaaggggatgtatggctctgcctggaccacacctttttccttgctcttccctccgcatctgctgtggccgaggccattcctcatcagggaacatgtgttagaggctcacgccacctgggaccacttgtcttatcacccccaggaccctaggcggtagtttcctgtggcctgagttagctgatatttatatagtgccattgtgccttttctcctgtgatgctcacagtaaggatgcctagatggggttacctgttgtcaagataaggaaactgaagcacagaatgctgaggtcatttgctgggttcatgtttggaaagcggcaaaggatttcagtgcaggttggctggctccaaacctgtgtgtgctttccatgacactgtactgtgtgcctcattgagcctcattctagaaaaccaaaaacacacccaaggcccggccttcacaaaggagacccctcccccatttggctccctttccagcagtcgacggcctcttgtcagccatcgagcccagagtcccttgaagtgcgactcatgctggggtggtatgctcaggagccgcagtgtttccgctcagaggaaagggctctgattctcctgcagtgctaggagacttgtgggtggccacagtgcaggtcaggcacaccggccagcaccacccacagcccaaattcctaaagaaatatttgggtcccagcttggcccgagtctctgttgtcctggggaaggacatcaagatctgagtgtatgatggcctggggccttgcatgtggtgggggtccaagcctgcctctgctcacttgttctgcagactggcatgttctctgtgatacttacatacttgtttaacacttcagggaagaaaagtcagaagaccaggacctccagggcctcaaggacaaacccctcaagtttaaaaaggtgaagaaagataagaaagaagagaaagagggcaagcatgagcccgtgcagccatcagcccaccactctgctgagcccgcagaggcaggcaaagcagagacatcagaagggtcaggctccgccccggctgtgccggaagcttctgcctcccccaaacagcggcgctccatcatccgtgaccggggacccatgtatgatgaccccaccctgcctgaaggctggacacggaagcttaagcaaaggaaatctggccgctctgctgggaagtatgatgtgtatttgatcaagtaagtaagagcaactcctatctctacagggcagggagggcagggacaaggatccctcatggagcaggaaaatgtatgtgcccagggtggggtcggggggaacataaacaatgaacactgagaccaggtgtgcttgaaatgaccgtgtacagaggtcgctgccctgagtgggaagttctcaaggtagcaggccctctatcctctccacacctcaagtctttatctggggatggaatagctgcggaagcagaggaacttgcagagctaggggttcagaggggtgaagaagcatgtttcagttctgccttttaaatgatcccaaaaaggttagcagttttcaaatgacatttgcagacagcctcatttaattccatgagaagggtgagcaaaggattatcttgttgaaactgattcctggagagactgagcaccgtacctgagttcaaacttgggaatgttctagatggtgactcaggcccaggcaccaaccagcagaatgggcctcagcctgacaacccttctgtaccaggcctgactctttggttgctgaactttggagaggcctgggggggtcagcggcaggcagacgagtgagtggctttggtgacaggtcctcaggggcagccaggcagtgtgactctcgttcaatagtaacgtttgtcagagcgttgtcaccaccatccgctctgccctatctctgacattgctatggagagcctctaattgttccttgtgtctttctgtttgtccccacagtccccagggaaaagcctttcgctctaaagtggagttgattgcgtacttcgaaaaggtaggcgacacatccctggaccctaatgattttgacttcacggtaactgggagagggagcccctcccggcgagagcagaaaccacctaa

SEQ ID NO: 11 - DNA, 66294 bp, Homo sapiens
ggccgccgccgccgccgccgcgccgagcggaggaggaggaggaggcgaggaggagagactgtgagtgggaccgccgtggccgcgggcggggacccttgccggggggcgggggtcaggggcgggacgtggcgcgggaggggcccgcggggtcggacgacacggctggcggatggcgtccctcctctctaccctccccctcccgccgccgccggtggcgactctcccctcggcccgtcacccctgctcgcgggtgaccgtcctcggcgcggcctccctggagccgccttcgcctgacgcccctcttcctcccgccctcgacgcgcatcccggcccccggccccgcgggcgcccctgtcgccggggcttcgcctgtcggggctgcgcgcgctcctgcccttctcggggctttgggccgcggcgccgtcgcgcgcccgcggccccggcctctccctggatcgcgctctccccctccctccctcgcgcgccccctctcccgttactcggcccccccaccggcgcgcgtgcgcacttcgcctcccgtcgggagagtgcgccacaagggctcctgagctctcacccccatctctgggctttgcctccccctccttctcgcccattccatgaatttctgccccccgctacccccccgcgagcgagtaggtccaccggctcctttccccatctagcaggaacaagtaggtggggattattatccacaaaagggactagacattgtgttctgggtcccacaactcatcataaagaggtggttatagttcccatcaggagccgtgggtaggggactgtgcgtccagcagcacccgaggctcttcggcgccagaggctctaaggtgcgagcgtgtccccagggtgctcagaggttctttggagtgctgtggcctcggaatgtgagcaccctcccatcctaccctccccttcgccggcgatcttccagttacataagtggagtgggacatagtaggtaacgggctctcatcgccctggagcgctcgggatcaccggtaccagatggggcaagttcatcgcgacgctgtggctcctgttaattgtgcctgaaaggttatcctctgttcagtttggtcatgaccgaatcacccaaactgaaactcagatgacttttatatggcagtggcaatgtttctgtggttttgcactaaagacttaaggtcattatgaagagtgtaaaaggattgctgtcgcaggggagaccgtttatgacattgctaagtatggaccccgagggggaaaaagctcattctggaattgctctgtggcggttgcttctgttgcgagtgtgttcgggtgtgggttggtcacagcagaaatgggctccaccacaaaattgatattcctgactcatggtcaggcagatgtgtgcttctggttatttttccaggaacaggaatgggctctgccgagcctttcacacgttgtgtctctgctgtgcgggatcagtaccccagactgtgagataacaggatcgaattcaggggttggttggtgatccaggaaccatacctacttggatgtgatactgagtggcctagacgttgtaggactctcataagttttagacattttgttatactgtaaaaatgaagcatatacggcctcagtagtaacattgcactaataggtaattattactctagagaattttgggttccatggctggaatgttcatcagtatctcagcaatttcagttaataaccagattaagctgacctcttgagtcttttgaaatctgctgggtccctataataagacagggtctggattttttaatcttttgggaatttccaccaaggatttagggaaataggcttttatgggcttttcaggatttctatttcaaatcccaatgaggaagtctaggaaacacttgcttttattttcttgcctgaatatgtcagaaccttaaatcacccaatcaatctagaagtactacagttgattaaagtaagtcaccacaggtcacccattcgtggcaggtcagctaggtggctgatcactggaatacagtcatatccccaggcatacacacgagcctcacttgacgatcccaaagtttgtacatctgagcttgagacgtgacaagttgaggtctctgctttgttcttcatagttggcagtttgtctcctcgggtgcccctccggttagctgtttatcatacgtctagccctatcaacagtgcaggcagcttccagagtatagttttctctgcaaagtgcctggtggaggggtacctccttttccattgtcctaatggctccactgggcttccataccagccctttccagtgtcttaacagctcaaagaaacccatctgtggctttcttgttagcactggcctatcacaccttcctattgcctgttaactaaaattttgcctggaatgctttaagcttagagtactgggtctttgtttcacccgattgataggagagtgtcatgcagtcagccgaactccgacttctgtgctgtttaaatccttaggtaggtctggggcaaggcacaaaccactgtgtattcaaagggttatggtgcttgcattctgtgtgtatatgtttgtaatttccaaccagagtcgtttcccgtgcctgccctgcctctgtgcaatctagtctagtagggtagggaggcaagctgtggagtttgaaaaaaaaaaaaaaaagctagatgagtttaataggctgttaccccctccagaacattcctcccatgtggagatgaaacgagaagttcatttctttaacctaaaataaagaacaacagagataaaattgttagttccttattggagcctggtttccattgctaatgtacctgcttgggactctgcatgataaatgacgtgtcctggaacctgaaatcttttataaaggttaatatcagcagaaatcttttaattagctaagagcagcttgttctcaagctgcccgagttatcttggaggagagaatcacaggaaatgtttgatatttctagtaaccagtgttttcagtgcgtggggtaaagcacactcctagactggccagtcccaaagagtgtggcaggacacctgcttgttttccctgccctctgctatggtgacatccttgcagaccagtcttgcgtggctggcagacgcaatctttttttcttgggtagagcattatcaccgctgcgatggaaggaccttgtcctcggtgcctccataccagccctttccagtgaaactactgctgtcccggcaagcccctgtgcgtgtgcatcattccgggtaggacaagatgtgaacaggtccctcttctttgggcttaagtagaagttgtgctcttctgcttttacctgtgtgctcttctgcttttacctgttctcttctgcctttctcttgcaagaaacctgtcgaaagcttgctttgcatgccattgcttaaatactttgatggtatgtatggtatgtgggataactgagtgggagccggaattggggggtgggcagggcatccccacccccacccccacatcaaagggggaatgaccatttcgttagagaataaagcctgagtcttataacttcttcaagcacatgtatgctgggtctcctggcgtgtgaatgtgttcccgctgtgctgtgtggctgttttgcagttactgtagacactgtagtctgggctctcattattgcctctgaagttgacaggaccaagccttagtaaggatgcacttgtcttcctagcccaagagctaggggtgttttatatatatattaactttcttttttagatttcataaactgctctcattttctcttttctttctttctttttttttttttttttttgagacagtctcactctgtcacccatgctggagtgcagtggcacgatctcagctcactgcaacctctgcctcccgggctcaagcagttctctgcctcagcctcccaagtagctgggattacaggcacctgccaccacgcctggctaatttttgtatttttttttttttttttttttttttttagtcgagacggggtttcaccatcttggccacgctggtcttgaactcctgacctcgtgatccacccgcttcagcctcccaaagtgcagggattacaggcgtgagccaccgcacccagcctctggctcttttctttttgacatgaaatcttaagttaattatcttaaactttaagaactagaaggattcttagtccagcaccatcagtttacaaacaaaaaaaacttgtgtccctgagaagttgtgacttttccagggcctcctagccaggataccagtttggtttttattatatagctagccgagtaatactattaacttgacttctgggatttcaaagtattctatgacttgactgtttaagggaattatgaggcctcactgaacctcaaaagataattttaggtaccatcctggtagctgtagagcagcaacagaccagtaaaagacttggttggtgttgcccttcttctgggtttgattacatgagtaattgtgtgaatagtctctaagttgtatgctctgagctttcgtttttagcttataaaagtgctactcttgggccagcatagtatcagaaattagctaattcatatggggcagtttaggctttaactaggaaatgatggttatcttaatgacaaaaaaggtactgacaaaagtccttttttgaacatgtgttcaaaagaaaaagagaaactatcaaactaataactgagtttgttgaacatcgagattgactgatctgagaggcttaaaactgattgccctgaaatagacttgcatgttttggatgatggctttgggtctcccagagcacttggtttcccttggtgctgattttttctctcaggattaaagcccctttatgtgatgttgttacagcagcttattgcaacttcattcagctgcttgaaaaagaagggagactgcctctaggttccatgtgttctttcagggatggtattttgatgttgcgtattctcttgaacatgtattcttccctgagaatttctgtgtgccgtggtagaagaaatacttgccagaaatcgccactcatggtatgcttttgtagtgtcgaagtgtcccctagaggtgacaaggcttgtgatagtgttgattctaacaagcatgaatctttcctttattttagcactgtgtgttacgtgccagtaatttgcagcttatcctttgtttctagctaggtaagctgggaaatagcctagtactttgtctatgtgtttatcttcaaaatgtcccaaatagccctgggaaaaaggtcgtgcagctcaatgggggctttcaacttacaattttctttgttttaggctccataaaaatacagactcaccagttcctgctttgatgtgacatgtgactccccagaatacaccttgcttctgtagaccagctccaacaggattccatggtagctgggatgttagggctcaggtaagtaaccttcctttttttttttttagtatatgtcctggtttggccatctgttttttttttttttaaaaaaaaaaaaaaaaggaaaagaggaaaaaaatatactactcttggacagtataaaagtaccccaaagactaaagacataactgtgccaaactgtgccatataataaaaaaaagtcacttccctgagccctgaaaggtcagtgtgtgtagggttacttggtcgccacagcgtgatctgggggcgggcgtcagattagagccggaactggtgatctgcaacttcagttcaccttgaagcaggtcagctgagctgagagcgcttgcactgagcccttttgcgctgctgctgttgccttagcggtcttcagcatgtgtttgctttggtttggggtaaatggcttagtggtcaacattagtgagcagtggtaatgcattttcagatatgggaactggtatgtggttggttccctagaaggacaccctcctgaaagctgtctcagaacaccgggggccatggctaatgtcatgtgcttgctacactcctcccatggtaactaaagagagtacccagatatacatctggttcttgggactctagaggaggatgagtactttgtaaaaacctgggggccccagtcattctaggtctgacactcaggtgctgtatcagctgcagtttgaactacttggcaccattgtgtggactttagttttgtaaaaatgaatggttccttaatttctcaaccttcaggctcaacatctcaagctgtttgttgttgttgttgttgttgttgttttgttttgtctttttgattagtggtcactccgcatttgatgttttgacatgtggatttcagaacttctgtgtggtaaagcagaatgttccaattgaattttcccattttttttcccctaagcaaaaatgtgagttttcacttatgcggccattgtgattccgactgagaccctaagtcgttctttgttgtctctctagtggtttctgacacctcagtgtgaagctgttgtagacatccataagaaatagcctgcttagggattatgtgagggcaaggtttggctgaaggagaatagaaggtgtggaaggaagcggaagaccagaagagcatcacactgcctcaagtcccaaatttgattctgctcctgatcctgtgactcaaattgtcattctcttttactgctgtggggtgtgctctgggcccagctgacaggacattctttgtactccacgtatttatgctggtgggagttgtatggctagtgctttgtgctttgtctcagaaattgtgtggactaaatgtaatatgggcagtgaatgggtttcttctggaagatgttaggcctggagggtggtttgggtttttacgagtctttttctcagattacagattacgaatggatgttataaaacaggcagtgttgacaccatacagtttctcctaagaaatgtacagagagttcaacctgaggaagctaattgaaaataaacttttaaaaagaaatgtagaaagaggaaatttaaaaagtatcttatgaatgggaaagatgtagccatttgagcttcaaagaacttttgagggaattctcaaaggacagtacccgtctttagtagataaatgcttgatatctatttttcttcttttactttttaaagaattactaaaataatacatggatttatagaaaaatcaaaccacttaaaaattgatcaggtggctgggcaaggtggctcatgcctgtaatcacagcgctttgggaggcctaggcgggtggatcacctgaagtcaggagttcgagaccagcctggctaacacggcgaaaccccatctctattaaaaatacaaaaattagctggccatggtggcttgagcgtgtagtcccagctactcggaaggctgaggcaggagaatcacttgaacctgggaggcggaggttgcagtgagccaagatcacaccactgaactcctgcctgggtgacagagtgagactcggtctcaaaaaaaaaaaaaaaaaaaagtatcaggtaaaaaaatgaaagctccccgcttaatctctgctcccactacccagaataactgctgttaatagcttaatgtagatccttctaagtcttctaagactaaactgtgtactttttgtgttgtaattaacaggagggtttttgttttgttttgttttttctttttttgagatggagtcttgctctgtcatccaggctggagtacagtggcacaatcttggctcactgcaacctccacctcctgggttcaagtgattctcctgcctcagcctcctgagtagctgggattacaggcgcctgccaccacacccagctaatttttgtatttttagtagagatgggtttcaccatgttggccaggctggtgtcgaactcctgacctcaggcgatccacctgccttggcctcccaaagtgctgggattacaggcgtgagccaccgtgcctggcctcaggatggtgttatatatacatattctgcatttttccatctcatatattcatctctgcctcatttcttttaaatagcagtgtagtccagggctgacttaccgtcatgcatttcgttgtctctctatgttattaaaaatgctacaggattgaaattcctcatgtgccagtcattttgaagaatggctgcctagacttggaatttctggtggataccaccacatcactgtccaaaatggctatcccagttcccacaacagtctgagaaagtgccattttcccatatcgtcccagaattggatatacatcttttaaattggtgccgcttggattattactgaggctaaacctcaataatcattgtcatagctcttaatgtattaaagatgttaactctttgtcatgcagatattttcctgttttgtcttacgtcttgattcttgtctttctgatatataaaatttatgttatgatttattcttttgctttcatacttaggaaatccttttttactcttttttttttttttttttttttttttgagacggagtctcgctctgtcgcccaggttggagtgcaatggcgtgatcttggctcactgcaagctccatctcccgggttcattccattctcctgcctcagcctcccgagtagctgggactacaggcgcccgccaccacgcctggctaatttttttgtatttgtgagacagggtttcaccatgttagccaggctggtctcgatctcctgaccttgtgatccgcccgtctctgcctcccaaagtgctgggattacaggcgtgagccaccgcgccccgccaggaaatcctttcctactcttaacaacagatcaatagtcatctatattttcttcctaaaaaacctgatgatgtattatattcatacatacgtatttaatacatacaaaagggccagatgcggtggctcatgcctgtaatcccagcactttgggaggctgaggcgggtggatcacctgaggtcaagagttcaagaccagcctggccaagatggtgaaatcccgtctctactaaaaatacaaaaattagccaggcgtggtggcgggcacctgtaatctcaactactggggtgactgaggcaggagaatcgcttgaacccaggaggcagaagtttcggtgagccaagatcacgccactgcactcctgcctgggcgatagagtgaggctctgtctcaaaaataaaaaataaaaataataattttatagttaagttgccctgtgtttttcctgtgattaaaaaaaaaaatacctgttttgtatttaactttggggtgggataaggtatagcccacttagtcagttgtgtctaagccacttgatgaaccagtcaatccagtcttcacctttaacaaatgctgatttcttcaagtgagcaaaatatctcttaaactttttcctattttctctataaagttgcttttttctgaattttttctttatgaggcttgatgggcagccctatcagcagacaatcattcattcacccaacaaatatttgagtatctgcttcaagccaggggcagtgctaagccctggaagtggtatcttctccttatccgggagtggggctacagtgttcattccagaagactcaagaaaatagcagatcatcacaaaagtaggttttacataaatgaggaggaatccacagggttgtgtatatgtgtgtgtattttaaattctgacataagttggagctttagggtagactgtgacataagagtagtttgttttccaactcatgtaattgccggctgatttttgtcttgaattatgataatggtaacttctgttgaaacaattctgtattcatcttagcttggttgggatgcaataaaagttttgtactggtaaaaatgataattttcttccatgatgattttgaagcttttctgtaacacctgataaaaatagaggggccaggcatggtggctcatgcctgtagtcccagctactcgggaggatgaggtgagaggatcccatgagcccaggagttttaggctacagtgagccatcatcacaccactgtactcctgtactctagcctgggcagcctcgttctttagagtaagacactgtctctttaaaaaaaaaaaaaaagaaaaaagaaaaaaagaaaaggcttttagtgaatatatttttagggtagcaagtgtaatttttataaattgcattatttgaatctaataaataccctcaaagctgaagtcgaattctgattttgattgaaaatattttttacttaaaggaagagggatagaataaatgacacgattaaggaaaagacttcttgtataaggccggggttttttaaatgattttttgaatagttagatggacaatacggaattaaaaaggtggtgtaaaaagttatacggggctgggcacagtgactcacgcctgcaatcccagtactttgggaggccgaggtgggtggatcacctgaggtcaggagttcgagaccagcctagccaacatgacgaaacatcatttctactaaaaatacaaaaattagctgggcttggtggtatgcacctgtaatccagctactcgggaggctgaggcagaagaatcgtttgaacccaggaggcagaggttgcagtgagccaagatcgtgccattgcactccagcctgggcgacagagtgagactccatctcagaaaaataataatagaaaaaagttatatggggctgggcatggtggctcatgcctgtaatcccagcagtttgggaggctgaggcagcttgatcacttgaggtcaggaattcgagactagcctggccaacatggtgaaactccgtctccactaaaaatacaaaaattagccaagcgtggtggtgcgtgcctgtagtcccagctacttgggaagctgaggcaggagaatcgcctgaacctgggaggcagaggttgcagtgagccaagatcatgccgttgcactccagcctggacgacaagagcggaactccgtctcaaaaaaaaaaaaaaaagagttatattgtaaagtatctctgctaccctgccccaaacattcatttctttccctggaggcagccactattacctgtttctttaaaaaaaaaaaaaaattgtggccgggcacggtggctcacgcctgtaatcctagcactttgggaggtggaggtgggtggatcatgaggtcaagagatcgagaccatcttggccaacatggtaaaaccccatctctactaaaaatacaaaaaattagccgggcatggtggcgggcacctgtagtcccagctactcgggaggctgaggcaggagaatcgcttgaacctgggaggcagaggttgcagtgaactgagatcacgccgctgcactccagcctggcaacagaatgagactccatctcaaaaaaaaaagcgtgtgtgtacccgtgtgttaaatttttattataaaatatatataacaggctgggcgtggtggctcacgcctgtaatcccagcactttgggaggccgaggcaggctgatcacgaggtcaggagatcgagaccatcctggcgagcacggtgaaacctcgtctttactaaaaatacaaaaaattagccgggcatggtggcgggcgcctgtagtcccagctactctgagagcctgaggcaggagaatggcgtgaacccaggaggcggagcttgcagtgagccgagatcgcgtcactgcactccagcctgggcgacagaccgagactccgtctcaaaaaatatatatcgatatatataacaatttacagttttaatcatcttaactgtacagttcagtggcactgagtacattcacattgttgtacagccattactaccatccatctctacaacctttcgtcttgcaaaactgaaatttcatacctattaaacactaactcccacttctcccctttcccccaccccaccctctggcaactactattctactctttgtctctattggacatatttttgtgtgtttaggtttgtgtatatattttacatgtgtgtataaatacacaagggtatgtgggcgttgtgtttttacacatactataaaatattgtgcacatttgtttattttaatgtatcctgtagattatttagaatcggttcatacagagccgtatcattccttttaagggttgggtttaaatagtctgttatggatgtaccacaatttatttaaccagtttttaaattttttacttattttttttaatgtttttttagagacaggatcccactccatcacccagactggagtgcaacagcatgatcatagcttactgcagccttgaactccggggctgatgtgatcctcccacctcaggctctcttgtagctgggactacagggatgtgccgccatgcctggctaaattttttatttttatttttatttttatttttggtagacacggggtttcactgtgttgcccaggctggtcttgaactccttgggcttgagtaatcctcctgccttggcctcccaaagtgccgagattacaaccatgagccatggagcccgacaagagtagccttttatttgcagaccattagagaaaaagttgcgtgtaagtagataagcatacgaatttatcactgcaatactgtttgtagagatcacagagctgttaggctaggaagaagtttttagcagttagcactagaaagcaaaactttggaaacttccatttcatcaaaagtgacctcatctgagtagggcatgtgagggaaggacctttttactcgacaaggggaacttgcccagttcttgtttgtgaaccttgaagaaagtggagcatttttattttgggaccattctaggttgtggtagttccttggtactcggggttggagaatctccctctgctgctggaccttctgcctcctcatgctgtaatatgcataagaggtgtcctagaagtattcaggaacaggctgtggttgctttgttgttctgtgactgttgaactctttatatagcagtacttttttaagctgtactaattgagcatttattatgtgtcagttactgtgctagctgctggaaactatcctaccctcagcagtcttctggtctaatgggaggtacagacaggcaaatgggctatgactttacaagaggctaacttctgtgatggagagaagttccagccactaagggagcacataaaaatcagaggagatcctaccaagaattgggaggtaggtcagggaggagacttctttgaaaaatggcatctaagacctgaacagcaaggaaacattagctaggtcaaggacaaagcatcagtggggagagatgcatgagtcttttggaaggaccagcatgtgtagaggctctgacaggagagaatctctcaggcccattcagagagtccactgtgtgaagacgaggcatgaacaaccagccaggacatgtggagaggagcatttttctttttttcttttttctttctttttttttttttttttttttgagacgtctttctctgtcacccaggctggagtgcaatggcatgatctcggctcactgcaacccccacttccagggttcaagcaattcttctgccttagcctcccaagcagctaggattacaggcacccgccaccatgcccggttaatttttgtatttttagtagagacggagtttcaccatgttggcctcaaactcctgaccttaggtgatctacccgtctcggcctcccagagtgctgggattacaggtgagagcccccacgcccggccaggctcggctttctttccaggccccgtcacactcttagatgttccctgggccccagaaggcagcgtgaggtgctctgcccatctatgctgtccttttccaccccaccctatccactgggcccctggggctcccactccactccaggtctcttcatggacccttctttcccttcacttctgtcccaggagacctgggagactcatgggaacaggcatcatcttctccagcacagttcattgtctaatgcacgaaagtgctgggctgtgagaaggtcaggagcttacatggaatgggagtcagctgtggtacaaagtacgctgcttagttctactgattttttattttttatttttacataagactttgatggtaaaggaagcagtgtgtgagcaagctgactcctgtcttgtcaagtaccaggtccactctgatgagcccctgtggacagcactgctgtaactccccaagcctgggctcaggaggtgggccctaagcgctgttcccagctcttcctccatgctgtcagctcttccaccattcttcctggcgtcattctaaggtcctgtcttcccccgccctcttccttcctggcttctacgctcagctcaagtagtagctgtttgggtacttttcacccagacttaggaaatgttatcagttggtcgtattcctgtcagccctcttactatggaactcaaataggacagattcagctgaattcccagccctgtggttgcactctttgtctgccctgcttccccaaggtagcctgctccctaaaggtcaccgagatactccccatgcaaggtttttgttgtattacacatgacaacatggaataaagtgttttgcaaatttactggatgatatcctactatgtggaacatcctacaacttactcttttcactcaacatttgacttttgaacctggtctgtactgctccgtgcagaccaatgttcattcatttgatatgtctccttgtgccatagaaatagttttacaatagaagcctgtccagagccatgagggagaaggggattgtagagaaacaaggattggcatctggtttatgtttacatcctttagtcctgttaaccgagaagaagatatttttatttccatgtttgcgaaagctttccacaaaaaaagcatccattttctagacttattaatagggcagtccaaaggttttatttttagatttgaaagaaagcaaagtaggcttctgagatatgcacatttccctgtgtccctgtctcttttgcaacattccacattgctgctaaaacttgaacatgagcactttcaagcatgtgcttactttctatgtatgactcattttttaaaacattaaagcattttcggccgggtgtggtggctcacgcctatattcctagcactttagaaggccgaggcgggtagatcacttgaggtcaggagttcaagaccagcctagccaatatagtgaaaccccatctccactaaaaatacaaaaattagccgggcatggtggcgggcgcctgtaatcccagctactcgggaggctgaggcaggagaattgcttgaacccaggaggtggaggttgcagtgagcagagatcgagccactgcactctagcctaggtgacagagcgagactctgtctcaaaaaaataaaaataaagcattaaagcactttgtctggtggtatgtaagttttggcattacttagataagttgtattttaagtctttctacacacaataacttatttttaaaatacaagtttctgtgtacttccgggttttgtgtttttgtaaacagcagaaggtattagtccatattaagtactaatttgttctaatattttcagctgtttttggaattacacttggcaaaaaaatagacaaatgtctgcagttgtgacagtttgtttttttgttctttttaactccagaataaataattctagtgagtttttttcttggcttgtaagaacatgggaatgattagagtcatcataacacttaagtagttatagaaggttgaacatctgtagtcagttgtataaaatttcctagtcatccttccaggttgtttaagacaaacaaatacatagtatttattaagctcttataaattttaattgtaaaacatcattgtacaaaactttgaaaatgcgtataggtacaaagataaaaaattaggccaggcatgccatggctcacgcctgtaatcccagcactttgggaggccaaggtgggaggatcttttgagcccaggagttcaagaccagcctgagcaacatattgagaccctatctctacaaaaatatcataaaacaaaatagaatcactctggcgattccactatccaaaaaaaaaaaaaactgctgttaatatttggtatgtatctttctagaccaaggcctccaactttggttgagaattcagccgggtctgtgaccttggatgggaaaaacattcactctttattttcactaatgtctctgaaaacccagatttttagctgggcatggtggctcgtgcctgtaatcccagtgctttggaagcccgtggagggcagatcacttgagcccaggagtttgagaccagcctgggcaacatagcaagaccctgtcttttaaaaaaaaaaaaaatccagccgggtgtggtggctcatgcctgtaatcccagcactttgagaggctgaggcaggcagatcacctgaggtcaggagtttgagaccagcctgaccaacatggtgaaatcctgtctctactaaaaatacaaaaatcagccgggcatggtggtgggcgcctgtaatcccagctactccggaggctgaggcaggagaatcacttgaacccggaaggtagaggttgcagtgagccaagatcacaccattgcactccagcctgggcgacagagcgagactctgtctcaaaaaaaaaaaaaaaaatccacattttcttcaatgacaattgtaagcaacagatcatggtagtattagaatagcagtgactgtcaccagtagagatcaaagatactttcatatcatattatagttgttacagatattttgaaatatatatgtccatcactgcttcaaacttaaggtaattattagacccatctctagatctggttatttaatgatttactgaagaagcacatattatttgagaacgaactcttgaaatatgttgttaatttctgtgcattttacacatttcaaaacattcttctgaggaggggtccagaaggccaaaagggtccatggcagaaaaaggttaagaacacctgttctgtactttgtaccatgtggctacaaatataaaaacagacgttaagccgggtatggtgatgcacacctgtagttccacctacttgggaggctgaggtgggaaaatcacttgagcccaggagtttgaggccagcctgggcaacagagcaagaccccatctcttaaaaaccagtcagcacttgactagtcagttagtgggggaaaacacaggtacagtaaaaggagtcaaaattacacttaaacttaggtcatcttattatatcaaacatttattaacatgtttagtgttttgtgtatattatgcaaagtgtaatgcaactaaaactgtttaacacttctcgatatcacataaatttgttggtgcataatagcctaaaagttacttttgctgttggcattttattttattacttacttatttatttatttatttatttattttgagacagagtcacactgtcgccaggctggagtgcagtggtgcgatctcagctcactgcaacctctgcctccctggttcaagcgattctcccgcctcagcctcctgactagctgggactacaggtgcgcgccaccatgcccagctaatttttgtatttttagtagagatagggtttcgccatgttggccaggatggtcttcatctcttgaccttgtgatctgcccacctcggcctcccaaagtgctaggattacaggcatgagccaccacgctgggcctgctgttggcattttaaacatccttctagagtctttcttatttgcctgtaagcacgtacacatgttgttgttgttttgagacaaggtctgtcgcccaagctggagcacagtggtgcaatcacagctcactacagcttcgacctcttgggtgcaagtgatcctcccaatcagcctcccaagtaggtgggactacaggtgtccgctaccatgcccagctaatttttgtattttttttgtagagacggagtttcaccatgttgcccagactggtctcaaactcctttgctcaaacgatccttccgcctcggcctcccaaagtgccgggattacaagtgtgcacctctgtgcctggcccacatgttgttttagatgaatgagatcatatatgtacttttgtaacttgctacctttcctcaacaaaatgttgtaaatatccatgtccataaaaatagacgtatatcttcacttttccctaaaatgaaaataacttaacttgcattttcttttttgtttttgtttttgttttgagacaggctcttgctctgttgctcaggctggagtgcagtgatgtcacagctcactacagcctccacctccagtttcaagtattccacctacctcagcctccaagatagctaagactacaggcacatgtcacgacgcctggctaatttttaaaatattttttgcagaaatgggatttcactatgttgcccaggctggcctcaaactgctggcctcaagtgatcttcctgccttggcctcccaaagtgctgggattacagtcgtgagccactgtgcccagcctgcattttcttattataaaagtaatacatgttcaatggacaaaaaattttcagaaaatatgcaaagatgaaaagtaaaaattgtccataaatctgtcatctacagataaagataacttctggataatgtttttctaccatcatttttagtaatcacataacatttcgttgtatgtctatgccttcatttaattaagaggcatttccattatttctgcatgttcatgactctgaatgatgatatgtctgcctgctgatggctacaaccctgtttctgcatttcaaacctctctcttgagctccagatttgatggcctcgtcagcatttacttgagttgctcataagtgtctcaaatttaacaagtcccagtcttgatttttttcccccttcaaacctattcctcatgttgtctctatttcagtaaacaatatcaacatccacccagttactcagtccaaaattctaggagtcatccttgattctgctctttctttttttttttttttttgagacggagtctcgctctgtcgcccaggccggactgcggactgcagtggcgcgatctcggctcactgcaagctccgcttcccgggttcacgccattctcctgcctcagcctcccgagtagctgggactacaggcgcccgccaccgcgcccggctaattttttgtatttttagtagagacggggtttcaccttgttagccaggatggtctcgatctcctgacctcatgatccacccgcctcggcctcccaaagtgctgggattacaggcgtgagccaccgcgcccggcctcttttttttttttgatacggagtctcattctcgtcatccaggctggagtgcagtggtgcaatcttggctcactgcaacctccgcctcccgggttcaagcaattcttctgccccaacctcctgagtagctgggcctggctaattttttgtatttttagtagagatggggtttcaccatgttggccaggctggtcctgaactcctgaccttgtgatccgcccacctcagcctcccaaagtgctgggattacaggcgtgagccactgcacccgccctgattctgctctttctctcatcatccctgatctgtcagcaagtcctgttaggccaaccacttctcagcatctgcactgccagtatgctagtccaagccacaaaacacctctcagaggtacgcaacaggactttgttgttgttgtgtgtgtgtgtgtttttttttttttacggtagaattattttataacttgaagtgtagggatgaccttccttttaaaattttatttattttcttaattttttattcccatagattttaggggaacaggtggtatttggtgacatgagtaagttctttaatggtgatttctgagattttggtgcacccatcacccgagcagtgtacactgaacccaatttgtagtcttttatccctcaccccctcccaccctttccctcaagtccccaaagtccattgtatcattctgatgcctttgcatcctcatagcttagctcccacttatgagtgagaacatacagtgtttggttttccattcctgagttacttcacttagaataatagtctctagttccatccaggttgctgtgaatgccattaagtcattcctttttatggctgagtagtattcctttgtatatatatgccacaatttctctattcactttctgattgatgggcatttgggctggttctatatttttgtaattgtgaattgtgctgctataagcatgcgtgtgcaagtatcattatgcaacgggacttcggatgacatattgaacaacttcctcactgatatccttgtgaaacgctacatatttcatgggtctgtttgttataccaacactcaattctgaatgatggaattatttcacatttagtctctttttcatctagccattatagtttagtttaaacaccaagttccattcctgctgcatgctgaaggatttgcagtacatcaggctatagtccatcaattcattccacaattgagtaagtaaggtatctatagtacctcaggccctgtgttaggcagggatggggtaacctagacagatttggtacctgtcctcatggagcttgactttagcggcagagacagatcttagataattgtaccagtacttaagtgttcagaaggacaagtatggaggtgggagccactccagtcctctacagtcacgtgctgcacaacaacgtttcaaccgacaacagagcacacatacagtggtgttcccataagattagaatgccatatttttactgtaccttttctatgtttagatatacaaatacttaccattgtgttccagtgatctacagtattcagtatagtaccatgctgtacagttttatagcccaggagcaataggctatataccgtatagcctaggtgtgtagtatgctacaccatctagatttgtgtaagaacactctctgatgttagcacaaataaatcgcccaatgacacatttctcagaacatatccctgttgttgagcgactcatgactgtacaatgggggaacagctcagcctgccttccccaaggaggcaacgccgatgcagggaaccgagggttgaacagaagtgggcaaggtgcagagaggaaaaaggctttccagatggagaagagcatgtgtgaaggccctcagtctggcaagagcttagtcctgtgtggcaggagctgaacgaggggttaggggagagtggcaaagggtccgggccatcagagaggtcaacaggggctggatcatgcaggattttgaatgttaacatcagagcgatagaaaacatgaagggtaaggtggtttgggttttgaatttttatcaaaatattgcaactactcggcaacaagttagatataacaaaagaggtcatcgtaaaaacagcagtctaccccttccccttcccttccctgactcagacatgacagcttttaactgtttctgattttagttcctttgatggttacctccaaaattaaatcatatgcttatacatctttcttgatttgccaactttagggaactgtgttaactccctgaaatgaaagagaatgacttagcttacgttacctccccatgttgaaattcatattcacatttctctgtaattttttttttgagatggagtctcactctgtcgcccaggctggagtgcagtgatgtgatctcggctcactgaaacctctgcctcccgggttcaagcaattctcgtgcctcagcctcctgagtagctgggactacaggcgcacaccagtgcactgggctaatttttgtatttttagtagaggcggggtttcaccatgttggccaggctggtcttaaactcctgacctcaggtgatctgcctgccttggcctcccaaagtgctgggattacaggtgtgagctaccatgccaagcccacatttctctgtaaattttaaacagtattttagtccatatgtcagttcccctctgtttaagataaggatattaataaccctacttttccttccactttccctccttaacttctgcgtcttaaaagctgtacttgaccatacccattcttgcatttgttaacatgtgtgttctgccctgcaaccacagccaagttgtagcttaattctaaagtcgaaaataacattatttacattattacacatgtgagtattgttcttggcgagaccaaataatgaatgtgcccaggattacatttccttctttacagatctggaccactcaaaggagaatgaccaatcaaggtcaaatggattcccttttcttagactctgtcacctgcttaaaatccttgctaggatttaatctacttcatattcaaaccttggcttgcttatatagctctttgttttgcccaccatttctagttgcctttttattttgtttactattcctccttgattatgttgtaaaatgctattagcagtgctgtttatttcgtacgattcggctttttccccactgaagacctttctcttggaaggcctctgcccttctgcaatctgggcaagtatctgctctttgatttaaggttgcatatacagctgtacctggaccttctcctcactgggctcttgggttggagcccgtgtcttaaaacccatatcttcctttcacatggtttactccctcgttttctggactgcatccttaaataatgtgctcagatagagtgcatggggagtaaactgtagtggataccgttgtcacctaccccatatccatttcttctttgcccattcctaacagaatcctgatattattcacctttctaccttattcccaacttcagaaaggatccttaagtcattccacacattgcattcctttggcaactgttactggtcaaggatggacatacgatctaagttggttcactcagactgaagggaaggacttccatggcacgttcagggaagactttctctttttctctcactggagtaagtgagaaaggtgttgctgggggctcttctgtaacctcagactgagggacaaagcctgaggataaagcctgctcaccaaggaaggcggagcagagaaacgggaagaacctgggtcttgatgccgttgcttagctggtgattgcactgtggctggggcctgtcctacctgagctagggactcagataggatggactttcttactgaatgagccagcttcagttttcttttctgttacttgtaaccaaaagcattgtaacagataggtcttctgagtcactgcatgcctgaaatacctttcttctactcttacacttgattggctgagtatagggttccaagttgaaaatcattttttctcctaactttggaggcatctcttctagtatgcagagtaacaaatgcaacaaatgcctgatgccaatcttattatggttcttttgtaggtgcccttcttttctcttccttccctggaagtttttaggatttcgtctccttatttttagtgtcctgaaatctcatgagaatatgtctagagttgtgtcttgttcactcgttgtactgtggtcattcaatctgaatacttttgtcaactcttttttttaaaaaaaaattactaatttacatgctttcattttctctatggggactactgtttaactttggacctcttatattggtcttctgtcttctctcatatttttcatttattgggcggtggggggtgctctgaattttggaagatctcctgcatttattttctttttccttttttctttttttttgaggcagagtcttgctctgtcacccaggctggagtgcagtagcctgatctcggctcactgcaacctctgccttccaggttcaagcaattctgcctctgcctcccacgtagctgggattacagacctgcaccaccacgcccggctaatttttgtatttttaatagagatggggtttcaccatgttgccaggctggtctcgaactcctgacctcaagtgatccgcccgcctcagcctcccaaagtggtgtgagccaccgcacccagcctcctgactttattttctatcccttctgttaaattctttatttcagccaaacctttttttttttttttttaacttactgtgaagcctgtgtgcctactgcctagattagacaattgttaacattttggcgtattttcctggtctgtatagatagggtgcatttttatacctttttgctcaccatttaaaaggaactcacagatgtcacgacatttcacccctaagtacttcagtatacatctcctaaaaataaggacattttccaatataagcacaataccccgatcacatctttaaaagttaacaataattctctaatgttatcaggcacccactttaaattcagatttcctccaaatgtctcttatcgctgttgaggggctccaaagcaattaagatttatacattgcatttgaatatgcttcctttgtctcttatttatttatttattttattttgagacagagtctcgctgtctcccaggctggagtgcagtggtgtgatctcagctcactgcaacctccgccttccaggttcaagcgattctcctgcctcagcctcccaaatagctgggattacaggtacgcaccaccacgcccagctaacttttttgtatttttagtagagacagggtttctactaaaccatgttggccaggctggttttgaactcctgacctcaagtgatctgcccgcctcggcctcccaaagttctaggattataggcgtgagccaccatgcccagcccctttgtctcttttaacaagaacagcctacccacctctccttcacttgtgatactgactttttgaagcagtcagcccaattgtcatctagaagggcccacattttaagatacatatttttagagatggcgtgtcactatgttgcctaggctggccttgaactcctggcctcaagtaatcctcctgcctcagcctcccaggtagctgggactacaggcttgtgccaccacgactagctggcccacattttagatgtctctcttttcttgtgatataatttaacttgtttgtccatatatattacttgtagacaagaagttaggtctacaggcatgttcaggttaaacattttgggcaagaatatttcataggcagtactgtgtacttcatatagcatcagctcaccaggcacttaatggttggttaccctgtggtttgtgatgctacgttttaacacttgattaaagaaggaggtgactgccaaatctccccattgtagacatacagttttcctgtggtaattgatatataatctgtgatgtgatgctttggcaccatacaaatatcctattgcccaacagccatttgcataattattttagcattcattgatccttgcctgaaaccattattacattgggggttgcaaaatgatagtttttttaattgtcacctcttctacatttagtactgtcattcctctgtaatgaattttccctcatcaaataaggaggcattatatttcctcctaaaaagacagtatagatgcttaatctttgcctttattacatttcagagtaaggagttggtagaataatcacctcaaatggtggcaaaatatttgctgttgtgtttccttttctctttcatgtcaatatggactcatagggatttatttattaaatgttttacaattcaaattgggtcaacaagagtcccttcatgttggttcctatattctcctggcataccctcattaattagtctttgagcaatttcttgttttctggcacaagatattccatcccaatatgtgcttttcgtgtcctagaactgattccaaggagctctggttccttatagtggcaacggtatttagaatccaacatgtgggtactaaatgtgctgattcttactggggtaacattatatctaggcactttcagaggacatcgctagaaaatatattcagtttttattttttatttttaatttttttgtagagacaaggtctcactatgttgcccaagctggtttcgaactgagctcaagcgatcctcccacctcagcctcccaaagtgctgggattacatctgtcagggcaaactgctggtaaatattttcacaaaagaaaaataaaaaaaccaaagtgctgggattacagatgtgagccactgtgccctccattttttttttaagtcataaatacataatgatgtcttctatggcaatttaacattacagggttcttccttaacttttttttttttttttcttttttttgaggcagggtcttgctctattgcccaggctggagtggtgcagtggtacaatcctaattcactgcagcttcaaatgcctaggcttcaaacaatcctcctccctcagcctcccgagtagctaagactacaggtgcatatcaccatgcccagctaatttttaaaaattttttgtagagatggggggtctcgttgcgttgcccaggctggtctcgaactcctggcctcaagtgatcctcccatctcgatttcccaaagtgctgggattacaggtgtgagccaccatgcctggccaacttttatttgatctgtatatatcttttccttacactgaaaatgttgggtcttactaatgttaacatagttacttatttgctttatcttgtaatagacataaaattacaaaattataataccaatattacgataaatagctgggcatggcggcgctcgcctgtagtcccagctactcaggaagctgaggtggagggactgcttgaacctaagagtttgaagctgcagtgagctgtggttgtgccactgtactcctacccggacaacagagtgagtggggggaaaaaaaagaaataatggaagatccagagaaagccccaaatatttaaaaattaaacaatacactttgcagcttcctcacctctctcagccttcatagaattgaagagagttagggccttgcactagattaggctttgccttaaggaaatgttgtgtttgatttgatcttttatccagaccattaaaacttccttaacgtttattagtaataaggctatttcactttcatatcatttgtgtgttcactggagtagcacttttagtttccttcaagaactttgattcacaacttggctaactttggtacaagaggcctagcttttggcttctcggctttcaacatgcctctcactaagcctgatcatttggtttttggtttaaagagaaagacatatgactcttccttttacttgaatgcttagaggccattgtagggttattaattggcctaatttcagtactgtcttgtccaagggaatagggaggcccaaggagagagagagagatgggggaacagctgattggtggagtagtcagaatatacacatttatcacttaagttttgccatcttttctttttctttttcttttttttttttgagacagtcttgctctgtcacccaggctggcatgcagtggcatgatctcagttcactgcaacctctgcctcctgggctcaagcaattctcctgcctcaacctcccgagtagctggtattacaagcgtgcgccaccatacccagctaatttttatattttttagtagagacagggtttgccatgttggccaggctggtctcgaattcctgacctcaagtgatccacccgccttggcctcccaaagtgcggggattacaggcgtaagccactgccgcctggccaagtttgccaccttttttattttttttattttttgagatggagtctcactccatcacccaggctggagtgcagtgatgcaatctcggctcactgcagtctctgcctcctggattcaagcgattctcctgcctcagcctcccgagtagctgggactacaggcatgtgccagcacgcccagcttgttttttgtatttttagtagagacggggtttcaccatgttggccaggctggtctccaactcctgacctcaggtgatctgcccggctcagcctcccaaagtgctgggattacaggcgtgagccaccccgcccggccaagtttgccatcttttatgggtgcagtttgtggtgccgcaaaatgatgatagtagtaacatcagagagcattgatcacagatcaccataacaaatataataatgagaaatttgaaacattgtgaaaattaccaaaatgtgacagagacatgaagtaagcacatgctattggaaaaatggcactggtaaacttgcttgatgcagggttgccacacaccttcaatttgttaaaaactcagtatctgcgaagtacagtaaagcaaagcacaatcaaatgaggtgcgcctgcatattacaaccaagaggcttttcgcagaaacacgagtgtgcttcaacattcaaaaatcagttggtgtaattcaccacattaagataataaaggaggccgggtgcggtggctcacacctgtaatcccagcactttcagaagccgaggtggacagatcacttgaggccaggagtttgagagcagcctggccaacatagtgaaatcctgtctctactaaaaatagaaaaattagccgggcagggtggcacgcacctttagtcccagctattcgggaggctgaggcaggtgaatccttgaaaccaagaggcggaggttgcagtaagctgagatcacgccaatgcattctagcctgggcaacagtgagacccagtatcaaaaaaaaaaaaaaaaaaaaaaaaagataataaaggagaaaaaccatatagtctattcaataaatacagaaaacgcatctgacaaaattcagtgccctttcatgataaaaattcagcagattagaaatagaggaagtgcatgtatgaaagagctacagatagattgtacttaattgtgaaatattgaacatgttaccccgaaaatcaggaaaaaggcaaagatgtccactctaaccacttctattcaacattatactagaggtcatagccagtataatgaggcaagaaaaaacataagaggcattaatatttaaaggaagtaaaactgtttctatttgtaggtaatgtcgaaaatgtgaaagaaactatcagaacctgctagaactaaaaagtgaattcagcaaggtctcagggtacgagatcattcaaaaactaatcagaaatgaaatttcaaatgcaatatcgttaggaataatttaataagaaatgtacaagatttacacgctgaaactgaaaatgttgctgaaagaaattaaagacctaaataaatggaatgttgtaccatgttcatcagctgaaagactaagtgtctttacagtgtcagttctcccttcattgaactgtagattcataaccccagtcataactgcagggttttttttgtagaaattgattgtaaaatgtatatggaagctgggcacggtggcttatgcctgtaaaccagcactttgggaggctgaggcagacagatgacttgaggtcaggaatttgagaccagcctggctaacatgacgaaaccccgtctctacaaaaaatacaaaaattagccagacatggtggcacacacctgtaatcccagctacttgggaggctgaggcatgagaatcacttgaacccggaggtggaggttgcagtgagccaagatcatgccactgcacgcccgcctgggcaacagagtgagactttgcctcaaataaataaataaataaaacgtatatggaaatgcaaaggacctagaacatccaaagtaaacttgaaagagaacaaaattaaggggcttatgtgatgtgactttatagtcatttgatttttaacagaggcaccagaacagtccggtgcgggaaaggaaagtcttttagcacgtgccggatgatggcaaatgacatccataccagacaaaaatgaaccttgaccttaccctaaatattagtttcttagagttgccacaaactaggtggcttaaaaccacagaaatttggctgggtgcggtggctgacgcctgtaatcccggcctttgggaggccgagtcgggcagatcacctgaggtcaggagtgcaagactagcctggccaacgtggtgaaactttgtctctactaaaaatacaaaaaacttagtcaggtgtagtggtgcacacatataatcccagctagccaggaggctgaggcaggagaattgcatgaacctgggaggttgcactgagccaagattgcaccactgcactccagcctgggtgacagagtgagactccgtctcaaaacaaaaccacagaaatttgctgtctcataattccagagtctagaagtccaaaatcaactgtcatcagggccatggtctctgtgaaacctgtaggggagtccttccttgcctcttcctagcttccagtggttggcaacctttggcattctttgatttgcagctgcattacttcaatatctgtcttcctcatcacacagcattctccatgtatgtctctgtctttacatggcctccttcttgtaagaacaacagtaatattggattggggcctgccctactccagtgtgacctcaccttaactaattacacctgcaacaacgctgtttccaactaaggtctcagtgtgaggtactgagggttaggacttcaacatatcttttttgggggacatagtccaacccatgacactacttcacaccatacataaaaattaattcatgagagattatagacctaaatgttttaaaagctaaaaatataaagcttctgcaagaaaacataggagaatatctgtgcagtccaaagaataaggttttttttaaacacaatttcactctgttgcccaggctggagtgcagtggtgcgatctcagctcactgcaacctctgcctcccgagttcaagcgattcccatgcctcagccttccaagtagctgggattacaggtgtgcgccaccatgcctggctaatttttgtatttttagtagaggcagggttttgccatgttggccaggctggtctcaaactcctgacctcaagtgatctgcctgcctcggcctcccaaagtgctgggattacaggtatgagccaccgtgccaggccaaaaaaagatttattaggatacatgaagcaatagctattaaaagaaaaaataaattggacttcattaaaatttaaaacttttggtcctcaaaagataccattaagaaaatgaaaagacagagctgggcgtggtgaggcttgcctgtagtcactactgggtacttgagaggctgaggcaggaggatcacttgagcccaggagttctaggccaacataggcaatatagtgagacagtgtctcttaaaaaaaaaaagaaaaagaaaaaacaaaagaaaataggctgagagctgtggctcatgcttgtaatcccagcactttgggagtacaaggcagatggattgcttgagctcaggagttcaagaccagcctgggcaacagtgaaatcccatctctacaaaagatacaaaaaattagccaaccatggtggcgtgcacccgtagtccatagtcccagctactcgggaagcagaggcaggaggattgcttgatcccaaggaggtcaaggctgcagtgagctgaggtcgcgccaccgcaccccagcctgggtgactgagtgagaccctgtctcaaagaaaatgaaaagacaagtccaccaagaaaacagttgagaccagtcatagaaaaaatagaaagtcatatctgacaaaggatttgtattcagaagaattcctataactcggtaataaaaagacaacctgatttttaaagggtgaaaatattttaatggatacttttttttttttttttgagacagagtctcactgtgtcacctaggctggagtgcagtggtgccatcatacatagctcactgcagactcgaactcctgggctcaagtggtcttcctgcctcagcctcctgcgtagctaggactacaagcacgtgccactatgcctggctaatttttaaattttttgtagacatgggctggtgtgtgtctgtgttgtctaggctggtcttgaactcctgggctcaagtgatcctcccacctctgccccccaaagtgctgggccaccacgcctggtgtggtgtcaccagagatgagccaccatgccctgcctgatacttttcttttatcatctgtttatttcttgtttatgggtgtttctgttctgattttatgactattctgtattctaagatttctctgagaatattatttgtttcctctaaggacagacttggtctctcttccatggggctggttcttgagccgccagggatggggggaggacctgggtagctgctgcgctgccccttctctgctgtggtggagtggcccgttgcctgcggggtctgtctctgaagggtggtttggagaagttctgtggaggcgaggcaggggtcagctcttgccccatggaccctcagagactgggaaaaggtaggcatcacctgggctgctgccagccacatcaagagcctttggggtgggtggggtgggggccggggaagggaaggttctagctgttgatttagaaaagacccattgatttcttgcctgagggaagaagtggcaccttgccactccaagtttgctctgctcaccagccccaacagcatcagcctcacctgggagcttattgaaggtgccctgccccaaagcttgtgggtcgggatctggcagtcagcagcccccaggtgttgcacacatgacagcactgcttgcccctcctctcgtctggtctggtctggtctggtctggtctggtctgagagcttctttggggctctgacaggtatacaggctctcatctgctctacagctctcttgtagtacattcctctctgttccattagtcaacatgttcttgcctacttccagcatctagaaatttgctgagtgtatcttatccgttcagaggtcctctcctgctattgcctctgttagaaatttcttccctttcatatgtctgtacttcggtttctttgaggtttgaagggtcaagtggcaattacatgtaggcagttggccatcctctggtgaaggctttaaagcccaggaataacaagatccattatgtctaaaactagcaaaaaccctacctgtcacatggtgaactgaattagaggtgatggggacagaagccagattggagtgagtggaaggtgagggagtggagattgggtatagacaactctctttaagaagttttgttgtgatggtgaccagaaaaataggagtggggtagagggggatgagggtgtttttcacgtgggtgaatatgagagcatgtttacatccttctgggaatggcccaggagagaggggagcgtgagaaggaggaaatggggacctggaggagcagactccttgtgtggaggggggaagcggcatctagagctgttgcaggaggtgggctttgagtaaatgcttcctctttggtaaagacggggaacgggaacggtagaagttgcacggaccctttgttaaagctcagaagctgagcgagaattagagcttaagtttatggagtagtcagaataaagtacccctaactgtattcttgcacagtgcaggaagccaggggtctgaaatcaagatgttgcagggctccattccccccagagcctctagcatggatccttccttgcctcttccagcttttggtggctgcctggcagtcctagactttccttggcttgcagttgcattgctccattctctgcttgtgtcttcacatggccttctctgtgtccccgtattcttctctggatgcttgtcactgtattaggcccaccctaaatccaggatgatctcatatcaagatccttcacttaattacagaagcaaagaccttccaaataaggtcagagccacagggtctgggggttaagacatacacctaactattcggggctaccatcgaacccctgtagaagcctgtccatttccaggatagcagagcccaaggaagggccagaagtccccccaaaacagttgtttgcattcaccagattctaagctataagcagatgggcagtggcagtcggtcctaatccatataccattggcaacaatagtttagttcactgtagacataatgagatgcttatcttctgctaagtagtcctcatggtaacagccatattactcctggctttgagtgacagcgctgtgctcttgtctggtgcccatatacttcagcagctggaaacaagacagtgctcatgattcaccggaaagtttctgtagttaaaatcaagtgatcccttgagtctattctaatatttgtctgtaccatgttctgtgacgagacatggaaacaaaacattaagaagtgaaagtatctttgattatgctcttgaagacaactttttgtttgtttgttttgtttgagacggagtttcactcttgttgcccaggctggagtgcaatggtgtgatctcggctcactgcaacctccgcattcccgggttcaagcgattctcctgcctcagcctcccaagtagccaggattacaggcatgcaccaccacgcctggctaattttttttattttagtagagacggggtttcaccatgctagtcagactggtctcaaactcctgacctcaggtgatccgcctgcctctgcctcccaaagtgccgggattacaggtgtgagccaccgtgcctggccgaagacaactttttaaagatgcatatgctctgggctgggtgtggtggctcacacctgtaatcccagcactttgggaggccaaggcgggcagatcacctgaggtcaggggttcaagaccagcctggccaacatggtgaaacaccgtctctactaaaagtataaaaattagccgggtgtggtggcgggtgcctgtaatcacagctactcaggaggctgaggcaggagaatcgcttgaaccccagaggcggaggttgcagtgaattgagactgtgccactgcactccagcctgggcgacagagtgagacttggtctcaataaataaaataaaataaagatgcatatatgctctgaaggctggctacattttattttttctcaaacaacttttacagtggatagtgctgtaaaagttgtttagctctggtcattttatcttttttgtgatctgcaaaaggagatccttttccttttcactgcctctaatacccaactccaatactcctttgacctcacaggcacttagaatccatcagtggctccatcttttctcagacttcacctccttcgtatccttattcctctcctttgtagcttcagtgccagtcagacgtcgttactccctggcacactacctcagcccttcggcactttcttgctttgttatattcagtcgacaaagccccagcctcatgaaattcagtcatgtctgccccatgcctgctccgtcctgaagctgaatgtgactccttcattgattccccctttaagttcatgtctaccccaggtaaacttcttgccgccaagcccacctgcatactgcagttccccggtctctcctagcccctcccaccctcctcatcagctgtcacacctccttgcagctgatatcttagttcccagagagcacagaagcaagctcaagagagtgtctacaggccagcgtctactccttcgctctgcctccctcatgctgtcacggagcgcctgtcccaggccctcactcctgttctaaggcatctctccagtcctctactgcactctcccccatcagagattcctccctcgcctgccctagaaacttgttgctacttctcccaccttgacaaaagctgctcccaaccccccacctgtctagcatctctgttttcctttaccagcaagactccagtccctgtctccacaccctcttcaaccttctccagttgttcctttgctgccacagctctgccaagctgctccatgaggtctccagtgatgaccttcatgttgttaaatctgggagctgcttgtcacttcttttcccagagctgtcgtcgtcagttaaccccaatacccatacgagacaatcctttccctcccttgagtctctgcactgatgtgcaccttctcagtgcaaaccacagcttttgtctctttctagctgaatacatgactgactgtgcttatcttagctgtcacccctgctggagcagaagctccacaggacaggattgtctccttgattcacagatgtagctcaagctcctagaacagtgcctggtgtctgtgggtcctcaggaagtcctaggtgagtgtgtgaatgtctgtcctcctcggtcttttctgtttcgcatgtgatgttggaaggcctcaggttcaggcttttcttctccaccctcactcccgaagtgattccgtccagcctcatggctcccaaatttatgtctccaggctgactgggtcacgggaactccttatcctccctagaccttctctttccctggtcttctcctttccagtaaacagcaactccaactcctgctcctcaggccagaaacctggcgctggttacctcatttgttcacaaatactgttactccacctgcaagatggatacaaaatctcatgagttcccctgcctccatggcccccaccctggtccaggtgtccagcttccctgcctctgcccttgccccctggttctttgtttagtcctgcaatattgtgctcttctgttcagaaccctccagtgggtccctgcttgctcagagtcacagcccaacaggatcacctctcttgccactctcccaccactcatgcactgcggcctcactggcctcctggctcctccctggaccctccaagtatgcccctgcctcaaggccttgacctctcctctgccctctgtcccaggtatcacacatgtctgctcaagtgtcaccttcccaatgtggccttccccgagcacacccatgtctgtaagtcaggcagcctgcctctgccccaccagttccccctgcctagcataggacttgtcaccatctgccacaagctgtgttactgcttggttttgtttgtgctctcccactcccttcccctccctccctctccccacccctatagaatctgagtcccatgaggacagagatttttttttttgcctcttcctcaatatatccccagtgcctagaatcatgcatattttaatttattgagtgaattaacaaataaattctgcagtgggacattgctctaaggttttgtcttataagagggacagaagaacatgcagcctgctctgctgttggctccttagcttctccatggctaacaggaacaatattgtttatgagataatcaaagccatagtcatgagttagaaggtacatataaaggcaaatatgtggagattgagttactttggcgggggcggaggggtgtgtagttatctgaaaacatggaacaaatcaatgagagtctaaatagcacccacatatttgcccctcttttaaaacatacctcctttatgagtgtagaatttaacagcacagtttcccagtgcagctttgcgaaacaagagaaatgaattttaaaggctgtcaggtgcctttgcaatctgtggcttagtatttgtgtaacaacatttgtgttttgccaacagatgtactgcttaaagtacccatgagaatggcctctgtggttttctactttctcggatggaaccttaggaactgattattgagaagaggctgatactgcccacctcagctcccaggcaggcttcagggccttggttactactcctttgggccctcactgacccttgcagacgtcttttgcaacctctgtagccagaagagacaactgctttctggcatgttgctctttccctaatggctttatgagcttcttgaacaccaaagcatgtgtgacttcctcacgccttcccctgtatagtatagcacccctaactgtatgtgtaaggagaaggagtgagcaattgatggcgtccccctggatctccaagggaatgggaaggggcagggtttctggattcagtcatgtggaatctggtcgttggtgtctaaatgtgcctgttacttgtgcccaatgtccaggttcaccaggaggcttagcctgctcatttccctgctagtagctatattttgggagagcattttttatgctctaattgaactttgtgggtctcagcaatttgaacaatgttttgtttttcttctggtcaggttacaaaggaaagaaaaggaatctggtgttgtaggaggtggtgtgttgtgtaattacttgttttttttttttaagtttttttatatttttgcaacaaggcaagttttctttgaataaataatgctgggagcttatcacatagaaggcatatgtgttgtactcagtacattctgaattatctgggtttatttttatctcttgaattcacttataaacaattcaaaggctgcttttttagctaacagaaataggaagagaatctcagaatctgttttgtcattttttcaatgggttgagttatagtgattatgctaactcggtggaaaagcagtgtagtgagtaaaccccacatacggcatatcatgaacattttgttgcttttttggcttctgaccatcttcatacctttttttgtgttaaaagtctccccattgtgtatatcttagtaagaggcaggtggaccctagtttctacctaagaaaacctgaagatggggttgggggcctgtggtgtacttccttctcatgctgtccatgaccactgcagtggctttgtaaggatccaggacccagggcccctcagtgggtgtcttccatttctcaagattgcctcttggttgtgagatgacggttgctgctctagtcattgcatccactcctccaggtaggaagaaagaggtcataggggaaaggcaaaatggcacttgacatcttaacttctaggcccattcaatatttccatttccatcttcacacccatcatcttgtcctagggaacaaacagcaccagcagctcagtagctataacagcaattattatttctcacacatgggtctgggtcagctgcaagatgggattcagatctgttctcaagcctgtcgttccaggacccaggagggagaagcagctgccaggggaagtctcttcgtaggcggaggtcaggagtccaagaggagtgagcagagtcacagaagcctcttaaagcctcttcttcccccatcccatcaacacgtgagcaagcccagagtcagtgggtgggaggtgtgctccgcccatagtcagtagaacaagagcaagcttgaaagagaacgatgaacaggagtgcactcggccactgtctccttagccataacgtagtcccatggtctgctgggaagcggggaataactctccttagctgagcgcagggtctcattagtaaggcagatggagaacatggatgttgggggacaactggcagtgcctgccacaggggaatggatatattccctccccttgctctctggaaactaggggatggcgatgaagcctaggtttggccaaacccattctgccttcagggactttgactcttgagggacagtgagggattagtcatggtggtggcagttgagtcacaaaaccagcagtggtggctaatgtccagtgatgacatgcaacagtgcccagggtgggtgtcccaaccagcaggtccctgcagtataaccttggctgtgtttgcagtggtgcagcctctattcctgctgcttttctgagcctagttctctagttctctctccatttccagatctgctgcccaagaactcctttgtgattgaatttaaccagagttgatttctgttgcttgaaactcaggaccttgatgcagtgtgcagggtctgggcaaggtaaaaacacactttcatgatttcgcctcaagtatagtagatgagcttaggctttttgagccaggtagccttgggattaattctcagctcttgcacctagcaggtgacctcagcaatcaagtcacttgccctccttgagcctcagtgttgccctcagttaaacattgctctcgtgtgttgctgagcattcagtgagattgtatataaagtgatcattgtgaaggtattgggacataatttgggaaagcgtcctggtctaagcttttgattggctctccatcatttgggtaatgggatagtgatttaggagtatcatagcagctcaaggggcccttctggaaagggtatgaggaaggtcagggacaagtctgaaatgaatcatcctaggcttaatgcctgtgactgggcagtgggtacaattatctcaggctagtcagtagtcatttattgtgagaatacatgggcagattttttaatttccttctcagtctagacttgaatgcaaacagttcttattgctaacttaccactagtcaccactaatgaacaaagactatgaacaggaaattcataaaagaagagatacagatggccaatgaagataggaaaagagttctgcctgctggtaatcaaagagatgcaaacgagaacaaaaatgatgccttttcacctaccaaatttgtcaagattaaaaagaaagcaaagagccagcgtcagctgatgttcatacctgcacctgctcggtagcttgctaatgttctgcctgctccacacgccaggccagcctccacggcgcagccaggtgaggcctttccttgtatacaggcacgtttggattcactgttgcataagtgagacatgtgcatgcttcacaattcaggaagtgcaaactccagagtgatgcaaggtctgagtgtccctgctgccctggtctcccagctgcctaggcctctcttcagggaacggctgcatccagggtcttgtctgtgtcttttgaggtgttctatgtacacgcagacacatctaaacctatttttattttccctgcacctgcttgggctactgtaagctgttaaatttttttttctaggaatttgtccattttgtctgactagcataaagttgttcatgttatagtttatacatttgcaacatctgtaattatgtctgctttttcattcctagtgtttgttgtttacttgtaccttctcccgtttttccttgtcttggtaaaagctcattaggttcattggtcttacaagaagcagacatgtaggcattattgccctgtattactctgtgtctcttttctagttcattaaattctgcttttgcttttatctttattattttttctatggtcttagagtacattctctgtgttttgttgttgttgttgttgttgtttgttttttgttttgagagagagagtcttgctctgtcgcccaggctggagtgcagtagtgcaatctcagctcactgcaacctccacctcctgggttcaagtgattctcgtgcctcaacctcccgagtagctgagatttacaggcatttgccccacacccggcaaattttttgtatttttagtagagatggggttttggcatgttgaccaggcgggtctcgaactgctgacgccaggtgctccacccgccttggcctcccaaagtgctgggattacaggcatgagccaccacgcctggccctaacttcttaagttataaatttggttcattgatttttctacccttttttcaaatgtaaacatttaaggctaaccctctggaactacttcaactgtatctagcaagttctgatagtattgtcactttaagttagcccaaagatattttaaattttctttgtttcttcctttgactcacatattattttaaaatgtgtttttcaatttccaagcacatggctttgggtttgttttttttttttcctagttgctctagaaaaaaaaattgactgcatgaggtggctcatgcctgtaatcccagcactttgggaggccgaggcgggcagatcacctgaggtcaggagttcgagaccagcctggccaacatgccaaaacctcgtctctactaaaaatacaaaattagccgggcatggtggcacacacctgtagttccagctactcgggaggctgaggcaggagaatcacttgaaccgggaggcagtggtcacagtgagccaagattgtgccagtgtactccagcctgggcaacaagagcaatactccgtctcaaaaaaaaaaaagaaaaaaagaaaaaatcaacttctaactaaatggcactgtgatcaaagaacttggtctgtgtgacaccagttcttgcagttggttgagaagtgctccatgacacattatccacaaccagtggacagaatatgtcaccaccaagcatgggtgcaggattctacatatattcattacctctgtcttatccgtttgttgtgaaagtattttctcttcttactgtcattttgtttacttgatttatcaactgatggaatacgtgttaaaacctactgtggtgatggacacatcagtttctccacagagtttggtcattttcattttattatttattttgaggccacattttcagttttagatacagtttcacattcctggtgtattgaaccctttggtattatgaagcgaccatactaatatgttatttttttttaaattattatttattttatttatttttctttcttttttttttttttgagacagggtctccctctgtcacccagtctggagtgcagtggtgcaatctcagctcactgcaacctccgcctcctgggctcaagtggtcctcccacctcagcctcctgagtagctgggattacaggcttgcaccagcgcgcctggctaagtttttgtatttttagtagagacagggttttgccatgttgcccagactggtctcaaactcctgggctcaagcagttcaccagccttggcctctaaaagtgttgggattacaggtgtgagccaccacgcccggccatcccagttttttattttcctcctttctgtgtctttatgcatcagtgaggtggagcttttgaaaatgtcagatagctagattttttttttttgagacggagttttgctcttgttgcccaggctggagtgcaatggcgtgatctcggctcactgcaacctccacctcccaggttcaaaacaattctcctgccgcagcctcctgagtagctgggactacaggcacgtgccaccacacccggctaattttgtatttttagtagagatgtggtttcaccatgttggccaggctggtctcaaactcctcacctcagctgatcacccgcctcagcctcccaaagtgttggaattacagacgtgagccaccatgcccagctgatagctagattttttttttttttttttttttgagacggagtcttgctctgtcgcccaggctggagtgcggtggcgcgatctcggctcactgcaagctccgccccccgggttcatgccattctcctgcttcagcctccagagtagctgggactacaggtgcccgccaccacgcgtggctgattttttttttttttttttttttgtatttttagtagagacggggtttcaccgtgtcagccaggatggtctcgatctcctgacctcgtgatccgcccgcctcagcctcccaaagtgctgggattacaggcgtgagccaccgcacccggcctcgagattttttaaaaaatccattgtctgtttcgtcctttaacatctatttgatttctgatgtatttagattcatttatagcatatttgtgcattctatttttccatattttctgttcttttaaattttccttctcctttcttgccttctcttagacttttaaaaaaattgtagtaaaatacacatcacctaaaatttaccatttttaaatgtacagttcagtggcattaaatacaaattggaggccaggcatggtggctcatgcctggaatcccagcactttgagaggctgaggtgggaggattgcttgaacctggaggtcgaggttgcagtgaggtgtgatcacactactgctatagcccaggcaacagagtgagaacctatctaaaaaaacaaacaaacaaacaaacaaacagattggcatcacacagtgtgtgtgctgctgtgctgtgctgttatcatttaacattaaaacataaacatcagcactgttatggactgaatgtttgtgtcccccaaaattccagtgttgaagctcaaacctccaatgtgatgttatttggagatggggtatttgagaggtggttaggtttagatgaaatcaggagggagggtgggtttcgcatgatgagattagtgtccttataacaagagacagcagagagcttgctttctccaccatgtgagtatgcaatgagaaggcagccatctccaagtcagaaagagagccctcaccaggggctgaatgtgctgacaccttgatcttggacttctagcctccagaactgtgagaaatttcagttgaataggccccccagtctgtactattttgttatagcttgagcagactaatacacccatgttatgaaaagctataaacatccctttaaaggccacctaacgcgtcgtattacctcatgcatcttctctgctgagctttccaaaagagtggcttaggctgggcctggtggctcatgcctgtaatcccagcactttgggaggccaaggcaggtggatcacctgaggtcaggagttcaagaccagcctgaccaacatggagaaatcccgtccctactaaaaatacaaaattagctgggcgtggtggcgcatgcctgtaatcccagctacttgggaggctgagccaggagaatcacttgaacctgggagatggagggtgcagtgagccgagatcgtgccattgcattccagcccggccaacaagagcgaaactccatctcaaaaaaaaagagtggctggccgggcgcagtggctcacgcctgtaatccccgcactgtgggaggccgaggtgggtggatcacgaggtcaggagttcaaaaccagcctggccgagatggtgaaaccccgtctctactaaaaatagaaaaactagccaggcgcagtggcaggcgcctgtaatcccagctacttgggtggctgaggcaggagaatcgcttgaacctggggggcggaggttgcagtgagccaagatggtgccactgcactccagcctgggtgacacagtgagaccccgtctcaaaaaaaaaaaaaaaaaaaaaaaaagtggcgtatgttcccggtctccacctctcattcgccagcccctgtgaccaaacccctgggattagatctccatcgggtccctcccctcaccctaacctcacatgcagtggttcctgagaagctgctgtttatctgatcacgggatccagcaggatctgagggctcattcactgaatctgtactacccaacaaggcaggcttgtccttacccacacttttcaggtgaaaacttaatcagattcaagcgtttatcttagtggcctcttcgtggtgtgtgatttccttcttgcagctctttactggctaaaactcttcactgggagttaaaccaggtgtggtccttgaccctcatcattttgtcccatctcctatgctgggctctgtatccttgtctccaagcagtctcgtgtgacagggaagttacctattattgtatggtcccctcttcttgtcacctctggtgtggcacttgttccatttcttgttcaatgaatgtgatttgtgaatgtgccacatctgtgggaggaaggcagttcgcagcaagagttgtagttcccttgctttgccctgagggccaggactttacactagatttttttgttgcattcctgcactcataaagtacacgtaaacttagaggtggtgtgttaaatgctagaacttaaaactgagttcagctaggctcaagtgccccacaatttttgtcccaccagacaatttcatgaatatctacagattgttccctcaatatgcctcaatattgaggcatattgatttggggagcacagacaagtcaaggttgatgtgcatccgctgaacatgatcttaagttgttgaagtaggtattattaatgaacgaacgtctattttagctccaagagcccctggtcttccagaagagactcccaatgatcttccagaagcagctgggcttcttttggtcctcccccacccaggtgcagtcccgttctccctgcctgggtgagtttgattcctctgccgtggaataggctaggctgctacctcttgagcctcttccaccaggccatccattaggtggcgacagagagcactaaaaggaactactatggaaataaaacttgttttgcttcttggggggaaaaaaaaagaaaaaggcttgtggggcgtgtgtgcattttagtcagattttactgtgcaaaacatttgagagatttctgccctctttctcccttccattcttctcaacccactgggcgccctaccacccctgtctccttcaagataaggtagatcagaagaccaaatagacaaatgccatgtccactgttttctgtcacagttgatagccataccagtcacccaagctggaaacccaacaggcccctgcccttcactgcccacatccaagggagccaccaagtcccacaaattgttcctttaactgtttgtccctcttttgtcttctgtcatcccttctaccgctgtcctggttcaatccctcatcttgctctgggactcccatgataacttatgatctttcctccacctctctatcttccacacaatccctatcatcaatctcattcccctgctttaaacccaagagtggcaccctgtgtttgagtgacatcagggcccctcatgtggctcctgcttctctttgtggccccttctgttgctgctgcttttcttatggacatagccctcagcagtccaggactgcttgtagttcctcccaggtaccatgtttcttgcactcctggcctttgtcattggctcccctgcccaagtccccttctcttctcctttccttcccctgtggccttgccttgtcgtgcttatccttgaagaccctgtcaggtatctcttccccaaagagccctgcctaaccaccgcccccctcccccccgcgacacacacacctgggttaggccctgcctctccacgcctgtgcctcctgccaagtcctcagaggtctctgatcccatgtgcctccaggcatggcatagggggactgtgacacagcctctcggcccacagacccctgattgtgggcttgctcactgccccagtcagtcctcttattgaggattccgtgccagttcctgactccagcacacacacgcatgtaggccgccctcctagtgcctggctccttccctgtctcttctgccactcattcccatggtcgtatcctggagttggtcatctctggaactccacccacggagttctaacttagctctgcctatgatgaggacttactgtcttcccagcttgcagtgtcaaccactgtttgatgcccctgggactccattggtcttccctcctcttgtgaactgtgcccatcaccagacgaacttgttttagaatttaccatcgtaactgagctcccttcagcgcatacctccttggctcctgctcagtctctgtttctccttttagccaaactctctaagagttctctccactcatgggccctcttccttgcctgctgctccttgctcagcttgctccatgaacacttgcttttccacattccatgaaataatcttaacagtcatcagtggctgtcactccttctcagccctttccttgtgtctcttctggtacctcatactctccaggtggccatctcacctcacatcttgaaccctctgggtttgggagaattctcacctcacgagttgatgggaggcctggcgacctctgattgtagtcactgcaaatgccagatgcttatttgcctagcttccctttcggtcagggcagcagttggcaaacggtatctcaagggccaagtccggcccactgcctgttttcgtaaatgaagctttaccaggacccagttccaccccgtcctttgtgcattgtccaagactgctctcctgtacaacagcaggtgggctggttgtgacagatactgtctggcccacaaggtggaaaatactatctggccccttacagaaagaaattacctgagttctacacgagggtgtaggtatgtaccctggcctctgccagtcagactcacatgctaggaggagcagggccaggcaggagagccgtgtctcctggcattggggctgcaggaaagacgagctcctaggccacagtgccagtggccagtgctgctgccttgcagggtcgcacaggcagtgctggctgtttggactggcttggcagaaggatttgaagtattgttcctagccaactggactcaaacctgttcctccaaccctctagggattctcttatcacccagtagccttttccccctagttttaaaaattgcagtaaaatacacaaaagataaaatgtactgccttaaccatttttaagtgtacaattctgtggtattgagcacatttatattgtgcaaccatcaccacatgcatcttcaatagcttttcatcagtccttgtctgcataaatcagctagagttggtttctattgattgccaccaataatcttgacagatatgtctgatcttccttctctgcactgactcctctttctctgtctcctctgctgattctttctcctcatcacaactccaaatagcagggggagggttgtttacacttatattcagcacgccctcacgcactcgcctggctcttcagacctctcccctgaactccagattcatacatccagctgccctttaggcctctagaaagctaaatacctcagtatcaaaaacatgagaaacggaagccagagtcctggatctctcgccctttcgctgtcccggtgcccatgcccttcagggatggcacctagaccagctccctgcatccctgcctagactctgcagtagtctcacgtggcagacccggaggtcactctcctctctggatgccctgcggacactccggttagcctcagctgcaagagcctcctcacccaaggtcacgccatttccaggacagcaccctggtgactgagcgaggtaagggtacaaggcccttatagggccttctctttgacttcttcccacctccctttatggatgtcagttcctgatgaacatcttacacctcaaaccgtgacccaacatctgcttctgcagagcccccctgtggcatcttgtgccctcctgccccactccctctactctatatcttcccatagttagaatgggctttttttttttttttttgagataaggtctccctttgtcacccaggctggaatgcaatggcacagtcacgactcactgcagcctcaacctcctgggctcaagcagtcctcccacctcagcctcccaagtagctgagactacaggtatgcaccaccacacctggctaatttttatattttttgtagagactggggtctccctatgttgcccgggctggtctcgaactcccaggctcaagcaatcctcccgccttggcctcccaaaatgcaggattacaggcgtgtaccagtgtgcccagcctcagatgggctctttgaaaaatgtttattagatcaggttactcccttgagaaaaaccctctcagaataaaacccgaagtccattacttgaaagcagagccagcttcatgggcctttgtaactgcccatgggcttgctggaacccaggcttggtttaatactctactctcaccatctcaaaattcttaatttttgaacaagaggccctgcattttcattttgcaccaggctccacaaattgtgtaactgggcctgcctcagcagccacatggaacatgatccctccttgcctatttgagctcattctctaccattctctcccttgctcacctggctcccactgctcttgctcttcctggaacttgccataatgttgctagagtcagagccttggctcttgctgctcctcattggctggacccctctttacttgacctgctccctcaccactcacttccttcagatctgtgttcagatttcgtcttctcagagaggcttttggcccctgtccatctctctgaatttacctctgacctctcccccaccaccactgcgctaagctgcctcagaactttgtagacattctgtctggtcttctgatgtttcccccttggaagaatcccaaggtgcctgaagaatgctttctttatccttgaagttgagtaggttgactagagtctggcttgctattgagcattctttatcaaattgtcctgggaacatggtgtattctttcagtctgcagatgtagtcgttgctgtttcaggtcagctctcttatggatctttgacagcatcttctgttccatttgttgagttctgtacttcagggacacaaattcctcatgttggattgtctttgtctctcttccaatgctattagctttgccgtaattggtttagcttttgtctttttcatctgcattcactttgtctaatttgattttcagctatgtatattctgtttctggctgtttttcaatgtatttattagtttcataatgatgtgttttggtctgcagtttgtttctctaggttggaaatttgtcttttcatcttattctgttttatcatcccatctttgaactcttttattgggaacatgttcttatgaagttgtggggaatttttttcccttccttgtgtattctcttcttggtgggagactttgcctttctcgtgccatctccctccctgggcctcttttttttcttctggccataatatgtttgcctagttaccatgtcacttcttttcgtcttggctcaggcttggatggctctgcatagtcgttctgtttgctttgagacagtggaggaattcttggctctctcttcccagtttcttggcatcttctcttgctgttttcccctctgagctatcgcgtgcaggcttgttatcttgtatccggagagaatttgcacgctggagggagctgcagccatgtagtcttcagccctatctggattcttctctttgttctaagaactgtgttggatgtcttactaaggctcactctagctgcacgagggatgtgtgtgccatttccatggggatagggggcacctcagtctctgggtggttccataatctgtgtatacctaagagcagttgcttcccacagagctgggctggctcactgggcactttgccatttctcctgcacctcccagctggagtttctgggtctaaaaggaaaaagtgaaggactcccacttggttgcttctctccagcttactgactgcaaattcccagggcgttgcccgctccctagggtggtttctgggggacggggcaggagcctggctttgctgctgctttgtcctctggagtcttttctcagactgctttgaattacacccctttcctttgtgtgctgaaatcttcccttcacactctccttccctgcctttcttttgtgtcttatcttactaggactggaagagggcagttgtgcaggaggtctgcatctaattccctaatccatgtgagagtgctcctgttgtgtgctttgtgacatgatggtgagaaatactccctagagcagtggctaccagaaggaagccatccccccccctgcacacacacacacacacacacacacacacacacacacacacacacactccttctggctgtcctcagatgcctattctaggtaaatgtcagattccaaagaaaatccagttgagatcttttttctttttttgagacgagagtcttgctgtgttgcccaggctggagtgcagtggcacaatctcggctcactgtaacctccgcctcctgggttcaagcgattctcctgcctcagcctcccaagtagctgggactacaggcgcgcaccaccacaccaggctaaaatttttttgtatttttagtagagacagggtttcactgtgttggccaggctggtctcgaactcctgacctcgtgttctgcccgcctcagcctcccagagtgctgggattacaggcttgagccatcgcgcccggcctccagttgggatcttgactggaatgactggtgttcaatcattatagtttccacctaatttgtatttgtacacaggacagttactaatttgttggtacttgtttgatccccagtccctagagttgtttatggggtggagcttcagtccctgctgcttcccctgtggcagcagctggagtcagggtggggacccagggtgctgctggcagattcttgagacaggtagaatctcctctatattggtgtctctctctgtcccagcagtgcccaggaaaacctggccagcctgtcactgacctctccacctagggcactggtggttcaggtccttctatttgccaccggcaaaccgtacttctgccagtctggctcttaggcccagtttctctgatcttgcagattttcttgggctctgctacggaatcctcatacctccggcaggtccctcctttgcccatgtgtttaactgtggtggaatcgtgtgagagctgcttctctcgcatggatcccagccacaccacattctacagcggttcctctgaaggcattgatagagatatttcctcctgttttgcatttcgttggtcatttcagtagaatcagggtgaaataaacatgggggctcagatgtcagcattacgaaccaagtacgtcaggcaggctgatgtggactgacctacactagtgagacgcaagatgacgaaaacaagggcactcactccaagttactgatgagatgtttggatcaaatgagccagtccttaagcagagttctctagtaaaagagatctcctttctgccctttcttgttccccaaaatgtgttgccttcatggtgaaaatttattttggcagattttctcttctttgataaaagcagccaacactttgttaaaagtctgtgaaacttatttacatgaagtatgtaaaggtaagaaaaaaacattatcaacaagaaatggagaaagccagcagctgaggacagaaaagtcatgcacagtgtcagtgtctatggaaacaggccacttggaccttgaggactaggtatttggaattggaggtgagcttggcctggtgagtctctaaccacttgtgtgtaggatcagtgtgagaaccctgctagaatatagtggcagagatgcaaggggaaatcattggagaagttaccagggaatgatgagctaatctgaaaaaaatacatgtttctaagttgggcgtggtagctcatctgtagtcccagctacttgagagcctgaggcaggaggatcgcttgagcccagcctgggcagcacagcgagaccctatctccctaaaaaaaactttttcgttgtttagttttgggatttttttttttcctggtcttttttccccctttttgtgaataacgggatctcactatgttgcccaggcagatctcgaactcctgggcccaagcaatcctcctgcctctgccttcctaagattacaggtatgagccactgtgttaagcaaaaaaacttttttaaatgaaaatcattttttaaaagacaggctttccaggggagggtattattccacttatatgaagtgtcaacagtaggcagatttgtggagacaaatagattagtggttaccaggggctgagaggagtgggagtggggagcaactgcttaatgggtaaagggttgtctttggaactagagagtagtgatggtcgcatgacattgtgaatgtactaaatgctattaatgataaattttatgttatgtgtattttaccacaattaaaaaaaaaagatcaaatgtcctcagaatagccaacaaccttccacttggctaaatgcctactcattaaacttcttgaactaaattcctttctgattgtcatggttattgtgtcctgggcttcagagtttcacattcaggttggcttggtccagtctgtcatgtatcactataggtccccacattggcctcttcctcagacggacagcccatctatctgccggggctctgtgccacagccagatagacttgctctgagacagctgtgtgggctctgagcactggccaggcatcacaaaacctatctttatgatttagaataattggtggtcagctgctgttttaatgttgttgttttttttaatttagatataattcacataccatgaaatttactcatttaaagtgtacaattcattcttcagtataattcataggctcacagaaaaaattgtttaaaaataaaatgtgcaattcagtgtcttttagtacattcacagagttgtgcaaccatcgcctctgtgtcattccagaacactttcagcacccaaaagaaaccccagacacaggagcagtcacctcttattacccgcagcccctggcaacaactcatccacttcctgtctctatggatttgcctattctggacatttcctataaatggaattatgcactatttggccttttgtgtctggcctctttcactgagcgtaatgtcctcaaggttcatctgcattgtagcatgtgtcagaatttctttcctttttgaggctgaatgatattatatcctatagataatgaggttttgattatccacccatcccttgggaatgcatatttgggttgcccccaccatttggctgttgtaaactgtgctgccatgaacactggtgtacggatatctgtttggttactggttttggttttttgtttgtttgttttggttttttgagacaaggtcttgctctgtcgcccaggctggattacagtggcacgatctctgctcactgcaacctccacctcccaggttcaagcaattctcctgcctcagtctcctgagtagctgggactacaggtagcactcaccaccatgcccggctaaatttttttgtatttttagtagagacaaggtttcgccatattggccaggctggtctcaaactcctgacctcaggtgatccacccacctcagcctcccaaagtgctgggattacagacgtgagccaccgcacccggcatagttgtggctttttgagagtgtatggctaggagtaaaattgccaggtcatatggtaactccatgtttaacatttgagaaactgccaaactgttctccacagcaggaattttttaacctgtatgtggtgggcttgtgtttcggttttcattttacacatctataaagatgagatttgctgtatggcactggttgcctgtatttggggagggttctgcttttggttggcaagaactgcattttatttaagcttagcaaaacataactggtttctcgcatcttctcaaaagtggaggattaagaaatggactgcgaattcagagcagggcagctgaacctcaggctccacccttgtagccttcaagctgaacctcattctctcttgctccctggagaccactgagacactctgcctgtgccagtttgatttctcacatttttaaagggccaaagcttgtgtctcaaagtgctatagcctttattgattcatgcagagaagcctccttgattccgtaattctgcagctaatactggaagtagaaagaattggaaacaccatctggatgacactttagggtggaagcagccagtacaagggggggctcattatttcctctggtcccagactgttcacctggagctgtagccaccaccctgcccttaggttaactgcctcgagtggtagtttagctctttgtgctgtgccgagggataactggaagtgaaaggtgctgagaaatgccatctcctgaaagtggcgagcatgagtgaatttacgaaaggttgggatattgctggggctctggaagtttctctggagctcactccaggggacagggagggggctggattccaattcaagtgaaaaatacctttcatctgccttgttcacctggcttttttgcctttttgtaaaatctgaaaacctcagggattgagtagtctttccttaactgcagttgcctgtctggccacacctgccagctgttgcttgtacccctgtaatttgcacggccttccgggcctttctcacaagatcactgcaggtcacattcatgaggaaaatgcaggcagttcctgccatcagacccctcaggatgtcatggtttggcctgaaaacaagattcctgcaactctaattttcctttgctagatcaaatgaaggatttgatctaatgtttgcattctagcagcaaaatcattgaatattttatttcttaagagccttacttcatattttgtaggtattttaagattttgtaaaggcctttctgcttcaacgtgtgatgtgtgcattcttagaaaaagatcttgtgttctgtaaatcacacaataaaaacatgagttcgtgcaggaaaaactggggcggggtggatcactccaaacttgtgtggtgtggtaactggagctcactgatgaaaccatgaacagttctggctgaaagaaccccacagtacactgaggtctgttggcatcgccgccagcaccgccccggtccctttgtgcgcgccaccacacctggctaattttttatttttagtagagagggggtttcaccatgttggtcaggatggcctcgaactgacctcgtgatccgcccacctcagcctcccaaagtgctgggattacaggtgtgagcctccgtgcccagccttcagctttttttcttaatgtctttgtgtaatatgaaggcattctctttaattgttaaaaagcttgcctaccactgcttcaaaatattactgtcagttggcatagcttctgattatattgatgtcatctcccttcttttaaacatgttaccatattggcactgtatttcccctagcccattgatcacttgagagttagtcatagtcctcgtgctgtttcactcctaaacgtttaagcatgcctttcctaagagcagacagtacagttaagacactcaggaagtttagcaatgagctaacacagaaccttacatttctccacataccccataaatgccttttttagagcctttgagcctggaatgcagagtccaggactgtgtgttgtattcgattgtgtcatcccttcagtctcctttatcagaaatgttcccccacccccttgttttctctcatcatcttgagtccagaccgtggttgcatggcacgccctctctggactcttcctgctgtctcctcacggtaagcttcagtctcctactcgtgatgctggttcatctcagcagcactgaggggcctgagctcagtttggtcgtgtgttaaggtggtgcctgccagatttctccacagaaaagggccccgtacttttatttgctcttcagcctgtgtattccttcctttcttgccagcttgtgggtggcttctctagcagcttctgtaagatactcagtttggcagttgtagttgtttcagcaggagaggtgtctgcatacctgaccaccacatggctagaagtcgatccatcctctggcgtaaccatcctccatgctactgtccctggggcactgaggccctcctcagtgacttcctccacctcatcttccgccatctccaagccaccagtgtccaacggactactgatatgtcccaaactcatcatttgtttattcaccaattcagagcccacctttttttcagcactgagctagcctctccttgctagaagcttacggtcgaaggtctccagccatcagaagaagcacgtggagcgctgcgtccgtgttgtggttattcatccagcatgtgttgagtaagggttgcacctgtgcctggcattatgcattgagcggggagatgggggttggcacgcacagtggggtgttctaagtacactgagggctcgggtgccctggctcatagagcagggagggaggcaggagcagggaaggtgtctcagaagtgccatctttttttttttttttttgggaagtggaatcttgttctatcgcctggtctggagtgcaatggcactatctcaactcactgcagcctccgcctcccaggttcaagcgattctcatgcctcagtccccgagtagctgggaccacaggcgcacaccaccacacccggcaaatattttgtatttttagtagaggcggagttttgccatgttggccaggctggtcttaaactcctggcctcaagtgatctgctcacctcggcctcctaaggtgttgggattacaggcatgagccactgcgcccggtctagaagtgccatcctaactgaacctgaaagatgaaagttctccagatgaacctgaaagttctccaaatgaaaaggtgggagggggtgacagggttaggcccagagcctctggtgacacagggtgggcatcattggtcactttttcctcgagggaggggcgtcacacgggtgatagggtgggagctataaccatgttgatagtgccgcctctgcccatctggcctggcatgccctgagccctctgtcccacctgtggaactcataagccctgacagcccactcactcctgattcattatccacacccctgtgcttccgctgtgcctggagcaagctttcttcagggggaagggaggctggaactatgttgtagttacctatttgtcctcccttccaaactgtgagttcttggaggtggaaggatgctgcaggatctggctcaggacgaaggcagttggtgaacagacacgtgtgtttttgactcacggtgatctcagacaagttcctctgtctagtcgaacttctttttttccatctgtaacactcaggagttgaataggtggtttttctgaggatacttcaactgtaaaatgtatgaacttgtgaactagctatttagttctcctcataatcaagattgtgtgtgtgtggggggttctgattagagggaggatgaagagaggtgtatggggttttttttgttttgttttctgtttgtttgtttgtttttgagatggagtctcactctgtcacccaggctggagtgcagtggcacgatttcggttcactgcaacctctgcctcctgggttcaagtgattctcctgcctcagcctcctgagtaactgggattacaggcatgcaccaccatgcccagctaatttttgtatttttaatagagatggggttttcgccatgttggccaggctggtctcgaactcctgacctcaggtgatccacctgcctcggcctcccaaagtgctgggattataggcatgagccaccacacctggcaggtttctttgaaaaagtttgtgtttcggcaaacaccataaaccccctgggggacagccttggggagtcacctggcaccctagcccagcctccctcccttgggtcctgcagtgaaggcttagtgagggtgtgcaaatgcccaggtcaccctgggactgggcaggccctctgggctaagggtaaactcatttggaatacctgttttctatcattgttttttatttgttaaatttaaagggtacaagtgcagttttgttgcgtggatatattgtatagtagtgaagtctgagctttcagtgtaaccatcacctgaatagtggacattgtacccgttaagtaatgtctcatccctcaccccctcccacccttcccagtctctccagtgtctgccattcctcactctgtccatgtgcacatgctattcagctcctgcttctaagtgagaacgtacggtatttgactttctgtgtctgagctgtgtcactgaagacaatggactccagctccatccacgttttttatcatttttacctgcactccacacccagcacaatccaggcttctttgtgggttttttgaaatttgtctttaattataaaagtagcagccagcaaattaacaaacacccatgtgcctttcattgcacagaattgaaaatcatcatactatatttgcttcaagtaatttccattagaaagaactagaatattacagtagagttaaagaccctttatttcccatcttcagtgctcttaaaagttcatttagggccaggcatggtggctcacacctataatcccagcactttgagaggcccaggtgggtggatcacctgaggtcaggagttcaagaccagcctggccaacatggcgaaaccccatctctactaaaaatacaaaaattagctgggcgtggtggtgcgcatctgtaatctcagctactcgggaggctgaggcaggagaatcgcttgaactcaggagggaggcagagcctgtatgcagtaagccgagattgcgccaccacaccccagcatgggtgacagagcaagactccgtctcaaaaaaaaaaaaaaaaaagttcattcattgtacacttagaaatagttaaaaaggtaaactttgttttgtgtgtgtgtgtatatatatatatatatatatatatatatatatatatatatatgtatttttttttgagacatatatgtgtctggtttgttcgcccaggcaggagtgcagtggcatgatcaacggctcactgcagcctcaacttcctaggctcaagtgatcctcctgcctcagcctcccgagtagctaggattacaggcacacaccaccatgcccagctaattttttttttttttttttttttttgtagagacagggttttgctatgttgcccaggctggtctcaaactcctgagctcaagcgatccacctgcctcacctcccaaagtgctgggattacaagtgtaagccaccacacctgacctgttttgtatattttaccacaataaaaagcctttaaaaccccaagcagacagttcattttcattcaggcccaactcagaatctgatcacagcggggtttcccccctttctagcgagtagctgaagaactgttttctctccttgatggtataactgtctctgtgggtgttgctcccctgccgctccagtggttttgtttttgtttttgtttttttgagacggagtcttgcgatctcagctcactgcgacctctgcctcctgggttcaggcgattcttctccctcagccttccatgtagctgggacttacaggcacctgccaccacgcccggctcatttttgtatttttagtagagacggagtttcaccatgttggccaggttgggctcgaactccagacctcaggtgatccacctgcctcagcctcccacagtgctgggattacaggtgagagccactgcacccagccggcccctcagtcttttccttctcaatcagtggcaccaccatcttcccaggctttggacatggtccctgactcacccttgcccctcacccccacactaatccacctgcgagctctgttgcttcaccacctagaccagccccaaatcctcaactgcccccaccctgggccacacctggaccactgctagaggcctctcatgggccctccctgtttttctcttgcactccccgggctttctggcacaagatgccccagaagcagaatcacatatctctcctgggagccaatctagtgtgtttactgcccctggagtgttattgttggccttagaatatgtcccactacaggtttgcagagcactgtagtcaaaagtcatttgaaataaatcttttctctgtggtatattgtcaatttgatatagaattaaatttgtttcttttcttttttcttttctttttttttttttttaagagacagggtcttggccaggcgtggtgtctcatgcctgtaatcccggcactttgggaagccaaggtgggtggatcgcctgaggtcaggaattcaagaccaacctggccagcatggtgaaaccccgtctctgctaaaaatacaaaaattagccgggcgtgatggcaggtacctgtaatcccagctactcgggaagctgaggcaggagaaggcttgaactcaggagtcggaggttgcagtgagccaagatcacgccatggcactctagcaagactctgtctcaaaaaaaaaaaaagagagagagagagacagggtcttgctctgtcactcaggctggagtgcagtgatgtagtcatggctcactgcagcctcatactcctgacctcaggtgatcgacccgcctcggcctcccaaagtgctgggatcgtaggctgaagccaccatgcctggcccgaactcatttgtttttatttgcattaagtgtaataaggttttgttacttttagtttgaattttattttgggtaatataaacatttacatgattcagaagtcagaattacactgaggcatgttcagctaggcctcactcctgtgcctgtacccttacctttttccccctaccccatgcagggaatcaatttcattagttcctggtgtgtccttccttaatacccccccttctttctttggtagaatgcagtagatatgtttgcgctttgctccctttgcttcacagtggatcctggaaatgactccatcgcagttcttagagctcttgtttagtccctttggatctgcacagtactccagtgtgtgggcgcaccataagtttattcagcaagtgccctggtgatagggatcgggggtattggaagcctttggctggtaaaaataatgttgtagcaaataacatcatgcatatgttctttgagatttctggaggtgtctctttagcatagatttctagaaggcattccttacgtcacgtttaggtttatagtttgacctcatggtgattaaggtatttgggaaatgcaaatgagagtttcgaagaagccagatctttcccattagttcactgtttttctctgacattaggaccgtccgggttctagggagcagccctggcgttaggcagtgccatgatggattgtgtagaagtagcgattcccatctgtctgctttcttggcccactctgctggtggctccccttccctccctcctttatggggagctggggagctgcctaggggtccattctcaaaggctgatctctggtgggcaacaggccacacctagctttccagggttcttcgtcatttcccattgagagctgtaagactcagagacatgaaaaggaagctctggctgggcacggtggctcacgcctgtaatcccagcactttgggaggctgaggcgggtcgatcacctgaggtcaggagttcgagaccagcctgcccaacatggtgaaaccccgtctccactaaacatacaaaaattagcctggcgtggtagcacacgcctgtgatcccagctactccggaggctgaggcaggagaataacttgaacccggcaggcggaggttgcgatgagccgatattatgccatcggcaacagagcgagactccatctcaaaaaaaaaacaaaaaacaaaacaaggcgagctctgtgctgggacagattagggacccctctttacagcaagaaagactgctctgtgggttgtaggatgcctttgtgtatgcagtggctctaggtgactctggcagccacactctgggccctaaacttctggaggaagatacaggatagggaggaactcaggggtgagtcatggtggggacaagacattccctcactctaagaccttgtcactagattggaacatctcttgcctccctacacctgacctgatggttctggagagatacgtccttgcagcttctgagtcccagcactaagcagcctttggtaacttccctacatcatttgagttctggtttcctaaggatgcttgccagtgagtgccatggtgccctcattgcacagtctgtgcagtgtagacaagaggggaagtctcttggggtagaccagccgcaaggcggtgactagcactgatgtgaaccacatgggacaggggagttgtggggctgagaacacggagggtgggagtagtcatgctcttttccagaatgaactgctaacgaagggactcgcaggtggctgctgcttctttccaagctgcccctgttgttgcagaggctctggagtcctaggaggtttcacggtggcatactcgacagagtactagagcatcatggccagatagtgatgctggggtgtggggcctcacggtggccatttctgacgagaccccaccgggccaaagtgatgtgtagagaaggagctgcttcggtcaccagaaaagaacggggaagcctcccacactagaataggtagggtgctcttctccaccggcaggaaggggatgtatggctctgcctggaccacacctttttccttgctcttccctccgcatctgctgtggccgaggccattcctcatcagggaacatgtgttagaggctcacgccacctgggaccacttgtcttatcacccccaggaccctaggcggtagtttcctgtggcctgagttagctgatatttatatagtgccattgtgccttttctcctgtgatgctcacagtaaggatgcctagatggggttacctgttgtcaagataaggaaactgaagcacagaatgctgaggtcatttgctgggttcatgtttggaaagcggcaaaggatttcagtgcaggttggctggctccaaacctgtgtgtgctttccatgacactgtactgtgtgcctcattgagcctcattctagaaaaccaaaaacacacccaaggcccggccttcacaaaggagacccctcccccatttggctccctttccagcagtcgacggcctcttgtcagccatcgagcccagagtcccttgaagtgcgactcatgctggggtggtatgctcaggagccgcagtgtttccgctcagaggaaagggctctgattctcctgcagtgctaggagacttgtgggtggccacagtgcaggtcaggcacaccggccagcaccacccacagcccaaattcctaaagaaatatttgggtcccagcttggcccgagtctctgttgtcctggggaaggacatcaagatctgagtgtatgatggcctggggccttgcatgtggtgggggtccaagcctgcctctgctcacttgttctgcagactggcatgttctctgtgatacttacatacttgtttaacacttcagggaagaaaagtcagaagaccaggacctccagggcctcaaggacaaacccctcaagtttaaaaaggtgaagaaagataagaaagaagagaaagagggcaagcatgagcccgtgcagccatcagcccaccactctgctgagcccgcagaggcaggcaaagcagagacatcagaagggtcaggctccgccccggctgtgccggaagcttctgcctcccccaaacagcggcgctccatcatccgtgaccggggacccatgtatgatgaccccaccctgcctgaaggctggacacggaagcttaagcaaaggaaatctggccgctctgctgggaagtatgatgtgtatttgatcaagtaagtaagagcaactcctatctctacagggcagggagggcagggacaaggatccctcatggagcaggaaaatgtatgtgcccagggtggggtcggggggaacataaacaatgaacactgagaccaggtgtgcttgaaatgaccgtgtacagaggtcgctgccctgagtgggaagttctcaaggtagcaggccctctatcctctccacacctcaagtctttatctggggatggaatagctgcggaagcagaggaacttgcagagctaggggttcagaggggtgaagaagcatgtttcagttctgccttttaaatgatcccaaaaaggttagcagttttcaaatgacatttgcagacagcctcatttaattccatgagaagggtgagcaaaggattatcttgttgaaactgattcctggagagactgagcaccgtacctgagttcaaacttgggaatgttctagatggtgactcaggcccaggcaccaaccagcagaatgggcctcagcctgacaacccttctgtaccaggcctgactctttggttgctgaactttggagaggcctgggggggtcagcggcaggcagacgagtgagtggctttggtgacaggtcctcaggggcagccaggcagtgtgactctcgttcaatagtaacgtttgtcagagcgttgtcaccaccatccgctctgccctatctctgacattgctatggagagcctctaattgttccttgtgtctttctgtttgtccccacagtccccagggaaaagcctttcgctctaaagtggagttgattgcgtacttcgaaaaggtaggcgacacatccctggaccctaa

SEQ ID NO: 12 - DNA, 64597 bp, Homo sapiens
agtaggtggggattattatccacaaaagggactagacattgtgttctgggtcccacaactcatcataaagaggtggttatagttcccatcaggagccgtgggtaggggactgtgcgtccagcagcacccgaggctcttcggcgccagaggctctaaggtgcgagcgtgtccccagggtgctcagaggttctttggagtgctgtggcctcggaatgtgagcaccctcccatcctaccctccccttcgccggcgatcttccagttacataagtggagtgggacatagtaggtaacgggctctcatcgccctggagcgctcgggatcaccggtaccagatggggcaagttcatcgcgacgctgtggctcctgttaattgtgcctgaaaggttatcctctgttcagtttggtcatgaccgaatcacccaaactgaaactcagatgacttttatatggcagtggcaatgtttctgtggttttgcactaaagacttaaggtcattatgaagagtgtaaaaggattgctgtcgcaggggagaccgtttatgacattgctaagtatggaccccgagggggaaaaagctcattctggaattgctctgtggcggttgcttctgttgcgagtgtgttcgggtgtgggttggtcacagcagaaatgggctccaccacaaaattgatattcctgactcatggtcaggcagatgtgtgcttctggttatttttccaggaacaggaatgggctctgccgagcctttcacacgttgtgtctctgctgtgcgggatcagtaccccagactgtgagataacaggatcgaattcaggggttggttggtgatccaggaaccatacctacttggatgtgatactgagtggcctagacgttgtaggactctcataagttttagacattttgttatactgtaaaaatgaagcatatacggcctcagtagtaacattgcactaataggtaattattactctagagaattttgggttccatggctggaatgttcatcagtatctcagcaatttcagttaataaccagattaagctgacctcttgagtcttttgaaatctgctgggtccctataataagacagggtctggattttttaatcttttgggaatttccaccaaggatttagggaaataggcttttatgggcttttcaggatttctatttcaaatcccaatgaggaagtctaggaaacacttgcttttattttcttgcctgaatatgtcagaaccttaaatcacccaatcaatctagaagtactacagttgattaaagtaagtcaccacaggtcacccattcgtggcaggtcagctaggtggctgatcactggaatacagtcatatccccaggcatacacacgagcctcacttgacgatcccaaagtttgtacatctgagcttgagacgtgacaagttgaggtctctgctttgttcttcatagttggcagtttgtctcctcgggtgcccctccggttagctgtttatcatacgtctagccctatcaacagtgcaggcagcttccagagtatagttttctctgcaaagtgcctggtggaggggtacctccttttccattgtcctaatggctccactgggcttccataccagccctttccagtgtcttaacagctcaaagaaacccatctgtggctttcttgttagcactggcctatcacaccttcctattgcctgttaactaaaattttgcctggaatgctttaagcttagagtactgggtctttgtttcacccgattgataggagagtgtcatgcagtcagccgaactccgacttctgtgctgtttaaatccttaggtaggtctggggcaaggcacaaaccactgtgtattcaaagggttatggtgcttgcattctgtgtgtatatgtttgtaatttccaaccagagtcgtttcccgtgcctgccctgcctctgtgcaatctagtctagtagggtagggaggcaagctgtggagtttgaaaaaaaaaaaaaaaagctagatgagtttaataggctgttaccccctccagaacattcctcccatgtggagatgaaacgagaagttcatttctttaacctaaaataaagaacaacagagataaaattgttagttccttattggagcctggtttccattgctaatgtacctgcttgggactctgcatgataaatgacgtgtcctggaacctgaaatcttttataaaggttaatatcagcagaaatcttttaattagctaagagcagcttgttctcaagctgcccgagttatcttggaggagagaatcacaggaaatgtttgatatttctagtaaccagtgttttcagtgcgtggggtaaagcacactcctagactggccagtcccaaagagtgtggcaggacacctgcttgttttccctgccctctgctatggtgacatccttgcagaccagtcttgcgtggctggcagacgcaatctttttttcttgggtagagcattatcaccgctgcgatggaaggaccttgtcctcggtgcctccataccagccctttccagtgaaactactgctgtcccggcaagcccctgtgcgtgtgcatcattccgggtaggacaagatgtgaacaggtccctcttctttgggcttaagtagaagttgtgctcttctgcttttacctgtgtgctcttctgcttttacctgttctcttctgcctttctcttgcaagaaacctgtcgaaagcttgctttgcatgccattgcttaaatactttgatggtatgtatggtatgtgggataactgagtgggagccggaattggggggtgggcagggcatccccacccccacccccacatcaaagggggaatgaccatttcgttagagaataaagcctgagtcttataacttcttcaagcacatgtatgctgggtctcctggcgtgtgaatgtgttcccgctgtgctgtgtggctgttttgcagttactgtagacactgtagtctgggctctcattattgcctctgaagttgacaggaccaagccttagtaaggatgcacttgtcttcctagcccaagagctaggggtgttttatatatatattaactttcttttttagatttcataaactgctctcattttctcttttctttctttctttttttttttttttttttgagacagtctcactctgtcacccatgctggagtgcagtggcacgatctcagctcactgcaacctctgcctcccgggctcaagcagttctctgcctcagcctcccaagtagctgggattacaggcacctgccaccacgcctggctaatttttgtatttttttttttttttttttttttttttagtcgagacggggtttcaccatcttggccacgctggtcttgaactcctgacctcgtgatccacccgcttcagcctcccaaagtgcagggattacaggcgtgagccaccgcacccagcctctggctcttttctttttgacatgaaatcttaagttaattatcttaaactttaagaactagaaggattcttagtccagcaccatcagtttacaaacaaaaaaaacttgtgtccctgagaagttgtgacttttccagggcctcctagccaggataccagtttggtttttattatatagctagccgagtaatactattaacttgacttctgggatttcaaagtattctatgacttgactgtttaagggaattatgaggcctcactgaacctcaaaagataattttaggtaccatcctggtagctgtagagcagcaacagaccagtaaaagacttggttggtgttgcccttcttctgggtttgattacatgagtaattgtgtgaatagtctctaagttgtatgctctgagctttcgtttttagcttataaaagtgctactcttgggccagcatagtatcagaaattagctaattcatatggggcagtttaggctttaactaggaaatgatggttatcttaatgacaaaaaaggtactgacaaaagtccttttttgaacatgtgttcaaaagaaaaagagaaactatcaaactaataactgagtttgttgaacatcgagattgactgatctgagaggcttaaaactgattgccctgaaatagacttgcatgttttggatgatggctttgggtctcccagagcacttggtttcccttggtgctgattttttctctcaggattaaagcccctttatgtgatgttgttacagcagcttattgcaacttcattcagctgcttgaaaaagaagggagactgcctctaggttccatgtgttctttcagggatggtattttgatgttgcgtattctcttgaacatgtattcttccctgagaatttctgtgtgccgtggtagaagaaatacttgccagaaatcgccactcatggtatgcttttgtagtgtcgaagtgtcccctagaggtgacaaggcttgtgatagtgttgattctaacaagcatgaatctttcctttattttagcactgtgtgttacgtgccagtaatttgcagcttatcctttgtttctagctaggtaagctgggaaatagcctagtactttgtctatgtgtttatcttcaaaatgtcccaaatagccctgggaaaaaggtcgtgcagctcaatgggggctttcaacttacaattttctttgttttaggctccataaaaatacagactcaccagttcctgctttgatgtgacatgtgactccccagaatacaccttgcttctgtagaccagctccaacaggattccatggtagctgggatgttagggctcaggtaagtaaccttcctttttttttttttagtatatgtcctggtttggccatctgttttttttttttttaaaaaaaaaaaaaaaaggaaaagaggaaaaaaatatactactcttggacagtataaaagtaccccaaagactaaagacataactgtgccaaactgtgccatataataaaaaaaagtcacttccctgagccctgaaaggtcagtgtgtgtagggttacttggtcgccacagcgtgatctgggggcgggcgtcagattagagccggaactggtgatctgcaacttcagttcaccttgaagcaggtcagctgagctgagagcgcttgcactgagcccttttgcgctgctgctgttgccttagcggtcttcagcatgtgtttgctttggtttggggtaaatggcttagtggtcaacattagtgagcagtggtaatgcattttcagatatgggaactggtatgtggttggttccctagaaggacaccctcctgaaagctgtctcagaacaccgggggccatggctaatgtcatgtgcttgctacactcctcccatggtaactaaagagagtacccagatatacatctggttcttgggactctagaggaggatgagtactttgtaaaaacctgggggccccagtcattctaggtctgacactcaggtgctgtatcagctgcagtttgaactacttggcaccattgtgtggactttagttttgtaaaaatgaatggttccttaatttctcaaccttcaggctcaacatctcaagctgtttgttgttgttgttgttgttgttgttttgttttgtctttttgattagtggtcactccgcatttgatgttttgacatgtggatttcagaacttctgtgtggtaaagcagaatgttccaattgaattttcccattttttttcccctaagcaaaaatgtgagttttcacttatgcggccattgtgattccgactgagaccctaagtcgttctttgttgtctctctagtggtttctgacacctcagtgtgaagctgttgtagacatccataagaaatagcctgcttagggattatgtgagggcaaggtttggctgaaggagaatagaaggtgtggaaggaagcggaagaccagaagagcatcacactgcctcaagtcccaaatttgattctgctcctgatcctgtgactcaaattgtcattctcttttactgctgtggggtgtgctctgggcccagctgacaggacattctttgtactccacgtatttatgctggtgggagttgtatggctagtgctttgtgctttgtctcagaaattgtgtggactaaatgtaatatgggcagtgaatgggtttcttctggaagatgttaggcctggagggtggtttgggtttttacgagtctttttctcagattacagattacgaatggatgttataaaacaggcagtgttgacaccatacagtttctcctaagaaatgtacagagagttcaacctgaggaagctaattgaaaataaacttttaaaaagaaatgtagaaagaggaaatttaaaaagtatcttatgaatgggaaagatgtagccatttgagcttcaaagaacttttgagggaattctcaaaggacagtacccgtctttagtagataaatgcttgatatctatttttcttcttttactttttaaagaattactaaaataatacatggatttatagaaaaatcaaaccacttaaaaattgatcaggtggctgggcaaggtggctcatgcctgtaatcacagcgctttgggaggcctaggcgggtggatcacctgaagtcaggagttcgagaccagcctggctaacacggcgaaaccccatctctattaaaaatacaaaaattagctggccatggtggcttgagcgtgtagtcccagctactcggaaggctgaggcaggagaatcacttgaacctgggaggcggaggttgcagtgagccaagatcacaccactgaactcctgcctgggtgacagagtgagactcggtctcaaaaaaaaaaaaaaaaaaaagtatcaggtaaaaaaatgaaagctccccgcttaatctctgctcccactacccagaataactgctgttaatagcttaatgtagatccttctaagtcttctaagactaaactgtgtactttttgtgttgtaattaacaggagggtttttgttttgttttgttttttctttttttgagatggagtcttgctctgtcatccaggctggagtacagtggcacaatcttggctcactgcaacctccacctcctgggttcaagtgattctcctgcctcagcctcctgagtagctgggattacaggcgcctgccaccacacccagctaatttttgtatttttagtagagatgggtttcaccatgttggccaggctggtgtcgaactcctgacctcaggcgatccacctgccttggcctcccaaagtgctgggattacaggcgtgagccaccgtgcctggcctcaggatggtgttatatatacatattctgcatttttccatctcatatattcatctctgcctcatttcttttaaatagcagtgtagtccagggctgacttaccgtcatgcatttcgttgtctctctatgttattaaaaatgctacaggattgaaattcctcatgtgccagtcattttgaagaatggctgcctagacttggaatttctggtggataccaccacatcactgtccaaaatggctatcccagttcccacaacagtctgagaaagtgccattttcccatatcgtcccagaattggatatacatcttttaaattggtgccgcttggattattactgaggctaaacctcaataatcattgtcatagctcttaatgtattaaagatgttaactctttgtcatgcagatattttcctgttttgtcttacgtcttgattcttgtctttctgatatataaaatttatgttatgatttattcttttgctttcatacttaggaaatccttttttactcttttttttttttttttttttttttttgagacggagtctcgctctgtcgcccaggttggagtgcaatggcgtgatcttggctcactgcaagctccatctcccgggttcattccattctcctgcctcagcctcccgagtagctgggactacaggcgcccgccaccacgcctggctaatttttttgtatttgtgagacagggtttcaccatgttagccaggctggtctcgatctcctgaccttgtgatccgcccgtctctgcctcccaaagtgctgggattacaggcgtgagccaccgcgccccgccaggaaatcctttcctactcttaacaacagatcaatagtcatctatattttcttcctaaaaaacctgatgatgtattatattcatacatacgtatttaatacatacaaaagggccagatgcggtggctcatgcctgtaatcccagcactttgggaggctgaggcgggtggatcacctgaggtcaagagttcaagaccagcctggccaagatggtgaaatcccgtctctactaaaaatacaaaaattagccaggcgtggtggcgggcacctgtaatctcaactactggggtgactgaggcaggagaatcgcttgaacccaggaggcagaagtttcggtgagccaagatcacgccactgcactcctgcctgggcgatagagtgaggctctgtctcaaaaataaaaaataaaaataataattttatagttaagttgccctgtgtttttcctgtgattaaaaaaaaaaatacctgttttgtatttaactttggggtgggataaggtatagcccacttagtcagttgtgtctaagccacttgatgaaccagtcaatccagtcttcacctttaacaaatgctgatttcttcaagtgagcaaaatatctcttaaactttttcctattttctctataaagttgcttttttctgaattttttctttatgaggcttgatgggcagccctatcagcagacaatcattcattcacccaacaaatatttgagtatctgcttcaagccaggggcagtgctaagccctggaagtggtatcttctccttatccgggagtggggctacagtgttcattccagaagactcaagaaaatagcagatcatcacaaaagtaggttttacataaatgaggaggaatccacagggttgtgtatatgtgtgtgtattttaaattctgacataagttggagctttagggtagactgtgacataagagtagtttgttttccaactcatgtaattgccggctgatttttgtcttgaattatgataatggtaacttctgttgaaacaattctgtattcatcttagcttggttgggatgcaataaaagttttgtactggtaaaaatgataattttcttccatgatgattttgaagcttttctgtaacacctgataaaaatagaggggccaggcatggtggctcatgcctgtagtcccagctactcgggaggatgaggtgagaggatcccatgagcccaggagttttaggctacagtgagccatcatcacaccactgtactcctgtactctagcctgggcagcctcgttctttagagtaagacactgtctctttaaaaaaaaaaaaaaagaaaaaagaaaaaaagaaaaggcttttagtgaatatatttttagggtagcaagtgtaatttttataaattgcattatttgaatctaataaataccctcaaagctgaagtcgaattctgattttgattgaaaatattttttacttaaaggaagagggatagaataaatgacacgattaaggaaaagacttcttgtataaggccggggttttttaaatgattttttgaatagttagatggacaatacggaattaaaaaggtggtgtaaaaagttatacggggctgggcacagtgactcacgcctgcaatcccagtactttgggaggccgaggtgggtggatcacctgaggtcaggagttcgagaccagcctagccaacatgacgaaacatcatttctactaaaaatacaaaaattagctgggcttggtggtatgcacctgtaatccagctactcgggaggctgaggcagaagaatcgtttgaacccaggaggcagaggttgcagtgagccaagatcgtgccattgcactccagcctgggcgacagagtgagactccatctcagaaaaataataatagaaaaaagttatatggggctgggcatggtggctcatgcctgtaatcccagcagtttgggaggctgaggcagcttgatcacttgaggtcaggaattcgagactagcctggccaacatggtgaaactccgtctccactaaaaatacaaaaattagccaagcgtggtggtgcgtgcctgtagtcccagctacttgggaagctgaggcaggagaatcgcctgaacctgggaggcagaggttgcagtgagccaagatcatgccgttgcactccagcctggacgacaagagcggaactccgtctcaaaaaaaaaaaaaaaagagttatattgtaaagtatctctgctaccctgccccaaacattcatttctttccctggaggcagccactattacctgtttctttaaaaaaaaaaaaaaattgtggccgggcacggtggctcacgcctgtaatcctagcactttgggaggtggaggtgggtggatcatgaggtcaagagatcgagaccatcttggccaacatggtaaaaccccatctctactaaaaatacaaaaaattagccgggcatggtggcgggcacctgtagtcccagctactcgggaggctgaggcaggagaatcgcttgaacctgggaggcagaggttgcagtgaactgagatcacgccgctgcactccagcctggcaacagaatgagactccatctcaaaaaaaaaagcgtgtgtgtacccgtgtgttaaatttttattataaaatatatataacaggctgggcgtggtggctcacgcctgtaatcccagcactttgggaggccgaggcaggctgatcacgaggtcaggagatcgagaccatcctggcgagcacggtgaaacctcgtctttactaaaaatacaaaaaattagccgggcatggtggcgggcgcctgtagtcccagctactctgagagcctgaggcaggagaatggcgtgaacccaggaggcggagcttgcagtgagccgagatcgcgtcactgcactccagcctgggcgacagaccgagactccgtctcaaaaaatatatatcgatatatataacaatttacagttttaatcatcttaactgtacagttcagtggcactgagtacattcacattgttgtacagccattactaccatccatctctacaacctttcgtcttgcaaaactgaaatttcatacctattaaacactaactcccacttctcccctttcccccaccccaccctctggcaactactattctactctttgtctctattggacatatttttgtgtgtttaggtttgtgtatatattttacatgtgtgtataaatacacaagggtatgtgggcgttgtgtttttacacatactataaaatattgtgcacatttgtttattttaatgtatcctgtagattatttagaatcggttcatacagagccgtatcattccttttaagggttgggtttaaatagtctgttatggatgtaccacaatttatttaaccagtttttaaattttttacttattttttttaatgtttttttagagacaggatcccactccatcacccagactggagtgcaacagcatgatcatagcttactgcagccttgaactccggggctgatgtgatcctcccacctcaggctctcttgtagctgggactacagggatgtgccgccatgcctggctaaattttttatttttatttttatttttatttttggtagacacggggtttcactgtgttgcccaggctggtcttgaactccttgggcttgagtaatcctcctgccttggcctcccaaagtgccgagattacaaccatgagccatggagcccgacaagagtagccttttatttgcagaccattagagaaaaagttgcgtgtaagtagataagcatacgaatttatcactgcaatactgtttgtagagatcacagagctgttaggctaggaagaagtttttagcagttagcactagaaagcaaaactttggaaacttccatttcatcaaaagtgacctcatctgagtagggcatgtgagggaaggacctttttactcgacaaggggaacttgcccagttcttgtttgtgaaccttgaagaaagtggagcatttttattttgggaccattctaggttgtggtagttccttggtactcggggttggagaatctccctctgctgctggaccttctgcctcctcatgctgtaatatgcataagaggtgtcctagaagtattcaggaacaggctgtggttgctttgttgttctgtgactgttgaactctttatatagcagtacttttttaagctgtactaattgagcatttattatgtgtcagttactgtgctagctgctggaaactatcctaccctcagcagtcttctggtctaatgggaggtacagacaggcaaatgggctatgactttacaagaggctaacttctgtgatggagagaagttccagccactaagggagcacataaaaatcagaggagatcctaccaagaattgggaggtaggtcagggaggagacttctttgaaaaatggcatctaagacctgaacagcaaggaaacattagctaggtcaaggacaaagcatcagtggggagagatgcatgagtcttttggaaggaccagcatgtgtagaggctctgacaggagagaatctctcaggcccattcagagagtccactgtgtgaagacgaggcatgaacaaccagccaggacatgtggagaggagcatttttctttttttcttttttctttctttttttttttttttttttttgagacgtctttctctgtcacccaggctggagtgcaatggcatgatctcggctcactgcaacccccacttccagggttcaagcaattcttctgccttagcctcccaagcagctaggattacaggcacccgccaccatgcccggttaatttttgtatttttagtagagacggagtttcaccatgttggcctcaaactcctgaccttaggtgatctacccgtctcggcctcccagagtgctgggattacaggtgagagcccccacgcccggccaggctcggctttctttccaggccccgtcacactcttagatgttccctgggccccagaaggcagcgtgaggtgctctgcccatctatgctgtccttttccaccccaccctatccactgggcccctggggctcccactccactccaggtctcttcatggacccttctttcccttcacttctgtcccaggagacctgggagactcatgggaacaggcatcatcttctccagcacagttcattgtctaatgcacgaaagtgctgggctgtgagaaggtcaggagcttacatggaatgggagtcagctgtggtacaaagtacgctgcttagttctactgattttttattttttatttttacataagactttgatggtaaaggaagcagtgtgtgagcaagctgactcctgtcttgtcaagtaccaggtccactctgatgagcccctgtggacagcactgctgtaactccccaagcctgggctcaggaggtgggccctaagcgctgttcccagctcttcctccatgctgtcagctcttccaccattcttcctggcgtcattctaaggtcctgtcttcccccgccctcttccttcctggcttctacgctcagctcaagtagtagctgtttgggtacttttcacccagacttaggaaatgttatcagttggtcgtattcctgtcagccctcttactatggaactcaaataggacagattcagctgaattcccagccctgtggttgcactctttgtctgccctgcttccccaaggtagcctgctccctaaaggtcaccgagatactccccatgcaaggtttttgttgtattacacatgacaacatggaataaagtgttttgcaaatttactggatgatatcctactatgtggaacatcctacaacttactcttttcactcaacatttgacttttgaacctggtctgtactgctccgtgcagaccaatgttcattcatttgatatgtctccttgtgccatagaaatagttttacaatagaagcctgtccagagccatgagggagaaggggattgtagagaaacaaggattggcatctggtttatgtttacatcctttagtcctgttaaccgagaagaagatatttttatttccatgtttgcgaaagctttccacaaaaaaagcatccattttctagacttattaatagggcagtccaaaggttttatttttagatttgaaagaaagcaaagtaggcttctgagatatgcacatttccctgtgtccctgtctcttttgcaacattccacattgctgctaaaacttgaacatgagcactttcaagcatgtgcttactttctatgtatgactcattttttaaaacattaaagcattttcggccgggtgtggtggctcacgcctatattcctagcactttagaaggccgaggcgggtagatcacttgaggtcaggagttcaagaccagcctagccaatatagtgaaaccccatctccactaaaaatacaaaaattagccgggcatggtggcgggcgcctgtaatcccagctactcgggaggctgaggcaggagaattgcttgaacccaggaggtggaggttgcagtgagcagagatcgagccactgcactctagcctaggtgacagagcgagactctgtctcaaaaaaataaaaataaagcattaaagcactttgtctggtggtatgtaagttttggcattacttagataagttgtattttaagtctttctacacacaataacttatttttaaaatacaagtttctgtgtacttccgggttttgtgtttttgtaaacagcagaaggtattagtccatattaagtactaatttgttctaatattttcagctgtttttggaattacacttggcaaaaaaatagacaaatgtctgcagttgtgacagtttgtttttttgttctttttaactccagaataaataattctagtgagtttttttcttggcttgtaagaacatgggaatgattagagtcatcataacacttaagtagttatagaaggttgaacatctgtagtcagttgtataaaatttcctagtcatccttccaggttgtttaagacaaacaaatacatagtatttattaagctcttataaattttaattgtaaaacatcattgtacaaaactttgaaaatgcgtataggtacaaagataaaaaattaggccaggcatgccatggctcacgcctgtaatcccagcactttgggaggccaaggtgggaggatcttttgagcccaggagttcaagaccagcctgagcaacatattgagaccctatctctacaaaaatatcataaaacaaaatagaatcactctggcgattccactatccaaaaaaaaaaaaaactgctgttaatatttggtatgtatctttctagaccaaggcctccaactttggttgagaattcagccgggtctgtgaccttggatgggaaaaacattcactctttattttcactaatgtctctgaaaacccagatttttagctgggcatggtggctcgtgcctgtaatcccagtgctttggaagcccgtggagggcagatcacttgagcccaggagtttgagaccagcctgggcaacatagcaagaccctgtcttttaaaaaaaaaaaaaatccagccgggtgtggtggctcatgcctgtaatcccagcactttgagaggctgaggcaggcagatcacctgaggtcaggagtttgagaccagcctgaccaacatggtgaaatcctgtctctactaaaaatacaaaaatcagccgggcatggtggtgggcgcctgtaatcccagctactccggaggctgaggcaggagaatcacttgaacccggaaggtagaggttgcagtgagccaagatcacaccattgcactccagcctgggcgacagagcgagactctgtctcaaaaaaaaaaaaaaaaatccacattttcttcaatgacaattgtaagcaacagatcatggtagtattagaatagcagtgactgtcaccagtagagatcaaagatactttcatatcatattatagttgttacagatattttgaaatatatatgtccatcactgcttcaaacttaaggtaattattagacccatctctagatctggttatttaatgatttactgaagaagcacatattatttgagaacgaactcttgaaatatgttgttaatttctgtgcattttacacatttcaaaacattcttctgaggaggggtccagaaggccaaaagggtccatggcagaaaaaggttaagaacacctgttctgtactttgtaccatgtggctacaaatataaaaacagacgttaagccgggtatggtgatgcacacctgtagttccacctacttgggaggctgaggtgggaaaatcacttgagcccaggagtttgaggccagcctgggcaacagagcaagaccccatctcttaaaaaccagtcagcacttgactagtcagttagtgggggaaaacacaggtacagtaaaaggagtcaaaattacacttaaacttaggtcatcttattatatcaaacatttattaacatgtttagtgttttgtgtatattatgcaaagtgtaatgcaactaaaactgtttaacacttctcgatatcacataaatttgttggtgcataatagcctaaaagttacttttgctgttggcattttattttattacttacttatttatttatttatttatttattttgagacagagtcacactgtcgccaggctggagtgcagtggtgcgatctcagctcactgcaacctctgcctccctggttcaagcgattctcccgcctcagcctcctgactagctgggactacaggtgcgcgccaccatgcccagctaatttttgtatttttagtagagatagggtttcgccatgttggccaggatggtcttcatctcttgaccttgtgatctgcccacctcggcctcccaaagtgctaggattacaggcatgagccaccacgctgggcctgctgttggcattttaaacatccttctagagtctttcttatttgcctgtaagcacgtacacatgttgttgttgttttgagacaaggtctgtcgcccaagctggagcacagtggtgcaatcacagctcactacagcttcgacctcttgggtgcaagtgatcctcccaatcagcctcccaagtaggtgggactacaggtgtccgctaccatgcccagctaatttttgtattttttttgtagagacggagtttcaccatgttgcccagactggtctcaaactcctttgctcaaacgatccttccgcctcggcctcccaaagtgccgggattacaagtgtgcacctctgtgcctggcccacatgttgttttagatgaatgagatcatatatgtacttttgtaacttgctacctttcctcaacaaaatgttgtaaatatccatgtccataaaaatagacgtatatcttcacttttccctaaaatgaaaataacttaacttgcattttcttttttgtttttgtttttgttttgagacaggctcttgctctgttgctcaggctggagtgcagtgatgtcacagctcactacagcctccacctccagtttcaagtattccacctacctcagcctccaagatagctaagactacaggcacatgtcacgacgcctggctaatttttaaaatattttttgcagaaatgggatttcactatgttgcccaggctggcctcaaactgctggcctcaagtgatcttcctgccttggcctcccaaagtgctgggattacagtcgtgagccactgtgcccagcctgcattttcttattataaaagtaatacatgttcaatggacaaaaaattttcagaaaatatgcaaagatgaaaagtaaaaattgtccataaatctgtcatctacagataaagataacttctggataatgtttttctaccatcatttttagtaatcacataacatttcgttgtatgtctatgccttcatttaattaagaggcatttccattatttctgcatgttcatgactctgaatgatgatatgtctgcctgctgatggctacaaccctgtttctgcatttcaaacctctctcttgagctccagatttgatggcctcgtcagcatttacttgagttgctcataagtgtctcaaatttaacaagtcccagtcttgatttttttcccccttcaaacctattcctcatgttgtctctatttcagtaaacaatatcaacatccacccagttactcagtccaaaattctaggagtcatccttgattctgctctttctttttttttttttttttgagacggagtctcgctctgtcgcccaggccggactgcggactgcagtggcgcgatctcggctcactgcaagctccgcttcccgggttcacgccattctcctgcctcagcctcccgagtagctgggactacaggcgcccgccaccgcgcccggctaattttttgtatttttagtagagacggggtttcaccttgttagccaggatggtctcgatctcctgacctcatgatccacccgcctcggcctcccaaagtgctgggattacaggcgtgagccaccgcgcccggcctcttttttttttttgatacggagtctcattctcgtcatccaggctggagtgcagtggtgcaatcttggctcactgcaacctccgcctcccgggttcaagcaattcttctgccccaacctcctgagtagctgggcctggctaattttttgtatttttagtagagatggggtttcaccatgttggccaggctggtcctgaactcctgaccttgtgatccgcccacctcagcctcccaaagtgctgggattacaggcgtgagccactgcacccgccctgattctgctctttctctcatcatccctgatctgtcagcaagtcctgttaggccaaccacttctcagcatctgcactgccagtatgctagtccaagccacaaaacacctctcagaggtacgcaacaggactttgttgttgttgtgtgtgtgtgtgtttttttttttttacggtagaattattttataacttgaagtgtagggatgaccttccttttaaaattttatttattttcttaattttttattcccatagattttaggggaacaggtggtatttggtgacatgagtaagttctttaatggtgatttctgagattttggtgcacccatcacccgagcagtgtacactgaacccaatttgtagtcttttatccctcaccccctcccaccctttccctcaagtccccaaagtccattgtatcattctgatgcctttgcatcctcatagcttagctcccacttatgagtgagaacatacagtgtttggttttccattcctgagttacttcacttagaataatagtctctagttccatccaggttgctgtgaatgccattaagtcattcctttttatggctgagtagtattcctttgtatatatatgccacaatttctctattcactttctgattgatgggcatttgggctggttctatatttttgtaattgtgaattgtgctgctataagcatgcgtgtgcaagtatcattatgcaacgggacttcggatgacatattgaacaacttcctcactgatatccttgtgaaacgctacatatttcatgggtctgtttgttataccaacactcaattctgaatgatggaattatttcacatttagtctctttttcatctagccattatagtttagtttaaacaccaagttccattcctgctgcatgctgaaggatttgcagtacatcaggctatagtccatcaattcattccacaattgagtaagtaaggtatctatagtacctcaggccctgtgttaggcagggatggggtaacctagacagatttggtacctgtcctcatggagcttgactttagcggcagagacagatcttagataattgtaccagtacttaagtgttcagaaggacaagtatggaggtgggagccactccagtcctctacagtcacgtgctgcacaacaacgtttcaaccgacaacagagcacacatacagtggtgttcccataagattagaatgccatatttttactgtaccttttctatgtttagatatacaaatacttaccattgtgttccagtgatctacagtattcagtatagtaccatgctgtacagttttatagcccaggagcaataggctatataccgtatagcctaggtgtgtagtatgctacaccatctagatttgtgtaagaacactctctgatgttagcacaaataaatcgcccaatgacacatttctcagaacatatccctgttgttgagcgactcatgactgtacaatgggggaacagctcagcctgccttccccaaggaggcaacgccgatgcagggaaccgagggttgaacagaagtgggcaaggtgcagagaggaaaaaggctttccagatggagaagagcatgtgtgaaggccctcagtctggcaagagcttagtcctgtgtggcaggagctgaacgaggggttaggggagagtggcaaagggtccgggccatcagagaggtcaacaggggctggatcatgcaggattttgaatgttaacatcagagcgatagaaaacatgaagggtaaggtggtttgggttttgaatttttatcaaaatattgcaactactcggcaacaagttagatataacaaaagaggtcatcgtaaaaacagcagtctaccccttccccttcccttccctgactcagacatgacagcttttaactgtttctgattttagttcctttgatggttacctccaaaattaaatcatatgcttatacatctttcttgatttgccaactttagggaactgtgttaactccctgaaatgaaagagaatgacttagcttacgttacctccccatgttgaaattcatattcacatttctctgtaattttttttttgagatggagtctcactctgtcgcccaggctggagtgcagtgatgtgatctcggctcactgaaacctctgcctcccgggttcaagcaattctcgtgcctcagcctcctgagtagctgggactacaggcgcacaccagtgcactgggctaatttttgtatttttagtagaggcggggtttcaccatgttggccaggctggtcttaaactcctgacctcaggtgatctgcctgccttggcctcccaaagtgctgggattacaggtgtgagctaccatgccaagcccacatttctctgtaaattttaaacagtattttagtccatatgtcagttcccctctgtttaagataaggatattaataaccctacttttccttccactttccctccttaacttctgcgtcttaaaagctgtacttgaccatacccattcttgcatttgttaacatgtgtgttctgccctgcaaccacagccaagttgtagcttaattctaaagtcgaaaataacattatttacattattacacatgtgagtattgttcttggcgagaccaaataatgaatgtgcccaggattacatttccttctttacagatctggaccactcaaaggagaatgaccaatcaaggtcaaatggattcccttttcttagactctgtcacctgcttaaaatccttgctaggatttaatctacttcatattcaaaccttggcttgcttatatagctctttgttttgcccaccatttctagttgcctttttattttgtttactattcctccttgattatgttgtaaaatgctattagcagtgctgtttatttcgtacgattcggctttttccccactgaagacctttctcttggaaggcctctgcccttctgcaatctgggcaagtatctgctctttgatttaaggttgcatatacagctgtacctggaccttctcctcactgggctcttgggttggagcccgtgtcttaaaacccatatcttcctttcacatggtttactccctcgttttctggactgcatccttaaataatgtgctcagatagagtgcatggggagtaaactgtagtggataccgttgtcacctaccccatatccatttcttctttgcccattcctaacagaatcctgatattattcacctttctaccttattcccaacttcagaaaggatccttaagtcattccacacattgcattcctttggcaactgttactggtcaaggatggacatacgatctaagttggttcactcagactgaagggaaggacttccatggcacgttcagggaagactttctctttttctctcactggagtaagtgagaaaggtgttgctgggggctcttctgtaacctcagactgagggacaaagcctgaggataaagcctgctcaccaaggaaggcggagcagagaaacgggaagaacctgggtcttgatgccgttgcttagctggtgattgcactgtggctggggcctgtcctacctgagctagggactcagataggatggactttcttactgaatgagccagcttcagttttcttttctgttacttgtaaccaaaagcattgtaacagataggtcttctgagtcactgcatgcctgaaatacctttcttctactcttacacttgattggctgagtatagggttccaagttgaaaatcattttttctcctaactttggaggcatctcttctagtatgcagagtaacaaatgcaacaaatgcctgatgccaatcttattatggttcttttgtaggtgcccttcttttctcttccttccctggaagtttttaggatttcgtctccttatttttagtgtcctgaaatctcatgagaatatgtctagagttgtgtcttgttcactcgttgtactgtggtcattcaatctgaatacttttgtcaactcttttttttaaaaaaaaattactaatttacatgctttcattttctctatggggactactgtttaactttggacctcttatattggtcttctgtcttctctcatatttttcatttattgggcggtggggggtgctctgaattttggaagatctcctgcatttattttctttttccttttttctttttttttgaggcagagtcttgctctgtcacccaggctggagtgcagtagcctgatctcggctcactgcaacctctgccttccaggttcaagcaattctgcctctgcctcccacgtagctgggattacagacctgcaccaccacgcccggctaatttttgtatttttaatagagatggggtttcaccatgttgccaggctggtctcgaactcctgacctcaagtgatccgcccgcctcagcctcccaaagtggtgtgagccaccgcacccagcctcctgactttattttctatcccttctgttaaattctttatttcagccaaacctttttttttttttttttaacttactgtgaagcctgtgtgcctactgcctagattagacaattgttaacattttggcgtattttcctggtctgtatagatagggtgcatttttatacctttttgctcaccatttaaaaggaactcacagatgtcacgacatttcacccctaagtacttcagtatacatctcctaaaaataaggacattttccaatataagcacaataccccgatcacatctttaaaagttaacaataattctctaatgttatcaggcacccactttaaattcagatttcctccaaatgtctcttatcgctgttgaggggctccaaagcaattaagatttatacattgcatttgaatatgcttcctttgtctcttatttatttatttattttattttgagacagagtctcgctgtctcccaggctggagtgcagtggtgtgatctcagctcactgcaacctccgccttccaggttcaagcgattctcctgcctcagcctcccaaatagctgggattacaggtacgcaccaccacgcccagctaacttttttgtatttttagtagagacagggtttctactaaaccatgttggccaggctggttttgaactcctgacctcaagtgatctgcccgcctcggcctcccaaagttctaggattataggcgtgagccaccatgcccagcccctttgtctcttttaacaagaacagcctacccacctctccttcacttgtgatactgactttttgaagcagtcagcccaattgtcatctagaagggcccacattttaagatacatatttttagagatggcgtgtcactatgttgcctaggctggccttgaactcctggcctcaagtaatcctcctgcctcagcctcccaggtagctgggactacaggcttgtgccaccacgactagctggcccacattttagatgtctctcttttcttgtgatataatttaacttgtttgtccatatatattacttgtagacaagaagttaggtctacaggcatgttcaggttaaacattttgggcaagaatatttcataggcagtactgtgtacttcatatagcatcagctcaccaggcacttaatggttggttaccctgtggtttgtgatgctacgttttaacacttgattaaagaaggaggtgactgccaaatctccccattgtagacatacagttttcctgtggtaattgatatataatctgtgatgtgatgctttggcaccatacaaatatcctattgcccaacagccatttgcataattattttagcattcattgatccttgcctgaaaccattattacattgggggttgcaaaatgatagtttttttaattgtcacctcttctacatttagtactgtcattcctctgtaatgaattttccctcatcaaataaggaggcattatatttcctcctaaaaagacagtatagatgcttaatctttgcctttattacatttcagagtaaggagttggtagaataatcacctcaaatggtggcaaaatatttgctgttgtgtttccttttctctttcatgtcaatatggactcatagggatttatttattaaatgttttacaattcaaattgggtcaacaagagtcccttcatgttggttcctatattctcctggcataccctcattaattagtctttgagcaatttcttgttttctggcacaagatattccatcccaatatgtgcttttcgtgtcctagaactgattccaaggagctctggttccttatagtggcaacggtatttagaatccaacatgtgggtactaaatgtgctgattcttactggggtaacattatatctaggcactttcagaggacatcgctagaaaatatattcagtttttattttttatttttaatttttttgtagagacaaggtctcactatgttgcccaagctggtttcgaactgagctcaagcgatcctcccacctcagcctcccaaagtgctgggattacatctgtcagggcaaactgctggtaaatattttcacaaaagaaaaataaaaaaaccaaagtgctgggattacagatgtgagccactgtgccctccattttttttttaagtcataaatacataatgatgtcttctatggcaatttaacattacagggttcttccttaacttttttttttttttttcttttttttgaggcagggtcttgctctattgcccaggctggagtggtgcagtggtacaatcctaattcactgcagcttcaaatgcctaggcttcaaacaatcctcctccctcagcctcccgagtagctaagactacaggtgcatatcaccatgcccagctaatttttaaaaattttttgtagagatggggggtctcgttgcgttgcccaggctggtctcgaactcctggcctcaagtgatcctcccatctcgatttcccaaagtgctgggattacaggtgtgagccaccatgcctggccaacttttatttgatctgtatatatcttttccttacactgaaaatgttgggtcttactaatgttaacatagttacttatttgctttatcttgtaatagacataaaattacaaaattataataccaatattacgataaatagctgggcatggcggcgctcgcctgtagtcccagctactcaggaagctgaggtggagggactgcttgaacctaagagtttgaagctgcagtgagctgtggttgtgccactgtactcctacccggacaacagagtgagtggggggaaaaaaaagaaataatggaagatccagagaaagccccaaatatttaaaaattaaacaatacactttgcagcttcctcacctctctcagccttcatagaattgaagagagttagggccttgcactagattaggctttgccttaaggaaatgttgtgtttgatttgatcttttatccagaccattaaaacttccttaacgtttattagtaataaggctatttcactttcatatcatttgtgtgttcactggagtagcacttttagtttccttcaagaactttgattcacaacttggctaactttggtacaagaggcctagcttttggcttctcggctttcaacatgcctctcactaagcctgatcatttggtttttggtttaaagagaaagacatatgactcttccttttacttgaatgcttagaggccattgtagggttattaattggcctaatttcagtactgtcttgtccaagggaatagggaggcccaaggagagagagagagatgggggaacagctgattggtggagtagtcagaatatacacatttatcacttaagttttgccatcttttctttttctttttcttttttttttttgagacagtcttgctctgtcacccaggctggcatgcagtggcatgatctcagttcactgcaacctctgcctcctgggctcaagcaattctcctgcctcaacctcccgagtagctggtattacaagcgtgcgccaccatacccagctaatttttatattttttagtagagacagggtttgccatgttggccaggctggtctcgaattcctgacctcaagtgatccacccgccttggcctcccaaagtgcggggattacaggcgtaagccactgccgcctggccaagtttgccaccttttttattttttttattttttgagatggagtctcactccatcacccaggctggagtgcagtgatgcaatctcggctcactgcagtctctgcctcctggattcaagcgattctcctgcctcagcctcccgagtagctgggactacaggcatgtgccagcacgcccagcttgttttttgtatttttagtagagacggggtttcaccatgttggccaggctggtctccaactcctgacctcaggtgatctgcccggctcagcctcccaaagtgctgggattacaggcgtgagccaccccgcccggccaagtttgccatcttttatgggtgcagtttgtggtgccgcaaaatgatgatagtagtaacatcagagagcattgatcacagatcaccataacaaatataataatgagaaatttgaaacattgtgaaaattaccaaaatgtgacagagacatgaagtaagcacatgctattggaaaaatggcactggtaaacttgcttgatgcagggttgccacacaccttcaatttgttaaaaactcagtatctgcgaagtacagtaaagcaaagcacaatcaaatgaggtgcgcctgcatattacaaccaagaggcttttcgcagaaacacgagtgtgcttcaacattcaaaaatcagttggtgtaattcaccacattaagataataaaggaggccgggtgcggtggctcacacctgtaatcccagcactttcagaagccgaggtggacagatcacttgaggccaggagtttgagagcagcctggccaacatagtgaaatcctgtctctactaaaaatagaaaaattagccgggcagggtggcacgcacctttagtcccagctattcgggaggctgaggcaggtgaatccttgaaaccaagaggcggaggttgcagtaagctgagatcacgccaatgcattctagcctgggcaacagtgagacccagtatcaaaaaaaaaaaaaaaaaaaaaaaaagataataaaggagaaaaaccatatagtctattcaataaatacagaaaacgcatctgacaaaattcagtgccctttcatgataaaaattcagcagattagaaatagaggaagtgcatgtatgaaagagctacagatagattgtacttaattgtgaaatattgaacatgttaccccgaaaatcaggaaaaaggcaaagatgtccactctaaccacttctattcaacattatactagaggtcatagccagtataatgaggcaagaaaaaacataagaggcattaatatttaaaggaagtaaaactgtttctatttgtaggtaatgtcgaaaatgtgaaagaaactatcagaacctgctagaactaaaaagtgaattcagcaaggtctcagggtacgagatcattcaaaaactaatcagaaatgaaatttcaaatgcaatatcgttaggaataatttaataagaaatgtacaagatttacacgctgaaactgaaaatgttgctgaaagaaattaaagacctaaataaatggaatgttgtaccatgttcatcagctgaaagactaagtgtctttacagtgtcagttctcccttcattgaactgtagattcataaccccagtcataactgcagggttttttttgtagaaattgattgtaaaatgtatatggaagctgggcacggtggcttatgcctgtaaaccagcactttgggaggctgaggcagacagatgacttgaggtcaggaatttgagaccagcctggctaacatgacgaaaccccgtctctacaaaaaatacaaaaattagccagacatggtggcacacacctgtaatcccagctacttgggaggctgaggcatgagaatcacttgaacccggaggtggaggttgcagtgagccaagatcatgccactgcacgcccgcctgggcaacagagtgagactttgcctcaaataaataaataaataaaacgtatatggaaatgcaaaggacctagaacatccaaagtaaacttgaaagagaacaaaattaaggggcttatgtgatgtgactttatagtcatttgatttttaacagaggcaccagaacagtccggtgcgggaaaggaaagtcttttagcacgtgccggatgatggcaaatgacatccataccagacaaaaatgaaccttgaccttaccctaaatattagtttcttagagttgccacaaactaggtggcttaaaaccacagaaatttggctgggtgcggtggctgacgcctgtaatcccggcctttgggaggccgagtcgggcagatcacctgaggtcaggagtgcaagactagcctggccaacgtggtgaaactttgtctctactaaaaatacaaaaaacttagtcaggtgtagtggtgcacacatataatcccagctagccaggaggctgaggcaggagaattgcatgaacctgggaggttgcactgagccaagattgcaccactgcactccagcctgggtgacagagtgagactccgtctcaaaacaaaaccacagaaatttgctgtctcataattccagagtctagaagtccaaaatcaactgtcatcagggccatggtctctgtgaaacctgtaggggagtccttccttgcctcttcctagcttccagtggttggcaacctttggcattctttgatttgcagctgcattacttcaatatctgtcttcctcatcacacagcattctccatgtatgtctctgtctttacatggcctccttcttgtaagaacaacagtaatattggattggggcctgccctactccagtgtgacctcaccttaactaattacacctgcaacaacgctgtttccaactaaggtctcagtgtgaggtactgagggttaggacttcaacatatcttttttgggggacatagtccaacccatgacactacttcacaccatacataaaaattaattcatgagagattatagacctaaatgttttaaaagctaaaaatataaagcttctgcaagaaaacataggagaatatctgtgcagtccaaagaataaggttttttttaaacacaatttcactctgttgcccaggctggagtgcagtggtgcgatctcagctcactgcaacctctgcctcccgagttcaagcgattcccatgcctcagccttccaagtagctgggattacaggtgtgcgccaccatgcctggctaatttttgtatttttagtagaggcagggttttgccatgttggccaggctggtctcaaactcctgacctcaagtgatctgcctgcctcggcctcccaaagtgctgggattacaggtatgagccaccgtgccaggccaaaaaaagatttattaggatacatgaagcaatagctattaaaagaaaaaataaattggacttcattaaaatttaaaacttttggtcctcaaaagataccattaagaaaatgaaaagacagagctgggcgtggtgaggcttgcctgtagtcactactgggtacttgagaggctgaggcaggaggatcacttgagcccaggagttctaggccaacataggcaatatagtgagacagtgtctcttaaaaaaaaaaagaaaaagaaaaaacaaaagaaaataggctgagagctgtggctcatgcttgtaatcccagcactttgggagtacaaggcagatggattgcttgagctcaggagttcaagaccagcctgggcaacagtgaaatcccatctctacaaaagatacaaaaaattagccaaccatggtggcgtgcacccgtagtccatagtcccagctactcgggaagcagaggcaggaggattgcttgatcccaaggaggtcaaggctgcagtgagctgaggtcgcgccaccgcaccccagcctgggtgactgagtgagaccctgtctcaaagaaaatgaaaagacaagtccaccaagaaaacagttgagaccagtcatagaaaaaatagaaagtcatatctgacaaaggatttgtattcagaagaattcctataactcggtaataaaaagacaacctgatttttaaagggtgaaaatattttaatggatacttttttttttttttttgagacagagtctcactgtgtcacctaggctggagtgcagtggtgccatcatacatagctcactgcagactcgaactcctgggctcaagtggtcttcctgcctcagcctcctgcgtagctaggactacaagcacgtgccactatgcctggctaatttttaaattttttgtagacatgggctggtgtgtgtctgtgttgtctaggctggtcttgaactcctgggctcaagtgatcctcccacctctgccccccaaagtgctgggccaccacgcctggtgtggtgtcaccagagatgagccaccatgccctgcctgatacttttcttttatcatctgtttatttcttgtttatgggtgtttctgttctgattttatgactattctgtattctaagatttctctgagaatattatttgtttcctctaaggacagacttggtctctcttccatggggctggttcttgagccgccagggatggggggaggacctgggtagctgctgcgctgccccttctctgctgtggtggagtggcccgttgcctgcggggtctgtctctgaagggtggtttggagaagttctgtggaggcgaggcaggggtcagctcttgccccatggaccctcagagactgggaaaaggtaggcatcacctgggctgctgccagccacatcaagagcctttggggtgggtggggtgggggccggggaagggaaggttctagctgttgatttagaaaagacccattgatttcttgcctgagggaagaagtggcaccttgccactccaagtttgctctgctcaccagccccaacagcatcagcctcacctgggagcttattgaaggtgccctgccccaaagcttgtgggtcgggatctggcagtcagcagcccccaggtgttgcacacatgacagcactgcttgcccctcctctcgtctggtctggtctggtctggtctggtctggtctgagagcttctttggggctctgacaggtatacaggctctcatctgctctacagctctcttgtagtacattcctctctgttccattagtcaacatgttcttgcctacttccagcatctagaaatttgctgagtgtatcttatccgttcagaggtcctctcctgctattgcctctgttagaaatttcttccctttcatatgtctgtacttcggtttctttgaggtttgaagggtcaagtggcaattacatgtaggcagttggccatcctctggtgaaggctttaaagcccaggaataacaagatccattatgtctaaaactagcaaaaaccctacctgtcacatggtgaactgaattagaggtgatggggacagaagccagattggagtgagtggaaggtgagggagtggagattgggtatagacaactctctttaagaagttttgttgtgatggtgaccagaaaaataggagtggggtagagggggatgagggtgtttttcacgtgggtgaatatgagagcatgtttacatccttctgggaatggcccaggagagaggggagcgtgagaaggaggaaatggggacctggaggagcagactccttgtgtggaggggggaagcggcatctagagctgttgcaggaggtgggctttgagtaaatgcttcctctttggtaaagacggggaacgggaacggtagaagttgcacggaccctttgttaaagctcagaagctgagcgagaattagagcttaagtttatggagtagtcagaataaagtacccctaactgtattcttgcacagtgcaggaagccaggggtctgaaatcaagatgttgcagggctccattccccccagagcctctagcatggatccttccttgcctcttccagcttttggtggctgcctggcagtcctagactttccttggcttgcagttgcattgctccattctctgcttgtgtcttcacatggccttctctgtgtccccgtattcttctctggatgcttgtcactgtattaggcccaccctaaatccaggatgatctcatatcaagatccttcacttaattacagaagcaaagaccttccaaataaggtcagagccacagggtctgggggttaagacatacacctaactattcggggctaccatcgaacccctgtagaagcctgtccatttccaggatagcagagcccaaggaagggccagaagtccccccaaaacagttgtttgcattcaccagattctaagctataagcagatgggcagtggcagtcggtcctaatccatataccattggcaacaatagtttagttcactgtagacataatgagatgcttatcttctgctaagtagtcctcatggtaacagccatattactcctggctttgagtgacagcgctgtgctcttgtctggtgcccatatacttcagcagctggaaacaagacagtgctcatgattcaccggaaagtttctgtagttaaaatcaagtgatcccttgagtctattctaatatttgtctgtaccatgttctgtgacgagacatggaaacaaaacattaagaagtgaaagtatctttgattatgctcttgaagacaactttttgtttgtttgttttgtttgagacggagtttcactcttgttgcccaggctggagtgcaatggtgtgatctcggctcactgcaacctccgcattcccgggttcaagcgattctcctgcctcagcctcccaagtagccaggattacaggcatgcaccaccacgcctggctaattttttttattttagtagagacggggtttcaccatgctagtcagactggtctcaaactcctgacctcaggtgatccgcctgcctctgcctcccaaagtgccgggattacaggtgtgagccaccgtgcctggccgaagacaactttttaaagatgcatatgctctgggctgggtgtggtggctcacacctgtaatcccagcactttgggaggccaaggcgggcagatcacctgaggtcaggggttcaagaccagcctggccaacatggtgaaacaccgtctctactaaaagtataaaaattagccgggtgtggtggcgggtgcctgtaatcacagctactcaggaggctgaggcaggagaatcgcttgaaccccagaggcggaggttgcagtgaattgagactgtgccactgcactccagcctgggcgacagagtgagacttggtctcaataaataaaataaaataaagatgcatatatgctctgaaggctggctacattttattttttctcaaacaacttttacagtggatagtgctgtaaaagttgtttagctctggtcattttatcttttttgtgatctgcaaaaggagatccttttccttttcactgcctctaatacccaactccaatactcctttgacctcacaggcacttagaatccatcagtggctccatcttttctcagacttcacctccttcgtatccttattcctctcctttgtagcttcagtgccagtcagacgtcgttactccctggcacactacctcagcccttcggcactttcttgctttgttatattcagtcgacaaagccccagcctcatgaaattcagtcatgtctgccccatgcctgctccgtcctgaagctgaatgtgactccttcattgattccccctttaagttcatgtctaccccaggtaaacttcttgccgccaagcccacctgcatactgcagttccccggtctctcctagcccctcccaccctcctcatcagctgtcacacctccttgcagctgatatcttagttcccagagagcacagaagcaagctcaagagagtgtctacaggccagcgtctactccttcgctctgcctccctcatgctgtcacggagcgcctgtcccaggccctcactcctgttctaaggcatctctccagtcctctactgcactctcccccatcagagattcctccctcgcctgccctagaaacttgttgctacttctcccaccttgacaaaagctgctcccaaccccccacctgtctagcatctctgttttcctttaccagcaagactccagtccctgtctccacaccctcttcaaccttctccagttgttcctttgctgccacagctctgccaagctgctccatgaggtctccagtgatgaccttcatgttgttaaatctgggagctgcttgtcacttcttttcccagagctgtcgtcgtcagttaaccccaatacccatacgagacaatcctttccctcccttgagtctctgcactgatgtgcaccttctcagtgcaaaccacagcttttgtctctttctagctgaatacatgactgactgtgcttatcttagctgtcacccctgctggagcagaagctccacaggacaggattgtctccttgattcacagatgtagctcaagctcctagaacagtgcctggtgtctgtgggtcctcaggaagtcctaggtgagtgtgtgaatgtctgtcctcctcggtcttttctgtttcgcatgtgatgttggaaggcctcaggttcaggcttttcttctccaccctcactcccgaagtgattccgtccagcctcatggctcccaaatttatgtctccaggctgactgggtcacgggaactccttatcctccctagaccttctctttccctggtcttctcctttccagtaaacagcaactccaactcctgctcctcaggccagaaacctggcgctggttacctcatttgttcacaaatactgttactccacctgcaagatggatacaaaatctcatgagttcccctgcctccatggcccccaccctggtccaggtgtccagcttccctgcctctgcccttgccccctggttctttgtttagtcctgcaatattgtgctcttctgttcagaaccctccagtgggtccctgcttgctcagagtcacagcccaacaggatcacctctcttgccactctcccaccactcatgcactgcggcctcactggcctcctggctcctccctggaccctccaagtatgcccctgcctcaaggccttgacctctcctctgccctctgtcccaggtatcacacatgtctgctcaagtgtcaccttcccaatgtggccttccccgagcacacccatgtctgtaagtcaggcagcctgcctctgccccaccagttccccctgcctagcataggacttgtcaccatctgccacaagctgtgttactgcttggttttgtttgtgctctcccactcccttcccctccctccctctccccacccctatagaatctgagtcccatgaggacagagatttttttttttgcctcttcctcaatatatccccagtgcctagaatcatgcatattttaatttattgagtgaattaacaaataaattctgcagtgggacattgctctaaggttttgtcttataagagggacagaagaacatgcagcctgctctgctgttggctccttagcttctccatggctaacaggaacaatattgtttatgagataatcaaagccatagtcatgagttagaaggtacatataaaggcaaatatgtggagattgagttactttggcgggggcggaggggtgtgtagttatctgaaaacatggaacaaatcaatgagagtctaaatagcacccacatatttgcccctcttttaaaacatacctcctttatgagtgtagaatttaacagcacagtttcccagtgcagctttgcgaaacaagagaaatgaattttaaaggctgtcaggtgcctttgcaatctgtggcttagtatttgtgtaacaacatttgtgttttgccaacagatgtactgcttaaagtacccatgagaatggcctctgtggttttctactttctcggatggaaccttaggaactgattattgagaagaggctgatactgcccacctcagctcccaggcaggcttcagggccttggttactactcctttgggccctcactgacccttgcagacgtcttttgcaacctctgtagccagaagagacaactgctttctggcatgttgctctttccctaatggctttatgagcttcttgaacaccaaagcatgtgtgacttcctcacgccttcccctgtatagtatagcacccctaactgtatgtgtaaggagaaggagtgagcaattgatggcgtccccctggatctccaagggaatgggaaggggcagggtttctggattcagtcatgtggaatctggtcgttggtgtctaaatgtgcctgttacttgtgcccaatgtccaggttcaccaggaggcttagcctgctcatttccctgctagtagctatattttgggagagcattttttatgctctaattgaactttgtgggtctcagcaatttgaacaatgttttgtttttcttctggtcaggttacaaaggaaagaaaaggaatctggtgttgtaggaggtggtgtgttgtgtaattacttgttttttttttttaagtttttttatatttttgcaacaaggcaagttttctttgaataaataatgctgggagcttatcacatagaaggcatatgtgttgtactcagtacattctgaattatctgggtttatttttatctcttgaattcacttataaacaattcaaaggctgcttttttagctaacagaaataggaagagaatctcagaatctgttttgtcattttttcaatgggttgagttatagtgattatgctaactcggtggaaaagcagtgtagtgagtaaaccccacatacggcatatcatgaacattttgttgcttttttggcttctgaccatcttcatacctttttttgtgttaaaagtctccccattgtgtatatcttagtaagaggcaggtggaccctagtttctacctaagaaaacctgaagatggggttgggggcctgtggtgtacttccttctcatgctgtccatgaccactgcagtggctttgtaaggatccaggacccagggcccctcagtgggtgtcttccatttctcaagattgcctcttggttgtgagatgacggttgctgctctagtcattgcatccactcctccaggtaggaagaaagaggtcataggggaaaggcaaaatggcacttgacatcttaacttctaggcccattcaatatttccatttccatcttcacacccatcatcttgtcctagggaacaaacagcaccagcagctcagtagctataacagcaattattatttctcacacatgggtctgggtcagctgcaagatgggattcagatctgttctcaagcctgtcgttccaggacccaggagggagaagcagctgccaggggaagtctcttcgtaggcggaggtcaggagtccaagaggagtgagcagagtcacagaagcctcttaaagcctcttcttcccccatcccatcaacacgtgagcaagcccagagtcagtgggtgggaggtgtgctccgcccatagtcagtagaacaagagcaagcttgaaagagaacgatgaacaggagtgcactcggccactgtctccttagccataacgtagtcccatggtctgctgggaagcggggaataactctccttagctgagcgcagggtctcattagtaaggcagatggagaacatggatgttgggggacaactggcagtgcctgccacaggggaatggatatattccctccccttgctctctggaaactaggggatggcgatgaagcctaggtttggccaaacccattctgccttcagggactttgactcttgagggacagtgagggattagtcatggtggtggcagttgagtcacaaaaccagcagtggtggctaatgtccagtgatgacatgcaacagtgcccagggtgggtgtcccaaccagcaggtccctgcagtataaccttggctgtgtttgcagtggtgcagcctctattcctgctgcttttctgagcctagttctctagttctctctccatttccagatctgctgcccaagaactcctttgtgattgaatttaaccagagttgatttctgttgcttgaaactcaggaccttgatgcagtgtgcagggtctgggcaaggtaaaaacacactttcatgatttcgcctcaagtatagtagatgagcttaggctttttgagccaggtagccttgggattaattctcagctcttgcacctagcaggtgacctcagcaatcaagtcacttgccctccttgagcctcagtgttgccctcagttaaacattgctctcgtgtgttgctgagcattcagtgagattgtatataaagtgatcattgtgaaggtattgggacataatttgggaaagcgtcctggtctaagcttttgattggctctccatcatttgggtaatgggatagtgatttaggagtatcatagcagctcaaggggcccttctggaaagggtatgaggaaggtcagggacaagtctgaaatgaatcatcctaggcttaatgcctgtgactgggcagtgggtacaattatctcaggctagtcagtagtcatttattgtgagaatacatgggcagattttttaatttccttctcagtctagacttgaatgcaaacagttcttattgctaacttaccactagtcaccactaatgaacaaagactatgaacaggaaattcataaaagaagagatacagatggccaatgaagataggaaaagagttctgcctgctggtaatcaaagagatgcaaacgagaacaaaaatgatgccttttcacctaccaaatttgtcaagattaaaaagaaagcaaagagccagcgtcagctgatgttcatacctgcacctgctcggtagcttgctaatgttctgcctgctccacacgccaggccagcctccacggcgcagccaggtgaggcctttccttgtatacaggcacgtttggattcactgttgcataagtgagacatgtgcatgcttcacaattcaggaagtgcaaactccagagtgatgcaaggtctgagtgtccctgctgccctggtctcccagctgcctaggcctctcttcagggaacggctgcatccagggtcttgtctgtgtcttttgaggtgttctatgtacacgcagacacatctaaacctatttttattttccctgcacctgcttgggctactgtaagctgttaaatttttttttctaggaatttgtccattttgtctgactagcataaagttgttcatgttatagtttatacatttgcaacatctgtaattatgtctgctttttcattcctagtgtttgttgtttacttgtaccttctcccgtttttccttgtcttggtaaaagctcattaggttcattggtcttacaagaagcagacatgtaggcattattgccctgtattactctgtgtctcttttctagttcattaaattctgcttttgcttttatctttattattttttctatggtcttagagtacattctctgtgttttgttgttgttgttgttgttgtttgttttttgttttgagagagagagtcttgctctgtcgcccaggctggagtgcagtagtgcaatctcagctcactgcaacctccacctcctgggttcaagtgattctcgtgcctcaacctcccgagtagctgagatttacaggcatttgccccacacccggcaaattttttgtatttttagtagagatggggttttggcatgttgaccaggcgggtctcgaactgctgacgccaggtgctccacccgccttggcctcccaaagtgctgggattacaggcatgagccaccacgcctggccctaacttcttaagttataaatttggttcattgatttttctacccttttttcaaatgtaaacatttaaggctaaccctctggaactacttcaactgtatctagcaagttctgatagtattgtcactttaagttagcccaaagatattttaaattttctttgtttcttcctttgactcacatattattttaaaatgtgtttttcaatttccaagcacatggctttgggtttgttttttttttttcctagttgctctagaaaaaaaaattgactgcatgaggtggctcatgcctgtaatcccagcactttgggaggccgaggcgggcagatcacctgaggtcaggagttcgagaccagcctggccaacatgccaaaacctcgtctctactaaaaatacaaaattagccgggcatggtggcacacacctgtagttccagctactcgggaggctgaggcaggagaatcacttgaaccgggaggcagtggtcacagtgagccaagattgtgccagtgtactccagcctgggcaacaagagcaatactccgtctcaaaaaaaaaaaagaaaaaaagaaaaaatcaacttctaactaaatggcactgtgatcaaagaacttggtctgtgtgacaccagttcttgcagttggttgagaagtgctccatgacacattatccacaaccagtggacagaatatgtcaccaccaagcatgggtgcaggattctacatatattcattacctctgtcttatccgtttgttgtgaaagtattttctcttcttactgtcattttgtttacttgatttatcaactgatggaatacgtgttaaaacctactgtggtgatggacacatcagtttctccacagagtttggtcattttcattttattatttattttgaggccacattttcagttttagatacagtttcacattcctggtgtattgaaccctttggtattatgaagcgaccatactaatatgttatttttttttaaattattatttattttatttatttttctttcttttttttttttttgagacagggtctccctctgtcacccagtctggagtgcagtggtgcaatctcagctcactgcaacctccgcctcctgggctcaagtggtcctcccacctcagcctcctgagtagctgggattacaggcttgcaccagcgcgcctggctaagtttttgtatttttagtagagacagggttttgccatgttgcccagactggtctcaaactcctgggctcaagcagttcaccagccttggcctctaaaagtgttgggattacaggtgtgagccaccacgcccggccatcccagttttttattttcctcctttctgtgtctttatgcatcagtgaggtggagcttttgaaaatgtcagatagctagattttttttttttgagacggagttttgctcttgttgcccaggctggagtgcaatggcgtgatctcggctcactgcaacctccacctcccaggttcaaaacaattctcctgccgcagcctcctgagtagctgggactacaggcacgtgccaccacacccggctaattttgtatttttagtagagatgtggtttcaccatgttggccaggctggtctcaaactcctcacctcagctgatcacccgcctcagcctcccaaagtgttggaattacagacgtgagccaccatgcccagctgatagctagattttttttttttttttttttttgagacggagtcttgctctgtcgcccaggctggagtgcggtggcgcgatctcggctcactgcaagctccgccccccgggttcatgccattctcctgcttcagcctccagagtagctgggactacaggtgcccgccaccacgcgtggctgattttttttttttttttttttttgtatttttagtagagacggggtttcaccgtgtcagccaggatggtctcgatctcctgacctcgtgatccgcccgcctcagcctcccaaagtgctgggattacaggcgtgagccaccgcacccggcctcgagattttttaaaaaatccattgtctgtttcgtcctttaacatctatttgatttctgatgtatttagattcatttatagcatatttgtgcattctatttttccatattttctgttcttttaaattttccttctcctttcttgccttctcttagacttttaaaaaaattgtagtaaaatacacatcacctaaaatttaccatttttaaatgtacagttcagtggcattaaatacaaattggaggccaggcatggtggctcatgcctggaatcccagcactttgagaggctgaggtgggaggattgcttgaacctggaggtcgaggttgcagtgaggtgtgatcacactactgctatagcccaggcaacagagtgagaacctatctaaaaaaacaaacaaacaaacaaacaaacagattggcatcacacagtgtgtgtgctgctgtgctgtgctgttatcatttaacattaaaacataaacatcagcactgttatggactgaatgtttgtgtcccccaaaattccagtgttgaagctcaaacctccaatgtgatgttatttggagatggggtatttgagaggtggttaggtttagatgaaatcaggagggagggtgggtttcgcatgatgagattagtgtccttataacaagagacagcagagagcttgctttctccaccatgtgagtatgcaatgagaaggcagccatctccaagtcagaaagagagccctcaccaggggctgaatgtgctgacaccttgatcttggacttctagcctccagaactgtgagaaatttcagttgaataggccccccagtctgtactattttgttatagcttgagcagactaatacacccatgttatgaaaagctataaacatccctttaaaggccacctaacgcgtcgtattacctcatgcatcttctctgctgagctttccaaaagagtggcttaggctgggcctggtggctcatgcctgtaatcccagcactttgggaggccaaggcaggtggatcacctgaggtcaggagttcaagaccagcctgaccaacatggagaaatcccgtccctactaaaaatacaaaattagctgggcgtggtggcgcatgcctgtaatcccagctacttgggaggctgagccaggagaatcacttgaacctgggagatggagggtgcagtgagccgagatcgtgccattgcattccagcccggccaacaagagcgaaactccatctcaaaaaaaaagagtggctggccgggcgcagtggctcacgcctgtaatccccgcactgtgggaggccgaggtgggtggatcacgaggtcaggagttcaaaaccagcctggccgagatggtgaaaccccgtctctactaaaaatagaaaaactagccaggcgcagtggcaggcgcctgtaatcccagctacttgggtggctgaggcaggagaatcgcttgaacctggggggcggaggttgcagtgagccaagatggtgccactgcactccagcctgggtgacacagtgagaccccgtctcaaaaaaaaaaaaaaaaaaaaaaaaagtggcgtatgttcccggtctccacctctcattcgccagcccctgtgaccaaacccctgggattagatctccatcgggtccctcccctcaccctaacctcacatgcagtggttcctgagaagctgctgtttatctgatcacgggatccagcaggatctgagggctcattcactgaatctgtactacccaacaaggcaggcttgtccttacccacacttttcaggtgaaaacttaatcagattcaagcgtttatcttagtggcctcttcgtggtgtgtgatttccttcttgcagctctttactggctaaaactcttcactgggagttaaaccaggtgtggtccttgaccctcatcattttgtcccatctcctatgctgggctctgtatccttgtctccaagcagtctcgtgtgacagggaagttacctattattgtatggtcccctcttcttgtcacctctggtgtggcacttgttccatttcttgttcaatgaatgtgatttgtgaatgtgccacatctgtgggaggaaggcagttcgcagcaagagttgtagttcccttgctttgccctgagggccaggactttacactagatttttttgttgcattcctgcactcataaagtacacgtaaacttagaggtggtgtgttaaatgctagaacttaaaactgagttcagctaggctcaagtgccccacaatttttgtcccaccagacaatttcatgaatatctacagattgttccctcaatatgcctcaatattgaggcatattgatttggggagcacagacaagtcaaggttgatgtgcatccgctgaacatgatcttaagttgttgaagtaggtattattaatgaacgaacgtctattttagctccaagagcccctggtcttccagaagagactcccaatgatcttccagaagcagctgggcttcttttggtcctcccccacccaggtgcagtcccgttctccctgcctgggtgagtttgattcctctgccgtggaataggctaggctgctacctcttgagcctcttccaccaggccatccattaggtggcgacagagagcactaaaaggaactactatggaaataaaacttgttttgcttcttggggggaaaaaaaaagaaaaaggcttgtggggcgtgtgtgcattttagtcagattttactgtgcaaaacatttgagagatttctgccctctttctcccttccattcttctcaacccactgggcgccctaccacccctgtctccttcaagataaggtagatcagaagaccaaatagacaaatgccatgtccactgttttctgtcacagttgatagccataccagtcacccaagctggaaacccaacaggcccctgcccttcactgcccacatccaagggagccaccaagtcccacaaattgttcctttaactgtttgtccctcttttgtcttctgtcatcccttctaccgctgtcctggttcaatccctcatcttgctctgggactcccatgataacttatgatctttcctccacctctctatcttccacacaatccctatcatcaatctcattcccctgctttaaacccaagagtggcaccctgtgtttgagtgacatcagggcccctcatgtggctcctgcttctctttgtggccccttctgttgctgctgcttttcttatggacatagccctcagcagtccaggactgcttgtagttcctcccaggtaccatgtttcttgcactcctggcctttgtcattggctcccctgcccaagtccccttctcttctcctttccttcccctgtggccttgccttgtcgtgcttatccttgaagaccctgtcaggtatctcttccccaaagagccctgcctaaccaccgcccccctcccccccgcgacacacacacctgggttaggccctgcctctccacgcctgtgcctcctgccaagtcctcagaggtctctgatcccatgtgcctccaggcatggcatagggggactgtgacacagcctctcggcccacagacccctgattgtgggcttgctcactgccccagtcagtcctcttattgaggattccgtgccagttcctgactccagcacacacacgcatgtaggccgccctcctagtgcctggctccttccctgtctcttctgccactcattcccatggtcgtatcctggagttggtcatctctggaactccacccacggagttctaacttagctctgcctatgatgaggacttactgtcttcccagcttgcagtgtcaaccactgtttgatgcccctgggactccattggtcttccctcctcttgtgaactgtgcccatcaccagacgaacttgttttagaatttaccatcgtaactgagctcccttcagcgcatacctccttggctcctgctcagtctctgtttctccttttagccaaactctctaagagttctctccactcatgggccctcttccttgcctgctgctccttgctcagcttgctccatgaacacttgcttttccacattccatgaaataatcttaacagtcatcagtggctgtcactccttctcagccctttccttgtgtctcttctggtacctcatactctccaggtggccatctcacctcacatcttgaaccctctgggtttgggagaattctcacctcacgagttgatgggaggcctggcgacctctgattgtagtcactgcaaatgccagatgcttatttgcctagcttccctttcggtcagggcagcagttggcaaacggtatctcaagggccaagtccggcccactgcctgttttcgtaaatgaagctttaccaggacccagttccaccccgtcctttgtgcattgtccaagactgctctcctgtacaacagcaggtgggctggttgtgacagatactgtctggcccacaaggtggaaaatactatctggccccttacagaaagaaattacctgagttctacacgagggtgtaggtatgtaccctggcctctgccagtcagactcacatgctaggaggagcagggccaggcaggagagccgtgtctcctggcattggggctgcaggaaagacgagctcctaggccacagtgccagtggccagtgctgctgccttgcagggtcgcacaggcagtgctggctgtttggactggcttggcagaaggatttgaagtattgttcctagccaactggactcaaacctgttcctccaaccctctagggattctcttatcacccagtagccttttccccctagttttaaaaattgcagtaaaatacacaaaagataaaatgtactgccttaaccatttttaagtgtacaattctgtggtattgagcacatttatattgtgcaaccatcaccacatgcatcttcaatagcttttcatcagtccttgtctgcataaatcagctagagttggtttctattgattgccaccaataatcttgacagatatgtctgatcttccttctctgcactgactcctctttctctgtctcctctgctgattctttctcctcatcacaactccaaatagcagggggagggttgtttacacttatattcagcacgccctcacgcactcgcctggctcttcagacctctcccctgaactccagattcatacatccagctgccctttaggcctctagaaagctaaatacctcagtatcaaaaacatgagaaacggaagccagagtcctggatctctcgccctttcgctgtcccggtgcccatgcccttcagggatggcacctagaccagctccctgcatccctgcctagactctgcagtagtctcacgtggcagacccggaggtcactctcctctctggatgccctgcggacactccggttagcctcagctgcaagagcctcctcacccaaggtcacgccatttccaggacagcaccctggtgactgagcgaggtaagggtacaaggcccttatagggccttctctttgacttcttcccacctccctttatggatgtcagttcctgatgaacatcttacacctcaaaccgtgacccaacatctgcttctgcagagcccccctgtggcatcttgtgccctcctgccccactccctctactctatatcttcccatagttagaatgggctttttttttttttttttgagataaggtctccctttgtcacccaggctggaatgcaatggcacagtcacgactcactgcagcctcaacctcctgggctcaagcagtcctcccacctcagcctcccaagtagctgagactacaggtatgcaccaccacacctggctaatttttatattttttgtagagactggggtctccctatgttgcccgggctggtctcgaactcccaggctcaagcaatcctcccgccttggcctcccaaaatgcaggattacaggcgtgtaccagtgtgcccagcctcagatgggctctttgaaaaatgtttattagatcaggttactcccttgagaaaaaccctctcagaataaaacccgaagtccattacttgaaagcagagccagcttcatgggcctttgtaactgcccatgggcttgctggaacccaggcttggtttaatactctactctcaccatctcaaaattcttaatttttgaacaagaggccctgcattttcattttgcaccaggctccacaaattgtgtaactgggcctgcctcagcagccacatggaacatgatccctccttgcctatttgagctcattctctaccattctctcccttgctcacctggctcccactgctcttgctcttcctggaacttgccataatgttgctagagtcagagccttggctcttgctgctcctcattggctggacccctctttacttgacctgctccctcaccactcacttccttcagatctgtgttcagatttcgtcttctcagagaggcttttggcccctgtccatctctctgaatttacctctgacctctcccccaccaccactgcgctaagctgcctcagaactttgtagacattctgtctggtcttctgatgtttcccccttggaagaatcccaaggtgcctgaagaatgctttctttatccttgaagttgagtaggttgactagagtctggcttgctattgagcattctttatcaaattgtcctgggaacatggtgtattctttcagtctgcagatgtagtcgttgctgtttcaggtcagctctcttatggatctttgacagcatcttctgttccatttgttgagttctgtacttcagggacacaaattcctcatgttggattgtctttgtctctcttccaatgctattagctttgccgtaattggtttagcttttgtctttttcatctgcattcactttgtctaatttgattttcagctatgtatattctgtttctggctgtttttcaatgtatttattagtttcataatgatgtgttttggtctgcagtttgtttctctaggttggaaatttgtcttttcatcttattctgttttatcatcccatctttgaactcttttattgggaacatgttcttatgaagttgtggggaatttttttcccttccttgtgtattctcttcttggtgggagactttgcctttctcgtgccatctccctccctgggcctcttttttttcttctggccataatatgtttgcctagttaccatgtcacttcttttcgtcttggctcaggcttggatggctctgcatagtcgttctgtttgctttgagacagtggaggaattcttggctctctcttcccagtttcttggcatcttctcttgctgttttcccctctgagctatcgcgtgcaggcttgttatcttgtatccggagagaatttgcacgctggagggagctgcagccatgtagtcttcagccctatctggattcttctctttgttctaagaactgtgttggatgtcttactaaggctcactctagctgcacgagggatgtgtgtgccatttccatggggatagggggcacctcagtctctgggtggttccataatctgtgtatacctaagagcagttgcttcccacagagctgggctggctcactgggcactttgccatttctcctgcacctcccagctggagtttctgggtctaaaaggaaaaagtgaaggactcccacttggttgcttctctccagcttactgactgcaaattcccagggcgttgcccgctccctagggtggtttctgggggacggggcaggagcctggctttgctgctgctttgtcctctggagtcttttctcagactgctttgaattacacccctttcctttgtgtgctgaaatcttcccttcacactctccttccctgcctttcttttgtgtcttatcttactaggactggaagagggcagttgtgcaggaggtctgcatctaattccctaatccatgtgagagtgctcctgttgtgtgctttgtgacatgatggtgagaaatactccctagagcagtggctaccagaaggaagccatccccccccctgcacacacacacacacacacacacacacacacacacacacacacacactccttctggctgtcctcagatgcctattctaggtaaatgtcagattccaaagaaaatccagttgagatcttttttctttttttgagacgagagtcttgctgtgttgcccaggctggagtgcagtggcacaatctcggctcactgtaacctccgcctcctgggttcaagcgattctcctgcctcagcctcccaagtagctgggactacaggcgcgcaccaccacaccaggctaaaatttttttgtatttttagtagagacagggtttcactgtgttggccaggctggtctcgaactcctgacctcgtgttctgcccgcctcagcctcccagagtgctgggattacaggcttgagccatcgcgcccggcctccagttgggatcttgactggaatgactggtgttcaatcattatagtttccacctaatttgtatttgtacacaggacagttactaatttgttggtacttgtttgatccccagtccctagagttgtttatggggtggagcttcagtccctgctgcttcccctgtggcagcagctggagtcagggtggggacccagggtgctgctggcagattcttgagacaggtagaatctcctctatattggtgtctctctctgtcccagcagtgcccaggaaaacctggccagcctgtcactgacctctccacctagggcactggtggttcaggtccttctatttgccaccggcaaaccgtacttctgccagtctggctcttaggcccagtttctctgatcttgcagattttcttgggctctgctacggaatcctcatacctccggcaggtccctcctttgcccatgtgtttaactgtggtggaatcgtgtgagagctgcttctctcgcatggatcccagccacaccacattctacagcggttcctctgaaggcattgatagagatatttcctcctgttttgcatttcgttggtcatttcagtagaatcagggtgaaataaacatgggggctcagatgtcagcattacgaaccaagtacgtcaggcaggctgatgtggactgacctacactagtgagacgcaagatgacgaaaacaagggcactcactccaagttactgatgagatgtttggatcaaatgagccagtccttaagcagagttctctagtaaaagagatctcctttctgccctttcttgttccccaaaatgtgttgccttcatggtgaaaatttattttggcagattttctcttctttgataaaagcagccaacactttgttaaaagtctgtgaaacttatttacatgaagtatgtaaaggtaagaaaaaaacattatcaacaagaaatggagaaagccagcagctgaggacagaaaagtcatgcacagtgtcagtgtctatggaaacaggccacttggaccttgaggactaggtatttggaattggaggtgagcttggcctggtgagtctctaaccacttgtgtgtaggatcagtgtgagaaccctgctagaatatagtggcagagatgcaaggggaaatcattggagaagttaccagggaatgatgagctaatctgaaaaaaatacatgtttctaagttgggcgtggtagctcatctgtagtcccagctacttgagagcctgaggcaggaggatcgcttgagcccagcctgggcagcacagcgagaccctatctccctaaaaaaaactttttcgttgtttagttttgggatttttttttttcctggtcttttttccccctttttgtgaataacgggatctcactatgttgcccaggcagatctcgaactcctgggcccaagcaatcctcctgcctctgccttcctaagattacaggtatgagccactgtgttaagcaaaaaaacttttttaaatgaaaatcattttttaaaagacaggctttccaggggagggtattattccacttatatgaagtgtcaacagtaggcagatttgtggagacaaatagattagtggttaccaggggctgagaggagtgggagtggggagcaactgcttaatgggtaaagggttgtctttggaactagagagtagtgatggtcgcatgacattgtgaatgtactaaatgctattaatgataaattttatgttatgtgtattttaccacaattaaaaaaaaaagatcaaatgtcctcagaatagccaacaaccttccacttggctaaatgcctactcattaaacttcttgaactaaattcctttctgattgtcatggttattgtgtcctgggcttcagagtttcacattcaggttggcttggtccagtctgtcatgtatcactataggtccccacattggcctcttcctcagacggacagcccatctatctgccggggctctgtgccacagccagatagacttgctctgagacagctgtgtgggctctgagcactggccaggcatcacaaaacctatctttatgatttagaataattggtggtcagctgctgttttaatgttgttgttttttttaatttagatataattcacataccatgaaatttactcatttaaagtgtacaattcattcttcagtataattcataggctcacagaaaaaattgtttaaaaataaaatgtgcaattcagtgtcttttagtacattcacagagttgtgcaaccatcgcctctgtgtcattccagaacactttcagcacccaaaagaaaccccagacacaggagcagtcacctcttattacccgcagcccctggcaacaactcatccacttcctgtctctatggatttgcctattctggacatttcctataaatggaattatgcactatttggccttttgtgtctggcctctttcactgagcgtaatgtcctcaaggttcatctgcattgtagcatgtgtcagaatttctttcctttttgaggctgaatgatattatatcctatagataatgaggttttgattatccacccatcccttgggaatgcatatttgggttgcccccaccatttggctgttgtaaactgtgctgccatgaacactggtgtacggatatctgtttggttactggttttggttttttgtttgtttgttttggttttttgagacaaggtcttgctctgtcgcccaggctggattacagtggcacgatctctgctcactgcaacctccacctcccaggttcaagcaattctcctgcctcagtctcctgagtagctgggactacaggtagcactcaccaccatgcccggctaaatttttttgtatttttagtagagacaaggtttcgccatattggccaggctggtctcaaactcctgacctcaggtgatccacccacctcagcctcccaaagtgctgggattacagacgtgagccaccgcacccggcatagttgtggctttttgagagtgtatggctaggagtaaaattgccaggtcatatggtaactccatgtttaacatttgagaaactgccaaactgttctccacagcaggaattttttaacctgtatgtggtgggcttgtgtttcggttttcattttacacatctataaagatgagatttgctgtatggcactggttgcctgtatttggggagggttctgcttttggttggcaagaactgcattttatttaagcttagcaaaacataactggtttctcgcatcttctcaaaagtggaggattaagaaatggactgcgaattcagagcagggcagctgaacctcaggctccacccttgtagccttcaagctgaacctcattctctcttgctccctggagaccactgagacactctgcctgtgccagtttgatttctcacatttttaaagggccaaagcttgtgtctcaaagtgctatagcctttattgattcatgcagagaagcctccttgattccgtaattctgcagctaatactggaagtagaaagaattggaaacaccatctggatgacactttagggtggaagcagccagtacaagggggggctcattatttcctctggtcccagactgttcacctggagctgtagccaccaccctgcccttaggttaactgcctcgagtggtagtttagctctttgtgctgtgccgagggataactggaagtgaaaggtgctgagaaatgccatctcctgaaagtggcgagcatgagtgaatttacgaaaggttgggatattgctggggctctggaagtttctctggagctcactccaggggacagggagggggctggattccaattcaagtgaaaaatacctttcatctgccttgttcacctggcttttttgcctttttgtaaaatctgaaaacctcagggattgagtagtctttccttaactgcagttgcctgtctggccacacctgccagctgttgcttgtacccctgtaatttgcacggccttccgggcctttctcacaagatcactgcaggtcacattcatgaggaaaatgcaggcagttcctgccatcagacccctcaggatgtcatggtttggcctgaaaacaagattcctgcaactctaattttcctttgctagatcaaatgaaggatttgatctaatgtttgcattctagcagcaaaatcattgaatattttatttcttaagagccttacttcatattttgtaggtattttaagattttgtaaaggcctttctgcttcaacgtgtgatgtgtgcattcttagaaaaagatcttgtgttctgtaaatcacacaataaaaacatgagttcgtgcaggaaaaactggggcggggtggatcactccaaacttgtgtggtgtggtaactggagctcactgatgaaaccatgaacagttctggctgaaagaaccccacagtacactgaggtctgttggcatcgccgccagcaccgccccggtccctttgtgcgcgccaccacacctggctaattttttatttttagtagagagggggtttcaccatgttggtcaggatggcctcgaactgacctcgtgatccgcccacctcagcctcccaaagtgctgggattacaggtgtgagcctccgtgcccagccttcagctttttttcttaatgtctttgtgtaatatgaaggcattctctttaattgttaaaaagcttgcctaccactgcttcaaaatattactgtcagttggcatagcttctgattatattgatgtcatctcccttcttttaaacatgttaccatattggcactgtatttcccctagcccattgatcacttgagagttagtcatagtcctcgtgctgtttcactcctaaacgtttaagcatgcctttcctaagagcagacagtacagttaagacactcaggaagtttagcaatgagctaacacagaaccttacatttctccacataccccataaatgccttttttagagcctttgagcctggaatgcagagtccaggactgtgtgttgtattcgattgtgtcatcccttcagtctcctttatcagaaatgttcccccacccccttgttttctctcatcatcttgagtccagaccgtggttgcatggcacgccctctctggactcttcctgctgtctcctcacggtaagcttcagtctcctactcgtgatgctggttcatctcagcagcactgaggggcctgagctcagtttggtcgtgtgttaaggtggtgcctgccagatttctccacagaaaagggccccgtacttttatttgctcttcagcctgtgtattccttcctttcttgccagcttgtgggtggcttctctagcagcttctgtaagatactcagtttggcagttgtagttgtttcagcaggagaggtgtctgcatacctgaccaccacatggctagaagtcgatccatcctctggcgtaaccatcctccatgctactgtccctggggcactgaggccctcctcagtgacttcctccacctcatcttccgccatctccaagccaccagtgtccaacggactactgatatgtcccaaactcatcatttgtttattcaccaattcagagcccacctttttttcagcactgagctagcctctccttgctagaagcttacggtcgaaggtctccagccatcagaagaagcacgtggagcgctgcgtccgtgttgtggttattcatccagcatgtgttgagtaagggttgcacctgtgcctggcattatgcattgagcggggagatgggggttggcacgcacagtggggtgttctaagtacactgagggctcgggtgccctggctcatagagcagggagggaggcaggagcagggaaggtgtctcagaagtgccatctttttttttttttttttgggaagtggaatcttgttctatcgcctggtctggagtgcaatggcactatctcaactcactgcagcctccgcctcccaggttcaagcgattctcatgcctcagtccccgagtagctgggaccacaggcgcacaccaccacacccggcaaatattttgtatttttagtagaggcggagttttgccatgttggccaggctggtcttaaactcctggcctcaagtgatctgctcacctcggcctcctaaggtgttgggattacaggcatgagccactgcgcccggtctagaagtgccatcctaactgaacctgaaagatgaaagttctccagatgaacctgaaagttctccaaatgaaaaggtgggagggggtgacagggttaggcccagagcctctggtgacacagggtgggcatcattggtcactttttcctcgagggaggggcgtcacacgggtgatagggtgggagctataaccatgttgatagtgccgcctctgcccatctggcctggcatgccctgagccctctgtcccacctgtggaactcataagccctgacagcccactcactcctgattcattatccacacccctgtgcttccgctgtgcctggagcaagctttcttcagggggaagggaggctggaactatgttgtagttacctatttgtcctcccttccaaactgtgagttcttggaggtggaaggatgctgcaggatctggctcaggacgaaggcagttggtgaacagacacgtgtgtttttgactcacggtgatctcagacaagttcctctgtctagtcgaacttctttttttccatctgtaacactcaggagttgaataggtggtttttctgaggatacttcaactgtaaaatgtatgaacttgtgaactagctatttagttctcctcataatcaagattgtgtgtgtgtggggggttctgattagagggaggatgaagagaggtgtatggggttttttttgttttgttttctgtttgtttgtttgtttttgagatggagtctcactctgtcacccaggctggagtgcagtggcacgatttcggttcactgcaacctctgcctcctgggttcaagtgattctcctgcctcagcctcctgagtaactgggattacaggcatgcaccaccatgcccagctaatttttgtatttttaatagagatggggttttcgccatgttggccaggctggtctcgaactcctgacctcaggtgatccacctgcctcggcctcccaaagtgctgggattataggcatgagccaccacacctggcaggtttctttgaaaaagtttgtgtttcggcaaacaccataaaccccctgggggacagccttggggagtcacctggcaccctagcccagcctccctcccttgggtcctgcagtgaaggcttagtgagggtgtgcaaatgcccaggtcaccctgggactgggcaggccctctgggctaagggtaaactcatttggaatacctgttttctatcattgttttttatttgttaaatttaaagggtacaagtgcagttttgttgcgtggatatattgtatagtagtgaagtctgagctttcagtgtaaccatcacctgaatagtggacattgtacccgttaagtaatgtctcatccctcaccccctcccacccttcccagtctctccagtgtctgccattcctcactctgtccatgtgcacatgctattcagctcctgcttctaagtgagaacgtacggtatttgactttctgtgtctgagctgtgtcactgaagacaatggactccagctccatccacgttttttatcatttttacctgcactccacacccagcacaatccaggcttctttgtgggttttttgaaatttgtctttaattataaaagtagcagccagcaaattaacaaacacccatgtgcctttcattgcacagaattgaaaatcatcatactatatttgcttcaagtaatttccattagaaagaactagaatattacagtagagttaaagaccctttatttcccatcttcagtgctcttaaaagttcatttagggccaggcatggtggctcacacctataatcccagcactttgagaggcccaggtgggtggatcacctgaggtcaggagttcaagaccagcctggccaacatggcgaaaccccatctctactaaaaatacaaaaattagctgggcgtggtggtgcgcatctgtaatctcagctactcgggaggctgaggcaggagaatcgcttgaactcaggagggaggcagagcctgtatgcagtaagccgagattgcgccaccacaccccagcatgggtgacagagcaagactccgtctcaaaaaaaaaaaaaaaaaagttcattcattgtacacttagaaatagttaaaaaggtaaactttgttttgtgtgtgtgtgtatatatatatatatatatatatatatatatatatatatatatgtatttttttttgagacatatatgtgtctggtttgttcgcccaggcaggagtgcagtggcatgatcaacggctcactgcagcctcaacttcctaggctcaagtgatcctcctgcctcagcctcccgagtagctaggattacaggcacacaccaccatgcccagctaattttttttttttttttttttttttgtagagacagggttttgctatgttgcccaggctggtctcaaactcctgagctcaagcgatccacctgcctcacctcccaaagtgctgggattacaagtgtaagccaccacacctgacctgttttgtatattttaccacaataaaaagcctttaaaaccccaagcagacagttcattttcattcaggcccaactcagaatctgatcacagcggggtttcccccctttctagcgagtagctgaagaactgttttctctccttgatggtataactgtctctgtgggtgttgctcccctgccgctccagtggttttgtttttgtttttgtttttttgagacggagtcttgcgatctcagctcactgcgacctctgcctcctgggttcaggcgattcttctccctcagccttccatgtagctgggacttacaggcacctgccaccacgcccggctcatttttgtatttttagtagagacggagtttcaccatgttggccaggttgggctcgaactccagacctcaggtgatccacctgcctcagcctcccacagtgctgggattacaggtgagagccactgcacccagccggcccctcagtcttttccttctcaatcagtggcaccaccatcttcccaggctttggacatggtccctgactcacccttgcccctcacccccacactaatccacctgcgagctctgttgcttcaccacctagaccagccccaaatcctcaactgcccccaccctgggccacacctggaccactgctagaggcctctcatgggccctccctgtttttctcttgcactccccgggctttctggcacaagatgccccagaagcagaatcacatatctctcctgggagccaatctagtgtgtttactgcccctggagtgttattgttggccttagaatatgtcccactacaggtttgcagagcactgtagtcaaaagtcatttgaaataaatcttttctctgtggtatattgtcaatttgatatagaattaaatttgtttcttttcttttttcttttctttttttttttttttaagagacagggtcttggccaggcgtggtgtctcatgcctgtaatcccggcactttgggaagccaaggtgggtggatcgcctgaggtcaggaattcaagaccaacctggccagcatggtgaaaccccgtctctgctaaaaatacaaaaattagccgggcgtgatggcaggtacctgtaatcccagctactcgggaagctgaggcaggagaaggcttgaactcaggagtcggaggttgcagtgagccaagatcacgccatggcactctagcaagactctgtctcaaaaaaaaaaaaagagagagagagagacagggtcttgctctgtcactcaggctggagtgcagtgatgtagtcatggctcactgcagcctcatactcctgacctcaggtgatcgacccgcctcggcctcccaaagtgctgggatcgtaggctgaagccaccatgcctggcccgaactcatttgtttttatttgcattaagtgtaataaggttttgttacttttagtttgaattttattttgggtaatataaacatttacatgattcagaagtcagaattacactgaggcatgttcagctaggcctcactcctgtgcctgtacccttacctttttccccctaccccatgcagggaatcaatttcattagttcctggtgtgtccttccttaatacccccccttctttctttggtagaatgcagtagatatgtttgcgctttgctccctttgcttcacagtggatcctggaaatgactccatcgcagttcttagagctcttgtttagtccctttggatctgcacagtactccagtgtgtgggcgcaccataagtttattcagcaagtgccctggtgatagggatcgggggtattggaagcctttggctggtaaaaataatgttgtagcaaataacatcatgcatatgttctttgagatttctggaggtgtctctttagcatagatttctagaaggcattccttacgtcacgtttaggtttatagtttgacctcatggtgattaaggtatttgggaaatgcaaatgagagtttcgaagaagccagatctttcccattagttcactgtttttctctgacattaggaccgtccgggttctagggagcagccctggcgttaggcagtgccatgatggattgtgtagaagtagcgattcccatctgtctgctttcttggcccactctgctggtggctccccttccctccctcctttatggggagctggggagctgcctaggggtccattctcaaaggctgatctctggtgggcaacaggccacacctagctttccagggttcttcgtcatttcccattgagagctgtaagactcagagacatgaaaaggaagctctggctgggcacggtggctcacgcctgtaatcccagcactttgggaggctgaggcgggtcgatcacctgaggtcaggagttcgagaccagcctgcccaacatggtgaaaccccgtctccactaaacatacaaaaattagcctggcgtggtagcacacgcctgtgatcccagctactccggaggctgaggcaggagaataacttgaacccggcaggcggaggttgcgatgagccgatattatgccatcggcaacagagcgagactccatctcaaaaaaaaaacaaaaaacaaaacaaggcgagctctgtgctgggacagattagggacccctctttacagcaagaaagactgctctgtgggttgtaggatgcctttgtgtatgcagtggctctaggtgactctggcagccacactctgggccctaaacttctggaggaagatacaggatagggaggaactcaggggtgagtcatggtggggacaagacattccctcactctaagaccttgtcactagattggaacatctcttgcctccctacacctgacctgatggttctggagagatacgtccttgcagcttctgagtcccagcactaagcagcctttggtaacttccctacatcatttgagttctggtttcctaaggatgcttgccagtgagtgccatggtgccctcattgcacagtctgtgcagtgtagacaagaggggaagtctcttggggtagaccagccgcaaggcggtgactagcactgatgtgaaccacatgggacaggggagttgtggggctgagaacacggagggtgggagtagtcatgctcttttccagaatgaactgctaacgaagggactcgcaggtggctgctgcttctttccaagctgcccctgttgttgcagaggctctggagtcctaggaggtttcacggtggcatactcgacagagtactagagcatcatggccagatagtgatgctggggtgtggggcctcacggtggccatttctgacgagaccccaccgggccaaagtgatgtgtagagaaggagctgcttcggtcaccagaaaagaacggggaagcctcccacactagaataggtagggtgctcttctccaccggcaggaaggggatgtatggctctgcctggaccacacctttttccttgctcttccctccgcatctgctgtggccgaggccattcctcatcagggaacatgtgttagaggctcacgccacctgggaccacttgtcttatcacccccaggaccctaggcggtagtttcctgtggcctgagttagctgatatttatatagtgccattgtgccttttctcctgtgatgctcacagtaaggatgcctagatggggttacctgttgtcaagataaggaaactgaagcacagaatgctgaggtcatttgctgggttcatgtttggaaagcggcaaaggatttcagtgcaggttggctggctccaaacctgtgtgtgctttccatgacactgtactgtgtgcctcattgagcctcattctagaaaaccaaaaacacacccaaggcccggccttcacaaaggagacccctcccccatttggctccctttccagcagtcgacggcctcttgtcagccatcgagcccagagtcccttgaagtgcgactcatgctggggtggtatgctcaggagccgcagtgtttccgctcagaggaaagggctctgattctcctgcagtgctaggagacttgtgggtggccacagtgcaggtcaggcacaccggccagcaccacccacagcccaaattcctaaagaaatatttgggtcccagcttggcccgagtctctgttgtcctggggaaggacatcaagatctgagtgtatgatggcctggggccttgcatgtggtgggggtccaagcctgcctctgctcacttgttctgcagactggcatgttctctgtgatacttacatacttgtttaacacttcagggaagaaaagtcagaagaccaggacctccagggcctcaaggacaaacccctcaagtttaaaaaggtgaagaaagataagaaagaagagaaagagggcaagcatgagcccgtgcagccatcagcccaccactctgctgagcccgcagaggcaggcaaagcagagacatcagaagggtcaggctccg

SEQ ID NO: 13 - DNA, 104731 bp, Homo sapiens
cgcctctgcgaagcccctgcctcgggccctgtgcaacgctttttccggtgagcggcggcggcggctcggtcctcttgctctgtgggtcgctttgctttgtctcagtgccttccgcactttggcctttgtggattctggttctcactgttgacaggtgggcgccttctgtctgccttagcacggggacccccgggaacgcgggaaggcccggggtttggcctcctgttcggctcccgggcgccctcttctggcgccgcctcgccgctcgcgcgtcaggaagcccccggcggccgccgcgggtcctcgggagttctcctggggctcgcatctgcccccatgcgatcctgagcgggcctgggccatgtcctgaaagggtggatcctggtcgggaccgctggggccctttgtagtcccctccctgctttgtcacatcctagcgctttctgatggcacaggttctggtttcctccagtatatcaaggaggggggctcattcattcttcctgtgtttggacttcttttaggagaagtgggggaattcgggttttcgctgccttcctactcctgcctgaacccagaaatcttattagccttttttcttaaaaacttttttttaatagtggtaaaatacccataacatacaacttaccatcttaaccgtttttaagtacacacagttcggtggcattagtgcattcacattctcttcagtatcatttttgtgttaaaatcattaattcagtgtgtggtccagccaagtgtttatttttttaattttaactcttacagacagtggaaatcagacaaaagcttaatttatacgatacatatgcaattaaaataccaagatttgcacatacaatgacatgattccctttaactgtctttcattgctagggaagaaatttctaacagaatcttagtgcactattagacagcactatttcctgtcattcagggacccaggtgtttttcttgcacgcatttcctgtgtatttcctttatctgttattgtgtgtattccattgatctgtctcacattttgtacacaatgcaacaagagatattatttgcttccattgttctaaaaagctttctactgcctttgaacagaaaacttgtccccactctgacggcagcccctgtacatctgggtaaggctgtgaccctccaggtcatcagtgtaagctctagcacattctctcccctctcaagttccatccttgttctgcaaggctgggtgtcttagagtcttggatctgatgatttgagctttgcatttacaagtgacatttctggtgacattgtacttacaaactcggtgtttccaattatagcatgggaggcaagaggaccaacttggattcactgatgcaaataaccgctttgttctgaagccaagcagcccgtgggcagtggcatggcacagactttagatgttggtcacattccctgcccagtcataaactcacttgaggttagtcattgatgtaatcatttgaacgaataaaagtcaagatgaatatgatctcaacccatactcctctatcaaagatagctgtggttttctaaagcgtaacctatttgctatacaagcattttcttttgtttttcttttcttttcttttttttttgagatggagcttcactctgtcccccaggctggagtgcagtggtgtgatctcagctcactgcaacctccacctcctgggttcaagccattctcctgcctcagtctcccgagtagctggactacaggcaagcaccaccatgcccagctaatttttgtatttttagtagagacggggttttgtcatgttggccaggctggtctcgaactcctgacctcaagtgatctgctcgcctcagcctcccaaagtgctgggattacaggcgtgagccacctcgcccagcctatacaagcattttttacattgtgatactatctcttgccttggaggcatctaggatctaatgtggtcctagatgtcccagctgcactatccagcctgcacagacctaacctgttaaatggagaaatagagaaagggcaagaggacaagacgtcattgtatgactattagaaatagtacactaaggatgatgccaaaaaatattcctggacagatagagaacaagaactgtctcttcctcatccatttcccttgttccctgcaaatcctttgtaattattacttattctgctgggggaataagtaggggccagcagtcttcctccatgagtcgagtctgccaggcttttcaggttgcgacctgctccccagagcttaccatactctctccatttggtctggatctcaagtgtagagctgcctaacaagcccccccaaaatttagtggcataaaataacaattgatgagttcttatgagtttatgtatcgactgatctgtaaggcacagttcttctgctccacctcgtgttggttggggtcactcatgccatgtctggcagttggtgctggctgttagctggcttgtattactctcctccacatggcatctcatcctgcagggcctctctctccatgcggcctctcaagcaggatagcccagacttcttcctatggtgctggcttccaagagggcaacgacagaaactgcaatgcctgttatggcctaggcctggaagtcacctaatgttccatctgccacatcctagtagtcaaaacaagtcacaaggccagctctgattccagagaaggggaaaaagcctccgcctcttgttgggcggagtgccaagtaatgctatagaaggacatgcagaatgggagccatgggagcagccatctttggaaacaatctacctcatccagtgagaggtgttccatccattcccatgtttaagagaaaaccctaggctgggcactgtggctcacgcctgtaatcccagcactttgggaggccgaggtgggtggatcacctgaggtcaagtgttcgagaccagcctggccaacatggtgaaaccccgtctctactaaaaatacaaaaattagccgggtgtggtggtgggtgcctgtaatcctagctactctggaggatgaggcaggagaatcacttcaacctgggaggcagaggttgcactgagctgagttcgtgccattgcactccagcctgggtgacaaaagcgagaccctgtctccccaaaaaaaagaaagaaaaaaagagaaaacccaaggaacagaaagaagttggtacagccttggcactgggatctctgatgggaaagtgggggtctatgacagtggcgctgccactttccaagtattggtgtccacattgtcaccacttgataaaccttggtgttgatgcgttctagcccctgcattcacaccaaggtacagcttggctgtacaccatgaccctgtcctgctaggccacttgtttctagctatcttgggtctggaaatctccattttgtgagtcactaaaactattaatggacaaagagattttaaagctcacaatacaatctttcagaaggtaaaaagtcatcgtgctgagagcacttgtgttagctcttgcataaaaaaataaacatttaaaattcatcccaagaagttatgcattaccaaaatattttgtgtttttgttgttgtttgagacagagtctcactctgtcacccacgctggagtgcagtggcacgatctccaatcactgcagcctctgcctcctggtctcaagcgatccacctcagcctcccaagtagctgggactacaggtgtatgccaccatacatggctaattttttgtgtattttttgtagagatgggggtttcaccatgttggccaggctggtctcgaactcctgggctcaaatgatactcctgccttggcctcccaaagtgctgggattatagttgtgagccaccacgcctggccaatatggtggtttttaattaaagtgaaaatcacataacataaaattagtcatctgaaagtgtacagtgtagtgacatttagtgcatttactaatgcacgttgtgccaccatcaccactatgtactttcagaatatttcatcatgccgtacagaaaccccgtgtccattacgtggccactccccatcccctaatccctcagcccctggcacccgctaatctgctgtctgtgtctatgaattcctctattctggatatttcacataaagtggctcatctgatatgtgacttttcatgtgtggcttctttcactgagcaaaatgcttttgaggatctatctgaatttcagcatgtatcggtacttcattcctttttaccgaaacacattgaaattagtgacatttttatacatttacaggatagtttttgtttgtttgtttgtttgtttgtttgttttgagacaggatcttgctctgtgacccaggctgcagtagtggcacgatcacaactcactgcagtctcgacctcctgggctccagcgatcctcctgcctcagcctctcgaggtacctgggactacagccacacaccaccatgcccagctaatttttgtattttttctgtagagacagggtctcgctatatagcccaggctggtctccaactcctagcttcaagcgactctcctgccttggcctcccaaagcactgggattacaggtgtgaaccactgctcccaggctgcagggtagattttttaattccattgagtcacttttcgtaactacaagcctcattcttctcggcatcagcctttattcgtgtgcaccatacagtgggttacccaagccaggcaaaggggcaaacctggatggtcccaagcagccaggtaccaaacacggtggtccgaagacccttgtcagtgttgttattaatttgaggactgatcttggagaagtccagtaccaaagagagttgccaggagacacgggtcagttgcttaagagaggagcacagctgccctagaacaagaaaggcccatggccttgacagtgtaaccagagtcccaatatttgataacaacacacaggagaaggtaacatggtaagcagtgggaattttagctcctccacaaaggaagagcctttgctctttgttctgttcgattgcttgttctcttataattggctgcagttatgaaataaccatgccaaggggcagcataaaagcacctctgttaacagatttgcagtgctgtgagctcctagtagggtgagaaaaaaaacctctggctctagataggatacttgaggttgaaaatatattgattacttaaagaccctttactcccttgcgcccaggcctctgcactccatcatacagaaactttaaaaaacattcattgatgtaatacacctctatgtatgtttatgtaaacatacacttatatgcagtcacagtaaaagatgttcacggccaggcatggtggctcatgcctataatcccagcactttgggaggctgaggcagacagatcacctgaggtcagaagtttgaggccagcctggtcaacatggtgaaaccccatctctactaaaaatacagaaattagccaggcatggtggtgtgtgcctgtaatcccagctacttgggagcctgaggcaggagaactgcttgaacctgagagacagaggttgcagggagccgagatcacgccgctgcactccagcctgggcaacagagtgagactccatctcacacacacacacacacacacacacacacacacagatgttcaggtagtggtattatttactgctttaaaagtttaggttttatagtaaaaatttaaaaatcaggcataggttgggcgtgggggctcatgcctgtaatcccagcactttgggaggccaagatgggaggattgcttggaggccaggtgttcgagagtaggctgggcaacacagcaaggccccatctctacaaaaagtaaaaatgcaaaaattagcagggtgtagtggcacccgcatgtgatcccagctacttgggaggctgaggtgggaggatcacttgagctcaggagtttgaggccacagtgagctaggattgcaccagtgcactccagcctgggtgacagagtgagactcggtctctaaaaaaaaaataagtaaaaattcaggcatagcacaaaacaatgtttagactacagtgattttctgatttatgagtgttgtgtggcaccattgtgtttatgcatagactagaatacatatatgtcagaaataactgtgtgtgtttgcattttgtctttatgaattttcattcctttggagattatccaggtaaatatacttgctaattacctcaatttattgtctaccccaggtatcaaagtcagtagatgagggaatcttagaaattatactaggctgcctgggcgtgttggctcacacctgtaatcccagcactttgggaggccaggtgagcggatcacgaggtcaggagttcaagaccagcctggccaacatggtgaaaccctgtctctactaaaaatacaaaaattagctgggtgtggtggcgcacgcctgtaatctcacctactcgacaggctgaggcaggagaatcgcttgaacccaggaggcggaggttacagttggccaagatcatgccactgcactccagcctggcaacagagcaagactccatctcaaaaaaaaaaaaaaagaaaaaaaaagaaaaaaagaaatgatagtagcacaatatgatcacacttcatgaataaaatttgacaaatatgacactacaatttattccgtttacaaggtggagtaactttgtagggctacacaattactgctattgttggaagtttaaaaggttgattttaaaaatacagatattcattattataactcagtttagctcaactcgtgtttacatttacaaaaccttagatatttagtgtaagaaatgctgacgtacgtgatctgcaaggtaagtattatgggtttagaaaggtcaacataataaaatttctcatgagaaaatcataatggatacatctcaaatcttgcaaaaaccaaagcacagtgttcccattgtcacttttacatacttcgtactgtgataaaactggagagaagacaaagacatacagctatttcttaaatgaagaataaaacaatttaatctattcaaggatttttcttataaagaaatattgaggaaacctggagttttagattattttcttggctttatttgttttttcttgatacattgtaatcatgcatatttatggtgccaattcatatcacgttgcacaatgacccaatcacggtagttagtgtacctatcacctcatgcaagtatcatttcttgacaatgcgaacatgcaaatacctctcttctagctattttattttattttttattttttattttttgagatggagtcttgctctcttgcccccaggctggagtgtagtggtgcgatctcagctcactgcaacctccgtctcctgggttcaagcgattctcctgccttggcctccagagtagctgggactacaggtgcccgccaccacacccggctaattttgtatttttagtagagatggggtttcattatgtttgccaggctggtcttgaactcctgacttcaggtgatccgcccacctcggcctcccaaagtgctgggatgacaggcctcttctagctattttaacagtaatatgcaatatcttactgttaaccatcatcatcccactgtgcacagaacaccagaacttattcctcccatctaattgttattttgtactgtcgacgaacctctccctgtgctcccttctccagtctctgtgcttctaagatatcagccttttttgttttgtatacagacagggtctcactctgtcactcaggctggagggcagtggcatgatcctagctcactgcagccttgaagtcctgagctcaaatgatcctcccacctcagcctcctgagtagctgggactacaggctcacaccaccatgcccagctaattaaaaaaatatatgtatatatatatatatatatatatatatatatgtgtgtgtgtgtgtgtgtgtgtgtgtgtgtgtatatatatattgtagagacagggtctctctaggttacccaggctggtttcaaactccaggcctcaagggatcttcctgccttggcctcctaaatcactgggattacacttgtgagccactgcacctaccctcaactctttaaaaaaaattccacatataagatcacacagtatttgtctttctgtgtctggctaatttcacttaacatgatgtattccaggtttattcatgttgttgcaaatgacaggatttcattctttttatggttgaatgggattccgttgtgtatagataccacattttctttatccattcatccatcgatggacacttgggttaattccatatctggctactgtgaataatgctgcaataaacatgagggtgcagatctccttgacacaccatttcatgtcctatggatatatacccagcagtgggattgctagatcagatggtagttagctctatttttaatttcttttttctttttctttcttttttttttttttgagacagggtctcactgtgtcacccaggctggagtgcagtggcactatcacggctcatgcagcctcaaccttctgggctcaagcaatcctcccacctcagcctcctgagtagttgggactaaatgtgtgcaccaccacgcctggctaaattttttaatttttttttttttttttttgagatggagtttcactcttgttgcccagggtggagtgaaatggcgtgatcttggctcaccacaacctccgcccctgggttcaagcaattctcctgcctcagcctccctagtaattgggattacaggcatgtgccaccacgcccggctaattttgtatttttagtagagacgggatttctccatgttgatcaggctggtcttgaactaccaacttaaggtgatccgcccacctcggcctcccaaagtgctgggattacaggtgtgagccaccgcgcccggccttaatttttttttttttaattttttgtagagatcgggtcttgttatgttgtccaggctgctctcaaactcctgggctcaagtgatcctccctcctggcctcccaaagtgctgggatcacaggtgtgagccaccgtgcctggccgattttaaatttcttgtgcctcatattgttttccaccaacaccaagtgttcccttttctccacatcctcatcaacacttgttttcttttgtcttttaaaaaatagctgttctaattagagtaaaatggtatctcatggtggttttaatgtgcgtcttcctgatgattagtgatgttgagcattttttcatgtatctgttgcccatttctgtgccttcttttaagaaatgtctattaaggtcttttgctttttttctgagacagagtctcgctcttgtcacccaggctggagtgcagtgacgcgatcttggctcactacaacctcggcctcccgggttcaagcaattctcctgcctcagcctctgggaggcaggattacaggcgcctgggattacaggcacctgccaccacgccaggctaatatttgtatttttggtagagatggggtttcaccatgttggtcaagctgctctcgaaatcctgacctcagatgatcctcctgactcggcctcccaaagtcctgggattacaggcgtgaaccactgcgccaggccccattttgttttgttttgtttttgagacagaatcccattccatcacccaggctggagcacagtggtacacacatggcttactgcagcctcaaactcttgggcttgactgatcctcccacttcagcctcccaagtagctgggacttaacatgccatagttacagtgttatagcgttttgtgttttttatgtacttactattaccactgaattttataccttcaagtgatttcttattgctcattaacatccttttcttttagattgaactgctcccattagcatttcttgtaggacaggtttgggaccgatgaaatccatcagcttttgtttgtctggcaaagtctttatttctcttttgtgtttgaagaatatttttgccagttatactattctagggtaagctttttttccttcagcactttaaatatgtcatgccactctctcctggcctgtcaggtttccactgagaagtcagcggcctccattgcatgttatttgtttcttttctcttgctgcttttgggatcctttctttatccttaacctttgggatctaagtgtttggtcactgcagctgtatctgctttagggggcaccccaagccgagtaaccctgtggttcttgcaggtggcaaaggcagccaggccagtgtcgtcccctccagggtggcgagttccccccagtcctgggcggatacagagatgccatttgggagccagtgcctgtagttgggagtcttaggaatctagttggtgctgtattctactgtggctaagctggcacccaagctgcgagacacaggccttcccactcttgcctcccttttccacaggcagagaaccctcaccccacagccaccactgccccaggcccacggggagtactgccagactatcgctcgtgttcactcgaggaccaacggccctcagtcagcttgtggtgaatatgctgccatgcctgagcctctctcttcagggcagtgggatcccctctagccctagggcaggtcaggagcccaggcctggaactggaactggggaccccaggagcccacttggtgcactactccgctgtggtcgagctggtacccaagctgcgagacaaagtcccctttactcttccctcccttttcctcaaaccgaaggggtctctgcctgtggccaccgcagctgggagtgtgctgggcccgcacggctctgagtgtcagccgaggcctgcagcaagtacggcctgggtatggctgctggttcctcagtgcccaagagcccttcagtcagcaggtgatgagtcccgctaggactgggtccttctcttcccttccggccgagggtgtctagaaatgtcgtctgggagctagggcctggaatgggggcctcacgactctgaccagtgccccatcttactgtggttgagctggtatccaagacacaagacaatgtcctccccacttttccgtgtcctctcctcaagcaagaggaaggaggggctcctggagctgtgagcggcactgcctggccttgggggaggggaggtgtaagcatggcccgagctaccccggctgctatctcactaagtcgcttgtaccccaagtccgctggctccgagcccagtccagcagcaggacttgcccgggacttgccgtccttgttgcctagactgcctttcaagtatatttcaggcccctgaatactttaggccgcagtggtgaggctttgctggagctcaggctccatccgctgaagatgggcgattcctctccggctagggctgatgtaaatcctcccttcgtgggcgcccgctaacttctgccccgtgttgctttctgctgggacacggcagcagcgctgagttccgacgcaaagccccacagtcaccgtgccctccctcccccaagtgtacagcttctctctctgcaccacgaggctgctgcggagcgggggctgggggtggggggtgccggggctgaggctggggcgcggggcggggagtgattcaagactgtccttcctacccttgtcacggcctctttcagtgatgtgaagttcaaccaggtcctgtgatcgctcacctgatttttggatattaggaaagtgcttttttgtgtggctagttgttcaatttggtgttcccgcagtggggatgatcactggaggcttctatttggccatgctgttctgcctctctctctatcttctgtgttgataaagccctttcaatattagtaagtgtatttaacacagtagagattcctgaagcttcttcatgactgttcaatttgggcctgatagcaatatgcgtttccttgtttcttatcctgtgactgagcaagcaggacattgtaacagtggaggaaaaatccccagttttccatgttctctcatccaaaaactttttgagagaaagagtacatttaggaagcaggacgaccatttagatttttactaatagcctggttttatatggttggttttatatggctatttataaatgttttgatttaacttgttaaagtgtaatatcccaaaattctatgatttatttttctcttttcccattgcaatatttatttatttatttatttattttgagacagagtctttctctgttgcccaggcttgggtgcactggtgcaatctcggctcactgcaacctccgcctcccgggttcaagcgattctcttgcctcagcctcctgagtagctgggactacaggtgcaccccaccatgcccggataatttttgtatctttggtagagacccagttttgccatgttggccaggctagtctcaaactcccaacctcagatgatccacctgcctcagcttcccaaagtgctggggttacaggcatgaggcaccacaccccgccccattccagtatttaaaaacgacttttgtgcacagaaaagagataacatgatgatttgttccccacaacttcaacttatttaatttaattaaaatttctaaacaggttaccatgtatataggaaggaaaacccacattgtatagagaccaaaatttatataatttagggttcctctttaagaatactaaatcacttgcaaatgtgtccattcatttagaaaaagataagaaatcacaacaaattacaaattttaaaaagctgacaaatacaacaaaaggcagcaaagtacaatgtttttgttcctattatattttgtactgaagctacctgtgttatcttttttccccacattttggctgcatagtgttagatcgcatcttcatctgacaatgatattgtgacataattctcactagagggaacagaaagataaagcagtcttccttccactctgcttgactgaaatgttttctgattgctatcacacagtctttgtttgtttccttatcagtaaagctgcaccagaaacttcctctgtcatttcctgctcagaggcgctccctgccccaggactagctctctgggtgtggcctgtggtccgtggtgtggcctgtggtgtggcccatcagtccgcccaggggtcactcgccctctgtgtggccagttgctgggttgctgttcctgcagcagctgccctaccctggccaggcccttactgtccctggttctctccatcccaggaccatcctaataaccgtttctccttttttctttttctttttttttttttggagacggagtctctctctgttgcccaggttggagtgcagtggcatgatctcagctcactgcaagctccgcctcccaggttcaagcgattgtcttgcctcagcctcctcagcctcccgagtagctgggattacaggtgctcaccaccacgcccggctaatgtttgtatttttagtagagaagcagtttcaccatgttggccgggctggtctcgaactcccgacctcaagtgatccgcgcaccttggcctcccaaagtgctgggataacaggcgtgagccaccgcgcccggcccatcctaataaccttgaagcctgattgtagcctcccctctcccacctgtcctcaaccatgcagggagtggagcagtgcctcacagggttcctcctcctggaagtcaaagaaaagtcaagcttttgatgaggtctggcagcccccgtgctaccactgaccagggtgtgagggtggcccaggcctctagtgcccagctggggtagctgcccagtccccaactgtgtggagagattctcaccgtggggaaactctaactttgagagtttgtcttaaaaggccagcacttttatagtatcagaggtttggccctacattttaaaatgtttttctctggtgagtctttgaagccaatcaatcagaatagtggttccatcagctgggagagcctcagcatcttcattcattcatttcctttgcaaatgggcaaaagtatcctttgggggaaactcctcccctttactctagttctagctgtacagaaaaaaagccaccatcacccagcaggatcgtctttttttttttaatttaaaaaaaaatttagggacaaggtcttgctccgtcacgcaggctggagtgtagtggcatgattatagctgactccagcctcaaactcctgggtttaagtgatcctcccacttcagcctcccaaagggttggggtttacaggcatgagccaccacgcccagccacccagcagaagaatctcatcaaaccctccagcatgctggagagtgtcaaggaggcctcccctgaggacatgagtccctcccctgtgactgtgcccggactgagggtctttgatggctacagagtttcacggtgtccctacagagttggtcagctcaggaacccccaggtaaggactggcaggcagaggggctgctccctactgtgcacagcactacagaaagtgtggatggaggatgagctgctattcagtgctgaagcttgaagctcacactggctcccacagcttcttctgccatcccatcaccttattccatgcaatccaatgtatgtattttcctgggatttctctagttattcagagcagaaggaccagcctcaaggagttcaagtagaggtcagtctcatgggggccagacaggccgagctggccaccactcactcgcttccctcccagtacaagactcagacccgcatgaccatgattgagatgtctcgggtgccctcgagccaccccccccaggagccaaattcttcccaagagtccattatcccggggacagctgtcttgtgatcctgttccctggagaacacaggcacggaacaagccctgatccccttcggtgacgactcagtagtgtgcacagccaggaaaccacagaagacaggcagaaccagttctccagctgtagctacaagttaactataaaaagacccctgggtccacagggcagggctactcggctggctctggcccaggctcttgggcacaattctggccacagacgggaagcacagagaagataaccaatggtgtcacaaacaggttttccaagatttcaatctgggagacaggacacttcatccaggcttccggtttcaaaattggaagacaaatgtcctaaggggtcttgtcagttttgtatactggcacacagccatgatttacagaaacaggacttttggtctctcaccctggaagacaagaggaactaatcaaaatgggccaaaggaccagaaacttccagtggacatcacacttggacagatgagagcttagaaagcagctcaattgctgtgaccaaagttcggctcccccctcagtgacagtcctcctgggaaggaaggtaagagactcaaggagcctctggggtcctgctgggacttcccaggccagggctgtgctccagtggcagctatcctgaggccagggacattgaggggaacctctaaacaatggaaacagccaaagagatgatgagcgtaggtccaagtgcagccaggcagcctgaaaagagaaagggaaggtggagttctcagggacaggcttcagaggaagaggagggtttaaatgagtctcttcagtagggccaaagcaagttcatttcccaagggctaaaagtctgccatgtttttatgagttgtttgggttaaacctgggtcatgttgacctagatacatctccaagaaacaccagatatgggaatcttaataagaaagaatgagcaacatggttgtgatcttccaacagaaatacagtgcaagaggccgggtgcggtggctcacgcttgtaatcccagcactttgggaggccgaggcgggtggatcatgaggtcaggagttcaagaccagcttggccaacatggtgaaaccctgtctctactaaaaatacaaaaattagccgggcgtgatggtgggcgcctgtaatcctagctacttgggaggctgaggcagagaactgcttgaacccaggaggcggaggttgcagtgagccaagatcgcaccactgctctccagcctgggcgacagagcgagactccatctccccttcccccctccccctaaaaaagaaatacagtgcaagaaagtccagtttttttctcataacaatgttctgcttaagtttggagaaaatatgcattttcttaagcttgaaataaagtttggctacttttggatggggtctttgtgtcattcctacgtcagacaccaatctatactgttgccaggaggatggcgacatgattgatgggaaaaggaaaaacttcacacaggtgactccttagagcagggagcaaagcagtgacgcctgtcagaggcagaagcttccctggcaggactaatgacatttacagtcctcattgagagaaacaagagaaaaggcacatggaaactatactatgaatggaaaatggctataaccacagatgcagacaggattttaaagtaatggctattgtgaataactttgtgccaatacatttgaaaatacagttgaaatgaacaaagtcctagaaaaagaaattaccagtattgactcaagaaaaagcaaagaccctaaatagtcatataattataaattttttgttagtaataaaatatcttccgttcaaaccaaactctaggcctagatgacttcatcagcaagatctatcaaatattcaagaagcaatagttctaattttacacaaactctttcagagaattaagaaaaagaggctccactcttgttagaaggcaaacataaccttgaaaccaaaacctgtcaaggacattatgagaaagaaaattataagccaacttcacttgtaggcagagattcagaaatcccaaacagaatactagcaatatgtaaaaaagataatacatggtgactggactgggcacggtggctcacgcctgtaatcccagcactttgggaggctgaggcgggtggatcacctgaggtcaggagttcaagaccagcctggccaacatggcgaaatccagtctctactaaaaatacaaaaaattagctgggcctggtggcgtgcacctataatcccagctactcgggagggtcaggcaggagaatcgtttgaacccaggaggtggaggttgcagtgagccgagattgtgccactgcactccagcctgggagacagagcgagatgctgtctcaaaaaaaaccaaacaaaaggaaaaaaaaagataatacatggtgaccaagatgtgtttatctcaggagtgcaaagttagtttaataatataaaatcatttattgtaattaaccaaattaatgttaaagaagaaaaattacatgatcagcagggcatggtggctcatgtcagtaagcctagcactttgggaggctaaggcaggcagattgcttgaactcaggagtttgagaccagcctggttaacatggtgaaacctcatctctacaaataatagacacacacacacacacacacacacacacacacacacacacacacaaattgccggtggtggcacatgcctgtcatcccagctacttggggagctgaggcaagaggatcgcttgagcccaggaggttgaggctgcagtgagctgagatcatgccactgcactccagcctgggtgataaagcgagaccctgtctcaaaaaaaattaaaaaaaataccaattacatgatcaccacaataagcacagaaaaagcactggataaaattcaatatccattcatgattacaaagaaaagtcaggagcctaggaattaaaatgaacttccttagcaaaggatttattaaaatagttatagcatcatcatatttaatgacaaaaagttgaaagcatcccctggagatcataaacaagaaaaggccagcgcagtggctcacgcctgtaatcccagcactttgggaggctgaggcgggtggatcagttgaggccaggtgttcgagaccagcctggccaacatggtgaaaccccgcctctactaaaaatacaaaagttagctggacgtggtggcacacgcctgtaatcccagctacttgggaggctgaggcaggagaatcacttgaacccggggggtggaggttgcagtgagccgagatctcgccactgcactccagcctaggtgacagattgagactgtctgaaaaaaaaaaaaaaagagaaagaaagagaaactgtaaaaaaaggaaaaggaaggaagctgtacctctacttcacaccattacaaaaatcaattttacacagattgaaaacctaaatatgaagggcaaaacgatgaatctttaagaataaaatgagaatagctccattactaggggtaagcaaatggttgcatgggtgttcaatttagaattgttctttaaactgcgcaatatatttgatgcactctatttcaaacagccttatcaaggtatagcctacataaaacaaagtgtgtgttgcttaaagtatacagaggctgggtgtggtggctcacacctgcaatctcagcactttgggaggctgaggcaggaggattgcttgaggccaggagtttgagaccagcctgggcaacaaacatagggaagcctagttgctacaaaaaatttaaaaactagccaggcattgtggcatgcacttgtggccccagcaacttggaaggccaaggcaggaggatcacttgagcccaggagttcaaggttacggtaaactatgattgccactgtactccagcctgggagacagagtgagacctatctctaaaataatgataataataaagtatataattttgctgggcaccgtggcatgcgcctgtaatcccagctactccggaggctaaggcaggaggattgcttgagcccaggagtttaagaccagcctgggcaacaaacatagggaagcctgggcaacatagtgagacccccatctctaattttaaaaaataaataacataaagtataccatttggtccattttgacacaggtatgcacccttaaaaccaccacaatcaaggtaatgaacatagctatcaaccctaagagcttcctcctgcatctctgtaaatcctccctcccaacactccccgtatcccaatctccgggcaaccccgatcagctttctgtcactatagattagtttgtatgttctagagttccatataatcatacagtatatcctctcaatgtggcctctttcagtgtaattattttgacatgcatttaggtagttgcctgcttgaatatcatattccttttggttgctgaatagtattcctttgcatggatgtaccacaatttatcattcaccctctgaaggacgtttgagttgtttccagtcagaactactacaaataaagctgctatgaatataaaaattcacagagaggttaattctgggtcgagaatgcagattgaacagtaaagctgtagtaaagcagctttggggagaaaaaaaggggcataactcgacatgaatgggaagggcaggggatgacacaacaggaacaaggtttggagagccggacaaacagctctccgaatgtcagagggcaagctgcagagagggagcccagggcccaggaactggagctgggggcggagggggcactaaaataaagaggactgggtgaaggttggccgcagtgactcacacctgtaatctcagcactttgggaagctgaggcaggtggatcacttgaccccaggagttccagaccagcttgggcaacatggcaaaaccccttctctatcaaaaatacacaaattagccaggcgtggtggcacatgcctgtaatcccagctactttggaggctgaggcacaataattgcttgaacccgggaggcggaggttgtaatgagctgagattacgccactgcacttcagcctgggagacagagcaagaccctgtcaaaaaaaaaaaaaggaaaagaaaagaaaagaaaaaggactgggtgaaagctggttactaatggttactaagcactctgagctccgggtgctagggtaacctattgtcccagccactttcagtgctgccagccccatgtcctctgaacgccctcagtcccaggcaaacctctctgcccgtgtgcccctgggcaactgtgcctcctccatcctgacagaaatgggggactttattctctggagagggcaaaggagtcagtgaactgtgggacaccaggtccaattgaaggcagtgaaattgtacccggagcagagcgacgctgtgagccggcactgcctgcaagcactgagcgacgtcccctcccctgctctgctcccagatctctgcaaccaggtcccggccctccaggcagcttgttacaagtgtcttctctagggaatctgatgtccccagagcttcttgtcgttctcccagactgaaaggcaggagctgccaaatggaaaaggcccacagtatgccctgcgtgtggctgacaacagagcctcccccaggcacatcaccatgacatctcagagcacggaggacatgaggaaggttcaacgagcttccaaggagagttcagtgtagaggcaggaagcagaatggccggcttatatttttgtaatgaaacggtcagtcaagtgagaaacagcacaggctcaggaaaaaagagtcgatcatcctcacaggtcctagacatgggagacacggcccggcacacgaggccccatggggaagcaccagggggtcgggaggcagaatacaggggcgacaggaagactgaggccagagcctttactggggtttccacagcaaaggcaaggccagcagtttaaagagcttaagggcacagggcttgtccctggttgcctggcgcctggctctgggatgatgaaggcagagggaggacgaaagggcctgggctgctcagtctgcacaccaaaggcctgttagcagcagggcccttccttctctctaagaattggctggccctgggaggacagtctctccagccagaaagagtttttttgttttcgtttttggagtttttagaaaagatgtctaaacattataatatacaggtaatgtatgtgcacacacacacacacacacacacacacacacacagacgcaaacacacacacacaatacacacactgcaatggcaacacctggagctaatggagcaattccctccaaatgctggaggaaaatcatttccaacctagaattccacatgtagccacatcatcaacggcatcagtggacagaaggttgtcagacatgcacgttctcaaacatttctctcccacacactctttctcagtgcgccaaactcagggggtagacaagaacaagacgacaagggctacagggacaccagtgccaacagacaggagacacaaaggagaccccgggaggagggttcagcctgaccagctcccaggcttgagggcagccagcctggaacggcaaagtgtgacttagagacagaggtgtgcagtctctggttcccatcccagccctgtcaggtgcacgactgcagacccctgtttcccaggagtcgctaacaaccttgcccactggctttcccagaaatgaactgtcagggaagccgaggccaggccgtgacccagaaactccgtccagcttccttctcctgggagccttggcctagagaaagggcaagcggttgccctttccttactcaccacttggttttctatgcatcacctttcttgtgcatttctacaaagcgagacttccctgtcactccatctaaactcacaaccctcccactgcctgtcatgctagactctggggctagaacactgaagaaatccgcaaagatgccatttcctccttgacaccgataacaaaggcaagagaggtgcaagtgtgtttgcggaagttattcattcagtgaactgacatgtgagtgccgaggatgggccaggcacttccagatgctggcttgagccctgttcttggggcacgctcctttgagcggagaagaccaaagtgaacacctctagaatctggaacgttcagtagcgataggtgcttggaaggaaggcagagctaaggcggagagcaggaccaggtagcagtggcagtggcagctgctgttccatatgtgctggatggagagggtttctcagtggccaaggccatttgagtaattgattctgatttcctttgcagcatgatatattatcctcctttgtaaatttgtccttggaactagatagcgcacattctctgtagtgtacacagtttgacacatagttttagccagcttgtttccttctcttggttttgccccaagaaaaagactgtgtcatacttctgcccatttcttcttcacctacttccagcaaattgtgctttctctaataaatgctgcccggttcataaagattcattacagttacctctttatggcaaagtggtctccttattgacataaaattatacttttttgataccatttaatgttctttgagttctgctttgccagacaccattactacttttttcattaatttacatttattcacccaaactgaaagaggttgctgagagcagatgggtctctgaagagttcagacagttgttcaattaactggcacttctgagggacaaaccagtgacccttttcttggaatggcagggccatagggcataagtcagtagctggttcacaggaaatcatccccattttcgaaataagtgattatctggaaggaaacattctggaaccaagtctagcaaactcagatgcgaggagcaacagcggtctgaacagtggcggtgagcagttctccatctacgttgttgttactgtgagaaagccaaaatgtctaaagctgtggggtaacaacaagtgaaaagctgaacaaaccgaaaaatcaacagcttttcttagacctataagaaaagctcacttccactgccctggaagttggagagacagacaggtggatacagagaatcacgactgggcagaaacatccgtgggaaccactgctggaggggagacctgaactgtaattgacgaattgctggaggctaggtatggacaaatttcagagcgaaaaacttcaggggtggccactgatggggtgagcacacttttgtgagttttacctccaggagcttgaccaggttctcacagtaaatatcagagaataacttcctcatgcttctggcagggggagggaaaaggaaccattttgaaatcattacctccaacttctcagaaaccctggaagcaaggaaggagcagagtgaaatgttttcagtgttgagagagactctgcaccgacctagaattctgtactcccggaagttatccttcaagagtgatggagaataaagactttctcagacaaataaatattgagaaaatgtgttgccagtagacctgcattgcaggaaatggtaaaagaagtcctttaaagagaaggacaatgacatagggtagaaacttggatatatgtaaggaaaggagagcatcagagagggaataaatgaaagtaaaagaaaaacgtttatttttcttattcctgattgatctaacagctaacattttcttcaaaataataatagcaacaatctatttgattatgtagcctaatatacaggtgaaatgaatgacagcaatggcgcagggatgagagggaagcattaagattattgtgttattataaggtactcacactacctgggaagtggtacagtgttatttggaagtgggcttggattagttgtaaatgtatatggcaaactctagggcatctgctaaaaaaggtattaaaaaagaagtatagctgatatgctgagaaaggagagaaaatagaatcatatgaaatgctcaattaaaaccacaaaaggaagaaaaggagcagaaaacaaaaatagaaacaaaagcaaaaattagaaaacagcaccaaatatcattaaatgtcaatagtttaagtacaccaattaaaagacagagattggctgggcatggtggctcaggcctgtaatcccagcactttgggaggccaaggtgggtgcatcacctgaggtcaggagttcaagagcagcctggccaacatggggaaaccccgtctctactaaaaatacaaaaattagccaggcatggtggcaggcacctgtaatcccagctacttgggacgctgaggcaggagaatcacttgaacacgggaggcagaggttgcagtgagtgaagattgcgccattgcactccagcctgggtgacagagtgagactccgtctcaaaaaataaataaataaataaataaaataataaaagacagagattgtcagaggaagtcacaaaacatgacccaattatatgttgtctacaggaaacccatttgacatgtagacacctgtagattaaaggtaagtggatggagaaagatatatcatgctaacagataatcaaaagaaagcaagcagcagctatattaatttcagacagagcagacttcaaagcaaggaaagttatcatggataaaaaagggcattacaggctgggagcggtggttcacgcctgtaatcccaaccctttgggaggccgaggagggtggatcacctgaggtcgggagtttgagaccagcctgaccaatatggagaaaccccgtctctactaaaaatacaaaaaattagccgagcgtggtggtgggtgactgtagtcccagctactcaggaggctgaggcaggagaattgcttgaacccgggaggtggaggttgcagtgagccgagatcgtgccattgcactccaccctgggcaacatctcaaaaaaaaaaaaaaaaaaaaaaggcattacataacaataaaggggtcaattctccaagaatacacaacaatcctcaatatgtaagtgcctaacaacaaagtgttcaaatacatgaggcaaaaactggtagaacgacaaggagaaattgatgagtccattgacaaagttagagacttcaatacccctctgtcagaaattaacagatccagcaggcagaaaatcaggaaggacatagttgaactcaccaacaccatcaatcaacctaatataattgacatctatagaatactttatccaacagcagcagagtacatgttcttctcaagctcccgtgggacattcaccgagatggaccacattctgggccataaagcacaccttaacaaatgtaaaagaataaaatcacacagtgttttctctcagaccacattggaattaaacaagaaatgaataacagaaagataactggaagtccccaaatacttgaagattaaacaacatgtgtctgaataacacatgggtaaaagaagaaatctcaagagaaatttataagtattttgaactaaatgaaaatgaaaacacagcttactaaaatgtgtgggatgctgtgaatgcagtgcttagagggaaatttatagcattgactgcatatattagaaaagaagaaagatctaaaatgaataatctaagcttccaccttaggaaactagaaaaagaagagcaaattaaattcaaagtaagcagaagaaaaggaataataaaaattatggcaggccaggcactgtggctcatgcctgtaatctcagtgctttgggaggctgaggcagaaggattgcttgagctcaggagtttgagaccagcctgggcaacatagtgagaccctatctctacagaaaataaaaataaaataaaatttaaagtaaaaattatagcagaaatcaataaaattaaaaacagtaaattaatagagaaaatcaatgaaatcaaaagctggttctttgaaaagaataatacaatttgtatggctctcgctaactaggaaaaaaatagagaacacaaattattagtatcagaaatgaaagagagaacatcactgtggatcccatggacattaacaggataataaagaaatcctatgaacaactctatgcccacaaatttggaatctacataaaatgaatccattccttgaaagacacaatctgccaaaactcacacaagaagaaataaacaatctgaataggcctatatcttttttttttttttttttttttttttgagacagagtcccactctgttggccagactgaagtgcagtggtgcaatctcctctcacggcagcctctgattcccaggttcaagtgattctcttgcctcagcctcctgagtagctggaattgaagatgcccaccaccacagctggctaattttttttgtatttttagtagagatggggtttcgccatgttggccaggctggtcttgaactcctgacctcagatgatctgcccactttggcctcccaaagtgctgggatgacaggcatgagccactgcgcccagcctgaataggcctatacctattaaagaaattgaatcaataattaataaccttccaaaaaagaaagcaccaggcccagatgggttcattgttgaattctaccaaacatttaaggaagaaattacagtcatgtggcacatcagagccttccactcaatgacagaccacatatatgatggggattacaatgcttaggatatgtttagatacacaaatacttaccattgtgtcacaattgccaacaaaattagtacatgaacatgctgtacaggtttgtagactgggagcaataagctaatccatataggctacaatttaagtttgtataagtacactctgtgatgttcacacaataatgaaattgcctaatgatgcatttcctggaacatatccccatcattaagtgatgcataactgtataccagctctttatgatctctttcagaagaagctgagagaatacttcctaatgcattctatgaggctagcatcaccttgatgtcaaaaccagaagacataccaagaaaactatagaccaatatccctaatgaacatagatgcaaaaatcttcaacaaaggattaacaaatagaattcaacaatgtatacagagaattatgactatgaccaagtaggatttatcccaagtaggcaaggctggctcaacattcaaaaatcaattaaagaggccgggcgcggtggctcacgcctgtcatcccagcactttgggaggccaaggcgggtggatcacctgaggtcaggagtttgagaccagcctgaccaacctggtgaacctctactaaaaatacaaaaattagctggctgtggtggtgggtgcctgtaatcccaactactcgggaggccaaggcaggagaattgcggaggttgcagtgagccgagatcacgccattgcactccagcctgggcaataagagcgaaactctgtctcaaaaaaaaaaaaaaaaaagaaaagaaaaaagaaagaaagaaaaatttgtccaagcgtagtggtgtgctcctataatcccacctactcgggaggctgaggcagaagaatcgcttgaaccttggaggcagaggttgcagtgagacgagactgcgccattgcactccaatctgggcgacagagtgagactctgtctcaaatcaaacaaacaaacaaaaaacaaacaaacaagaaaattgggtcgaaaatctttagagaaacctccccaaagaagatagacagatggcaaataagcatatcagacgatgctccatatcatacattatcagggaaatgcaaattaaagcaacaatgagacgccagtacacacctactagaatggccaaaatccagaacactgataacaccaaatgctggtgaggatgtggagcaatggaaactcattccttgctggtgggagagcaaaatggtatagccaccctaaaagacagtttggtggtttcttataaaactaaacatacacttgccagatgatccagcaatcacactccttggtatttacccaaaggagttgataagttatgtccacacaaaaacctgcacatggatgtttatagcagctttattcataattgctcaaacttgggagtaatcaagatgcctttcagtaggtgaatggataaataaacggtggtatatccagttgatggaatatcattcagtgctaaaaagaaatgagctctcaagccatgaaaaaacattgaaagaagcttaaatgcatattacaaagtgaaagaaggcaatctgaagaggctacagactgtaggatttcaactctatgacattctggaaaagataaaactatggaaacagggagaatatgggaattctctgtaccttcctctcaattttgctgtgaacctaatagtgctctaaaatataaagtctttaaaaagaaatctggccttccctctccctcaccctgcaggggcaggtcctgttgcctgcctgtcccaggatccaggctcagctggtttctggctgggtttgaccataggagacccgagccggagactagagggaagaagaagtggggggagcagctcggcggcagctgcagctcctaccaaaaggcccctgtggttctaggccttctctctgtggccccccaacctcgggtgggctgtgctgatcccctatcaacctccaagtagtcctgggtaccctttccctggtatttagtgccctaagtcgaagtggtttctgttttcctggggcgactctaaactgatgaaatagtcacttggagactgatatgatttggatatgtgtccccacccaaatctcatgttgaattgtaatccccactgttggaggtggggccaagtgggaggtgattggttcacgggggtgggtttctcatgaatgatttagcaccatcctcttggtgctatccccacaatagtgagtgaattctcaccagatctggttgtttaagagtgtgtggcaccctggagccccagctactcaggaggctgaggcaggagaatcacttgaacccgggaggcataggttgcagtgagccgagatagcaccatccactgcactccagcctgggcaacagagtgaaactccgtctcaaaaagaaaaaaaaaaaaaagtaaccccgacaatgtaaaattaaagtgtagctgatgcaaaatggtcaaagataactttactagtgaaagctaatggaacaagagatttaaatgtattatttaaacatacaaagaactaaagataacagtggatggtgttacatacatggtcatatatcaggtgtgggggtccccaataccacctgcaggaacacccaggcctgctggagttaactcttgctacacagaaagaggagagaaatgtgtcccatccagcaacaaaaacctatccttccatgttttgtgtataggttgacgctaaaacctgaaaagcaaaaacaaaaattcacattagaaagtctatgtaaatattttcagtgccaggtcaagaagaggaatgctaggattatatttctttcttatacgtctaattcgatagtccctgagtcatttgaaaagagaactttcctagcacccaggtcccaatgattctcttcttaccatgaattaggaaaattatgatctattttactttacttctggcttttttcttttttctttattttatttttattttttgaaatggagcctcgctctatcacccaggctggagtgcagtggtgcaatctcggctcactgcaacctccacctcccaggttcaagcaattcttgtgcctcagcctcttgagtagctgggatcacaggtgtgcaccaccacacccagctaatttttatatttttagtagggacatgttggtttcgccatgttggccaggctggtcttgaactcctggcctcaagtgatctgcccacctcggacccccaaagtgctgggattacagacttgagccactgtgcccggcctgcttcttgttttgatcataactttcttttttttttttttttttttgagatggagtctcactctgtcgcccaggctggagtgcagtggcgctatctcggctcactgcaacctccgcctcccgggttcacgccattctcctgcctcagcccccgagtagctgggactacaggcacccgccaccacgcccggctaaatgtttgtattttttagtagagatgggatttcactgcgttagccaggatggtctcgatctcctgaactcgtgatccgcccgccttggcctcccaaagtactgggattacaggcgtgagccacggctccttgcggatcataactttcttgtatagttctttccttctggtatttttaattgcttttccttattttcttgtactatttgccatcatcgtatccaacttcagactcccaatcacaccatctaatatgttgaattcacatatacacaattttttttttttttttttttgagacggagtctcactctgtcgcccaggctggagtgcagtggcgcaagctcggctcaccgcaacctctgcctcccaggttcaagcgattctcctgcctcagcctcctgagtagctgggattacaggcacccgccaccatgcccggctaatttttgtattcttagtagagacggggtttcgccacgttggccaggctggtctcgagctcctgacttcaggtgatccacccgcctcagtctcccaaagtgctgggattacaggcgtgagccaccacacccggctatacatatatatttaattcttggagtcctctctcccagagcctaccattctcctactccaacctggactgattgccaaccaggctttctgcccagttggcatccctggtatttcccatcacagctctcctggattagatccattgtcttatggatcccacattttcctttttcttggcttgcacccttgatttgctgcagagcatccccaagtagcttcctaagaaagtacatttcagaggcaaattttcttagctcttgtgtatctaaaaacatttttattccattatcacacataatggatattttggatggtgtacttctatgtggaaaatcattttcccttggaatttggaaagcattgccctattatctttttcttttcttgttgtcctgtgatcttttatcattcagtgttgttatgaactctggtgctactctgattcctgttcctttttctttatttcatttttccataattcttgttagttgcttgccagacttcctagatcactcctcaaagtcctcatattttctctcatatctttgtctctattgttttgttctattttctgggagacttcttcagttttattttccaatatttctattgaaatttgaatttcaataattccttcttgttctctgattgctctttttacataatattctgttcttgttttatgaatacagcattttcttttagttctgtagatatgttaattaaattaaattttttgatacattccctgaattttcttgaattccaagtttatattttttctacaggtttatcttgactctttttcctgttgaaggctttcatcaaatttctgataatatttactgactggtttatatttaataaggaaggactggataagtattgtggatttaatctgctgttgggcaaataggtctgttttcctgctgtgactcttctctgtgtaggacagggaggtgacgaacagagtatcccctagatgccggaatgaggaaacaattgttcaggggttgtcagcatccatgctggaagccttagctctccaccgacatttcaatcaatttctttacagaactgtcaggtgttttccctgtaggtctgtgccagctcccagctcagctgtctggtggggagaggaggttccaactggtacagtcattctgtactggtgccttcaattaatccccatgtgttcagtcctatttaattctatcgttttctaccacatgcctactgattctgattgtctggtgttatatctagcaaactcactcccacttcttctgtggctcccttgtcaaatattctcacctggatttttactgcctattttattcatcaatcaattcccatatgctttctataaagttgttgtcctttgatgataacctctcatcctcaccacattctcttcactctggtgggtttattcctttcctttttttttttttttcagacggagtcttgctctgtcacccaggctggagtgcaatggcacgatctcggctcactgcaacctctgcctcctgggttcaagcgattctcctgcctcggcctcccaagtagctgggattacaggtgcgtgccaccaggcctggctaattgtttgtatttttagcagaggcagggtttcaccatgttggccaagctggtctcgaactcctgacctcaagcaattcaccctccttggcttcccaaagtgctgggattacaggcatgagccaccacaccctgcctcctttctgtttcttgacattcttcttttagtgcacttctatgagtaaagaaggaaaactgtgtgtgtgtgtgtgtgtctgtgtctgtgtgtctgtgtgtgtgtctgtgtgtctgtgtatgtgactgtgtgtgtgtgtctgtgtgtctgggtgtgtgtgtgttcatgcacatctgtgcctgctcatggtgtcttatatcagaatttattcatttcttatctattttctaacaaatatggttaaggctattaatttttctaggtgacctctgtagccttatctcctaggttttaatatgtagggctctcaatgttggtcatttcttttgtttttagagacaggggcttgctctttctcccaggctggagtgcagtggcatgatcccacctcagcctgttgagtagctaggactacaggtgcgcacgtgcccagctaatttatttcatttttgggaaaaacggggtctcactttgttgcccaggctgatctcgaactcctgggctcaagcgatcctcctgccttggcctcccaaagtgctgggattacaggcatgagccagcgcccctggcctggattagctcttctgaaatatatatattctctatcagtttaagagatttttagacaaatggagtaaaagtttgtgttgtttgtcatattgataaaatccttctggttgtgggctttctgtcaattaccatctatactagattttcctggtttttatcttctacagtcctgtttttaagaggaccttaaactattacagtcccattttttaaattactgatttttaattctaatagtaaataattttgattatagtatatttttcttttttttcttttttttgagatggagtcttgctctgttacccgggctggagtgcagtggcacgatctcggctcactgcaagctccgcctcctgggttcaccccattctcctgcctcatcctcccaagtagctgggactacaggcgcccaccaccacacccggctaattttttgtatttttagtagagacggggtttcaccttgttagccagaatggtctcgatctcctgacctcgtgatctgcccgcctcggcctctcaaagtgctgggattacagacgtgagccaccatgcccagccgattatagtatatttttctacttttcaatggcaagtgtgaaactgtataacttaagttccttctattcaacctaaggaatttagcaagattctcttcattattttttaatatttcaaaaacttcttgagttctagtcttgtacattattctttccaatctagatttaagttgttatagcccatgaaacttcttgacttttgattgagcaaagaatttccagagttattgatgaagaattaacatttctataatgttaatgcttcccctccaggaatacggtagcgtctgtttttgtttttgttttcttcaggtcttcttttagatttttcagtaaagttttatagctttttgatgcaggttttgacatttcttattaagtttattcccagctgttttataatttttgtagtgagagtgagttgaatcttttttccctcattacattttccagctttttattactggtcgtgtttacatgcctgcatcctaacaccggggaactgacttgaaatgggcctttctccccgcagagacgcaccaagaatgaggtttaaaagagaatggaagaaggatgtatgtggggctttttatttttgttttttaattgacacatatttagggagtacaatttgatatttcaatatatatttatgttgcacaatggtccaagcagggtagttaatatatccatcagctcatgcatgtaccatttctttgttgtgggaactttcaaaagtctctcttctaggtattttgtaacatacaatatattgctgtcaaccatagtcaccctgctgtgcaatagaacaacataatttttttttttgagacagaatctcgctgtgtcacccaggctggagtgcagtggtgtgatctcagctcaccaggttgctctgcctcctgggttcgagcgattctcctgcctcagcctcccaagcagctgggactataggcacccgccgccatgcccagctaatttttgtatttttagtagaaatggggtttcaccatgttggccaggctgcactcaagctcctgacctcaagtgagtcacccacctcagtctcccaaagtgctgggattacaagcgtgagccactgcacctggtcaaaacaccagaatttattcatcttatctaataataactttgtacctgttgaccaacctctgcccatcctcctctccccgatcctctccccagtctctggtaactactgttctactctctgcttctatgatatcaactcttttttgtttttgagattccacatatgactgagatcatgtggtatttgtctttctgtttctggtttatttcccttaactttatgtcctccaggttcattcatgttgtcttaagtgacaggatttcattcttttttatggccgaatattattccattgcatatatgtaccacattttctttatccattcacctgttggtggacacctaagttgattctgtatctggctattgtgaatagtcattcaataaaaatgggagtgcagataactcttccacatactgatttcatttcctttggatatataccggtagtaggattgctggtagttctattttcaatttattgagaaacctccatactgttctccatagttgactatactaacttactaccccaccaacagtatgaaagtattcccttttctccacatctttgccaacttgtcttcttttgtctttttgattaaagccattctaactgaattgaaggggtatctcattgggcttttgatttgaatttccctgatgatgagtgatgttgaactttttttcccctccctccctccctcccttccttctctttcttttttcgagacagggtctcactctgtcacccaggccaaagtgcaatggcacgatcctggctcattgcagcctcaaactcctgggctcaagtgatcctcccaccccagcctcccaagaagctgagatgacaagtgtgcacaaccatgcctggctaattttttgtttttttagagacagtggtcttgccatgttaaccaggctggccttgaactcctggactcaagtgatcttcccacctcggcctaccaaagtgctgggattacaggtgtgagccaaggtgcctggcgagatttttcccatatacctgttggtcatttaaatgttttcttttgagaaatgtctattcaggttttttgccctctcctaaccttttattttatctatctatctatctgtctgtctgtctgtctgtctatctatctatctatctatctatctatccatccatccatccatccatccatccatccatctatttcgagatggagtctcgctctgtcacccaggctgtagtgcaatggcacgatctcggcttactgcaacctccacctcccaggttcaagcgattctcctgcctcagcctccagagtagctgggactacaggtgcgtgccaccacgcccggctaatttttttttgtatttttagtagagatggggtttcaccattttagccaggatcatctcaatcccctgatctcgtgatccgcctgcctcggcctcccaaagtgctgagattacaggcgtgagccgtcgtgcctggtcacctttttttttttttttttttttttaaagacagggtcttgctttgttgcccaggctagagtgcaatgtgcaatcatagctcactgcagcctcaaactcctgggctcaagtgatccttccacctcagctttccagggagctgggactacaggtgtgtgccaccacgtctgtctaatttttaaattttttttgtaaagacggggtcttgcttcttgctatgttgcccaggcttgtcttgaactccagttctctgatttttaaaaaaaatcataagtagatgttgaattttatcaaatgctttttctgcatctattgaaataattatgtagtgtttttccccttaagtttgttaaggttgggtttctaattttaaaccatatttgcattcttaggataaaactcaactcggttgtgatagatcatatactgcaggattcagtttatttgtctagaattttaaaacttatttccacatcttgtgtcatacttttcttggctcatcatagtagatatattagtctagtaaaataagtttggagacatttatttcttttctgtgtatgattggaattgcctactcattaaagatttggtagaagtcatccataaagccctcttggtctgtttctctctctctctctctctctctctctgtgtgcgtgtgtgtctgtgtgtgtctgcgtgtctgtgtctgtgtgtaggaggatgggtagctttttaaatacatagtcaatttcattgtggttacagggattttctgtttctaaagtcggttttggtaagctgtactttcctaggaatgtattccttttgcttatgttttcaaatttactgacacacagtgcataataaaaccttttcatgagtaacataatttacttttctcttttctctttatatccagcttgttagagggttggcttttgtttttcagcttttcaaagaagcaggtttaaaattttctcaatcctctccatcatttgtttctatttcattaagttttattcatccttatttttctttcttctacttttgcaggcttactctgtcatttctttatggcttcttgaattggatgttcagcgtgatgacttttggactgctttagccgcatctctatacttcagcatcgcacacccaatggcttactcaacatctccactttcacaccactgggcaccccaagcttaatacagccaaagcagaactcttgatctgcacctctgaaaatgtacttttcctgtagttctccccactatggtgaaaagcacccttatttccccagttgctcaggccccaatctcaggaatcatccttgtttcttcccttgctctatgccctacatccaatccttttgttcagttctgaaaacatatcttgaatctcacaacttctcagagctgcactgctgccaccctagttaaagctaccatcaactctttctcctagactgttccagggccttgcaactagccttgtgctgtagttttgtttcatcacgtccagttctccactctacacctgcaacatagatcagacagctcctggctcaaaatcctctgagggcttctcatcttagaataaactctcggttctggccgggtgcggtggcttacgcctgtagtcccagcactttgggagtccgaggcgggcggatcacttgaactcaggagtttgagaccagcctgggcaacatggtgaactcccatctctatcaaaaatacaaaaacttagccaggcgtggtggttcgcatctgtggtcccagctacttaggacgctgaggagggaggatcgcttgagctcagggtggacgttgcagtgagccaagattgcgccactgcactgcagcctgggtgacagaatgagaccccatccccaccccccccaaaaaagaatgaactcccagttctcatagtggccccagctgcctttccaatcacattccctaccactctccagcaacactgacttcctcgttagtccccaacatgccaggcatagtctctcctcatgtcctttgaacttgcctggaatgttctttccccagatattcatatgagggagtaaaatgagggtgaaaaccagcagatatctaaatagcacccccttcacttagtttatctttctcaaagcccttatcactatgtgaaatgatatattatacttatttgtatgctagtatgaatcttcccggcaagaatgttagtttgctgtctgttcagtaccgtgcatccagagcctggaagagtgcctggcacatagcaggtagtcaataaatgaatgggggcaagcagccaaatcagaatcaggttttcttgctaagcatagaactaacagaaggatcattgaatggattggataatgactggcatcagggtaaggtccccttaacaaacactcctgtcctgaacacctggttagctaacagttttctcatactcttattttcccaaaacacaattgctggatctcagctccaaatcaactcttctaggaaagtgaaaaattgctggatctcagctcccaaatcatatcttccaggcagagctaacattgccccttattcacacctccaccaaaccatctgatccaacagtgacaggtgtcacgaggccttggcatgcactctcttcccccgccagagttctgcgaaagccagggttgcgatttgttgtcagtttattccccgcctctatgagagtgtgagcactgggcaggctcggatgaaataatgcattgagtaggcctctgaaaccaaggcccctcagctggggcaacgtcaggctccagggtgggcaactttgctgcttctgccgaagatagtgatattgagaaaatgtgggtgcaatgaaacgcttattgcagcgcactcggtgcatctgtggacagagggtcaatcgcccctcagagcagcgcaaacaggcgtcccaagcctaggccttcacttgccccagcatccgcaagggtccattaatccttaacattcaaattccgcccactaaaccagtccctccgcgcccaagccgcctcttttccccaaacgacggccgaaagcagccaatcaacagctggaggggtccgcccccttttccctggccgaaatggacaggaaatctcgccaattgacggcatcgccgctgagactcccccctcccccgtcctccccgtcccagcccggccatcacagccaatgacgggcgggctcgcagcggcgccgagggcggggcgcgggcgcgcaggtgcagcagcgcgcgggccggccaagagggcggggcgcgacgtcggccgtgcggggtcccggcgtcggcggcgcgcgcgctccctcctctcggagagagggctgtggtaaaagccgtccggaaaatggccgccgccgccgccgccgcgccgagcggaggaggaggaggaggcgaggaggagagactgtgagtgggaccgccgtggccgcgggcggggacccttgccggggggcgggggtcaggggcgggacgtggcgcgggaggggcccgcggggtcggacgacacggctggcggatggcgtccctcctctctaccctccccctcccgccgccgccggtggcgactctcccctcggcccgtcacccctgctcgcgggtgaccgtcctcggcgcggcctccctggagccgccttcgcctgacgcccctcttcctcccgccctcgacgcgcatcccggcccccggccccgcgggcgcccctgtcgccggggcttcgcctgtcggggctgcgcgcgctcctgcccttctcggggctttgggccgcggcgccgtcgcgcgcccgcggccccggcctctccctggatcgcgctctccccctccctccctcgcgcgccccctctcccgttactcggcccccccaccggcgcgcgtgcgcacttcgcctcccgtcgggagagtgcgccacaagggctcctgagctctcacccccatctctgggctttgcctccccctccttctcgcccattccatgaatttctgccccccgctacccccccgcgagcgagtaggtccaccggctcctttccccatctagcaggaacaagtaggtggggattattatccacaaaagggactagacattgtgttctgggtcccacaactcatcataaagaggtggttatagttcccatcaggagccgtgggtaggggactgtgcgtccagcagcacccgaggctcttcggcgccagaggctctaaggtgcgagcgtgtccccagggtgctcagaggttctttggagtgctgtggcctcggaatgtgagcaccctcccatcctaccctccccttcgccggcgatcttccagttacataagtggagtgggacatagtaggtaacgggctctcatcgccctggagcgctcgggatcaccggtaccagatggggcaagttcatcgcgacgctgtggctcctgttaattgtgcctgaaaggttatcctctgttcagtttggtcatgaccgaatcacccaaactgaaactcagatgacttttatatggcagtggcaatgtttctgtggttttgcactaaagacttaaggtcattatgaagagtgtaaaaggattgctgtcgcaggggagaccgtttatgacattgctaagtatggaccccgagggggaaaaagctcattctggaattgctctgtggcggttgcttctgttgcgagtgtgttcgggtgtgggttggtcacagcagaaatgggctccaccacaaaattgatattcctgactcatggtcaggcagatgtgtgcttctggttatttttccaggaacaggaatgggctctgccgagcctttcacacgttgtgtctctgctgtgcgggatcagtaccccagactgtgagataacaggatcgaattcaggggttggttggtgatccaggaaccatacctacttggatgtgatactgagtggcctagacgttgtaggactctcataagttttagacattttgttatactgtaaaaatgaagcatatacggcctcagtagtaacattgcactaataggtaattattactctagagaattttgggttccatggctggaatgttcatcagtatctcagcaatttcagttaataaccagattaagctgacctcttgagtcttttgaaatctgctgggtccctataataagacagggtctggattttttaatcttttgggaatttccaccaaggatttagggaaataggcttttatgggcttttcaggatttctatttcaaatcccaatgaggaagtctaggaaacacttgcttttattttcttgcctgaatatgtcagaaccttaaatcacccaatcaatctagaagtactacagttgattaaagtaagtcaccacaggtcacccattcgtggcaggtcagctaggtggctgatcactggaatacagtcatatccccaggcatacacacgagcctcacttgacgatcccaaagtttgtacatctgagcttgagacgtgacaagttgaggtctctgctttgttcttcatagttggcagtttgtctcctcgggtgcccctccggttagctgtttatcatacgtctagccctatcaacagtgcaggcagcttccagagtatagttttctctgcaaagtgcctggtggaggggtacctccttttccattgtcctaatggctccactgggcttccataccagccctttccagtgtcttaacagctcaaagaaacccatctgtggctttcttgttagcactggcctatcacaccttcctattgcctgttaactaaaattttgcctggaatgctttaagcttagagtactgggtctttgtttcacccgattgataggagagtgtcatgcagtcagccgaactccgacttctgtgctgtttaaatccttaggtaggtctggggcaaggcacaaaccactgtgtattcaaagggttatggtgcttgcattctgtgtgtatatgtttgtaatttccaaccagagtcgtttcccgtgcctgccctgcctctgtgcaatctagtctagtagggtagggaggcaagctgtggagtttgaaaaaaaaaaaaaaaagctagatgagtttaataggctgttaccccctccagaacattcctcccatgtggagatgaaacgagaagttcatttctttaacctaaaataaagaacaacagagataaaattgttagttccttattggagcctggtttccattgctaatgtacctgcttgggactctgcatgataaatgacgtgtcctggaacctgaaatcttttataaaggttaatatcagcagaaatcttttaattagctaagagcagcttgttctcaagctgcccgagttatcttggaggagagaatcacaggaaatgtttgatatttctagtaaccagtgttttcagtgcgtggggtaaagcacactcctagactggccagtcccaaagagtgtggcaggacacctgcttgttttccctgccctctgctatggtgacatccttgcagaccagtcttgcgtggctggcagacgcaatctttttttcttgggtagagcattatcaccgctgcgatggaaggaccttgtcctcggtgcctccataccagccctttccagtgaaactactgctgtcccggcaagcccctgtgcgtgtgcatcattccgggtaggacaagatgtgaacaggtccctcttctttgggcttaagtagaagttgtgctcttctgcttttacctgtgtgctcttctgcttttacctgttctcttctgcctttctcttgcaagaaacctgtcgaaagcttgctttgcatgccattgcttaaatactttgatggtatgtatggtatgtgggataactgagtgggagccggaattggggggtgggcagggcatccccacccccacccccacatcaaagggggaatgaccatttcgttagagaataaagcctgagtcttataacttcttcaagcacatgtatgctgggtctcctggcgtgtgaatgtgttcccgctgtgctgtgtggctgttttgcagttactgtagacactgtagtctgggctctcattattgcctctgaagttgacaggaccaagccttagtaaggatgcacttgtcttcctagcccaagagctaggggtgttttatatatatattaactttcttttttagatttcataaactgctctcattttctcttttctttctttctttttttttttttttttttgagacagtctcactctgtcacccatgctggagtgcagtggcacgatctcagctcactgcaacctctgcctcccgggctcaagcagttctctgcctcagcctcccaagtagctgggattacaggcacctgccaccacgcctggctaatttttgtatttttttttttttttttttttttttttagtcgagacggggtttcaccatcttggccacgctggtcttgaactcctgacctcgtgatccacccgcttcagcctcccaaagtgcagggattacaggcgtgagccaccgcacccagcctctggctcttttctttttgacatgaaatcttaagttaattatcttaaactttaagaactagaaggattcttagtccagcaccatcagtttacaaacaaaaaaaacttgtgtccctgagaagttgtgacttttccagggcctcctagccaggataccagtttggtttttattatatagctagccgagtaatactattaacttgacttctgggatttcaaagtattctatgacttgactgtttaagggaattatgaggcctcactgaacctcaaaagataattttaggtaccatcctggtagctgtagagcagcaacagaccagtaaaagacttggttggtgttgcccttcttctgggtttgattacatgagtaattgtgtgaatagtctctaagttgtatgctctgagctttcgtttttagcttataaaagtgctactcttgggccagcatagtatcagaaattagctaattcatatggggcagtttaggctttaactaggaaatgatggttatcttaatgacaaaaaaggtactgacaaaagtccttttttgaacatgtgttcaaaagaaaaagagaaactatcaaactaataactgagtttgttgaacatcgagattgactgatctgagaggcttaaaactgattgccctgaaatagacttgcatgttttggatgatggctttgggtctcccagagcacttggtttcccttggtgctgattttttctctcaggattaaagcccctttatgtgatgttgttacagcagcttattgcaacttcattcagctgcttgaaaaagaagggagactgcctctaggttccatgtgttctttcagggatggtattttgatgttgcgtattctcttgaacatgtattcttccctgagaatttctgtgtgccgtggtagaagaaatacttgccagaaatcgccactcatggtatgcttttgtagtgtcgaagtgtcccctagaggtgacaaggcttgtgatagtgttgattctaacaagcatgaatctttcctttattttagcactgtgtgttacgtgccagtaatttgcagcttatcctttgtttctagctaggtaagctgggaaatagcctagtactttgtctatgtgtttatcttcaaaatgtcccaaatagccctgggaaaaaggtcgtgcagctcaatgggggctttcaacttacaattttctttgttttaggctccataaaaatacagactcaccagttcctgctttgatgtgacatgtgactccccagaatacaccttgcttctgtagaccagctccaacaggattccatggtagctgggatgttagggctcaggtaagtaaccttcctttttttttttttagtatatgtcctggtttggccatctgttttttttttttttaaaaaaaaaaaaaaaaggaaaagaggaaaaaaatatactactcttggacagtataaaagtaccccaaagactaaagacataactgtgccaaactgtgccatataataaaaaaaagtcacttccctgagccctgaaaggtcagtgtgtgtagggttacttggtcgccacagcgtgatctgggggcgggcgtcagattagagccggaactggtgatctgcaacttcagttcaccttgaagcaggtcagctgagctgagagcgcttgcactgagcccttttgcgctgctgctgttgccttagcggtcttcagcatgtgtttgctttggtttggggtaaatggcttagtggtcaacattagtgagcagtggtaatgcattttcagatatgggaactggtatgtggttggttccctagaaggacaccctcctgaaagctgtctcagaacaccgggggccatggctaatgtcatgtgcttgctacactcctcccatggtaactaaagagagtacccagatatacatctggttcttgggactctagaggaggatgagtactttgtaaaaacctgggggccccagtcattctaggtctgacactcaggtgctgtatcagctgcagtttgaactacttggcaccattgtgtggactttagttttgtaaaaatgaatggttccttaatttctcaaccttcaggctcaacatctcaagctgtttgttgttgttgttgttgttgttgttttgttttgtctttttgattagtggtcactccgcatttgatgttttgacatgtggatttcagaacttctgtgtggtaaagcagaatgttccaattgaattttcccattttttttcccctaagcaaaaatgtgagttttcacttatgcggccattgtgattccgactgagaccctaagtcgttctttgttgtctctctagtggtttctgacacctcagtgtgaagctgttgtagacatccataagaaatagcctgcttagggattatgtgagggcaaggtttggctgaaggagaatagaaggtgtggaaggaagcggaagaccagaagagcatcacactgcctcaagtcccaaatttgattctgctcctgatcctgtgactcaaattgtcattctcttttactgctgtggggtgtgctctgggcccagctgacaggacattctttgtactccacgtatttatgctggtgggagttgtatggctagtgctttgtgctttgtctcagaaattgtgtggactaaatgtaatatgggcagtgaatgggtttcttctggaagatgttaggcctggagggtggtttgggtttttacgagtctttttctcagattacagattacgaatggatgttataaaacaggcagtgttgacaccatacagtttctcctaagaaatgtacagagagttcaacctgaggaagctaattgaaaataaacttttaaaaagaaatgtagaaagaggaaatttaaaaagtatcttatgaatgggaaagatgtagccatttgagcttcaaagaacttttgagggaattctcaaaggacagtacccgtctttagtagataaatgcttgatatctatttttcttcttttactttttaaagaattactaaaataatacatggatttatagaaaaatcaaaccacttaaaaattgatcaggtggctgggcaaggtggctcatgcctgtaatcacagcgctttgggaggcctaggcgggtggatcacctgaagtcaggagttcgagaccagcctggctaacacggcgaaaccccatctctattaaaaatacaaaaattagctggccatggtggcttgagcgtgtagtcccagctactcggaaggctgaggcaggagaatcacttgaacctgggaggcggaggttgcagtgagccaagatcacaccactgaactcctgcctgggtgacagagtgagactcggtctcaaaaaaaaaaaaaaaaaaaagtatcaggtaaaaaaatgaaagctccccgcttaatctctgctcccactacccagaataactgctgttaatagcttaatgtagatccttctaagtcttctaagactaaactgtgtactttttgtgttgtaattaacaggagggtttttgttttgttttgttttttctttttttgagatggagtcttgctctgtcatccaggctggagtacagtggcacaatcttggctcactgcaacctccacctcctgggttcaagtgattctcctgcctcagcctcctgagtagctgggattacaggcgcctgccaccacacccagctaatttttgtatttttagtagagatgggtttcaccatgttggccaggctggtgtcgaactcctgacctcaggcgatccacctgccttggcctcccaaagtgctgggattacaggcgtgagccaccgtgcctggcctcaggatggtgttatatatacatattctgcatttttccatctcatatattcatctctgcctcatttcttttaaatagcagtgtagtccagggctgacttaccgtcatgcatttcgttgtctctctatgttattaaaaatgctacaggattgaaattcctcatgtgccagtcattttgaagaatggctgcctagacttggaatttctggtggataccaccacatcactgtccaaaatggctatcccagttcccacaacagtctgagaaagtgccattttcccatatcgtcccagaattggatatacatcttttaaattggtgccgcttggattattactgaggctaaacctcaataatcattgtcatagctcttaatgtattaaagatgttaactctttgtcatgcagatattttcctgttttgtcttacgtcttgattcttgtctttctgatatataaaatttatgttatgatttattcttttgctttcatacttaggaaatccttttttactcttttttttttttttttttttttttttgagacggagtctcgctctgtcgcccaggttggagtgcaatggcgtgatcttggctcactgcaagctccatctcccgggttcattccattctcctgcctcagcctcccgagtagctgggactacaggcgcccgccaccacgcctggctaatttttttgtatttgtgagacagggtttcaccatgttagccaggctggtctcgatctcctgaccttgtgatccgcccgtctctgcctcccaaagtgctgggattacaggcgtgagccaccgcgccccgccaggaaatcctttcctactcttaacaacagatcaatagtcatctatattttcttcctaaaaaacctgatgatgtattatattcatacatacgtatttaatacatacaaaagggccagatgcggtggctcatgcctgtaatcccagcactttgggaggctgaggcgggtggatcacctgaggtcaagagttcaagaccagcctggccaagatggtgaaatcccgtctctactaaaaatacaaaaattagccaggcgtggtggcgggcacctgtaatctcaactactggggtgactgaggcaggagaatcgcttgaacccaggaggcagaagtttcggtgagccaagatcacgccactgcactcctgcctgggcgatagagtgaggctctgtctcaaaaataaaaaataaaaataataattttatagttaagttgccctgtgtttttcctgtgattaaaaaaaaaaatacctgttttgtatttaactttggggtgggataaggtatagcccacttagtcagttgtgtctaagccacttgatgaaccagtcaatccagtcttcacctttaacaaatgctgatttcttcaagtgagcaaaatatctcttaaactttttcctattttctctataaagttgcttttttctgaattttttctttatgaggcttgatgggcagccctatcagcagacaatcattcattcacccaacaaatatttgagtatctgcttcaagccaggggcagtgctaagccctggaagtggtatcttctccttatccgggagtggggctacagtgttcattccagaagactcaagaaaatagcagatcatcacaaaagtaggttttacataaatgaggaggaatccacagggttgtgtatatgtgtgtgtattttaaattctgacataagttggagctttagggtagactgtgacataagagtagtttgttttccaactcatgtaattgccggctgatttttgtcttgaattatgataatggtaacttctgttgaaacaattctgtattcatcttagcttggttgggatgcaataaaagttttgtactggtaaaaatgataattttcttccatgatgattttgaagcttttctgtaacacctgataaaaatagaggggccaggcatggtggctcatgcctgtagtcccagctactcgggaggatgaggtgagaggatcccatgagcccaggagttttaggctacagtgagccatcatcacaccactgtactcctgtactctagcctgggcagcctcgttctttagagtaagacactgtctctttaaaaaaaaaaaaaaagaaaaaagaaaaaaagaaaaggcttttagtgaatatatttttagggtagcaagtgtaatttttataaattgcattatttgaatctaataaataccctcaaagctgaagtcgaattctgattttgattgaaaatattttttacttaaaggaagagggatagaataaatgacacgattaaggaaaagacttcttgtataaggccggggttttttaaatgattttttgaatagttagatggacaatacggaattaaaaaggtggtgtaaaaagttatacggggctgggcacagtgactcacgcctgcaatcccagtactttgggaggccgaggtgggtggatcacctgaggtcaggagttcgagaccagcctagccaacatgacgaaacatcatttctactaaaaatacaaaaattagctgggcttggtggtatgcacctgtaatccagctactcgggaggctgaggcagaagaatcgtttgaacccaggaggcagaggttgcagtgagccaagatcgtgccattgcactccagcctgggcgacagagtgagactccatctcagaaaaataataatagaaaaaagttatatggggctgggcatggtggctcatgcctgtaatcccagcagtttgggaggctgaggcagcttgatcacttgaggtcaggaattcgagactagcctggccaacatggtgaaactccgtctccactaaaaatacaaaaattagccaagcgtggtggtgcgtgcctgtagtcccagctacttgggaagctgaggcaggagaatcgcctgaacctgggaggcagaggttgcagtgagccaagatcatgccgttgcactccagcctggacgacaagagcggaactccgtctcaaaaaaaaaaaaaaaagagttatattgtaaagtatctctgctaccctgccccaaacattcatttctttccctggaggcagccactattacctgtttctttaaaaaaaaaaaaaaattgtggccgggcacggtggctcacgcctgtaatcctagcactttgggaggtggaggtgggtggatcatgaggtcaagagatcgagaccatcttggccaacatggtaaaaccccatctctactaaaaatacaaaaaattagccgggcatggtggcgggcacctgtagtcccagctactcgggaggctgaggcaggagaatcgcttgaacctgggaggcagaggttgcagtgaactgagatcacgccgctgcactccagcctggcaacagaatgagactccatctcaaaaaaaaaagcgtgtgtgtacccgtgtgttaaatttttattataaaatatatataacaggctgggcgtggtggctcacgcctgtaatcccagcactttgggaggccgaggcaggctgatcacgaggtcaggagatcgagaccatcctggcgagcacggtgaaacctcgtctttactaaaaatacaaaaaattagccgggcatggtggcgggcgcctgtagtcccagctactctgagagcctgaggcaggagaatggcgtgaacccaggaggcggagcttgcagtgagccgagatcgcgtcactgcactccagcctgggcgacagaccgagactccgtctcaaaaaatatatatcgatatatataacaatttacagttttaatcatcttaactgtacagttcagtggcactgagtacattcacattgttgtacagccattactaccatccatctctacaacctttcgtcttgcaaaactgaaatttcatacctattaaacactaactcccacttctcccctttcccccaccccaccctctggcaactactattctactctttgtctctattggacatatttttgtgtgtttaggtttgtgtatatattttacatgtgtgtataaatacacaagggtatgtgggcgttgtgtttttacacatactataaaatattgtgcacatttgtttattttaatgtatcctgtagattatttagaatcggttcatacagagccgtatcattccttttaagggttgggtttaaatagtctgttatggatgtaccacaatttatttaaccagtttttaaattttttacttattttttttaatgtttttttagagacaggatcccactccatcacccagactggagtgcaacagcatgatcatagcttactgcagccttgaactccggggctgatgtgatcctcccacctcaggctctcttgtagctgggactacagggatgtgccgccatgcctggctaaattttttatttttatttttatttttatttttggtagacacggggtttcactgtgttgcccaggctggtcttgaactccttgggcttgagtaatcctcctgccttggcctcccaaagtgccgagattacaaccatgagccatggagcccgacaagagtagccttttatttgcagaccattagagaaaaagttgcgtgtaagtagataagcatacgaatttatcactgcaatactgtttgtagagatcacagagctgttaggctaggaagaagtttttagcagttagcactagaaagcaaaactttggaaacttccatttcatcaaaagtgacctcatctgagtagggcatgtgagggaaggacctttttactcgacaaggggaacttgcccagttcttgtttgtgaaccttgaagaaagtggagcatttttattttgggaccattctaggttgtggtagttccttggtactcggggttggagaatctccctctgctgctggaccttctgcctcctcatgctgtaatatgcataagaggtgtcctagaagtattcaggaacaggctgtggttgctttgttgttctgtgactgttgaactctttatatagcagtacttttttaagctgtactaattgagcatttattatgtgtcagttactgtgctagctgctggaaactatcctaccctcagcagtcttctggtctaatgggaggtacagacaggcaaatgggctatgactttacaagaggctaacttctgtgatggagagaagttccagccactaagggagcacataaaaatcagaggagatcctaccaagaattgggaggtaggtcagggaggagacttctttgaaaaatggcatctaagacctgaacagcaaggaaacattagctaggtcaaggacaaagcatcagtggggagagatgcatgagtcttttggaaggaccagcatgtgtagaggctctgacaggagagaatctctcaggcccattcagagagtccactgtgtgaagacgaggcatgaacaaccagccaggacatgtggagaggagcatttttctttttttcttttttctttctttttttttttttttttttttgagacgtctttctctgtcacccaggctggagtgcaatggcatgatctcggctcactgcaacccccacttccagggttcaagcaattcttctgccttagcctcccaagcagctaggattacaggcacccgccaccatgcccggttaatttttgtatttttagtagagacggagtttcaccatgttggcctcaaactcctgaccttaggtgatctacccgtctcggcctcccagagtgctgggattacaggtgagagcccccacgcccggccaggctcggctttctttccaggccccgtcacactcttagatgttccctgggccccagaaggcagcgtgaggtgctctgcccatctatgctgtccttttccaccccaccctatccactgggcccctggggctcccactccactccaggtctcttcatggacccttctttcccttcacttctgtcccaggagacctgggagactcatgggaacaggcatcatcttctccagcacagttcattgtctaatgcacgaaagtgctgggctgtgagaaggtcaggagcttacatggaatgggagtcagctgtggtacaaagtacgctgcttagttctactgattttttattttttatttttacataagactttgatggtaaaggaagcagtgtgtgagcaagctgactcctgtcttgtcaagtaccaggtccactctgatgagcccctgtggacagcactgctgtaactccccaagcctgggctcaggaggtgggccctaagcgctgttcccagctcttcctccatgctgtcagctcttccaccattcttcctggcgtcattctaaggtcctgtcttcccccgccctcttccttcctggcttctacgctcagctcaagtagtagctgtttgggtacttttcacccagacttaggaaatgttatcagttggtcgtattcctgtcagccctcttactatggaactcaaataggacagattcagctgaattcccagccctgtggttgcactctttgtctgccctgcttccccaaggtagcctgctccctaaaggtcaccgagatactccccatgcaaggtttttgttgtattacacatgacaacatggaataaagtgttttgcaaatttactggatgatatcctactatgtggaacatcctacaacttactcttttcactcaacatttgacttttgaacctggtctgtactgctccgtgcagaccaatgttcattcatttgatatgtctccttgtgccatagaaatagttttacaatagaagcctgtccagagccatgagggagaaggggattgtagagaaacaaggattggcatctggtttatgtttacatcctttagtcctgttaaccgagaagaagatatttttatttccatgtttgcgaaagctttccacaaaaaaagcatccattttctagacttattaatagggcagtccaaaggttttatttttagatttgaaagaaagcaaagtaggcttctgagatatgcacatttccctgtgtccctgtctcttttgcaacattccacattgctgctaaaacttgaacatgagcactttcaagcatgtgcttactttctatgtatgactcattttttaaaacattaaagcattttcggccgggtgtggtggctcacgcctatattcctagcactttagaaggccgaggcgggtagatcacttgaggtcaggagttcaagaccagcctagccaatatagtgaaaccccatctccactaaaaatacaaaaattagccgggcatggtggcgggcgcctgtaatcccagctactcgggaggctgaggcaggagaattgcttgaacccaggaggtggaggttgcagtgagcagagatcgagccactgcactctagcctaggtgacagagcgagactctgtctcaaaaaaataaaaataaagcattaaagcactttgtctggtggtatgtaagttttggcattacttagataagttgtattttaagtctttctacacacaataacttatttttaaaatacaagtttctgtgtacttccgggttttgtgtttttgtaaacagcagaaggtattagtccatattaagtactaatttgttctaatattttcagctgtttttggaattacacttggcaaaaaaatagacaaatgtctgcagttgtgacagtttgtttttttgttctttttaactccagaataaataattctagtgagtttttttcttggcttgtaagaacatgggaatgattagagtcatcataacacttaagtagttatagaaggttgaacatctgtagtcagttgtataaaatttcctagtcatccttccaggttgtttaagacaaacaaatacatagtatttattaagctcttataaattttaattgtaaaacatcattgtacaaaactttgaaaatgcgtataggtacaaagataaaaaattaggccaggcatgccatggctcacgcctgtaatcccagcactttgggaggccaaggtgggaggatcttttgagcccaggagttcaagaccagcctgagcaacatattgagaccctatctctacaaaaatatcataaaacaaaatagaatcactctggcgattccactatccaaaaaaaaaaaaaactgctgttaatatttggtatgtatctttctagaccaaggcctccaactttggttgagaattcagccgggtctgtgaccttggatgggaaaaacattcactctttattttcactaatgtctctgaaaacccagatttttagctgggcatggtggctcgtgcctgtaatcccagtgctttggaagcccgtggagggcagatcacttgagcccaggagtttgagaccagcctgggcaacatagcaagaccctgtcttttaaaaaaaaaaaaaatccagccgggtgtggtggctcatgcctgtaatcccagcactttgagaggctgaggcaggcagatcacctgaggtcaggagtttgagaccagcctgaccaacatggtgaaatcctgtctctactaaaaatacaaaaatcagccgggcatggtggtgggcgcctgtaatcccagctactccggaggctgaggcaggagaatcacttgaacccggaaggtagaggttgcagtgagccaagatcacaccattgcactccagcctgggcgacagagcgagactctgtctcaaaaaaaaaaaaaaaaatccacattttcttcaatgacaattgtaagcaacagatcatggtagtattagaatagcagtgactgtcaccagtagagatcaaagatactttcatatcatattatagttgttacagatattttgaaatatatatgtccatcactgcttcaaacttaaggtaattattagacccatctctagatctggttatttaatgatttactgaagaagcacatattatttgagaacgaactcttgaaatatgttgttaatttctgtgcattttacacatttcaaaacattcttctgaggaggggtccagaaggccaaaagggtccatggcagaaaaaggttaagaacacctgttctgtactttgtaccatgtggctacaaatataaaaacagacgttaagccgggtatggtgatgcacacctgtagttccacctacttgggaggctgaggtgggaaaatcacttgagcccaggagtttgaggccagcctgggcaacagagcaagaccccatctcttaaaaaccagtcagcacttgactagtcagttagtgggggaaaacacaggtacagtaaaaggagtcaaaattacacttaaacttaggtcatcttattatatcaaacatttattaacatgtttagtgttttgtgtatattatgcaaagtgtaatgcaactaaaactgtttaacacttctcgatatcacataaatttgttggtgcataatagcctaaaagttacttttgctgttggcattttattttattacttacttatttatttatttatttatttattttgagacagagtcacactgtcgccaggctggagtgcagtggtgcgatctcagctcactgcaacctctgcctccctggttcaagcgattctcccgcctcagcctcctgactagctgggactacaggtgcgcgccaccatgcccagctaatttttgtatttttagtagagatagggtttcgccatgttggccaggatggtcttcatctcttgaccttgtgatctgcccacctcggcctcccaaagtgctaggattacaggcatgagccaccacgctgggcctgctgttggcattttaaacatccttctagagtctttcttatttgcctgtaagcacgtacacatgttgttgttgttttgagacaaggtctgtcgcccaagctggagcacagtggtgcaatcacagctcactacagcttcgacctcttgggtgcaagtgatcctcccaatcagcctcccaagtaggtgggactacaggtgtccgctaccatgcccagctaatttttgtattttttttgtagagacggagtttcaccatgttgcccagactggtctcaaactcctttgctcaaacgatccttccgcctcggcctcccaaagtgccgggattacaagtgtgcacctctgtgcctggcccacatgttgttttagatgaatgagatcatatatgtacttttgtaacttgctacctttcctcaacaaaatgttgtaaatatccatgtccataaaaatagacgtatatcttcacttttccctaaaatgaaaataacttaacttgcattttcttttttgtttttgtttttgttttgagacaggctcttgctctgttgctcaggctggagtgcagtgatgtcacagctcactacagcctccacctccagtttcaagtattccacctacctcagcctccaagatagctaagactacaggcacatgtcacgacgcctggctaatttttaaaatattttttgcagaaatgggatttcactatgttgcccaggctggcctcaaactgctggcctcaagtgatcttcctgccttggcctcccaaagtgctgggattacagtcgtgagccactgtgcccagcctgcattttcttattataaaagtaatacatgttcaatggacaaaaaattttcagaaaatatgcaaagatgaaaagtaaaaattgtccataaatctgtcatctacagataaagataacttctggataatgtttttctaccatcatttttagtaatcacataacatttcgttgtatgtctatgccttcatttaattaagaggcatttccattatttctgcatgttcatgactctgaatgatgatatgtctgcctgctgatggctacaaccctgtttctgcatttcaaacctctctcttgagctccagatttgatggcctcgtcagcatttacttgagttgctcataagtgtctcaaatttaacaagtcccagtcttgatttttttcccccttcaaacctattcctcatgttgtctctatttcagtaaacaatatcaacatccacccagttactcagtccaaaattctaggagtcatccttgattctgctctttctttttttttttttttttgagacggagtctcgctctgtcgcccaggccggactgcggactgcagtggcgcgatctcggctcactgcaagctccgcttcccgggttcacgccattctcctgcctcagcctcccgagtagctgggactacaggcgcccgccaccgcgcccggctaattttttgtatttttagtagagacggggtttcaccttgttagccaggatggtctcgatctcctgacctcatgatccacccgcctcggcctcccaaagtgctgggattacaggcgtgagccaccgcgcccggcctcttttttttttttgatacggagtctcattctcgtcatccaggctggagtgcagtggtgcaatcttggctcactgcaacctccgcctcccgggttcaagcaattcttctgccccaacctcctgagtagctgggcctggctaattttttgtatttttagtagagatggggtttcaccatgttggccaggctggtcctgaactcctgaccttgtgatccgcccacctcagcctcccaaagtgctgggattacaggcgtgagccactgcacccgccctgattctgctctttctctcatcatccctgatctgtcagcaagtcctgttaggccaaccacttctcagcatctgcactgccagtatgctagtccaagccacaaaacacctctcagaggtacgcaacaggactttgttgttgttgtgtgtgtgtgtgtttttttttttttacggtagaattattttataacttgaagtgtagggatgaccttccttttaaaattttatttattttcttaattttttattcccatagattttaggggaacaggtggtatttggtgacatgagtaagttctttaatggtgatttctgagattttggtgcacccatcacccgagcagtgtacactgaacccaatttgtagtcttttatccctcaccccctcccaccctttccctcaagtccccaaagtccattgtatcattctgatgcctttgcatcctcatagcttagctcccacttatgagtgagaacatacagtgtttggttttccattcctgagttacttcacttagaataatagtctctagttccatccaggttgctgtgaatgccattaagtcattcctttttatggctgagtagtattcctttgtatatatatgccacaatttctctattcactttctgattgatgggcatttgggctggttctatatttttgtaattgtgaattgtgctgctataagcatgcgtgtgcaagtatcattatgcaacgggacttcggatgacatattgaacaacttcctcactgatatccttgtgaaacgctacatatttcatgggtctgtttgttataccaacactcaattctgaatgatggaattatttcacatttagtctctttttcatctagccattatagtttagtttaaacaccaagttccattcctgctgcatgctgaaggatttgcagtacatcaggctatagtccatcaattcattccacaattgagtaagtaaggtatctatagtacctcaggccctgtgttaggcagggatggggtaacctagacagatttggtacctgtcctcatggagcttgactttagcggcagagacagatcttagataattgtaccagtacttaagtgttcagaaggacaagtatggaggtgggagccactccagtcctctacagtcacgtgctgcacaacaacgtttcaaccgacaacagagcacacatacagtggtgttcccataagattagaatgccatatttttactgtaccttttctatgtttagatatacaaatacttaccattgtgttccagtgatctacagtattcagtatagtaccatgctgtacagttttatagcccaggagcaataggctatataccgtatagcctaggtgtgtagtatgctacaccatctagatttgtgtaagaacactctctgatgttagcacaaataaatcgcccaatgacacatttctcagaacatatccctgttgttgagcgactcatgactgtacaatgggggaacagctcagcctgccttccccaaggaggcaacgccgatgcagggaaccgagggttgaacagaagtgggcaaggtgcagagaggaaaaaggctttccagatggagaagagcatgtgtgaaggccctcagtctggcaagagcttagtcctgtgtggcaggagctgaacgaggggttaggggagagtggcaaagggtccgggccatcagagaggtcaacaggggctggatcatgcaggattttgaatgttaacatcagagcgatagaaaacatgaagggtaaggtggtttgggttttgaatttttatcaaaatattgcaactactcggcaacaagttagatataacaaaagaggtcatcgtaaaaacagcagtctaccccttccccttcccttccctgactcagacatgacagcttttaactgtttctgattttagttcctttgatggttacctccaaaattaaatcatatgcttatacatctttcttgatttgccaactttagggaactgtgttaactccctgaaatgaaagagaatgacttagcttacgttacctccccatgttgaaattcatattcacatttctctgtaattttttttttgagatggagtctcactctgtcgcccaggctggagtgcagtgatgtgatctcggctcactgaaacctctgcctcccgggttcaagcaattctcgtgcctcagcctcctgagtagctgggactacaggcgcacaccagtgcactgggctaatttttgtatttttagtagaggcggggtttcaccatgttggccaggctggtcttaaactcctgacctcaggtgatctgcctgccttggcctcccaaagtgctgggattacaggtgtgagctaccatgccaagcccacatttctctgtaaattttaaacagtattttagtccatatgtcagttcccctctgtttaagataaggatattaataaccctacttttccttccactttccctccttaacttctgcgtcttaaaagctgtacttgaccatacccattcttgcatttgttaacatgtgtgttctgccctgcaaccacagccaagttgtagcttaattctaaagtcgaaaataacattatttacattattacacatgtgagtattgttcttggcgagaccaaataatgaatgtgcccaggattacatttccttctttacagatctggaccactcaaaggagaatgaccaatcaaggtcaaatggattcccttttcttagactctgtcacctgcttaaaatccttgctaggatttaatctacttcatattcaaaccttggcttgcttatatagctctttgttttgcccaccatttctagttgcctttttattttgtttactattcctccttgattatgttgtaaaatgctattagcagtgctgtttatttcgtacgattcggctttttccccactgaagacctttctcttggaaggcctctgcccttctgcaatctgggcaagtatctgctctttgatttaaggttgcatatacagctgtacctggaccttctcctcactgggctcttgggttggagcccgtgtcttaaaacccatatcttcctttcacatggtttactccctcgttttctggactgcatccttaaataatgtgctcagatagagtgcatggggagtaaactgtagtggataccgttgtcacctaccccatatccatttcttctttgcccattcctaacagaatcctgatattattcacctttctaccttattcccaacttcagaaaggatccttaagtcattccacacattgcattcctttggcaactgttactggtcaaggatggacatacgatctaagttggttcactcagactgaagggaaggacttccatggcacgttcagggaagactttctctttttctctcactggagtaagtgagaaaggtgttgctgggggctcttctgtaacctcagactgagggacaaagcctgaggataaagcctgctcaccaaggaaggcggagcagagaaacgggaagaacctgggtcttgatgccgttgcttagctggtgattgcactgtggctggggcctgtcctacctgagctagggactcagataggatggactttcttactgaatgagccagcttcagttttcttttctgttacttgtaaccaaaagcattgtaacagataggtcttctgagtcactgcatgcctgaaatacctttcttctactcttacacttgattggctgagtatagggttccaagttgaaaatcattttttctcctaactttggaggcatctcttctagtatgcagagtaacaaatgcaacaaatgcctgatgccaatcttattatggttcttttgtaggtgcccttcttttctcttccttccctggaagtttttaggatttcgtctccttatttttagtgtcctgaaatctcatgagaatatgtctagagttgtgtcttgttcactcgttgtactgtggtcattcaatctgaatacttttgtcaactcttttttttaaaaaaaaattactaatttacatgctttcattttctctatggggactactgtttaactttggacctcttatattggtcttctgtcttctctcatatttttcatttattgggcggtggggggtgctctgaattttggaagatctcctgcatttattttctttttccttttttctttttttttgaggcagagtcttgctctgtcacccaggctggagtgcagtagcctgatctcggctcactgcaacctctgccttccaggttcaagcaattctgcctctgcctcccacgtagctgggattacagacctgcaccaccacgcccggctaatttttgtatttttaatagagatggggtttcaccatgttgccaggctggtctcgaactcctgacctcaagtgatccgcccgcctcagcctcccaaagtggtgtgagccaccgcacccagcctcctgactttattttctatcccttctgttaaattctttatttcagccaaacctttttttttttttttttaacttactgtgaagcctgtgtgcctactgcctagattagacaattgttaacattttggcgtattttcctggtctgtatagatagggtgcatttttatacctttttgctcaccatttaaaaggaactcacagatgtcacgacatttcacccctaagtacttcagtatacatctcctaaaaataaggacattttccaatataagcacaataccccgatcacatctttaaaagttaacaataattctctaatgttatcaggcacccactttaaattcagatttcctccaaatgtctcttatcgctgttgaggggctccaaagcaattaagatttatacattgcatttgaatatgcttcctttgtctcttatttatttatttattttattttgagacagagtctcgctgtctcccaggctggagtgcagtggtgtgatctcagctcactgcaacctccgccttccaggttcaagcgattctcctgcctcagcctcccaaatagctgggattacaggtacgcaccaccacgcccagctaacttttttgtatttttagtagagacagggtttctactaaaccatgttggccaggctggttttgaactcctgacctcaagtgatctgcccgcctcggcctcccaaagttctaggattataggcgtgagccaccatgcccagcccctttgtctcttttaacaagaacagcctacccacctctccttcacttgtgatactgactttttgaagcagtcagcccaattgtcatctagaagggcccacattttaagatacatatttttagagatggcgtgtcactatgttgcctaggctggccttgaactcctggcctcaagtaatcctcctgcctcagcctcccaggtagctgggactacaggcttgtgccaccacgactagctggcccacattttagatgtctctcttttcttgtgatataatttaacttgtttgtccatatatattacttgtagacaagaagttaggtctacaggcatgttcaggttaaacattttgggcaagaatatttcataggcagtactgtgtacttcatatagcatcagctcaccaggcacttaatggttggttaccctgtggtttgtgatgctacgttttaacacttgattaaagaaggaggtgactgccaaatctccccattgtagacatacagttttcctgtggtaattgatatataatctgtgatgtgatgctttggcaccatacaaatatcctattgcccaacagccatttgcataattattttagcattcattgatccttgcctgaaaccattattacattgggggttgcaaaatgatagtttttttaattgtcacctcttctacatttagtactgtcattcctctgtaatgaattttccctcatcaaataaggaggcattatatttcctcctaaaaagacagtatagatgcttaatctttgcctttattacatttcagagtaaggagttggtagaataatcacctcaaatggtggcaaaatatttgctgttgtgtttccttttctctttcatgtcaatatggactcatagggatttatttattaaatgttttacaattcaaattgggtcaacaagagtcccttcatgttggttcctatattctcctggcataccctcattaattagtctttgagcaatttcttgttttctggcacaagatattccatcccaatatgtgcttttcgtgtcctagaactgattccaaggagctctggttccttatagtggcaacggtatttagaatccaacatgtgggtactaaatgtgctgattcttactggggtaacattatatctaggcactttcagaggacatcgctagaaaatatattcagtttttattttttatttttaatttttttgtagagacaaggtctcactatgttgcccaagctggtttcgaactgagctcaagcgatcctcccacctcagcctcccaaagtgctgggattacatctgtcagggcaaactgctggtaaatattttcacaaaagaaaaataaaaaaaccaaagtgctgggattacagatgtgagccactgtgccctccattttttttttaagtcataaatacataatgatgtcttctatggcaatttaacattacagggttcttccttaacttttttttttttttttcttttttttgaggcagggtcttgctctattgcccaggctggagtggtgcagtggtacaatcctaattcactgcagcttcaaatgcctaggcttcaaacaatcctcctccctcagcctcccgagtagctaagactacaggtgcatatcaccatgcccagctaatttttaaaaattttttgtagagatggggggtctcgttgcgttgcccaggctggtctcgaactcctggcctcaagtgatcctcccatctcgatttcccaaagtgctgggattacaggtgtgagccaccatgcctggccaacttttatttgatctgtatatatcttttccttacactgaaaatgttgggtcttactaatgttaacatagttacttatttgctttatcttgtaatagacataaaattacaaaattataataccaatattacgataaatagctgggcatggcggcgctcgcctgtagtcccagctactcaggaagctgaggtggagggactgcttgaacctaagagtttgaagctgcagtgagctgtggttgtgccactgtactcctacccggacaacagagtgagtggggggaaaaaaaagaaataatggaagatccagagaaagccccaaatatttaaaaattaaacaatacactttgcagcttcctcacctctctcagccttcatagaattgaagagagttagggccttgcactagattaggctttgccttaaggaaatgttgtgtttgatttgatcttttatccagaccattaaaacttccttaacgtttattagtaataaggctatttcactttcatatcatttgtgtgttcactggagtagcacttttagtttccttcaagaactttgattcacaacttggctaactttggtacaagaggcctagcttttggcttctcggctttcaacatgcctctcactaagcctgatcatttggtttttggtttaaagagaaagacatatgactcttccttttacttgaatgcttagaggccattgtagggttattaattggcctaatttcagtactgtcttgtccaagggaatagggaggcccaaggagagagagagagatgggggaacagctgattggtggagtagtcagaatatacacatttatcacttaagttttgccatcttttctttttctttttcttttttttttttgagacagtcttgctctgtcacccaggctggcatgcagtggcatgatctcagttcactgcaacctctgcctcctgggctcaagcaattctcctgcctcaacctcccgagtagctggtattacaagcgtgcgccaccatacccagctaatttttatattttttagtagagacagggtttgccatgttggccaggctggtctcgaattcctgacctcaagtgatccacccgccttggcctcccaaagtgcggggattacaggcgtaagccactgccgcctggccaagtttgccaccttttttattttttttattttttgagatggagtctcactccatcacccaggctggagtgcagtgatgcaatctcggctcactgcagtctctgcctcctggattcaagcgattctcctgcctcagcctcccgagtagctgggactacaggcatgtgccagcacgcccagcttgttttttgtatttttagtagagacggggtttcaccatgttggccaggctggtctccaactcctgacctcaggtgatctgcccggctcagcctcccaaagtgctgggattacaggcgtgagccaccccgcccggccaagtttgccatcttttatgggtgcagtttgtggtgccgcaaaatgatgatagtagtaacatcagagagcattgatcacagatcaccataacaaatataataatgagaaatttgaaacattgtgaaaattaccaaaatgtgacagagacatgaagtaagcacatgctattggaaaaatggcactggtaaacttgcttgatgcagggttgccacacaccttcaatttgttaaaaactcagtatctgcgaagtacagtaaagcaaagcacaatcaaatgaggtgcgcctgcatattacaaccaagaggcttttcgcagaaacacgagtgtgcttcaacattcaaaaatcagttggtgtaattcaccacattaagataataaaggaggccgggtgcggtggctcacacctgtaatcccagcactttcagaagccgaggtggacagatcacttgaggccaggagtttgagagcagcctggccaacatagtgaaatcctgtctctactaaaaatagaaaaattagccgggcagggtggcacgcacctttagtcccagctattcgggaggctgaggcaggtgaatccttgaaaccaagaggcggaggttgcagtaagctgagatcacgccaatgcattctagcctgggcaacagtgagacccagtatcaaaaaaaaaaaaaaaaaaaaaaaaagataataaaggagaaaaaccatatagtctattcaataaatacagaaaacgcatctgacaaaattcagtgccctttcatgataaaaattcagcagattagaaatagaggaagtgcatgtatgaaagagctacagatagattgtacttaattgtgaaatattgaacatgttaccccgaaaatcaggaaaaaggcaaagatgtccactctaaccacttctattcaacattatactagaggtcatagccagtataatgaggcaagaaaaaacataagaggcattaatatttaaaggaagtaaaactgtttctatttgtaggtaatgtcgaaaatgtgaaagaaactatcagaacctgctagaactaaaaagtgaattcagcaaggtctcagggtacgagatcattcaaaaactaatcagaaatgaaatttcaaatgcaatatcgttaggaataatttaataagaaatgtacaagatttacacgctgaaactgaaaatgttgctgaaagaaattaaagacctaaataaatggaatgttgtaccatgttcatcagctgaaagactaagtgtctttacagtgtcagttctcccttcattgaactgtagattcataaccccagtcataactgcagggttttttttgtagaaattgattgtaaaatgtatatggaagctgggcacggtggcttatgcctgtaaaccagcactttgggaggctgaggcagacagatgacttgaggtcaggaatttgagaccagcctggctaacatgacgaaaccccgtctctacaaaaaatacaaaaattagccagacatggtggcacacacctgtaatcccagctacttgggaggctgaggcatgagaatcacttgaacccggaggtggaggttgcagtgagccaagatcatgccactgcacgcccgcctgggcaacagagtgagactttgcctcaaataaataaataaataaaacgtatatggaaatgcaaaggacctagaacatccaaagtaaacttgaaagagaacaaaattaaggggcttatgtgatgtgactttatagtcatttgatttttaacagaggcaccagaacagtccggtgcgggaaaggaaagtcttttagcacgtgccggatgatggcaaatgacatccataccagacaaaaatgaaccttgaccttaccctaaatattagtttcttagagttgccacaaactaggtggcttaaaaccacagaaatttggctgggtgcggtggctgacgcctgtaatcccggcctttgggaggccgagtcgggcagatcacctgaggtcaggagtgcaagactagcctggccaacgtggtgaaactttgtctctactaaaaatacaaaaaacttagtcaggtgtagtggtgcacacatataatcccagctagccaggaggctgaggcaggagaattgcatgaacctgggaggttgcactgagccaagattgcaccactgcactccagcctgggtgacagagtgagactccgtctcaaaacaaaaccacagaaatttgctgtctcataattccagagtctagaagtccaaaatcaactgtcatcagggccatggtctctgtgaaacctgtaggggagtccttccttgcctcttcctagcttccagtggttggcaacctttggcattctttgatttgcagctgcattacttcaatatctgtcttcctcatcacacagcattctccatgtatgtctctgtctttacatggcctccttcttgtaagaacaacagtaatattggattggggcctgccctactccagtgtgacctcaccttaactaattacacctgcaacaacgctgtttccaactaaggtctcagtgtgaggtactgagggttaggacttcaacatatcttttttgggggacatagtccaacccatgacactacttcacaccatacataaaaattaattcatgagagattatagacctaaatgttttaaaagctaaaaatataaagcttctgcaagaaaacataggagaatatctgtgcagtccaaagaataaggttttttttaaacacaatttcactctgttgcccaggctggagtgcagtggtgcgatctcagctcactgcaacctctgcctcccgagttcaagcgattcccatgcctcagccttccaagtagctgggattacaggtgtgcgccaccatgcctggctaatttttgtatttttagtagaggcagggttttgccatgttggccaggctggtctcaaactcctgacctcaagtgatctgcctgcctcggcctcccaaagtgctgggattacaggtatgagccaccgtgccaggccaaaaaaagatttattaggatacatgaagcaatagctattaaaagaaaaaataaattggacttcattaaaatttaaaacttttggtcctcaaaagataccattaagaaaatgaaaagacagagctgggcgtggtgaggcttgcctgtagtcactactgggtacttgagaggctgaggcaggaggatcacttgagcccaggagttctaggccaacataggcaatatagtgagacagtgtctcttaaaaaaaaaaagaaaaagaaaaaacaaaagaaaataggctgagagctgtggctcatgcttgtaatcccagcactttgggagtacaaggcagatggattgcttgagctcaggagttcaagaccagcctgggcaacagtgaaatcccatctctacaaaagatacaaaaaattagccaaccatggtggcgtgcacccgtagtccatagtcccagctactcgggaagcagaggcaggaggattgcttgatcccaaggaggtcaaggctgcagtgagctgaggtcgcgccaccgcaccccagcctgggtgactgagtgagaccctgtctcaaagaaaatgaaaagacaagtccaccaagaaaacagttgagaccagtcatagaaaaaatagaaagtcatatctgacaaaggatttgtattcagaagaattcctataactcggtaataaaaagacaacctgatttttaaagggtgaaaatattttaatggatacttttttttttttttttgagacagagtctcactgtgtcacctaggctggagtgcagtggtgccatcatacatagctcactgcagactcgaactcctgggctcaagtggtcttcctgcctcagcctcctgcgtagctaggactacaagcacgtgccactatgcctggctaatttttaaattttttgtagacatgggctggtgtgtgtctgtgttgtctaggctggtcttgaactcctgggctcaagtgatcctcccacctctgccccccaaagtgctgggccaccacgcctggtgtggtgtcaccagagatgagccaccatgccctgcctgatacttttcttttatcatctgtttatttcttgtttatgggtgtttctgttctgattttatgactattctgtattctaagatttctctgagaatattatttgtttcctctaaggacagacttggtctctcttccatggggctggttcttgagccgccagggatggggggaggacctgggtagctgctgcgctgccccttctctgctgtggtggagtggcccgttgcctgcggggtctgtctctgaagggtggtttggagaagttctgtggaggcgaggcaggggtcagctcttgccccatggaccctcagagactgggaaaaggtaggcatcacctgggctgctgccagccacatcaagagcctttggggtgggtggggtgggggccggggaagggaaggttctagctgttgatttagaaaagacccattgatttcttgcctgagggaagaagtggcaccttgccactccaagtttgctctgctcaccagccccaacagcatcagcctcacctgggagcttattgaaggtgccctgccccaaagcttgtgggtcgggatctggcagtcagcagcccccaggtgttgcacacatgacagcactgcttgcccctcctctcgtctggtctggtctggtctggtctggtctggtctgagagcttctttggggctctgacaggtatacaggctctcatctgctctacagctctcttgtagtacattcctctctgttccattagtcaacatgttcttgcctacttccagcatctagaaatttgctgagtgtatcttatccgttcagaggtcctctcctgctattgcctctgttagaaatttcttccctttcatatgtctgtacttcggtttctttgaggtttgaagggtcaagtggcaattacatgtaggcagttggccatcctctggtgaaggctttaaagcccaggaataacaagatccattatgtctaaaactagcaaaaaccctacctgtcacatggtgaactgaattagaggtgatggggacagaagccagattggagtgagtggaaggtgagggagtggagattgggtatagacaactctctttaagaagttttgttgtgatggtgaccagaaaaataggagtggggtagagggggatgagggtgtttttcacgtgggtgaatatgagagcatgtttacatccttctgggaatggcccaggagagaggggagcgtgagaaggaggaaatggggacctggaggagcagactccttgtgtggaggggggaagcggcatctagagctgttgcaggaggtgggctttgagtaaatgcttcctctttggtaaagacggggaacgggaacggtagaagttgcacggaccctttgttaaagctcagaagctgagcgagaattagagcttaagtttatggagtagtcagaataaagtacccctaactgtattcttgcacagtgcaggaagccaggggtctgaaatcaagatgttgcagggctccattccccccagagcctctagcatggatccttccttgcctcttccagcttttggtggctgcctggcagtcctagactttccttggcttgcagttgcattgctccattctctgcttgtgtcttcacatggccttctctgtgtccccgtattcttctctggatgcttgtcactgtattaggcccaccctaaatccaggatgatctcatatcaagatccttcacttaattacagaagcaaagaccttccaaataaggtcagagccacagggtctgggggttaagacatacacctaactattcggggctaccatcgaacccctgtagaagcctgtccatttccaggatagcagagcccaaggaagggccagaagtccccccaaaacagttgtttgcattcaccagattctaagctataagcagatgggcagtggcagtcggtcctaatccatataccattggcaacaatagtttagttcactgtagacataatgagatgcttatcttctgctaagtagtcctcatggtaacagccatattactcctggctttgagtgacagcgctgtgctcttgtctggtgcccatatacttcagcagctggaaacaagacagtgctcatgattcaccggaaagtttctgtagttaaaatcaagtgatcccttgagtctattctaatatttgtctgtaccatgttctgtgacgagacatggaaacaaaacattaagaagtgaaagtatctttgattatgctcttgaagacaactttttgtttgtttgttttgtttgagacggagtttcactcttgttgcccaggctggagtgcaatggtgtgatctcggctcactgcaacctccgcattcccgggttcaagcgattctcctgcctcagcctcccaagtagccaggattacaggcatgcaccaccacgcctggctaattttttttattttagtagagacggggtttcaccatgctagtcagactggtctcaaactcctgacctcaggtgatccgcctgcctctgcctcccaaagtgccgggattacaggtgtgagccaccgtgcctggccgaagacaactttttaaagatgcatatgctctgggctgggtgtggtggctcacacctgtaatcccagcactttgggaggccaaggcgggcagatcacctgaggtcaggggttcaagaccagcctggccaacatggtgaaacaccgtctctactaaaagtataaaaattagccgggtgtggtggcgggtgcctgtaatcacagctactcaggaggctgaggcaggagaatcgcttgaaccccagaggcggaggttgcagtgaattgagactgtgccactgcactccagcctgggcgacagagtgagacttggtctcaataaataaaataaaataaagatgcatatatgctctgaaggctggctacattttattttttctcaaacaacttttacagtggatagtgctgtaaaagttgtttagctctggtcattttatcttttttgtgatctgcaaaaggagatccttttccttttcactgcctctaatacccaactccaatactcctttgacctcacaggcacttagaatccatcagtggctccatcttttctcagacttcacctccttcgtatccttattcctctcctttgtagcttcagtgccagtcagacgtcgttactccctggcacactacctcagcccttcggcactttcttgctttgttatattcagtcgacaaagccccagcctcatgaaattcagtcatgtctgccccatgcctgctccgtcctgaagctgaatgtgactccttcattgattccccctttaagttcatgtctaccccaggtaaacttcttgccgccaagcccacctgcatactgcagttccccggtctctcctagcccctcccaccctcctcatcagctgtcacacctccttgcagctgatatcttagttcccagagagcacagaagcaagctcaagagagtgtctacaggccagcgtctactccttcgctctgcctccctcatgctgtcacggagcgcctgtcccaggccctcactcctgttctaaggcatctctccagtcctctactgcactctcccccatcagagattcctccctcgcctgccctagaaacttgttgctacttctcccaccttgacaaaagctgctcccaaccccccacctgtctagcatctctgttttcctttaccagcaagactccagtccctgtctccacaccctcttcaaccttctccagttgttcctttgctgccacagctctgccaagctgctccatgaggtctccagtgatgaccttcatgttgttaaatctgggagctgcttgtcacttcttttcccagagctgtcgtcgtcagttaaccccaatacccatacgagacaatcctttccctcccttgagtctctgcactgatgtgcaccttctcagtgcaaaccacagcttttgtctctttctagctgaatacatgactgactgtgcttatcttagctgtcacccctgctggagcagaagctccacaggacaggattgtctccttgattcacagatgtagctcaagctcctagaacagtgcctggtgtctgtgggtcctcaggaagtcctaggtgagtgtgtgaatgtctgtcctcctcggtcttttctgtttcgcatgtgatgttggaaggcctcaggttcaggcttttcttctccaccctcactcccgaagtgattccgtccagcctcatggctcccaaatttatgtctccaggctgactgggtcacgggaactccttatcctccctagaccttctctttccctggtcttctcctttccagtaaacagcaactccaactcctgctcctcaggccagaaacctggcgctggttacctcatttgttcacaaatactgttactccacctgcaagatggatacaaaatctcatgagttcccctgcctccatggcccccaccctggtccaggtgtccagcttccctgcctctgcccttgccccctggttctttgtttagtcctgcaatattgtgctcttctgttcagaaccctccagtgggtccctgcttgctcagagtcacagcccaacaggatcacctctcttgccactctcccaccactcatgcactgcggcctcactggcctcctggctcctccctggaccctccaagtatgcccctgcctcaaggccttgacctctcctctgccctctgtcccaggtatcacacatgtctgctcaagtgtcaccttcccaatgtggccttccccgagcacacccatgtctgtaagtcaggcagcctgcctctgccccaccagttccccctgcctagcataggacttgtcaccatctgccacaagctgtgttactgcttggttttgtttgtgctctcccactcccttcccctccctccctctccccacccctatagaatctgagtcccatgaggacagagatttttttttttgcctcttcctcaatatatccccagtgcctagaatcatgcatattttaatttattgagtgaattaacaaataaattctgcagtgggacattgctctaaggttttgtcttataagagggacagaagaacatgcagcctgctctgctgttggctccttagcttctccatggctaacaggaacaatattgtttatgagataatcaaagccatagtcatgagttagaaggtacatataaaggcaaatatgtggagattgagttactttggcgggggcggaggggtgtgtagttatctgaaaacatggaacaaatcaatgagagtctaaatagcacccacatatttgcccctcttttaaaacatacctcctttatgagtgtagaatttaacagcacagtttcccagtgcagctttgcgaaacaagagaaatgaattttaaaggctgtcaggtgcctttgcaatctgtggcttagtatttgtgtaacaacatttgtgttttgccaacagatgtactgcttaaagtacccatgagaatggcctctgtggttttctactttctcggatggaaccttaggaactgattattgagaagaggctgatactgcccacctcagctcccaggcaggcttcagggccttggttactactcctttgggccctcactgacccttgcagacgtcttttgcaacctctgtagccagaagagacaactgctttctggcatgttgctctttccctaatggctttatgagcttcttgaacaccaaagcatgtgtgacttcctcacgccttcccctgtatagtatagcacccctaactgtatgtgtaaggagaaggagtgagcaattgatggcgtccccctggatctccaagggaatgggaaggggcagggtttctggattcagtcatgtggaatctggtcgttggtgtctaaatgtgcctgttacttgtgcccaatgtccaggttcaccaggaggcttagcctgctcatttccctgctagtagctatattttgggagagcattttttatgctctaattgaactttgtgggtctcagcaatttgaacaatgttttgtttttcttctggtcaggttacaaaggaaagaaaaggaatctggtgttgtaggaggtggtgtgttgtgtaattacttgttttttttttttaagtttttttatatttttgcaacaaggcaagttttctttgaataaataatgctgggagcttatcacatagaaggcatatgtgttgtactcagtacattctgaattatctgggtttatttttatctcttgaattcacttataaacaattcaaaggctgcttttttagctaacagaaataggaagagaatctcagaatctgttttgtcattttttcaatgggttgagttatagtgattatgctaactcggtggaaaagcagtgtagtgagtaaaccccacatacggcatatcatgaacattttgttgcttttttggcttctgaccatcttcatacctttttttgtgttaaaagtctccccattgtgtatatcttagtaagaggcaggtggaccctagtttctacctaagaaaacctgaagatggggttgggggcctgtggtgtacttccttctcatgctgtccatgaccactgcagtggctttgtaaggatccaggacccagggcccctcagtgggtgtcttccatttctcaagattgcctcttggttgtgagatgacggttgctgctctagtcattgcatccactcctccaggtaggaagaaagaggtcataggggaaaggcaaaatggcacttgacatcttaacttctaggcccattcaatatttccatttccatcttcacacccatcatcttgtcctagggaacaaacagcaccagcagctcagtagctataacagcaattattatttctcacacatgggtctgggtcagctgcaagatgggattcagatctgttctcaagcctgtcgttccaggacccaggagggagaagcagctgccaggggaagtctcttcgtaggcggaggtcaggagtccaagaggagtgagcagagtcacagaagcctcttaaagcctcttcttcccccatcccatcaacacgtgagcaagcccagagtcagtgggtgggaggtgtgctccgcccatagtcagtagaacaagagcaagcttgaaagagaacgatgaacaggagtgcactcggccactgtctccttagccataacgtagtcccatggtctgctgggaagcggggaataactctccttagctgagcgcagggtctcattagtaaggcagatggagaacatggatgttgggggacaactggcagtgcctgccacaggggaatggatatattccctccccttgctctctggaaactaggggatggcgatgaagcctaggtttggccaaacccattctgccttcagggactttgactcttgagggacagtgagggattagtcatggtggtggcagttgagtcacaaaaccagcagtggtggctaatgtccagtgatgacatgcaacagtgcccagggtgggtgtcccaaccagcaggtccctgcagtataaccttggctgtgtttgcagtggtgcagcctctattcctgctgcttttctgagcctagttctctagttctctctccatttccagatctgctgcccaagaactcctttgtgattgaatttaaccagagttgatttctgttgcttgaaactcaggaccttgatgcagtgtgcagggtctgggcaaggtaaaaacacactttcatgatttcgcctcaagtatagtagatgagcttaggctttttgagccaggtagccttgggattaattctcagctcttgcacctagcaggtgacctcagcaatcaagtcacttgccctccttgagcctcagtgttgccctcagttaaacattgctctcgtgtgttgctgagcattcagtgagattgtatataaagtgatcattgtgaaggtattgggacataatttgggaaagcgtcctggtctaagcttttgattggctctccatcatttgggtaatgggatagtgatttaggagtatcatagcagctcaaggggcccttctggaaagggtatgaggaaggtcagggacaagtctgaaatgaatcatcctaggcttaatgcctgtgactgggcagtgggtacaattatctcaggctagtcagtagtcatttattgtgagaatacatgggcagattttttaatttccttctcagtctagacttgaatgcaaacagttcttattgctaacttaccactagtcaccactaatgaacaaagactatgaacaggaaattcataaaagaagagatacagatggccaatgaagataggaaaagagttctgcctgctggtaatcaaagagatgcaaacgagaacaaaaatgatgccttttcacctaccaaatttgtcaagattaaaaagaaagcaaagagccagcgtcagctgatgttcatacctgcacctgctcggtagcttgctaatgttctgcctgctccacacgccaggccagcctccacggcgcagccaggtgaggcctttccttgtatacaggcacgtttggattcactgttgcataagtgagacatgtgcatgcttcacaattcaggaagtgcaaactccagagtgatgcaaggtctgagtgtccctgctgccctggtctcccagctgcctaggcctctcttcagggaacggctgcatccagggtcttgtctgtgtcttttgaggtgttctatgtacacgcagacacatctaaacctatttttattttccctgcacctgcttgggctactgtaagctgttaaatttttttttctaggaatttgtccattttgtctgactagcataaagttgttcatgttatagtttatacatttgcaacatctgtaattatgtctgctttttcattcctagtgtttgttgtttacttgtaccttctcccgtttttccttgtcttggtaaaagctcattaggttcattggtcttacaagaagcagacatgtaggcattattgccctgtattactctgtgtctcttttctagttcattaaattctgcttttgcttttatctttattattttttctatggtcttagagtacattctctgtgttttgttgttgttgttgttgttgtttgttttttgttttgagagagagagtcttgctctgtcgcccaggctggagtgcagtagtgcaatctcagctcactgcaacctccacctcctgggttcaagtgattctcgtgcctcaacctcccgagtagctgagatttacaggcatttgccccacacccggcaaattttttgtatttttagtagagatggggttttggcatgttgaccaggcgggtctcgaactgctgacgccaggtgctccacccgccttggcctcccaaagtgctgggattacaggcatgagccaccacgcctggccctaacttcttaagttataaatttggttcattgatttttctacccttttttcaaatgtaaacatttaaggctaaccctctggaactacttcaactgtatctagcaagttctgatagtattgtcactttaagttagcccaaagatattttaaattttctttgtttcttcctttgactcacatattattttaaaatgtgtttttcaatttccaagcacatggctttgggtttgttttttttttttcctagttgctctagaaaaaaaaattgactgcatgaggtggctcatgcctgtaatcccagcactttgggaggccgaggcgggcagatcacctgaggtcaggagttcgagaccagcctggccaacatgccaaaacctcgtctctactaaaaatacaaaattagccgggcatggtggcacacacctgtagttccagctactcgggaggctgaggcaggagaatcacttgaaccgggaggcagtggtcacagtgagccaagattgtgccagtgtactccagcctgggcaacaagagcaatactccgtctcaaaaaaaaaaaagaaaaaaagaaaaaatcaacttctaactaaatggcactgtgatcaaagaacttggtctgtgtgacaccagttcttgcagttggttgagaagtgctccatgacacattatccacaaccagtggacagaatatgtcaccaccaagcatgggtgcaggattctacatatattcattacctctgtcttatccgtttgttgtgaaagtattttctcttcttactgtcattttgtttacttgatttatcaactgatggaatacgtgttaaaacctactgtggtgatggacacatcagtttctccacagagtttggtcattttcattttattatttattttgaggccacattttcagttttagatacagtttcacattcctggtgtattgaaccctttggtattatgaagcgaccatactaatatgttatttttttttaaattattatttattttatttatttttctttcttttttttttttttgagacagggtctccctctgtcacccagtctggagtgcagtggtgcaatctcagctcactgcaacctccgcctcctgggctcaagtggtcctcccacctcagcctcctgagtagctgggattacaggcttgcaccagcgcgcctggctaagtttttgtatttttagtagagacagggttttgccatgttgcccagactggtctcaaactcctgggctcaagcagttcaccagccttggcctctaaaagtgttgggattacaggtgtgagccaccacgcccggccatcccagttttttattttcctcctttctgtgtctttatgcatcagtgaggtggagcttttgaaaatgtcagatagctagattttttttttttgagacggagttttgctcttgttgcccaggctggagtgcaatggcgtgatctcggctcactgcaacctccacctcccaggttcaaaacaattctcctgccgcagcctcctgagtagctgggactacaggcacgtgccaccacacccggctaattttgtatttttagtagagatgtggtttcaccatgttggccaggctggtctcaaactcctcacctcagctgatcacccgcctcagcctcccaaagtgttggaattacagacgtgagccaccatgcccagctgatagctagattttttttttttttttttttttgagacggagtcttgctctgtcgcccaggctggagtgcggtggcgcgatctcggctcactgcaagctccgccccccgggttcatgccattctcctgcttcagcctccagagtagctgggactacaggtgcccgccaccacgcgtggctgattttttttttttttttttttttgtatttttagtagagacggggtttcaccgtgtcagccaggatggtctcgatctcctgacctcgtgatccgcccgcctcagcctcccaaagtgctgggattacaggcgtgagccaccgcacccggcctcgagattttttaaaaaatccattgtctgtttcgtcctttaacatctatttgatttctgatgtatttagattcatttatagcatatttgtgcattctatttttccatattttctgttcttttaaattttccttctcctttcttgccttctcttagacttttaaaaaaattgtagtaaaatacacatcacctaaaatttaccatttttaaatgtacagttcagtggcattaaatacaaattggaggccaggcatggtggctcatgcctggaatcccagcactttgagaggctgaggtgggaggattgcttgaacctggaggtcgaggttgcagtgaggtgtgatcacactactgctatagcccaggcaacagagtgagaacctatctaaaaaaacaaacaaacaaacaaacaaacagattggcatcacacagtgtgtgtgctgctgtgctgtgctgttatcatttaacattaaaacataaacatcagcactgttatggactgaatgtttgtgtcccccaaaattccagtgttgaagctcaaacctccaatgtgatgttatttggagatggggtatttgagaggtggttaggtttagatgaaatcaggagggagggtgggtttcgcatgatgagattagtgtccttataacaagagacagcagagagcttgctttctccaccatgtgagtatgcaatgagaaggcagccatctccaagtcagaaagagagccctcaccaggggctgaatgtgctgacaccttgatcttggacttctagcctccagaactgtgagaaatttcagttgaataggccccccagtctgtactattttgttatagcttgagcagactaatacacccatgttatgaaaagctataaacatccctttaaaggccacctaacgcgtcgtattacctcatgcatcttctctgctgagctttccaaaagagtggcttaggctgggcctggtggctcatgcctgtaatcccagcactttgggaggccaaggcaggtggatcacctgaggtcaggagttcaagaccagcctgaccaacatggagaaatcccgtccctactaaaaatacaaaattagctgggcgtggtggcgcatgcctgtaatcccagctacttgggaggctgagccaggagaatcacttgaacctgggagatggagggtgcagtgagccgagatcgtgccattgcattccagcccggccaacaagagcgaaactccatctcaaaaaaaaagagtggctggccgggcgcagtggctcacgcctgtaatccccgcactgtgggaggccgaggtgggtggatcacgaggtcaggagttcaaaaccagcctggccgagatggtgaaaccccgtctctactaaaaatagaaaaactagccaggcgcagtggcaggcgcctgtaatcccagctacttgggtggctgaggcaggagaatcgcttgaacctggggggcggaggttgcagtgagccaagatggtgccactgcactccagcctgggtgacacagtgagaccccgtctcaaaaaaaaaaaaaaaaaaaaaaaaagtggcgtatgttcccggtctccacctctcattcgccagcccctgtgaccaaacccctgggattagatctccatcgggtccctcccctcaccctaacctcacatgcagtggttcctgagaagctgctgtttatctgatcacgggatccagcaggatctgagggctcattcactgaatctgtactacccaacaaggcaggcttgtccttacccacacttttcaggtgaaaacttaatcagattcaagcgtttatcttagtggcctcttcgtggtgtgtgatttccttcttgcagctctttactggctaaaactcttcactgggagttaaaccaggtgtggtccttgaccctcatcattttgtcccatctcctatgctgggctctgtatccttgtctccaagcagtctcgtgtgacagggaagttacctattattgtatggtcccctcttcttgtcacctctggtgtggcacttgttccatttcttgttcaatgaatgtgatttgtgaatgtgccacatctgtgggaggaaggcagttcgcagcaagagttgtagttcccttgctttgccctgagggccaggactttacactagatttttttgttgcattcctgcactcataaagtacacgtaaacttagaggtggtgtgttaaatgctagaacttaaaactgagttcagctaggctcaagtgccccacaatttttgtcccaccagacaatttcatgaatatctacagattgttccctcaatatgcctcaatattgaggcatattgatttggggagcacagacaagtcaaggttgatgtgcatccgctgaacatgatcttaagttgttgaagtaggtattattaatgaacgaacgtctattttagctccaagagcccctggtcttccagaagagactcccaatgatcttccagaagcagctgggcttcttttggtcctcccccacccaggtgcagtcccgttctccctgcctgggtgagtttgattcctctgccgtggaataggctaggctgctacctcttgagcctcttccaccaggccatccattaggtggcgacagagagcactaaaaggaactactatggaaataaaacttgttttgcttcttggggggaaaaaaaaagaaaaaggcttgtggggcgtgtgtgcattttagtcagattttactgtgcaaaacatttgagagatttctgccctctttctcccttccattcttctcaacccactgggcgccctaccacccctgtctccttcaagataaggtagatcagaagaccaaatagacaaatgccatgtccactgttttctgtcacagttgatagccataccagtcacccaagctggaaacccaacaggcccctgcccttcactgcccacatccaagggagccaccaagtcccacaaattgttcctttaactgtttgtccctcttttgtcttctgtcatcccttctaccgctgtcctggttcaatccctcatcttgctctgggactcccatgataacttatgatctttcctccacctctctatcttccacacaatccctatcatcaatctcattcccctgctttaaacccaagagtggcaccctgtgtttgagtgacatcagggcccctcatgtggctcctgcttctctttgtggccccttctgttgctgctgcttttcttatggacatagccctcagcagtccaggactgcttgtagttcctcccaggtaccatgtttcttgcactcctggcctttgtcattggctcccctgcccaagtccccttctcttctcctttccttcccctgtggccttgccttgtcgtgcttatccttgaagaccctgtcaggtatctcttccccaaagagccctgcctaaccaccgcccccctcccccccgcgacacacacacctgggttaggccctgcctctccacgcctgtgcctcctgccaagtcctcagaggtctctgatcccatgtgcctccaggcatggcatagggggactgtgacacagcctctcggcccacagacccctgattgtgggcttgctcactgccccagtcagtcctcttattgaggattccgtgccagttcctgactccagcacacacacgcatgtaggccgccctcctagtgcctggctccttccctgtctcttctgccactcattcccatggtcgtatcctggagttggtcatctctggaactccacccacggagttctaacttagctctgcctatgatgaggacttactgtcttcccagcttgcagtgtcaaccactgtttgatgcccctgggactccattggtcttccctcctcttgtgaactgtgcccatcaccagacgaacttgttttagaatttaccatcgtaactgagctcccttcagcgcatacctccttggctcctgctcagtctctgtttctccttttagccaaactctctaagagttctctccactcatgggccctcttccttgcctgctgctccttgctcagcttgctccatgaacacttgcttttccacattccatgaaataatcttaacagtcatcagtggctgtcactccttctcagccctttccttgtgtctcttctggtacctcatactctccaggtggccatctcacctcacatcttgaaccctctgggtttgggagaattctcacctcacgagttgatgggaggcctggcgacctctgattgtagtcactgcaaatgccagatgcttatttgcctagcttccctttcggtcagggcagcagttggcaaacggtatctcaagggccaagtccggcccactgcctgttttcgtaaatgaagctttaccaggacccagttccaccccgtcctttgtgcattgtccaagactgctctcctgtacaacagcaggtgggctggttgtgacagatactgtctggcccacaaggtggaaaatactatctggccccttacagaaagaaattacctgagttctacacgagggtgtaggtatgtaccctggcctctgccagtcagactcacatgctaggaggagcagggccaggcaggagagccgtgtctcctggcattggggctgcaggaaagacgagctcctaggccacagtgccagtggccagtgctgctgccttgcagggtcgcacaggcagtgctggctgtttggactggcttggcagaaggatttgaagtattgttcctagccaactggactcaaacctgttcctccaaccctctagggattctcttatcacccagtagccttttccccctagttttaaaaattgcagtaaaatacacaaaagataaaatgtactgccttaaccatttttaagtgtacaattctgtggtattgagcacatttatattgtgcaaccatcaccacatgcatcttcaatagcttttcatcagtccttgtctgcataaatcagctagagttggtttctattgattgccaccaataatcttgacagatatgtctgatcttccttctctgcactgactcctctttctctgtctcctctgctgattctttctcctcatcacaactccaaatagcagggggagggttgtttacacttatattcagcacgccctcacgcactcgcctggctcttcagacctctcccctgaactccagattcatacatccagctgccctttaggcctctagaaagctaaatacctcagtatcaaaaacatgagaaacggaagccagagtcctggatctctcgccctttcgctgtcccggtgcccatgcccttcagggatggcacctagaccagctccctgcatccctgcctagactctgcagtagtctcacgtggcagacccggaggtcactctcctctctggatgccctgcggacactccggttagcctcagctgcaagagcctcctcacccaaggtcacgccatttccaggacagcaccctggtgactgagcgaggtaagggtacaaggcccttatagggccttctctttgacttcttcccacctccctttatggatgtcagttcctgatgaacatcttacacctcaaaccgtgacccaacatctgcttctgcagagcccccctgtggcatcttgtgccctcctgccccactccctctactctatatcttcccatagttagaatgggctttttttttttttttttgagataaggtctccctttgtcacccaggctggaatgcaatggcacagtcacgactcactgcagcctcaacctcctgggctcaagcagtcctcccacctcagcctcccaagtagctgagactacaggtatgcaccaccacacctggctaatttttatattttttgtagagactggggtctccctatgttgcccgggctggtctcgaactcccaggctcaagcaatcctcccgccttggcctcccaaaatgcaggattacaggcgtgtaccagtgtgcccagcctcagatgggctctttgaaaaatgtttattagatcaggttactcccttgagaaaaaccctctcagaataaaacccgaagtccattacttgaaagcagagccagcttcatgggcctttgtaactgcccatgggcttgctggaacccaggcttggtttaatactctactctcaccatctcaaaattcttaatttttgaacaagaggccctgcattttcattttgcaccaggctccacaaattgtgtaactgggcctgcctcagcagccacatggaacatgatccctccttgcctatttgagctcattctctaccattctctcccttgctcacctggctcccactgctcttgctcttcctggaacttgccataatgttgctagagtcagagccttggctcttgctgctcctcattggctggacccctctttacttgacctgctccctcaccactcacttccttcagatctgtgttcagatttcgtcttctcagagaggcttttggcccctgtccatctctctgaatttacctctgacctctcccccaccaccactgcgctaagctgcctcagaactttgtagacattctgtctggtcttctgatgtttcccccttggaagaatcccaaggtgcctgaagaatgctttctttatccttgaagttgagtaggttgactagagtctggcttgctattgagcattctttatcaaattgtcctgggaacatggtgtattctttcagtctgcagatgtagtcgttgctgtttcaggtcagctctcttatggatctttgacagcatcttctgttccatttgttgagttctgtacttcagggacacaaattcctcatgttggattgtctttgtctctcttccaatgctattagctttgccgtaattggtttagcttttgtctttttcatctgcattcactttgtctaatttgattttcagctatgtatattctgtttctggctgtttttcaatgtatttattagtttcataatgatgtgttttggtctgcagtttgtttctctaggttggaaatttgtcttttcatcttattctgttttatcatcccatctttgaactcttttattgggaacatgttcttatgaagttgtggggaatttttttcccttccttgtgtattctcttcttggtgggagactttgcctttctcgtgccatctccctccctgggcctcttttttttcttctggccataatatgtttgcctagttaccatgtcacttcttttcgtcttggctcaggcttggatggctctgcatagtcgttctgtttgctttgagacagtggaggaattcttggctctctcttcccagtttcttggcatcttctcttgctgttttcccctctgagctatcgcgtgcaggcttgttatcttgtatccggagagaatttgcacgctggagggagctgcagccatgtagtcttcagccctatctggattcttctctttgttctaagaactgtgttggatgtcttactaaggctcactctagctgcacgagggatgtgtgtgccatttccatggggatagggggcacctcagtctctgggtggttccataatctgtgtatacctaagagcagttgcttcccacagagctgggctggctcactgggcactttgccatttctcctgcacctcccagctggagtttctgggtctaaaaggaaaaagtgaaggactcccacttggttgcttctctccagcttactgactgcaaattcccagggcgttgcccgctccctagggtggtttctgggggacggggcaggagcctggctttgctgctgctttgtcctctggagtcttttctcagactgctttgaattacacccctttcctttgtgtgctgaaatcttcccttcacactctccttccctgcctttcttttgtgtcttatcttactaggactggaagagggcagttgtgcaggaggtctgcatctaattccctaatccatgtgagagtgctcctgttgtgtgctttgtgacatgatggtgagaaatactccctagagcagtggctaccagaaggaagccatccccccccctgcacacacacacacacacacacacacacacacacacacacacacacactccttctggctgtcctcagatgcctattctaggtaaatgtcagattccaaagaaaatccagttgagatcttttttctttttttgagacgagagtcttgctgtgttgcccaggctggagtgcagtggcacaatctcggctcactgtaacctccgcctcctgggttcaagcgattctcctgcctcagcctcccaagtagctgggactacaggcgcgcaccaccacaccaggctaaaatttttttgtatttttagtagagacagggtttcactgtgttggccaggctggtctcgaactcctgacctcgtgttctgcccgcctcagcctcccagagtgctgggattacaggcttgagccatcgcgcccggcctccagttgggatcttgactggaatgactggtgttcaatcattatagtttccacctaatttgtatttgtacacaggacagttactaatttgttggtacttgtttgatccccagtccctagagttgtttatggggtggagcttcagtccctgctgcttcccctgtggcagcagctggagtcagggtggggacccagggtgctgctggcagattcttgagacaggtagaatctcctctatattggtgtctctctctgtcccagcagtgcccaggaaaacctggccagcctgtcactgacctctccacctagggcactggtggttcaggtccttctatttgccaccggcaaaccgtacttctgccagtctggctcttaggcccagtttctctgatcttgcagattttcttgggctctgctacggaatcctcatacctccggcaggtccctcctttgcccatgtgtttaactgtggtggaatcgtgtgagagctgcttctctcgcatggatcccagccacaccacattctacagcggttcctctgaaggcattgatagagatatttcctcctgttttgcatttcgttggtcatttcagtagaatcagggtgaaataaacatgggggctcagatgtcagcattacgaaccaagtacgtcaggcaggctgatgtggactgacctacactagtgagacgcaagatgacgaaaacaagggcactcactccaagttactgatgagatgtttggatcaaatgagccagtccttaagcagagttctctagtaaaagagatctcctttctgccctttcttgttccccaaaatgtgttgccttcatggtgaaaatttattttggcagattttctcttctttgataaaagcagccaacactttgttaaaagtctgtgaaacttatttacatgaagtatgtaaaggtaagaaaaaaacattatcaacaagaaatggagaaagccagcagctgaggacagaaaagtcatgcacagtgtcagtgtctatggaaacaggccacttggaccttgaggactaggtatttggaattggaggtgagcttggcctggtgagtctctaaccacttgtgtgtaggatcagtgtgagaaccctgctagaatatagtggcagagatgcaaggggaaatcattggagaagttaccagggaatgatgagctaatctgaaaaaaatacatgtttctaagttgggcgtggtagctcatctgtagtcccagctacttgagagcctgaggcaggaggatcgcttgagcccagcctgggcagcacagcgagaccctatctccctaaaaaaaactttttcgttgtttagttttgggatttttttttttcctggtcttttttccccctttttgtgaataacgggatctcactatgttgcccaggcagatctcgaactcctgggcccaagcaatcctcctgcctctgccttcctaagattacaggtatgagccactgtgttaagcaaaaaaacttttttaaatgaaaatcattttttaaaagacaggctttccaggggagggtattattccacttatatgaagtgtcaacagtaggcagatttgtggagacaaatagattagtggttaccaggggctgagaggagtgggagtggggagcaactgcttaatgggtaaagggttgtctttggaactagagagtagtgatggtcgcatgacattgtgaatgtactaaatgctattaatgataaattttatgttatgtgtattttaccacaattaaaaaaaaaagatcaaatgtcctcagaatagccaacaaccttccacttggctaaatgcctactcattaaacttcttgaactaaattcctttctgattgtcatggttattgtgtcctgggcttcagagtttcacattcaggttggcttggtccagtctgtcatgtatcactataggtccccacattggcctcttcctcagacggacagcccatctatctgccggggctctgtgccacagccagatagacttgctctgagacagctgtgtgggctctgagcactggccaggcatcacaaaacctatctttatgatttagaataattggtggtcagctgctgttttaatgttgttgttttttttaatttagatataattcacataccatgaaatttactcatttaaagtgtacaattcattcttcagtataattcataggctcacagaaaaaattgtttaaaaataaaatgtgcaattcagtgtcttttagtacattcacagagttgtgcaaccatcgcctctgtgtcattccagaacactttcagcacccaaaagaaaccccagacacaggagcagtcacctcttattacccgcagcccctggcaacaactcatccacttcctgtctctatggatttgcctattctggacatttcctataaatggaattatgcactatttggccttttgtgtctggcctctttcactgagcgtaatgtcctcaaggttcatctgcattgtagcatgtgtcagaatttctttcctttttgaggctgaatgatattatatcctatagataatgaggttttgattatccacccatcccttgggaatgcatatttgggttgcccccaccatttggctgttgtaaactgtgctgccatgaacactggtgtacggatatctgtttggttactggttttggttttttgtttgtttgttttggttttttgagacaaggtcttgctctgtcgcccaggctggattacagtggcacgatctctgctcactgcaacctccacctcccaggttcaagcaattctcctgcctcagtctcctgagtagctgggactacaggtagcactcaccaccatgcccggctaaatttttttgtatttttagtagagacaaggtttcgccatattggccaggctggtctcaaactcctgacctcaggtgatccacccacctcagcctcccaaagtgctgggattacagacgtgagccaccgcacccggcatagttgtggctttttgagagtgtatggctaggagtaaaattgccaggtcatatggtaactccatgtttaacatttgagaaactgccaaactgttctccacagcaggaattttttaacctgtatgtggtgggcttgtgtttcggttttcattttacacatctataaagatgagatttgctgtatggcactggttgcctgtatttggggagggttctgcttttggttggcaagaactgcattttatttaagcttagcaaaacataactggtttctcgcatcttctcaaaagtggaggattaagaaatggactgcgaattcagagcagggcagctgaacctcaggctccacccttgtagccttcaagctgaacctcattctctcttgctccctggagaccactgagacactctgcctgtgccagtttgatttctcacatttttaaagggccaaagcttgtgtctcaaagtgctatagcctttattgattcatgcagagaagcctccttgattccgtaattctgcagctaatactggaagtagaaagaattggaaacaccatctggatgacactttagggtggaagcagccagtacaagggggggctcattatttcctctggtcccagactgttcacctggagctgtagccaccaccctgcccttaggttaactgcctcgagtggtagtttagctctttgtgctgtgccgagggataactggaagtgaaaggtgctgagaaatgccatctcctgaaagtggcgagcatgagtgaatttacgaaaggttgggatattgctggggctctggaagtttctctggagctcactccaggggacagggagggggctggattccaattcaagtgaaaaatacctttcatctgccttgttcacctggcttttttgcctttttgtaaaatctgaaaacctcagggattgagtagtctttccttaactgcagttgcctgtctggccacacctgccagctgttgcttgtacccctgtaatttgcacggccttccgggcctttctcacaagatcactgcaggtcacattcatgaggaaaatgcaggcagttcctgccatcagacccctcaggatgtcatggtttggcctgaaaacaagattcctgcaactctaattttcctttgctagatcaaatgaaggatttgatctaatgtttgcattctagcagcaaaatcattgaatattttatttcttaagagccttacttcatattttgtaggtattttaagattttgtaaaggcctttctgcttcaacgtgtgatgtgtgcattcttagaaaaagatcttgtgttctgtaaatcacacaataaaaacatgagttcgtgcaggaaaaactggggcggggtggatcactccaaacttgtgtggtgtggtaactggagctcactgatgaaaccatgaacagttctggctgaaagaaccccacagtacactgaggtctgttggcatcgccgccagcaccgccccggtccctttgtgcgcgccaccacacctggctaattttttatttttagtagagagggggtttcaccatgttggtcaggatggcctcgaactgacctcgtgatccgcccacctcagcctcccaaagtgctgggattacaggtgtgagcctccgtgcccagccttcagctttttttcttaatgtctttgtgtaatatgaaggcattctctttaattgttaaaaagcttgcctaccactgcttcaaaatattactgtcagttggcatagcttctgattatattgatgtcatctcccttcttttaaacatgttaccatattggcactgtatttcccctagcccattgatcacttgagagttagtcatagtcctcgtgctgtttcactcctaaacgtttaagcatgcctttcctaagagcagacagtacagttaagacactcaggaagtttagcaatgagctaacacagaaccttacatttctccacataccccataaatgccttttttagagcctttgagcctggaatgcagagtccaggactgtgtgttgtattcgattgtgtcatcccttcagtctcctttatcagaaatgttcccccacccccttgttttctctcatcatcttgagtccagaccgtggttgcatggcacgccctctctggactcttcctgctgtctcctcacggtaagcttcagtctcctactcgtgatgctggttcatctcagcagcactgaggggcctgagctcagtttggtcgtgtgttaaggtggtgcctgccagatttctccacagaaaagggccccgtacttttatttgctcttcagcctgtgtattccttcctttcttgccagcttgtgggtggcttctctagcagcttctgtaagatactcagtttggcagttgtagttgtttcagcaggagaggtgtctgcatacctgaccaccacatggctagaagtcgatccatcctctggcgtaaccatcctccatgctactgtccctggggcactgaggccctcctcagtgacttcctccacctcatcttccgccatctccaagccaccagtgtccaacggactactgatatgtcccaaactcatcatttgtttattcaccaattcagagcccacctttttttcagcactgagctagcctctccttgctagaagcttacggtcgaaggtctccagccatcagaagaagcacgtggagcgctgcgtccgtgttgtggttattcatccagcatgtgttgagtaagggttgcacctgtgcctggcattatgcattgagcggggagatgggggttggcacgcacagtggggtgttctaagtacactgagggctcgggtgccctggctcatagagcagggagggaggcaggagcagggaaggtgtctcagaagtgccatctttttttttttttttttgggaagtggaatcttgttctatcgcctggtctggagtgcaatggcactatctcaactcactgcagcctccgcctcccaggttcaagcgattctcatgcctcagtccccgagtagctgggaccacaggcgcacaccaccacacccggcaaatattttgtatttttagtagaggcggagttttgccatgttggccaggctggtcttaaactcctggcctcaagtgatctgctcacctcggcctcctaaggtgttgggattacaggcatgagccactgcgcccggtctagaagtgccatcctaactgaacctgaaagatgaaagttctccagatgaacctgaaagttctccaaatgaaaaggtgggagggggtgacagggttaggcccagagcctctggtgacacagggtgggcatcattggtcactttttcctcgagggaggggcgtcacacgggtgatagggtgggagctataaccatgttgatagtgccgcctctgcccatctggcctggcatgccctgagccctctgtcccacctgtggaactcataagccctgacagcccactcactcctgattcattatccacacccctgtgcttccgctgtgcctggagcaagctttcttcagggggaagggaggctggaactatgttgtagttacctatttgtcctcccttccaaactgtgagttcttggaggtggaaggatgctgcaggatctggctcaggacgaaggcagttggtgaacagacacgtgtgtttttgactcacggtgatctcagacaagttcctctgtctagtcgaacttctttttttccatctgtaacactcaggagttgaataggtggtttttctgaggatacttcaactgtaaaatgtatgaacttgtgaactagctatttagttctcctcataatcaagattgtgtgtgtgtggggggttctgattagagggaggatgaagagaggtgtatggggttttttttgttttgttttctgtttgtttgtttgtttttgagatggagtctcactctgtcacccaggctggagtgcagtggcacgatttcggttcactgcaacctctgcctcctgggttcaagtgattctcctgcctcagcctcctgagtaactgggattacaggcatgcaccaccatgcccagctaatttttgtatttttaatagagatggggttttcgccatgttggccaggctggtctcgaactcctgacctcaggtgatccacctgcctcggcctcccaaagtgctgggattataggcatgagccaccacacctggcaggtttctttgaaaaagtttgtgtttcggcaaacaccataaaccccctgggggacagccttggggagtcacctggcaccctagcccagcctccctcccttgggtcctgcagtgaaggcttagtgagggtgtgcaaatgcccaggtcaccctgggactgggcaggccctctgggctaagggtaaactcatttggaatacctgttttctatcattgttttttatttgttaaatttaaagggtacaagtgcagttttgttgcgtggatatattgtatagtagtgaagtctgagctttcagtgtaaccatcacctgaatagtggacattgtacccgttaagtaatgtctcatccctcaccccctcccacccttcccagtctctccagtgtctgccattcctcactctgtccatgtgcacatgctattcagctcctgcttctaagtgagaacgtacggtatttgactttctgtgtctgagctgtgtcactgaagacaatggactccagctccatccacgttttttatcatttttacctgcactccacacccagcacaatccaggcttctttgtgggttttttgaaatttgtctttaattataaaagtagcagccagcaaattaacaaacacccatgtgcctttcattgcacagaattgaaaatcatcatactatatttgcttcaagtaatttccattagaaagaactagaatattacagtagagttaaagaccctttatttcccatcttcagtgctcttaaaagttcatttagggccaggcatggtggctcacacctataatcccagcactttgagaggcccaggtgggtggatcacctgaggtcaggagttcaagaccagcctggccaacatggcgaaaccccatctctactaaaaatacaaaaattagctgggcgtggtggtgcgcatctgtaatctcagctactcgggaggctgaggcaggagaatcgcttgaactcaggagggaggcagagcctgtatgcagtaagccgagattgcgccaccacaccccagcatgggtgacagagcaagactccgtctcaaaaaaaaaaaaaaaaaagttcattcattgtacacttagaaatagttaaaaaggtaaactttgttttgtgtgtgtgtgtatatatatatatatatatatatatatatatatatatatatatgtatttttttttgagacatatatgtgtctggtttgttcgcccaggcaggagtgcagtggcatgatcaacggctcactgcagcctcaacttcctaggctcaagtgatcctcctgcctcagcctcccgagtagctaggattacaggcacacaccaccatgcccagctaattttttttttttttttttttttttgtagagacagggttttgctatgttgcccaggctggtctcaaactcctgagctcaagcgatccacctgcctcacctcccaaagtgctgggattacaagtgtaagccaccacacctgacctgttttgtatattttaccacaataaaaagcctttaaaaccccaagcagacagttcattttcattcaggcccaactcagaatctgatcacagcggggtttcccccctttctagcgagtagctgaagaactgttttctctccttgatggtataactgtctctgtgggtgttgctcccctgccgctccagtggttttgtttttgtttttgtttttttgagacggagtcttgcgatctcagctcactgcgacctctgcctcctgggttcaggcgattcttctccctcagccttccatgtagctgggacttacaggcacctgccaccacgcccggctcatttttgtatttttagtagagacggagtttcaccatgttggccaggttgggctcgaactccagacctcaggtgatccacctgcctcagcctcccacagtgctgggattacaggtgagagccactgcacccagccggcccctcagtcttttccttctcaatcagtggcaccaccatcttcccaggctttggacatggtccctgactcacccttgcccctcacccccacactaatccacctgcgagctctgttgcttcaccacctagaccagccccaaatcctcaactgcccccaccctgggccacacctggaccactgctagaggcctctcatgggccctccctgtttttctcttgcactccccgggctttctggcacaagatgccccagaagcagaatcacatatctctcctgggagccaatctagtgtgtttactgcccctggagtgttattgttggccttagaatatgtcccactacaggtttgcagagcactgtagtcaaaagtcatttgaaataaatcttttctctgtggtatattgtcaatttgatatagaattaaatttgtttcttttcttttttcttttctttttttttttttttaagagacagggtcttggccaggcgtggtgtctcatgcctgtaatcccggcactttgggaagccaaggtgggtggatcgcctgaggtcaggaattcaagaccaacctggccagcatggtgaaaccccgtctctgctaaaaatacaaaaattagccgggcgtgatggcaggtacctgtaatcccagctactcgggaagctgaggcaggagaaggcttgaactcaggagtcggaggttgcagtgagccaagatcacgccatggcactctagcaagactctgtctcaaaaaaaaaaaaagagagagagagagacagggtcttgctctgtcactcaggctggagtgcagtgatgtagtcatggctcactgcagcctcatactcctgacctcaggtgatcgacccgcctcggcctcccaaagtgctgggatcgtaggctgaagccaccatgcctggcccgaactcatttgtttttatttgcattaagtgtaataaggttttgttacttttagtttgaattttattttgggtaatataaacatttacatgattcagaagtcagaattacactgaggcatgttcagctaggcctcactcctgtgcctgtacccttacctttttccccctaccccatgcagggaatcaatttcattagttcctggtgtgtccttccttaatacccccccttctttctttggtagaatgcagtagatatgtttgcgctttgctccctttgcttcacagtggatcctggaaatgactccatcgcagttcttagagctcttgtttagtccctttggatctgcacagtactccagtgtgtgggcgcaccataagtttattcagcaagtgccctggtgatagggatcgggggtattggaagcctttggctggtaaaaataatgttgtagcaaataacatcatgcatatgttctttgagatttctggaggtgtctctttagcatagatttctagaaggcattccttacgtcacgtttaggtttatagtttgacctcatggtgattaaggtatttgggaaatgcaaatgagagtttcgaagaagccagatctttcccattagttcactgtttttctctgacattaggaccgtccgggttctagggagcagccctggcgttaggcagtgccatgatggattgtgtagaagtagcgattcccatctgtctgctttcttggcccactctgctggtggctccccttccctccctcctttatggggagctggggagctgcctaggggtccattctcaaaggctgatctctggtgggcaacaggccacacctagctttccagggttcttcgtcatttcccattgagagctgtaagactcagagacatgaaaaggaagctctggctgggcacggtggctcacgcctgtaatcccagcactttgggaggctgaggcgggtcgatcacctgaggtcaggagttcgagaccagcctgcccaacatggtgaaaccccgtctccactaaacatacaaaaattagcctggcgtggtagcacacgcctgtgatcccagctactccggaggctgaggcaggagaataacttgaacccggcaggcggaggttgcgatgagccgatattatgccatcggcaacagagcgagactccatctcaaaaaaaaaacaaaaaacaaaacaaggcgagctctgtgctgggacagattagggacccctctttacagcaagaaagactgctctgtgggttgtaggatgcctttgtgtatgcagtggctctaggtgactctggcagccacactctgggccctaaacttctggaggaagatacaggatagggaggaactcaggggtgagtcatggtggggacaagacattccctcactctaagaccttgtcactagattggaacatctcttgcctccctacacctgacctgatggttctggagagatacgtccttgcagcttctgagtcccagcactaagcagcctttggtaacttccctacatcatttgagttctggtttcctaaggatgcttgccagtgagtgccatggtgccctcattgcacagtctgtgcagtgtagacaagaggggaagtctcttggggtagaccagccgcaaggcggtgactagcactgatgtgaaccacatgggacaggggagttgtggggctgagaacacggagggtgggagtagtcatgctcttttccagaatgaactgctaacgaagggactcgcaggtggctgctgcttctttccaagctgcccctgttgttgcagaggctctggagtcctaggaggtttcacggtggcatactcgacagagtactagagcatcatggccagatagtgatgctggggtgtggggcctcacggtggccatttctgacgagaccccaccgggccaaagtgatgtgtagagaaggagctgcttcggtcaccagaaaagaacggggaagcctcccacactagaataggtagggtgctcttctccaccggcaggaaggggatgtatggctctgcctggaccacacctttttccttgctcttccctccgcatctgctgtggccgaggccattcctcatcagggaacatgtgttagaggctcacgccacctgggaccacttgtcttatcacccccaggaccctaggcggtagtttcctgtggcctgagttagctgatatttatatagtgccattgtgccttttctcctgtgatgctcacagtaaggatgcctagatggggttacctgttgtcaagataaggaaactgaagcacagaatgctgaggtcatttgctgggttcatgtttggaaagcggcaaaggatttcagtgcaggttggctggctccaaacctgtgtgtgctttccatgacactgtactgtgtgcctcattgagcctcattctagaaaaccaaaaacacacccaaggcccggccttcacaaaggagacccctcccccatttggctccctttccagcagtcgacggcctcttgtcagccatcgagcccagagtcccttgaagtgcgactcatgctggggtggtatgctcaggagccgcagtgtttccgctcagaggaaagggctctgattctcctgcagtgctaggagacttgtgggtggccacagtgcaggtcaggcacaccggccagcaccacccacagcccaaattcctaaagaaatatttgggtcccagcttggcccgagtctctgttgtcctggggaaggacatcaagatctgagtgtatgatggcctggggccttgcatgtggtgggggtccaagcctgcctctgctcacttgttctgcagactggcatgttctctgtgatacttacatacttgtttaacacttcagggaagaaaagtcagaagaccaggacctccagggcctcaaggacaaacccctcaagtttaaaaaggtgaagaaagataagaaagaagagaaagagggcaagcatgagcccgtgcagccatcagcccaccactctgctgagcccgcagaggcaggcaaagcagagacatcagaagggtcaggctccg

SEQ ID NO: 14 - DNA, 7670 bp, Homo sapiens
caccacatggctagaagtcgatccatcctctggcgtaaccatcctccatgctactgtccctggggcactgaggccctcctcagtgacttcctccacctcatcttccgccatctccaagccaccagtgtccaacggactactgatatgtcccaaactcatcatttgtttattcaccaattcagagcccacctttttttcagcactgagctagcctctccttgctagaagcttacggtcgaaggtctccagccatcagaagaagcacgtggagcgctgcgtccgtgttgtggttattcatccagcatgtgttgagtaagggttgcacctgtgcctggcattatgcattgagcggggagatgggggttggcacgcacagtggggtgttctaagtacactgagggctcgggtgccctggctcatagagcagggagggaggcaggagcagggaaggtgtctcagaagtgccatctttttttttttttttttgggaagtggaatcttgttctatcgcctggtctggagtgcaatggcactatctcaactcactgcagcctccgcctcccaggttcaagcgattctcatgcctcagtccccgagtagctgggaccacaggcgcacaccaccacacccggcaaatattttgtatttttagtagaggcggagttttgccatgttggccaggctggtcttaaactcctggcctcaagtgatctgctcacctcggcctcctaaggtgttgggattacaggcatgagccactgcgcccggtctagaagtgccatcctaactgaacctgaaagatgaaagttctccagatgaacctgaaagttctccaaatgaaaaggtgggagggggtgacagggttaggcccagagcctctggtgacacagggtgggcatcattggtcactttttcctcgagggaggggcgtcacacgggtgatagggtgggagctataaccatgttgatagtgccgcctctgcccatctggcctggcatgccctgagccctctgtcccacctgtggaactcataagccctgacagcccactcactcctgattcattatccacacccctgtgcttccgctgtgcctggagcaagctttcttcagggggaagggaggctggaactatgttgtagttacctatttgtcctcccttccaaactgtgagttcttggaggtggaaggatgctgcaggatctggctcaggacgaaggcagttggtgaacagacacgtgtgtttttgactcacggtgatctcagacaagttcctctgtctagtcgaacttctttttttccatctgtaacactcaggagttgaataggtggtttttctgaggatacttcaactgtaaaatgtatgaacttgtgaactagctatttagttctcctcataatcaagattgtgtgtgtgtggggggttctgattagagggaggatgaagagaggtgtatggggttttttttgttttgttttctgtttgtttgtttgtttttgagatggagtctcactctgtcacccaggctggagtgcagtggcacgatttcggttcactgcaacctctgcctcctgggttcaagtgattctcctgcctcagcctcctgagtaactgggattacaggcatgcaccaccatgcccagctaatttttgtatttttaatagagatggggttttcgccatgttggccaggctggtctcgaactcctgacctcaggtgatccacctgcctcggcctcccaaagtgctgggattataggcatgagccaccacacctggcaggtttctttgaaaaagtttgtgtttcggcaaacaccataaaccccctgggggacagccttggggagtcacctggcaccctagcccagcctccctcccttgggtcctgcagtgaaggcttagtgagggtgtgcaaatgcccaggtcaccctgggactgggcaggccctctgggctaagggtaaactcatttggaatacctgttttctatcattgttttttatttgttaaatttaaagggtacaagtgcagttttgttgcgtggatatattgtatagtagtgaagtctgagctttcagtgtaaccatcacctgaatagtggacattgtacccgttaagtaatgtctcatccctcaccccctcccacccttcccagtctctccagtgtctgccattcctcactctgtccatgtgcacatgctattcagctcctgcttctaagtgagaacgtacggtatttgactttctgtgtctgagctgtgtcactgaagacaatggactccagctccatccacgttttttatcatttttacctgcactccacacccagcacaatccaggcttctttgtgggttttttgaaatttgtctttaattataaaagtagcagccagcaaattaacaaacacccatgtgcctttcattgcacagaattgaaaatcatcatactatatttgcttcaagtaatttccattagaaagaactagaatattacagtagagttaaagaccctttatttcccatcttcagtgctcttaaaagttcatttagggccaggcatggtggctcacacctataatcccagcactttgagaggcccaggtgggtggatcacctgaggtcaggagttcaagaccagcctggccaacatggcgaaaccccatctctactaaaaatacaaaaattagctgggcgtggtggtgcgcatctgtaatctcagctactcgggaggctgaggcaggagaatcgcttgaactcaggagggaggcagagcctgtatgcagtaagccgagattgcgccaccacaccccagcatgggtgacagagcaagactccgtctcaaaaaaaaaaaaaaaaaagttcattcattgtacacttagaaatagttaaaaaggtaaactttgttttgtgtgtgtgtgtatatatatatatatatatatatatatatatatatatatatatgtatttttttttgagacatatatgtgtctggtttgttcgcccaggcaggagtgcagtggcatgatcaacggctcactgcagcctcaacttcctaggctcaagtgatcctcctgcctcagcctcccgagtagctaggattacaggcacacaccaccatgcccagctaattttttttttttttttttttttttgtagagacagggttttgctatgttgcccaggctggtctcaaactcctgagctcaagcgatccacctgcctcacctcccaaagtgctgggattacaagtgtaagccaccacacctgacctgttttgtatattttaccacaataaaaagcctttaaaaccccaagcagacagttcattttcattcaggcccaactcagaatctgatcacagcggggtttcccccctttctagcgagtagctgaagaactgttttctctccttgatggtataactgtctctgtgggtgttgctcccctgccgctccagtggttttgtttttgtttttgtttttttgagacggagtcttgcgatctcagctcactgcgacctctgcctcctgggttcaggcgattcttctccctcagccttccatgtagctgggacttacaggcacctgccaccacgcccggctcatttttgtatttttagtagagacggagtttcaccatgttggccaggttgggctcgaactccagacctcaggtgatccacctgcctcagcctcccacagtgctgggattacaggtgagagccactgcacccagccggcccctcagtcttttccttctcaatcagtggcaccaccatcttcccaggctttggacatggtccctgactcacccttgcccctcacccccacactaatccacctgcgagctctgttgcttcaccacctagaccagccccaaatcctcaactgcccccaccctgggccacacctggaccactgctagaggcctctcatgggccctccctgtttttctcttgcactccccgggctttctggcacaagatgccccagaagcagaatcacatatctctcctgggagccaatctagtgtgtttactgcccctggagtgttattgttggccttagaatatgtcccactacaggtttgcagagcactgtagtcaaaagtcatttgaaataaatcttttctctgtggtatattgtcaatttgatatagaattaaatttgtttcttttcttttttcttttctttttttttttttttaagagacagggtcttggccaggcgtggtgtctcatgcctgtaatcccggcactttgggaagccaaggtgggtggatcgcctgaggtcaggaattcaagaccaacctggccagcatggtgaaaccccgtctctgctaaaaatacaaaaattagccgggcgtgatggcaggtacctgtaatcccagctactcgggaagctgaggcaggagaaggcttgaactcaggagtcggaggttgcagtgagccaagatcacgccatggcactctagcaagactctgtctcaaaaaaaaaaaaagagagagagagagacagggtcttgctctgtcactcaggctggagtgcagtgatgtagtcatggctcactgcagcctcatactcctgacctcaggtgatcgacccgcctcggcctcccaaagtgctgggatcgtaggctgaagccaccatgcctggcccgaactcatttgtttttatttgcattaagtgtaataaggttttgttacttttagtttgaattttattttgggtaatataaacatttacatgattcagaagtcagaattacactgaggcatgttcagctaggcctcactcctgtgcctgtacccttacctttttccccctaccccatgcagggaatcaatttcattagttcctggtgtgtccttccttaatacccccccttctttctttggtagaatgcagtagatatgtttgcgctttgctccctttgcttcacagtggatcctggaaatgactccatcgcagttcttagagctcttgtttagtccctttggatctgcacagtactccagtgtgtgggcgcaccataagtttattcagcaagtgccctggtgatagggatcgggggtattggaagcctttggctggtaaaaataatgttgtagcaaataacatcatgcatatgttctttgagatttctggaggtgtctctttagcatagatttctagaaggcattccttacgtcacgtttaggtttatagtttgacctcatggtgattaaggtatttgggaaatgcaaatgagagtttcgaagaagccagatctttcccattagttcactgtttttctctgacattaggaccgtccgggttctagggagcagccctggcgttaggcagtgccatgatggattgtgtagaagtagcgattcccatctgtctgctttcttggcccactctgctggtggctccccttccctccctcctttatggggagctggggagctgcctaggggtccattctcaaaggctgatctctggtgggcaacaggccacacctagctttccagggttcttcgtcatttcccattgagagctgtaagactcagagacatgaaaaggaagctctggctgggcacggtggctcacgcctgtaatcccagcactttgggaggctgaggcgggtcgatcacctgaggtcaggagttcgagaccagcctgcccaacatggtgaaaccccgtctccactaaacatacaaaaattagcctggcgtggtagcacacgcctgtgatcccagctactccggaggctgaggcaggagaataacttgaacccggcaggcggaggttgcgatgagccgatattatgccatcggcaacagagcgagactccatctcaaaaaaaaaacaaaaaacaaaacaaggcgagctctgtgctgggacagattagggacccctctttacagcaagaaagactgctctgtgggttgtaggatgcctttgtgtatgcagtggctctaggtgactctggcagccacactctgggccctaaacttctggaggaagatacaggatagggaggaactcaggggtgagtcatggtggggacaagacattccctcactctaagaccttgtcactagattggaacatctcttgcctccctacacctgacctgatggttctggagagatacgtccttgcagcttctgagtcccagcactaagcagcctttggtaacttccctacatcatttgagttctggtttcctaaggatgcttgccagtgagtgccatggtgccctcattgcacagtctgtgcagtgtagacaagaggggaagtctcttggggtagaccagccgcaaggcggtgactagcactgatgtgaaccacatgggacaggggagttgtggggctgagaacacggagggtgggagtagtcatgctcttttccagaatgaactgctaacgaagggactcgcaggtggctgctgcttctttccaagctgcccctgttgttgcagaggctctggagtcctaggaggtttcacggtggcatactcgacagagtactagagcatcatggccagatagtgatgctggggtgtggggcctcacggtggccatttctgacgagaccccaccgggccaaagtgatgtgtagagaaggagctgcttcggtcaccagaaaagaacggggaagcctcccacactagaataggtagggtgctcttctccaccggcaggaaggggatgtatggctctgcctggaccacacctttttccttgctcttccctccgcatctgctgtggccgaggccattcctcatcagggaacatgtgttagaggctcacgccacctgggaccacttgtcttatcacccccaggaccctaggcggtagtttcctgtggcctgagttagctgatatttatatagtgccattgtgccttttctcctgtgatgctcacagtaaggatgcctagatggggttacctgttgtcaagataaggaaactgaagcacagaatgctgaggtcatttgctgggttcatgtttggaaagcggcaaaggatttcagtgcaggttggctggctccaaacctgtgtgtgctttccatgacactgtactgtgtgcctcattgagcctcattctagaaaaccaaaaacacacccaaggcccggccttcacaaaggagacccctcccccatttggctccctttccagcagtcgacggcctcttgtcagccatcgagcccagagtcccttgaagtgcgactcatgctggggtggtatgctcaggagccgcagtgtttccgctcagaggaaagggctctgattctcctgcagtgctaggagacttgtgggtggccacagtgcaggtcaggcacaccggccagcaccacccacagcccaaattcctaaagaaatatttgggtcccagcttggcccgagtctctgttgtcctggggaaggacatcaagatctgagtgtatgatggcctggggccttgcatgtggtgggggtccaagcctgcctctgctcacttgttctgcagactggcatgttctctgtgatacttacatacttgtttaacacttcagggaagaaaagtcagaagaccaggacctccagggcctcaaggacaaacccctcaagtttaaaaaggtgaagaaagataagaaagaagagaaagagggcaagcatgagcccgtgcagccatcagcc

SEQ ID NO: 15 - DNA, 17045 bp, Homo sapiens
gggtgtaggtatgtaccctggcctctgccagtcagactcacatgctaggaggagcagggccaggcaggagagccgtgtctcctggcattggggctgcaggaaagacgagctcctaggccacagtgccagtggccagtgctgctgccttgcagggtcgcacaggcagtgctggctgtttggactggcttggcagaaggatttgaagtattgttcctagccaactggactcaaacctgttcctccaaccctctagggattctcttatcacccagtagccttttccccctagttttaaaaattgcagtaaaatacacaaaagataaaatgtactgccttaaccatttttaagtgtacaattctgtggtattgagcacatttatattgtgcaaccatcaccacatgcatcttcaatagcttttcatcagtccttgtctgcataaatcagctagagttggtttctattgattgccaccaataatcttgacagatatgtctgatcttccttctctgcactgactcctctttctctgtctcctctgctgattctttctcctcatcacaactccaaatagcagggggagggttgtttacacttatattcagcacgccctcacgcactcgcctggctcttcagacctctcccctgaactccagattcatacatccagctgccctttaggcctctagaaagctaaatacctcagtatcaaaaacatgagaaacggaagccagagtcctggatctctcgccctttcgctgtcccggtgcccatgcccttcagggatggcacctagaccagctccctgcatccctgcctagactctgcagtagtctcacgtggcagacccggaggtcactctcctctctggatgccctgcggacactccggttagcctcagctgcaagagcctcctcacccaaggtcacgccatttccaggacagcaccctggtgactgagcgaggtaagggtacaaggcccttatagggccttctctttgacttcttcccacctccctttatggatgtcagttcctgatgaacatcttacacctcaaaccgtgacccaacatctgcttctgcagagcccccctgtggcatcttgtgccctcctgccccactccctctactctatatcttcccatagttagaatgggctttttttttttttttttgagataaggtctccctttgtcacccaggctggaatgcaatggcacagtcacgactcactgcagcctcaacctcctgggctcaagcagtcctcccacctcagcctcccaagtagctgagactacaggtatgcaccaccacacctggctaatttttatattttttgtagagactggggtctccctatgttgcccgggctggtctcgaactcccaggctcaagcaatcctcccgccttggcctcccaaaatgcaggattacaggcgtgtaccagtgtgcccagcctcagatgggctctttgaaaaatgtttattagatcaggttactcccttgagaaaaaccctctcagaataaaacccgaagtccattacttgaaagcagagccagcttcatgggcctttgtaactgcccatgggcttgctggaacccaggcttggtttaatactctactctcaccatctcaaaattcttaatttttgaacaagaggccctgcattttcattttgcaccaggctccacaaattgtgtaactgggcctgcctcagcagccacatggaacatgatccctccttgcctatttgagctcattctctaccattctctcccttgctcacctggctcccactgctcttgctcttcctggaacttgccataatgttgctagagtcagagccttggctcttgctgctcctcattggctggacccctctttacttgacctgctccctcaccactcacttccttcagatctgtgttcagatttcgtcttctcagagaggcttttggcccctgtccatctctctgaatttacctctgacctctcccccaccaccactgcgctaagctgcctcagaactttgtagacattctgtctggtcttctgatgtttcccccttggaagaatcccaaggtgcctgaagaatgctttctttatccttgaagttgagtaggttgactagagtctggcttgctattgagcattctttatcaaattgtcctgggaacatggtgtattctttcagtctgcagatgtagtcgttgctgtttcaggtcagctctcttatggatctttgacagcatcttctgttccatttgttgagttctgtacttcagggacacaaattcctcatgttggattgtctttgtctctcttccaatgctattagctttgccgtaattggtttagcttttgtctttttcatctgcattcactttgtctaatttgattttcagctatgtatattctgtttctggctgtttttcaatgtatttattagtttcataatgatgtgttttggtctgcagtttgtttctctaggttggaaatttgtcttttcatcttattctgttttatcatcccatctttgaactcttttattgggaacatgttcttatgaagttgtggggaatttttttcccttccttgtgtattctcttcttggtgggagactttgcctttctcgtgccatctccctccctgggcctcttttttttcttctggccataatatgtttgcctagttaccatgtcacttcttttcgtcttggctcaggcttggatggctctgcatagtcgttctgtttgctttgagacagtggaggaattcttggctctctcttcccagtttcttggcatcttctcttgctgttttcccctctgagctatcgcgtgcaggcttgttatcttgtatccggagagaatttgcacgctggagggagctgcagccatgtagtcttcagccctatctggattcttctctttgttctaagaactgtgttggatgtcttactaaggctcactctagctgcacgagggatgtgtgtgccatttccatggggatagggggcacctcagtctctgggtggttccataatctgtgtatacctaagagcagttgcttcccacagagctgggctggctcactgggcactttgccatttctcctgcacctcccagctggagtttctgggtctaaaaggaaaaagtgaaggactcccacttggttgcttctctccagcttactgactgcaaattcccagggcgttgcccgctccctagggtggtttctgggggacggggcaggagcctggctttgctgctgctttgtcctctggagtcttttctcagactgctttgaattacacccctttcctttgtgtgctgaaatcttcccttcacactctccttccctgcctttcttttgtgtcttatcttactaggactggaagagggcagttgtgcaggaggtctgcatctaattccctaatccatgtgagagtgctcctgttgtgtgctttgtgacatgatggtgagaaatactccctagagcagtggctaccagaaggaagccatccccccccctgcacacacacacacacacacacacacacacacacacacacacacacactccttctggctgtcctcagatgcctattctaggtaaatgtcagattccaaagaaaatccagttgagatcttttttctttttttgagacgagagtcttgctgtgttgcccaggctggagtgcagtggcacaatctcggctcactgtaacctccgcctcctgggttcaagcgattctcctgcctcagcctcccaagtagctgggactacaggcgcgcaccaccacaccaggctaaaatttttttgtatttttagtagagacagggtttcactgtgttggccaggctggtctcgaactcctgacctcgtgttctgcccgcctcagcctcccagagtgctgggattacaggcttgagccatcgcgcccggcctccagttgggatcttgactggaatgactggtgttcaatcattatagtttccacctaatttgtatttgtacacaggacagttactaatttgttggtacttgtttgatccccagtccctagagttgtttatggggtggagcttcagtccctgctgcttcccctgtggcagcagctggagtcagggtggggacccagggtgctgctggcagattcttgagacaggtagaatctcctctatattggtgtctctctctgtcccagcagtgcccaggaaaacctggccagcctgtcactgacctctccacctagggcactggtggttcaggtccttctatttgccaccggcaaaccgtacttctgccagtctggctcttaggcccagtttctctgatcttgcagattttcttgggctctgctacggaatcctcatacctccggcaggtccctcctttgcccatgtgtttaactgtggtggaatcgtgtgagagctgcttctctcgcatggatcccagccacaccacattctacagcggttcctctgaaggcattgatagagatatttcctcctgttttgcatttcgttggtcatttcagtagaatcagggtgaaataaacatgggggctcagatgtcagcattacgaaccaagtacgtcaggcaggctgatgtggactgacctacactagtgagacgcaagatgacgaaaacaagggcactcactccaagttactgatgagatgtttggatcaaatgagccagtccttaagcagagttctctagtaaaagagatctcctttctgccctttcttgttccccaaaatgtgttgccttcatggtgaaaatttattttggcagattttctcttctttgataaaagcagccaacactttgttaaaagtctgtgaaacttatttacatgaagtatgtaaaggtaagaaaaaaacattatcaacaagaaatggagaaagccagcagctgaggacagaaaagtcatgcacagtgtcagtgtctatggaaacaggccacttggaccttgaggactaggtatttggaattggaggtgagcttggcctggtgagtctctaaccacttgtgtgtaggatcagtgtgagaaccctgctagaatatagtggcagagatgcaaggggaaatcattggagaagttaccagggaatgatgagctaatctgaaaaaaatacatgtttctaagttgggcgtggtagctcatctgtagtcccagctacttgagagcctgaggcaggaggatcgcttgagcccagcctgggcagcacagcgagaccctatctccctaaaaaaaactttttcgttgtttagttttgggatttttttttttcctggtcttttttccccctttttgtgaataacgggatctcactatgttgcccaggcagatctcgaactcctgggcccaagcaatcctcctgcctctgccttcctaagattacaggtatgagccactgtgttaagcaaaaaaacttttttaaatgaaaatcattttttaaaagacaggctttccaggggagggtattattccacttatatgaagtgtcaacagtaggcagatttgtggagacaaatagattagtggttaccaggggctgagaggagtgggagtggggagcaactgcttaatgggtaaagggttgtctttggaactagagagtagtgatggtcgcatgacattgtgaatgtactaaatgctattaatgataaattttatgttatgtgtattttaccacaattaaaaaaaaaagatcaaatgtcctcagaatagccaacaaccttccacttggctaaatgcctactcattaaacttcttgaactaaattcctttctgattgtcatggttattgtgtcctgggcttcagagtttcacattcaggttggcttggtccagtctgtcatgtatcactataggtccccacattggcctcttcctcagacggacagcccatctatctgccggggctctgtgccacagccagatagacttgctctgagacagctgtgtgggctctgagcactggccaggcatcacaaaacctatctttatgatttagaataattggtggtcagctgctgttttaatgttgttgttttttttaatttagatataattcacataccatgaaatttactcatttaaagtgtacaattcattcttcagtataattcataggctcacagaaaaaattgtttaaaaataaaatgtgcaattcagtgtcttttagtacattcacagagttgtgcaaccatcgcctctgtgtcattccagaacactttcagcacccaaaagaaaccccagacacaggagcagtcacctcttattacccgcagcccctggcaacaactcatccacttcctgtctctatggatttgcctattctggacatttcctataaatggaattatgcactatttggccttttgtgtctggcctctttcactgagcgtaatgtcctcaaggttcatctgcattgtagcatgtgtcagaatttctttcctttttgaggctgaatgatattatatcctatagataatgaggttttgattatccacccatcccttgggaatgcatatttgggttgcccccaccatttggctgttgtaaactgtgctgccatgaacactggtgtacggatatctgtttggttactggttttggttttttgtttgtttgttttggttttttgagacaaggtcttgctctgtcgcccaggctggattacagtggcacgatctctgctcactgcaacctccacctcccaggttcaagcaattctcctgcctcagtctcctgagtagctgggactacaggtagcactcaccaccatgcccggctaaatttttttgtatttttagtagagacaaggtttcgccatattggccaggctggtctcaaactcctgacctcaggtgatccacccacctcagcctcccaaagtgctgggattacagacgtgagccaccgcacccggcatagttgtggctttttgagagtgtatggctaggagtaaaattgccaggtcatatggtaactccatgtttaacatttgagaaactgccaaactgttctccacagcaggaattttttaacctgtatgtggtgggcttgtgtttcggttttcattttacacatctataaagatgagatttgctgtatggcactggttgcctgtatttggggagggttctgcttttggttggcaagaactgcattttatttaagcttagcaaaacataactggtttctcgcatcttctcaaaagtggaggattaagaaatggactgcgaattcagagcagggcagctgaacctcaggctccacccttgtagccttcaagctgaacctcattctctcttgctccctggagaccactgagacactctgcctgtgccagtttgatttctcacatttttaaagggccaaagcttgtgtctcaaagtgctatagcctttattgattcatgcagagaagcctccttgattccgtaattctgcagctaatactggaagtagaaagaattggaaacaccatctggatgacactttagggtggaagcagccagtacaagggggggctcattatttcctctggtcccagactgttcacctggagctgtagccaccaccctgcccttaggttaactgcctcgagtggtagtttagctctttgtgctgtgccgagggataactggaagtgaaaggtgctgagaaatgccatctcctgaaagtggcgagcatgagtgaatttacgaaaggttgggatattgctggggctctggaagtttctctggagctcactccaggggacagggagggggctggattccaattcaagtgaaaaatacctttcatctgccttgttcacctggcttttttgcctttttgtaaaatctgaaaacctcagggattgagtagtctttccttaactgcagttgcctgtctggccacacctgccagctgttgcttgtacccctgtaatttgcacggccttccgggcctttctcacaagatcactgcaggtcacattcatgaggaaaatgcaggcagttcctgccatcagacccctcaggatgtcatggtttggcctgaaaacaagattcctgcaactctaattttcctttgctagatcaaatgaaggatttgatctaatgtttgcattctagcagcaaaatcattgaatattttatttcttaagagccttacttcatattttgtaggtattttaagattttgtaaaggcctttctgcttcaacgtgtgatgtgtgcattcttagaaaaagatcttgtgttctgtaaatcacacaataaaaacatgagttcgtgcaggaaaaactggggcggggtggatcactccaaacttgtgtggtgtggtaactggagctcactgatgaaaccatgaacagttctggctgaaagaaccccacagtacactgaggtctgttggcatcgccgccagcaccgccccggtccctttgtgcgcgccaccacacctggctaattttttatttttagtagagagggggtttcaccatgttggtcaggatggcctcgaactgacctcgtgatccgcccacctcagcctcccaaagtgctgggattacaggtgtgagcctccgtgcccagccttcagctttttttcttaatgtctttgtgtaatatgaaggcattctctttaattgttaaaaagcttgcctaccactgcttcaaaatattactgtcagttggcatagcttctgattatattgatgtcatctcccttcttttaaacatgttaccatattggcactgtatttcccctagcccattgatcacttgagagttagtcatagtcctcgtgctgtttcactcctaaacgtttaagcatgcctttcctaagagcagacagtacagttaagacactcaggaagtttagcaatgagctaacacagaaccttacatttctccacataccccataaatgccttttttagagcctttgagcctggaatgcagagtccaggactgtgtgttgtattcgattgtgtcatcccttcagtctcctttatcagaaatgttcccccacccccttgttttctctcatcatcttgagtccagaccgtggttgcatggcacgccctctctggactcttcctgctgtctcctcacggtaagcttcagtctcctactcgtgatgctggttcatctcagcagcactgaggggcctgagctcagtttggtcgtgtgttaaggtggtgcctgccagatttctccacagaaaagggccccgtacttttatttgctcttcagcctgtgtattccttcctttcttgccagcttgtgggtggcttctctagcagcttctgtaagatactcagtttggcagttgtagttgtttcagcaggagaggtgtctgcatacctgaccaccacatggctagaagtcgatccatcctctggcgtaaccatcctccatgctactgtccctggggcactgaggccctcctcagtgacttcctccacctcatcttccgccatctccaagccaccagtgtccaacggactactgatatgtcccaaactcatcatttgtttattcaccaattcagagcccacctttttttcagcactgagctagcctctccttgctagaagcttacggtcgaaggtctccagccatcagaagaagcacgtggagcgctgcgtccgtgttgtggttattcatccagcatgtgttgagtaagggttgcacctgtgcctggcattatgcattgagcggggagatgggggttggcacgcacagtggggtgttctaagtacactgagggctcgggtgccctggctcatagagcagggagggaggcaggagcagggaaggtgtctcagaagtgccatctttttttttttttttttgggaagtggaatcttgttctatcgcctggtctggagtgcaatggcactatctcaactcactgcagcctccgcctcccaggttcaagcgattctcatgcctcagtccccgagtagctgggaccacaggcgcacaccaccacacccggcaaatattttgtatttttagtagaggcggagttttgccatgttggccaggctggtcttaaactcctggcctcaagtgatctgctcacctcggcctcctaaggtgttgggattacaggcatgagccactgcgcccggtctagaagtgccatcctaactgaacctgaaagatgaaagttctccagatgaacctgaaagttctccaaatgaaaaggtgggagggggtgacagggttaggcccagagcctctggtgacacagggtgggcatcattggtcactttttcctcgagggaggggcgtcacacgggtgatagggtgggagctataaccatgttgatagtgccgcctctgcccatctggcctggcatgccctgagccctctgtcccacctgtggaactcataagccctgacagcccactcactcctgattcattatccacacccctgtgcttccgctgtgcctggagcaagctttcttcagggggaagggaggctggaactatgttgtagttacctatttgtcctcccttccaaactgtgagttcttggaggtggaaggatgctgcaggatctggctcaggacgaaggcagttggtgaacagacacgtgtgtttttgactcacggtgatctcagacaagttcctctgtctagtcgaacttctttttttccatctgtaacactcaggagttgaataggtggtttttctgaggatacttcaactgtaaaatgtatgaacttgtgaactagctatttagttctcctcataatcaagattgtgtgtgtgtggggggttctgattagagggaggatgaagagaggtgtatggggttttttttgttttgttttctgtttgtttgtttgtttttgagatggagtctcactctgtcacccaggctggagtgcagtggcacgatttcggttcactgcaacctctgcctcctgggttcaagtgattctcctgcctcagcctcctgagtaactgggattacaggcatgcaccaccatgcccagctaatttttgtatttttaatagagatggggttttcgccatgttggccaggctggtctcgaactcctgacctcaggtgatccacctgcctcggcctcccaaagtgctgggattataggcatgagccaccacacctggcaggtttctttgaaaaagtttgtgtttcggcaaacaccataaaccccctgggggacagccttggggagtcacctggcaccctagcccagcctccctcccttgggtcctgcagtgaaggcttagtgagggtgtgcaaatgcccaggtcaccctgggactgggcaggccctctgggctaagggtaaactcatttggaatacctgttttctatcattgttttttatttgttaaatttaaagggtacaagtgcagttttgttgcgtggatatattgtatagtagtgaagtctgagctttcagtgtaaccatcacctgaatagtggacattgtacccgttaagtaatgtctcatccctcaccccctcccacccttcccagtctctccagtgtctgccattcctcactctgtccatgtgcacatgctattcagctcctgcttctaagtgagaacgtacggtatttgactttctgtgtctgagctgtgtcactgaagacaatggactccagctccatccacgttttttatcatttttacctgcactccacacccagcacaatccaggcttctttgtgggttttttgaaatttgtctttaattataaaagtagcagccagcaaattaacaaacacccatgtgcctttcattgcacagaattgaaaatcatcatactatatttgcttcaagtaatttccattagaaagaactagaatattacagtagagttaaagaccctttatttcccatcttcagtgctcttaaaagttcatttagggccaggcatggtggctcacacctataatcccagcactttgagaggcccaggtgggtggatcacctgaggtcaggagttcaagaccagcctggccaacatggcgaaaccccatctctactaaaaatacaaaaattagctgggcgtggtggtgcgcatctgtaatctcagctactcgggaggctgaggcaggagaatcgcttgaactcaggagggaggcagagcctgtatgcagtaagccgagattgcgccaccacaccccagcatgggtgacagagcaagactccgtctcaaaaaaaaaaaaaaaaaagttcattcattgtacacttagaaatagttaaaaaggtaaactttgttttgtgtgtgtgtgtatatatatatatatatatatatatatatatatatatatatatgtatttttttttgagacatatatgtgtctggtttgttcgcccaggcaggagtgcagtggcatgatcaacggctcactgcagcctcaacttcctaggctcaagtgatcctcctgcctcagcctcccgagtagctaggattacaggcacacaccaccatgcccagctaattttttttttttttttttttttttgtagagacagggttttgctatgttgcccaggctggtctcaaactcctgagctcaagcgatccacctgcctcacctcccaaagtgctgggattacaagtgtaagccaccacacctgacctgttttgtatattttaccacaataaaaagcctttaaaaccccaagcagacagttcattttcattcaggcccaactcagaatctgatcacagcggggtttcccccctttctagcgagtagctgaagaactgttttctctccttgatggtataactgtctctgtgggtgttgctcccctgccgctccagtggttttgtttttgtttttgtttttttgagacggagtcttgcgatctcagctcactgcgacctctgcctcctgggttcaggcgattcttctccctcagccttccatgtagctgggacttacaggcacctgccaccacgcccggctcatttttgtatttttagtagagacggagtttcaccatgttggccaggttgggctcgaactccagacctcaggtgatccacctgcctcagcctcccacagtgctgggattacaggtgagagccactgcacccagccggcccctcagtcttttccttctcaatcagtggcaccaccatcttcccaggctttggacatggtccctgactcacccttgcccctcacccccacactaatccacctgcgagctctgttgcttcaccacctagaccagccccaaatcctcaactgcccccaccctgggccacacctggaccactgctagaggcctctcatgggccctccctgtttttctcttgcactccccgggctttctggcacaagatgccccagaagcagaatcacatatctctcctgggagccaatctagtgtgtttactgcccctggagtgttattgttggccttagaatatgtcccactacaggtttgcagagcactgtagtcaaaagtcatttgaaataaatcttttctctgtggtatattgtcaatttgatatagaattaaatttgtttcttttcttttttcttttctttttttttttttttaagagacagggtcttggccaggcgtggtgtctcatgcctgtaatcccggcactttgggaagccaaggtgggtggatcgcctgaggtcaggaattcaagaccaacctggccagcatggtgaaaccccgtctctgctaaaaatacaaaaattagccgggcgtgatggcaggtacctgtaatcccagctactcgggaagctgaggcaggagaaggcttgaactcaggagtcggaggttgcagtgagccaagatcacgccatggcactctagcaagactctgtctcaaaaaaaaaaaaagagagagagagagacagggtcttgctctgtcactcaggctggagtgcagtgatgtagtcatggctcactgcagcctcatactcctgacctcaggtgatcgacccgcctcggcctcccaaagtgctgggatcgtaggctgaagccaccatgcctggcccgaactcatttgtttttatttgcattaagtgtaataaggttttgttacttttagtttgaattttattttgggtaatataaacatttacatgattcagaagtcagaattacactgaggcatgttcagctaggcctcactcctgtgcctgtacccttacctttttccccctaccccatgcagggaatcaatttcattagttcctggtgtgtccttccttaatacccccccttctttctttggtagaatgcagtagatatgtttgcgctttgctccctttgcttcacagtggatcctggaaatgactccatcgcagttcttagagctcttgtttagtccctttggatctgcacagtactccagtgtgtgggcgcaccataagtttattcagcaagtgccctggtgatagggatcgggggtattggaagcctttggctggtaaaaataatgttgtagcaaataacatcatgcatatgttctttgagatttctggaggtgtctctttagcatagatttctagaaggcattccttacgtcacgtttaggtttatagtttgacctcatggtgattaaggtatttgggaaatgcaaatgagagtttcgaagaagccagatctttcccattagttcactgtttttctctgacattaggaccgtccgggttctagggagcagccctggcgttaggcagtgccatgatggattgtgtagaagtagcgattcccatctgtctgctttcttggcccactctgctggtggctccccttccctccctcctttatggggagctggggagctgcctaggggtccattctcaaaggctgatctctggtgggcaacaggccacacctagctttccagggttcttcgtcatttcccattgagagctgtaagactcagagacatgaaaaggaagctctggctgggcacggtggctcacgcctgtaatcccagcactttgggaggctgaggcgggtcgatcacctgaggtcaggagttcgagaccagcctgcccaacatggtgaaaccccgtctccactaaacatacaaaaattagcctggcgtggtagcacacgcctgtgatcccagctactccggaggctgaggcaggagaataacttgaacccggcaggcggaggttgcgatgagccgatattatgccatcggcaacagagcgagactccatctcaaaaaaaaaacaaaaaacaaaacaaggcgagctctgtgctgggacagattagggacccctctttacagcaagaaagactgctctgtgggttgtaggatgcctttgtgtatgcagtggctctaggtgactctggcagccacactctgggccctaaacttctggaggaagatacaggatagggaggaactcaggggtgagtcatggtggggacaagacattccctcactctaagaccttgtcactagattggaacatctcttgcctccctacacctgacctgatggttctggagagatacgtccttgcagcttctgagtcccagcactaagcagcctttggtaacttccctacatcatttgagttctggtttcctaaggatgcttgccagtgagtgccatggtgccctcattgcacagtctgtgcagtgtagacaagaggggaagtctcttggggtagaccagccgcaaggcggtgactagcactgatgtgaaccacatgggacaggggagttgtggggctgagaacacggagggtgggagtagtcatgctcttttccagaatgaactgctaacgaagggactcgcaggtggctgctgcttctttccaagctgcccctgttgttgcagaggctctggagtcctaggaggtttcacggtggcatactcgacagagtactagagcatcatggccagatagtgatgctggggtgtggggcctcacggtggccatttctgacgagaccccaccgggccaaagtgatgtgtagagaaggagctgcttcggtcaccagaaaagaacggggaagcctcccacactagaataggtagggtgctcttctccaccggcaggaaggggatgtatggctctgcctggaccacacctttttccttgctcttccctccgcatctgctgtggccgaggccattcctcatcagggaacatgtgttagaggctcacgccacctgggaccacttgtcttatcacccccaggaccctaggcggtagtttcctgtggcctgagttagctgatatttatatagtgccattgtgccttttctcctgtgatgctcacagtaaggatgcctagatggggttacctgttgtcaagataaggaaactgaagcacagaatgctgaggtcatttgctgggttcatgtttggaaagcggcaaaggatttcagtgcaggttggctggctccaaacctgtgtgtgctttccatgacactgtactgtgtgcctcattgagcctcattctagaaaaccaaaaacacacccaaggcccggccttcacaaaggagacccctcccccatttggctccctttccagcagtcgacggcctcttgtcagccatcgagcccagagtcccttgaagtgcgactcatgctggggtggtatgctcaggagccgcagtgtttccgctcagaggaaagggctctgattctcctgcagtgctaggagacttgtgggtggccacagtgcaggtcaggcacaccggccagcaccacccacagcccaaattcctaaagaaatatttgggtcccagcttggcccgagtctctgttgtcctggggaaggacatcaagatctgagtgtatgatggcctggggccttgcatgtggtgggggtccaagcctgcctctgctcacttgttctgcagactggcatgttctctgtgatacttacatacttgtttaacacttcagggaagaaaagtcagaagaccaggacctccagggcctcaaggacaaacccctcaagtttaaaaaggtgaagaaagataagaaagaagagaaagagggcaagcatgagcccgtgcagccatcagc

SEQ ID NO: 16 - DNA, 17047 bp, Homo sapiens
gagggtgtaggtatgtaccctggcctctgccagtcagactcacatgctaggaggagcagggccaggcaggagagccgtgtctcctggcattggggctgcaggaaagacgagctcctaggccacagtgccagtggccagtgctgctgccttgcagggtcgcacaggcagtgctggctgtttggactggcttggcagaaggatttgaagtattgttcctagccaactggactcaaacctgttcctccaaccctctagggattctcttatcacccagtagccttttccccctagttttaaaaattgcagtaaaatacacaaaagataaaatgtactgccttaaccatttttaagtgtacaattctgtggtattgagcacatttatattgtgcaaccatcaccacatgcatcttcaatagcttttcatcagtccttgtctgcataaatcagctagagttggtttctattgattgccaccaataatcttgacagatatgtctgatcttccttctctgcactgactcctctttctctgtctcctctgctgattctttctcctcatcacaactccaaatagcagggggagggttgtttacacttatattcagcacgccctcacgcactcgcctggctcttcagacctctcccctgaactccagattcatacatccagctgccctttaggcctctagaaagctaaatacctcagtatcaaaaacatgagaaacggaagccagagtcctggatctctcgccctttcgctgtcccggtgcccatgcccttcagggatggcacctagaccagctccctgcatccctgcctagactctgcagtagtctcacgtggcagacccggaggtcactctcctctctggatgccctgcggacactccggttagcctcagctgcaagagcctcctcacccaaggtcacgccatttccaggacagcaccctggtgactgagcgaggtaagggtacaaggcccttatagggccttctctttgacttcttcccacctccctttatggatgtcagttcctgatgaacatcttacacctcaaaccgtgacccaacatctgcttctgcagagcccccctgtggcatcttgtgccctcctgccccactccctctactctatatcttcccatagttagaatgggctttttttttttttttttgagataaggtctccctttgtcacccaggctggaatgcaatggcacagtcacgactcactgcagcctcaacctcctgggctcaagcagtcctcccacctcagcctcccaagtagctgagactacaggtatgcaccaccacacctggctaatttttatattttttgtagagactggggtctccctatgttgcccgggctggtctcgaactcccaggctcaagcaatcctcccgccttggcctcccaaaatgcaggattacaggcgtgtaccagtgtgcccagcctcagatgggctctttgaaaaatgtttattagatcaggttactcccttgagaaaaaccctctcagaataaaacccgaagtccattacttgaaagcagagccagcttcatgggcctttgtaactgcccatgggcttgctggaacccaggcttggtttaatactctactctcaccatctcaaaattcttaatttttgaacaagaggccctgcattttcattttgcaccaggctccacaaattgtgtaactgggcctgcctcagcagccacatggaacatgatccctccttgcctatttgagctcattctctaccattctctcccttgctcacctggctcccactgctcttgctcttcctggaacttgccataatgttgctagagtcagagccttggctcttgctgctcctcattggctggacccctctttacttgacctgctccctcaccactcacttccttcagatctgtgttcagatttcgtcttctcagagaggcttttggcccctgtccatctctctgaatttacctctgacctctcccccaccaccactgcgctaagctgcctcagaactttgtagacattctgtctggtcttctgatgtttcccccttggaagaatcccaaggtgcctgaagaatgctttctttatccttgaagttgagtaggttgactagagtctggcttgctattgagcattctttatcaaattgtcctgggaacatggtgtattctttcagtctgcagatgtagtcgttgctgtttcaggtcagctctcttatggatctttgacagcatcttctgttccatttgttgagttctgtacttcagggacacaaattcctcatgttggattgtctttgtctctcttccaatgctattagctttgccgtaattggtttagcttttgtctttttcatctgcattcactttgtctaatttgattttcagctatgtatattctgtttctggctgtttttcaatgtatttattagtttcataatgatgtgttttggtctgcagtttgtttctctaggttggaaatttgtcttttcatcttattctgttttatcatcccatctttgaactcttttattgggaacatgttcttatgaagttgtggggaatttttttcccttccttgtgtattctcttcttggtgggagactttgcctttctcgtgccatctccctccctgggcctcttttttttcttctggccataatatgtttgcctagttaccatgtcacttcttttcgtcttggctcaggcttggatggctctgcatagtcgttctgtttgctttgagacagtggaggaattcttggctctctcttcccagtttcttggcatcttctcttgctgttttcccctctgagctatcgcgtgcaggcttgttatcttgtatccggagagaatttgcacgctggagggagctgcagccatgtagtcttcagccctatctggattcttctctttgttctaagaactgtgttggatgtcttactaaggctcactctagctgcacgagggatgtgtgtgccatttccatggggatagggggcacctcagtctctgggtggttccataatctgtgtatacctaagagcagttgcttcccacagagctgggctggctcactgggcactttgccatttctcctgcacctcccagctggagtttctgggtctaaaaggaaaaagtgaaggactcccacttggttgcttctctccagcttactgactgcaaattcccagggcgttgcccgctccctagggtggtttctgggggacggggcaggagcctggctttgctgctgctttgtcctctggagtcttttctcagactgctttgaattacacccctttcctttgtgtgctgaaatcttcccttcacactctccttccctgcctttcttttgtgtcttatcttactaggactggaagagggcagttgtgcaggaggtctgcatctaattccctaatccatgtgagagtgctcctgttgtgtgctttgtgacatgatggtgagaaatactccctagagcagtggctaccagaaggaagccatccccccccctgcacacacacacacacacacacacacacacacacacacacacacacactccttctggctgtcctcagatgcctattctaggtaaatgtcagattccaaagaaaatccagttgagatcttttttctttttttgagacgagagtcttgctgtgttgcccaggctggagtgcagtggcacaatctcggctcactgtaacctccgcctcctgggttcaagcgattctcctgcctcagcctcccaagtagctgggactacaggcgcgcaccaccacaccaggctaaaatttttttgtatttttagtagagacagggtttcactgtgttggccaggctggtctcgaactcctgacctcgtgttctgcccgcctcagcctcccagagtgctgggattacaggcttgagccatcgcgcccggcctccagttgggatcttgactggaatgactggtgttcaatcattatagtttccacctaatttgtatttgtacacaggacagttactaatttgttggtacttgtttgatccccagtccctagagttgtttatggggtggagcttcagtccctgctgcttcccctgtggcagcagctggagtcagggtggggacccagggtgctgctggcagattcttgagacaggtagaatctcctctatattggtgtctctctctgtcccagcagtgcccaggaaaacctggccagcctgtcactgacctctccacctagggcactggtggttcaggtccttctatttgccaccggcaaaccgtacttctgccagtctggctcttaggcccagtttctctgatcttgcagattttcttgggctctgctacggaatcctcatacctccggcaggtccctcctttgcccatgtgtttaactgtggtggaatcgtgtgagagctgcttctctcgcatggatcccagccacaccacattctacagcggttcctctgaaggcattgatagagatatttcctcctgttttgcatttcgttggtcatttcagtagaatcagggtgaaataaacatgggggctcagatgtcagcattacgaaccaagtacgtcaggcaggctgatgtggactgacctacactagtgagacgcaagatgacgaaaacaagggcactcactccaagttactgatgagatgtttggatcaaatgagccagtccttaagcagagttctctagtaaaagagatctcctttctgccctttcttgttccccaaaatgtgttgccttcatggtgaaaatttattttggcagattttctcttctttgataaaagcagccaacactttgttaaaagtctgtgaaacttatttacatgaagtatgtaaaggtaagaaaaaaacattatcaacaagaaatggagaaagccagcagctgaggacagaaaagtcatgcacagtgtcagtgtctatggaaacaggccacttggaccttgaggactaggtatttggaattggaggtgagcttggcctggtgagtctctaaccacttgtgtgtaggatcagtgtgagaaccctgctagaatatagtggcagagatgcaaggggaaatcattggagaagttaccagggaatgatgagctaatctgaaaaaaatacatgtttctaagttgggcgtggtagctcatctgtagtcccagctacttgagagcctgaggcaggaggatcgcttgagcccagcctgggcagcacagcgagaccctatctccctaaaaaaaactttttcgttgtttagttttgggatttttttttttcctggtcttttttccccctttttgtgaataacgggatctcactatgttgcccaggcagatctcgaactcctgggcccaagcaatcctcctgcctctgccttcctaagattacaggtatgagccactgtgttaagcaaaaaaacttttttaaatgaaaatcattttttaaaagacaggctttccaggggagggtattattccacttatatgaagtgtcaacagtaggcagatttgtggagacaaatagattagtggttaccaggggctgagaggagtgggagtggggagcaactgcttaatgggtaaagggttgtctttggaactagagagtagtgatggtcgcatgacattgtgaatgtactaaatgctattaatgataaattttatgttatgtgtattttaccacaattaaaaaaaaaagatcaaatgtcctcagaatagccaacaaccttccacttggctaaatgcctactcattaaacttcttgaactaaattcctttctgattgtcatggttattgtgtcctgggcttcagagtttcacattcaggttggcttggtccagtctgtcatgtatcactataggtccccacattggcctcttcctcagacggacagcccatctatctgccggggctctgtgccacagccagatagacttgctctgagacagctgtgtgggctctgagcactggccaggcatcacaaaacctatctttatgatttagaataattggtggtcagctgctgttttaatgttgttgttttttttaatttagatataattcacataccatgaaatttactcatttaaagtgtacaattcattcttcagtataattcataggctcacagaaaaaattgtttaaaaataaaatgtgcaattcagtgtcttttagtacattcacagagttgtgcaaccatcgcctctgtgtcattccagaacactttcagcacccaaaagaaaccccagacacaggagcagtcacctcttattacccgcagcccctggcaacaactcatccacttcctgtctctatggatttgcctattctggacatttcctataaatggaattatgcactatttggccttttgtgtctggcctctttcactgagcgtaatgtcctcaaggttcatctgcattgtagcatgtgtcagaatttctttcctttttgaggctgaatgatattatatcctatagataatgaggttttgattatccacccatcccttgggaatgcatatttgggttgcccccaccatttggctgttgtaaactgtgctgccatgaacactggtgtacggatatctgtttggttactggttttggttttttgtttgtttgttttggttttttgagacaaggtcttgctctgtcgcccaggctggattacagtggcacgatctctgctcactgcaacctccacctcccaggttcaagcaattctcctgcctcagtctcctgagtagctgggactacaggtagcactcaccaccatgcccggctaaatttttttgtatttttagtagagacaaggtttcgccatattggccaggctggtctcaaactcctgacctcaggtgatccacccacctcagcctcccaaagtgctgggattacagacgtgagccaccgcacccggcatagttgtggctttttgagagtgtatggctaggagtaaaattgccaggtcatatggtaactccatgtttaacatttgagaaactgccaaactgttctccacagcaggaattttttaacctgtatgtggtgggcttgtgtttcggttttcattttacacatctataaagatgagatttgctgtatggcactggttgcctgtatttggggagggttctgcttttggttggcaagaactgcattttatttaagcttagcaaaacataactggtttctcgcatcttctcaaaagtggaggattaagaaatggactgcgaattcagagcagggcagctgaacctcaggctccacccttgtagccttcaagctgaacctcattctctcttgctccctggagaccactgagacactctgcctgtgccagtttgatttctcacatttttaaagggccaaagcttgtgtctcaaagtgctatagcctttattgattcatgcagagaagcctccttgattccgtaattctgcagctaatactggaagtagaaagaattggaaacaccatctggatgacactttagggtggaagcagccagtacaagggggggctcattatttcctctggtcccagactgttcacctggagctgtagccaccaccctgcccttaggttaactgcctcgagtggtagtttagctctttgtgctgtgccgagggataactggaagtgaaaggtgctgagaaatgccatctcctgaaagtggcgagcatgagtgaatttacgaaaggttgggatattgctggggctctggaagtttctctggagctcactccaggggacagggagggggctggattccaattcaagtgaaaaatacctttcatctgccttgttcacctggcttttttgcctttttgtaaaatctgaaaacctcagggattgagtagtctttccttaactgcagttgcctgtctggccacacctgccagctgttgcttgtacccctgtaatttgcacggccttccgggcctttctcacaagatcactgcaggtcacattcatgaggaaaatgcaggcagttcctgccatcagacccctcaggatgtcatggtttggcctgaaaacaagattcctgcaactctaattttcctttgctagatcaaatgaaggatttgatctaatgtttgcattctagcagcaaaatcattgaatattttatttcttaagagccttacttcatattttgtaggtattttaagattttgtaaaggcctttctgcttcaacgtgtgatgtgtgcattcttagaaaaagatcttgtgttctgtaaatcacacaataaaaacatgagttcgtgcaggaaaaactggggcggggtggatcactccaaacttgtgtggtgtggtaactggagctcactgatgaaaccatgaacagttctggctgaaagaaccccacagtacactgaggtctgttggcatcgccgccagcaccgccccggtccctttgtgcgcgccaccacacctggctaattttttatttttagtagagagggggtttcaccatgttggtcaggatggcctcgaactgacctcgtgatccgcccacctcagcctcccaaagtgctgggattacaggtgtgagcctccgtgcccagccttcagctttttttcttaatgtctttgtgtaatatgaaggcattctctttaattgttaaaaagcttgcctaccactgcttcaaaatattactgtcagttggcatagcttctgattatattgatgtcatctcccttcttttaaacatgttaccatattggcactgtatttcccctagcccattgatcacttgagagttagtcatagtcctcgtgctgtttcactcctaaacgtttaagcatgcctttcctaagagcagacagtacagttaagacactcaggaagtttagcaatgagctaacacagaaccttacatttctccacataccccataaatgccttttttagagcctttgagcctggaatgcagagtccaggactgtgtgttgtattcgattgtgtcatcccttcagtctcctttatcagaaatgttcccccacccccttgttttctctcatcatcttgagtccagaccgtggttgcatggcacgccctctctggactcttcctgctgtctcctcacggtaagcttcagtctcctactcgtgatgctggttcatctcagcagcactgaggggcctgagctcagtttggtcgtgtgttaaggtggtgcctgccagatttctccacagaaaagggccccgtacttttatttgctcttcagcctgtgtattccttcctttcttgccagcttgtgggtggcttctctagcagcttctgtaagatactcagtttggcagttgtagttgtttcagcaggagaggtgtctgcatacctgaccaccacatggctagaagtcgatccatcctctggcgtaaccatcctccatgctactgtccctggggcactgaggccctcctcagtgacttcctccacctcatcttccgccatctccaagccaccagtgtccaacggactactgatatgtcccaaactcatcatttgtttattcaccaattcagagcccacctttttttcagcactgagctagcctctccttgctagaagcttacggtcgaaggtctccagccatcagaagaagcacgtggagcgctgcgtccgtgttgtggttattcatccagcatgtgttgagtaagggttgcacctgtgcctggcattatgcattgagcggggagatgggggttggcacgcacagtggggtgttctaagtacactgagggctcgggtgccctggctcatagagcagggagggaggcaggagcagggaaggtgtctcagaagtgccatctttttttttttttttttgggaagtggaatcttgttctatcgcctggtctggagtgcaatggcactatctcaactcactgcagcctccgcctcccaggttcaagcgattctcatgcctcagtccccgagtagctgggaccacaggcgcacaccaccacacccggcaaatattttgtatttttagtagaggcggagttttgccatgttggccaggctggtcttaaactcctggcctcaagtgatctgctcacctcggcctcctaaggtgttgggattacaggcatgagccactgcgcccggtctagaagtgccatcctaactgaacctgaaagatgaaagttctccagatgaacctgaaagttctccaaatgaaaaggtgggagggggtgacagggttaggcccagagcctctggtgacacagggtgggcatcattggtcactttttcctcgagggaggggcgtcacacgggtgatagggtgggagctataaccatgttgatagtgccgcctctgcccatctggcctggcatgccctgagccctctgtcccacctgtggaactcataagccctgacagcccactcactcctgattcattatccacacccctgtgcttccgctgtgcctggagcaagctttcttcagggggaagggaggctggaactatgttgtagttacctatttgtcctcccttccaaactgtgagttcttggaggtggaaggatgctgcaggatctggctcaggacgaaggcagttggtgaacagacacgtgtgtttttgactcacggtgatctcagacaagttcctctgtctagtcgaacttctttttttccatctgtaacactcaggagttgaataggtggtttttctgaggatacttcaactgtaaaatgtatgaacttgtgaactagctatttagttctcctcataatcaagattgtgtgtgtgtggggggttctgattagagggaggatgaagagaggtgtatggggttttttttgttttgttttctgtttgtttgtttgtttttgagatggagtctcactctgtcacccaggctggagtgcagtggcacgatttcggttcactgcaacctctgcctcctgggttcaagtgattctcctgcctcagcctcctgagtaactgggattacaggcatgcaccaccatgcccagctaatttttgtatttttaatagagatggggttttcgccatgttggccaggctggtctcgaactcctgacctcaggtgatccacctgcctcggcctcccaaagtgctgggattataggcatgagccaccacacctggcaggtttctttgaaaaagtttgtgtttcggcaaacaccataaaccccctgggggacagccttggggagtcacctggcaccctagcccagcctccctcccttgggtcctgcagtgaaggcttagtgagggtgtgcaaatgcccaggtcaccctgggactgggcaggccctctgggctaagggtaaactcatttggaatacctgttttctatcattgttttttatttgttaaatttaaagggtacaagtgcagttttgttgcgtggatatattgtatagtagtgaagtctgagctttcagtgtaaccatcacctgaatagtggacattgtacccgttaagtaatgtctcatccctcaccccctcccacccttcccagtctctccagtgtctgccattcctcactctgtccatgtgcacatgctattcagctcctgcttctaagtgagaacgtacggtatttgactttctgtgtctgagctgtgtcactgaagacaatggactccagctccatccacgttttttatcatttttacctgcactccacacccagcacaatccaggcttctttgtgggttttttgaaatttgtctttaattataaaagtagcagccagcaaattaacaaacacccatgtgcctttcattgcacagaattgaaaatcatcatactatatttgcttcaagtaatttccattagaaagaactagaatattacagtagagttaaagaccctttatttcccatcttcagtgctcttaaaagttcatttagggccaggcatggtggctcacacctataatcccagcactttgagaggcccaggtgggtggatcacctgaggtcaggagttcaagaccagcctggccaacatggcgaaaccccatctctactaaaaatacaaaaattagctgggcgtggtggtgcgcatctgtaatctcagctactcgggaggctgaggcaggagaatcgcttgaactcaggagggaggcagagcctgtatgcagtaagccgagattgcgccaccacaccccagcatgggtgacagagcaagactccgtctcaaaaaaaaaaaaaaaaaagttcattcattgtacacttagaaatagttaaaaaggtaaactttgttttgtgtgtgtgtgtatatatatatatatatatatatatatatatatatatatatatgtatttttttttgagacatatatgtgtctggtttgttcgcccaggcaggagtgcagtggcatgatcaacggctcactgcagcctcaacttcctaggctcaagtgatcctcctgcctcagcctcccgagtagctaggattacaggcacacaccaccatgcccagctaattttttttttttttttttttttttgtagagacagggttttgctatgttgcccaggctggtctcaaactcctgagctcaagcgatccacctgcctcacctcccaaagtgctgggattacaagtgtaagccaccacacctgacctgttttgtatattttaccacaataaaaagcctttaaaaccccaagcagacagttcattttcattcaggcccaactcagaatctgatcacagcggggtttcccccctttctagcgagtagctgaagaactgttttctctccttgatggtataactgtctctgtgggtgttgctcccctgccgctccagtggttttgtttttgtttttgtttttttgagacggagtcttgcgatctcagctcactgcgacctctgcctcctgggttcaggcgattcttctccctcagccttccatgtagctgggacttacaggcacctgccaccacgcccggctcatttttgtatttttagtagagacggagtttcaccatgttggccaggttgggctcgaactccagacctcaggtgatccacctgcctcagcctcccacagtgctgggattacaggtgagagccactgcacccagccggcccctcagtcttttccttctcaatcagtggcaccaccatcttcccaggctttggacatggtccctgactcacccttgcccctcacccccacactaatccacctgcgagctctgttgcttcaccacctagaccagccccaaatcctcaactgcccccaccctgggccacacctggaccactgctagaggcctctcatgggccctccctgtttttctcttgcactccccgggctttctggcacaagatgccccagaagcagaatcacatatctctcctgggagccaatctagtgtgtttactgcccctggagtgttattgttggccttagaatatgtcccactacaggtttgcagagcactgtagtcaaaagtcatttgaaataaatcttttctctgtggtatattgtcaatttgatatagaattaaatttgtttcttttcttttttcttttctttttttttttttttaagagacagggtcttggccaggcgtggtgtctcatgcctgtaatcccggcactttgggaagccaaggtgggtggatcgcctgaggtcaggaattcaagaccaacctggccagcatggtgaaaccccgtctctgctaaaaatacaaaaattagccgggcgtgatggcaggtacctgtaatcccagctactcgggaagctgaggcaggagaaggcttgaactcaggagtcggaggttgcagtgagccaagatcacgccatggcactctagcaagactctgtctcaaaaaaaaaaaaagagagagagagagacagggtcttgctctgtcactcaggctggagtgcagtgatgtagtcatggctcactgcagcctcatactcctgacctcaggtgatcgacccgcctcggcctcccaaagtgctgggatcgtaggctgaagccaccatgcctggcccgaactcatttgtttttatttgcattaagtgtaataaggttttgttacttttagtttgaattttattttgggtaatataaacatttacatgattcagaagtcagaattacactgaggcatgttcagctaggcctcactcctgtgcctgtacccttacctttttccccctaccccatgcagggaatcaatttcattagttcctggtgtgtccttccttaatacccccccttctttctttggtagaatgcagtagatatgtttgcgctttgctccctttgcttcacagtggatcctggaaatgactccatcgcagttcttagagctcttgtttagtccctttggatctgcacagtactccagtgtgtgggcgcaccataagtttattcagcaagtgccctggtgatagggatcgggggtattggaagcctttggctggtaaaaataatgttgtagcaaataacatcatgcatatgttctttgagatttctggaggtgtctctttagcatagatttctagaaggcattccttacgtcacgtttaggtttatagtttgacctcatggtgattaaggtatttgggaaatgcaaatgagagtttcgaagaagccagatctttcccattagttcactgtttttctctgacattaggaccgtccgggttctagggagcagccctggcgttaggcagtgccatgatggattgtgtagaagtagcgattcccatctgtctgctttcttggcccactctgctggtggctccccttccctccctcctttatggggagctggggagctgcctaggggtccattctcaaaggctgatctctggtgggcaacaggccacacctagctttccagggttcttcgtcatttcccattgagagctgtaagactcagagacatgaaaaggaagctctggctgggcacggtggctcacgcctgtaatcccagcactttgggaggctgaggcgggtcgatcacctgaggtcaggagttcgagaccagcctgcccaacatggtgaaaccccgtctccactaaacatacaaaaattagcctggcgtggtagcacacgcctgtgatcccagctactccggaggctgaggcaggagaataacttgaacccggcaggcggaggttgcgatgagccgatattatgccatcggcaacagagcgagactccatctcaaaaaaaaaacaaaaaacaaaacaaggcgagctctgtgctgggacagattagggacccctctttacagcaagaaagactgctctgtgggttgtaggatgcctttgtgtatgcagtggctctaggtgactctggcagccacactctgggccctaaacttctggaggaagatacaggatagggaggaactcaggggtgagtcatggtggggacaagacattccctcactctaagaccttgtcactagattggaacatctcttgcctccctacacctgacctgatggttctggagagatacgtccttgcagcttctgagtcccagcactaagcagcctttggtaacttccctacatcatttgagttctggtttcctaaggatgcttgccagtgagtgccatggtgccctcattgcacagtctgtgcagtgtagacaagaggggaagtctcttggggtagaccagccgcaaggcggtgactagcactgatgtgaaccacatgggacaggggagttgtggggctgagaacacggagggtgggagtagtcatgctcttttccagaatgaactgctaacgaagggactcgcaggtggctgctgcttctttccaagctgcccctgttgttgcagaggctctggagtcctaggaggtttcacggtggcatactcgacagagtactagagcatcatggccagatagtgatgctggggtgtggggcctcacggtggccatttctgacgagaccccaccgggccaaagtgatgtgtagagaaggagctgcttcggtcaccagaaaagaacggggaagcctcccacactagaataggtagggtgctcttctccaccggcaggaaggggatgtatggctctgcctggaccacacctttttccttgctcttccctccgcatctgctgtggccgaggccattcctcatcagggaacatgtgttagaggctcacgccacctgggaccacttgtcttatcacccccaggaccctaggcggtagtttcctgtggcctgagttagctgatatttatatagtgccattgtgccttttctcctgtgatgctcacagtaaggatgcctagatggggttacctgttgtcaagataaggaaactgaagcacagaatgctgaggtcatttgctgggttcatgtttggaaagcggcaaaggatttcagtgcaggttggctggctccaaacctgtgtgtgctttccatgacactgtactgtgtgcctcattgagcctcattctagaaaaccaaaaacacacccaaggcccggccttcacaaaggagacccctcccccatttggctccctttccagcagtcgacggcctcttgtcagccatcgagcccagagtcccttgaagtgcgactcatgctggggtggtatgctcaggagccgcagtgtttccgctcagaggaaagggctctgattctcctgcagtgctaggagacttgtgggtggccacagtgcaggtcaggcacaccggccagcaccacccacagcccaaattcctaaagaaatatttgggtcccagcttggcccgagtctctgttgtcctggggaaggacatcaagatctgagtgtatgatggcctggggccttgcatgtggtgggggtccaagcctgcctctgctcacttgttctgcagactggcatgttctctgtgatacttacatacttgtttaacacttcagggaagaaaagtcagaagaccaggacctccagggcctcaaggacaaacccctcaagtttaaaaaggtgaagaaagataagaaagaagagaaagagggcaagcatgagcccgtgcagccatcagc

SEQ ID NO: 17 - DNA, 17047 bp, Homo sapiens; identical to SEQ ID NO: 16

SEQ ID NO: 18 - DNA, 64544 bp, Homo sapiens
gcaggaacaagtaggtggggattattatccacaaaagggactagacattgtgttctgggtcccacaactcatcataaagaggtggttatagttcccatcaggagccgtgggtaggggactgtgcgtccagcagcacccgaggctcttcggcgccagaggctctaaggtgcgagcgtgtccccagggtgctcagaggttctttggagtgctgtggcctcggaatgtgagcaccctcccatcctaccctccccttcgccggcgatcttccagttacataagtggagtgggacatagtaggtaacgggctctcatcgccctggagcgctcgggatcaccggtaccagatggggcaagttcatcgcgacgctgtggctcctgttaattgtgcctgaaaggttatcctctgttcagtttggtcatgaccgaatcacccaaactgaaactcagatgacttttatatggcagtggcaatgtttctgtggttttgcactaaagacttaaggtcattatgaagagtgtaaaaggattgctgtcgcaggggagaccgtttatgacattgctaagtatggaccccgagggggaaaaagctcattctggaattgctctgtggcggttgcttctgttgcgagtgtgttcgggtgtgggttggtcacagcagaaatgggctccaccacaaaattgatattcctgactcatggtcaggcagatgtgtgcttctggttatttttccaggaacaggaatgggctctgccgagcctttcacacgttgtgtctctgctgtgcgggatcagtaccccagactgtgagataacaggatcgaattcaggggttggttggtgatccaggaaccatacctacttggatgtgatactgagtggcctagacgttgtaggactctcataagttttagacattttgttatactgtaaaaatgaagcatatacggcctcagtagtaacattgcactaataggtaattattactctagagaattttgggttccatggctggaatgttcatcagtatctcagcaatttcagttaataaccagattaagctgacctcttgagtcttttgaaatctgctgggtccctataataagacagggtctggattttttaatcttttgggaatttccaccaaggatttagggaaataggcttttatgggcttttcaggatttctatttcaaatcccaatgaggaagtctaggaaacacttgcttttattttcttgcctgaatatgtcagaaccttaaatcacccaatcaatctagaagtactacagttgattaaagtaagtcaccacaggtcacccattcgtggcaggtcagctaggtggctgatcactggaatacagtcatatccccaggcatacacacgagcctcacttgacgatcccaaagtttgtacatctgagcttgagacgtgacaagttgaggtctctgctttgttcttcatagttggcagtttgtctcctcgggtgcccctccggttagctgtttatcatacgtctagccctatcaacagtgcaggcagcttccagagtatagttttctctgcaaagtgcctggtggaggggtacctccttttccattgtcctaatggctccactgggcttccataccagccctttccagtgtcttaacagctcaaagaaacccatctgtggctttcttgttagcactggcctatcacaccttcctattgcctgttaactaaaattttgcctggaatgctttaagcttagagtactgggtctttgtttcacccgattgataggagagtgtcatgcagtcagccgaactccgacttctgtgctgtttaaatccttaggtaggtctggggcaaggcacaaaccactgtgtattcaaagggttatggtgcttgcattctgtgtgtatatgtttgtaatttccaaccagagtcgtttcccgtgcctgccctgcctctgtgcaatctagtctagtagggtagggaggcaagctgtggagtttgaaaaaaaaaaaaaaaagctagatgagtttaataggctgttaccccctccagaacattcctcccatgtggagatgaaacgagaagttcatttctttaacctaaaataaagaacaacagagataaaattgttagttccttattggagcctggtttccattgctaatgtacctgcttgggactctgcatgataaatgacgtgtcctggaacctgaaatcttttataaaggttaatatcagcagaaatcttttaattagctaagagcagcttgttctcaagctgcccgagttatcttggaggagagaatcacaggaaatgtttgatatttctagtaaccagtgttttcagtgcgtggggtaaagcacactcctagactggccagtcccaaagagtgtggcaggacacctgcttgttttccctgccctctgctatggtgacatccttgcagaccagtcttgcgtggctggcagacgcaatctttttttcttgggtagagcattatcaccgctgcgatggaaggaccttgtcctcggtgcctccataccagccctttccagtgaaactactgctgtcccggcaagcccctgtgcgtgtgcatcattccgggtaggacaagatgtgaacaggtccctcttctttgggcttaagtagaagttgtgctcttctgcttttacctgtgtgctcttctgcttttacctgttctcttctgcctttctcttgcaagaaacctgtcgaaagcttgctttgcatgccattgcttaaatactttgatggtatgtatggtatgtgggataactgagtgggagccggaattggggggtgggcagggcatccccacccccacccccacatcaaagggggaatgaccatttcgttagagaataaagcctgagtcttataacttcttcaagcacatgtatgctgggtctcctggcgtgtgaatgtgttcccgctgtgctgtgtggctgttttgcagttactgtagacactgtagtctgggctctcattattgcctctgaagttgacaggaccaagccttagtaaggatgcacttgtcttcctagcccaagagctaggggtgttttatatatatattaactttcttttttagatttcataaactgctctcattttctcttttctttctttctttttttttttttttttttgagacagtctcactctgtcacccatgctggagtgcagtggcacgatctcagctcactgcaacctctgcctcccgggctcaagcagttctctgcctcagcctcccaagtagctgggattacaggcacctgccaccacgcctggctaatttttgtatttttttttttttttttttttttttttagtcgagacggggtttcaccatcttggccacgctggtcttgaactcctgacctcgtgatccacccgcttcagcctcccaaagtgcagggattacaggcgtgagccaccgcacccagcctctggctcttttctttttgacatgaaatcttaagttaattatcttaaactttaagaactagaaggattcttagtccagcaccatcagtttacaaacaaaaaaaacttgtgtccctgagaagttgtgacttttccagggcctcctagccaggataccagtttggtttttattatatagctagccgagtaatactattaacttgacttctgggatttcaaagtattctatgacttgactgtttaagggaattatgaggcctcactgaacctcaaaagataattttaggtaccatcctggtagctgtagagcagcaacagaccagtaaaagacttggttggtgttgcccttcttctgggtttgattacatgagtaattgtgtgaatagtctctaagttgtatgctctgagctttcgtttttagcttataaaagtgctactcttgggccagcatagtatcagaaattagctaattcatatggggcagtttaggctttaactaggaaatgatggttatcttaatgacaaaaaaggtactgacaaaagtccttttttgaacatgtgttcaaaagaaaaagagaaactatcaaactaataactgagtttgttgaacatcgagattgactgatctgagaggcttaaaactgattgccctgaaatagacttgcatgttttggatgatggctttgggtctcccagagcacttggtttcccttggtgctgattttttctctcaggattaaagcccctttatgtgatgttgttacagcagcttattgcaacttcattcagctgcttgaaaaagaagggagactgcctctaggttccatgtgttctttcagggatggtattttgatgttgcgtattctcttgaacatgtattcttccctgagaatttctgtgtgccgtggtagaagaaatacttgccagaaatcgccactcatggtatgcttttgtagtgtcgaagtgtcccctagaggtgacaaggcttgtgatagtgttgattctaacaagcatgaatctttcctttattttagcactgtgtgttacgtgccagtaatttgcagcttatcctttgtttctagctaggtaagctgggaaatagcctagtactttgtctatgtgtttatcttcaaaatgtcccaaatagccctgggaaaaaggtcgtgcagctcaatgggggctttcaacttacaattttctttgttttaggctccataaaaatacagactcaccagttcctgctttgatgtgacatgtgactccccagaatacaccttgcttctgtagaccagctccaacaggattccatggtagctgggatgttagggctcaggtaagtaaccttcctttttttttttttagtatatgtcctggtttggccatctgttttttttttttttaaaaaaaaaaaaaaaaggaaaagaggaaaaaaatatactactcttggacagtataaaagtaccccaaagactaaagacataactgtgccaaactgtgccatataataaaaaaaagtcacttccctgagccctgaaaggtcagtgtgtgtagggttacttggtcgccacagcgtgatctgggggcgggcgtcagattagagccggaactggtgatctgcaacttcagttcaccttgaagcaggtcagctgagctgagagcgcttgcactgagcccttttgcgctgctgctgttgccttagcggtcttcagcatgtgtttgctttggtttggggtaaatggcttagtggtcaacattagtgagcagtggtaatgcattttcagatatgggaactggtatgtggttggttccctagaaggacaccctcctgaaagctgtctcagaacaccgggggccatggctaatgtcatgtgcttgctacactcctcccatggtaactaaagagagtacccagatatacatctggttcttgggactctagaggaggatgagtactttgtaaaaacctgggggccccagtcattctaggtctgacactcaggtgctgtatcagctgcagtttgaactacttggcaccattgtgtggactttagttttgtaaaaatgaatggttccttaatttctcaaccttcaggctcaacatctcaagctgtttgttgttgttgttgttgttgttgttttgttttgtctttttgattagtggtcactccgcatttgatgttttgacatgtggatttcagaacttctgtgtggtaaagcagaatgttccaattgaattttcccattttttttcccctaagcaaaaatgtgagttttcacttatgcggccattgtgattccgactgagaccctaagtcgttctttgttgtctctctagtggtttctgacacctcagtgtgaagctgttgtagacatccataagaaatagcctgcttagggattatgtgagggcaaggtttggctgaaggagaatagaaggtgtggaaggaagcggaagaccagaagagcatcacactgcctcaagtcccaaatttgattctgctcctgatcctgtgactcaaattgtcattctcttttactgctgtggggtgtgctctgggcccagctgacaggacattctttgtactccacgtatttatgctggtgggagttgtatggctagtgctttgtgctttgtctcagaaattgtgtggactaaatgtaatatgggcagtgaatgggtttcttctggaagatgttaggcctggagggtggtttgggtttttacgagtctttttctcagattacagattacgaatggatgttataaaacaggcagtgttgacaccatacagtttctcctaagaaatgtacagagagttcaacctgaggaagctaattgaaaataaacttttaaaaagaaatgtagaaagaggaaatttaaaaagtatcttatgaatgggaaagatgtagccatttgagcttcaaagaacttttgagggaattctcaaaggacagtacccgtctttagtagataaatgcttgatatctatttttcttcttttactttttaaagaattactaaaataatacatggatttatagaaaaatcaaaccacttaaaaattgatcaggtggctgggcaaggtggctcatgcctgtaatcacagcgctttgggaggcctaggcgggtggatcacctgaagtcaggagttcgagaccagcctggctaacacggcgaaaccccatctctattaaaaatacaaaaattagctggccatggtggcttgagcgtgtagtcccagctactcggaaggctgaggcaggagaatcacttgaacctgggaggcggaggttgcagtgagccaagatcacaccactgaactcctgcctgggtgacagagtgagactcggtctcaaaaaaaaaaaaaaaaaaaagtatcaggtaaaaaaatgaaagctccccgcttaatctctgctcccactacccagaataactgctgttaatagcttaatgtagatccttctaagtcttctaagactaaactgtgtactttttgtgttgtaattaacaggagggtttttgttttgttttgttttttctttttttgagatggagtcttgctctgtcatccaggctggagtacagtggcacaatcttggctcactgcaacctccacctcctgggttcaagtgattctcctgcctcagcctcctgagtagctgggattacaggcgcctgccaccacacccagctaatttttgtatttttagtagagatgggtttcaccatgttggccaggctggtgtcgaactcctgacctcaggcgatccacctgccttggcctcccaaagtgctgggattacaggcgtgagccaccgtgcctggcctcaggatggtgttatatatacatattctgcatttttccatctcatatattcatctctgcctcatttcttttaaatagcagtgtagtccagggctgacttaccgtcatgcatttcgttgtctctctatgttattaaaaatgctacaggattgaaattcctcatgtgccagtcattttgaagaatggctgcctagacttggaatttctggtggataccaccacatcactgtccaaaatggctatcccagttcccacaacagtctgagaaagtgccattttcccatatcgtcccagaattggatatacatcttttaaattggtgccgcttggattattactgaggctaaacctcaataatcattgtcatagctcttaatgtattaaagatgttaactctttgtcatgcagatattttcctgttttgtcttacgtcttgattcttgtctttctgatatataaaatttatgttatgatttattcttttgctttcatacttaggaaatccttttttactcttttttttttttttttttttttttttgagacggagtctcgctctgtcgcccaggttggagtgcaatggcgtgatcttggctcactgcaagctccatctcccgggttcattccattctcctgcctcagcctcccgagtagctgggactacaggcgcccgccaccacgcctggctaatttttttgtatttgtgagacagggtttcaccatgttagccaggctggtctcgatctcctgaccttgtgatccgcccgtctctgcctcccaaagtgctgggattacaggcgtgagccaccgcgccccgccaggaaatcctttcctactcttaacaacagatcaatagtcatctatattttcttcctaaaaaacctgatgatgtattatattcatacatacgtatttaatacatacaaaagggccagatgcggtggctcatgcctgtaatcccagcactttgggaggctgaggcgggtggatcacctgaggtcaagagttcaagaccagcctggccaagatggtgaaatcccgtctctactaaaaatacaaaaattagccaggcgtggtggcgggcacctgtaatctcaactactggggtgactgaggcaggagaatcgcttgaacccaggaggcagaagtttcggtgagccaagatcacgccactgcactcctgcctgggcgatagagtgaggctctgtctcaaaaataaaaaataaaaataataattttatagttaagttgccctgtgtttttcctgtgattaaaaaaaaaaatacctgttttgtatttaactttggggtgggataaggtatagcccacttagtcagttgtgtctaagccacttgatgaaccagtcaatccagtcttcacctttaacaaatgctgatttcttcaagtgagcaaaatatctcttaaactttttcctattttctctataaagttgcttttttctgaattttttctttatgaggcttgatgggcagccctatcagcagacaatcattcattcacccaacaaatatttgagtatctgcttcaagccaggggcagtgctaagccctggaagtggtatcttctccttatccgggagtggggctacagtgttcattccagaagactcaagaaaatagcagatcatcacaaaagtaggttttacataaatgaggaggaatccacagggttgtgtatatgtgtgtgtattttaaattctgacataagttggagctttagggtagactgtgacataagagtagtttgttttccaactcatgtaattgccggctgatttttgtcttgaattatgataatggtaacttctgttgaaacaattctgtattcatcttagcttggttgggatgcaataaaagttttgtactggtaaaaatgataattttcttccatgatgattttgaagcttttctgtaacacctgataaaaatagaggggccaggcatggtggctcatgcctgtagtcccagctactcgggaggatgaggtgagaggatcccatgagcccaggagttttaggctacagtgagccatcatcacaccactgtactcctgtactctagcctgggcagcctcgttctttagagtaagacactgtctctttaaaaaaaaaaaaaaagaaaaaagaaaaaaagaaaaggcttttagtgaatatatttttagggtagcaagtgtaatttttataaattgcattatttgaatctaataaataccctcaaagctgaagtcgaattctgattttgattgaaaatattttttacttaaaggaagagggatagaataaatgacacgattaaggaaaagacttcttgtataaggccggggttttttaaatgattttttgaatagttagatggacaatacggaattaaaaaggtggtgtaaaaagttatacggggctgggcacagtgactcacgcctgcaatcccagtactttgggaggccgaggtgggtggatcacctgaggtcaggagttcgagaccagcctagccaacatgacgaaacatcatttctactaaaaatacaaaaattagctgggcttggtggtatgcacctgtaatccagctactcgggaggctgaggcagaagaatcgtttgaacccaggaggcagaggttgcagtgagccaagatcgtgccattgcactccagcctgggcgacagagtgagactccatctcagaaaaataataatagaaaaaagttatatggggctgggcatggtggctcatgcctgtaatcccagcagtttgggaggctgaggcagcttgatcacttgaggtcaggaattcgagactagcctggccaacatggtgaaactccgtctccactaaaaatacaaaaattagccaagcgtggtggtgcgtgcctgtagtcccagctacttgggaagctgaggcaggagaatcgcctgaacctgggaggcagaggttgcagtgagccaagatcatgccgttgcactccagcctggacgacaagagcggaactccgtctcaaaaaaaaaaaaaaaagagttatattgtaaagtatctctgctaccctgccccaaacattcatttctttccctggaggcagccactattacctgtttctttaaaaaaaaaaaaaaattgtggccgggcacggtggctcacgcctgtaatcctagcactttgggaggtggaggtgggtggatcatgaggtcaagagatcgagaccatcttggccaacatggtaaaaccccatctctactaaaaatacaaaaaattagccgggcatggtggcgggcacctgtagtcccagctactcgggaggctgaggcaggagaatcgcttgaacctgggaggcagaggttgcagtgaactgagatcacgccgctgcactccagcctggcaacagaatgagactccatctcaaaaaaaaaagcgtgtgtgtacccgtgtgttaaatttttattataaaatatatataacaggctgggcgtggtggctcacgcctgtaatcccagcactttgggaggccgaggcaggctgatcacgaggtcaggagatcgagaccatcctggcgagcacggtgaaacctcgtctttactaaaaatacaaaaaattagccgggcatggtggcgggcgcctgtagtcccagctactctgagagcctgaggcaggagaatggcgtgaacccaggaggcggagcttgcagtgagccgagatcgcgtcactgcactccagcctgggcgacagaccgagactccgtctcaaaaaatatatatcgatatatataacaatttacagttttaatcatcttaactgtacagttcagtggcactgagtacattcacattgttgtacagccattactaccatccatctctacaacctttcgtcttgcaaaactgaaatttcatacctattaaacactaactcccacttctcccctttcccccaccccaccctctggcaactactattctactctttgtctctattggacatatttttgtgtgtttaggtttgtgtatatattttacatgtgtgtataaatacacaagggtatgtgggcgttgtgtttttacacatactataaaatattgtgcacatttgtttattttaatgtatcctgtagattatttagaatcggttcatacagagccgtatcattccttttaagggttgggtttaaatagtctgttatggatgtaccacaatttatttaaccagtttttaaattttttacttattttttttaatgtttttttagagacaggatcccactccatcacccagactggagtgcaacagcatgatcatagcttactgcagccttgaactccggggctgatgtgatcctcccacctcaggctctcttgtagctgggactacagggatgtgccgccatgcctggctaaattttttatttttatttttatttttatttttggtagacacggggtttcactgtgttgcccaggctggtcttgaactccttgggcttgagtaatcctcctgccttggcctcccaaagtgccgagattacaaccatgagccatggagcccgacaagagtagccttttatttgcagaccattagagaaaaagttgcgtgtaagtagataagcatacgaatttatcactgcaatactgtttgtagagatcacagagctgttaggctaggaagaagtttttagcagttagcactagaaagcaaaactttggaaacttccatttcatcaaaagtgacctcatctgagtagggcatgtgagggaaggacctttttactcgacaaggggaacttgcccagttcttgtttgtgaaccttgaagaaagtggagcatttttattttgggaccattctaggttgtggtagttccttggtactcggggttggagaatctccctctgctgctggaccttctgcctcctcatgctgtaatatgcataagaggtgtcctagaagtattcaggaacaggctgtggttgctttgttgttctgtgactgttgaactctttatatagcagtacttttttaagctgtactaattgagcatttattatgtgtcagttactgtgctagctgctggaaactatcctaccctcagcagtcttctggtctaatgggaggtacagacaggcaaatgggctatgactttacaagaggctaacttctgtgatggagagaagttccagccactaagggagcacataaaaatcagaggagatcctaccaagaattgggaggtaggtcagggaggagacttctttgaaaaatggcatctaagacctgaacagcaaggaaacattagctaggtcaaggacaaagcatcagtggggagagatgcatgagtcttttggaaggaccagcatgtgtagaggctctgacaggagagaatctctcaggcccattcagagagtccactgtgtgaagacgaggcatgaacaaccagccaggacatgtggagaggagcatttttctttttttcttttttctttctttttttttttttttttttttgagacgtctttctctgtcacccaggctggagtgcaatggcatgatctcggctcactgcaacccccacttccagggttcaagcaattcttctgccttagcctcccaagcagctaggattacaggcacccgccaccatgcccggttaatttttgtatttttagtagagacggagtttcaccatgttggcctcaaactcctgaccttaggtgatctacccgtctcggcctcccagagtgctgggattacaggtgagagcccccacgcccggccaggctcggctttctttccaggccccgtcacactcttagatgttccctgggccccagaaggcagcgtgaggtgctctgcccatctatgctgtccttttccaccccaccctatccactgggcccctggggctcccactccactccaggtctcttcatggacccttctttcccttcacttctgtcccaggagacctgggagactcatgggaacaggcatcatcttctccagcacagttcattgtctaatgcacgaaagtgctgggctgtgagaaggtcaggagcttacatggaatgggagtcagctgtggtacaaagtacgctgcttagttctactgattttttattttttatttttacataagactttgatggtaaaggaagcagtgtgtgagcaagctgactcctgtcttgtcaagtaccaggtccactctgatgagcccctgtggacagcactgctgtaactccccaagcctgggctcaggaggtgggccctaagcgctgttcccagctcttcctccatgctgtcagctcttccaccattcttcctggcgtcattctaaggtcctgtcttcccccgccctcttccttcctggcttctacgctcagctcaagtagtagctgtttgggtacttttcacccagacttaggaaatgttatcagttggtcgtattcctgtcagccctcttactatggaactcaaataggacagattcagctgaattcccagccctgtggttgcactctttgtctgccctgcttccccaaggtagcctgctccctaaaggtcaccgagatactccccatgcaaggtttttgttgtattacacatgacaacatggaataaagtgttttgcaaatttactggatgatatcctactatgtggaacatcctacaacttactcttttcactcaacatttgacttttgaacctggtctgtactgctccgtgcagaccaatgttcattcatttgatatgtctccttgtgccatagaaatagttttacaatagaagcctgtccagagccatgagggagaaggggattgtagagaaacaaggattggcatctggtttatgtttacatcctttagtcctgttaaccgagaagaagatatttttatttccatgtttgcgaaagctttccacaaaaaaagcatccattttctagacttattaatagggcagtccaaaggttttatttttagatttgaaagaaagcaaagtaggcttctgagatatgcacatttccctgtgtccctgtctcttttgcaacattccacattgctgctaaaacttgaacatgagcactttcaagcatgtgcttactttctatgtatgactcattttttaaaacattaaagcattttcggccgggtgtggtggctcacgcctatattcctagcactttagaaggccgaggcgggtagatcacttgaggtcaggagttcaagaccagcctagccaatatagtgaaaccccatctccactaaaaatacaaaaattagccgggcatggtggcgggcgcctgtaatcccagctactcgggaggctgaggcaggagaattgcttgaacccaggaggtggaggttgcagtgagcagagatcgagccactgcactctagcctaggtgacagagcgagactctgtctcaaaaaaataaaaataaagcattaaagcactttgtctggtggtatgtaagttttggcattacttagataagttgtattttaagtctttctacacacaataacttatttttaaaatacaagtttctgtgtacttccgggttttgtgtttttgtaaacagcagaaggtattagtccatattaagtactaatttgttctaatattttcagctgtttttggaattacacttggcaaaaaaatagacaaatgtctgcagttgtgacagtttgtttttttgttctttttaactccagaataaataattctagtgagtttttttcttggcttgtaagaacatgggaatgattagagtcatcataacacttaagtagttatagaaggttgaacatctgtagtcagttgtataaaatttcctagtcatccttccaggttgtttaagacaaacaaatacatagtatttattaagctcttataaattttaattgtaaaacatcattgtacaaaactttgaaaatgcgtataggtacaaagataaaaaattaggccaggcatgccatggctcacgcctgtaatcccagcactttgggaggccaaggtgggaggatcttttgagcccaggagttcaagaccagcctgagcaacatattgagaccctatctctacaaaaatatcataaaacaaaatagaatcactctggcgattccactatccaaaaaaaaaaaaaactgctgttaatatttggtatgtatctttctagaccaaggcctccaactttggttgagaattcagccgggtctgtgaccttggatgggaaaaacattcactctttattttcactaatgtctctgaaaacccagatttttagctgggcatggtggctcgtgcctgtaatcccagtgctttggaagcccgtggagggcagatcacttgagcccaggagtttgagaccagcctgggcaacatagcaagaccctgtcttttaaaaaaaaaaaaaatccagccgggtgtggtggctcatgcctgtaatcccagcactttgagaggctgaggcaggcagatcacctgaggtcaggagtttgagaccagcctgaccaacatggtgaaatcctgtctctactaaaaatacaaaaatcagccgggcatggtggtgggcgcctgtaatcccagctactccggaggctgaggcaggagaatcacttgaacccggaaggtagaggttgcagtgagccaagatcacaccattgcactccagcctgggcgacagagcgagactctgtctcaaaaaaaaaaaaaaaaatccacattttcttcaatgacaattgtaagcaacagatcatggtagtattagaatagcagtgactgtcaccagtagagatcaaagatactttcatatcatattatagttgttacagatattttgaaatatatatgtccatcactgcttcaaacttaaggtaattattagacccatctctagatctggttatttaatgatttactgaagaagcacatattatttgagaacgaactcttgaaatatgttgttaatttctgtgcattttacacatttcaaaacattcttctgaggaggggtccagaaggccaaaagggtccatggcagaaaaaggttaagaacacctgttctgtactttgtaccatgtggctacaaatataaaaacagacgttaagccgggtatggtgatgcacacctgtagttccacctacttgggaggctgaggtgggaaaatcacttgagcccaggagtttgaggccagcctgggcaacagagcaagaccccatctcttaaaaaccagtcagcacttgactagtcagttagtgggggaaaacacaggtacagtaaaaggagtcaaaattacacttaaacttaggtcatcttattatatcaaacatttattaacatgtttagtgttttgtgtatattatgcaaagtgtaatgcaactaaaactgtttaacacttctcgatatcacataaatttgttggtgcataatagcctaaaagttacttttgctgttggcattttattttattacttacttatttatttatttatttatttattttgagacagagtcacactgtcgccaggctggagtgcagtggtgcgatctcagctcactgcaacctctgcctccctggttcaagcgattctcccgcctcagcctcctgactagctgggactacaggtgcgcgccaccatgcccagctaatttttgtatttttagtagagatagggtttcgccatgttggccaggatggtcttcatctcttgaccttgtgatctgcccacctcggcctcccaaagtgctaggattacaggcatgagccaccacgctgggcctgctgttggcattttaaacatccttctagagtctttcttatttgcctgtaagcacgtacacatgttgttgttgttttgagacaaggtctgtcgcccaagctggagcacagtggtgcaatcacagctcactacagcttcgacctcttgggtgcaagtgatcctcccaatcagcctcccaagtaggtgggactacaggtgtccgctaccatgcccagctaatttttgtattttttttgtagagacggagtttcaccatgttgcccagactggtctcaaactcctttgctcaaacgatccttccgcctcggcctcccaaagtgccgggattacaagtgtgcacctctgtgcctggcccacatgttgttttagatgaatgagatcatatatgtacttttgtaacttgctacctttcctcaacaaaatgttgtaaatatccatgtccataaaaatagacgtatatcttcacttttccctaaaatgaaaataacttaacttgcattttcttttttgtttttgtttttgttttgagacaggctcttgctctgttgctcaggctggagtgcagtgatgtcacagctcactacagcctccacctccagtttcaagtattccacctacctcagcctccaagatagctaagactacaggcacatgtcacgacgcctggctaatttttaaaatattttttgcagaaatgggatttcactatgttgcccaggctggcctcaaactgctggcctcaagtgatcttcctgccttggcctcccaaagtgctgggattacagtcgtgagccactgtgcccagcctgcattttcttattataaaagtaatacatgttcaatggacaaaaaattttcagaaaatatgcaaagatgaaaagtaaaaattgtccataaatctgtcatctacagataaagataacttctggataatgtttttctaccatcatttttagtaatcacataacatttcgttgtatgtctatgccttcatttaattaagaggcatttccattatttctgcatgttcatgactctgaatgatgatatgtctgcctgctgatggctacaaccctgtttctgcatttcaaacctctctcttgagctccagatttgatggcctcgtcagcatttacttgagttgctcataagtgtctcaaatttaacaagtcccagtcttgatttttttcccccttcaaacctattcctcatgttgtctctatttcagtaaacaatatcaacatccacccagttactcagtccaaaattctaggagtcatccttgattctgctctttctttttttttttttttttgagacggagtctcgctctgtcgcccaggccggactgcggactgcagtggcgcgatctcggctcactgcaagctccgcttcccgggttcacgccattctcctgcctcagcctcccgagtagctgggactacaggcgcccgccaccgcgcccggctaattttttgtatttttagtagagacggggtttcaccttgttagccaggatggtctcgatctcctgacctcatgatccacccgcctcggcctcccaaagtgctgggattacaggcgtgagccaccgcgcccggcctcttttttttttttgatacggagtctcattctcgtcatccaggctggagtgcagtggtgcaatcttggctcactgcaacctccgcctcccgggttcaagcaattcttctgccccaacctcctgagtagctgggcctggctaattttttgtatttttagtagagatggggtttcaccatgttggccaggctggtcctgaactcctgaccttgtgatccgcccacctcagcctcccaaagtgctgggattacaggcgtgagccactgcacccgccctgattctgctctttctctcatcatccctgatctgtcagcaagtcctgttaggccaaccacttctcagcatctgcactgccagtatgctagtccaagccacaaaacacctctcagaggtacgcaacaggactttgttgttgttgtgtgtgtgtgtgtttttttttttttacggtagaattattttataacttgaagtgtagggatgaccttccttttaaaattttatttattttcttaattttttattcccatagattttaggggaacaggtggtatttggtgacatgagtaagttctttaatggtgatttctgagattttggtgcacccatcacccgagcagtgtacactgaacccaatttgtagtcttttatccctcaccccctcccaccctttccctcaagtccccaaagtccattgtatcattctgatgcctttgcatcctcatagcttagctcccacttatgagtgagaacatacagtgtttggttttccattcctgagttacttcacttagaataatagtctctagttccatccaggttgctgtgaatgccattaagtcattcctttttatggctgagtagtattcctttgtatatatatgccacaatttctctattcactttctgattgatgggcatttgggctggttctatatttttgtaattgtgaattgtgctgctataagcatgcgtgtgcaagtatcattatgcaacgggacttcggatgacatattgaacaacttcctcactgatatccttgtgaaacgctacatatttcatgggtctgtttgttataccaacactcaattctgaatgatggaattatttcacatttagtctctttttcatctagccattatagtttagtttaaacaccaagttccattcctgctgcatgctgaaggatttgcagtacatcaggctatagtccatcaattcattccacaattgagtaagtaaggtatctatagtacctcaggccctgtgttaggcagggatggggtaacctagacagatttggtacctgtcctcatggagcttgactttagcggcagagacagatcttagataattgtaccagtacttaagtgttcagaaggacaagtatggaggtgggagccactccagtcctctacagtcacgtgctgcacaacaacgtttcaaccgacaacagagcacacatacagtggtgttcccataagattagaatgccatatttttactgtaccttttctatgtttagatatacaaatacttaccattgtgttccagtgatctacagtattcagtatagtaccatgctgtacagttttatagcccaggagcaataggctatataccgtatagcctaggtgtgtagtatgctacaccatctagatttgtgtaagaacactctctgatgttagcacaaataaatcgcccaatgacacatttctcagaacatatccctgttgttgagcgactcatgactgtacaatgggggaacagctcagcctgccttccccaaggaggcaacgccgatgcagggaaccgagggttgaacagaagtgggcaaggtgcagagaggaaaaaggctttccagatggagaagagcatgtgtgaaggccctcagtctggcaagagcttagtcctgtgtggcaggagctgaacgaggggttaggggagagtggcaaagggtccgggccatcagagaggtcaacaggggctggatcatgcaggattttgaatgttaacatcagagcgatagaaaacatgaagggtaaggtggtttgggttttgaatttttatcaaaatattgcaactactcggcaacaagttagatataacaaaagaggtcatcgtaaaaacagcagtctaccccttccccttcccttccctgactcagacatgacagcttttaactgtttctgattttagttcctttgatggttacctccaaaattaaatcatatgcttatacatctttcttgatttgccaactttagggaactgtgttaactccctgaaatgaaagagaatgacttagcttacgttacctccccatgttgaaattcatattcacatttctctgtaattttttttttgagatggagtctcactctgtcgcccaggctggagtgcagtgatgtgatctcggctcactgaaacctctgcctcccgggttcaagcaattctcgtgcctcagcctcctgagtagctgggactacaggcgcacaccagtgcactgggctaatttttgtatttttagtagaggcggggtttcaccatgttggccaggctggtcttaaactcctgacctcaggtgatctgcctgccttggcctcccaaagtgctgggattacaggtgtgagctaccatgccaagcccacatttctctgtaaattttaaacagtattttagtccatatgtcagttcccctctgtttaagataaggatattaataaccctacttttccttccactttccctccttaacttctgcgtcttaaaagctgtacttgaccatacccattcttgcatttgttaacatgtgtgttctgccctgcaaccacagccaagttgtagcttaattctaaagtcgaaaataacattatttacattattacacatgtgagtattgttcttggcgagaccaaataatgaatgtgcccaggattacatttccttctttacagatctggaccactcaaaggagaatgaccaatcaaggtcaaatggattcccttttcttagactctgtcacctgcttaaaatccttgctaggatttaatctacttcatattcaaaccttggcttgcttatatagctctttgttttgcccaccatttctagttgcctttttattttgtttactattcctccttgattatgttgtaaaatgctattagcagtgctgtttatttcgtacgattcggctttttccccactgaagacctttctcttggaaggcctctgcccttctgcaatctgggcaagtatctgctctttgatttaaggttgcatatacagctgtacctggaccttctcctcactgggctcttgggttggagcccgtgtcttaaaacccatatcttcctttcacatggtttactccctcgttttctggactgcatccttaaataatgtgctcagatagagtgcatggggagtaaactgtagtggataccgttgtcacctaccccatatccatttcttctttgcccattcctaacagaatcctgatattattcacctttctaccttattcccaacttcagaaaggatccttaagtcattccacacattgcattcctttggcaactgttactggtcaaggatggacatacgatctaagttggttcactcagactgaagggaaggacttccatggcacgttcagggaagactttctctttttctctcactggagtaagtgagaaaggtgttgctgggggctcttctgtaacctcagactgagggacaaagcctgaggataaagcctgctcaccaaggaaggcggagcagagaaacgggaagaacctgggtcttgatgccgttgcttagctggtgattgcactgtggctggggcctgtcctacctgagctagggactcagataggatggactttcttactgaatgagccagcttcagttttcttttctgttacttgtaaccaaaagcattgtaacagataggtcttctgagtcactgcatgcctgaaatacctttcttctactcttacacttgattggctgagtatagggttccaagttgaaaatcattttttctcctaactttggaggcatctcttctagtatgcagagtaacaaatgcaacaaatgcctgatgccaatcttattatggttcttttgtaggtgcccttcttttctcttccttccctggaagtttttaggatttcgtctccttatttttagtgtcctgaaatctcatgagaatatgtctagagttgtgtcttgttcactcgttgtactgtggtcattcaatctgaatacttttgtcaactcttttttttaaaaaaaaattactaatttacatgctttcattttctctatggggactactgtttaactttggacctcttatattggtcttctgtcttctctcatatttttcatttattgggcggtggggggtgctctgaattttggaagatctcctgcatttattttctttttccttttttctttttttttgaggcagagtcttgctctgtcacccaggctggagtgcagtagcctgatctcggctcactgcaacctctgccttccaggttcaagcaattctgcctctgcctcccacgtagctgggattacagacctgcaccaccacgcccggctaatttttgtatttttaatagagatggggtttcaccatgttgccaggctggtctcgaactcctgacctcaagtgatccgcccgcctcagcctcccaaagtggtgtgagccaccgcacccagcctcctgactttattttctatcccttctgttaaattctttatttcagccaaacctttttttttttttttttaacttactgtgaagcctgtgtgcctactgcctagattagacaattgttaacattttggcgtattttcctggtctgtatagatagggtgcatttttatacctttttgctcaccatttaaaaggaactcacagatgtcacgacatttcacccctaagtacttcagtatacatctcctaaaaataaggacattttccaatataagcacaataccccgatcacatctttaaaagttaacaataattctctaatgttatcaggcacccactttaaattcagatttcctccaaatgtctcttatcgctgttgaggggctccaaagcaattaagatttatacattgcatttgaatatgcttcctttgtctcttatttatttatttattttattttgagacagagtctcgctgtctcccaggctggagtgcagtggtgtgatctcagctcactgcaacctccgccttccaggttcaagcgattctcctgcctcagcctcccaaatagctgggattacaggtacgcaccaccacgcccagctaacttttttgtatttttagtagagacagggtttctactaaaccatgttggccaggctggttttgaactcctgacctcaagtgatctgcccgcctcggcctcccaaagttctaggattataggcgtgagccaccatgcccagcccctttgtctcttttaacaagaacagcctacccacctctccttcacttgtgatactgactttttgaagcagtcagcccaattgtcatctagaagggcccacattttaagatacatatttttagagatggcgtgtcactatgttgcctaggctggccttgaactcctggcctcaagtaatcctcctgcctcagcctcccaggtagctgggactacaggcttgtgccaccacgactagctggcccacattttagatgtctctcttttcttgtgatataatttaacttgtttgtccatatatattacttgtagacaagaagttaggtctacaggcatgttcaggttaaacattttgggcaagaatatttcataggcagtactgtgtacttcatatagcatcagctcaccaggcacttaatggttggttaccctgtggtttgtgatgctacgttttaacacttgattaaagaaggaggtgactgccaaatctccccattgtagacatacagttttcctgtggtaattgatatataatctgtgatgtgatgctttggcaccatacaaatatcctattgcccaacagccatttgcataattattttagcattcattgatccttgcctgaaaccattattacattgggggttgcaaaatgatagtttttttaattgtcacctcttctacatttagtactgtcattcctctgtaatgaattttccctcatcaaataaggaggcattatatttcctcctaaaaagacagtatagatgcttaatctttgcctttattacatttcagagtaaggagttggtagaataatcacctcaaatggtggcaaaatatttgctgttgtgtttccttttctctttcatgtcaatatggactcatagggatttatttattaaatgttttacaattcaaattgggtcaacaagagtcccttcatgttggttcctatattctcctggcataccctcattaattagtctttgagcaatttcttgttttctggcacaagatattccatcccaatatgtgcttttcgtgtcctagaactgattccaaggagctctggttccttatagtggcaacggtatttagaatccaacatgtgggtactaaatgtgctgattcttactggggtaacattatatctaggcactttcagaggacatcgctagaaaatatattcagtttttattttttatttttaatttttttgtagagacaaggtctcactatgttgcccaagctggtttcgaactgagctcaagcgatcctcccacctcagcctcccaaagtgctgggattacatctgtcagggcaaactgctggtaaatattttcacaaaagaaaaataaaaaaaccaaagtgctgggattacagatgtgagccactgtgccctccattttttttttaagtcataaatacataatgatgtcttctatggcaatttaacattacagggttcttccttaacttttttttttttttttcttttttttgaggcagggtcttgctctattgcccaggctggagtggtgcagtggtacaatcctaattcactgcagcttcaaatgcctaggcttcaaacaatcctcctccctcagcctcccgagtagctaagactacaggtgcatatcaccatgcccagctaatttttaaaaattttttgtagagatggggggtctcgttgcgttgcccaggctggtctcgaactcctggcctcaagtgatcctcccatctcgatttcccaaagtgctgggattacaggtgtgagccaccatgcctggccaacttttatttgatctgtatatatcttttccttacactgaaaatgttgggtcttactaatgttaacatagttacttatttgctttatcttgtaatagacataaaattacaaaattataataccaatattacgataaatagctgggcatggcggcgctcgcctgtagtcccagctactcaggaagctgaggtggagggactgcttgaacctaagagtttgaagctgcagtgagctgtggttgtgccactgtactcctacccggacaacagagtgagtggggggaaaaaaaagaaataatggaagatccagagaaagccccaaatatttaaaaattaaacaatacactttgcagcttcctcacctctctcagccttcatagaattgaagagagttagggccttgcactagattaggctttgccttaaggaaatgttgtgtttgatttgatcttttatccagaccattaaaacttccttaacgtttattagtaataaggctatttcactttcatatcatttgtgtgttcactggagtagcacttttagtttccttcaagaactttgattcacaacttggctaactttggtacaagaggcctagcttttggcttctcggctttcaacatgcctctcactaagcctgatcatttggtttttggtttaaagagaaagacatatgactcttccttttacttgaatgcttagaggccattgtagggttattaattggcctaatttcagtactgtcttgtccaagggaatagggaggcccaaggagagagagagagatgggggaacagctgattggtggagtagtcagaatatacacatttatcacttaagttttgccatcttttctttttctttttcttttttttttttgagacagtcttgctctgtcacccaggctggcatgcagtggcatgatctcagttcactgcaacctctgcctcctgggctcaagcaattctcctgcctcaacctcccgagtagctggtattacaagcgtgcgccaccatacccagctaatttttatattttttagtagagacagggtttgccatgttggccaggctggtctcgaattcctgacctcaagtgatccacccgccttggcctcccaaagtgcggggattacaggcgtaagccactgccgcctggccaagtttgccaccttttttattttttttattttttgagatggagtctcactccatcacccaggctggagtgcagtgatgcaatctcggctcactgcagtctctgcctcctggattcaagcgattctcctgcctcagcctcccgagtagctgggactacaggcatgtgccagcacgcccagcttgttttttgtatttttagtagagacggggtttcaccatgttggccaggctggtctccaactcctgacctcaggtgatctgcccggctcagcctcccaaagtgctgggattacaggcgtgagccaccccgcccggccaagtttgccatcttttatgggtgcagtttgtggtgccgcaaaatgatgatagtagtaacatcagagagcattgatcacagatcaccataacaaatataataatgagaaatttgaaacattgtgaaaattaccaaaatgtgacagagacatgaagtaagcacatgctattggaaaaatggcactggtaaacttgcttgatgcagggttgccacacaccttcaatttgttaaaaactcagtatctgcgaagtacagtaaagcaaagcacaatcaaatgaggtgcgcctgcatattacaaccaagaggcttttcgcagaaacacgagtgtgcttcaacattcaaaaatcagttggtgtaattcaccacattaagataataaaggaggccgggtgcggtggctcacacctgtaatcccagcactttcagaagccgaggtggacagatcacttgaggccaggagtttgagagcagcctggccaacatagtgaaatcctgtctctactaaaaatagaaaaattagccgggcagggtggcacgcacctttagtcccagctattcgggaggctgaggcaggtgaatccttgaaaccaagaggcggaggttgcagtaagctgagatcacgccaatgcattctagcctgggcaacagtgagacccagtatcaaaaaaaaaaaaaaaaaaaaaaaaagataataaaggagaaaaaccatatagtctattcaataaatacagaaaacgcatctgacaaaattcagtgccctttcatgataaaaattcagcagattagaaatagaggaagtgcatgtatgaaagagctacagatagattgtacttaattgtgaaatattgaacatgttaccccgaaaatcaggaaaaaggcaaagatgtccactctaaccacttctattcaacattatactagaggtcatagccagtataatgaggcaagaaaaaacataagaggcattaatatttaaaggaagtaaaactgtttctatttgtaggtaatgtcgaaaatgtgaaagaaactatcagaacctgctagaactaaaaagtgaattcagcaaggtctcagggtacgagatcattcaaaaactaatcagaaatgaaatttcaaatgcaatatcgttaggaataatttaataagaaatgtacaagatttacacgctgaaactgaaaatgttgctgaaagaaattaaagacctaaataaatggaatgttgtaccatgttcatcagctgaaagactaagtgtctttacagtgtcagttctcccttcattgaactgtagattcataaccccagtcataactgcagggttttttttgtagaaattgattgtaaaatgtatatggaagctgggcacggtggcttatgcctgtaaaccagcactttgggaggctgaggcagacagatgacttgaggtcaggaatttgagaccagcctggctaacatgacgaaaccccgtctctacaaaaaatacaaaaattagccagacatggtggcacacacctgtaatcccagctacttgggaggctgaggcatgagaatcacttgaacccggaggtggaggttgcagtgagccaagatcatgccactgcacgcccgcctgggcaacagagtgagactttgcctcaaataaataaataaataaaacgtatatggaaatgcaaaggacctagaacatccaaagtaaacttgaaagagaacaaaattaaggggcttatgtgatgtgactttatagtcatttgatttttaacagaggcaccagaacagtccggtgcgggaaaggaaagtcttttagcacgtgccggatgatggcaaatgacatccataccagacaaaaatgaaccttgaccttaccctaaatattagtttcttagagttgccacaaactaggtggcttaaaaccacagaaatttggctgggtgcggtggctgacgcctgtaatcccggcctttgggaggccgagtcgggcagatcacctgaggtcaggagtgcaagactagcctggccaacgtggtgaaactttgtctctactaaaaatacaaaaaacttagtcaggtgtagtggtgcacacatataatcccagctagccaggaggctgaggcaggagaattgcatgaacctgggaggttgcactgagccaagattgcaccactgcactccagcctgggtgacagagtgagactccgtctcaaaacaaaaccacagaaatttgctgtctcataattccagagtctagaagtccaaaatcaactgtcatcagggccatggtctctgtgaaacctgtaggggagtccttccttgcctcttcctagcttccagtggttggcaacctttggcattctttgatttgcagctgcattacttcaatatctgtcttcctcatcacacagcattctccatgtatgtctctgtctttacatggcctccttcttgtaagaacaacagtaatattggattggggcctgccctactccagtgtgacctcaccttaactaattacacctgcaacaacgctgtttccaactaaggtctcagtgtgaggtactgagggttaggacttcaacatatcttttttgggggacatagtccaacccatgacactacttcacaccatacataaaaattaattcatgagagattatagacctaaatgttttaaaagctaaaaatataaagcttctgcaagaaaacataggagaatatctgtgcagtccaaagaataaggttttttttaaacacaatttcactctgttgcccaggctggagtgcagtggtgcgatctcagctcactgcaacctctgcctcccgagttcaagcgattcccatgcctcagccttccaagtagctgggattacaggtgtgcgccaccatgcctggctaatttttgtatttttagtagaggcagggttttgccatgttggccaggctggtctcaaactcctgacctcaagtgatctgcctgcctcggcctcccaaagtgctgggattacaggtatgagccaccgtgccaggccaaaaaaagatttattaggatacatgaagcaatagctattaaaagaaaaaataaattggacttcattaaaatttaaaacttttggtcctcaaaagataccattaagaaaatgaaaagacagagctgggcgtggtgaggcttgcctgtagtcactactgggtacttgagaggctgaggcaggaggatcacttgagcccaggagttctaggccaacataggcaatatagtgagacagtgtctcttaaaaaaaaaaagaaaaagaaaaaacaaaagaaaataggctgagagctgtggctcatgcttgtaatcccagcactttgggagtacaaggcagatggattgcttgagctcaggagttcaagaccagcctgggcaacagtgaaatcccatctctacaaaagatacaaaaaattagccaaccatggtggcgtgcacccgtagtccatagtcccagctactcgggaagcagaggcaggaggattgcttgatcccaaggaggtcaaggctgcagtgagctgaggtcgcgccaccgcaccccagcctgggtgactgagtgagaccctgtctcaaagaaaatgaaaagacaagtccaccaagaaaacagttgagaccagtcatagaaaaaatagaaagtcatatctgacaaaggatttgtattcagaagaattcctataactcggtaataaaaagacaacctgatttttaaagggtgaaaatattttaatggatacttttttttttttttttgagacagagtctcactgtgtcacctaggctggagtgcagtggtgccatcatacatagctcactgcagactcgaactcctgggctcaagtggtcttcctgcctcagcctcctgcgtagctaggactacaagcacgtgccactatgcctggctaatttttaaattttttgtagacatgggctggtgtgtgtctgtgttgtctaggctggtcttgaactcctgggctcaagtgatcctcccacctctgccccccaaagtgctgggccaccacgcctggtgtggtgtcaccagagatgagccaccatgccctgcctgatacttttcttttatcatctgtttatttcttgtttatgggtgtttctgttctgattttatgactattctgtattctaagatttctctgagaatattatttgtttcctctaaggacagacttggtctctcttccatggggctggttcttgagccgccagggatggggggaggacctgggtagctgctgcgctgccccttctctgctgtggtggagtggcccgttgcctgcggggtctgtctctgaagggtggtttggagaagttctgtggaggcgaggcaggggtcagctcttgccccatggaccctcagagactgggaaaaggtaggcatcacctgggctgctgccagccacatcaagagcctttggggtgggtggggtgggggccggggaagggaaggttctagctgttgatttagaaaagacccattgatttcttgcctgagggaagaagtggcaccttgccactccaagtttgctctgctcaccagccccaacagcatcagcctcacctgggagcttattgaaggtgccctgccccaaagcttgtgggtcgggatctggcagtcagcagcccccaggtgttgcacacatgacagcactgcttgcccctcctctcgtctggtctggtctggtctggtctggtctggtctgagagcttctttggggctctgacaggtatacaggctctcatctgctctacagctctcttgtagtacattcctctctgttccattagtcaacatgttcttgcctacttccagcatctagaaatttgctgagtgtatcttatccgttcagaggtcctctcctgctattgcctctgttagaaatttcttccctttcatatgtctgtacttcggtttctttgaggtttgaagggtcaagtggcaattacatgtaggcagttggccatcctctggtgaaggctttaaagcccaggaataacaagatccattatgtctaaaactagcaaaaaccctacctgtcacatggtgaactgaattagaggtgatggggacagaagccagattggagtgagtggaaggtgagggagtggagattgggtatagacaactctctttaagaagttttgttgtgatggtgaccagaaaaataggagtggggtagagggggatgagggtgtttttcacgtgggtgaatatgagagcatgtttacatccttctgggaatggcccaggagagaggggagcgtgagaaggaggaaatggggacctggaggagcagactccttgtgtggaggggggaagcggcatctagagctgttgcaggaggtgggctttgagtaaatgcttcctctttggtaaagacggggaacgggaacggtagaagttgcacggaccctttgttaaagctcagaagctgagcgagaattagagcttaagtttatggagtagtcagaataaagtacccctaactgtattcttgcacagtgcaggaagccaggggtctgaaatcaagatgttgcagggctccattccccccagagcctctagcatggatccttccttgcctcttccagcttttggtggctgcctggcagtcctagactttccttggcttgcagttgcattgctccattctctgcttgtgtcttcacatggccttctctgtgtccccgtattcttctctggatgcttgtcactgtattaggcccaccctaaatccaggatgatctcatatcaagatccttcacttaattacagaagcaaagaccttccaaataaggtcagagccacagggtctgggggttaagacatacacctaactattcggggctaccatcgaacccctgtagaagcctgtccatttccaggatagcagagcccaaggaagggccagaagtccccccaaaacagttgtttgcattcaccagattctaagctataagcagatgggcagtggcagtcggtcctaatccatataccattggcaacaatagtttagttcactgtagacataatgagatgcttatcttctgctaagtagtcctcatggtaacagccatattactcctggctttgagtgacagcgctgtgctcttgtctggtgcccatatacttcagcagctggaaacaagacagtgctcatgattcaccggaaagtttctgtagttaaaatcaagtgatcccttgagtctattctaatatttgtctgtaccatgttctgtgacgagacatggaaacaaaacattaagaagtgaaagtatctttgattatgctcttgaagacaactttttgtttgtttgttttgtttgagacggagtttcactcttgttgcccaggctggagtgcaatggtgtgatctcggctcactgcaacctccgcattcccgggttcaagcgattctcctgcctcagcctcccaagtagccaggattacaggcatgcaccaccacgcctggctaattttttttattttagtagagacggggtttcaccatgctagtcagactggtctcaaactcctgacctcaggtgatccgcctgcctctgcctcccaaagtgccgggattacaggtgtgagccaccgtgcctggccgaagacaactttttaaagatgcatatgctctgggctgggtgtggtggctcacacctgtaatcccagcactttgggaggccaaggcgggcagatcacctgaggtcaggggttcaagaccagcctggccaacatggtgaaacaccgtctctactaaaagtataaaaattagccgggtgtggtggcgggtgcctgtaatcacagctactcaggaggctgaggcaggagaatcgcttgaaccccagaggcggaggttgcagtgaattgagactgtgccactgcactccagcctgggcgacagagtgagacttggtctcaataaataaaataaaataaagatgcatatatgctctgaaggctggctacattttattttttctcaaacaacttttacagtggatagtgctgtaaaagttgtttagctctggtcattttatcttttttgtgatctgcaaaaggagatccttttccttttcactgcctctaatacccaactccaatactcctttgacctcacaggcacttagaatccatcagtggctccatcttttctcagacttcacctccttcgtatccttattcctctcctttgtagcttcagtgccagtcagacgtcgttactccctggcacactacctcagcccttcggcactttcttgctttgttatattcagtcgacaaagccccagcctcatgaaattcagtcatgtctgccccatgcctgctccgtcctgaagctgaatgtgactccttcattgattccccctttaagttcatgtctaccccaggtaaacttcttgccgccaagcccacctgcatactgcagttccccggtctctcctagcccctcccaccctcctcatcagctgtcacacctccttgcagctgatatcttagttcccagagagcacagaagcaagctcaagagagtgtctacaggccagcgtctactccttcgctctgcctccctcatgctgtcacggagcgcctgtcccaggccctcactcctgttctaaggcatctctccagtcctctactgcactctcccccatcagagattcctccctcgcctgccctagaaacttgttgctacttctcccaccttgacaaaagctgctcccaaccccccacctgtctagcatctctgttttcctttaccagcaagactccagtccctgtctccacaccctcttcaaccttctccagttgttcctttgctgccacagctctgccaagctgctccatgaggtctccagtgatgaccttcatgttgttaaatctgggagctgcttgtcacttcttttcccagagctgtcgtcgtcagttaaccccaatacccatacgagacaatcctttccctcccttgagtctctgcactgatgtgcaccttctcagtgcaaaccacagcttttgtctctttctagctgaatacatgactgactgtgcttatcttagctgtcacccctgctggagcagaagctccacaggacaggattgtctccttgattcacagatgtagctcaagctcctagaacagtgcctggtgtctgtgggtcctcaggaagtcctaggtgagtgtgtgaatgtctgtcctcctcggtcttttctgtttcgcatgtgatgttggaaggcctcaggttcaggcttttcttctccaccctcactcccgaagtgattccgtccagcctcatggctcccaaatttatgtctccaggctgactgggtcacgggaactccttatcctccctagaccttctctttccctggtcttctcctttccagtaaacagcaactccaactcctgctcctcaggccagaaacctggcgctggttacctcatttgttcacaaatactgttactccacctgcaagatggatacaaaatctcatgagttcccctgcctccatggcccccaccctggtccaggtgtccagcttccctgcctctgcccttgccccctggttctttgtttagtcctgcaatattgtgctcttctgttcagaaccctccagtgggtccctgcttgctcagagtcacagcccaacaggatcacctctcttgccactctcccaccactcatgcactgcggcctcactggcctcctggctcctccctggaccctccaagtatgcccctgcctcaaggccttgacctctcctctgccctctgtcccaggtatcacacatgtctgctcaagtgtcaccttcccaatgtggccttccccgagcacacccatgtctgtaagtcaggcagcctgcctctgccccaccagttccccctgcctagcataggacttgtcaccatctgccacaagctgtgttactgcttggttttgtttgtgctctcccactcccttcccctccctccctctccccacccctatagaatctgagtcccatgaggacagagatttttttttttgcctcttcctcaatatatccccagtgcctagaatcatgcatattttaatttattgagtgaattaacaaataaattctgcagtgggacattgctctaaggttttgtcttataagagggacagaagaacatgcagcctgctctgctgttggctccttagcttctccatggctaacaggaacaatattgtttatgagataatcaaagccatagtcatgagttagaaggtacatataaaggcaaatatgtggagattgagttactttggcgggggcggaggggtgtgtagttatctgaaaacatggaacaaatcaatgagagtctaaatagcacccacatatttgcccctcttttaaaacatacctcctttatgagtgtagaatttaacagcacagtttcccagtgcagctttgcgaaacaagagaaatgaattttaaaggctgtcaggtgcctttgcaatctgtggcttagtatttgtgtaacaacatttgtgttttgccaacagatgtactgcttaaagtacccatgagaatggcctctgtggttttctactttctcggatggaaccttaggaactgattattgagaagaggctgatactgcccacctcagctcccaggcaggcttcagggccttggttactactcctttgggccctcactgacccttgcagacgtcttttgcaacctctgtagccagaagagacaactgctttctggcatgttgctctttccctaatggctttatgagcttcttgaacaccaaagcatgtgtgacttcctcacgccttcccctgtatagtatagcacccctaactgtatgtgtaaggagaaggagtgagcaattgatggcgtccccctggatctccaagggaatgggaaggggcagggtttctggattcagtcatgtggaatctggtcgttggtgtctaaatgtgcctgttacttgtgcccaatgtccaggttcaccaggaggcttagcctgctcatttccctgctagtagctatattttgggagagcattttttatgctctaattgaactttgtgggtctcagcaatttgaacaatgttttgtttttcttctggtcaggttacaaaggaaagaaaaggaatctggtgttgtaggaggtggtgtgttgtgtaattacttgttttttttttttaagtttttttatatttttgcaacaaggcaagttttctttgaataaataatgctgggagcttatcacatagaaggcatatgtgttgtactcagtacattctgaattatctgggtttatttttatctcttgaattcacttataaacaattcaaaggctgcttttttagctaacagaaataggaagagaatctcagaatctgttttgtcattttttcaatgggttgagttatagtgattatgctaactcggtggaaaagcagtgtagtgagtaaaccccacatacggcatatcatgaacattttgttgcttttttggcttctgaccatcttcatacctttttttgtgttaaaagtctccccattgtgtatatcttagtaagaggcaggtggaccctagtttctacctaagaaaacctgaagatggggttgggggcctgtggtgtacttccttctcatgctgtccatgaccactgcagtggctttgtaaggatccaggacccagggcccctcagtgggtgtcttccatttctcaagattgcctcttggttgtgagatgacggttgctgctctagtcattgcatccactcctccaggtaggaagaaagaggtcataggggaaaggcaaaatggcacttgacatcttaacttctaggcccattcaatatttccatttccatcttcacacccatcatcttgtcctagggaacaaacagcaccagcagctcagtagctataacagcaattattatttctcacacatgggtctgggtcagctgcaagatgggattcagatctgttctcaagcctgtcgttccaggacccaggagggagaagcagctgccaggggaagtctcttcgtaggcggaggtcaggagtccaagaggagtgagcagagtcacagaagcctcttaaagcctcttcttcccccatcccatcaacacgtgagcaagcccagagtcagtgggtgggaggtgtgctccgcccatagtcagtagaacaagagcaagcttgaaagagaacgatgaacaggagtgcactcggccactgtctccttagccataacgtagtcccatggtctgctgggaagcggggaataactctccttagctgagcgcagggtctcattagtaaggcagatggagaacatggatgttgggggacaactggcagtgcctgccacaggggaatggatatattccctccccttgctctctggaaactaggggatggcgatgaagcctaggtttggccaaacccattctgccttcagggactttgactcttgagggacagtgagggattagtcatggtggtggcagttgagtcacaaaaccagcagtggtggctaatgtccagtgatgacatgcaacagtgcccagggtgggtgtcccaaccagcaggtccctgcagtataaccttggctgtgtttgcagtggtgcagcctctattcctgctgcttttctgagcctagttctctagttctctctccatttccagatctgctgcccaagaactcctttgtgattgaatttaaccagagttgatttctgttgcttgaaactcaggaccttgatgcagtgtgcagggtctgggcaaggtaaaaacacactttcatgatttcgcctcaagtatagtagatgagcttaggctttttgagccaggtagccttgggattaattctcagctcttgcacctagcaggtgacctcagcaatcaagtcacttgccctccttgagcctcagtgttgccctcagttaaacattgctctcgtgtgttgctgagcattcagtgagattgtatataaagtgatcattgtgaaggtattgggacataatttgggaaagcgtcctggtctaagcttttgattggctctccatcatttgggtaatgggatagtgatttaggagtatcatagcagctcaaggggcccttctggaaagggtatgaggaaggtcagggacaagtctgaaatgaatcatcctaggcttaatgcctgtgactgggcagtgggtacaattatctcaggctagtcagtagtcatttattgtgagaatacatgggcagattttttaatttccttctcagtctagacttgaatgcaaacagttcttattgctaacttaccactagtcaccactaatgaacaaagactatgaacaggaaattcataaaagaagagatacagatggccaatgaagataggaaaagagttctgcctgctggtaatcaaagagatgcaaacgagaacaaaaatgatgccttttcacctaccaaatttgtcaagattaaaaagaaagcaaagagccagcgtcagctgatgttcatacctgcacctgctcggtagcttgctaatgttctgcctgctccacacgccaggccagcctccacggcgcagccaggtgaggcctttccttgtatacaggcacgtttggattcactgttgcataagtgagacatgtgcatgcttcacaattcaggaagtgcaaactccagagtgatgcaaggtctgagtgtccctgctgccctggtctcccagctgcctaggcctctcttcagggaacggctgcatccagggtcttgtctgtgtcttttgaggtgttctatgtacacgcagacacatctaaacctatttttattttccctgcacctgcttgggctactgtaagctgttaaatttttttttctaggaatttgtccattttgtctgactagcataaagttgttcatgttatagtttatacatttgcaacatctgtaattatgtctgctttttcattcctagtgtttgttgtttacttgtaccttctcccgtttttccttgtcttggtaaaagctcattaggttcattggtcttacaagaagcagacatgtaggcattattgccctgtattactctgtgtctcttttctagttcattaaattctgcttttgcttttatctttattattttttctatggtcttagagtacattctctgtgttttgttgttgttgttgttgttgtttgttttttgttttgagagagagagtcttgctctgtcgcccaggctggagtgcagtagtgcaatctcagctcactgcaacctccacctcctgggttcaagtgattctcgtgcctcaacctcccgagtagctgagatttacaggcatttgccccacacccggcaaattttttgtatttttagtagagatggggttttggcatgttgaccaggcgggtctcgaactgctgacgccaggtgctccacccgccttggcctcccaaagtgctgggattacaggcatgagccaccacgcctggccctaacttcttaagttataaatttggttcattgatttttctacccttttttcaaatgtaaacatttaaggctaaccctctggaactacttcaactgtatctagcaagttctgatagtattgtcactttaagttagcccaaagatattttaaattttctttgtttcttcctttgactcacatattattttaaaatgtgtttttcaatttccaagcacatggctttgggtttgttttttttttttcctagttgctctagaaaaaaaaattgactgcatgaggtggctcatgcctgtaatcccagcactttgggaggccgaggcgggcagatcacctgaggtcaggagttcgagaccagcctggccaacatgccaaaacctcgtctctactaaaaatacaaaattagccgggcatggtggcacacacctgtagttccagctactcgggaggctgaggcaggagaatcacttgaaccgggaggcagtggtcacagtgagccaagattgtgccagtgtactccagcctgggcaacaagagcaatactccgtctcaaaaaaaaaaaagaaaaaaagaaaaaatcaacttctaactaaatggcactgtgatcaaagaacttggtctgtgtgacaccagttcttgcagttggttgagaagtgctccatgacacattatccacaaccagtggacagaatatgtcaccaccaagcatgggtgcaggattctacatatattcattacctctgtcttatccgtttgttgtgaaagtattttctcttcttactgtcattttgtttacttgatttatcaactgatggaatacgtgttaaaacctactgtggtgatggacacatcagtttctccacagagtttggtcattttcattttattatttattttgaggccacattttcagttttagatacagtttcacattcctggtgtattgaaccctttggtattatgaagcgaccatactaatatgttatttttttttaaattattatttattttatttatttttctttcttttttttttttttgagacagggtctccctctgtcacccagtctggagtgcagtggtgcaatctcagctcactgcaacctccgcctcctgggctcaagtggtcctcccacctcagcctcctgagtagctgggattacaggcttgcaccagcgcgcctggctaagtttttgtatttttagtagagacagggttttgccatgttgcccagactggtctcaaactcctgggctcaagcagttcaccagccttggcctctaaaagtgttgggattacaggtgtgagccaccacgcccggccatcccagttttttattttcctcctttctgtgtctttatgcatcagtgaggtggagcttttgaaaatgtcagatagctagattttttttttttgagacggagttttgctcttgttgcccaggctggagtgcaatggcgtgatctcggctcactgcaacctccacctcccaggttcaaaacaattctcctgccgcagcctcctgagtagctgggactacaggcacgtgccaccacacccggctaattttgtatttttagtagagatgtggtttcaccatgttggccaggctggtctcaaactcctcacctcagctgatcacccgcctcagcctcccaaagtgttggaattacagacgtgagccaccatgcccagctgatagctagattttttttttttttttttttttgagacggagtcttgctctgtcgcccaggctggagtgcggtggcgcgatctcggctcactgcaagctccgccccccgggttcatgccattctcctgcttcagcctccagagtagctgggactacaggtgcccgccaccacgcgtggctgattttttttttttttttttttttgtatttttagtagagacggggtttcaccgtgtcagccaggatggtctcgatctcctgacctcgtgatccgcccgcctcagcctcccaaagtgctgggattacaggcgtgagccaccgcacccggcctcgagattttttaaaaaatccattgtctgtttcgtcctttaacatctatttgatttctgatgtatttagattcatttatagcatatttgtgcattctatttttccatattttctgttcttttaaattttccttctcctttcttgccttctcttagacttttaaaaaaattgtagtaaaatacacatcacctaaaatttaccatttttaaatgtacagttcagtggcattaaatacaaattggaggccaggcatggtggctcatgcctggaatcccagcactttgagaggctgaggtgggaggattgcttgaacctggaggtcgaggttgcagtgaggtgtgatcacactactgctatagcccaggcaacagagtgagaacctatctaaaaaaacaaacaaacaaacaaacaaacagattggcatcacacagtgtgtgtgctgctgtgctgtgctgttatcatttaacattaaaacataaacatcagcactgttatggactgaatgtttgtgtcccccaaaattccagtgttgaagctcaaacctccaatgtgatgttatttggagatggggtatttgagaggtggttaggtttagatgaaatcaggagggagggtgggtttcgcatgatgagattagtgtccttataacaagagacagcagagagcttgctttctccaccatgtgagtatgcaatgagaaggcagccatctccaagtcagaaagagagccctcaccaggggctgaatgtgctgacaccttgatcttggacttctagcctccagaactgtgagaaatttcagttgaataggccccccagtctgtactattttgttatagcttgagcagactaatacacccatgttatgaaaagctataaacatccctttaaaggccacctaacgcgtcgtattacctcatgcatcttctctgctgagctttccaaaagagtggcttaggctgggcctggtggctcatgcctgtaatcccagcactttgggaggccaaggcaggtggatcacctgaggtcaggagttcaagaccagcctgaccaacatggagaaatcccgtccctactaaaaatacaaaattagctgggcgtggtggcgcatgcctgtaatcccagctacttgggaggctgagccaggagaatcacttgaacctgggagatggagggtgcagtgagccgagatcgtgccattgcattccagcccggccaacaagagcgaaactccatctcaaaaaaaaagagtggctggccgggcgcagtggctcacgcctgtaatccccgcactgtgggaggccgaggtgggtggatcacgaggtcaggagttcaaaaccagcctggccgagatggtgaaaccccgtctctactaaaaatagaaaaactagccaggcgcagtggcaggcgcctgtaatcccagctacttgggtggctgaggcaggagaatcgcttgaacctggggggcggaggttgcagtgagccaagatggtgccactgcactccagcctgggtgacacagtgagaccccgtctcaaaaaaaaaaaaaaaaaaaaaaaaagtggcgtatgttcccggtctccacctctcattcgccagcccctgtgaccaaacccctgggattagatctccatcgggtccctcccctcaccctaacctcacatgcagtggttcctgagaagctgctgtttatctgatcacgggatccagcaggatctgagggctcattcactgaatctgtactacccaacaaggcaggcttgtccttacccacacttttcaggtgaaaacttaatcagattcaagcgtttatcttagtggcctcttcgtggtgtgtgatttccttcttgcagctctttactggctaaaactcttcactgggagttaaaccaggtgtggtccttgaccctcatcattttgtcccatctcctatgctgggctctgtatccttgtctccaagcagtctcgtgtgacagggaagttacctattattgtatggtcccctcttcttgtcacctctggtgtggcacttgttccatttcttgttcaatgaatgtgatttgtgaatgtgccacatctgtgggaggaaggcagttcgcagcaagagttgtagttcccttgctttgccctgagggccaggactttacactagatttttttgttgcattcctgcactcataaagtacacgtaaacttagaggtggtgtgttaaatgctagaacttaaaactgagttcagctaggctcaagtgccccacaatttttgtcccaccagacaatttcatgaatatctacagattgttccctcaatatgcctcaatattgaggcatattgatttggggagcacagacaagtcaaggttgatgtgcatccgctgaacatgatcttaagttgttgaagtaggtattattaatgaacgaacgtctattttagctccaagagcccctggtcttccagaagagactcccaatgatcttccagaagcagctgggcttcttttggtcctcccccacccaggtgcagtcccgttctccctgcctgggtgagtttgattcctctgccgtggaataggctaggctgctacctcttgagcctcttccaccaggccatccattaggtggcgacagagagcactaaaaggaactactatggaaataaaacttgttttgcttcttggggggaaaaaaaaagaaaaaggcttgtggggcgtgtgtgcattttagtcagattttactgtgcaaaacatttgagagatttctgccctctttctcccttccattcttctcaacccactgggcgccctaccacccctgtctccttcaagataaggtagatcagaagaccaaatagacaaatgccatgtccactgttttctgtcacagttgatagccataccagtcacccaagctggaaacccaacaggcccctgcccttcactgcccacatccaagggagccaccaagtcccacaaattgttcctttaactgtttgtccctcttttgtcttctgtcatcccttctaccgctgtcctggttcaatccctcatcttgctctgggactcccatgataacttatgatctttcctccacctctctatcttccacacaatccctatcatcaatctcattcccctgctttaaacccaagagtggcaccctgtgtttgagtgacatcagggcccctcatgtggctcctgcttctctttgtggccccttctgttgctgctgcttttcttatggacatagccctcagcagtccaggactgcttgtagttcctcccaggtaccatgtttcttgcactcctggcctttgtcattggctcccctgcccaagtccccttctcttctcctttccttcccctgtggccttgccttgtcgtgcttatccttgaagaccctgtcaggtatctcttccccaaagagccctgcctaaccaccgcccccctcccccccgcgacacacacacctgggttaggccctgcctctccacgcctgtgcctcctgccaagtcctcagaggtctctgatcccatgtgcctccaggcatggcatagggggactgtgacacagcctctcggcccacagacccctgattgtgggcttgctcactgccccagtcagtcctcttattgaggattccgtgccagttcctgactccagcacacacacgcatgtaggccgccctcctagtgcctggctccttccctgtctcttctgccactcattcccatggtcgtatcctggagttggtcatctctggaactccacccacggagttctaacttagctctgcctatgatgaggacttactgtcttcccagcttgcagtgtcaaccactgtttgatgcccctgggactccattggtcttccctcctcttgtgaactgtgcccatcaccagacgaacttgttttagaatttaccatcgtaactgagctcccttcagcgcatacctccttggctcctgctcagtctctgtttctccttttagccaaactctctaagagttctctccactcatgggccctcttccttgcctgctgctccttgctcagcttgctccatgaacacttgcttttccacattccatgaaataatcttaacagtcatcagtggctgtcactccttctcagccctttccttgtgtctcttctggtacctcatactctccaggtggccatctcacctcacatcttgaaccctctgggtttgggagaattctcacctcacgagttgatgggaggcctggcgacctctgattgtagtcactgcaaatgccagatgcttatttgcctagcttccctttcggtcagggcagcagttggcaaacggtatctcaagggccaagtccggcccactgcctgttttcgtaaatgaagctttaccaggacccagttccaccccgtcctttgtgcattgtccaagactgctctcctgtacaacagcaggtgggctggttgtgacagatactgtctggcccacaaggtggaaaatactatctggccccttacagaaagaaattacctgagttctacacgagggtgtaggtatgtaccctggcctctgccagtcagactcacatgctaggaggagcagggccaggcaggagagccgtgtctcctggcattggggctgcaggaaagacgagctcctaggccacagtgccagtggccagtgctgctgccttgcagggtcgcacaggcagtgctggctgtttggactggcttggcagaaggatttgaagtattgttcctagccaactggactcaaacctgttcctccaaccctctagggattctcttatcacccagtagccttttccccctagttttaaaaattgcagtaaaatacacaaaagataaaatgtactgccttaaccatttttaagtgtacaattctgtggtattgagcacatttatattgtgcaaccatcaccacatgcatcttcaatagcttttcatcagtccttgtctgcataaatcagctagagttggtttctattgattgccaccaataatcttgacagatatgtctgatcttccttctctgcactgactcctctttctctgtctcctctgctgattctttctcctcatcacaactccaaatagcagggggagggttgtttacacttatattcagcacgccctcacgcactcgcctggctcttcagacctctcccctgaactccagattcatacatccagctgccctttaggcctctagaaagctaaatacctcagtatcaaaaacatgagaaacggaagccagagtcctggatctctcgccctttcgctgtcccggtgcccatgcccttcagggatggcacctagaccagctccctgcatccctgcctagactctgcagtagtctcacgtggcagacccggaggtcactctcctctctggatgccctgcggacactccggttagcctcagctgcaagagcctcctcacccaaggtcacgccatttccaggacagcaccctggtgactgagcgaggtaagggtacaaggcccttatagggccttctctttgacttcttcccacctccctttatggatgtcagttcctgatgaacatcttacacctcaaaccgtgacccaacatctgcttctgcagagcccccctgtggcatcttgtgccctcctgccccactccctctactctatatcttcccatagttagaatgggctttttttttttttttttgagataaggtctccctttgtcacccaggctggaatgcaatggcacagtcacgactcactgcagcctcaacctcctgggctcaagcagtcctcccacctcagcctcccaagtagctgagactacaggtatgcaccaccacacctggctaatttttatattttttgtagagactggggtctccctatgttgcccgggctggtctcgaactcccaggctcaagcaatcctcccgccttggcctcccaaaatgcaggattacaggcgtgtaccagtgtgcccagcctcagatgggctctttgaaaaatgtttattagatcaggttactcccttgagaaaaaccctctcagaataaaacccgaagtccattacttgaaagcagagccagcttcatgggcctttgtaactgcccatgggcttgctggaacccaggcttggtttaatactctactctcaccatctcaaaattcttaatttttgaacaagaggccctgcattttcattttgcaccaggctccacaaattgtgtaactgggcctgcctcagcagccacatggaacatgatccctccttgcctatttgagctcattctctaccattctctcccttgctcacctggctcccactgctcttgctcttcctggaacttgccataatgttgctagagtcagagccttggctcttgctgctcctcattggctggacccctctttacttgacctgctccctcaccactcacttccttcagatctgtgttcagatttcgtcttctcagagaggcttttggcccctgtccatctctctgaatttacctctgacctctcccccaccaccactgcgctaagctgcctcagaactttgtagacattctgtctggtcttctgatgtttcccccttggaagaatcccaaggtgcctgaagaatgctttctttatccttgaagttgagtaggttgactagagtctggcttgctattgagcattctttatcaaattgtcctgggaacatggtgtattctttcagtctgcagatgtagtcgttgctgtttcaggtcagctctcttatggatctttgacagcatcttctgttccatttgttgagttctgtacttcagggacacaaattcctcatgttggattgtctttgtctctcttccaatgctattagctttgccgtaattggtttagcttttgtctttttcatctgcattcactttgtctaatttgattttcagctatgtatattctgtttctggctgtttttcaatgtatttattagtttcataatgatgtgttttggtctgcagtttgtttctctaggttggaaatttgtcttttcatcttattctgttttatcatcccatctttgaactcttttattgggaacatgttcttatgaagttgtggggaatttttttcccttccttgtgtattctcttcttggtgggagactttgcctttctcgtgccatctccctccctgggcctcttttttttcttctggccataatatgtttgcctagttaccatgtcacttcttttcgtcttggctcaggcttggatggctctgcatagtcgttctgtttgctttgagacagtggaggaattcttggctctctcttcccagtttcttggcatcttctcttgctgttttcccctctgagctatcgcgtgcaggcttgttatcttgtatccggagagaatttgcacgctggagggagctgcagccatgtagtcttcagccctatctggattcttctctttgttctaagaactgtgttggatgtcttactaaggctcactctagctgcacgagggatgtgtgtgccatttccatggggatagggggcacctcagtctctgggtggttccataatctgtgtatacctaagagcagttgcttcccacagagctgggctggctcactgggcactttgccatttctcctgcacctcccagctggagtttctgggtctaaaaggaaaaagtgaaggactcccacttggttgcttctctccagcttactgactgcaaattcccagggcgttgcccgctccctagggtggtttctgggggacggggcaggagcctggctttgctgctgctttgtcctctggagtcttttctcagactgctttgaattacacccctttcctttgtgtgctgaaatcttcccttcacactctccttccctgcctttcttttgtgtcttatcttactaggactggaagagggcagttgtgcaggaggtctgcatctaattccctaatccatgtgagagtgctcctgttgtgtgctttgtgacatgatggtgagaaatactccctagagcagtggctaccagaaggaagccatccccccccctgcacacacacacacacacacacacacacacacacacacacacacacactccttctggctgtcctcagatgcctattctaggtaaatgtcagattccaaagaaaatccagttgagatcttttttctttttttgagacgagagtcttgctgtgttgcccaggctggagtgcagtggcacaatctcggctcactgtaacctccgcctcctgggttcaagcgattctcctgcctcagcctcccaagtagctgggactacaggcgcgcaccaccacaccaggctaaaatttttttgtatttttagtagagacagggtttcactgtgttggccaggctggtctcgaactcctgacctcgtgttctgcccgcctcagcctcccagagtgctgggattacaggcttgagccatcgcgcccggcctccagttgggatcttgactggaatgactggtgttcaatcattatagtttccacctaatttgtatttgtacacaggacagttactaatttgttggtacttgtttgatccccagtccctagagttgtttatggggtggagcttcagtccctgctgcttcccctgtggcagcagctggagtcagggtggggacccagggtgctgctggcagattcttgagacaggtagaatctcctctatattggtgtctctctctgtcccagcagtgcccaggaaaacctggccagcctgtcactgacctctccacctagggcactggtggttcaggtccttctatttgccaccggcaaaccgtacttctgccagtctggctcttaggcccagtttctctgatcttgcagattttcttgggctctgctacggaatcctcatacctccggcaggtccctcctttgcccatgtgtttaactgtggtggaatcgtgtgagagctgcttctctcgcatggatcccagccacaccacattctacagcggttcctctgaaggcattgatagagatatttcctcctgttttgcatttcgttggtcatttcagtagaatcagggtgaaataaacatgggggctcagatgtcagcattacgaaccaagtacgtcaggcaggctgatgtggactgacctacactagtgagacgcaagatgacgaaaacaagggcactcactccaagttactgatgagatgtttggatcaaatgagccagtccttaagcagagttctctagtaaaagagatctcctttctgccctttcttgttccccaaaatgtgttgccttcatggtgaaaatttattttggcagattttctcttctttgataaaagcagccaacactttgttaaaagtctgtgaaacttatttacatgaagtatgtaaaggtaagaaaaaaacattatcaacaagaaatggagaaagccagcagctgaggacagaaaagtcatgcacagtgtcagtgtctatggaaacaggccacttggaccttgaggactaggtatttggaattggaggtgagcttggcctggtgagtctctaaccacttgtgtgtaggatcagtgtgagaaccctgctagaatatagtggcagagatgcaaggggaaatcattggagaagttaccagggaatgatgagctaatctgaaaaaaatacatgtttctaagttgggcgtggtagctcatctgtagtcccagctacttgagagcctgaggcaggaggatcgcttgagcccagcctgggcagcacagcgagaccctatctccctaaaaaaaactttttcgttgtttagttttgggatttttttttttcctggtcttttttccccctttttgtgaataacgggatctcactatgttgcccaggcagatctcgaactcctgggcccaagcaatcctcctgcctctgccttcctaagattacaggtatgagccactgtgttaagcaaaaaaacttttttaaatgaaaatcattttttaaaagacaggctttccaggggagggtattattccacttatatgaagtgtcaacagtaggcagatttgtggagacaaatagattagtggttaccaggggctgagaggagtgggagtggggagcaactgcttaatgggtaaagggttgtctttggaactagagagtagtgatggtcgcatgacattgtgaatgtactaaatgctattaatgataaattttatgttatgtgtattttaccacaattaaaaaaaaaagatcaaatgtcctcagaatagccaacaaccttccacttggctaaatgcctactcattaaacttcttgaactaaattcctttctgattgtcatggttattgtgtcctgggcttcagagtttcacattcaggttggcttggtccagtctgtcatgtatcactataggtccccacattggcctcttcctcagacggacagcccatctatctgccggggctctgtgccacagccagatagacttgctctgagacagctgtgtgggctctgagcactggccaggcatcacaaaacctatctttatgatttagaataattggtggtcagctgctgttttaatgttgttgttttttttaatttagatataattcacataccatgaaatttactcatttaaagtgtacaattcattcttcagtataattcataggctcacagaaaaaattgtttaaaaataaaatgtgcaattcagtgtcttttagtacattcacagagttgtgcaaccatcgcctctgtgtcattccagaacactttcagcacccaaaagaaaccccagacacaggagcagtcacctcttattacccgcagcccctggcaacaactcatccacttcctgtctctatggatttgcctattctggacatttcctataaatggaattatgcactatttggccttttgtgtctggcctctttcactgagcgtaatgtcctcaaggttcatctgcattgtagcatgtgtcagaatttctttcctttttgaggctgaatgatattatatcctatagataatgaggttttgattatccacccatcccttgggaatgcatatttgggttgcccccaccatttggctgttgtaaactgtgctgccatgaacactggtgtacggatatctgtttggttactggttttggttttttgtttgtttgttttggttttttgagacaaggtcttgctctgtcgcccaggctggattacagtggcacgatctctgctcactgcaacctccacctcccaggttcaagcaattctcctgcctcagtctcctgagtagctgggactacaggtagcactcaccaccatgcccggctaaatttttttgtatttttagtagagacaaggtttcgccatattggccaggctggtctcaaactcctgacctcaggtgatccacccacctcagcctcccaaagtgctgggattacagacgtgagccaccgcacccggcatagttgtggctttttgagagtgtatggctaggagtaaaattgccaggtcatatggtaactccatgtttaacatttgagaaactgccaaactgttctccacagcaggaattttttaacctgtatgtggtgggcttgtgtttcggttttcattttacacatctataaagatgagatttgctgtatggcactggttgcctgtatttggggagggttctgcttttggttggcaagaactgcattttatttaagcttagcaaaacataactggtttctcgcatcttctcaaaagtggaggattaagaaatggactgcgaattcagagcagggcagctgaacctcaggctccacccttgtagccttcaagctgaacctcattctctcttgctccctggagaccactgagacactctgcctgtgccagtttgatttctcacatttttaaagggccaaagcttgtgtctcaaagtgctatagcctttattgattcatgcagagaagcctccttgattccgtaattctgcagctaatactggaagtagaaagaattggaaacaccatctggatgacactttagggtggaagcagccagtacaagggggggctcattatttcctctggtcccagactgttcacctggagctgtagccaccaccctgcccttaggttaactgcctcgagtggtagtttagctctttgtgctgtgccgagggataactggaagtgaaaggtgctgagaaatgccatctcctgaaagtggcgagcatgagtgaatttacgaaaggttgggatattgctggggctctggaagtttctctggagctcactccaggggacagggagggggctggattccaattcaagtgaaaaatacctttcatctgccttgttcacctggcttttttgcctttttgtaaaatctgaaaacctcagggattgagtagtctttccttaactgcagttgcctgtctggccacacctgccagctgttgcttgtacccctgtaatttgcacggccttccgggcctttctcacaagatcactgcaggtcacattcatgaggaaaatgcaggcagttcctgccatcagacccctcaggatgtcatggtttggcctgaaaacaagattcctgcaactctaattttcctttgctagatcaaatgaaggatttgatctaatgtttgcattctagcagcaaaatcattgaatattttatttcttaagagccttacttcatattttgtaggtattttaagattttgtaaaggcctttctgcttcaacgtgtgatgtgtgcattcttagaaaaagatcttgtgttctgtaaatcacacaataaaaacatgagttcgtgcaggaaaaactggggcggggtggatcactccaaacttgtgtggtgtggtaactggagctcactgatgaaaccatgaacagttctggctgaaagaaccccacagtacactgaggtctgttggcatcgccgccagcaccgccccggtccctttgtgcgcgccaccacacctggctaattttttatttttagtagagagggggtttcaccatgttggtcaggatggcctcgaactgacctcgtgatccgcccacctcagcctcccaaagtgctgggattacaggtgtgagcctccgtgcccagccttcagctttttttcttaatgtctttgtgtaatatgaaggcattctctttaattgttaaaaagcttgcctaccactgcttcaaaatattactgtcagttggcatagcttctgattatattgatgtcatctcccttcttttaaacatgttaccatattggcactgtatttcccctagcccattgatcacttgagagttagtcatagtcctcgtgctgtttcactcctaaacgtttaagcatgcctttcctaagagcagacagtacagttaagacactcaggaagtttagcaatgagctaacacagaaccttacatttctccacataccccataaatgccttttttagagcctttgagcctggaatgcagagtccaggactgtgtgttgtattcgattgtgtcatcccttcagtctcctttatcagaaatgttcccccacccccttgttttctctcatcatcttgagtccagaccgtggttgcatggcacgccctctctggactcttcctgctgtctcctcacggtaagcttcagtctcctactcgtgatgctggttcatctcagcagcactgaggggcctgagctcagtttggtcgtgtgttaaggtggtgcctgccagatttctccacagaaaagggccccgtacttttatttgctcttcagcctgtgtattccttcctttcttgccagcttgtgggtggcttctctagcagcttctgtaagatactcagtttggcagttgtagttgtttcagcaggagaggtgtctgcatacctgaccaccacatggctagaagtcgatccatcctctggcgtaaccatcctccatgctactgtccctggggcactgaggccctcctcagtgacttcctccacctcatcttccgccatctccaagccaccagtgtccaacggactactgatatgtcccaaactcatcatttgtttattcaccaattcagagcccacctttttttcagcactgagctagcctctccttgctagaagcttacggtcgaaggtctccagccatcagaagaagcacgtggagcgctgcgtccgtgttgtggttattcatccagcatgtgttgagtaagggttgcacctgtgcctggcattatgcattgagcggggagatgggggttggcacgcacagtggggtgttctaagtacactgagggctcgggtgccctggctcatagagcagggagggaggcaggagcagggaaggtgtctcagaagtgccatctttttttttttttttttgggaagtggaatcttgttctatcgcctggtctggagtgcaatggcactatctcaactcactgcagcctccgcctcccaggttcaagcgattctcatgcctcagtccccgagtagctgggaccacaggcgcacaccaccacacccggcaaatattttgtatttttagtagaggcggagttttgccatgttggccaggctggtcttaaactcctggcctcaagtgatctgctcacctcggcctcctaaggtgttgggattacaggcatgagccactgcgcccggtctagaagtgccatcctaactgaacctgaaagatgaaagttctccagatgaacctgaaagttctccaaatgaaaaggtgggagggggtgacagggttaggcccagagcctctggtgacacagggtgggcatcattggtcactttttcctcgagggaggggcgtcacacgggtgatagggtgggagctataaccatgttgatagtgccgcctctgcccatctggcctggcatgccctgagccctctgtcccacctgtggaactcataagccctgacagcccactcactcctgattcattatccacacccctgtgcttccgctgtgcctggagcaagctttcttcagggggaagggaggctggaactatgttgtagttacctatttgtcctcccttccaaactgtgagttcttggaggtggaaggatgctgcaggatctggctcaggacgaaggcagttggtgaacagacacgtgtgtttttgactcacggtgatctcagacaagttcctctgtctagtcgaacttctttttttccatctgtaacactcaggagttgaataggtggtttttctgaggatacttcaactgtaaaatgtatgaacttgtgaactagctatttagttctcctcataatcaagattgtgtgtgtgtggggggttctgattagagggaggatgaagagaggtgtatggggttttttttgttttgttttctgtttgtttgtttgtttttgagatggagtctcactctgtcacccaggctggagtgcagtggcacgatttcggttcactgcaacctctgcctcctgggttcaagtgattctcctgcctcagcctcctgagtaactgggattacaggcatgcaccaccatgcccagctaatttttgtatttttaatagagatggggttttcgccatgttggccaggctggtctcgaactcctgacctcaggtgatccacctgcctcggcctcccaaagtgctgggattataggcatgagccaccacacctggcaggtttctttgaaaaagtttgtgtttcggcaaacaccataaaccccctgggggacagccttggggagtcacctggcaccctagcccagcctccctcccttgggtcctgcagtgaaggcttagtgagggtgtgcaaatgcccaggtcaccctgggactgggcaggccctctgggctaagggtaaactcatttggaatacctgttttctatcattgttttttatttgttaaatttaaagggtacaagtgcagttttgttgcgtggatatattgtatagtagtgaagtctgagctttcagtgtaaccatcacctgaatagtggacattgtacccgttaagtaatgtctcatccctcaccccctcccacccttcccagtctctccagtgtctgccattcctcactctgtccatgtgcacatgctattcagctcctgcttctaagtgagaacgtacggtatttgactttctgtgtctgagctgtgtcactgaagacaatggactccagctccatccacgttttttatcatttttacctgcactccacacccagcacaatccaggcttctttgtgggttttttgaaatttgtctttaattataaaagtagcagccagcaaattaacaaacacccatgtgcctttcattgcacagaattgaaaatcatcatactatatttgcttcaagtaatttccattagaaagaactagaatattacagtagagttaaagaccctttatttcccatcttcagtgctcttaaaagttcatttagggccaggcatggtggctcacacctataatcccagcactttgagaggcccaggtgggtggatcacctgaggtcaggagttcaagaccagcctggccaacatggcgaaaccccatctctactaaaaatacaaaaattagctgggcgtggtggtgcgcatctgtaatctcagctactcgggaggctgaggcaggagaatcgcttgaactcaggagggaggcagagcctgtatgcagtaagccgagattgcgccaccacaccccagcatgggtgacagagcaagactccgtctcaaaaaaaaaaaaaaaaaagttcattcattgtacacttagaaatagttaaaaaggtaaactttgttttgtgtgtgtgtgtatatatatatatatatatatatatatatatatatatatatatgtatttttttttgagacatatatgtgtctggtttgttcgcccaggcaggagtgcagtggcatgatcaacggctcactgcagcctcaacttcctaggctcaagtgatcctcctgcctcagcctcccgagtagctaggattacaggcacacaccaccatgcccagctaattttttttttttttttttttttttgtagagacagggttttgctatgttgcccaggctggtctcaaactcctgagctcaagcgatccacctgcctcacctcccaaagtgctgggattacaagtgtaagccaccacacctgacctgttttgtatattttaccacaataaaaagcctttaaaaccccaagcagacagttcattttcattcaggcccaactcagaatctgatcacagcggggtttcccccctttctagcgagtagctgaagaactgttttctctccttgatggtataactgtctctgtgggtgttgctcccctgccgctccagtggttttgtttttgtttttgtttttttgagacggagtcttgcgatctcagctcactgcgacctctgcctcctgggttcaggcgattcttctccctcagccttccatgtagctgggacttacaggcacctgccaccacgcccggctcatttttgtatttttagtagagacggagtttcaccatgttggccaggttgggctcgaactccagacctcaggtgatccacctgcctcagcctcccacagtgctgggattacaggtgagagccactgcacccagccggcccctcagtcttttccttctcaatcagtggcaccaccatcttcccaggctttggacatggtccctgactcacccttgcccctcacccccacactaatccacctgcgagctctgttgcttcaccacctagaccagccccaaatcctcaactgcccccaccctgggccacacctggaccactgctagaggcctctcatgggccctccctgtttttctcttgcactccccgggctttctggcacaagatgccccagaagcagaatcacatatctctcctgggagccaatctagtgtgtttactgcccctggagtgttattgttggccttagaatatgtcccactacaggtttgcagagcactgtagtcaaaagtcatttgaaataaatcttttctctgtggtatattgtcaatttgatatagaattaaatttgtttcttttcttttttcttttctttttttttttttttaagagacagggtcttggccaggcgtggtgtctcatgcctgtaatcccggcactttgggaagccaaggtgggtggatcgcctgaggtcaggaattcaagaccaacctggccagcatggtgaaaccccgtctctgctaaaaatacaaaaattagccgggcgtgatggcaggtacctgtaatcccagctactcgggaagctgaggcaggagaaggcttgaactcaggagtcggaggttgcagtgagccaagatcacgccatggcactctagcaagactctgtctcaaaaaaaaaaaaagagagagagagagacagggtcttgctctgtcactcaggctggagtgcagtgatgtagtcatggctcactgcagcctcatactcctgacctcaggtgatcgacccgcctcggcctcccaaagtgctgggatcgtaggctgaagccaccatgcctggcccgaactcatttgtttttatttgcattaagtgtaataaggttttgttacttttagtttgaattttattttgggtaatataaacatttacatgattcagaagtcagaattacactgaggcatgttcagctaggcctcactcctgtgcctgtacccttacctttttccccctaccccatgcagggaatcaatttcattagttcctggtgtgtccttccttaatacccccccttctttctttggtagaatgcagtagatatgtttgcgctttgctccctttgcttcacagtggatcctggaaatgactccatcgcagttcttagagctcttgtttagtccctttggatctgcacagtactccagtgtgtgggcgcaccataagtttattcagcaagtgccctggtgatagggatcgggggtattggaagcctttggctggtaaaaataatgttgtagcaaataacatcatgcatatgttctttgagatttctggaggtgtctctttagcatagatttctagaaggcattccttacgtcacgtttaggtttatagtttgacctcatggtgattaaggtatttgggaaatgcaaatgagagtttcgaagaagccagatctttcccattagttcactgtttttctctgacattaggaccgtccgggttctagggagcagccctggcgttaggcagtgccatgatggattgtgtagaagtagcgattcccatctgtctgctttcttggcccactctgctggtggctccccttccctccctcctttatggggagctggggagctgcctaggggtccattctcaaaggctgatctctggtgggcaacaggccacacctagctttccagggttcttcgtcatttcccattgagagctgtaagactcagagacatgaaaaggaagctctggctgggcacggtggctcacgcctgtaatcccagcactttgggaggctgaggcgggtcgatcacctgaggtcaggagttcgagaccagcctgcccaacatggtgaaaccccgtctccactaaacatacaaaaattagcctggcgtggtagcacacgcctgtgatcccagctactccggaggctgaggcaggagaataacttgaacccggcaggcggaggttgcgatgagccgatattatgccatcggcaacagagcgagactccatctcaaaaaaaaaacaaaaaacaaaacaaggcgagctctgtgctgggacagattagggacccctctttacagcaagaaagactgctctgtgggttgtaggatgcctttgtgtatgcagtggctctaggtgactctggcagccacactctgggccctaaacttctggaggaagatacaggatagggaggaactcaggggtgagtcatggtggggacaagacattccctcactctaagaccttgtcactagattggaacatctcttgcctccctacacctgacctgatggttctggagagatacgtccttgcagcttctgagtcccagcactaagcagcctttggtaacttccctacatcatttgagttctggtttcctaaggatgcttgccagtgagtgccatggtgccctcattgcacagtctgtgcagtgtagacaagaggggaagtctcttggggtagaccagccgcaaggcggtgactagcactgatgtgaaccacatgggacaggggagttgtggggctgagaacacggagggtgggagtagtcatgctcttttccagaatgaactgctaacgaagggactcgcaggtggctgctgcttctttccaagctgcccctgttgttgcagaggctctggagtcctaggaggtttcacggtggcatactcgacagagtactagagcatcatggccagatagtgatgctggggtgtggggcctcacggtggccatttctgacgagaccccaccgggccaaagtgatgtgtagagaaggagctgcttcggtcaccagaaaagaacggggaagcctcccacactagaataggtagggtgctcttctccaccggcaggaaggggatgtatggctctgcctggaccacacctttttccttgctcttccctccgcatctgctgtggccgaggccattcctcatcagggaacatgtgttagaggctcacgccacctgggaccacttgtcttatcacccccaggaccctaggcggtagtttcctgtggcctgagttagctgatatttatatagtgccattgtgccttttctcctgtgatgctcacagtaaggatgcctagatggggttacctgttgtcaagataaggaaactgaagcacagaatgctgaggtcatttgctgggttcatgtttggaaagcggcaaaggatttcagtgcaggttggctggctccaaacctgtgtgtgctttccatgacactgtactgtgtgcctcattgagcctcattctagaaaaccaaaaacacacccaaggcccggccttcacaaaggagacccctcccccatttggctccctttccagcagtcgacggcctcttgtcagccatcgagcccagagtcccttgaagtgcgactcatgctggggtggtatgctcaggagccgcagtgtttccgctcagaggaaagggctctgattctcctgcagtgctaggagacttgtgggtggccacagtgcaggtcaggcacaccggccagcaccacccacagcccaaattcctaaagaaatatttgggtcccagcttggcccgagtctctgttgtcctggggaaggacatcaagatctgagtgtatgatggcctggggccttgcatgtggtgggggtccaagcctgcctctgctcacttgttctgcagactggcatgttctctgtgatacttacatacttgtttaacacttcagggaagaaaagtcagaagaccaggacctccagggcctcaaggacaaacccctcaagtttaaaaaggtgaagaaagataagaaagaagagaaagagggcaagcatgagcccgtgcagccatcagc

SEQ ID NO: 19 - DNA, 1716 bp, Homo sapiens
ggttgtaggatgcctttgtgtatgcagtggctctaggtgactctggcagccacactctgggccctaaacttctggaggaagatacaggatagggaggaactcaggggtgagtcatggtggggacaagacattccctcactctaagaccttgtcactagattggaacatctcttgcctccctacacctgacctgatggttctggagagatacgtccttgcagcttctgagtcccagcactaagcagcctttggtaacttccctacatcatttgagttctggtttcctaaggatgcttgccagtgagtgccatggtgccctcattgcacagtctgtgcagtgtagacaagaggggaagtctcttggggtagaccagccgcaaggcggtgactagcactgatgtgaaccacatgggacaggggagttgtggggctgagaacacggagggtgggagtagtcatgctcttttccagaatgaactgctaacgaagggactcgcaggtggctgctgcttctttccaagctgcccctgttgttgcagaggctctggagtcctaggaggtttcacggtggcatactcgacagagtactagagcatcatggccagatagtgatgctggggtgtggggcctcacggtggccatttctgacgagaccccaccgggccaaagtgatgtgtagagaaggagctgcttcggtcaccagaaaagaacggggaagcctcccacactagaataggtagggtgctcttctccaccggcaggaaggggatgtatggctctgcctggaccacacctttttccttgctcttccctccgcatctgctgtggccgaggccattcctcatcagggaacatgtgttagaggctcacgccacctgggaccacttgtcttatcacccccaggaccctaggcggtagtttcctgtggcctgagttagctgatatttatatagtgccattgtgccttttctcctgtgatgctcacagtaaggatgcctagatggggttacctgttgtcaagataaggaaactgaagcacagaatgctgaggtcatttgctgggttcatgtttggaaagcggcaaaggatttcagtgcaggttggctggctccaaacctgtgtgtgctttccatgacactgtactgtgtgcctcattgagcctcattctagaaaaccaaaaacacacccaaggcccggccttcacaaaggagacccctcccccatttggctccctttccagcagtcgacggcctcttgtcagccatcgagcccagagtcccttgaagtgcgactcatgctggggtggtatgctcaggagccgcagtgtttccgctcagaggaaagggctctgattctcctgcagtgctaggagacttgtgggtggccacagtgcaggtcaggcacaccggccagcaccacccacagcccaaattcctaaagaaatatttgggtcccagcttggcccgagtctctgttgtcctggggaaggacatcaagatctgagtgtatgatggcctggggccttgcatgtggtgggggtccaagcctgcctctgctcacttgttctgcagactggcatgttctctgtgatacttacatacttgtttaacacttcagggaagaaaagtcagaagaccaggacctccagggcctcaaggacaaacccctcaagtttaaaaaggtgaagaaagataagaaagaagagaaagagggcaa

SEQ ID NO: 20 - DNA, 1716 bp, Homo sapiens; identical to SEQ ID NO: 19

SEQ ID NO: 21 - DNA, 62018 bp, Homo sapiens
ctgcgatggaaggaccttgtcctcggtgcctccataccagccctttccagtgaaactactgctgtcccggcaagcccctgtgcgtgtgcatcattccgggtaggacaagatgtgaacaggtccctcttctttgggcttaagtagaagttgtgctcttctgcttttacctgtgtgctcttctgcttttacctgttctcttctgcctttctcttgcaagaaacctgtcgaaagcttgctttgcatgccattgcttaaatactttgatggtatgtatggtatgtgggataactgagtgggagccggaattggggggtgggcagggcatccccacccccacccccacatcaaagggggaatgaccatttcgttagagaataaagcctgagtcttataacttcttcaagcacatgtatgctgggtctcctggcgtgtgaatgtgttcccgctgtgctgtgtggctgttttgcagttactgtagacactgtagtctgggctctcattattgcctctgaagttgacaggaccaagccttagtaaggatgcacttgtcttcctagcccaagagctaggggtgttttatatatatattaactttcttttttagatttcataaactgctctcattttctcttttctttctttctttttttttttttttttttgagacagtctcactctgtcacccatgctggagtgcagtggcacgatctcagctcactgcaacctctgcctcccgggctcaagcagttctctgcctcagcctcccaagtagctgggattacaggcacctgccaccacgcctggctaatttttgtatttttttttttttttttttttttttttagtcgagacggggtttcaccatcttggccacgctggtcttgaactcctgacctcgtgatccacccgcttcagcctcccaaagtgcagggattacaggcgtgagccaccgcacccagcctctggctcttttctttttgacatgaaatcttaagttaattatcttaaactttaagaactagaaggattcttagtccagcaccatcagtttacaaacaaaaaaaacttgtgtccctgagaagttgtgacttttccagggcctcctagccaggataccagtttggtttttattatatagctagccgagtaatactattaacttgacttctgggatttcaaagtattctatgacttgactgtttaagggaattatgaggcctcactgaacctcaaaagataattttaggtaccatcctggtagctgtagagcagcaacagaccagtaaaagacttggttggtgttgcccttcttctgggtttgattacatgagtaattgtgtgaatagtctctaagttgtatgctctgagctttcgtttttagcttataaaagtgctactcttgggccagcatagtatcagaaattagctaattcatatggggcagtttaggctttaactaggaaatgatggttatcttaatgacaaaaaaggtactgacaaaagtccttttttgaacatgtgttcaaaagaaaaagagaaactatcaaactaataactgagtttgttgaacatcgagattgactgatctgagaggcttaaaactgattgccctgaaatagacttgcatgttttggatgatggctttgggtctcccagagcacttggtttcccttggtgctgattttttctctcaggattaaagcccctttatgtgatgttgttacagcagcttattgcaacttcattcagctgcttgaaaaagaagggagactgcctctaggttccatgtgttctttcagggatggtattttgatgttgcgtattctcttgaacatgtattcttccctgagaatttctgtgtgccgtggtagaagaaatacttgccagaaatcgccactcatggtatgcttttgtagtgtcgaagtgtcccctagaggtgacaaggcttgtgatagtgttgattctaacaagcatgaatctttcctttattttagcactgtgtgttacgtgccagtaatttgcagcttatcctttgtttctagctaggtaagctgggaaatagcctagtactttgtctatgtgtttatcttcaaaatgtcccaaatagccctgggaaaaaggtcgtgcagctcaatgggggctttcaacttacaattttctttgttttaggctccataaaaatacagactcaccagttcctgctttgatgtgacatgtgactccccagaatacaccttgcttctgtagaccagctccaacaggattccatggtagctgggatgttagggctcaggtaagtaaccttcctttttttttttttagtatatgtcctggtttggccatctgttttttttttttttaaaaaaaaaaaaaaaaggaaaagaggaaaaaaatatactactcttggacagtataaaagtaccccaaagactaaagacataactgtgccaaactgtgccatataataaaaaaaagtcacttccctgagccctgaaaggtcagtgtgtgtagggttacttggtcgccacagcgtgatctgggggcgggcgtcagattagagccggaactggtgatctgcaacttcagttcaccttgaagcaggtcagctgagctgagagcgcttgcactgagcccttttgcgctgctgctgttgccttagcggtcttcagcatgtgtttgctttggtttggggtaaatggcttagtggtcaacattagtgagcagtggtaatgcattttcagatatgggaactggtatgtggttggttccctagaaggacaccctcctgaaagctgtctcagaacaccgggggccatggctaatgtcatgtgcttgctacactcctcccatggtaactaaagagagtacccagatatacatctggttcttgggactctagaggaggatgagtactttgtaaaaacctgggggccccagtcattctaggtctgacactcaggtgctgtatcagctgcagtttgaactacttggcaccattgtgtggactttagttttgtaaaaatgaatggttccttaatttctcaaccttcaggctcaacatctcaagctgtttgttgttgttgttgttgttgttgttttgttttgtctttttgattagtggtcactccgcatttgatgttttgacatgtggatttcagaacttctgtgtggtaaagcagaatgttccaattgaattttcccattttttttcccctaagcaaaaatgtgagttttcacttatgcggccattgtgattccgactgagaccctaagtcgttctttgttgtctctctagtggtttctgacacctcagtgtgaagctgttgtagacatccataagaaatagcctgcttagggattatgtgagggcaaggtttggctgaaggagaatagaaggtgtggaaggaagcggaagaccagaagagcatcacactgcctcaagtcccaaatttgattctgctcctgatcctgtgactcaaattgtcattctcttttactgctgtggggtgtgctctgggcccagctgacaggacattctttgtactccacgtatttatgctggtgggagttgtatggctagtgctttgtgctttgtctcagaaattgtgtggactaaatgtaatatgggcagtgaatgggtttcttctggaagatgttaggcctggagggtggtttgggtttttacgagtctttttctcagattacagattacgaatggatgttataaaacaggcagtgttgacaccatacagtttctcctaagaaatgtacagagagttcaacctgaggaagctaattgaaaataaacttttaaaaagaaatgtagaaagaggaaatttaaaaagtatcttatgaatgggaaagatgtagccatttgagcttcaaagaacttttgagggaattctcaaaggacagtacccgtctttagtagataaatgcttgatatctatttttcttcttttactttttaaagaattactaaaataatacatggatttatagaaaaatcaaaccacttaaaaattgatcaggtggctgggcaaggtggctcatgcctgtaatcacagcgctttgggaggcctaggcgggtggatcacctgaagtcaggagttcgagaccagcctggctaacacggcgaaaccccatctctattaaaaatacaaaaattagctggccatggtggcttgagcgtgtagtcccagctactcggaaggctgaggcaggagaatcacttgaacctgggaggcggaggttgcagtgagccaagatcacaccactgaactcctgcctgggtgacagagtgagactcggtctcaaaaaaaaaaaaaaaaaaaagtatcaggtaaaaaaatgaaagctccccgcttaatctctgctcccactacccagaataactgctgttaatagcttaatgtagatccttctaagtcttctaagactaaactgtgtactttttgtgttgtaattaacaggagggtttttgttttgttttgttttttctttttttgagatggagtcttgctctgtcatccaggctggagtacagtggcacaatcttggctcactgcaacctccacctcctgggttcaagtgattctcctgcctcagcctcctgagtagctgggattacaggcgcctgccaccacacccagctaatttttgtatttttagtagagatgggtttcaccatgttggccaggctggtgtcgaactcctgacctcaggcgatccacctgccttggcctcccaaagtgctgggattacaggcgtgagccaccgtgcctggcctcaggatggtgttatatatacatattctgcatttttccatctcatatattcatctctgcctcatttcttttaaatagcagtgtagtccagggctgacttaccgtcatgcatttcgttgtctctctatgttattaaaaatgctacaggattgaaattcctcatgtgccagtcattttgaagaatggctgcctagacttggaatttctggtggataccaccacatcactgtccaaaatggctatcccagttcccacaacagtctgagaaagtgccattttcccatatcgtcccagaattggatatacatcttttaaattggtgccgcttggattattactgaggctaaacctcaataatcattgtcatagctcttaatgtattaaagatgttaactctttgtcatgcagatattttcctgttttgtcttacgtcttgattcttgtctttctgatatataaaatttatgttatgatttattcttttgctttcatacttaggaaatccttttttactcttttttttttttttttttttttttttgagacggagtctcgctctgtcgcccaggttggagtgcaatggcgtgatcttggctcactgcaagctccatctcccgggttcattccattctcctgcctcagcctcccgagtagctgggactacaggcgcccgccaccacgcctggctaatttttttgtatttgtgagacagggtttcaccatgttagccaggctggtctcgatctcctgaccttgtgatccgcccgtctctgcctcccaaagtgctgggattacaggcgtgagccaccgcgccccgccaggaaatcctttcctactcttaacaacagatcaatagtcatctatattttcttcctaaaaaacctgatgatgtattatattcatacatacgtatttaatacatacaaaagggccagatgcggtggctcatgcctgtaatcccagcactttgggaggctgaggcgggtggatcacctgaggtcaagagttcaagaccagcctggccaagatggtgaaatcccgtctctactaaaaatacaaaaattagccaggcgtggtggcgggcacctgtaatctcaactactggggtgactgaggcaggagaatcgcttgaacccaggaggcagaagtttcggtgagccaagatcacgccactgcactcctgcctgggcgatagagtgaggctctgtctcaaaaataaaaaataaaaataataattttatagttaagttgccctgtgtttttcctgtgattaaaaaaaaaaatacctgttttgtatttaactttggggtgggataaggtatagcccacttagtcagttgtgtctaagccacttgatgaaccagtcaatccagtcttcacctttaacaaatgctgatttcttcaagtgagcaaaatatctcttaaactttttcctattttctctataaagttgcttttttctgaattttttctttatgaggcttgatgggcagccctatcagcagacaatcattcattcacccaacaaatatttgagtatctgcttcaagccaggggcagtgctaagccctggaagtggtatcttctccttatccgggagtggggctacagtgttcattccagaagactcaagaaaatagcagatcatcacaaaagtaggttttacataaatgaggaggaatccacagggttgtgtatatgtgtgtgtattttaaattctgacataagttggagctttagggtagactgtgacataagagtagtttgttttccaactcatgtaattgccggctgatttttgtcttgaattatgataatggtaacttctgttgaaacaattctgtattcatcttagcttggttgggatgcaataaaagttttgtactggtaaaaatgataattttcttccatgatgattttgaagcttttctgtaacacctgataaaaatagaggggccaggcatggtggctcatgcctgtagtcccagctactcgggaggatgaggtgagaggatcccatgagcccaggagttttaggctacagtgagccatcatcacaccactgtactcctgtactctagcctgggcagcctcgttctttagagtaagacactgtctctttaaaaaaaaaaaaaaagaaaaaagaaaaaaagaaaaggcttttagtgaatatatttttagggtagcaagtgtaatttttataaattgcattatttgaatctaataaataccctcaaagctgaagtcgaattctgattttgattgaaaatattttttacttaaaggaagagggatagaataaatgacacgattaaggaaaagacttcttgtataaggccggggttttttaaatgattttttgaatagttagatggacaatacggaattaaaaaggtggtgtaaaaagttatacggggctgggcacagtgactcacgcctgcaatcccagtactttgggaggccgaggtgggtggatcacctgaggtcaggagttcgagaccagcctagccaacatgacgaaacatcatttctactaaaaatacaaaaattagctgggcttggtggtatgcacctgtaatccagctactcgggaggctgaggcagaagaatcgtttgaacccaggaggcagaggttgcagtgagccaagatcgtgccattgcactccagcctgggcgacagagtgagactccatctcagaaaaataataatagaaaaaagttatatggggctgggcatggtggctcatgcctgtaatcccagcagtttgggaggctgaggcagcttgatcacttgaggtcaggaattcgagactagcctggccaacatggtgaaactccgtctccactaaaaatacaaaaattagccaagcgtggtggtgcgtgcctgtagtcccagctacttgggaagctgaggcaggagaatcgcctgaacctgggaggcagaggttgcagtgagccaagatcatgccgttgcactccagcctggacgacaagagcggaactccgtctcaaaaaaaaaaaaaaaagagttatattgtaaagtatctctgctaccctgccccaaacattcatttctttccctggaggcagccactattacctgtttctttaaaaaaaaaaaaaaattgtggccgggcacggtggctcacgcctgtaatcctagcactttgggaggtggaggtgggtggatcatgaggtcaagagatcgagaccatcttggccaacatggtaaaaccccatctctactaaaaatacaaaaaattagccgggcatggtggcgggcacctgtagtcccagctactcgggaggctgaggcaggagaatcgcttgaacctgggaggcagaggttgcagtgaactgagatcacgccgctgcactccagcctggcaacagaatgagactccatctcaaaaaaaaaagcgtgtgtgtacccgtgtgttaaatttttattataaaatatatataacaggctgggcgtggtggctcacgcctgtaatcccagcactttgggaggccgaggcaggctgatcacgaggtcaggagatcgagaccatcctggcgagcacggtgaaacctcgtctttactaaaaatacaaaaaattagccgggcatggtggcgggcgcctgtagtcccagctactctgagagcctgaggcaggagaatggcgtgaacccaggaggcggagcttgcagtgagccgagatcgcgtcactgcactccagcctgggcgacagaccgagactccgtctcaaaaaatatatatcgatatatataacaatttacagttttaatcatcttaactgtacagttcagtggcactgagtacattcacattgttgtacagccattactaccatccatctctacaacctttcgtcttgcaaaactgaaatttcatacctattaaacactaactcccacttctcccctttcccccaccccaccctctggcaactactattctactctttgtctctattggacatatttttgtgtgtttaggtttgtgtatatattttacatgtgtgtataaatacacaagggtatgtgggcgttgtgtttttacacatactataaaatattgtgcacatttgtttattttaatgtatcctgtagattatttagaatcggttcatacagagccgtatcattccttttaagggttgggtttaaatagtctgttatggatgtaccacaatttatttaaccagtttttaaattttttacttattttttttaatgtttttttagagacaggatcccactccatcacccagactggagtgcaacagcatgatcatagcttactgcagccttgaactccggggctgatgtgatcctcccacctcaggctctcttgtagctgggactacagggatgtgccgccatgcctggctaaattttttatttttatttttatttttatttttggtagacacggggtttcactgtgttgcccaggctggtcttgaactccttgggcttgagtaatcctcctgccttggcctcccaaagtgccgagattacaaccatgagccatggagcccgacaagagtagccttttatttgcagaccattagagaaaaagttgcgtgtaagtagataagcatacgaatttatcactgcaatactgtttgtagagatcacagagctgttaggctaggaagaagtttttagcagttagcactagaaagcaaaactttggaaacttccatttcatcaaaagtgacctcatctgagtagggcatgtgagggaaggacctttttactcgacaaggggaacttgcccagttcttgtttgtgaaccttgaagaaagtggagcatttttattttgggaccattctaggttgtggtagttccttggtactcggggttggagaatctccctctgctgctggaccttctgcctcctcatgctgtaatatgcataagaggtgtcctagaagtattcaggaacaggctgtggttgctttgttgttctgtgactgttgaactctttatatagcagtacttttttaagctgtactaattgagcatttattatgtgtcagttactgtgctagctgctggaaactatcctaccctcagcagtcttctggtctaatgggaggtacagacaggcaaatgggctatgactttacaagaggctaacttctgtgatggagagaagttccagccactaagggagcacataaaaatcagaggagatcctaccaagaattgggaggtaggtcagggaggagacttctttgaaaaatggcatctaagacctgaacagcaaggaaacattagctaggtcaaggacaaagcatcagtggggagagatgcatgagtcttttggaaggaccagcatgtgtagaggctctgacaggagagaatctctcaggcccattcagagagtccactgtgtgaagacgaggcatgaacaaccagccaggacatgtggagaggagcatttttctttttttcttttttctttctttttttttttttttttttttgagacgtctttctctgtcacccaggctggagtgcaatggcatgatctcggctcactgcaacccccacttccagggttcaagcaattcttctgccttagcctcccaagcagctaggattacaggcacccgccaccatgcccggttaatttttgtatttttagtagagacggagtttcaccatgttggcctcaaactcctgaccttaggtgatctacccgtctcggcctcccagagtgctgggattacaggtgagagcccccacgcccggccaggctcggctttctttccaggccccgtcacactcttagatgttccctgggccccagaaggcagcgtgaggtgctctgcccatctatgctgtccttttccaccccaccctatccactgggcccctggggctcccactccactccaggtctcttcatggacccttctttcccttcacttctgtcccaggagacctgggagactcatgggaacaggcatcatcttctccagcacagttcattgtctaatgcacgaaagtgctgggctgtgagaaggtcaggagcttacatggaatgggagtcagctgtggtacaaagtacgctgcttagttctactgattttttattttttatttttacataagactttgatggtaaaggaagcagtgtgtgagcaagctgactcctgtcttgtcaagtaccaggtccactctgatgagcccctgtggacagcactgctgtaactccccaagcctgggctcaggaggtgggccctaagcgctgttcccagctcttcctccatgctgtcagctcttccaccattcttcctggcgtcattctaaggtcctgtcttcccccgccctcttccttcctggcttctacgctcagctcaagtagtagctgtttgggtacttttcacccagacttaggaaatgttatcagttggtcgtattcctgtcagccctcttactatggaactcaaataggacagattcagctgaattcccagccctgtggttgcactctttgtctgccctgcttccccaaggtagcctgctccctaaaggtcaccgagatactccccatgcaaggtttttgttgtattacacatgacaacatggaataaagtgttttgcaaatttactggatgatatcctactatgtggaacatcctacaacttactcttttcactcaacatttgacttttgaacctggtctgtactgctccgtgcagaccaatgttcattcatttgatatgtctccttgtgccatagaaatagttttacaatagaagcctgtccagagccatgagggagaaggggattgtagagaaacaaggattggcatctggtttatgtttacatcctttagtcctgttaaccgagaagaagatatttttatttccatgtttgcgaaagctttccacaaaaaaagcatccattttctagacttattaatagggcagtccaaaggttttatttttagatttgaaagaaagcaaagtaggcttctgagatatgcacatttccctgtgtccctgtctcttttgcaacattccacattgctgctaaaacttgaacatgagcactttcaagcatgtgcttactttctatgtatgactcattttttaaaacattaaagcattttcggccgggtgtggtggctcacgcctatattcctagcactttagaaggccgaggcgggtagatcacttgaggtcaggagttcaagaccagcctagccaatatagtgaaaccccatctccactaaaaatacaaaaattagccgggcatggtggcgggcgcctgtaatcccagctactcgggaggctgaggcaggagaattgcttgaacccaggaggtggaggttgcagtgagcagagatcgagccactgcactctagcctaggtgacagagcgagactctgtctcaaaaaaataaaaataaagcattaaagcactttgtctggtggtatgtaagttttggcattacttagataagttgtattttaagtctttctacacacaataacttatttttaaaatacaagtttctgtgtacttccgggttttgtgtttttgtaaacagcagaaggtattagtccatattaagtactaatttgttctaatattttcagctgtttttggaattacacttggcaaaaaaatagacaaatgtctgcagttgtgacagtttgtttttttgttctttttaactccagaataaataattctagtgagtttttttcttggcttgtaagaacatgggaatgattagagtcatcataacacttaagtagttatagaaggttgaacatctgtagtcagttgtataaaatttcctagtcatccttccaggttgtttaagacaaacaaatacatagtatttattaagctcttataaattttaattgtaaaacatcattgtacaaaactttgaaaatgcgtataggtacaaagataaaaaattaggccaggcatgccatggctcacgcctgtaatcccagcactttgggaggccaaggtgggaggatcttttgagcccaggagttcaagaccagcctgagcaacatattgagaccctatctctacaaaaatatcataaaacaaaatagaatcactctggcgattccactatccaaaaaaaaaaaaaactgctgttaatatttggtatgtatctttctagaccaaggcctccaactttggttgagaattcagccgggtctgtgaccttggatgggaaaaacattcactctttattttcactaatgtctctgaaaacccagatttttagctgggcatggtggctcgtgcctgtaatcccagtgctttggaagcccgtggagggcagatcacttgagcccaggagtttgagaccagcctgggcaacatagcaagaccctgtcttttaaaaaaaaaaaaaatccagccgggtgtggtggctcatgcctgtaatcccagcactttgagaggctgaggcaggcagatcacctgaggtcaggagtttgagaccagcctgaccaacatggtgaaatcctgtctctactaaaaatacaaaaatcagccgggcatggtggtgggcgcctgtaatcccagctactccggaggctgaggcaggagaatcacttgaacccggaaggtagaggttgcagtgagccaagatcacaccattgcactccagcctgggcgacagagcgagactctgtctcaaaaaaaaaaaaaaaaatccacattttcttcaatgacaattgtaagcaacagatcatggtagtattagaatagcagtgactgtcaccagtagagatcaaagatactttcatatcatattatagttgttacagatattttgaaatatatatgtccatcactgcttcaaacttaaggtaattattagacccatctctagatctggttatttaatgatttactgaagaagcacatattatttgagaacgaactcttgaaatatgttgttaatttctgtgcattttacacatttcaaaacattcttctgaggaggggtccagaaggccaaaagggtccatggcagaaaaaggttaagaacacctgttctgtactttgtaccatgtggctacaaatataaaaacagacgttaagccgggtatggtgatgcacacctgtagttccacctacttgggaggctgaggtgggaaaatcacttgagcccaggagtttgaggccagcctgggcaacagagcaagaccccatctcttaaaaaccagtcagcacttgactagtcagttagtgggggaaaacacaggtacagtaaaaggagtcaaaattacacttaaacttaggtcatcttattatatcaaacatttattaacatgtttagtgttttgtgtatattatgcaaagtgtaatgcaactaaaactgtttaacacttctcgatatcacataaatttgttggtgcataatagcctaaaagttacttttgctgttggcattttattttattacttacttatttatttatttatttatttattttgagacagagtcacactgtcgccaggctggagtgcagtggtgcgatctcagctcactgcaacctctgcctccctggttcaagcgattctcccgcctcagcctcctgactagctgggactacaggtgcgcgccaccatgcccagctaatttttgtatttttagtagagatagggtttcgccatgttggccaggatggtcttcatctcttgaccttgtgatctgcccacctcggcctcccaaagtgctaggattacaggcatgagccaccacgctgggcctgctgttggcattttaaacatccttctagagtctttcttatttgcctgtaagcacgtacacatgttgttgttgttttgagacaaggtctgtcgcccaagctggagcacagtggtgcaatcacagctcactacagcttcgacctcttgggtgcaagtgatcctcccaatcagcctcccaagtaggtgggactacaggtgtccgctaccatgcccagctaatttttgtattttttttgtagagacggagtttcaccatgttgcccagactggtctcaaactcctttgctcaaacgatccttccgcctcggcctcccaaagtgccgggattacaagtgtgcacctctgtgcctggcccacatgttgttttagatgaatgagatcatatatgtacttttgtaacttgctacctttcctcaacaaaatgttgtaaatatccatgtccataaaaatagacgtatatcttcacttttccctaaaatgaaaataacttaacttgcattttcttttttgtttttgtttttgttttgagacaggctcttgctctgttgctcaggctggagtgcagtgatgtcacagctcactacagcctccacctccagtttcaagtattccacctacctcagcctccaagatagctaagactacaggcacatgtcacgacgcctggctaatttttaaaatattttttgcagaaatgggatttcactatgttgcccaggctggcctcaaactgctggcctcaagtgatcttcctgccttggcctcccaaagtgctgggattacagtcgtgagccactgtgcccagcctgcattttcttattataaaagtaatacatgttcaatggacaaaaaattttcagaaaatatgcaaagatgaaaagtaaaaattgtccataaatctgtcatctacagataaagataacttctggataatgtttttctaccatcatttttagtaatcacataacatttcgttgtatgtctatgccttcatttaattaagaggcatttccattatttctgcatgttcatgactctgaatgatgatatgtctgcctgctgatggctacaaccctgtttctgcatttcaaacctctctcttgagctccagatttgatggcctcgtcagcatttacttgagttgctcataagtgtctcaaatttaacaagtcccagtcttgatttttttcccccttcaaacctattcctcatgttgtctctatttcagtaaacaatatcaacatccacccagttactcagtccaaaattctaggagtcatccttgattctgctctttctttttttttttttttttgagacggagtctcgctctgtcgcccaggccggactgcggactgcagtggcgcgatctcggctcactgcaagctccgcttcccgggttcacgccattctcctgcctcagcctcccgagtagctgggactacaggcgcccgccaccgcgcccggctaattttttgtatttttagtagagacggggtttcaccttgttagccaggatggtctcgatctcctgacctcatgatccacccgcctcggcctcccaaagtgctgggattacaggcgtgagccaccgcgcccggcctcttttttttttttgatacggagtctcattctcgtcatccaggctggagtgcagtggtgcaatcttggctcactgcaacctccgcctcccgggttcaagcaattcttctgccccaacctcctgagtagctgggcctggctaattttttgtatttttagtagagatggggtttcaccatgttggccaggctggtcctgaactcctgaccttgtgatccgcccacctcagcctcccaaagtgctgggattacaggcgtgagccactgcacccgccctgattctgctctttctctcatcatccctgatctgtcagcaagtcctgttaggccaaccacttctcagcatctgcactgccagtatgctagtccaagccacaaaacacctctcagaggtacgcaacaggactttgttgttgttgtgtgtgtgtgtgtttttttttttttacggtagaattattttataacttgaagtgtagggatgaccttccttttaaaattttatttattttcttaattttttattcccatagattttaggggaacaggtggtatttggtgacatgagtaagttctttaatggtgatttctgagattttggtgcacccatcacccgagcagtgtacactgaacccaatttgtagtcttttatccctcaccccctcccaccctttccctcaagtccccaaagtccattgtatcattctgatgcctttgcatcctcatagcttagctcccacttatgagtgagaacatacagtgtttggttttccattcctgagttacttcacttagaataatagtctctagttccatccaggttgctgtgaatgccattaagtcattcctttttatggctgagtagtattcctttgtatatatatgccacaatttctctattcactttctgattgatgggcatttgggctggttctatatttttgtaattgtgaattgtgctgctataagcatgcgtgtgcaagtatcattatgcaacgggacttcggatgacatattgaacaacttcctcactgatatccttgtgaaacgctacatatttcatgggtctgtttgttataccaacactcaattctgaatgatggaattatttcacatttagtctctttttcatctagccattatagtttagtttaaacaccaagttccattcctgctgcatgctgaaggatttgcagtacatcaggctatagtccatcaattcattccacaattgagtaagtaaggtatctatagtacctcaggccctgtgttaggcagggatggggtaacctagacagatttggtacctgtcctcatggagcttgactttagcggcagagacagatcttagataattgtaccagtacttaagtgttcagaaggacaagtatggaggtgggagccactccagtcctctacagtcacgtgctgcacaacaacgtttcaaccgacaacagagcacacatacagtggtgttcccataagattagaatgccatatttttactgtaccttttctatgtttagatatacaaatacttaccattgtgttccagtgatctacagtattcagtatagtaccatgctgtacagttttatagcccaggagcaataggctatataccgtatagcctaggtgtgtagtatgctacaccatctagatttgtgtaagaacactctctgatgttagcacaaataaatcgcccaatgacacatttctcagaacatatccctgttgttgagcgactcatgactgtacaatgggggaacagctcagcctgccttccccaaggaggcaacgccgatgcagggaaccgagggttgaacagaagtgggcaaggtgcagagaggaaaaaggctttccagatggagaagagcatgtgtgaaggccctcagtctggcaagagcttagtcctgtgtggcaggagctgaacgaggggttaggggagagtggcaaagggtccgggccatcagagaggtcaacaggggctggatcatgcaggattttgaatgttaacatcagagcgatagaaaacatgaagggtaaggtggtttgggttttgaatttttatcaaaatattgcaactactcggcaacaagttagatataacaaaagaggtcatcgtaaaaacagcagtctaccccttccccttcccttccctgactcagacatgacagcttttaactgtttctgattttagttcctttgatggttacctccaaaattaaatcatatgcttatacatctttcttgatttgccaactttagggaactgtgttaactccctgaaatgaaagagaatgacttagcttacgttacctccccatgttgaaattcatattcacatttctctgtaattttttttttgagatggagtctcactctgtcgcccaggctggagtgcagtgatgtgatctcggctcactgaaacctctgcctcccgggttcaagcaattctcgtgcctcagcctcctgagtagctgggactacaggcgcacaccagtgcactgggctaatttttgtatttttagtagaggcggggtttcaccatgttggccaggctggtcttaaactcctgacctcaggtgatctgcctgccttggcctcccaaagtgctgggattacaggtgtgagctaccatgccaagcccacatttctctgtaaattttaaacagtattttagtccatatgtcagttcccctctgtttaagataaggatattaataaccctacttttccttccactttccctccttaacttctgcgtcttaaaagctgtacttgaccatacccattcttgcatttgttaacatgtgtgttctgccctgcaaccacagccaagttgtagcttaattctaaagtcgaaaataacattatttacattattacacatgtgagtattgttcttggcgagaccaaataatgaatgtgcccaggattacatttccttctttacagatctggaccactcaaaggagaatgaccaatcaaggtcaaatggattcccttttcttagactctgtcacctgcttaaaatccttgctaggatttaatctacttcatattcaaaccttggcttgcttatatagctctttgttttgcccaccatttctagttgcctttttattttgtttactattcctccttgattatgttgtaaaatgctattagcagtgctgtttatttcgtacgattcggctttttccccactgaagacctttctcttggaaggcctctgcccttctgcaatctgggcaagtatctgctctttgatttaaggttgcatatacagctgtacctggaccttctcctcactgggctcttgggttggagcccgtgtcttaaaacccatatcttcctttcacatggtttactccctcgttttctggactgcatccttaaataatgtgctcagatagagtgcatggggagtaaactgtagtggataccgttgtcacctaccccatatccatttcttctttgcccattcctaacagaatcctgatattattcacctttctaccttattcccaacttcagaaaggatccttaagtcattccacacattgcattcctttggcaactgttactggtcaaggatggacatacgatctaagttggttcactcagactgaagggaaggacttccatggcacgttcagggaagactttctctttttctctcactggagtaagtgagaaaggtgttgctgggggctcttctgtaacctcagactgagggacaaagcctgaggataaagcctgctcaccaaggaaggcggagcagagaaacgggaagaacctgggtcttgatgccgttgcttagctggtgattgcactgtggctggggcctgtcctacctgagctagggactcagataggatggactttcttactgaatgagccagcttcagttttcttttctgttacttgtaaccaaaagcattgtaacagataggtcttctgagtcactgcatgcctgaaatacctttcttctactcttacacttgattggctgagtatagggttccaagttgaaaatcattttttctcctaactttggaggcatctcttctagtatgcagagtaacaaatgcaacaaatgcctgatgccaatcttattatggttcttttgtaggtgcccttcttttctcttccttccctggaagtttttaggatttcgtctccttatttttagtgtcctgaaatctcatgagaatatgtctagagttgtgtcttgttcactcgttgtactgtggtcattcaatctgaatacttttgtcaactcttttttttaaaaaaaaattactaatttacatgctttcattttctctatggggactactgtttaactttggacctcttatattggtcttctgtcttctctcatatttttcatttattgggcggtggggggtgctctgaattttggaagatctcctgcatttattttctttttccttttttctttttttttgaggcagagtcttgctctgtcacccaggctggagtgcagtagcctgatctcggctcactgcaacctctgccttccaggttcaagcaattctgcctctgcctcccacgtagctgggattacagacctgcaccaccacgcccggctaatttttgtatttttaatagagatggggtttcaccatgttgccaggctggtctcgaactcctgacctcaagtgatccgcccgcctcagcctcccaaagtggtgtgagccaccgcacccagcctcctgactttattttctatcccttctgttaaattctttatttcagccaaacctttttttttttttttttaacttactgtgaagcctgtgtgcctactgcctagattagacaattgttaacattttggcgtattttcctggtctgtatagatagggtgcatttttatacctttttgctcaccatttaaaaggaactcacagatgtcacgacatttcacccctaagtacttcagtatacatctcctaaaaataaggacattttccaatataagcacaataccccgatcacatctttaaaagttaacaataattctctaatgttatcaggcacccactttaaattcagatttcctccaaatgtctcttatcgctgttgaggggctccaaagcaattaagatttatacattgcatttgaatatgcttcctttgtctcttatttatttatttattttattttgagacagagtctcgctgtctcccaggctggagtgcagtggtgtgatctcagctcactgcaacctccgccttccaggttcaagcgattctcctgcctcagcctcccaaatagctgggattacaggtacgcaccaccacgcccagctaacttttttgtatttttagtagagacagggtttctactaaaccatgttggccaggctggttttgaactcctgacctcaagtgatctgcccgcctcggcctcccaaagttctaggattataggcgtgagccaccatgcccagcccctttgtctcttttaacaagaacagcctacccacctctccttcacttgtgatactgactttttgaagcagtcagcccaattgtcatctagaagggcccacattttaagatacatatttttagagatggcgtgtcactatgttgcctaggctggccttgaactcctggcctcaagtaatcctcctgcctcagcctcccaggtagctgggactacaggcttgtgccaccacgactagctggcccacattttagatgtctctcttttcttgtgatataatttaacttgtttgtccatatatattacttgtagacaagaagttaggtctacaggcatgttcaggttaaacattttgggcaagaatatttcataggcagtactgtgtacttcatatagcatcagctcaccaggcacttaatggttggttaccctgtggtttgtgatgctacgttttaacacttgattaaagaaggaggtgactgccaaatctccccattgtagacatacagttttcctgtggtaattgatatataatctgtgatgtgatgctttggcaccatacaaatatcctattgcccaacagccatttgcataattattttagcattcattgatccttgcctgaaaccattattacattgggggttgcaaaatgatagtttttttaattgtcacctcttctacatttagtactgtcattcctctgtaatgaattttccctcatcaaataaggaggcattatatttcctcctaaaaagacagtatagatgcttaatctttgcctttattacatttcagagtaaggagttggtagaataatcacctcaaatggtggcaaaatatttgctgttgtgtttccttttctctttcatgtcaatatggactcatagggatttatttattaaatgttttacaattcaaattgggtcaacaagagtcccttcatgttggttcctatattctcctggcataccctcattaattagtctttgagcaatttcttgttttctggcacaagatattccatcccaatatgtgcttttcgtgtcctagaactgattccaaggagctctggttccttatagtggcaacggtatttagaatccaacatgtgggtactaaatgtgctgattcttactggggtaacattatatctaggcactttcagaggacatcgctagaaaatatattcagtttttattttttatttttaatttttttgtagagacaaggtctcactatgttgcccaagctggtttcgaactgagctcaagcgatcctcccacctcagcctcccaaagtgctgggattacatctgtcagggcaaactgctggtaaatattttcacaaaagaaaaataaaaaaaccaaagtgctgggattacagatgtgagccactgtgccctccattttttttttaagtcataaatacataatgatgtcttctatggcaatttaacattacagggttcttccttaacttttttttttttttttcttttttttgaggcagggtcttgctctattgcccaggctggagtggtgcagtggtacaatcctaattcactgcagcttcaaatgcctaggcttcaaacaatcctcctccctcagcctcccgagtagctaagactacaggtgcatatcaccatgcccagctaatttttaaaaattttttgtagagatggggggtctcgttgcgttgcccaggctggtctcgaactcctggcctcaagtgatcctcccatctcgatttcccaaagtgctgggattacaggtgtgagccaccatgcctggccaacttttatttgatctgtatatatcttttccttacactgaaaatgttgggtcttactaatgttaacatagttacttatttgctttatcttgtaatagacataaaattacaaaattataataccaatattacgataaatagctgggcatggcggcgctcgcctgtagtcccagctactcaggaagctgaggtggagggactgcttgaacctaagagtttgaagctgcagtgagctgtggttgtgccactgtactcctacccggacaacagagtgagtggggggaaaaaaaagaaataatggaagatccagagaaagccccaaatatttaaaaattaaacaatacactttgcagcttcctcacctctctcagccttcatagaattgaagagagttagggccttgcactagattaggctttgccttaaggaaatgttgtgtttgatttgatcttttatccagaccattaaaacttccttaacgtttattagtaataaggctatttcactttcatatcatttgtgtgttcactggagtagcacttttagtttccttcaagaactttgattcacaacttggctaactttggtacaagaggcctagcttttggcttctcggctttcaacatgcctctcactaagcctgatcatttggtttttggtttaaagagaaagacatatgactcttccttttacttgaatgcttagaggccattgtagggttattaattggcctaatttcagtactgtcttgtccaagggaatagggaggcccaaggagagagagagagatgggggaacagctgattggtggagtagtcagaatatacacatttatcacttaagttttgccatcttttctttttctttttcttttttttttttgagacagtcttgctctgtcacccaggctggcatgcagtggcatgatctcagttcactgcaacctctgcctcctgggctcaagcaattctcctgcctcaacctcccgagtagctggtattacaagcgtgcgccaccatacccagctaatttttatattttttagtagagacagggtttgccatgttggccaggctggtctcgaattcctgacctcaagtgatccacccgccttggcctcccaaagtgcggggattacaggcgtaagccactgccgcctggccaagtttgccaccttttttattttttttattttttgagatggagtctcactccatcacccaggctggagtgcagtgatgcaatctcggctcactgcagtctctgcctcctggattcaagcgattctcctgcctcagcctcccgagtagctgggactacaggcatgtgccagcacgcccagcttgttttttgtatttttagtagagacggggtttcaccatgttggccaggctggtctccaactcctgacctcaggtgatctgcccggctcagcctcccaaagtgctgggattacaggcgtgagccaccccgcccggccaagtttgccatcttttatgggtgcagtttgtggtgccgcaaaatgatgatagtagtaacatcagagagcattgatcacagatcaccataacaaatataataatgagaaatttgaaacattgtgaaaattaccaaaatgtgacagagacatgaagtaagcacatgctattggaaaaatggcactggtaaacttgcttgatgcagggttgccacacaccttcaatttgttaaaaactcagtatctgcgaagtacagtaaagcaaagcacaatcaaatgaggtgcgcctgcatattacaaccaagaggcttttcgcagaaacacgagtgtgcttcaacattcaaaaatcagttggtgtaattcaccacattaagataataaaggaggccgggtgcggtggctcacacctgtaatcccagcactttcagaagccgaggtggacagatcacttgaggccaggagtttgagagcagcctggccaacatagtgaaatcctgtctctactaaaaatagaaaaattagccgggcagggtggcacgcacctttagtcccagctattcgggaggctgaggcaggtgaatccttgaaaccaagaggcggaggttgcagtaagctgagatcacgccaatgcattctagcctgggcaacagtgagacccagtatcaaaaaaaaaaaaaaaaaaaaaaaaagataataaaggagaaaaaccatatagtctattcaataaatacagaaaacgcatctgacaaaattcagtgccctttcatgataaaaattcagcagattagaaatagaggaagtgcatgtatgaaagagctacagatagattgtacttaattgtgaaatattgaacatgttaccccgaaaatcaggaaaaaggcaaagatgtccactctaaccacttctattcaacattatactagaggtcatagccagtataatgaggcaagaaaaaacataagaggcattaatatttaaaggaagtaaaactgtttctatttgtaggtaatgtcgaaaatgtgaaagaaactatcagaacctgctagaactaaaaagtgaattcagcaaggtctcagggtacgagatcattcaaaaactaatcagaaatgaaatttcaaatgcaatatcgttaggaataatttaataagaaatgtacaagatttacacgctgaaactgaaaatgttgctgaaagaaattaaagacctaaataaatggaatgttgtaccatgttcatcagctgaaagactaagtgtctttacagtgtcagttctcccttcattgaactgtagattcataaccccagtcataactgcagggttttttttgtagaaattgattgtaaaatgtatatggaagctgggcacggtggcttatgcctgtaaaccagcactttgggaggctgaggcagacagatgacttgaggtcaggaatttgagaccagcctggctaacatgacgaaaccccgtctctacaaaaaatacaaaaattagccagacatggtggcacacacctgtaatcccagctacttgggaggctgaggcatgagaatcacttgaacccggaggtggaggttgcagtgagccaagatcatgccactgcacgcccgcctgggcaacagagtgagactttgcctcaaataaataaataaataaaacgtatatggaaatgcaaaggacctagaacatccaaagtaaacttgaaagagaacaaaattaaggggcttatgtgatgtgactttatagtcatttgatttttaacagaggcaccagaacagtccggtgcgggaaaggaaagtcttttagcacgtgccggatgatggcaaatgacatccataccagacaaaaatgaaccttgaccttaccctaaatattagtttcttagagttgccacaaactaggtggcttaaaaccacagaaatttggctgggtgcggtggctgacgcctgtaatcccggcctttgggaggccgagtcgggcagatcacctgaggtcaggagtgcaagactagcctggccaacgtggtgaaactttgtctctactaaaaatacaaaaaacttagtcaggtgtagtggtgcacacatataatcccagctagccaggaggctgaggcaggagaattgcatgaacctgggaggttgcactgagccaagattgcaccactgcactccagcctgggtgacagagtgagactccgtctcaaaacaaaaccacagaaatttgctgtctcataattccagagtctagaagtccaaaatcaactgtcatcagggccatggtctctgtgaaacctgtaggggagtccttccttgcctcttcctagcttccagtggttggcaacctttggcattctttgatttgcagctgcattacttcaatatctgtcttcctcatcacacagcattctccatgtatgtctctgtctttacatggcctccttcttgtaagaacaacagtaatattggattggggcctgccctactccagtgtgacctcaccttaactaattacacctgcaacaacgctgtttccaactaaggtctcagtgtgaggtactgagggttaggacttcaacatatcttttttgggggacatagtccaacccatgacactacttcacaccatacataaaaattaattcatgagagattatagacctaaatgttttaaaagctaaaaatataaagcttctgcaagaaaacataggagaatatctgtgcagtccaaagaataaggttttttttaaacacaatttcactctgttgcccaggctggagtgcagtggtgcgatctcagctcactgcaacctctgcctcccgagttcaagcgattcccatgcctcagccttccaagtagctgggattacaggtgtgcgccaccatgcctggctaatttttgtatttttagtagaggcagggttttgccatgttggccaggctggtctcaaactcctgacctcaagtgatctgcctgcctcggcctcccaaagtgctgggattacaggtatgagccaccgtgccaggccaaaaaaagatttattaggatacatgaagcaatagctattaaaagaaaaaataaattggacttcattaaaatttaaaacttttggtcctcaaaagataccattaagaaaatgaaaagacagagctgggcgtggtgaggcttgcctgtagtcactactgggtacttgagaggctgaggcaggaggatcacttgagcccaggagttctaggccaacataggcaatatagtgagacagtgtctcttaaaaaaaaaaagaaaaagaaaaaacaaaagaaaataggctgagagctgtggctcatgcttgtaatcccagcactttgggagtacaaggcagatggattgcttgagctcaggagttcaagaccagcctgggcaacagtgaaatcccatctctacaaaagatacaaaaaattagccaaccatggtggcgtgcacccgtagtccatagtcccagctactcgggaagcagaggcaggaggattgcttgatcccaaggaggtcaaggctgcagtgagctgaggtcgcgccaccgcaccccagcctgggtgactgagtgagaccctgtctcaaagaaaatgaaaagacaagtccaccaagaaaacagttgagaccagtcatagaaaaaatagaaagtcatatctgacaaaggatttgtattcagaagaattcctataactcggtaataaaaagacaacctgatttttaaagggtgaaaatattttaatggatacttttttttttttttttgagacagagtctcactgtgtcacctaggctggagtgcagtggtgccatcatacatagctcactgcagactcgaactcctgggctcaagtggtcttcctgcctcagcctcctgcgtagctaggactacaagcacgtgccactatgcctggctaatttttaaattttttgtagacatgggctggtgtgtgtctgtgttgtctaggctggtcttgaactcctgggctcaagtgatcctcccacctctgccccccaaagtgctgggccaccacgcctggtgtggtgtcaccagagatgagccaccatgccctgcctgatacttttcttttatcatctgtttatttcttgtttatgggtgtttctgttctgattttatgactattctgtattctaagatttctctgagaatattatttgtttcctctaaggacagacttggtctctcttccatggggctggttcttgagccgccagggatggggggaggacctgggtagctgctgcgctgccccttctctgctgtggtggagtggcccgttgcctgcggggtctgtctctgaagggtggtttggagaagttctgtggaggcgaggcaggggtcagctcttgccccatggaccctcagagactgggaaaaggtaggcatcacctgggctgctgccagccacatcaagagcctttggggtgggtggggtgggggccggggaagggaaggttctagctgttgatttagaaaagacccattgatttcttgcctgagggaagaagtggcaccttgccactccaagtttgctctgctcaccagccccaacagcatcagcctcacctgggagcttattgaaggtgccctgccccaaagcttgtgggtcgggatctggcagtcagcagcccccaggtgttgcacacatgacagcactgcttgcccctcctctcgtctggtctggtctggtctggtctggtctggtctgagagcttctttggggctctgacaggtatacaggctctcatctgctctacagctctcttgtagtacattcctctctgttccattagtcaacatgttcttgcctacttccagcatctagaaatttgctgagtgtatcttatccgttcagaggtcctctcctgctattgcctctgttagaaatttcttccctttcatatgtctgtacttcggtttctttgaggtttgaagggtcaagtggcaattacatgtaggcagttggccatcctctggtgaaggctttaaagcccaggaataacaagatccattatgtctaaaactagcaaaaaccctacctgtcacatggtgaactgaattagaggtgatggggacagaagccagattggagtgagtggaaggtgagggagtggagattgggtatagacaactctctttaagaagttttgttgtgatggtgaccagaaaaataggagtggggtagagggggatgagggtgtttttcacgtgggtgaatatgagagcatgtttacatccttctgggaatggcccaggagagaggggagcgtgagaaggaggaaatggggacctggaggagcagactccttgtgtggaggggggaagcggcatctagagctgttgcaggaggtgggctttgagtaaatgcttcctctttggtaaagacggggaacgggaacggtagaagttgcacggaccctttgttaaagctcagaagctgagcgagaattagagcttaagtttatggagtagtcagaataaagtacccctaactgtattcttgcacagtgcaggaagccaggggtctgaaatcaagatgttgcagggctccattccccccagagcctctagcatggatccttccttgcctcttccagcttttggtggctgcctggcagtcctagactttccttggcttgcagttgcattgctccattctctgcttgtgtcttcacatggccttctctgtgtccccgtattcttctctggatgcttgtcactgtattaggcccaccctaaatccaggatgatctcatatcaagatccttcacttaattacagaagcaaagaccttccaaataaggtcagagccacagggtctgggggttaagacatacacctaactattcggggctaccatcgaacccctgtagaagcctgtccatttccaggatagcagagcccaaggaagggccagaagtccccccaaaacagttgtttgcattcaccagattctaagctataagcagatgggcagtggcagtcggtcctaatccatataccattggcaacaatagtttagttcactgtagacataatgagatgcttatcttctgctaagtagtcctcatggtaacagccatattactcctggctttgagtgacagcgctgtgctcttgtctggtgcccatatacttcagcagctggaaacaagacagtgctcatgattcaccggaaagtttctgtagttaaaatcaagtgatcccttgagtctattctaatatttgtctgtaccatgttctgtgacgagacatggaaacaaaacattaagaagtgaaagtatctttgattatgctcttgaagacaactttttgtttgtttgttttgtttgagacggagtttcactcttgttgcccaggctggagtgcaatggtgtgatctcggctcactgcaacctccgcattcccgggttcaagcgattctcctgcctcagcctcccaagtagccaggattacaggcatgcaccaccacgcctggctaattttttttattttagtagagacggggtttcaccatgctagtcagactggtctcaaactcctgacctcaggtgatccgcctgcctctgcctcccaaagtgccgggattacaggtgtgagccaccgtgcctggccgaagacaactttttaaagatgcatatgctctgggctgggtgtggtggctcacacctgtaatcccagcactttgggaggccaaggcgggcagatcacctgaggtcaggggttcaagaccagcctggccaacatggtgaaacaccgtctctactaaaagtataaaaattagccgggtgtggtggcgggtgcctgtaatcacagctactcaggaggctgaggcaggagaatcgcttgaaccccagaggcggaggttgcagtgaattgagactgtgccactgcactccagcctgggcgacagagtgagacttggtctcaataaataaaataaaataaagatgcatatatgctctgaaggctggctacattttattttttctcaaacaacttttacagtggatagtgctgtaaaagttgtttagctctggtcattttatcttttttgtgatctgcaaaaggagatccttttccttttcactgcctctaatacccaactccaatactcctttgacctcacaggcacttagaatccatcagtggctccatcttttctcagacttcacctccttcgtatccttattcctctcctttgtagcttcagtgccagtcagacgtcgttactccctggcacactacctcagcccttcggcactttcttgctttgttatattcagtcgacaaagccccagcctcatgaaattcagtcatgtctgccccatgcctgctccgtcctgaagctgaatgtgactccttcattgattccccctttaagttcatgtctaccccaggtaaacttcttgccgccaagcccacctgcatactgcagttccccggtctctcctagcccctcccaccctcctcatcagctgtcacacctccttgcagctgatatcttagttcccagagagcacagaagcaagctcaagagagtgtctacaggccagcgtctactccttcgctctgcctccctcatgctgtcacggagcgcctgtcccaggccctcactcctgttctaaggcatctctccagtcctctactgcactctcccccatcagagattcctccctcgcctgccctagaaacttgttgctacttctcccaccttgacaaaagctgctcccaaccccccacctgtctagcatctctgttttcctttaccagcaagactccagtccctgtctccacaccctcttcaaccttctccagttgttcctttgctgccacagctctgccaagctgctccatgaggtctccagtgatgaccttcatgttgttaaatctgggagctgcttgtcacttcttttcccagagctgtcgtcgtcagttaaccccaatacccatacgagacaatcctttccctcccttgagtctctgcactgatgtgcaccttctcagtgcaaaccacagcttttgtctctttctagctgaatacatgactgactgtgcttatcttagctgtcacccctgctggagcagaagctccacaggacaggattgtctccttgattcacagatgtagctcaagctcctagaacagtgcctggtgtctgtgggtcctcaggaagtcctaggtgagtgtgtgaatgtctgtcctcctcggtcttttctgtttcgcatgtgatgttggaaggcctcaggttcaggcttttcttctccaccctcactcccgaagtgattccgtccagcctcatggctcccaaatttatgtctccaggctgactgggtcacgggaactccttatcctccctagaccttctctttccctggtcttctcctttccagtaaacagcaactccaactcctgctcctcaggccagaaacctggcgctggttacctcatttgttcacaaatactgttactccacctgcaagatggatacaaaatctcatgagttcccctgcctccatggcccccaccctggtccaggtgtccagcttccctgcctctgcccttgccccctggttctttgtttagtcctgcaatattgtgctcttctgttcagaaccctccagtgggtccctgcttgctcagagtcacagcccaacaggatcacctctcttgccactctcccaccactcatgcactgcggcctcactggcctcctggctcctccctggaccctccaagtatgcccctgcctcaaggccttgacctctcctctgccctctgtcccaggtatcacacatgtctgctcaagtgtcaccttcccaatgtggccttccccgagcacacccatgtctgtaagtcaggcagcctgcctctgccccaccagttccccctgcctagcataggacttgtcaccatctgccacaagctgtgttactgcttggttttgtttgtgctctcccactcccttcccctccctccctctccccacccctatagaatctgagtcccatgaggacagagatttttttttttgcctcttcctcaatatatccccagtgcctagaatcatgcatattttaatttattgagtgaattaacaaataaattctgcagtgggacattgctctaaggttttgtcttataagagggacagaagaacatgcagcctgctctgctgttggctccttagcttctccatggctaacaggaacaatattgtttatgagataatcaaagccatagtcatgagttagaaggtacatataaaggcaaatatgtggagattgagttactttggcgggggcggaggggtgtgtagttatctgaaaacatggaacaaatcaatgagagtctaaatagcacccacatatttgcccctcttttaaaacatacctcctttatgagtgtagaatttaacagcacagtttcccagtgcagctttgcgaaacaagagaaatgaattttaaaggctgtcaggtgcctttgcaatctgtggcttagtatttgtgtaacaacatttgtgttttgccaacagatgtactgcttaaagtacccatgagaatggcctctgtggttttctactttctcggatggaaccttaggaactgattattgagaagaggctgatactgcccacctcagctcccaggcaggcttcagggccttggttactactcctttgggccctcactgacccttgcagacgtcttttgcaacctctgtagccagaagagacaactgctttctggcatgttgctctttccctaatggctttatgagcttcttgaacaccaaagcatgtgtgacttcctcacgccttcccctgtatagtatagcacccctaactgtatgtgtaaggagaaggagtgagcaattgatggcgtccccctggatctccaagggaatgggaaggggcagggtttctggattcagtcatgtggaatctggtcgttggtgtctaaatgtgcctgttacttgtgcccaatgtccaggttcaccaggaggcttagcctgctcatttccctgctagtagctatattttgggagagcattttttatgctctaattgaactttgtgggtctcagcaatttgaacaatgttttgtttttcttctggtcaggttacaaaggaaagaaaaggaatctggtgttgtaggaggtggtgtgttgtgtaattacttgttttttttttttaagtttttttatatttttgcaacaaggcaagttttctttgaataaataatgctgggagcttatcacatagaaggcatatgtgttgtactcagtacattctgaattatctgggtttatttttatctcttgaattcacttataaacaattcaaaggctgcttttttagctaacagaaataggaagagaatctcagaatctgttttgtcattttttcaatgggttgagttatagtgattatgctaactcggtggaaaagcagtgtagtgagtaaaccccacatacggcatatcatgaacattttgttgcttttttggcttctgaccatcttcatacctttttttgtgttaaaagtctccccattgtgtatatcttagtaagaggcaggtggaccctagtttctacctaagaaaacctgaagatggggttgggggcctgtggtgtacttccttctcatgctgtccatgaccactgcagtggctttgtaaggatccaggacccagggcccctcagtgggtgtcttccatttctcaagattgcctcttggttgtgagatgacggttgctgctctagtcattgcatccactcctccaggtaggaagaaagaggtcataggggaaaggcaaaatggcacttgacatcttaacttctaggcccattcaatatttccatttccatcttcacacccatcatcttgtcctagggaacaaacagcaccagcagctcagtagctataacagcaattattatttctcacacatgggtctgggtcagctgcaagatgggattcagatctgttctcaagcctgtcgttccaggacccaggagggagaagcagctgccaggggaagtctcttcgtaggcggaggtcaggagtccaagaggagtgagcagagtcacagaagcctcttaaagcctcttcttcccccatcccatcaacacgtgagcaagcccagagtcagtgggtgggaggtgtgctccgcccatagtcagtagaacaagagcaagcttgaaagagaacgatgaacaggagtgcactcggccactgtctccttagccataacgtagtcccatggtctgctgggaagcggggaataactctccttagctgagcgcagggtctcattagtaaggcagatggagaacatggatgttgggggacaactggcagtgcctgccacaggggaatggatatattccctccccttgctctctggaaactaggggatggcgatgaagcctaggtttggccaaacccattctgccttcagggactttgactcttgagggacagtgagggattagtcatggtggtggcagttgagtcacaaaaccagcagtggtggctaatgtccagtgatgacatgcaacagtgcccagggtgggtgtcccaaccagcaggtccctgcagtataaccttggctgtgtttgcagtggtgcagcctctattcctgctgcttttctgagcctagttctctagttctctctccatttccagatctgctgcccaagaactcctttgtgattgaatttaaccagagttgatttctgttgcttgaaactcaggaccttgatgcagtgtgcagggtctgggcaaggtaaaaacacactttcatgatttcgcctcaagtatagtagatgagcttaggctttttgagccaggtagccttgggattaattctcagctcttgcacctagcaggtgacctcagcaatcaagtcacttgccctccttgagcctcagtgttgccctcagttaaacattgctctcgtgtgttgctgagcattcagtgagattgtatataaagtgatcattgtgaaggtattgggacataatttgggaaagcgtcctggtctaagcttttgattggctctccatcatttgggtaatgggatagtgatttaggagtatcatagcagctcaaggggcccttctggaaagggtatgaggaaggtcagggacaagtctgaaatgaatcatcctaggcttaatgcctgtgactgggcagtgggtacaattatctcaggctagtcagtagtcatttattgtgagaatacatgggcagattttttaatttccttctcagtctagacttgaatgcaaacagttcttattgctaacttaccactagtcaccactaatgaacaaagactatgaacaggaaattcataaaagaagagatacagatggccaatgaagataggaaaagagttctgcctgctggtaatcaaagagatgcaaacgagaacaaaaatgatgccttttcacctaccaaatttgtcaagattaaaaagaaagcaaagagccagcgtcagctgatgttcatacctgcacctgctcggtagcttgctaatgttctgcctgctccacacgccaggccagcctccacggcgcagccaggtgaggcctttccttgtatacaggcacgtttggattcactgttgcataagtgagacatgtgcatgcttcacaattcaggaagtgcaaactccagagtgatgcaaggtctgagtgtccctgctgccctggtctcccagctgcctaggcctctcttcagggaacggctgcatccagggtcttgtctgtgtcttttgaggtgttctatgtacacgcagacacatctaaacctatttttattttccctgcacctgcttgggctactgtaagctgttaaatttttttttctaggaatttgtccattttgtctgactagcataaagttgttcatgttatagtttatacatttgcaacatctgtaattatgtctgctttttcattcctagtgtttgttgtttacttgtaccttctcccgtttttccttgtcttggtaaaagctcattaggttcattggtcttacaagaagcagacatgtaggcattattgccctgtattactctgtgtctcttttctagttcattaaattctgcttttgcttttatctttattattttttctatggtcttagagtacattctctgtgttttgttgttgttgttgttgttgtttgttttttgttttgagagagagagtcttgctctgtcgcccaggctggagtgcagtagtgcaatctcagctcactgcaacctccacctcctgggttcaagtgattctcgtgcctcaacctcccgagtagctgagatttacaggcatttgccccacacccggcaaattttttgtatttttagtagagatggggttttggcatgttgaccaggcgggtctcgaactgctgacgccaggtgctccacccgccttggcctcccaaagtgctgggattacaggcatgagccaccacgcctggccctaacttcttaagttataaatttggttcattgatttttctacccttttttcaaatgtaaacatttaaggctaaccctctggaactacttcaactgtatctagcaagttctgatagtattgtcactttaagttagcccaaagatattttaaattttctttgtttcttcctttgactcacatattattttaaaatgtgtttttcaatttccaagcacatggctttgggtttgttttttttttttcctagttgctctagaaaaaaaaattgactgcatgaggtggctcatgcctgtaatcccagcactttgggaggccgaggcgggcagatcacctgaggtcaggagttcgagaccagcctggccaacatgccaaaacctcgtctctactaaaaatacaaaattagccgggcatggtggcacacacctgtagttccagctactcgggaggctgaggcaggagaatcacttgaaccgggaggcagtggtcacagtgagccaagattgtgccagtgtactccagcctgggcaacaagagcaatactccgtctcaaaaaaaaaaaagaaaaaaagaaaaaatcaacttctaactaaatggcactgtgatcaaagaacttggtctgtgtgacaccagttcttgcagttggttgagaagtgctccatgacacattatccacaaccagtggacagaatatgtcaccaccaagcatgggtgcaggattctacatatattcattacctctgtcttatccgtttgttgtgaaagtattttctcttcttactgtcattttgtttacttgatttatcaactgatggaatacgtgttaaaacctactgtggtgatggacacatcagtttctccacagagtttggtcattttcattttattatttattttgaggccacattttcagttttagatacagtttcacattcctggtgtattgaaccctttggtattatgaagcgaccatactaatatgttatttttttttaaattattatttattttatttatttttctttcttttttttttttttgagacagggtctccctctgtcacccagtctggagtgcagtggtgcaatctcagctcactgcaacctccgcctcctgggctcaagtggtcctcccacctcagcctcctgagtagctgggattacaggcttgcaccagcgcgcctggctaagtttttgtatttttagtagagacagggttttgccatgttgcccagactggtctcaaactcctgggctcaagcagttcaccagccttggcctctaaaagtgttgggattacaggtgtgagccaccacgcccggccatcccagttttttattttcctcctttctgtgtctttatgcatcagtgaggtggagcttttgaaaatgtcagatagctagattttttttttttgagacggagttttgctcttgttgcccaggctggagtgcaatggcgtgatctcggctcactgcaacctccacctcccaggttcaaaacaattctcctgccgcagcctcctgagtagctgggactacaggcacgtgccaccacacccggctaattttgtatttttagtagagatgtggtttcaccatgttggccaggctggtctcaaactcctcacctcagctgatcacccgcctcagcctcccaaagtgttggaattacagacgtgagccaccatgcccagctgatagctagattttttttttttttttttttttgagacggagtcttgctctgtcgcccaggctggagtgcggtggcgcgatctcggctcactgcaagctccgccccccgggttcatgccattctcctgcttcagcctccagagtagctgggactacaggtgcccgccaccacgcgtggctgattttttttttttttttttttttgtatttttagtagagacggggtttcaccgtgtcagccaggatggtctcgatctcctgacctcgtgatccgcccgcctcagcctcccaaagtgctgggattacaggcgtgagccaccgcacccggcctcgagattttttaaaaaatccattgtctgtttcgtcctttaacatctatttgatttctgatgtatttagattcatttatagcatatttgtgcattctatttttccatattttctgttcttttaaattttccttctcctttcttgccttctcttagacttttaaaaaaattgtagtaaaatacacatcacctaaaatttaccatttttaaatgtacagttcagtggcattaaatacaaattggaggccaggcatggtggctcatgcctggaatcccagcactttgagaggctgaggtgggaggattgcttgaacctggaggtcgaggttgcagtgaggtgtgatcacactactgctatagcccaggcaacagagtgagaacctatctaaaaaaacaaacaaacaaacaaacaaacagattggcatcacacagtgtgtgtgctgctgtgctgtgctgttatcatttaacattaaaacataaacatcagcactgttatggactgaatgtttgtgtcccccaaaattccagtgttgaagctcaaacctccaatgtgatgttatttggagatggggtatttgagaggtggttaggtttagatgaaatcaggagggagggtgggtttcgcatgatgagattagtgtccttataacaagagacagcagagagcttgctttctccaccatgtgagtatgcaatgagaaggcagccatctccaagtcagaaagagagccctcaccaggggctgaatgtgctgacaccttgatcttggacttctagcctccagaactgtgagaaatttcagttgaataggccccccagtctgtactattttgttatagcttgagcagactaatacacccatgttatgaaaagctataaacatccctttaaaggccacctaacgcgtcgtattacctcatgcatcttctctgctgagctttccaaaagagtggcttaggctgggcctggtggctcatgcctgtaatcccagcactttgggaggccaaggcaggtggatcacctgaggtcaggagttcaagaccagcctgaccaacatggagaaatcccgtccctactaaaaatacaaaattagctgggcgtggtggcgcatgcctgtaatcccagctacttgggaggctgagccaggagaatcacttgaacctgggagatggagggtgcagtgagccgagatcgtgccattgcattccagcccggccaacaagagcgaaactccatctcaaaaaaaaagagtggctggccgggcgcagtggctcacgcctgtaatccccgcactgtgggaggccgaggtgggtggatcacgaggtcaggagttcaaaaccagcctggccgagatggtgaaaccccgtctctactaaaaatagaaaaactagccaggcgcagtggcaggcgcctgtaatcccagctacttgggtggctgaggcaggagaatcgcttgaacctggggggcggaggttgcagtgagccaagatggtgccactgcactccagcctgggtgacacagtgagaccccgtctcaaaaaaaaaaaaaaaaaaaaaaaaagtggcgtatgttcccggtctccacctctcattcgccagcccctgtgaccaaacccctgggattagatctccatcgggtccctcccctcaccctaacctcacatgcagtggttcctgagaagctgctgtttatctgatcacgggatccagcaggatctgagggctcattcactgaatctgtactacccaacaaggcaggcttgtccttacccacacttttcaggtgaaaacttaatcagattcaagcgtttatcttagtggcctcttcgtggtgtgtgatttccttcttgcagctctttactggctaaaactcttcactgggagttaaaccaggtgtggtccttgaccctcatcattttgtcccatctcctatgctgggctctgtatccttgtctccaagcagtctcgtgtgacagggaagttacctattattgtatggtcccctcttcttgtcacctctggtgtggcacttgttccatttcttgttcaatgaatgtgatttgtgaatgtgccacatctgtgggaggaaggcagttcgcagcaagagttgtagttcccttgctttgccctgagggccaggactttacactagatttttttgttgcattcctgcactcataaagtacacgtaaacttagaggtggtgtgttaaatgctagaacttaaaactgagttcagctaggctcaagtgccccacaatttttgtcccaccagacaatttcatgaatatctacagattgttccctcaatatgcctcaatattgaggcatattgatttggggagcacagacaagtcaaggttgatgtgcatccgctgaacatgatcttaagttgttgaagtaggtattattaatgaacgaacgtctattttagctccaagagcccctggtcttccagaagagactcccaatgatcttccagaagcagctgggcttcttttggtcctcccccacccaggtgcagtcccgttctccctgcctgggtgagtttgattcctctgccgtggaataggctaggctgctacctcttgagcctcttccaccaggccatccattaggtggcgacagagagcactaaaaggaactactatggaaataaaacttgttttgcttcttggggggaaaaaaaaagaaaaaggcttgtggggcgtgtgtgcattttagtcagattttactgtgcaaaacatttgagagatttctgccctctttctcccttccattcttctcaacccactgggcgccctaccacccctgtctccttcaagataaggtagatcagaagaccaaatagacaaatgccatgtccactgttttctgtcacagttgatagccataccagtcacccaagctggaaacccaacaggcccctgcccttcactgcccacatccaagggagccaccaagtcccacaaattgttcctttaactgtttgtccctcttttgtcttctgtcatcccttctaccgctgtcctggttcaatccctcatcttgctctgggactcccatgataacttatgatctttcctccacctctctatcttccacacaatccctatcatcaatctcattcccctgctttaaacccaagagtggcaccctgtgtttgagtgacatcagggcccctcatgtggctcctgcttctctttgtggccccttctgttgctgctgcttttcttatggacatagccctcagcagtccaggactgcttgtagttcctcccaggtaccatgtttcttgcactcctggcctttgtcattggctcccctgcccaagtccccttctcttctcctttccttcccctgtggccttgccttgtcgtgcttatccttgaagaccctgtcaggtatctcttccccaaagagccctgcctaaccaccgcccccctcccccccgcgacacacacacctgggttaggccctgcctctccacgcctgtgcctcctgccaagtcctcagaggtctctgatcccatgtgcctccaggcatggcatagggggactgtgacacagcctctcggcccacagacccctgattgtgggcttgctcactgccccagtcagtcctcttattgaggattccgtgccagttcctgactccagcacacacacgcatgtaggccgccctcctagtgcctggctccttccctgtctcttctgccactcattcccatggtcgtatcctggagttggtcatctctggaactccacccacggagttctaacttagctctgcctatgatgaggacttactgtcttcccagcttgcagtgtcaaccactgtttgatgcccctgggactccattggtcttccctcctcttgtgaactgtgcccatcaccagacgaacttgttttagaatttaccatcgtaactgagctcccttcagcgcatacctccttggctcctgctcagtctctgtttctccttttagccaaactctctaagagttctctccactcatgggccctcttccttgcctgctgctccttgctcagcttgctccatgaacacttgcttttccacattccatgaaataatcttaacagtcatcagtggctgtcactccttctcagccctttccttgtgtctcttctggtacctcatactctccaggtggccatctcacctcacatcttgaaccctctgggtttgggagaattctcacctcacgagttgatgggaggcctggcgacctctgattgtagtcactgcaaatgccagatgcttatttgcctagcttccctttcggtcagggcagcagttggcaaacggtatctcaagggccaagtccggcccactgcctgttttcgtaaatgaagctttaccaggacccagttccaccccgtcctttgtgcattgtccaagactgctctcctgtacaacagcaggtgggctggttgtgacagatactgtctggcccacaaggtggaaaatactatctggccccttacagaaagaaattacctgagttctacacgagggtgtaggtatgtaccctggcctctgccagtcagactcacatgctaggaggagcagggccaggcaggagagccgtgtctcctggcattggggctgcaggaaagacgagctcctaggccacagtgccagtggccagtgctgctgccttgcagggtcgcacaggcagtgctggctgtttggactggcttggcagaaggatttgaagtattgttcctagccaactggactcaaacctgttcctccaaccctctagggattctcttatcacccagtagccttttccccctagttttaaaaattgcagtaaaatacacaaaagataaaatgtactgccttaaccatttttaagtgtacaattctgtggtattgagcacatttatattgtgcaaccatcaccacatgcatcttcaatagcttttcatcagtccttgtctgcataaatcagctagagttggtttctattgattgccaccaataatcttgacagatatgtctgatcttccttctctgcactgactcctctttctctgtctcctctgctgattctttctcctcatcacaactccaaatagcagggggagggttgtttacacttatattcagcacgccctcacgcactcgcctggctcttcagacctctcccctgaactccagattcatacatccagctgccctttaggcctctagaaagctaaatacctcagtatcaaaaacatgagaaacggaagccagagtcctggatctctcgccctttcgctgtcccggtgcccatgcccttcagggatggcacctagaccagctccctgcatccctgcctagactctgcagtagtctcacgtggcagacccggaggtcactctcctctctggatgccctgcggacactccggttagcctcagctgcaagagcctcctcacccaaggtcacgccatttccaggacagcaccctggtgactgagcgaggtaagggtacaaggcccttatagggccttctctttgacttcttcccacctccctttatggatgtcagttcctgatgaacatcttacacctcaaaccgtgacccaacatctgcttctgcagagcccccctgtggcatcttgtgccctcctgccccactccctctactctatatcttcccatagttagaatgggctttttttttttttttttgagataaggtctccctttgtcacccaggctggaatgcaatggcacagtcacgactcactgcagcctcaacctcctgggctcaagcagtcctcccacctcagcctcccaagtagctgagactacaggtatgcaccaccacacctggctaatttttatattttttgtagagactggggtctccctatgttgcccgggctggtctcgaactcccaggctcaagcaatcctcccgccttggcctcccaaaatgcaggattacaggcgtgtaccagtgtgcccagcctcagatgggctctttgaaaaatgtttattagatcaggttactcccttgagaaaaaccctctcagaataaaacccgaagtccattacttgaaagcagagccagcttcatgggcctttgtaactgcccatgggcttgctggaacccaggcttggtttaatactctactctcaccatctcaaaattcttaatttttgaacaagaggccctgcattttcattttgcaccaggctccacaaattgtgtaactgggcctgcctcagcagccacatggaacatgatccctccttgcctatttgagctcattctctaccattctctcccttgctcacctggctcccactgctcttgctcttcctggaacttgccataatgttgctagagtcagagccttggctcttgctgctcctcattggctggacccctctttacttgacctgctccctcaccactcacttccttcagatctgtgttcagatttcgtcttctcagagaggcttttggcccctgtccatctctctgaatttacctctgacctctcccccaccaccactgcgctaagctgcctcagaactttgtagacattctgtctggtcttctgatgtttcccccttggaagaatcccaaggtgcctgaagaatgctttctttatccttgaagttgagtaggttgactagagtctggcttgctattgagcattctttatcaaattgtcctgggaacatggtgtattctttcagtctgcagatgtagtcgttgctgtttcaggtcagctctcttatggatctttgacagcatcttctgttccatttgttgagttctgtacttcagggacacaaattcctcatgttggattgtctttgtctctcttccaatgctattagctttgccgtaattggtttagcttttgtctttttcatctgcattcactttgtctaatttgattttcagctatgtatattctgtttctggctgtttttcaatgtatttattagtttcataatgatgtgttttggtctgcagtttgtttctctaggttggaaatttgtcttttcatcttattctgttttatcatcccatctttgaactcttttattgggaacatgttcttatgaagttgtggggaatttttttcccttccttgtgtattctcttcttggtgggagactttgcctttctcgtgccatctccctccctgggcctcttttttttcttctggccataatatgtttgcctagttaccatgtcacttcttttcgtcttggctcaggcttggatggctctgcatagtcgttctgtttgctttgagacagtggaggaattcttggctctctcttcccagtttcttggcatcttctcttgctgttttcccctctgagctatcgcgtgcaggcttgttatcttgtatccggagagaatttgcacgctggagggagctgcagccatgtagtcttcagccctatctggattcttctctttgttctaagaactgtgttggatgtcttactaaggctcactctagctgcacgagggatgtgtgtgccatttccatggggatagggggcacctcagtctctgggtggttccataatctgtgtatacctaagagcagttgcttcccacagagctgggctggctcactgggcactttgccatttctcctgcacctcccagctggagtttctgggtctaaaaggaaaaagtgaaggactcccacttggttgcttctctccagcttactgactgcaaattcccagggcgttgcccgctccctagggtggtttctgggggacggggcaggagcctggctttgctgctgctttgtcctctggagtcttttctcagactgctttgaattacacccctttcctttgtgtgctgaaatcttcccttcacactctccttccctgcctttcttttgtgtcttatcttactaggactggaagagggcagttgtgcaggaggtctgcatctaattccctaatccatgtgagagtgctcctgttgtgtgctttgtgacatgatggtgagaaatactccctagagcagtggctaccagaaggaagccatccccccccctgcacacacacacacacacacacacacacacacacacacacacacacactccttctggctgtcctcagatgcctattctaggtaaatgtcagattccaaagaaaatccagttgagatcttttttctttttttgagacgagagtcttgctgtgttgcccaggctggagtgcagtggcacaatctcggctcactgtaacctccgcctcctgggttcaagcgattctcctgcctcagcctcccaagtagctgggactacaggcgcgcaccaccacaccaggctaaaatttttttgtatttttagtagagacagggtttcactgtgttggccaggctggtctcgaactcctgacctcgtgttctgcccgcctcagcctcccagagtgctgggattacaggcttgagccatcgcgcccggcctccagttgggatcttgactggaatgactggtgttcaatcattatagtttccacctaatttgtatttgtacacaggacagttactaatttgttggtacttgtttgatccccagtccctagagttgtttatggggtggagcttcagtccctgctgcttcccctgtggcagcagctggagtcagggtggggacccagggtgctgctggcagattcttgagacaggtagaatctcctctatattggtgtctctctctgtcccagcagtgcccaggaaaacctggccagcctgtcactgacctctccacctagggcactggtggttcaggtccttctatttgccaccggcaaaccgtacttctgccagtctggctcttaggcccagtttctctgatcttgcagattttcttgggctctgctacggaatcctcatacctccggcaggtccctcctttgcccatgtgtttaactgtggtggaatcgtgtgagagctgcttctctcgcatggatcccagccacaccacattctacagcggttcctctgaaggcattgatagagatatttcctcctgttttgcatttcgttggtcatttcagtagaatcagggtgaaataaacatgggggctcagatgtcagcattacgaaccaagtacgtcaggcaggctgatgtggactgacctacactagtgagacgcaagatgacgaaaacaagggcactcactccaagttactgatgagatgtttggatcaaatgagccagtccttaagcagagttctctagtaaaagagatctcctttctgccctttcttgttccccaaaatgtgttgccttcatggtgaaaatttattttggcagattttctcttctttgataaaagcagccaacactttgttaaaagtctgtgaaacttatttacatgaagtatgtaaaggtaagaaaaaaacattatcaacaagaaatggagaaagccagcagctgaggacagaaaagtcatgcacagtgtcagtgtctatggaaacaggccacttggaccttgaggactaggtatttggaattggaggtgagcttggcctggtgagtctctaaccacttgtgtgtaggatcagtgtgagaaccctgctagaatatagtggcagagatgcaaggggaaatcattggagaagttaccagggaatgatgagctaatctgaaaaaaatacatgtttctaagttgggcgtggtagctcatctgtagtcccagctacttgagagcctgaggcaggaggatcgcttgagcccagcctgggcagcacagcgagaccctatctccctaaaaaaaactttttcgttgtttagttttgggatttttttttttcctggtcttttttccccctttttgtgaataacgggatctcactatgttgcccaggcagatctcgaactcctgggcccaagcaatcctcctgcctctgccttcctaagattacaggtatgagccactgtgttaagcaaaaaaacttttttaaatgaaaatcattttttaaaagacaggctttccaggggagggtattattccacttatatgaagtgtcaacagtaggcagatttgtggagacaaatagattagtggttaccaggggctgagaggagtgggagtggggagcaactgcttaatgggtaaagggttgtctttggaactagagagtagtgatggtcgcatgacattgtgaatgtactaaatgctattaatgataaattttatgttatgtgtattttaccacaattaaaaaaaaaagatcaaatgtcctcagaatagccaacaaccttccacttggctaaatgcctactcattaaacttcttgaactaaattcctttctgattgtcatggttattgtgtcctgggcttcagagtttcacattcaggttggcttggtccagtctgtcatgtatcactataggtccccacattggcctcttcctcagacggacagcccatctatctgccggggctctgtgccacagccagatagacttgctctgagacagctgtgtgggctctgagcactggccaggcatcacaaaacctatctttatgatttagaataattggtggtcagctgctgttttaatgttgttgttttttttaatttagatataattcacataccatgaaatttactcatttaaagtgtacaattcattcttcagtataattcataggctcacagaaaaaattgtttaaaaataaaatgtgcaattcagtgtcttttagtacattcacagagttgtgcaaccatcgcctctgtgtcattccagaacactttcagcacccaaaagaaaccccagacacaggagcagtcacctcttattacccgcagcccctggcaacaactcatccacttcctgtctctatggatttgcctattctggacatttcctataaatggaattatgcactatttggccttttgtgtctggcctctttcactgagcgtaatgtcctcaaggttcatctgcattgtagcatgtgtcagaatttctttcctttttgaggctgaatgatattatatcctatagataatgaggttttgattatccacccatcccttgggaatgcatatttgggttgcccccaccatttggctgttgtaaactgtgctgccatgaacactggtgtacggatatctgtttggttactggttttggttttttgtttgtttgttttggttttttgagacaaggtcttgctctgtcgcccaggctggattacagtggcacgatctctgctcactgcaacctccacctcccaggttcaagcaattctcctgcctcagtctcctgagtagctgggactacaggtagcactcaccaccatgcccggctaaatttttttgtatttttagtagagacaaggtttcgccatattggccaggctggtctcaaactcctgacctcaggtgatccacccacctcagcctcccaaagtgctgggattacagacgtgagccaccgcacccggcatagttgtggctttttgagagtgtatggctaggagtaaaattgccaggtcatatggtaactccatgtttaacatttgagaaactgccaaactgttctccacagcaggaattttttaacctgtatgtggtgggcttgtgtttcggttttcattttacacatctataaagatgagatttgctgtatggcactggttgcctgtatttggggagggttctgcttttggttggcaagaactgcattttatttaagcttagcaaaacataactggtttctcgcatcttctcaaaagtggaggattaagaaatggactgcgaattcagagcagggcagctgaacctcaggctccacccttgtagccttcaagctgaacctcattctctcttgctccctggagaccactgagacactctgcctgtgccagtttgatttctcacatttttaaagggccaaagcttgtgtctcaaagtgctatagcctttattgattcatgcagagaagcctccttgattccgtaattctgcagctaatactggaagtagaaagaattggaaacaccatctggatgacactttagggtggaagcagccagtacaagggggggctcattatttcctctggtcccagactgttcacctggagctgtagccaccaccctgcccttaggttaactgcctcgagtggtagtttagctctttgtgctgtgccgagggataactggaagtgaaaggtgctgagaaatgccatctcctgaaagtggcgagcatgagtgaatttacgaaaggttgggatattgctggggctctggaagtttctctggagctcactccaggggacagggagggggctggattccaattcaagtgaaaaatacctttcatctgccttgttcacctggcttttttgcctttttgtaaaatctgaaaacctcagggattgagtagtctttccttaactgcagttgcctgtctggccacacctgccagctgttgcttgtacccctgtaatttgcacggccttccgggcctttctcacaagatcactgcaggtcacattcatgaggaaaatgcaggcagttcctgccatcagacccctcaggatgtcatggtttggcctgaaaacaagattcctgcaactctaattttcctttgctagatcaaatgaaggatttgatctaatgtttgcattctagcagcaaaatcattgaatattttatttcttaagagccttacttcatattttgtaggtattttaagattttgtaaaggcctttctgcttcaacgtgtgatgtgtgcattcttagaaaaagatcttgtgttctgtaaatcacacaataaaaacatgagttcgtgcaggaaaaactggggcggggtggatcactccaaacttgtgtggtgtggtaactggagctcactgatgaaaccatgaacagttctggctgaaagaaccccacagtacactgaggtctgttggcatcgccgccagcaccgccccggtccctttgtgcgcgccaccacacctggctaattttttatttttagtagagagggggtttcaccatgttggtcaggatggcctcgaactgacctcgtgatccgcccacctcagcctcccaaagtgctgggattacaggtgtgagcctccgtgcccagccttcagctttttttcttaatgtctttgtgtaatatgaaggcattctctttaattgttaaaaagcttgcctaccactgcttcaaaatattactgtcagttggcatagcttctgattatattgatgtcatctcccttcttttaaacatgttaccatattggcactgtatttcccctagcccattgatcacttgagagttagtcatagtcctcgtgctgtttcactcctaaacgtttaagcatgcctttcctaagagcagacagtacagttaagacactcaggaagtttagcaatgagctaacacagaaccttacatttctccacataccccataaatgccttttttagagcctttgagcctggaatgcagagtccaggactgtgtgttgtattcgattgtgtcatcccttcagtctcctttatcagaaatgttcccccacccccttgttttctctcatcatcttgagtccagaccgtggttgcatggcacgccctctctggactcttcctgctgtctcctcacggtaagcttcagtctcctactcgtgatgctggttcatctcagcagcactgaggggcctgagctcagtttggtcgtgtgttaaggtggtgcctgccagatttctccacagaaaagggccccgtacttttatttgctcttcagcctgtgtattccttcctttcttgccagcttgtgggtggcttctctagcagcttctgtaagatactcagtttggcagttgtagttgtttcagcaggagaggtgtctgcatacctgaccaccacatggctagaagtcgatccatcctctggcgtaaccatcctccatgctactgtccctggggcactgaggccctcctcagtgacttcctccacctcatcttccgccatctccaagccaccagtgtccaacggactactgatatgtcccaaactcatcatttgtttattcaccaattcagagcccacctttttttcagcactgagctagcctctccttgctagaagcttacggtcgaaggtctccagccatcagaagaagcacgtggagcgctgcgtccgtgttgtggttattcatccagcatgtgttgagtaagggttgcacctgtgcctggcattatgcattgagcggggagatgggggttggcacgcacagtggggtgttctaagtacactgagggctcgggtgccctggctcatagagcagggagggaggcaggagcagggaaggtgtctcagaagtgccatctttttttttttttttttgggaagtggaatcttgttctatcgcctggtctggagtgcaatggcactatctcaactcactgcagcctccgcctcccaggttcaagcgattctcatgcctcagtccccgagtagctgggaccacaggcgcacaccaccacacccggcaaatattttgtatttttagtagaggcggagttttgccatgttggccaggctggtcttaaactcctggcctcaagtgatctgctcacctcggcctcctaaggtgttgggattacaggcatgagccactgcgcccggtctagaagtgccatcctaactgaacctgaaagatgaaagttctccagatgaacctgaaagttctccaaatgaaaaggtgggagggggtgacagggttaggcccagagcctctggtgacacagggtgggcatcattggtcactttttcctcgagggaggggcgtcacacgggtgatagggtgggagctataaccatgttgatagtgccgcctctgcccatctggcctggcatgccctgagccctctgtcccacctgtggaactcataagccctgacagcccactcactcctgattcattatccacacccctgtgcttccgctgtgcctggagcaagctttcttcagggggaagggaggctggaactatgttgtagttacctatttgtcctcccttccaaactgtgagttcttggaggtggaaggatgctgcaggatctggctcaggacgaaggcagttggtgaacagacacgtgtgtttttgactcacggtgatctcagacaagttcctctgtctagtcgaacttctttttttccatctgtaacactcaggagttgaataggtggtttttctgaggatacttcaactgtaaaatgtatgaacttgtgaactagctatttagttctcctcataatcaagattgtgtgtgtgtggggggttctgattagagggaggatgaagagaggtgtatggggttttttttgttttgttttctgtttgtttgtttgtttttgagatggagtctcactctgtcacccaggctggagtgcagtggcacgatttcggttcactgcaacctctgcctcctgggttcaagtgattctcctgcctcagcctcctgagtaactgggattacaggcatgcaccaccatgcccagctaatttttgtatttttaatagagatggggttttcgccatgttggccaggctggtctcgaactcctgacctcaggtgatccacctgcctcggcctcccaaagtgctgggattataggcatgagccaccacacctggcaggtttctttgaaaaagtttgtgtttcggcaaacaccataaaccccctgggggacagccttggggagtcacctggcaccctagcccagcctccctcccttgggtcctgcagtgaaggcttagtgagggtgtgcaaatgcccaggtcaccctgggactgggcaggccctctgggctaagggtaaactcatttggaatacctgttttctatcattgttttttatttgttaaatttaaagggtacaagtgcagttttgttgcgtggatatattgtatagtagtgaagtctgagctttcagtgtaaccatcacctgaatagtggacattgtacccgttaagtaatgtctcatccctcaccccctcccacccttcccagtctctccagtgtctgccattcctcactctgtccatgtgcacatgctattcagctcctgcttctaagtgagaacgtacggtatttgactttctgtgtctgagctgtgtcactgaagacaatggactccagctccatccacgttttttatcatttttacctgcactccacacccagcacaatccaggcttctttgtgggttttttgaaatttgtctttaattataaaagtagcagccagcaaattaacaaacacccatgtgcctttcattgcacagaattgaaaatcatcatactatatttgcttcaagtaatttccattagaaagaactagaatattacagtagagttaaagaccctttatttcccatcttcagtgctcttaaaagttcatttagggccaggcatggtggctcacacctataatcccagcactttgagaggcccaggtgggtggatcacctgaggtcaggagttcaagaccagcctggccaacatggcgaaaccccatctctactaaaaatacaaaaattagctgggcgtggtggtgcgcatctgtaatctcagctactcgggaggctgaggcaggagaatcgcttgaactcaggagggaggcagagcctgtatgcagtaagccgagattgcgccaccacaccccagcatgggtgacagagcaagactccgtctcaaaaaaaaaaaaaaaaaagttcattcattgtacacttagaaatagttaaaaaggtaaactttgttttgtgtgtgtgtgtatatatatatatatatatatatatatatatatatatatatatgtatttttttttgagacatatatgtgtctggtttgttcgcccaggcaggagtgcagtggcatgatcaacggctcactgcagcctcaacttcctaggctcaagtgatcctcctgcctcagcctcccgagtagctaggattacaggcacacaccaccatgcccagctaattttttttttttttttttttttttgtagagacagggttttgctatgttgcccaggctggtctcaaactcctgagctcaagcgatccacctgcctcacctcccaaagtgctgggattacaagtgtaagccaccacacctgacctgttttgtatattttaccacaataaaaagcctttaaaaccccaagcagacagttcattttcattcaggcccaactcagaatctgatcacagcggggtttcccccctttctagcgagtagctgaagaactgttttctctccttgatggtataactgtctctgtgggtgttgctcccctgccgctccagtggttttgtttttgtttttgtttttttgagacggagtcttgcgatctcagctcactgcgacctctgcctcctgggttcaggcgattcttctccctcagccttccatgtagctgggacttacaggcacctgccaccacgcccggctcatttttgtatttttagtagagacggagtttcaccatgttggccaggttgggctcgaactccagacctcaggtgatccacctgcctcagcctcccacagtgctgggattacaggtgagagccactgcacccagccggcccctcagtcttttccttctcaatcagtggcaccaccatcttcccaggctttggacatggtccctgactcacccttgcccctcacccccacactaatccacctgcgagctctgttgcttcaccacctagaccagccccaaatcctcaactgcccccaccctgggccacacctggaccactgctagaggcctctcatgggccctccctgtttttctcttgcactccccgggctttctggcacaagatgccccagaagcagaatcacatatctctcctgggagccaatctagtgtgtttactgcccctggagtgttattgttggccttagaatatgtcccactacaggtttgcagagcactgtagtcaaaagtcatttgaaataaatcttttctctgtggtatattgtcaatttgatatagaattaaatttgtttcttttcttttttcttttctttttttttttttttaagagacagggtcttggccaggcgtggtgtctcatgcctgtaatcccggcactttgggaagccaaggtgggtggatcgcctgaggtcaggaattcaagaccaacctggccagcatggtgaaaccccgtctctgctaaaaatacaaaaattagccgggcgtgatggcaggtacctgtaatcccagctactcgggaagctgaggcaggagaaggcttgaactcaggagtcggaggttgcagtgagccaagatcacgccatggcactctagcaagactctgtctcaaaaaaaaaaaaagagagagagagagacagggtcttgctctgtcactcaggctggagtgcagtgatgtagtcatggctcactgcagcctcatactcctgacctcaggtgatcgacccgcctcggcctcccaaagtgctgggatcgtaggctgaagccaccatgcctggcccgaactcatttgtttttatttgcattaagtgtaataaggttttgttacttttagtttgaattttattttgggtaatataaacatttacatgattcagaagtcagaattacactgaggcatgttcagctaggcctcactcctgtgcctgtacccttacctttttccccctaccccatgcagggaatcaatttcattagttcctggtgtgtccttccttaatacccccccttctttctttggtagaatgcagtagatatgtttgcgctttgctccctttgcttcacagtggatcctggaaatgactccatcgcagttcttagagctcttgtttagtccctttggatctgcacagtactccagtgtgtgggcgcaccataagtttattcagcaagtgccctggtgatagggatcgggggtattggaagcctttggctggtaaaaataatgttgtagcaaataacatcatgcatatgttctttgagatttctggaggtgtctctttagcatagatttctagaaggcattccttacgtcacgtttaggtttatagtttgacctcatggtgattaaggtatttgggaaatgcaaatgagagtttcgaagaagccagatctttcccattagttcactgtttttctctgacattaggaccgtccgggttctagggagcagccctggcgttaggcagtgccatgatggattgtgtagaagtagcgattcccatctgtctgctttcttggcccactctgctggtggctccccttccctccctcctttatggggagctggggagctgcctaggggtccattctcaaaggctgatctctggtgggcaacaggccacacctagctttccagggttcttcgtcatttcccattgagagctgtaagactcagagacatgaaaaggaagctctggctgggcacggtggctcacgcctgtaatcccagcactttgggaggctgaggcgggtcgatcacctgaggtcaggagttcgagaccagcctgcccaacatggtgaaaccccgtctccactaaacatacaaaaattagcctggcgtggtagcacacgcctgtgatcccagctactccggaggctgaggcaggagaataacttgaacccggcaggcggaggttgcgatgagccgatattatgccatcggcaacagagcgagactccatctcaaaaaaaaaacaaaaaacaaaacaaggcgagctctgtgctgggacagattagggacccctctttacagcaagaaagactgctctgtgggttgtaggatgcctttgtgtatgcagtggctctaggtgactctggcagccacactctgggccctaaacttctggaggaagatacaggatagggaggaactcaggggtgagtcatggtggggacaagacattccctcactctaagaccttgtcactagattggaacatctcttgcctccctacacctgacctgatggttctggagagatacgtccttgcagcttctgagtcccagcactaagcagcctttggtaacttccctacatcatttgagttctggtttcctaaggatgcttgccagtgagtgccatggtgccctcattgcacagtctgtgcagtgtagacaagaggggaagtctcttggggtagaccagccgcaaggcggtgactagcactgatgtgaaccacatgggacaggggagttgtggggctgagaacacggagggtgggagtagtcatgctcttttccagaatgaactgctaacgaagggactcgcaggtggctgctgcttctttccaagctgcccctgttgttgcagaggctctggagtcctaggaggtttcacggtggcatactcgacagagtactagagcatcatggccagatagtgatgctggggtgtggggcctcacggtggccatttctgacgagaccccaccgggccaaagtgatgtgtagagaaggagctgcttcggtcaccagaaaagaacggggaagcctcccacactagaataggtagggtgctcttctccaccggcaggaaggggatgtatggctctgcctggaccacacctttttccttgctcttccctccgcatctgctgtggccgaggccattcctcatcagggaacatgtgttagaggctcacgccacctgggaccacttgtcttatcacccccaggaccctaggcggtagtttcctgtggcctgagttagctgatatttatatagtgccattgtgccttttctcctgtgatgctcacagtaaggatgcctagatggggttacctgttgtcaagataaggaaactgaagcacagaatgctgaggtcatttgctgggttcatgtttggaaagcggcaaaggatttcagtgcaggttggctggctccaaacctgtgtgtgctttccatgacactgtactgtgtgcctcattgagcctcattctagaaaaccaaaaacacacccaaggcccggccttcacaaaggagacccctcccccatttggctccctttccagcagtcgacggcctcttgtcagccatcgagcccagagtcccttgaagtgcgactcatgctggggtggtatgctcaggagccgcagtgtttccgctcagaggaaagggctctgattctcctgcagtgctaggagacttgtgggtggccacagtgcaggtcaggcacaccggccagcaccacccacagcccaaattcctaaagaaatatttgggtcccagcttggcccgagtctctgttgtcctggggaaggacatcaagatctgagtgtatgatggcctggggccttgcatgtggtgggggtccaagcctgcctctgctcacttgttctgcagactggcatgttctctgtgatacttacatacttgtttaacacttcagggaagaaaagtcagaagaccaggacctccagggcctcaaggacaaacccctcaagtttaaaaaggtgaagaaagataagaaagaagagaaagagggcaa

SEQ ID NO: 22 - DNA, 64551 bp, Homo sapiens
ctacccccccgcgagcgagtaggtccaccggctcctttccccatctagcaggaacaagtaggtggggattattatccacaaaagggactagacattgtgttctgggtcccacaactcatcataaagaggtggttatagttcccatcaggagccgtgggtaggggactgtgcgtccagcagcacccgaggctcttcggcgccagaggctctaaggtgcgagcgtgtccccagggtgctcagaggttctttggagtgctgtggcctcggaatgtgagcaccctcccatcctaccctccccttcgccggcgatcttccagttacataagtggagtgggacatagtaggtaacgggctctcatcgccctggagcgctcgggatcaccggtaccagatggggcaagttcatcgcgacgctgtggctcctgttaattgtgcctgaaaggttatcctctgttcagtttggtcatgaccgaatcacccaaactgaaactcagatgacttttatatggcagtggcaatgtttctgtggttttgcactaaagacttaaggtcattatgaagagtgtaaaaggattgctgtcgcaggggagaccgtttatgacattgctaagtatggaccccgagggggaaaaagctcattctggaattgctctgtggcggttgcttctgttgcgagtgtgttcgggtgtgggttggtcacagcagaaatgggctccaccacaaaattgatattcctgactcatggtcaggcagatgtgtgcttctggttatttttccaggaacaggaatgggctctgccgagcctttcacacgttgtgtctctgctgtgcgggatcagtaccccagactgtgagataacaggatcgaattcaggggttggttggtgatccaggaaccatacctacttggatgtgatactgagtggcctagacgttgtaggactctcataagttttagacattttgttatactgtaaaaatgaagcatatacggcctcagtagtaacattgcactaataggtaattattactctagagaattttgggttccatggctggaatgttcatcagtatctcagcaatttcagttaataaccagattaagctgacctcttgagtcttttgaaatctgctgggtccctataataagacagggtctggattttttaatcttttgggaatttccaccaaggatttagggaaataggcttttatgggcttttcaggatttctatttcaaatcccaatgaggaagtctaggaaacacttgcttttattttcttgcctgaatatgtcagaaccttaaatcacccaatcaatctagaagtactacagttgattaaagtaagtcaccacaggtcacccattcgtggcaggtcagctaggtggctgatcactggaatacagtcatatccccaggcatacacacgagcctcacttgacgatcccaaagtttgtacatctgagcttgagacgtgacaagttgaggtctctgctttgttcttcatagttggcagtttgtctcctcgggtgcccctccggttagctgtttatcatacgtctagccctatcaacagtgcaggcagcttccagagtatagttttctctgcaaagtgcctggtggaggggtacctccttttccattgtcctaatggctccactgggcttccataccagccctttccagtgtcttaacagctcaaagaaacccatctgtggctttcttgttagcactggcctatcacaccttcctattgcctgttaactaaaattttgcctggaatgctttaagcttagagtactgggtctttgtttcacccgattgataggagagtgtcatgcagtcagccgaactccgacttctgtgctgtttaaatccttaggtaggtctggggcaaggcacaaaccactgtgtattcaaagggttatggtgcttgcattctgtgtgtatatgtttgtaatttccaaccagagtcgtttcccgtgcctgccctgcctctgtgcaatctagtctagtagggtagggaggcaagctgtggagtttgaaaaaaaaaaaaaaaagctagatgagtttaataggctgttaccccctccagaacattcctcccatgtggagatgaaacgagaagttcatttctttaacctaaaataaagaacaacagagataaaattgttagttccttattggagcctggtttccattgctaatgtacctgcttgggactctgcatgataaatgacgtgtcctggaacctgaaatcttttataaaggttaatatcagcagaaatcttttaattagctaagagcagcttgttctcaagctgcccgagttatcttggaggagagaatcacaggaaatgtttgatatttctagtaaccagtgttttcagtgcgtggggtaaagcacactcctagactggccagtcccaaagagtgtggcaggacacctgcttgttttccctgccctctgctatggtgacatccttgcagaccagtcttgcgtggctggcagacgcaatctttttttcttgggtagagcattatcaccgctgcgatggaaggaccttgtcctcggtgcctccataccagccctttccagtgaaactactgctgtcccggcaagcccctgtgcgtgtgcatcattccgggtaggacaagatgtgaacaggtccctcttctttgggcttaagtagaagttgtgctcttctgcttttacctgtgtgctcttctgcttttacctgttctcttctgcctttctcttgcaagaaacctgtcgaaagcttgctttgcatgccattgcttaaatactttgatggtatgtatggtatgtgggataactgagtgggagccggaattggggggtgggcagggcatccccacccccacccccacatcaaagggggaatgaccatttcgttagagaataaagcctgagtcttataacttcttcaagcacatgtatgctgggtctcctggcgtgtgaatgtgttcccgctgtgctgtgtggctgttttgcagttactgtagacactgtagtctgggctctcattattgcctctgaagttgacaggaccaagccttagtaaggatgcacttgtcttcctagcccaagagctaggggtgttttatatatatattaactttcttttttagatttcataaactgctctcattttctcttttctttctttctttttttttttttttttttgagacagtctcactctgtcacccatgctggagtgcagtggcacgatctcagctcactgcaacctctgcctcccgggctcaagcagttctctgcctcagcctcccaagtagctgggattacaggcacctgccaccacgcctggctaatttttgtatttttttttttttttttttttttttttagtcgagacggggtttcaccatcttggccacgctggtcttgaactcctgacctcgtgatccacccgcttcagcctcccaaagtgcagggattacaggcgtgagccaccgcacccagcctctggctcttttctttttgacatgaaatcttaagttaattatcttaaactttaagaactagaaggattcttagtccagcaccatcagtttacaaacaaaaaaaacttgtgtccctgagaagttgtgacttttccagggcctcctagccaggataccagtttggtttttattatatagctagccgagtaatactattaacttgacttctgggatttcaaagtattctatgacttgactgtttaagggaattatgaggcctcactgaacctcaaaagataattttaggtaccatcctggtagctgtagagcagcaacagaccagtaaaagacttggttggtgttgcccttcttctgggtttgattacatgagtaattgtgtgaatagtctctaagttgtatgctctgagctttcgtttttagcttataaaagtgctactcttgggccagcatagtatcagaaattagctaattcatatggggcagtttaggctttaactaggaaatgatggttatcttaatgacaaaaaaggtactgacaaaagtccttttttgaacatgtgttcaaaagaaaaagagaaactatcaaactaataactgagtttgttgaacatcgagattgactgatctgagaggcttaaaactgattgccctgaaatagacttgcatgttttggatgatggctttgggtctcccagagcacttggtttcccttggtgctgattttttctctcaggattaaagcccctttatgtgatgttgttacagcagcttattgcaacttcattcagctgcttgaaaaagaagggagactgcctctaggttccatgtgttctttcagggatggtattttgatgttgcgtattctcttgaacatgtattcttccctgagaatttctgtgtgccgtggtagaagaaatacttgccagaaatcgccactcatggtatgcttttgtagtgtcgaagtgtcccctagaggtgacaaggcttgtgatagtgttgattctaacaagcatgaatctttcctttattttagcactgtgtgttacgtgccagtaatttgcagcttatcctttgtttctagctaggtaagctgggaaatagcctagtactttgtctatgtgtttatcttcaaaatgtcccaaatagccctgggaaaaaggtcgtgcagctcaatgggggctttcaacttacaattttctttgttttaggctccataaaaatacagactcaccagttcctgctttgatgtgacatgtgactccccagaatacaccttgcttctgtagaccagctccaacaggattccatggtagctgggatgttagggctcaggtaagtaaccttcctttttttttttttagtatatgtcctggtttggccatctgttttttttttttttaaaaaaaaaaaaaaaaggaaaagaggaaaaaaatatactactcttggacagtataaaagtaccccaaagactaaagacataactgtgccaaactgtgccatataataaaaaaaagtcacttccctgagccctgaaaggtcagtgtgtgtagggttacttggtcgccacagcgtgatctgggggcgggcgtcagattagagccggaactggtgatctgcaacttcagttcaccttgaagcaggtcagctgagctgagagcgcttgcactgagcccttttgcgctgctgctgttgccttagcggtcttcagcatgtgtttgctttggtttggggtaaatggcttagtggtcaacattagtgagcagtggtaatgcattttcagatatgggaactggtatgtggttggttccctagaaggacaccctcctgaaagctgtctcagaacaccgggggccatggctaatgtcatgtgcttgctacactcctcccatggtaactaaagagagtacccagatatacatctggttcttgggactctagaggaggatgagtactttgtaaaaacctgggggccccagtcattctaggtctgacactcaggtgctgtatcagctgcagtttgaactacttggcaccattgtgtggactttagttttgtaaaaatgaatggttccttaatttctcaaccttcaggctcaacatctcaagctgtttgttgttgttgttgttgttgttgttttgttttgtctttttgattagtggtcactccgcatttgatgttttgacatgtggatttcagaacttctgtgtggtaaagcagaatgttccaattgaattttcccattttttttcccctaagcaaaaatgtgagttttcacttatgcggccattgtgattccgactgagaccctaagtcgttctttgttgtctctctagtggtttctgacacctcagtgtgaagctgttgtagacatccataagaaatagcctgcttagggattatgtgagggcaaggtttggctgaaggagaatagaaggtgtggaaggaagcggaagaccagaagagcatcacactgcctcaagtcccaaatttgattctgctcctgatcctgtgactcaaattgtcattctcttttactgctgtggggtgtgctctgggcccagctgacaggacattctttgtactccacgtatttatgctggtgggagttgtatggctagtgctttgtgctttgtctcagaaattgtgtggactaaatgtaatatgggcagtgaatgggtttcttctggaagatgttaggcctggagggtggtttgggtttttacgagtctttttctcagattacagattacgaatggatgttataaaacaggcagtgttgacaccatacagtttctcctaagaaatgtacagagagttcaacctgaggaagctaattgaaaataaacttttaaaaagaaatgtagaaagaggaaatttaaaaagtatcttatgaatgggaaagatgtagccatttgagcttcaaagaacttttgagggaattctcaaaggacagtacccgtctttagtagataaatgcttgatatctatttttcttcttttactttttaaagaattactaaaataatacatggatttatagaaaaatcaaaccacttaaaaattgatcaggtggctgggcaaggtggctcatgcctgtaatcacagcgctttgggaggcctaggcgggtggatcacctgaagtcaggagttcgagaccagcctggctaacacggcgaaaccccatctctattaaaaatacaaaaattagctggccatggtggcttgagcgtgtagtcccagctactcggaaggctgaggcaggagaatcacttgaacctgggaggcggaggttgcagtgagccaagatcacaccactgaactcctgcctgggtgacagagtgagactcggtctcaaaaaaaaaaaaaaaaaaaagtatcaggtaaaaaaatgaaagctccccgcttaatctctgctcccactacccagaataactgctgttaatagcttaatgtagatccttctaagtcttctaagactaaactgtgtactttttgtgttgtaattaacaggagggtttttgttttgttttgttttttctttttttgagatggagtcttgctctgtcatccaggctggagtacagtggcacaatcttggctcactgcaacctccacctcctgggttcaagtgattctcctgcctcagcctcctgagtagctgggattacaggcgcctgccaccacacccagctaatttttgtatttttagtagagatgggtttcaccatgttggccaggctggtgtcgaactcctgacctcaggcgatccacctgccttggcctcccaaagtgctgggattacaggcgtgagccaccgtgcctggcctcaggatggtgttatatatacatattctgcatttttccatctcatatattcatctctgcctcatttcttttaaatagcagtgtagtccagggctgacttaccgtcatgcatttcgttgtctctctatgttattaaaaatgctacaggattgaaattcctcatgtgccagtcattttgaagaatggctgcctagacttggaatttctggtggataccaccacatcactgtccaaaatggctatcccagttcccacaacagtctgagaaagtgccattttcccatatcgtcccagaattggatatacatcttttaaattggtgccgcttggattattactgaggctaaacctcaataatcattgtcatagctcttaatgtattaaagatgttaactctttgtcatgcagatattttcctgttttgtcttacgtcttgattcttgtctttctgatatataaaatttatgttatgatttattcttttgctttcatacttaggaaatccttttttactcttttttttttttttttttttttttttgagacggagtctcgctctgtcgcccaggttggagtgcaatggcgtgatcttggctcactgcaagctccatctcccgggttcattccattctcctgcctcagcctcccgagtagctgggactacaggcgcccgccaccacgcctggctaatttttttgtatttgtgagacagggtttcaccatgttagccaggctggtctcgatctcctgaccttgtgatccgcccgtctctgcctcccaaagtgctgggattacaggcgtgagccaccgcgccccgccaggaaatcctttcctactcttaacaacagatcaatagtcatctatattttcttcctaaaaaacctgatgatgtattatattcatacatacgtatttaatacatacaaaagggccagatgcggtggctcatgcctgtaatcccagcactttgggaggctgaggcgggtggatcacctgaggtcaagagttcaagaccagcctggccaagatggtgaaatcccgtctctactaaaaatacaaaaattagccaggcgtggtggcgggcacctgtaatctcaactactggggtgactgaggcaggagaatcgcttgaacccaggaggcagaagtttcggtgagccaagatcacgccactgcactcctgcctgggcgatagagtgaggctctgtctcaaaaataaaaaataaaaataataattttatagttaagttgccctgtgtttttcctgtgattaaaaaaaaaaatacctgttttgtatttaactttggggtgggataaggtatagcccacttagtcagttgtgtctaagccacttgatgaaccagtcaatccagtcttcacctttaacaaatgctgatttcttcaagtgagcaaaatatctcttaaactttttcctattttctctataaagttgcttttttctgaattttttctttatgaggcttgatgggcagccctatcagcagacaatcattcattcacccaacaaatatttgagtatctgcttcaagccaggggcagtgctaagccctggaagtggtatcttctccttatccgggagtggggctacagtgttcattccagaagactcaagaaaatagcagatcatcacaaaagtaggttttacataaatgaggaggaatccacagggttgtgtatatgtgtgtgtattttaaattctgacataagttggagctttagggtagactgtgacataagagtagtttgttttccaactcatgtaattgccggctgatttttgtcttgaattatgataatggtaacttctgttgaaacaattctgtattcatcttagcttggttgggatgcaataaaagttttgtactggtaaaaatgataattttcttccatgatgattttgaagcttttctgtaacacctgataaaaatagaggggccaggcatggtggctcatgcctgtagtcccagctactcgggaggatgaggtgagaggatcccatgagcccaggagttttaggctacagtgagccatcatcacaccactgtactcctgtactctagcctgggcagcctcgttctttagagtaagacactgtctctttaaaaaaaaaaaaaaagaaaaaagaaaaaaagaaaaggcttttagtgaatatatttttagggtagcaagtgtaatttttataaattgcattatttgaatctaataaataccctcaaagctgaagtcgaattctgattttgattgaaaatattttttacttaaaggaagagggatagaataaatgacacgattaaggaaaagacttcttgtataaggccggggttttttaaatgattttttgaatagttagatggacaatacggaattaaaaaggtggtgtaaaaagttatacggggctgggcacagtgactcacgcctgcaatcccagtactttgggaggccgaggtgggtggatcacctgaggtcaggagttcgagaccagcctagccaacatgacgaaacatcatttctactaaaaatacaaaaattagctgggcttggtggtatgcacctgtaatccagctactcgggaggctgaggcagaagaatcgtttgaacccaggaggcagaggttgcagtgagccaagatcgtgccattgcactccagcctgggcgacagagtgagactccatctcagaaaaataataatagaaaaaagttatatggggctgggcatggtggctcatgcctgtaatcccagcagtttgggaggctgaggcagcttgatcacttgaggtcaggaattcgagactagcctggccaacatggtgaaactccgtctccactaaaaatacaaaaattagccaagcgtggtggtgcgtgcctgtagtcccagctacttgggaagctgaggcaggagaatcgcctgaacctgggaggcagaggttgcagtgagccaagatcatgccgttgcactccagcctggacgacaagagcggaactccgtctcaaaaaaaaaaaaaaaagagttatattgtaaagtatctctgctaccctgccccaaacattcatttctttccctggaggcagccactattacctgtttctttaaaaaaaaaaaaaaattgtggccgggcacggtggctcacgcctgtaatcctagcactttgggaggtggaggtgggtggatcatgaggtcaagagatcgagaccatcttggccaacatggtaaaaccccatctctactaaaaatacaaaaaattagccgggcatggtggcgggcacctgtagtcccagctactcgggaggctgaggcaggagaatcgcttgaacctgggaggcagaggttgcagtgaactgagatcacgccgctgcactccagcctggcaacagaatgagactccatctcaaaaaaaaaagcgtgtgtgtacccgtgtgttaaatttttattataaaatatatataacaggctgggcgtggtggctcacgcctgtaatcccagcactttgggaggccgaggcaggctgatcacgaggtcaggagatcgagaccatcctggcgagcacggtgaaacctcgtctttactaaaaatacaaaaaattagccgggcatggtggcgggcgcctgtagtcccagctactctgagagcctgaggcaggagaatggcgtgaacccaggaggcggagcttgcagtgagccgagatcgcgtcactgcactccagcctgggcgacagaccgagactccgtctcaaaaaatatatatcgatatatataacaatttacagttttaatcatcttaactgtacagttcagtggcactgagtacattcacattgttgtacagccattactaccatccatctctacaacctttcgtcttgcaaaactgaaatttcatacctattaaacactaactcccacttctcccctttcccccaccccaccctctggcaactactattctactctttgtctctattggacatatttttgtgtgtttaggtttgtgtatatattttacatgtgtgtataaatacacaagggtatgtgggcgttgtgtttttacacatactataaaatattgtgcacatttgtttattttaatgtatcctgtagattatttagaatcggttcatacagagccgtatcattccttttaagggttgggtttaaatagtctgttatggatgtaccacaatttatttaaccagtttttaaattttttacttattttttttaatgtttttttagagacaggatcccactccatcacccagactggagtgcaacagcatgatcatagcttactgcagccttgaactccggggctgatgtgatcctcccacctcaggctctcttgtagctgggactacagggatgtgccgccatgcctggctaaattttttatttttatttttatttttatttttggtagacacggggtttcactgtgttgcccaggctggtcttgaactccttgggcttgagtaatcctcctgccttggcctcccaaagtgccgagattacaaccatgagccatggagcccgacaagagtagccttttatttgcagaccattagagaaaaagttgcgtgtaagtagataagcatacgaatttatcactgcaatactgtttgtagagatcacagagctgttaggctaggaagaagtttttagcagttagcactagaaagcaaaactttggaaacttccatttcatcaaaagtgacctcatctgagtagggcatgtgagggaaggacctttttactcgacaaggggaacttgcccagttcttgtttgtgaaccttgaagaaagtggagcatttttattttgggaccattctaggttgtggtagttccttggtactcggggttggagaatctccctctgctgctggaccttctgcctcctcatgctgtaatatgcataagaggtgtcctagaagtattcaggaacaggctgtggttgctttgttgttctgtgactgttgaactctttatatagcagtacttttttaagctgtactaattgagcatttattatgtgtcagttactgtgctagctgctggaaactatcctaccctcagcagtcttctggtctaatgggaggtacagacaggcaaatgggctatgactttacaagaggctaacttctgtgatggagagaagttccagccactaagggagcacataaaaatcagaggagatcctaccaagaattgggaggtaggtcagggaggagacttctttgaaaaatggcatctaagacctgaacagcaaggaaacattagctaggtcaaggacaaagcatcagtggggagagatgcatgagtcttttggaaggaccagcatgtgtagaggctctgacaggagagaatctctcaggcccattcagagagtccactgtgtgaagacgaggcatgaacaaccagccaggacatgtggagaggagcatttttctttttttcttttttctttctttttttttttttttttttttgagacgtctttctctgtcacccaggctggagtgcaatggcatgatctcggctcactgcaacccccacttccagggttcaagcaattcttctgccttagcctcccaagcagctaggattacaggcacccgccaccatgcccggttaatttttgtatttttagtagagacggagtttcaccatgttggcctcaaactcctgaccttaggtgatctacccgtctcggcctcccagagtgctgggattacaggtgagagcccccacgcccggccaggctcggctttctttccaggccccgtcacactcttagatgttccctgggccccagaaggcagcgtgaggtgctctgcccatctatgctgtccttttccaccccaccctatccactgggcccctggggctcccactccactccaggtctcttcatggacccttctttcccttcacttctgtcccaggagacctgggagactcatgggaacaggcatcatcttctccagcacagttcattgtctaatgcacgaaagtgctgggctgtgagaaggtcaggagcttacatggaatgggagtcagctgtggtacaaagtacgctgcttagttctactgattttttattttttatttttacataagactttgatggtaaaggaagcagtgtgtgagcaagctgactcctgtcttgtcaagtaccaggtccactctgatgagcccctgtggacagcactgctgtaactccccaagcctgggctcaggaggtgggccctaagcgctgttcccagctcttcctccatgctgtcagctcttccaccattcttcctggcgtcattctaaggtcctgtcttcccccgccctcttccttcctggcttctacgctcagctcaagtagtagctgtttgggtacttttcacccagacttaggaaatgttatcagttggtcgtattcctgtcagccctcttactatggaactcaaataggacagattcagctgaattcccagccctgtggttgcactctttgtctgccctgcttccccaaggtagcctgctccctaaaggtcaccgagatactccccatgcaaggtttttgttgtattacacatgacaacatggaataaagtgttttgcaaatttactggatgatatcctactatgtggaacatcctacaacttactcttttcactcaacatttgacttttgaacctggtctgtactgctccgtgcagaccaatgttcattcatttgatatgtctccttgtgccatagaaatagttttacaatagaagcctgtccagagccatgagggagaaggggattgtagagaaacaaggattggcatctggtttatgtttacatcctttagtcctgttaaccgagaagaagatatttttatttccatgtttgcgaaagctttccacaaaaaaagcatccattttctagacttattaatagggcagtccaaaggttttatttttagatttgaaagaaagcaaagtaggcttctgagatatgcacatttccctgtgtccctgtctcttttgcaacattccacattgctgctaaaacttgaacatgagcactttcaagcatgtgcttactttctatgtatgactcattttttaaaacattaaagcattttcggccgggtgtggtggctcacgcctatattcctagcactttagaaggccgaggcgggtagatcacttgaggtcaggagttcaagaccagcctagccaatatagtgaaaccccatctccactaaaaatacaaaaattagccgggcatggtggcgggcgcctgtaatcccagctactcgggaggctgaggcaggagaattgcttgaacccaggaggtggaggttgcagtgagcagagatcgagccactgcactctagcctaggtgacagagcgagactctgtctcaaaaaaataaaaataaagcattaaagcactttgtctggtggtatgtaagttttggcattacttagataagttgtattttaagtctttctacacacaataacttatttttaaaatacaagtttctgtgtacttccgggttttgtgtttttgtaaacagcagaaggtattagtccatattaagtactaatttgttctaatattttcagctgtttttggaattacacttggcaaaaaaatagacaaatgtctgcagttgtgacagtttgtttttttgttctttttaactccagaataaataattctagtgagtttttttcttggcttgtaagaacatgggaatgattagagtcatcataacacttaagtagttatagaaggttgaacatctgtagtcagttgtataaaatttcctagtcatccttccaggttgtttaagacaaacaaatacatagtatttattaagctcttataaattttaattgtaaaacatcattgtacaaaactttgaaaatgcgtataggtacaaagataaaaaattaggccaggcatgccatggctcacgcctgtaatcccagcactttgggaggccaaggtgggaggatcttttgagcccaggagttcaagaccagcctgagcaacatattgagaccctatctctacaaaaatatcataaaacaaaatagaatcactctggcgattccactatccaaaaaaaaaaaaaactgctgttaatatttggtatgtatctttctagaccaaggcctccaactttggttgagaattcagccgggtctgtgaccttggatgggaaaaacattcactctttattttcactaatgtctctgaaaacccagatttttagctgggcatggtggctcgtgcctgtaatcccagtgctttggaagcccgtggagggcagatcacttgagcccaggagtttgagaccagcctgggcaacatagcaagaccctgtcttttaaaaaaaaaaaaaatccagccgggtgtggtggctcatgcctgtaatcccagcactttgagaggctgaggcaggcagatcacctgaggtcaggagtttgagaccagcctgaccaacatggtgaaatcctgtctctactaaaaatacaaaaatcagccgggcatggtggtgggcgcctgtaatcccagctactccggaggctgaggcaggagaatcacttgaacccggaaggtagaggttgcagtgagccaagatcacaccattgcactccagcctgggcgacagagcgagactctgtctcaaaaaaaaaaaaaaaaatccacattttcttcaatgacaattgtaagcaacagatcatggtagtattagaatagcagtgactgtcaccagtagagatcaaagatactttcatatcatattatagttgttacagatattttgaaatatatatgtccatcactgcttcaaacttaaggtaattattagacccatctctagatctggttatttaatgatttactgaagaagcacatattatttgagaacgaactcttgaaatatgttgttaatttctgtgcattttacacatttcaaaacattcttctgaggaggggtccagaaggccaaaagggtccatggcagaaaaaggttaagaacacctgttctgtactttgtaccatgtggctacaaatataaaaacagacgttaagccgggtatggtgatgcacacctgtagttccacctacttgggaggctgaggtgggaaaatcacttgagcccaggagtttgaggccagcctgggcaacagagcaagaccccatctcttaaaaaccagtcagcacttgactagtcagttagtgggggaaaacacaggtacagtaaaaggagtcaaaattacacttaaacttaggtcatcttattatatcaaacatttattaacatgtttagtgttttgtgtatattatgcaaagtgtaatgcaactaaaactgtttaacacttctcgatatcacataaatttgttggtgcataatagcctaaaagttacttttgctgttggcattttattttattacttacttatttatttatttatttatttattttgagacagagtcacactgtcgccaggctggagtgcagtggtgcgatctcagctcactgcaacctctgcctccctggttcaagcgattctcccgcctcagcctcctgactagctgggactacaggtgcgcgccaccatgcccagctaatttttgtatttttagtagagatagggtttcgccatgttggccaggatggtcttcatctcttgaccttgtgatctgcccacctcggcctcccaaagtgctaggattacaggcatgagccaccacgctgggcctgctgttggcattttaaacatccttctagagtctttcttatttgcctgtaagcacgtacacatgttgttgttgttttgagacaaggtctgtcgcccaagctggagcacagtggtgcaatcacagctcactacagcttcgacctcttgggtgcaagtgatcctcccaatcagcctcccaagtaggtgggactacaggtgtccgctaccatgcccagctaatttttgtattttttttgtagagacggagtttcaccatgttgcccagactggtctcaaactcctttgctcaaacgatccttccgcctcggcctcccaaagtgccgggattacaagtgtgcacctctgtgcctggcccacatgttgttttagatgaatgagatcatatatgtacttttgtaacttgctacctttcctcaacaaaatgttgtaaatatccatgtccataaaaatagacgtatatcttcacttttccctaaaatgaaaataacttaacttgcattttcttttttgtttttgtttttgttttgagacaggctcttgctctgttgctcaggctggagtgcagtgatgtcacagctcactacagcctccacctccagtttcaagtattccacctacctcagcctccaagatagctaagactacaggcacatgtcacgacgcctggctaatttttaaaatattttttgcagaaatgggatttcactatgttgcccaggctggcctcaaactgctggcctcaagtgatcttcctgccttggcctcccaaagtgctgggattacagtcgtgagccactgtgcccagcctgcattttcttattataaaagtaatacatgttcaatggacaaaaaattttcagaaaatatgcaaagatgaaaagtaaaaattgtccataaatctgtcatctacagataaagataacttctggataatgtttttctaccatcatttttagtaatcacataacatttcgttgtatgtctatgccttcatttaattaagaggcatttccattatttctgcatgttcatgactctgaatgatgatatgtctgcctgctgatggctacaaccctgtttctgcatttcaaacctctctcttgagctccagatttgatggcctcgtcagcatttacttgagttgctcataagtgtctcaaatttaacaagtcccagtcttgatttttttcccccttcaaacctattcctcatgttgtctctatttcagtaaacaatatcaacatccacccagttactcagtccaaaattctaggagtcatccttgattctgctctttctttttttttttttttttgagacggagtctcgctctgtcgcccaggccggactgcggactgcagtggcgcgatctcggctcactgcaagctccgcttcccgggttcacgccattctcctgcctcagcctcccgagtagctgggactacaggcgcccgccaccgcgcccggctaattttttgtatttttagtagagacggggtttcaccttgttagccaggatggtctcgatctcctgacctcatgatccacccgcctcggcctcccaaagtgctgggattacaggcgtgagccaccgcgcccggcctcttttttttttttgatacggagtctcattctcgtcatccaggctggagtgcagtggtgcaatcttggctcactgcaacctccgcctcccgggttcaagcaattcttctgccccaacctcctgagtagctgggcctggctaattttttgtatttttagtagagatggggtttcaccatgttggccaggctggtcctgaactcctgaccttgtgatccgcccacctcagcctcccaaagtgctgggattacaggcgtgagccactgcacccgccctgattctgctctttctctcatcatccctgatctgtcagcaagtcctgttaggccaaccacttctcagcatctgcactgccagtatgctagtccaagccacaaaacacctctcagaggtacgcaacaggactttgttgttgttgtgtgtgtgtgtgtttttttttttttacggtagaattattttataacttgaagtgtagggatgaccttccttttaaaattttatttattttcttaattttttattcccatagattttaggggaacaggtggtatttggtgacatgagtaagttctttaatggtgatttctgagattttggtgcacccatcacccgagcagtgtacactgaacccaatttgtagtcttttatccctcaccccctcccaccctttccctcaagtccccaaagtccattgtatcattctgatgcctttgcatcctcatagcttagctcccacttatgagtgagaacatacagtgtttggttttccattcctgagttacttcacttagaataatagtctctagttccatccaggttgctgtgaatgccattaagtcattcctttttatggctgagtagtattcctttgtatatatatgccacaatttctctattcactttctgattgatgggcatttgggctggttctatatttttgtaattgtgaattgtgctgctataagcatgcgtgtgcaagtatcattatgcaacgggacttcggatgacatattgaacaacttcctcactgatatccttgtgaaacgctacatatttcatgggtctgtttgttataccaacactcaattctgaatgatggaattatttcacatttagtctctttttcatctagccattatagtttagtttaaacaccaagttccattcctgctgcatgctgaaggatttgcagtacatcaggctatagtccatcaattcattccacaattgagtaagtaaggtatctatagtacctcaggccctgtgttaggcagggatggggtaacctagacagatttggtacctgtcctcatggagcttgactttagcggcagagacagatcttagataattgtaccagtacttaagtgttcagaaggacaagtatggaggtgggagccactccagtcctctacagtcacgtgctgcacaacaacgtttcaaccgacaacagagcacacatacagtggtgttcccataagattagaatgccatatttttactgtaccttttctatgtttagatatacaaatacttaccattgtgttccagtgatctacagtattcagtatagtaccatgctgtacagttttatagcccaggagcaataggctatataccgtatagcctaggtgtgtagtatgctacaccatctagatttgtgtaagaacactctctgatgttagcacaaataaatcgcccaatgacacatttctcagaacatatccctgttgttgagcgactcatgactgtacaatgggggaacagctcagcctgccttccccaaggaggcaacgccgatgcagggaaccgagggttgaacagaagtgggcaaggtgcagagaggaaaaaggctttccagatggagaagagcatgtgtgaaggccctcagtctggcaagagcttagtcctgtgtggcaggagctgaacgaggggttaggggagagtggcaaagggtccgggccatcagagaggtcaacaggggctggatcatgcaggattttgaatgttaacatcagagcgatagaaaacatgaagggtaaggtggtttgggttttgaatttttatcaaaatattgcaactactcggcaacaagttagatataacaaaagaggtcatcgtaaaaacagcagtctaccccttccccttcccttccctgactcagacatgacagcttttaactgtttctgattttagttcctttgatggttacctccaaaattaaatcatatgcttatacatctttcttgatttgccaactttagggaactgtgttaactccctgaaatgaaagagaatgacttagcttacgttacctccccatgttgaaattcatattcacatttctctgtaattttttttttgagatggagtctcactctgtcgcccaggctggagtgcagtgatgtgatctcggctcactgaaacctctgcctcccgggttcaagcaattctcgtgcctcagcctcctgagtagctgggactacaggcgcacaccagtgcactgggctaatttttgtatttttagtagaggcggggtttcaccatgttggccaggctggtcttaaactcctgacctcaggtgatctgcctgccttggcctcccaaagtgctgggattacaggtgtgagctaccatgccaagcccacatttctctgtaaattttaaacagtattttagtccatatgtcagttcccctctgtttaagataaggatattaataaccctacttttccttccactttccctccttaacttctgcgtcttaaaagctgtacttgaccatacccattcttgcatttgttaacatgtgtgttctgccctgcaaccacagccaagttgtagcttaattctaaagtcgaaaataacattatttacattattacacatgtgagtattgttcttggcgagaccaaataatgaatgtgcccaggattacatttccttctttacagatctggaccactcaaaggagaatgaccaatcaaggtcaaatggattcccttttcttagactctgtcacctgcttaaaatccttgctaggatttaatctacttcatattcaaaccttggcttgcttatatagctctttgttttgcccaccatttctagttgcctttttattttgtttactattcctccttgattatgttgtaaaatgctattagcagtgctgtttatttcgtacgattcggctttttccccactgaagacctttctcttggaaggcctctgcccttctgcaatctgggcaagtatctgctctttgatttaaggttgcatatacagctgtacctggaccttctcctcactgggctcttgggttggagcccgtgtcttaaaacccatatcttcctttcacatggtttactccctcgttttctggactgcatccttaaataatgtgctcagatagagtgcatggggagtaaactgtagtggataccgttgtcacctaccccatatccatttcttctttgcccattcctaacagaatcctgatattattcacctttctaccttattcccaacttcagaaaggatccttaagtcattccacacattgcattcctttggcaactgttactggtcaaggatggacatacgatctaagttggttcactcagactgaagggaaggacttccatggcacgttcagggaagactttctctttttctctcactggagtaagtgagaaaggtgttgctgggggctcttctgtaacctcagactgagggacaaagcctgaggataaagcctgctcaccaaggaaggcggagcagagaaacgggaagaacctgggtcttgatgccgttgcttagctggtgattgcactgtggctggggcctgtcctacctgagctagggactcagataggatggactttcttactgaatgagccagcttcagttttcttttctgttacttgtaaccaaaagcattgtaacagataggtcttctgagtcactgcatgcctgaaatacctttcttctactcttacacttgattggctgagtatagggttccaagttgaaaatcattttttctcctaactttggaggcatctcttctagtatgcagagtaacaaatgcaacaaatgcctgatgccaatcttattatggttcttttgtaggtgcccttcttttctcttccttccctggaagtttttaggatttcgtctccttatttttagtgtcctgaaatctcatgagaatatgtctagagttgtgtcttgttcactcgttgtactgtggtcattcaatctgaatacttttgtcaactcttttttttaaaaaaaaattactaatttacatgctttcattttctctatggggactactgtttaactttggacctcttatattggtcttctgtcttctctcatatttttcatttattgggcggtggggggtgctctgaattttggaagatctcctgcatttattttctttttccttttttctttttttttgaggcagagtcttgctctgtcacccaggctggagtgcagtagcctgatctcggctcactgcaacctctgccttccaggttcaagcaattctgcctctgcctcccacgtagctgggattacagacctgcaccaccacgcccggctaatttttgtatttttaatagagatggggtttcaccatgttgccaggctggtctcgaactcctgacctcaagtgatccgcccgcctcagcctcccaaagtggtgtgagccaccgcacccagcctcctgactttattttctatcccttctgttaaattctttatttcagccaaacctttttttttttttttttaacttactgtgaagcctgtgtgcctactgcctagattagacaattgttaacattttggcgtattttcctggtctgtatagatagggtgcatttttatacctttttgctcaccatttaaaaggaactcacagatgtcacgacatttcacccctaagtacttcagtatacatctcctaaaaataaggacattttccaatataagcacaataccccgatcacatctttaaaagttaacaataattctctaatgttatcaggcacccactttaaattcagatttcctccaaatgtctcttatcgctgttgaggggctccaaagcaattaagatttatacattgcatttgaatatgcttcctttgtctcttatttatttatttattttattttgagacagagtctcgctgtctcccaggctggagtgcagtggtgtgatctcagctcactgcaacctccgccttccaggttcaagcgattctcctgcctcagcctcccaaatagctgggattacaggtacgcaccaccacgcccagctaacttttttgtatttttagtagagacagggtttctactaaaccatgttggccaggctggttttgaactcctgacctcaagtgatctgcccgcctcggcctcccaaagttctaggattataggcgtgagccaccatgcccagcccctttgtctcttttaacaagaacagcctacccacctctccttcacttgtgatactgactttttgaagcagtcagcccaattgtcatctagaagggcccacattttaagatacatatttttagagatggcgtgtcactatgttgcctaggctggccttgaactcctggcctcaagtaatcctcctgcctcagcctcccaggtagctgggactacaggcttgtgccaccacgactagctggcccacattttagatgtctctcttttcttgtgatataatttaacttgtttgtccatatatattacttgtagacaagaagttaggtctacaggcatgttcaggttaaacattttgggcaagaatatttcataggcagtactgtgtacttcatatagcatcagctcaccaggcacttaatggttggttaccctgtggtttgtgatgctacgttttaacacttgattaaagaaggaggtgactgccaaatctccccattgtagacatacagttttcctgtggtaattgatatataatctgtgatgtgatgctttggcaccatacaaatatcctattgcccaacagccatttgcataattattttagcattcattgatccttgcctgaaaccattattacattgggggttgcaaaatgatagtttttttaattgtcacctcttctacatttagtactgtcattcctctgtaatgaattttccctcatcaaataaggaggcattatatttcctcctaaaaagacagtatagatgcttaatctttgcctttattacatttcagagtaaggagttggtagaataatcacctcaaatggtggcaaaatatttgctgttgtgtttccttttctctttcatgtcaatatggactcatagggatttatttattaaatgttttacaattcaaattgggtcaacaagagtcccttcatgttggttcctatattctcctggcataccctcattaattagtctttgagcaatttcttgttttctggcacaagatattccatcccaatatgtgcttttcgtgtcctagaactgattccaaggagctctggttccttatagtggcaacggtatttagaatccaacatgtgggtactaaatgtgctgattcttactggggtaacattatatctaggcactttcagaggacatcgctagaaaatatattcagtttttattttttatttttaatttttttgtagagacaaggtctcactatgttgcccaagctggtttcgaactgagctcaagcgatcctcccacctcagcctcccaaagtgctgggattacatctgtcagggcaaactgctggtaaatattttcacaaaagaaaaataaaaaaaccaaagtgctgggattacagatgtgagccactgtgccctccattttttttttaagtcataaatacataatgatgtcttctatggcaatttaacattacagggttcttccttaacttttttttttttttttcttttttttgaggcagggtcttgctctattgcccaggctggagtggtgcagtggtacaatcctaattcactgcagcttcaaatgcctaggcttcaaacaatcctcctccctcagcctcccgagtagctaagactacaggtgcatatcaccatgcccagctaatttttaaaaattttttgtagagatggggggtctcgttgcgttgcccaggctggtctcgaactcctggcctcaagtgatcctcccatctcgatttcccaaagtgctgggattacaggtgtgagccaccatgcctggccaacttttatttgatctgtatatatcttttccttacactgaaaatgttgggtcttactaatgttaacatagttacttatttgctttatcttgtaatagacataaaattacaaaattataataccaatattacgataaatagctgggcatggcggcgctcgcctgtagtcccagctactcaggaagctgaggtggagggactgcttgaacctaagagtttgaagctgcagtgagctgtggttgtgccactgtactcctacccggacaacagagtgagtggggggaaaaaaaagaaataatggaagatccagagaaagccccaaatatttaaaaattaaacaatacactttgcagcttcctcacctctctcagccttcatagaattgaagagagttagggccttgcactagattaggctttgccttaaggaaatgttgtgtttgatttgatcttttatccagaccattaaaacttccttaacgtttattagtaataaggctatttcactttcatatcatttgtgtgttcactggagtagcacttttagtttccttcaagaactttgattcacaacttggctaactttggtacaagaggcctagcttttggcttctcggctttcaacatgcctctcactaagcctgatcatttggtttttggtttaaagagaaagacatatgactcttccttttacttgaatgcttagaggccattgtagggttattaattggcctaatttcagtactgtcttgtccaagggaatagggaggcccaaggagagagagagagatgggggaacagctgattggtggagtagtcagaatatacacatttatcacttaagttttgccatcttttctttttctttttcttttttttttttgagacagtcttgctctgtcacccaggctggcatgcagtggcatgatctcagttcactgcaacctctgcctcctgggctcaagcaattctcctgcctcaacctcccgagtagctggtattacaagcgtgcgccaccatacccagctaatttttatattttttagtagagacagggtttgccatgttggccaggctggtctcgaattcctgacctcaagtgatccacccgccttggcctcccaaagtgcggggattacaggcgtaagccactgccgcctggccaagtttgccaccttttttattttttttattttttgagatggagtctcactccatcacccaggctggagtgcagtgatgcaatctcggctcactgcagtctctgcctcctggattcaagcgattctcctgcctcagcctcccgagtagctgggactacaggcatgtgccagcacgcccagcttgttttttgtatttttagtagagacggggtttcaccatgttggccaggctggtctccaactcctgacctcaggtgatctgcccggctcagcctcccaaagtgctgggattacaggcgtgagccaccccgcccggccaagtttgccatcttttatgggtgcagtttgtggtgccgcaaaatgatgatagtagtaacatcagagagcattgatcacagatcaccataacaaatataataatgagaaatttgaaacattgtgaaaattaccaaaatgtgacagagacatgaagtaagcacatgctattggaaaaatggcactggtaaacttgcttgatgcagggttgccacacaccttcaatttgttaaaaactcagtatctgcgaagtacagtaaagcaaagcacaatcaaatgaggtgcgcctgcatattacaaccaagaggcttttcgcagaaacacgagtgtgcttcaacattcaaaaatcagttggtgtaattcaccacattaagataataaaggaggccgggtgcggtggctcacacctgtaatcccagcactttcagaagccgaggtggacagatcacttgaggccaggagtttgagagcagcctggccaacatagtgaaatcctgtctctactaaaaatagaaaaattagccgggcagggtggcacgcacctttagtcccagctattcgggaggctgaggcaggtgaatccttgaaaccaagaggcggaggttgcagtaagctgagatcacgccaatgcattctagcctgggcaacagtgagacccagtatcaaaaaaaaaaaaaaaaaaaaaaaaagataataaaggagaaaaaccatatagtctattcaataaatacagaaaacgcatctgacaaaattcagtgccctttcatgataaaaattcagcagattagaaatagaggaagtgcatgtatgaaagagctacagatagattgtacttaattgtgaaatattgaacatgttaccccgaaaatcaggaaaaaggcaaagatgtccactctaaccacttctattcaacattatactagaggtcatagccagtataatgaggcaagaaaaaacataagaggcattaatatttaaaggaagtaaaactgtttctatttgtaggtaatgtcgaaaatgtgaaagaaactatcagaacctgctagaactaaaaagtgaattcagcaaggtctcagggtacgagatcattcaaaaactaatcagaaatgaaatttcaaatgcaatatcgttaggaataatttaataagaaatgtacaagatttacacgctgaaactgaaaatgttgctgaaagaaattaaagacctaaataaatggaatgttgtaccatgttcatcagctgaaagactaagtgtctttacagtgtcagttctcccttcattgaactgtagattcataaccccagtcataactgcagggttttttttgtagaaattgattgtaaaatgtatatggaagctgggcacggtggcttatgcctgtaaaccagcactttgggaggctgaggcagacagatgacttgaggtcaggaatttgagaccagcctggctaacatgacgaaaccccgtctctacaaaaaatacaaaaattagccagacatggtggcacacacctgtaatcccagctacttgggaggctgaggcatgagaatcacttgaacccggaggtggaggttgcagtgagccaagatcatgccactgcacgcccgcctgggcaacagagtgagactttgcctcaaataaataaataaataaaacgtatatggaaatgcaaaggacctagaacatccaaagtaaacttgaaagagaacaaaattaaggggcttatgtgatgtgactttatagtcatttgatttttaacagaggcaccagaacagtccggtgcgggaaaggaaagtcttttagcacgtgccggatgatggcaaatgacatccataccagacaaaaatgaaccttgaccttaccctaaatattagtttcttagagttgccacaaactaggtggcttaaaaccacagaaatttggctgggtgcggtggctgacgcctgtaatcccggcctttgggaggccgagtcgggcagatcacctgaggtcaggagtgcaagactagcctggccaacgtggtgaaactttgtctctactaaaaatacaaaaaacttagtcaggtgtagtggtgcacacatataatcccagctagccaggaggctgaggcaggagaattgcatgaacctgggaggttgcactgagccaagattgcaccactgcactccagcctgggtgacagagtgagactccgtctcaaaacaaaaccacagaaatttgctgtctcataattccagagtctagaagtccaaaatcaactgtcatcagggccatggtctctgtgaaacctgtaggggagtccttccttgcctcttcctagcttccagtggttggcaacctttggcattctttgatttgcagctgcattacttcaatatctgtcttcctcatcacacagcattctccatgtatgtctctgtctttacatggcctccttcttgtaagaacaacagtaatattggattggggcctgccctactccagtgtgacctcaccttaactaattacacctgcaacaacgctgtttccaactaaggtctcagtgtgaggtactgagggttaggacttcaacatatcttttttgggggacatagtccaacccatgacactacttcacaccatacataaaaattaattcatgagagattatagacctaaatgttttaaaagctaaaaatataaagcttctgcaagaaaacataggagaatatctgtgcagtccaaagaataaggttttttttaaacacaatttcactctgttgcccaggctggagtgcagtggtgcgatctcagctcactgcaacctctgcctcccgagttcaagcgattcccatgcctcagccttccaagtagctgggattacaggtgtgcgccaccatgcctggctaatttttgtatttttagtagaggcagggttttgccatgttggccaggctggtctcaaactcctgacctcaagtgatctgcctgcctcggcctcccaaagtgctgggattacaggtatgagccaccgtgccaggccaaaaaaagatttattaggatacatgaagcaatagctattaaaagaaaaaataaattggacttcattaaaatttaaaacttttggtcctcaaaagataccattaagaaaatgaaaagacagagctgggcgtggtgaggcttgcctgtagtcactactgggtacttgagaggctgaggcaggaggatcacttgagcccaggagttctaggccaacataggcaatatagtgagacagtgtctcttaaaaaaaaaaagaaaaagaaaaaacaaaagaaaataggctgagagctgtggctcatgcttgtaatcccagcactttgggagtacaaggcagatggattgcttgagctcaggagttcaagaccagcctgggcaacagtgaaatcccatctctacaaaagatacaaaaaattagccaaccatggtggcgtgcacccgtagtccatagtcccagctactcgggaagcagaggcaggaggattgcttgatcccaaggaggtcaaggctgcagtgagctgaggtcgcgccaccgcaccccagcctgggtgactgagtgagaccctgtctcaaagaaaatgaaaagacaagtccaccaagaaaacagttgagaccagtcatagaaaaaatagaaagtcatatctgacaaaggatttgtattcagaagaattcctataactcggtaataaaaagacaacctgatttttaaagggtgaaaatattttaatggatacttttttttttttttttgagacagagtctcactgtgtcacctaggctggagtgcagtggtgccatcatacatagctcactgcagactcgaactcctgggctcaagtggtcttcctgcctcagcctcctgcgtagctaggactacaagcacgtgccactatgcctggctaatttttaaattttttgtagacatgggctggtgtgtgtctgtgttgtctaggctggtcttgaactcctgggctcaagtgatcctcccacctctgccccccaaagtgctgggccaccacgcctggtgtggtgtcaccagagatgagccaccatgccctgcctgatacttttcttttatcatctgtttatttcttgtttatgggtgtttctgttctgattttatgactattctgtattctaagatttctctgagaatattatttgtttcctctaaggacagacttggtctctcttccatggggctggttcttgagccgccagggatggggggaggacctgggtagctgctgcgctgccccttctctgctgtggtggagtggcccgttgcctgcggggtctgtctctgaagggtggtttggagaagttctgtggaggcgaggcaggggtcagctcttgccccatggaccctcagagactgggaaaaggtaggcatcacctgggctgctgccagccacatcaagagcctttggggtgggtggggtgggggccggggaagggaaggttctagctgttgatttagaaaagacccattgatttcttgcctgagggaagaagtggcaccttgccactccaagtttgctctgctcaccagccccaacagcatcagcctcacctgggagcttattgaaggtgccctgccccaaagcttgtgggtcgggatctggcagtcagcagcccccaggtgttgcacacatgacagcactgcttgcccctcctctcgtctggtctggtctggtctggtctggtctggtctgagagcttctttggggctctgacaggtatacaggctctcatctgctctacagctctcttgtagtacattcctctctgttccattagtcaacatgttcttgcctacttccagcatctagaaatttgctgagtgtatcttatccgttcagaggtcctctcctgctattgcctctgttagaaatttcttccctttcatatgtctgtacttcggtttctttgaggtttgaagggtcaagtggcaattacatgtaggcagttggccatcctctggtgaaggctttaaagcccaggaataacaagatccattatgtctaaaactagcaaaaaccctacctgtcacatggtgaactgaattagaggtgatggggacagaagccagattggagtgagtggaaggtgagggagtggagattgggtatagacaactctctttaagaagttttgttgtgatggtgaccagaaaaataggagtggggtagagggggatgagggtgtttttcacgtgggtgaatatgagagcatgtttacatccttctgggaatggcccaggagagaggggagcgtgagaaggaggaaatggggacctggaggagcagactccttgtgtggaggggggaagcggcatctagagctgttgcaggaggtgggctttgagtaaatgcttcctctttggtaaagacggggaacgggaacggtagaagttgcacggaccctttgttaaagctcagaagctgagcgagaattagagcttaagtttatggagtagtcagaataaagtacccctaactgtattcttgcacagtgcaggaagccaggggtctgaaatcaagatgttgcagggctccattccccccagagcctctagcatggatccttccttgcctcttccagcttttggtggctgcctggcagtcctagactttccttggcttgcagttgcattgctccattctctgcttgtgtcttcacatggccttctctgtgtccccgtattcttctctggatgcttgtcactgtattaggcccaccctaaatccaggatgatctcatatcaagatccttcacttaattacagaagcaaagaccttccaaataaggtcagagccacagggtctgggggttaagacatacacctaactattcggggctaccatcgaacccctgtagaagcctgtccatttccaggatagcagagcccaaggaagggccagaagtccccccaaaacagttgtttgcattcaccagattctaagctataagcagatgggcagtggcagtcggtcctaatccatataccattggcaacaatagtttagttcactgtagacataatgagatgcttatcttctgctaagtagtcctcatggtaacagccatattactcctggctttgagtgacagcgctgtgctcttgtctggtgcccatatacttcagcagctggaaacaagacagtgctcatgattcaccggaaagtttctgtagttaaaatcaagtgatcccttgagtctattctaatatttgtctgtaccatgttctgtgacgagacatggaaacaaaacattaagaagtgaaagtatctttgattatgctcttgaagacaactttttgtttgtttgttttgtttgagacggagtttcactcttgttgcccaggctggagtgcaatggtgtgatctcggctcactgcaacctccgcattcccgggttcaagcgattctcctgcctcagcctcccaagtagccaggattacaggcatgcaccaccacgcctggctaattttttttattttagtagagacggggtttcaccatgctagtcagactggtctcaaactcctgacctcaggtgatccgcctgcctctgcctcccaaagtgccgggattacaggtgtgagccaccgtgcctggccgaagacaactttttaaagatgcatatgctctgggctgggtgtggtggctcacacctgtaatcccagcactttgggaggccaaggcgggcagatcacctgaggtcaggggttcaagaccagcctggccaacatggtgaaacaccgtctctactaaaagtataaaaattagccgggtgtggtggcgggtgcctgtaatcacagctactcaggaggctgaggcaggagaatcgcttgaaccccagaggcggaggttgcagtgaattgagactgtgccactgcactccagcctgggcgacagagtgagacttggtctcaataaataaaataaaataaagatgcatatatgctctgaaggctggctacattttattttttctcaaacaacttttacagtggatagtgctgtaaaagttgtttagctctggtcattttatcttttttgtgatctgcaaaaggagatccttttccttttcactgcctctaatacccaactccaatactcctttgacctcacaggcacttagaatccatcagtggctccatcttttctcagacttcacctccttcgtatccttattcctctcctttgtagcttcagtgccagtcagacgtcgttactccctggcacactacctcagcccttcggcactttcttgctttgttatattcagtcgacaaagccccagcctcatgaaattcagtcatgtctgccccatgcctgctccgtcctgaagctgaatgtgactccttcattgattccccctttaagttcatgtctaccccaggtaaacttcttgccgccaagcccacctgcatactgcagttccccggtctctcctagcccctcccaccctcctcatcagctgtcacacctccttgcagctgatatcttagttcccagagagcacagaagcaagctcaagagagtgtctacaggccagcgtctactccttcgctctgcctccctcatgctgtcacggagcgcctgtcccaggccctcactcctgttctaaggcatctctccagtcctctactgcactctcccccatcagagattcctccctcgcctgccctagaaacttgttgctacttctcccaccttgacaaaagctgctcccaaccccccacctgtctagcatctctgttttcctttaccagcaagactccagtccctgtctccacaccctcttcaaccttctccagttgttcctttgctgccacagctctgccaagctgctccatgaggtctccagtgatgaccttcatgttgttaaatctgggagctgcttgtcacttcttttcccagagctgtcgtcgtcagttaaccccaatacccatacgagacaatcctttccctcccttgagtctctgcactgatgtgcaccttctcagtgcaaaccacagcttttgtctctttctagctgaatacatgactgactgtgcttatcttagctgtcacccctgctggagcagaagctccacaggacaggattgtctccttgattcacagatgtagctcaagctcctagaacagtgcctggtgtctgtgggtcctcaggaagtcctaggtgagtgtgtgaatgtctgtcctcctcggtcttttctgtttcgcatgtgatgttggaaggcctcaggttcaggcttttcttctccaccctcactcccgaagtgattccgtccagcctcatggctcccaaatttatgtctccaggctgactgggtcacgggaactccttatcctccctagaccttctctttccctggtcttctcctttccagtaaacagcaactccaactcctgctcctcaggccagaaacctggcgctggttacctcatttgttcacaaatactgttactccacctgcaagatggatacaaaatctcatgagttcccctgcctccatggcccccaccctggtccaggtgtccagcttccctgcctctgcccttgccccctggttctttgtttagtcctgcaatattgtgctcttctgttcagaaccctccagtgggtccctgcttgctcagagtcacagcccaacaggatcacctctcttgccactctcccaccactcatgcactgcggcctcactggcctcctggctcctccctggaccctccaagtatgcccctgcctcaaggccttgacctctcctctgccctctgtcccaggtatcacacatgtctgctcaagtgtcaccttcccaatgtggccttccccgagcacacccatgtctgtaagtcaggcagcctgcctctgccccaccagttccccctgcctagcataggacttgtcaccatctgccacaagctgtgttactgcttggttttgtttgtgctctcccactcccttcccctccctccctctccccacccctatagaatctgagtcccatgaggacagagatttttttttttgcctcttcctcaatatatccccagtgcctagaatcatgcatattttaatttattgagtgaattaacaaataaattctgcagtgggacattgctctaaggttttgtcttataagagggacagaagaacatgcagcctgctctgctgttggctccttagcttctccatggctaacaggaacaatattgtttatgagataatcaaagccatagtcatgagttagaaggtacatataaaggcaaatatgtggagattgagttactttggcgggggcggaggggtgtgtagttatctgaaaacatggaacaaatcaatgagagtctaaatagcacccacatatttgcccctcttttaaaacatacctcctttatgagtgtagaatttaacagcacagtttcccagtgcagctttgcgaaacaagagaaatgaattttaaaggctgtcaggtgcctttgcaatctgtggcttagtatttgtgtaacaacatttgtgttttgccaacagatgtactgcttaaagtacccatgagaatggcctctgtggttttctactttctcggatggaaccttaggaactgattattgagaagaggctgatactgcccacctcagctcccaggcaggcttcagggccttggttactactcctttgggccctcactgacccttgcagacgtcttttgcaacctctgtagccagaagagacaactgctttctggcatgttgctctttccctaatggctttatgagcttcttgaacaccaaagcatgtgtgacttcctcacgccttcccctgtatagtatagcacccctaactgtatgtgtaaggagaaggagtgagcaattgatggcgtccccctggatctccaagggaatgggaaggggcagggtttctggattcagtcatgtggaatctggtcgttggtgtctaaatgtgcctgttacttgtgcccaatgtccaggttcaccaggaggcttagcctgctcatttccctgctagtagctatattttgggagagcattttttatgctctaattgaactttgtgggtctcagcaatttgaacaatgttttgtttttcttctggtcaggttacaaaggaaagaaaaggaatctggtgttgtaggaggtggtgtgttgtgtaattacttgttttttttttttaagtttttttatatttttgcaacaaggcaagttttctttgaataaataatgctgggagcttatcacatagaaggcatatgtgttgtactcagtacattctgaattatctgggtttatttttatctcttgaattcacttataaacaattcaaaggctgcttttttagctaacagaaataggaagagaatctcagaatctgttttgtcattttttcaatgggttgagttatagtgattatgctaactcggtggaaaagcagtgtagtgagtaaaccccacatacggcatatcatgaacattttgttgcttttttggcttctgaccatcttcatacctttttttgtgttaaaagtctccccattgtgtatatcttagtaagaggcaggtggaccctagtttctacctaagaaaacctgaagatggggttgggggcctgtggtgtacttccttctcatgctgtccatgaccactgcagtggctttgtaaggatccaggacccagggcccctcagtgggtgtcttccatttctcaagattgcctcttggttgtgagatgacggttgctgctctagtcattgcatccactcctccaggtaggaagaaagaggtcataggggaaaggcaaaatggcacttgacatcttaacttctaggcccattcaatatttccatttccatcttcacacccatcatcttgtcctagggaacaaacagcaccagcagctcagtagctataacagcaattattatttctcacacatgggtctgggtcagctgcaagatgggattcagatctgttctcaagcctgtcgttccaggacccaggagggagaagcagctgccaggggaagtctcttcgtaggcggaggtcaggagtccaagaggagtgagcagagtcacagaagcctcttaaagcctcttcttcccccatcccatcaacacgtgagcaagcccagagtcagtgggtgggaggtgtgctccgcccatagtcagtagaacaagagcaagcttgaaagagaacgatgaacaggagtgcactcggccactgtctccttagccataacgtagtcccatggtctgctgggaagcggggaataactctccttagctgagcgcagggtctcattagtaaggcagatggagaacatggatgttgggggacaactggcagtgcctgccacaggggaatggatatattccctccccttgctctctggaaactaggggatggcgatgaagcctaggtttggccaaacccattctgccttcagggactttgactcttgagggacagtgagggattagtcatggtggtggcagttgagtcacaaaaccagcagtggtggctaatgtccagtgatgacatgcaacagtgcccagggtgggtgtcccaaccagcaggtccctgcagtataaccttggctgtgtttgcagtggtgcagcctctattcctgctgcttttctgagcctagttctctagttctctctccatttccagatctgctgcccaagaactcctttgtgattgaatttaaccagagttgatttctgttgcttgaaactcaggaccttgatgcagtgtgcagggtctgggcaaggtaaaaacacactttcatgatttcgcctcaagtatagtagatgagcttaggctttttgagccaggtagccttgggattaattctcagctcttgcacctagcaggtgacctcagcaatcaagtcacttgccctccttgagcctcagtgttgccctcagttaaacattgctctcgtgtgttgctgagcattcagtgagattgtatataaagtgatcattgtgaaggtattgggacataatttgggaaagcgtcctggtctaagcttttgattggctctccatcatttgggtaatgggatagtgatttaggagtatcatagcagctcaaggggcccttctggaaagggtatgaggaaggtcagggacaagtctgaaatgaatcatcctaggcttaatgcctgtgactgggcagtgggtacaattatctcaggctagtcagtagtcatttattgtgagaatacatgggcagattttttaatttccttctcagtctagacttgaatgcaaacagttcttattgctaacttaccactagtcaccactaatgaacaaagactatgaacaggaaattcataaaagaagagatacagatggccaatgaagataggaaaagagttctgcctgctggtaatcaaagagatgcaaacgagaacaaaaatgatgccttttcacctaccaaatttgtcaagattaaaaagaaagcaaagagccagcgtcagctgatgttcatacctgcacctgctcggtagcttgctaatgttctgcctgctccacacgccaggccagcctccacggcgcagccaggtgaggcctttccttgtatacaggcacgtttggattcactgttgcataagtgagacatgtgcatgcttcacaattcaggaagtgcaaactccagagtgatgcaaggtctgagtgtccctgctgccctggtctcccagctgcctaggcctctcttcagggaacggctgcatccagggtcttgtctgtgtcttttgaggtgttctatgtacacgcagacacatctaaacctatttttattttccctgcacctgcttgggctactgtaagctgttaaatttttttttctaggaatttgtccattttgtctgactagcataaagttgttcatgttatagtttatacatttgcaacatctgtaattatgtctgctttttcattcctagtgtttgttgtttacttgtaccttctcccgtttttccttgtcttggtaaaagctcattaggttcattggtcttacaagaagcagacatgtaggcattattgccctgtattactctgtgtctcttttctagttcattaaattctgcttttgcttttatctttattattttttctatggtcttagagtacattctctgtgttttgttgttgttgttgttgttgtttgttttttgttttgagagagagagtcttgctctgtcgcccaggctggagtgcagtagtgcaatctcagctcactgcaacctccacctcctgggttcaagtgattctcgtgcctcaacctcccgagtagctgagatttacaggcatttgccccacacccggcaaattttttgtatttttagtagagatggggttttggcatgttgaccaggcgggtctcgaactgctgacgccaggtgctccacccgccttggcctcccaaagtgctgggattacaggcatgagccaccacgcctggccctaacttcttaagttataaatttggttcattgatttttctacccttttttcaaatgtaaacatttaaggctaaccctctggaactacttcaactgtatctagcaagttctgatagtattgtcactttaagttagcccaaagatattttaaattttctttgtttcttcctttgactcacatattattttaaaatgtgtttttcaatttccaagcacatggctttgggtttgttttttttttttcctagttgctctagaaaaaaaaattgactgcatgaggtggctcatgcctgtaatcccagcactttgggaggccgaggcgggcagatcacctgaggtcaggagttcgagaccagcctggccaacatgccaaaacctcgtctctactaaaaatacaaaattagccgggcatggtggcacacacctgtagttccagctactcgggaggctgaggcaggagaatcacttgaaccgggaggcagtggtcacagtgagccaagattgtgccagtgtactccagcctgggcaacaagagcaatactccgtctcaaaaaaaaaaaagaaaaaaagaaaaaatcaacttctaactaaatggcactgtgatcaaagaacttggtctgtgtgacaccagttcttgcagttggttgagaagtgctccatgacacattatccacaaccagtggacagaatatgtcaccaccaagcatgggtgcaggattctacatatattcattacctctgtcttatccgtttgttgtgaaagtattttctcttcttactgtcattttgtttacttgatttatcaactgatggaatacgtgttaaaacctactgtggtgatggacacatcagtttctccacagagtttggtcattttcattttattatttattttgaggccacattttcagttttagatacagtttcacattcctggtgtattgaaccctttggtattatgaagcgaccatactaatatgttatttttttttaaattattatttattttatttatttttctttcttttttttttttttgagacagggtctccctctgtcacccagtctggagtgcagtggtgcaatctcagctcactgcaacctccgcctcctgggctcaagtggtcctcccacctcagcctcctgagtagctgggattacaggcttgcaccagcgcgcctggctaagtttttgtatttttagtagagacagggttttgccatgttgcccagactggtctcaaactcctgggctcaagcagttcaccagccttggcctctaaaagtgttgggattacaggtgtgagccaccacgcccggccatcccagttttttattttcctcctttctgtgtctttatgcatcagtgaggtggagcttttgaaaatgtcagatagctagattttttttttttgagacggagttttgctcttgttgcccaggctggagtgcaatggcgtgatctcggctcactgcaacctccacctcccaggttcaaaacaattctcctgccgcagcctcctgagtagctgggactacaggcacgtgccaccacacccggctaattttgtatttttagtagagatgtggtttcaccatgttggccaggctggtctcaaactcctcacctcagctgatcacccgcctcagcctcccaaagtgttggaattacagacgtgagccaccatgcccagctgatagctagattttttttttttttttttttttgagacggagtcttgctctgtcgcccaggctggagtgcggtggcgcgatctcggctcactgcaagctccgccccccgggttcatgccattctcctgcttcagcctccagagtagctgggactacaggtgcccgccaccacgcgtggctgattttttttttttttttttttttgtatttttagtagagacggggtttcaccgtgtcagccaggatggtctcgatctcctgacctcgtgatccgcccgcctcagcctcccaaagtgctgggattacaggcgtgagccaccgcacccggcctcgagattttttaaaaaatccattgtctgtttcgtcctttaacatctatttgatttctgatgtatttagattcatttatagcatatttgtgcattctatttttccatattttctgttcttttaaattttccttctcctttcttgccttctcttagacttttaaaaaaattgtagtaaaatacacatcacctaaaatttaccatttttaaatgtacagttcagtggcattaaatacaaattggaggccaggcatggtggctcatgcctggaatcccagcactttgagaggctgaggtgggaggattgcttgaacctggaggtcgaggttgcagtgaggtgtgatcacactactgctatagcccaggcaacagagtgagaacctatctaaaaaaacaaacaaacaaacaaacaaacagattggcatcacacagtgtgtgtgctgctgtgctgtgctgttatcatttaacattaaaacataaacatcagcactgttatggactgaatgtttgtgtcccccaaaattccagtgttgaagctcaaacctccaatgtgatgttatttggagatggggtatttgagaggtggttaggtttagatgaaatcaggagggagggtgggtttcgcatgatgagattagtgtccttataacaagagacagcagagagcttgctttctccaccatgtgagtatgcaatgagaaggcagccatctccaagtcagaaagagagccctcaccaggggctgaatgtgctgacaccttgatcttggacttctagcctccagaactgtgagaaatttcagttgaataggccccccagtctgtactattttgttatagcttgagcagactaatacacccatgttatgaaaagctataaacatccctttaaaggccacctaacgcgtcgtattacctcatgcatcttctctgctgagctttccaaaagagtggcttaggctgggcctggtggctcatgcctgtaatcccagcactttgggaggccaaggcaggtggatcacctgaggtcaggagttcaagaccagcctgaccaacatggagaaatcccgtccctactaaaaatacaaaattagctgggcgtggtggcgcatgcctgtaatcccagctacttgggaggctgagccaggagaatcacttgaacctgggagatggagggtgcagtgagccgagatcgtgccattgcattccagcccggccaacaagagcgaaactccatctcaaaaaaaaagagtggctggccgggcgcagtggctcacgcctgtaatccccgcactgtgggaggccgaggtgggtggatcacgaggtcaggagttcaaaaccagcctggccgagatggtgaaaccccgtctctactaaaaatagaaaaactagccaggcgcagtggcaggcgcctgtaatcccagctacttgggtggctgaggcaggagaatcgcttgaacctggggggcggaggttgcagtgagccaagatggtgccactgcactccagcctgggtgacacagtgagaccccgtctcaaaaaaaaaaaaaaaaaaaaaaaaagtggcgtatgttcccggtctccacctctcattcgccagcccctgtgaccaaacccctgggattagatctccatcgggtccctcccctcaccctaacctcacatgcagtggttcctgagaagctgctgtttatctgatcacgggatccagcaggatctgagggctcattcactgaatctgtactacccaacaaggcaggcttgtccttacccacacttttcaggtgaaaacttaatcagattcaagcgtttatcttagtggcctcttcgtggtgtgtgatttccttcttgcagctctttactggctaaaactcttcactgggagttaaaccaggtgtggtccttgaccctcatcattttgtcccatctcctatgctgggctctgtatccttgtctccaagcagtctcgtgtgacagggaagttacctattattgtatggtcccctcttcttgtcacctctggtgtggcacttgttccatttcttgttcaatgaatgtgatttgtgaatgtgccacatctgtgggaggaaggcagttcgcagcaagagttgtagttcccttgctttgccctgagggccaggactttacactagatttttttgttgcattcctgcactcataaagtacacgtaaacttagaggtggtgtgttaaatgctagaacttaaaactgagttcagctaggctcaagtgccccacaatttttgtcccaccagacaatttcatgaatatctacagattgttccctcaatatgcctcaatattgaggcatattgatttggggagcacagacaagtcaaggttgatgtgcatccgctgaacatgatcttaagttgttgaagtaggtattattaatgaacgaacgtctattttagctccaagagcccctggtcttccagaagagactcccaatgatcttccagaagcagctgggcttcttttggtcctcccccacccaggtgcagtcccgttctccctgcctgggtgagtttgattcctctgccgtggaataggctaggctgctacctcttgagcctcttccaccaggccatccattaggtggcgacagagagcactaaaaggaactactatggaaataaaacttgttttgcttcttggggggaaaaaaaaagaaaaaggcttgtggggcgtgtgtgcattttagtcagattttactgtgcaaaacatttgagagatttctgccctctttctcccttccattcttctcaacccactgggcgccctaccacccctgtctccttcaagataaggtagatcagaagaccaaatagacaaatgccatgtccactgttttctgtcacagttgatagccataccagtcacccaagctggaaacccaacaggcccctgcccttcactgcccacatccaagggagccaccaagtcccacaaattgttcctttaactgtttgtccctcttttgtcttctgtcatcccttctaccgctgtcctggttcaatccctcatcttgctctgggactcccatgataacttatgatctttcctccacctctctatcttccacacaatccctatcatcaatctcattcccctgctttaaacccaagagtggcaccctgtgtttgagtgacatcagggcccctcatgtggctcctgcttctctttgtggccccttctgttgctgctgcttttcttatggacatagccctcagcagtccaggactgcttgtagttcctcccaggtaccatgtttcttgcactcctggcctttgtcattggctcccctgcccaagtccccttctcttctcctttccttcccctgtggccttgccttgtcgtgcttatccttgaagaccctgtcaggtatctcttccccaaagagccctgcctaaccaccgcccccctcccccccgcgacacacacacctgggttaggccctgcctctccacgcctgtgcctcctgccaagtcctcagaggtctctgatcccatgtgcctccaggcatggcatagggggactgtgacacagcctctcggcccacagacccctgattgtgggcttgctcactgccccagtcagtcctcttattgaggattccgtgccagttcctgactccagcacacacacgcatgtaggccgccctcctagtgcctggctccttccctgtctcttctgccactcattcccatggtcgtatcctggagttggtcatctctggaactccacccacggagttctaacttagctctgcctatgatgaggacttactgtcttcccagcttgcagtgtcaaccactgtttgatgcccctgggactccattggtcttccctcctcttgtgaactgtgcccatcaccagacgaacttgttttagaatttaccatcgtaactgagctcccttcagcgcatacctccttggctcctgctcagtctctgtttctccttttagccaaactctctaagagttctctccactcatgggccctcttccttgcctgctgctccttgctcagcttgctccatgaacacttgcttttccacattccatgaaataatcttaacagtcatcagtggctgtcactccttctcagccctttccttgtgtctcttctggtacctcatactctccaggtggccatctcacctcacatcttgaaccctctgggtttgggagaattctcacctcacgagttgatgggaggcctggcgacctctgattgtagtcactgcaaatgccagatgcttatttgcctagcttccctttcggtcagggcagcagttggcaaacggtatctcaagggccaagtccggcccactgcctgttttcgtaaatgaagctttaccaggacccagttccaccccgtcctttgtgcattgtccaagactgctctcctgtacaacagcaggtgggctggttgtgacagatactgtctggcccacaaggtggaaaatactatctggccccttacagaaagaaattacctgagttctacacgagggtgtaggtatgtaccctggcctctgccagtcagactcacatgctaggaggagcagggccaggcaggagagccgtgtctcctggcattggggctgcaggaaagacgagctcctaggccacagtgccagtggccagtgctgctgccttgcagggtcgcacaggcagtgctggctgtttggactggcttggcagaaggatttgaagtattgttcctagccaactggactcaaacctgttcctccaaccctctagggattctcttatcacccagtagccttttccccctagttttaaaaattgcagtaaaatacacaaaagataaaatgtactgccttaaccatttttaagtgtacaattctgtggtattgagcacatttatattgtgcaaccatcaccacatgcatcttcaatagcttttcatcagtccttgtctgcataaatcagctagagttggtttctattgattgccaccaataatcttgacagatatgtctgatcttccttctctgcactgactcctctttctctgtctcctctgctgattctttctcctcatcacaactccaaatagcagggggagggttgtttacacttatattcagcacgccctcacgcactcgcctggctcttcagacctctcccctgaactccagattcatacatccagctgccctttaggcctctagaaagctaaatacctcagtatcaaaaacatgagaaacggaagccagagtcctggatctctcgccctttcgctgtcccggtgcccatgcccttcagggatggcacctagaccagctccctgcatccctgcctagactctgcagtagtctcacgtggcagacccggaggtcactctcctctctggatgccctgcggacactccggttagcctcagctgcaagagcctcctcacccaaggtcacgccatttccaggacagcaccctggtgactgagcgaggtaagggtacaaggcccttatagggccttctctttgacttcttcccacctccctttatggatgtcagttcctgatgaacatcttacacctcaaaccgtgacccaacatctgcttctgcagagcccccctgtggcatcttgtgccctcctgccccactccctctactctatatcttcccatagttagaatgggctttttttttttttttttgagataaggtctccctttgtcacccaggctggaatgcaatggcacagtcacgactcactgcagcctcaacctcctgggctcaagcagtcctcccacctcagcctcccaagtagctgagactacaggtatgcaccaccacacctggctaatttttatattttttgtagagactggggtctccctatgttgcccgggctggtctcgaactcccaggctcaagcaatcctcccgccttggcctcccaaaatgcaggattacaggcgtgtaccagtgtgcccagcctcagatgggctctttgaaaaatgtttattagatcaggttactcccttgagaaaaaccctctcagaataaaacccgaagtccattacttgaaagcagagccagcttcatgggcctttgtaactgcccatgggcttgctggaacccaggcttggtttaatactctactctcaccatctcaaaattcttaatttttgaacaagaggccctgcattttcattttgcaccaggctccacaaattgtgtaactgggcctgcctcagcagccacatggaacatgatccctccttgcctatttgagctcattctctaccattctctcccttgctcacctggctcccactgctcttgctcttcctggaacttgccataatgttgctagagtcagagccttggctcttgctgctcctcattggctggacccctctttacttgacctgctccctcaccactcacttccttcagatctgtgttcagatttcgtcttctcagagaggcttttggcccctgtccatctctctgaatttacctctgacctctcccccaccaccactgcgctaagctgcctcagaactttgtagacattctgtctggtcttctgatgtttcccccttggaagaatcccaaggtgcctgaagaatgctttctttatccttgaagttgagtaggttgactagagtctggcttgctattgagcattctttatcaaattgtcctgggaacatggtgtattctttcagtctgcagatgtagtcgttgctgtttcaggtcagctctcttatggatctttgacagcatcttctgttccatttgttgagttctgtacttcagggacacaaattcctcatgttggattgtctttgtctctcttccaatgctattagctttgccgtaattggtttagcttttgtctttttcatctgcattcactttgtctaatttgattttcagctatgtatattctgtttctggctgtttttcaatgtatttattagtttcataatgatgtgttttggtctgcagtttgtttctctaggttggaaatttgtcttttcatcttattctgttttatcatcccatctttgaactcttttattgggaacatgttcttatgaagttgtggggaatttttttcccttccttgtgtattctcttcttggtgggagactttgcctttctcgtgccatctccctccctgggcctcttttttttcttctggccataatatgtttgcctagttaccatgtcacttcttttcgtcttggctcaggcttggatggctctgcatagtcgttctgtttgctttgagacagtggaggaattcttggctctctcttcccagtttcttggcatcttctcttgctgttttcccctctgagctatcgcgtgcaggcttgttatcttgtatccggagagaatttgcacgctggagggagctgcagccatgtagtcttcagccctatctggattcttctctttgttctaagaactgtgttggatgtcttactaaggctcactctagctgcacgagggatgtgtgtgccatttccatggggatagggggcacctcagtctctgggtggttccataatctgtgtatacctaagagcagttgcttcccacagagctgggctggctcactgggcactttgccatttctcctgcacctcccagctggagtttctgggtctaaaaggaaaaagtgaaggactcccacttggttgcttctctccagcttactgactgcaaattcccagggcgttgcccgctccctagggtggtttctgggggacggggcaggagcctggctttgctgctgctttgtcctctggagtcttttctcagactgctttgaattacacccctttcctttgtgtgctgaaatcttcccttcacactctccttccctgcctttcttttgtgtcttatcttactaggactggaagagggcagttgtgcaggaggtctgcatctaattccctaatccatgtgagagtgctcctgttgtgtgctttgtgacatgatggtgagaaatactccctagagcagtggctaccagaaggaagccatccccccccctgcacacacacacacacacacacacacacacacacacacacacacacactccttctggctgtcctcagatgcctattctaggtaaatgtcagattccaaagaaaatccagttgagatcttttttctttttttgagacgagagtcttgctgtgttgcccaggctggagtgcagtggcacaatctcggctcactgtaacctccgcctcctgggttcaagcgattctcctgcctcagcctcccaagtagctgggactacaggcgcgcaccaccacaccaggctaaaatttttttgtatttttagtagagacagggtttcactgtgttggccaggctggtctcgaactcctgacctcgtgttctgcccgcctcagcctcccagagtgctgggattacaggcttgagccatcgcgcccggcctccagttgggatcttgactggaatgactggtgttcaatcattatagtttccacctaatttgtatttgtacacaggacagttactaatttgttggtacttgtttgatccccagtccctagagttgtttatggggtggagcttcagtccctgctgcttcccctgtggcagcagctggagtcagggtggggacccagggtgctgctggcagattcttgagacaggtagaatctcctctatattggtgtctctctctgtcccagcagtgcccaggaaaacctggccagcctgtcactgacctctccacctagggcactggtggttcaggtccttctatttgccaccggcaaaccgtacttctgccagtctggctcttaggcccagtttctctgatcttgcagattttcttgggctctgctacggaatcctcatacctccggcaggtccctcctttgcccatgtgtttaactgtggtggaatcgtgtgagagctgcttctctcgcatggatcccagccacaccacattctacagcggttcctctgaaggcattgatagagatatttcctcctgttttgcatttcgttggtcatttcagtagaatcagggtgaaataaacatgggggctcagatgtcagcattacgaaccaagtacgtcaggcaggctgatgtggactgacctacactagtgagacgcaagatgacgaaaacaagggcactcactccaagttactgatgagatgtttggatcaaatgagccagtccttaagcagagttctctagtaaaagagatctcctttctgccctttcttgttccccaaaatgtgttgccttcatggtgaaaatttattttggcagattttctcttctttgataaaagcagccaacactttgttaaaagtctgtgaaacttatttacatgaagtatgtaaaggtaagaaaaaaacattatcaacaagaaatggagaaagccagcagctgaggacagaaaagtcatgcacagtgtcagtgtctatggaaacaggccacttggaccttgaggactaggtatttggaattggaggtgagcttggcctggtgagtctctaaccacttgtgtgtaggatcagtgtgagaaccctgctagaatatagtggcagagatgcaaggggaaatcattggagaagttaccagggaatgatgagctaatctgaaaaaaatacatgtttctaagttgggcgtggtagctcatctgtagtcccagctacttgagagcctgaggcaggaggatcgcttgagcccagcctgggcagcacagcgagaccctatctccctaaaaaaaactttttcgttgtttagttttgggatttttttttttcctggtcttttttccccctttttgtgaataacgggatctcactatgttgcccaggcagatctcgaactcctgggcccaagcaatcctcctgcctctgccttcctaagattacaggtatgagccactgtgttaagcaaaaaaacttttttaaatgaaaatcattttttaaaagacaggctttccaggggagggtattattccacttatatgaagtgtcaacagtaggcagatttgtggagacaaatagattagtggttaccaggggctgagaggagtgggagtggggagcaactgcttaatgggtaaagggttgtctttggaactagagagtagtgatggtcgcatgacattgtgaatgtactaaatgctattaatgataaattttatgttatgtgtattttaccacaattaaaaaaaaaagatcaaatgtcctcagaatagccaacaaccttccacttggctaaatgcctactcattaaacttcttgaactaaattcctttctgattgtcatggttattgtgtcctgggcttcagagtttcacattcaggttggcttggtccagtctgtcatgtatcactataggtccccacattggcctcttcctcagacggacagcccatctatctgccggggctctgtgccacagccagatagacttgctctgagacagctgtgtgggctctgagcactggccaggcatcacaaaacctatctttatgatttagaataattggtggtcagctgctgttttaatgttgttgttttttttaatttagatataattcacataccatgaaatttactcatttaaagtgtacaattcattcttcagtataattcataggctcacagaaaaaattgtttaaaaataaaatgtgcaattcagtgtcttttagtacattcacagagttgtgcaaccatcgcctctgtgtcattccagaacactttcagcacccaaaagaaaccccagacacaggagcagtcacctcttattacccgcagcccctggcaacaactcatccacttcctgtctctatggatttgcctattctggacatttcctataaatggaattatgcactatttggccttttgtgtctggcctctttcactgagcgtaatgtcctcaaggttcatctgcattgtagcatgtgtcagaatttctttcctttttgaggctgaatgatattatatcctatagataatgaggttttgattatccacccatcccttgggaatgcatatttgggttgcccccaccatttggctgttgtaaactgtgctgccatgaacactggtgtacggatatctgtttggttactggttttggttttttgtttgtttgttttggttttttgagacaaggtcttgctctgtcgcccaggctggattacagtggcacgatctctgctcactgcaacctccacctcccaggttcaagcaattctcctgcctcagtctcctgagtagctgggactacaggtagcactcaccaccatgcccggctaaatttttttgtatttttagtagagacaaggtttcgccatattggccaggctggtctcaaactcctgacctcaggtgatccacccacctcagcctcccaaagtgctgggattacagacgtgagccaccgcacccggcatagttgtggctttttgagagtgtatggctaggagtaaaattgccaggtcatatggtaactccatgtttaacatttgagaaactgccaaactgttctccacagcaggaattttttaacctgtatgtggtgggcttgtgtttcggttttcattttacacatctataaagatgagatttgctgtatggcactggttgcctgtatttggggagggttctgcttttggttggcaagaactgcattttatttaagcttagcaaaacataactggtttctcgcatcttctcaaaagtggaggattaagaaatggactgcgaattcagagcagggcagctgaacctcaggctccacccttgtagccttcaagctgaacctcattctctcttgctccctggagaccactgagacactctgcctgtgccagtttgatttctcacatttttaaagggccaaagcttgtgtctcaaagtgctatagcctttattgattcatgcagagaagcctccttgattccgtaattctgcagctaatactggaagtagaaagaattggaaacaccatctggatgacactttagggtggaagcagccagtacaagggggggctcattatttcctctggtcccagactgttcacctggagctgtagccaccaccctgcccttaggttaactgcctcgagtggtagtttagctctttgtgctgtgccgagggataactggaagtgaaaggtgctgagaaatgccatctcctgaaagtggcgagcatgagtgaatttacgaaaggttgggatattgctggggctctggaagtttctctggagctcactccaggggacagggagggggctggattccaattcaagtgaaaaatacctttcatctgccttgttcacctggcttttttgcctttttgtaaaatctgaaaacctcagggattgagtagtctttccttaactgcagttgcctgtctggccacacctgccagctgttgcttgtacccctgtaatttgcacggccttccgggcctttctcacaagatcactgcaggtcacattcatgaggaaaatgcaggcagttcctgccatcagacccctcaggatgtcatggtttggcctgaaaacaagattcctgcaactctaattttcctttgctagatcaaatgaaggatttgatctaatgtttgcattctagcagcaaaatcattgaatattttatttcttaagagccttacttcatattttgtaggtattttaagattttgtaaaggcctttctgcttcaacgtgtgatgtgtgcattcttagaaaaagatcttgtgttctgtaaatcacacaataaaaacatgagttcgtgcaggaaaaactggggcggggtggatcactccaaacttgtgtggtgtggtaactggagctcactgatgaaaccatgaacagttctggctgaaagaaccccacagtacactgaggtctgttggcatcgccgccagcaccgccccggtccctttgtgcgcgccaccacacctggctaattttttatttttagtagagagggggtttcaccatgttggtcaggatggcctcgaactgacctcgtgatccgcccacctcagcctcccaaagtgctgggattacaggtgtgagcctccgtgcccagccttcagctttttttcttaatgtctttgtgtaatatgaaggcattctctttaattgttaaaaagcttgcctaccactgcttcaaaatattactgtcagttggcatagcttctgattatattgatgtcatctcccttcttttaaacatgttaccatattggcactgtatttcccctagcccattgatcacttgagagttagtcatagtcctcgtgctgtttcactcctaaacgtttaagcatgcctttcctaagagcagacagtacagttaagacactcaggaagtttagcaatgagctaacacagaaccttacatttctccacataccccataaatgccttttttagagcctttgagcctggaatgcagagtccaggactgtgtgttgtattcgattgtgtcatcccttcagtctcctttatcagaaatgttcccccacccccttgttttctctcatcatcttgagtccagaccgtggttgcatggcacgccctctctggactcttcctgctgtctcctcacggtaagcttcagtctcctactcgtgatgctggttcatctcagcagcactgaggggcctgagctcagtttggtcgtgtgttaaggtggtgcctgccagatttctccacagaaaagggccccgtacttttatttgctcttcagcctgtgtattccttcctttcttgccagcttgtgggtggcttctctagcagcttctgtaagatactcagtttggcagttgtagttgtttcagcaggagaggtgtctgcatacctgaccaccacatggctagaagtcgatccatcctctggcgtaaccatcctccatgctactgtccctggggcactgaggccctcctcagtgacttcctccacctcatcttccgccatctccaagccaccagtgtccaacggactactgatatgtcccaaactcatcatttgtttattcaccaattcagagcccacctttttttcagcactgagctagcctctccttgctagaagcttacggtcgaaggtctccagccatcagaagaagcacgtggagcgctgcgtccgtgttgtggttattcatccagcatgtgttgagtaagggttgcacctgtgcctggcattatgcattgagcggggagatgggggttggcacgcacagtggggtgttctaagtacactgagggctcgggtgccctggctcatagagcagggagggaggcaggagcagggaaggtgtctcagaagtgccatctttttttttttttttttgggaagtggaatcttgttctatcgcctggtctggagtgcaatggcactatctcaactcactgcagcctccgcctcccaggttcaagcgattctcatgcctcagtccccgagtagctgggaccacaggcgcacaccaccacacccggcaaatattttgtatttttagtagaggcggagttttgccatgttggccaggctggtcttaaactcctggcctcaagtgatctgctcacctcggcctcctaaggtgttgggattacaggcatgagccactgcgcccggtctagaagtgccatcctaactgaacctgaaagatgaaagttctccagatgaacctgaaagttctccaaatgaaaaggtgggagggggtgacagggttaggcccagagcctctggtgacacagggtgggcatcattggtcactttttcctcgagggaggggcgtcacacgggtgatagggtgggagctataaccatgttgatagtgccgcctctgcccatctggcctggcatgccctgagccctctgtcccacctgtggaactcataagccctgacagcccactcactcctgattcattatccacacccctgtgcttccgctgtgcctggagcaagctttcttcagggggaagggaggctggaactatgttgtagttacctatttgtcctcccttccaaactgtgagttcttggaggtggaaggatgctgcaggatctggctcaggacgaaggcagttggtgaacagacacgtgtgtttttgactcacggtgatctcagacaagttcctctgtctagtcgaacttctttttttccatctgtaacactcaggagttgaataggtggtttttctgaggatacttcaactgtaaaatgtatgaacttgtgaactagctatttagttctcctcataatcaagattgtgtgtgtgtggggggttctgattagagggaggatgaagagaggtgtatggggttttttttgttttgttttctgtttgtttgtttgtttttgagatggagtctcactctgtcacccaggctggagtgcagtggcacgatttcggttcactgcaacctctgcctcctgggttcaagtgattctcctgcctcagcctcctgagtaactgggattacaggcatgcaccaccatgcccagctaatttttgtatttttaatagagatggggttttcgccatgttggccaggctggtctcgaactcctgacctcaggtgatccacctgcctcggcctcccaaagtgctgggattataggcatgagccaccacacctggcaggtttctttgaaaaagtttgtgtttcggcaaacaccataaaccccctgggggacagccttggggagtcacctggcaccctagcccagcctccctcccttgggtcctgcagtgaaggcttagtgagggtgtgcaaatgcccaggtcaccctgggactgggcaggccctctgggctaagggtaaactcatttggaatacctgttttctatcattgttttttatttgttaaatttaaagggtacaagtgcagttttgttgcgtggatatattgtatagtagtgaagtctgagctttcagtgtaaccatcacctgaatagtggacattgtacccgttaagtaatgtctcatccctcaccccctcccacccttcccagtctctccagtgtctgccattcctcactctgtccatgtgcacatgctattcagctcctgcttctaagtgagaacgtacggtatttgactttctgtgtctgagctgtgtcactgaagacaatggactccagctccatccacgttttttatcatttttacctgcactccacacccagcacaatccaggcttctttgtgggttttttgaaatttgtctttaattataaaagtagcagccagcaaattaacaaacacccatgtgcctttcattgcacagaattgaaaatcatcatactatatttgcttcaagtaatttccattagaaagaactagaatattacagtagagttaaagaccctttatttcccatcttcagtgctcttaaaagttcatttagggccaggcatggtggctcacacctataatcccagcactttgagaggcccaggtgggtggatcacctgaggtcaggagttcaagaccagcctggccaacatggcgaaaccccatctctactaaaaatacaaaaattagctgggcgtggtggtgcgcatctgtaatctcagctactcgggaggctgaggcaggagaatcgcttgaactcaggagggaggcagagcctgtatgcagtaagccgagattgcgccaccacaccccagcatgggtgacagagcaagactccgtctcaaaaaaaaaaaaaaaaaagttcattcattgtacacttagaaatagttaaaaaggtaaactttgttttgtgtgtgtgtgtatatatatatatatatatatatatatatatatatatatatatgtatttttttttgagacatatatgtgtctggtttgttcgcccaggcaggagtgcagtggcatgatcaacggctcactgcagcctcaacttcctaggctcaagtgatcctcctgcctcagcctcccgagtagctaggattacaggcacacaccaccatgcccagctaattttttttttttttttttttttttgtagagacagggttttgctatgttgcccaggctggtctcaaactcctgagctcaagcgatccacctgcctcacctcccaaagtgctgggattacaagtgtaagccaccacacctgacctgttttgtatattttaccacaataaaaagcctttaaaaccccaagcagacagttcattttcattcaggcccaactcagaatctgatcacagcggggtttcccccctttctagcgagtagctgaagaactgttttctctccttgatggtataactgtctctgtgggtgttgctcccctgccgctccagtggttttgtttttgtttttgtttttttgagacggagtcttgcgatctcagctcactgcgacctctgcctcctgggttcaggcgattcttctccctcagccttccatgtagctgggacttacaggcacctgccaccacgcccggctcatttttgtatttttagtagagacggagtttcaccatgttggccaggttgggctcgaactccagacctcaggtgatccacctgcctcagcctcccacagtgctgggattacaggtgagagccactgcacccagccggcccctcagtcttttccttctcaatcagtggcaccaccatcttcccaggctttggacatggtccctgactcacccttgcccctcacccccacactaatccacctgcgagctctgttgcttcaccacctagaccagccccaaatcctcaactgcccccaccctgggccacacctggaccactgctagaggcctctcatgggccctccctgtttttctcttgcactccccgggctttctggcacaagatgccccagaagcagaatcacatatctctcctgggagccaatctagtgtgtttactgcccctggagtgttattgttggccttagaatatgtcccactacaggtttgcagagcactgtagtcaaaagtcatttgaaataaatcttttctctgtggtatattgtcaatttgatatagaattaaatttgtttcttttcttttttcttttctttttttttttttttaagagacagggtcttggccaggcgtggtgtctcatgcctgtaatcccggcactttgggaagccaaggtgggtggatcgcctgaggtcaggaattcaagaccaacctggccagcatggtgaaaccccgtctctgctaaaaatacaaaaattagccgggcgtgatggcaggtacctgtaatcccagctactcgggaagctgaggcaggagaaggcttgaactcaggagtcggaggttgcagtgagccaagatcacgccatggcactctagcaagactctgtctcaaaaaaaaaaaaagagagagagagagacagggtcttgctctgtcactcaggctggagtgcagtgatgtagtcatggctcactgcagcctcatactcctgacctcaggtgatcgacccgcctcggcctcccaaagtgctgggatcgtaggctgaagccaccatgcctggcccgaactcatttgtttttatttgcattaagtgtaataaggttttgttacttttagtttgaattttattttgggtaatataaacatttacatgattcagaagtcagaattacactgaggcatgttcagctaggcctcactcctgtgcctgtacccttacctttttccccctaccccatgcagggaatcaatttcattagttcctggtgtgtccttccttaatacccccccttctttctttggtagaatgcagtagatatgtttgcgctttgctccctttgcttcacagtggatcctggaaatgactccatcgcagttcttagagctcttgtttagtccctttggatctgcacagtactccagtgtgtgggcgcaccataagtttattcagcaagtgccctggtgatagggatcgggggtattggaagcctttggctggtaaaaataatgttgtagcaaataacatcatgcatatgttctttgagatttctggaggtgtctctttagcatagatttctagaaggcattccttacgtcacgtttaggtttatagtttgacctcatggtgattaaggtatttgggaaatgcaaatgagagtttcgaagaagccagatctttcccattagttcactgtttttctctgacattaggaccgtccgggttctagggagcagccctggcgttaggcagtgccatgatggattgtgtagaagtagcgattcccatctgtctgctttcttggcccactctgctggtggctccccttccctccctcctttatggggagctggggagctgcctaggggtccattctcaaaggctgatctctggtgggcaacaggccacacctagctttccagggttcttcgtcatttcccattgagagctgtaagactcagagacatgaaaaggaagctctggctgggcacggtggctcacgcctgtaatcccagcactttgggaggctgaggcgggtcgatcacctgaggtcaggagttcgagaccagcctgcccaacatggtgaaaccccgtctccactaaacatacaaaaattagcctggcgtggtagcacacgcctgtgatcccagctactccggaggctgaggcaggagaataacttgaacccggcaggcggaggttgcgatgagccgatattatgccatcggcaacagagcgagactccatctcaaaaaaaaaacaaaaaacaaaacaaggcgagctctgtgctgggacagattagggacccctctttacagcaagaaagactgctctgtgggttgtaggatgcctttgtgtatgcagtggctctaggtgactctggcagccacactctgggccctaaacttctggaggaagatacaggatagggaggaactcaggggtgagtcatggtggggacaagacattccctcactctaagaccttgtcactagattggaacatctcttgcctccctacacctgacctgatggttctggagagatacgtccttgcagcttctgagtcccagcactaagcagcctttggtaacttccctacatcatttgagttctggtttcctaaggatgcttgccagtgagtgccatggtgccctcattgcacagtctgtgcagtgtagacaagaggggaagtctcttggggtagaccagccgcaaggcggtgactagcactgatgtgaaccacatgggacaggggagttgtggggctgagaacacggagggtgggagtagtcatgctcttttccagaatgaactgctaacgaagggactcgcaggtggctgctgcttctttccaagctgcccctgttgttgcagaggctctggagtcctaggaggtttcacggtggcatactcgacagagtactagagcatcatggccagatagtgatgctggggtgtggggcctcacggtggccatttctgacgagaccccaccgggccaaagtgatgtgtagagaaggagctgcttcggtcaccagaaaagaacggggaagcctcccacactagaataggtagggtgctcttctccaccggcaggaaggggatgtatggctctgcctggaccacacctttttccttgctcttccctccgcatctgctgtggccgaggccattcctcatcagggaacatgtgttagaggctcacgccacctgggaccacttgtcttatcacccccaggaccctaggcggtagtttcctgtggcctgagttagctgatatttatatagtgccattgtgccttttctcctgtgatgctcacagtaaggatgcctagatggggttacctgttgtcaagataaggaaactgaagcacagaatgctgaggtcatttgctgggttcatgtttggaaagcggcaaaggatttcagtgcaggttggctggctccaaacctgtgtgtgctttccatgacactgtactgtgtgcctcattgagcctcattctagaaaaccaaaaacacacccaaggcccggccttcacaaaggagacccctcccccatttggctccctttccagcagtcgacggcctcttgtcagccatcgagcccagagtcccttgaagtgcgactcatgctggggtggtatgctcaggagccgcagtgtttccgctcagaggaaagggctctgattctcctgcagtgctaggagacttgtgggtggccacagtgcaggtcaggcacaccggccagcaccacccacagcccaaattcctaaagaaatatttgggtcccagcttggcccgagtctctgttgtcctggggaaggacatcaagatctgagtgtatgatggcctggggccttgcatgtggtgggggtccaagcctgcctctgctcacttgttctgcagactggcatgttctctgtgatacttacatacttgtttaacacttcagggaagaaaagtcagaagaccaggacctccagggcctcaaggacaaacccctcaagtttaaaaaggtgaagaaagataagaaag

SEQ ID NO: 23 - DNA, 58268 bp, Homo sapiens
gtgactccccagaatacaccttgcttctgtagaccagctccaacaggattccatggtagctgggatgttagggctcaggtaagtaaccttcctttttttttttttagtatatgtcctggtttggccatctgttttttttttttttaaaaaaaaaaaaaaaaggaaaagaggaaaaaaatatactactcttggacagtataaaagtaccccaaagactaaagacataactgtgccaaactgtgccatataataaaaaaaagtcacttccctgagccctgaaaggtcagtgtgtgtagggttacttggtcgccacagcgtgatctgggggcgggcgtcagattagagccggaactggtgatctgcaacttcagttcaccttgaagcaggtcagctgagctgagagcgcttgcactgagcccttttgcgctgctgctgttgccttagcggtcttcagcatgtgtttgctttggtttggggtaaatggcttagtggtcaacattagtgagcagtggtaatgcattttcagatatgggaactggtatgtggttggttccctagaaggacaccctcctgaaagctgtctcagaacaccgggggccatggctaatgtcatgtgcttgctacactcctcccatggtaactaaagagagtacccagatatacatctggttcttgggactctagaggaggatgagtactttgtaaaaacctgggggccccagtcattctaggtctgacactcaggtgctgtatcagctgcagtttgaactacttggcaccattgtgtggactttagttttgtaaaaatgaatggttccttaatttctcaaccttcaggctcaacatctcaagctgtttgttgttgttgttgttgttgttgttttgttttgtctttttgattagtggtcactccgcatttgatgttttgacatgtggatttcagaacttctgtgtggtaaagcagaatgttccaattgaattttcccattttttttcccctaagcaaaaatgtgagttttcacttatgcggccattgtgattccgactgagaccctaagtcgttctttgttgtctctctagtggtttctgacacctcagtgtgaagctgttgtagacatccataagaaatagcctgcttagggattatgtgagggcaaggtttggctgaaggagaatagaaggtgtggaaggaagcggaagaccagaagagcatcacactgcctcaagtcccaaatttgattctgctcctgatcctgtgactcaaattgtcattctcttttactgctgtggggtgtgctctgggcccagctgacaggacattctttgtactccacgtatttatgctggtgggagttgtatggctagtgctttgtgctttgtctcagaaattgtgtggactaaatgtaatatgggcagtgaatgggtttcttctggaagatgttaggcctggagggtggtttgggtttttacgagtctttttctcagattacagattacgaatggatgttataaaacaggcagtgttgacaccatacagtttctcctaagaaatgtacagagagttcaacctgaggaagctaattgaaaataaacttttaaaaagaaatgtagaaagaggaaatttaaaaagtatcttatgaatgggaaagatgtagccatttgagcttcaaagaacttttgagggaattctcaaaggacagtacccgtctttagtagataaatgcttgatatctatttttcttcttttactttttaaagaattactaaaataatacatggatttatagaaaaatcaaaccacttaaaaattgatcaggtggctgggcaaggtggctcatgcctgtaatcacagcgctttgggaggcctaggcgggtggatcacctgaagtcaggagttcgagaccagcctggctaacacggcgaaaccccatctctattaaaaatacaaaaattagctggccatggtggcttgagcgtgtagtcccagctactcggaaggctgaggcaggagaatcacttgaacctgggaggcggaggttgcagtgagccaagatcacaccactgaactcctgcctgggtgacagagtgagactcggtctcaaaaaaaaaaaaaaaaaaaagtatcaggtaaaaaaatgaaagctccccgcttaatctctgctcccactacccagaataactgctgttaatagcttaatgtagatccttctaagtcttctaagactaaactgtgtactttttgtgttgtaattaacaggagggtttttgttttgttttgttttttctttttttgagatggagtcttgctctgtcatccaggctggagtacagtggcacaatcttggctcactgcaacctccacctcctgggttcaagtgattctcctgcctcagcctcctgagtagctgggattacaggcgcctgccaccacacccagctaatttttgtatttttagtagagatgggtttcaccatgttggccaggctggtgtcgaactcctgacctcaggcgatccacctgccttggcctcccaaagtgctgggattacaggcgtgagccaccgtgcctggcctcaggatggtgttatatatacatattctgcatttttccatctcatatattcatctctgcctcatttcttttaaatagcagtgtagtccagggctgacttaccgtcatgcatttcgttgtctctctatgttattaaaaatgctacaggattgaaattcctcatgtgccagtcattttgaagaatggctgcctagacttggaatttctggtggataccaccacatcactgtccaaaatggctatcccagttcccacaacagtctgagaaagtgccattttcccatatcgtcccagaattggatatacatcttttaaattggtgccgcttggattattactgaggctaaacctcaataatcattgtcatagctcttaatgtattaaagatgttaactctttgtcatgcagatattttcctgttttgtcttacgtcttgattcttgtctttctgatatataaaatttatgttatgatttattcttttgctttcatacttaggaaatccttttttactcttttttttttttttttttttttttttgagacggagtctcgctctgtcgcccaggttggagtgcaatggcgtgatcttggctcactgcaagctccatctcccgggttcattccattctcctgcctcagcctcccgagtagctgggactacaggcgcccgccaccacgcctggctaatttttttgtatttgtgagacagggtttcaccatgttagccaggctggtctcgatctcctgaccttgtgatccgcccgtctctgcctcccaaagtgctgggattacaggcgtgagccaccgcgccccgccaggaaatcctttcctactcttaacaacagatcaatagtcatctatattttcttcctaaaaaacctgatgatgtattatattcatacatacgtatttaatacatacaaaagggccagatgcggtggctcatgcctgtaatcccagcactttgggaggctgaggcgggtggatcacctgaggtcaagagttcaagaccagcctggccaagatggtgaaatcccgtctctactaaaaatacaaaaattagccaggcgtggtggcgggcacctgtaatctcaactactggggtgactgaggcaggagaatcgcttgaacccaggaggcagaagtttcggtgagccaagatcacgccactgcactcctgcctgggcgatagagtgaggctctgtctcaaaaataaaaaataaaaataataattttatagttaagttgccctgtgtttttcctgtgattaaaaaaaaaaatacctgttttgtatttaactttggggtgggataaggtatagcccacttagtcagttgtgtctaagccacttgatgaaccagtcaatccagtcttcacctttaacaaatgctgatttcttcaagtgagcaaaatatctcttaaactttttcctattttctctataaagttgcttttttctgaattttttctttatgaggcttgatgggcagccctatcagcagacaatcattcattcacccaacaaatatttgagtatctgcttcaagccaggggcagtgctaagccctggaagtggtatcttctccttatccgggagtggggctacagtgttcattccagaagactcaagaaaatagcagatcatcacaaaagtaggttttacataaatgaggaggaatccacagggttgtgtatatgtgtgtgtattttaaattctgacataagttggagctttagggtagactgtgacataagagtagtttgttttccaactcatgtaattgccggctgatttttgtcttgaattatgataatggtaacttctgttgaaacaattctgtattcatcttagcttggttgggatgcaataaaagttttgtactggtaaaaatgataattttcttccatgatgattttgaagcttttctgtaacacctgataaaaatagaggggccaggcatggtggctcatgcctgtagtcccagctactcgggaggatgaggtgagaggatcccatgagcccaggagttttaggctacagtgagccatcatcacaccactgtactcctgtactctagcctgggcagcctcgttctttagagtaagacactgtctctttaaaaaaaaaaaaaaagaaaaaagaaaaaaagaaaaggcttttagtgaatatatttttagggtagcaagtgtaatttttataaattgcattatttgaatctaataaataccctcaaagctgaagtcgaattctgattttgattgaaaatattttttacttaaaggaagagggatagaataaatgacacgattaaggaaaagacttcttgtataaggccggggttttttaaatgattttttgaatagttagatggacaatacggaattaaaaaggtggtgtaaaaagttatacggggctgggcacagtgactcacgcctgcaatcccagtactttgggaggccgaggtgggtggatcacctgaggtcaggagttcgagaccagcctagccaacatgacgaaacatcatttctactaaaaatacaaaaattagctgggcttggtggtatgcacctgtaatccagctactcgggaggctgaggcagaagaatcgtttgaacccaggaggcagaggttgcagtgagccaagatcgtgccattgcactccagcctgggcgacagagtgagactccatctcagaaaaataataatagaaaaaagttatatggggctgggcatggtggctcatgcctgtaatcccagcagtttgggaggctgaggcagcttgatcacttgaggtcaggaattcgagactagcctggccaacatggtgaaactccgtctccactaaaaatacaaaaattagccaagcgtggtggtgcgtgcctgtagtcccagctacttgggaagctgaggcaggagaatcgcctgaacctgggaggcagaggttgcagtgagccaagatcatgccgttgcactccagcctggacgacaagagcggaactccgtctcaaaaaaaaaaaaaaaagagttatattgtaaagtatctctgctaccctgccccaaacattcatttctttccctggaggcagccactattacctgtttctttaaaaaaaaaaaaaaattgtggccgggcacggtggctcacgcctgtaatcctagcactttgggaggtggaggtgggtggatcatgaggtcaagagatcgagaccatcttggccaacatggtaaaaccccatctctactaaaaatacaaaaaattagccgggcatggtggcgggcacctgtagtcccagctactcgggaggctgaggcaggagaatcgcttgaacctgggaggcagaggttgcagtgaactgagatcacgccgctgcactccagcctggcaacagaatgagactccatctcaaaaaaaaaagcgtgtgtgtacccgtgtgttaaatttttattataaaatatatataacaggctgggcgtggtggctcacgcctgtaatcccagcactttgggaggccgaggcaggctgatcacgaggtcaggagatcgagaccatcctggcgagcacggtgaaacctcgtctttactaaaaatacaaaaaattagccgggcatggtggcgggcgcctgtagtcccagctactctgagagcctgaggcaggagaatggcgtgaacccaggaggcggagcttgcagtgagccgagatcgcgtcactgcactccagcctgggcgacagaccgagactccgtctcaaaaaatatatatcgatatatataacaatttacagttttaatcatcttaactgtacagttcagtggcactgagtacattcacattgttgtacagccattactaccatccatctctacaacctttcgtcttgcaaaactgaaatttcatacctattaaacactaactcccacttctcccctttcccccaccccaccctctggcaactactattctactctttgtctctattggacatatttttgtgtgtttaggtttgtgtatatattttacatgtgtgtataaatacacaagggtatgtgggcgttgtgtttttacacatactataaaatattgtgcacatttgtttattttaatgtatcctgtagattatttagaatcggttcatacagagccgtatcattccttttaagggttgggtttaaatagtctgttatggatgtaccacaatttatttaaccagtttttaaattttttacttattttttttaatgtttttttagagacaggatcccactccatcacccagactggagtgcaacagcatgatcatagcttactgcagccttgaactccggggctgatgtgatcctcccacctcaggctctcttgtagctgggactacagggatgtgccgccatgcctggctaaattttttatttttatttttatttttatttttggtagacacggggtttcactgtgttgcccaggctggtcttgaactccttgggcttgagtaatcctcctgccttggcctcccaaagtgccgagattacaaccatgagccatggagcccgacaagagtagccttttatttgcagaccattagagaaaaagttgcgtgtaagtagataagcatacgaatttatcactgcaatactgtttgtagagatcacagagctgttaggctaggaagaagtttttagcagttagcactagaaagcaaaactttggaaacttccatttcatcaaaagtgacctcatctgagtagggcatgtgagggaaggacctttttactcgacaaggggaacttgcccagttcttgtttgtgaaccttgaagaaagtggagcatttttattttgggaccattctaggttgtggtagttccttggtactcggggttggagaatctccctctgctgctggaccttctgcctcctcatgctgtaatatgcataagaggtgtcctagaagtattcaggaacaggctgtggttgctttgttgttctgtgactgttgaactctttatatagcagtacttttttaagctgtactaattgagcatttattatgtgtcagttactgtgctagctgctggaaactatcctaccctcagcagtcttctggtctaatgggaggtacagacaggcaaatgggctatgactttacaagaggctaacttctgtgatggagagaagttccagccactaagggagcacataaaaatcagaggagatcctaccaagaattgggaggtaggtcagggaggagacttctttgaaaaatggcatctaagacctgaacagcaaggaaacattagctaggtcaaggacaaagcatcagtggggagagatgcatgagtcttttggaaggaccagcatgtgtagaggctctgacaggagagaatctctcaggcccattcagagagtccactgtgtgaagacgaggcatgaacaaccagccaggacatgtggagaggagcatttttctttttttcttttttctttctttttttttttttttttttttgagacgtctttctctgtcacccaggctggagtgcaatggcatgatctcggctcactgcaacccccacttccagggttcaagcaattcttctgccttagcctcccaagcagctaggattacaggcacccgccaccatgcccggttaatttttgtatttttagtagagacggagtttcaccatgttggcctcaaactcctgaccttaggtgatctacccgtctcggcctcccagagtgctgggattacaggtgagagcccccacgcccggccaggctcggctttctttccaggccccgtcacactcttagatgttccctgggccccagaaggcagcgtgaggtgctctgcccatctatgctgtccttttccaccccaccctatccactgggcccctggggctcccactccactccaggtctcttcatggacccttctttcccttcacttctgtcccaggagacctgggagactcatgggaacaggcatcatcttctccagcacagttcattgtctaatgcacgaaagtgctgggctgtgagaaggtcaggagcttacatggaatgggagtcagctgtggtacaaagtacgctgcttagttctactgattttttattttttatttttacataagactttgatggtaaaggaagcagtgtgtgagcaagctgactcctgtcttgtcaagtaccaggtccactctgatgagcccctgtggacagcactgctgtaactccccaagcctgggctcaggaggtgggccctaagcgctgttcccagctcttcctccatgctgtcagctcttccaccattcttcctggcgtcattctaaggtcctgtcttcccccgccctcttccttcctggcttctacgctcagctcaagtagtagctgtttgggtacttttcacccagacttaggaaatgttatcagttggtcgtattcctgtcagccctcttactatggaactcaaataggacagattcagctgaattcccagccctgtggttgcactctttgtctgccctgcttccccaaggtagcctgctccctaaaggtcaccgagatactccccatgcaaggtttttgttgtattacacatgacaacatggaataaagtgttttgcaaatttactggatgatatcctactatgtggaacatcctacaacttactcttttcactcaacatttgacttttgaacctggtctgtactgctccgtgcagaccaatgttcattcatttgatatgtctccttgtgccatagaaatagttttacaatagaagcctgtccagagccatgagggagaaggggattgtagagaaacaaggattggcatctggtttatgtttacatcctttagtcctgttaaccgagaagaagatatttttatttccatgtttgcgaaagctttccacaaaaaaagcatccattttctagacttattaatagggcagtccaaaggttttatttttagatttgaaagaaagcaaagtaggcttctgagatatgcacatttccctgtgtccctgtctcttttgcaacattccacattgctgctaaaacttgaacatgagcactttcaagcatgtgcttactttctatgtatgactcattttttaaaacattaaagcattttcggccgggtgtggtggctcacgcctatattcctagcactttagaaggccgaggcgggtagatcacttgaggtcaggagttcaagaccagcctagccaatatagtgaaaccccatctccactaaaaatacaaaaattagccgggcatggtggcgggcgcctgtaatcccagctactcgggaggctgaggcaggagaattgcttgaacccaggaggtggaggttgcagtgagcagagatcgagccactgcactctagcctaggtgacagagcgagactctgtctcaaaaaaataaaaataaagcattaaagcactttgtctggtggtatgtaagttttggcattacttagataagttgtattttaagtctttctacacacaataacttatttttaaaatacaagtttctgtgtacttccgggttttgtgtttttgtaaacagcagaaggtattagtccatattaagtactaatttgttctaatattttcagctgtttttggaattacacttggcaaaaaaatagacaaatgtctgcagttgtgacagtttgtttttttgttctttttaactccagaataaataattctagtgagtttttttcttggcttgtaagaacatgggaatgattagagtcatcataacacttaagtagttatagaaggttgaacatctgtagtcagttgtataaaatttcctagtcatccttccaggttgtttaagacaaacaaatacatagtatttattaagctcttataaattttaattgtaaaacatcattgtacaaaactttgaaaatgcgtataggtacaaagataaaaaattaggccaggcatgccatggctcacgcctgtaatcccagcactttgggaggccaaggtgggaggatcttttgagcccaggagttcaagaccagcctgagcaacatattgagaccctatctctacaaaaatatcataaaacaaaatagaatcactctggcgattccactatccaaaaaaaaaaaaaactgctgttaatatttggtatgtatctttctagaccaaggcctccaactttggttgagaattcagccgggtctgtgaccttggatgggaaaaacattcactctttattttcactaatgtctctgaaaacccagatttttagctgggcatggtggctcgtgcctgtaatcccagtgctttggaagcccgtggagggcagatcacttgagcccaggagtttgagaccagcctgggcaacatagcaagaccctgtcttttaaaaaaaaaaaaaatccagccgggtgtggtggctcatgcctgtaatcccagcactttgagaggctgaggcaggcagatcacctgaggtcaggagtttgagaccagcctgaccaacatggtgaaatcctgtctctactaaaaatacaaaaatcagccgggcatggtggtgggcgcctgtaatcccagctactccggaggctgaggcaggagaatcacttgaacccggaaggtagaggttgcagtgagccaagatcacaccattgcactccagcctgggcgacagagcgagactctgtctcaaaaaaaaaaaaaaaaatccacattttcttcaatgacaattgtaagcaacagatcatggtagtattagaatagcagtgactgtcaccagtagagatcaaagatactttcatatcatattatagttgttacagatattttgaaatatatatgtccatcactgcttcaaacttaaggtaattattagacccatctctagatctggttatttaatgatttactgaagaagcacatattatttgagaacgaactcttgaaatatgttgttaatttctgtgcattttacacatttcaaaacattcttctgaggaggggtccagaaggccaaaagggtccatggcagaaaaaggttaagaacacctgttctgtactttgtaccatgtggctacaaatataaaaacagacgttaagccgggtatggtgatgcacacctgtagttccacctacttgggaggctgaggtgggaaaatcacttgagcccaggagtttgaggccagcctgggcaacagagcaagaccccatctcttaaaaaccagtcagcacttgactagtcagttagtgggggaaaacacaggtacagtaaaaggagtcaaaattacacttaaacttaggtcatcttattatatcaaacatttattaacatgtttagtgttttgtgtatattatgcaaagtgtaatgcaactaaaactgtttaacacttctcgatatcacataaatttgttggtgcataatagcctaaaagttacttttgctgttggcattttattttattacttacttatttatttatttatttatttattttgagacagagtcacactgtcgccaggctggagtgcagtggtgcgatctcagctcactgcaacctctgcctccctggttcaagcgattctcccgcctcagcctcctgactagctgggactacaggtgcgcgccaccatgcccagctaatttttgtatttttagtagagatagggtttcgccatgttggccaggatggtcttcatctcttgaccttgtgatctgcccacctcggcctcccaaagtgctaggattacaggcatgagccaccacgctgggcctgctgttggcattttaaacatccttctagagtctttcttatttgcctgtaagcacgtacacatgttgttgttgttttgagacaaggtctgtcgcccaagctggagcacagtggtgcaatcacagctcactacagcttcgacctcttgggtgcaagtgatcctcccaatcagcctcccaagtaggtgggactacaggtgtccgctaccatgcccagctaatttttgtattttttttgtagagacggagtttcaccatgttgcccagactggtctcaaactcctttgctcaaacgatccttccgcctcggcctcccaaagtgccgggattacaagtgtgcacctctgtgcctggcccacatgttgttttagatgaatgagatcatatatgtacttttgtaacttgctacctttcctcaacaaaatgttgtaaatatccatgtccataaaaatagacgtatatcttcacttttccctaaaatgaaaataacttaacttgcattttcttttttgtttttgtttttgttttgagacaggctcttgctctgttgctcaggctggagtgcagtgatgtcacagctcactacagcctccacctccagtttcaagtattccacctacctcagcctccaagatagctaagactacaggcacatgtcacgacgcctggctaatttttaaaatattttttgcagaaatgggatttcactatgttgcccaggctggcctcaaactgctggcctcaagtgatcttcctgccttggcctcccaaagtgctgggattacagtcgtgagccactgtgcccagcctgcattttcttattataaaagtaatacatgttcaatggacaaaaaattttcagaaaatatgcaaagatgaaaagtaaaaattgtccataaatctgtcatctacagataaagataacttctggataatgtttttctaccatcatttttagtaatcacataacatttcgttgtatgtctatgccttcatttaattaagaggcatttccattatttctgcatgttcatgactctgaatgatgatatgtctgcctgctgatggctacaaccctgtttctgcatttcaaacctctctcttgagctccagatttgatggcctcgtcagcatttacttgagttgctcataagtgtctcaaatttaacaagtcccagtcttgatttttttcccccttcaaacctattcctcatgttgtctctatttcagtaaacaatatcaacatccacccagttactcagtccaaaattctaggagtcatccttgattctgctctttctttttttttttttttttgagacggagtctcgctctgtcgcccaggccggactgcggactgcagtggcgcgatctcggctcactgcaagctccgcttcccgggttcacgccattctcctgcctcagcctcccgagtagctgggactacaggcgcccgccaccgcgcccggctaattttttgtatttttagtagagacggggtttcaccttgttagccaggatggtctcgatctcctgacctcatgatccacccgcctcggcctcccaaagtgctgggattacaggcgtgagccaccgcgcccggcctcttttttttttttgatacggagtctcattctcgtcatccaggctggagtgcagtggtgcaatcttggctcactgcaacctccgcctcccgggttcaagcaattcttctgccccaacctcctgagtagctgggcctggctaattttttgtatttttagtagagatggggtttcaccatgttggccaggctggtcctgaactcctgaccttgtgatccgcccacctcagcctcccaaagtgctgggattacaggcgtgagccactgcacccgccctgattctgctctttctctcatcatccctgatctgtcagcaagtcctgttaggccaaccacttctcagcatctgcactgccagtatgctagtccaagccacaaaacacctctcagaggtacgcaacaggactttgttgttgttgtgtgtgtgtgtgtttttttttttttacggtagaattattttataacttgaagtgtagggatgaccttccttttaaaattttatttattttcttaattttttattcccatagattttaggggaacaggtggtatttggtgacatgagtaagttctttaatggtgatttctgagattttggtgcacccatcacccgagcagtgtacactgaacccaatttgtagtcttttatccctcaccccctcccaccctttccctcaagtccccaaagtccattgtatcattctgatgcctttgcatcctcatagcttagctcccacttatgagtgagaacatacagtgtttggttttccattcctgagttacttcacttagaataatagtctctagttccatccaggttgctgtgaatgccattaagtcattcctttttatggctgagtagtattcctttgtatatatatgccacaatttctctattcactttctgattgatgggcatttgggctggttctatatttttgtaattgtgaattgtgctgctataagcatgcgtgtgcaagtatcattatgcaacgggacttcggatgacatattgaacaacttcctcactgatatccttgtgaaacgctacatatttcatgggtctgtttgttataccaacactcaattctgaatgatggaattatttcacatttagtctctttttcatctagccattatagtttagtttaaacaccaagttccattcctgctgcatgctgaaggatttgcagtacatcaggctatagtccatcaattcattccacaattgagtaagtaaggtatctatagtacctcaggccctgtgttaggcagggatggggtaacctagacagatttggtacctgtcctcatggagcttgactttagcggcagagacagatcttagataattgtaccagtacttaagtgttcagaaggacaagtatggaggtgggagccactccagtcctctacagtcacgtgctgcacaacaacgtttcaaccgacaacagagcacacatacagtggtgttcccataagattagaatgccatatttttactgtaccttttctatgtttagatatacaaatacttaccattgtgttccagtgatctacagtattcagtatagtaccatgctgtacagttttatagcccaggagcaataggctatataccgtatagcctaggtgtgtagtatgctacaccatctagatttgtgtaagaacactctctgatgttagcacaaataaatcgcccaatgacacatttctcagaacatatccctgttgttgagcgactcatgactgtacaatgggggaacagctcagcctgccttccccaaggaggcaacgccgatgcagggaaccgagggttgaacagaagtgggcaaggtgcagagaggaaaaaggctttccagatggagaagagcatgtgtgaaggccctcagtctggcaagagcttagtcctgtgtggcaggagctgaacgaggggttaggggagagtggcaaagggtccgggccatcagagaggtcaacaggggctggatcatgcaggattttgaatgttaacatcagagcgatagaaaacatgaagggtaaggtggtttgggttttgaatttttatcaaaatattgcaactactcggcaacaagttagatataacaaaagaggtcatcgtaaaaacagcagtctaccccttccccttcccttccctgactcagacatgacagcttttaactgtttctgattttagttcctttgatggttacctccaaaattaaatcatatgcttatacatctttcttgatttgccaactttagggaactgtgttaactccctgaaatgaaagagaatgacttagcttacgttacctccccatgttgaaattcatattcacatttctctgtaattttttttttgagatggagtctcactctgtcgcccaggctggagtgcagtgatgtgatctcggctcactgaaacctctgcctcccgggttcaagcaattctcgtgcctcagcctcctgagtagctgggactacaggcgcacaccagtgcactgggctaatttttgtatttttagtagaggcggggtttcaccatgttggccaggctggtcttaaactcctgacctcaggtgatctgcctgccttggcctcccaaagtgctgggattacaggtgtgagctaccatgccaagcccacatttctctgtaaattttaaacagtattttagtccatatgtcagttcccctctgtttaagataaggatattaataaccctacttttccttccactttccctccttaacttctgcgtcttaaaagctgtacttgaccatacccattcttgcatttgttaacatgtgtgttctgccctgcaaccacagccaagttgtagcttaattctaaagtcgaaaataacattatttacattattacacatgtgagtattgttcttggcgagaccaaataatgaatgtgcccaggattacatttccttctttacagatctggaccactcaaaggagaatgaccaatcaaggtcaaatggattcccttttcttagactctgtcacctgcttaaaatccttgctaggatttaatctacttcatattcaaaccttggcttgcttatatagctctttgttttgcccaccatttctagttgcctttttattttgtttactattcctccttgattatgttgtaaaatgctattagcagtgctgtttatttcgtacgattcggctttttccccactgaagacctttctcttggaaggcctctgcccttctgcaatctgggcaagtatctgctctttgatttaaggttgcatatacagctgtacctggaccttctcctcactgggctcttgggttggagcccgtgtcttaaaacccatatcttcctttcacatggtttactccctcgttttctggactgcatccttaaataatgtgctcagatagagtgcatggggagtaaactgtagtggataccgttgtcacctaccccatatccatttcttctttgcccattcctaacagaatcctgatattattcacctttctaccttattcccaacttcagaaaggatccttaagtcattccacacattgcattcctttggcaactgttactggtcaaggatggacatacgatctaagttggttcactcagactgaagggaaggacttccatggcacgttcagggaagactttctctttttctctcactggagtaagtgagaaaggtgttgctgggggctcttctgtaacctcagactgagggacaaagcctgaggataaagcctgctcaccaaggaaggcggagcagagaaacgggaagaacctgggtcttgatgccgttgcttagctggtgattgcactgtggctggggcctgtcctacctgagctagggactcagataggatggactttcttactgaatgagccagcttcagttttcttttctgttacttgtaaccaaaagcattgtaacagataggtcttctgagtcactgcatgcctgaaatacctttcttctactcttacacttgattggctgagtatagggttccaagttgaaaatcattttttctcctaactttggaggcatctcttctagtatgcagagtaacaaatgcaacaaatgcctgatgccaatcttattatggttcttttgtaggtgcccttcttttctcttccttccctggaagtttttaggatttcgtctccttatttttagtgtcctgaaatctcatgagaatatgtctagagttgtgtcttgttcactcgttgtactgtggtcattcaatctgaatacttttgtcaactcttttttttaaaaaaaaattactaatttacatgctttcattttctctatggggactactgtttaactttggacctcttatattggtcttctgtcttctctcatatttttcatttattgggcggtggggggtgctctgaattttggaagatctcctgcatttattttctttttccttttttctttttttttgaggcagagtcttgctctgtcacccaggctggagtgcagtagcctgatctcggctcactgcaacctctgccttccaggttcaagcaattctgcctctgcctcccacgtagctgggattacagacctgcaccaccacgcccggctaatttttgtatttttaatagagatggggtttcaccatgttgccaggctggtctcgaactcctgacctcaagtgatccgcccgcctcagcctcccaaagtggtgtgagccaccgcacccagcctcctgactttattttctatcccttctgttaaattctttatttcagccaaacctttttttttttttttttaacttactgtgaagcctgtgtgcctactgcctagattagacaattgttaacattttggcgtattttcctggtctgtatagatagggtgcatttttatacctttttgctcaccatttaaaaggaactcacagatgtcacgacatttcacccctaagtacttcagtatacatctcctaaaaataaggacattttccaatataagcacaataccccgatcacatctttaaaagttaacaataattctctaatgttatcaggcacccactttaaattcagatttcctccaaatgtctcttatcgctgttgaggggctccaaagcaattaagatttatacattgcatttgaatatgcttcctttgtctcttatttatttatttattttattttgagacagagtctcgctgtctcccaggctggagtgcagtggtgtgatctcagctcactgcaacctccgccttccaggttcaagcgattctcctgcctcagcctcccaaatagctgggattacaggtacgcaccaccacgcccagctaacttttttgtatttttagtagagacagggtttctactaaaccatgttggccaggctggttttgaactcctgacctcaagtgatctgcccgcctcggcctcccaaagttctaggattataggcgtgagccaccatgcccagcccctttgtctcttttaacaagaacagcctacccacctctccttcacttgtgatactgactttttgaagcagtcagcccaattgtcatctagaagggcccacattttaagatacatatttttagagatggcgtgtcactatgttgcctaggctggccttgaactcctggcctcaagtaatcctcctgcctcagcctcccaggtagctgggactacaggcttgtgccaccacgactagctggcccacattttagatgtctctcttttcttgtgatataatttaacttgtttgtccatatatattacttgtagacaagaagttaggtctacaggcatgttcaggttaaacattttgggcaagaatatttcataggcagtactgtgtacttcatatagcatcagctcaccaggcacttaatggttggttaccctgtggtttgtgatgctacgttttaacacttgattaaagaaggaggtgactgccaaatctccccattgtagacatacagttttcctgtggtaattgatatataatctgtgatgtgatgctttggcaccatacaaatatcctattgcccaacagccatttgcataattattttagcattcattgatccttgcctgaaaccattattacattgggggttgcaaaatgatagtttttttaattgtcacctcttctacatttagtactgtcattcctctgtaatgaattttccctcatcaaataaggaggcattatatttcctcctaaaaagacagtatagatgcttaatctttgcctttattacatttcagagtaaggagttggtagaataatcacctcaaatggtggcaaaatatttgctgttgtgtttccttttctctttcatgtcaatatggactcatagggatttatttattaaatgttttacaattcaaattgggtcaacaagagtcccttcatgttggttcctatattctcctggcataccctcattaattagtctttgagcaatttcttgttttctggcacaagatattccatcccaatatgtgcttttcgtgtcctagaactgattccaaggagctctggttccttatagtggcaacggtatttagaatccaacatgtgggtactaaatgtgctgattcttactggggtaacattatatctaggcactttcagaggacatcgctagaaaatatattcagtttttattttttatttttaatttttttgtagagacaaggtctcactatgttgcccaagctggtttcgaactgagctcaagcgatcctcccacctcagcctcccaaagtgctgggattacatctgtcagggcaaactgctggtaaatattttcacaaaagaaaaataaaaaaaccaaagtgctgggattacagatgtgagccactgtgccctccattttttttttaagtcataaatacataatgatgtcttctatggcaatttaacattacagggttcttccttaacttttttttttttttttcttttttttgaggcagggtcttgctctattgcccaggctggagtggtgcagtggtacaatcctaattcactgcagcttcaaatgcctaggcttcaaacaatcctcctccctcagcctcccgagtagctaagactacaggtgcatatcaccatgcccagctaatttttaaaaattttttgtagagatggggggtctcgttgcgttgcccaggctggtctcgaactcctggcctcaagtgatcctcccatctcgatttcccaaagtgctgggattacaggtgtgagccaccatgcctggccaacttttatttgatctgtatatatcttttccttacactgaaaatgttgggtcttactaatgttaacatagttacttatttgctttatcttgtaatagacataaaattacaaaattataataccaatattacgataaatagctgggcatggcggcgctcgcctgtagtcccagctactcaggaagctgaggtggagggactgcttgaacctaagagtttgaagctgcagtgagctgtggttgtgccactgtactcctacccggacaacagagtgagtggggggaaaaaaaagaaataatggaagatccagagaaagccccaaatatttaaaaattaaacaatacactttgcagcttcctcacctctctcagccttcatagaattgaagagagttagggccttgcactagattaggctttgccttaaggaaatgttgtgtttgatttgatcttttatccagaccattaaaacttccttaacgtttattagtaataaggctatttcactttcatatcatttgtgtgttcactggagtagcacttttagtttccttcaagaactttgattcacaacttggctaactttggtacaagaggcctagcttttggcttctcggctttcaacatgcctctcactaagcctgatcatttggtttttggtttaaagagaaagacatatgactcttccttttacttgaatgcttagaggccattgtagggttattaattggcctaatttcagtactgtcttgtccaagggaatagggaggcccaaggagagagagagagatgggggaacagctgattggtggagtagtcagaatatacacatttatcacttaagttttgccatcttttctttttctttttcttttttttttttgagacagtcttgctctgtcacccaggctggcatgcagtggcatgatctcagttcactgcaacctctgcctcctgggctcaagcaattctcctgcctcaacctcccgagtagctggtattacaagcgtgcgccaccatacccagctaatttttatattttttagtagagacagggtttgccatgttggccaggctggtctcgaattcctgacctcaagtgatccacccgccttggcctcccaaagtgcggggattacaggcgtaagccactgccgcctggccaagtttgccaccttttttattttttttattttttgagatggagtctcactccatcacccaggctggagtgcagtgatgcaatctcggctcactgcagtctctgcctcctggattcaagcgattctcctgcctcagcctcccgagtagctgggactacaggcatgtgccagcacgcccagcttgttttttgtatttttagtagagacggggtttcaccatgttggccaggctggtctccaactcctgacctcaggtgatctgcccggctcagcctcccaaagtgctgggattacaggcgtgagccaccccgcccggccaagtttgccatcttttatgggtgcagtttgtggtgccgcaaaatgatgatagtagtaacatcagagagcattgatcacagatcaccataacaaatataataatgagaaatttgaaacattgtgaaaattaccaaaatgtgacagagacatgaagtaagcacatgctattggaaaaatggcactggtaaacttgcttgatgcagggttgccacacaccttcaatttgttaaaaactcagtatctgcgaagtacagtaaagcaaagcacaatcaaatgaggtgcgcctgcatattacaaccaagaggcttttcgcagaaacacgagtgtgcttcaacattcaaaaatcagttggtgtaattcaccacattaagataataaaggaggccgggtgcggtggctcacacctgtaatcccagcactttcagaagccgaggtggacagatcacttgaggccaggagtttgagagcagcctggccaacatagtgaaatcctgtctctactaaaaatagaaaaattagccgggcagggtggcacgcacctttagtcccagctattcgggaggctgaggcaggtgaatccttgaaaccaagaggcggaggttgcagtaagctgagatcacgccaatgcattctagcctgggcaacagtgagacccagtatcaaaaaaaaaaaaaaaaaaaaaaaaagataataaaggagaaaaaccatatagtctattcaataaatacagaaaacgcatctgacaaaattcagtgccctttcatgataaaaattcagcagattagaaatagaggaagtgcatgtatgaaagagctacagatagattgtacttaattgtgaaatattgaacatgttaccccgaaaatcaggaaaaaggcaaagatgtccactctaaccacttctattcaacattatactagaggtcatagccagtataatgaggcaagaaaaaacataagaggcattaatatttaaaggaagtaaaactgtttctatttgtaggtaatgtcgaaaatgtgaaagaaactatcagaacctgctagaactaaaaagtgaattcagcaaggtctcagggtacgagatcattcaaaaactaatcagaaatgaaatttcaaatgcaatatcgttaggaataatttaataagaaatgtacaagatttacacgctgaaactgaaaatgttgctgaaagaaattaaagacctaaataaatggaatgttgtaccatgttcatcagctgaaagactaagtgtctttacagtgtcagttctcccttcattgaactgtagattcataaccccagtcataactgcagggttttttttgtagaaattgattgtaaaatgtatatggaagctgggcacggtggcttatgcctgtaaaccagcactttgggaggctgaggcagacagatgacttgaggtcaggaatttgagaccagcctggctaacatgacgaaaccccgtctctacaaaaaatacaaaaattagccagacatggtggcacacacctgtaatcccagctacttgggaggctgaggcatgagaatcacttgaacccggaggtggaggttgcagtgagccaagatcatgccactgcacgcccgcctgggcaacagagtgagactttgcctcaaataaataaataaataaaacgtatatggaaatgcaaaggacctagaacatccaaagtaaacttgaaagagaacaaaattaaggggcttatgtgatgtgactttatagtcatttgatttttaacagaggcaccagaacagtccggtgcgggaaaggaaagtcttttagcacgtgccggatgatggcaaatgacatccataccagacaaaaatgaaccttgaccttaccctaaatattagtttcttagagttgccacaaactaggtggcttaaaaccacagaaatttggctgggtgcggtggctgacgcctgtaatcccggcctttgggaggccgagtcgggcagatcacctgaggtcaggagtgcaagactagcctggccaacgtggtgaaactttgtctctactaaaaatacaaaaaacttagtcaggtgtagtggtgcacacatataatcccagctagccaggaggctgaggcaggagaattgcatgaacctgggaggttgcactgagccaagattgcaccactgcactccagcctgggtgacagagtgagactccgtctcaaaacaaaaccacagaaatttgctgtctcataattccagagtctagaagtccaaaatcaactgtcatcagggccatggtctctgtgaaacctgtaggggagtccttccttgcctcttcctagcttccagtggttggcaacctttggcattctttgatttgcagctgcattacttcaatatctgtcttcctcatcacacagcattctccatgtatgtctctgtctttacatggcctccttcttgtaagaacaacagtaatattggattggggcctgccctactccagtgtgacctcaccttaactaattacacctgcaacaacgctgtttccaactaaggtctcagtgtgaggtactgagggttaggacttcaacatatcttttttgggggacatagtccaacccatgacactacttcacaccatacataaaaattaattcatgagagattatagacctaaatgttttaaaagctaaaaatataaagcttctgcaagaaaacataggagaatatctgtgcagtccaaagaataaggttttttttaaacacaatttcactctgttgcccaggctggagtgcagtggtgcgatctcagctcactgcaacctctgcctcccgagttcaagcgattcccatgcctcagccttccaagtagctgggattacaggtgtgcgccaccatgcctggctaatttttgtatttttagtagaggcagggttttgccatgttggccaggctggtctcaaactcctgacctcaagtgatctgcctgcctcggcctcccaaagtgctgggattacaggtatgagccaccgtgccaggccaaaaaaagatttattaggatacatgaagcaatagctattaaaagaaaaaataaattggacttcattaaaatttaaaacttttggtcctcaaaagataccattaagaaaatgaaaagacagagctgggcgtggtgaggcttgcctgtagtcactactgggtacttgagaggctgaggcaggaggatcacttgagcccaggagttctaggccaacataggcaatatagtgagacagtgtctcttaaaaaaaaaaagaaaaagaaaaaacaaaagaaaataggctgagagctgtggctcatgcttgtaatcccagcactttgggagtacaaggcagatggattgcttgagctcaggagttcaagaccagcctgggcaacagtgaaatcccatctctacaaaagatacaaaaaattagccaaccatggtggcgtgcacccgtagtccatagtcccagctactcgggaagcagaggcaggaggattgcttgatcccaaggaggtcaaggctgcagtgagctgaggtcgcgccaccgcaccccagcctgggtgactgagtgagaccctgtctcaaagaaaatgaaaagacaagtccaccaagaaaacagttgagaccagtcatagaaaaaatagaaagtcatatctgacaaaggatttgtattcagaagaattcctataactcggtaataaaaagacaacctgatttttaaagggtgaaaatattttaatggatacttttttttttttttttgagacagagtctcactgtgtcacctaggctggagtgcagtggtgccatcatacatagctcactgcagactcgaactcctgggctcaagtggtcttcctgcctcagcctcctgcgtagctaggactacaagcacgtgccactatgcctggctaatttttaaattttttgtagacatgggctggtgtgtgtctgtgttgtctaggctggtcttgaactcctgggctcaagtgatcctcccacctctgccccccaaagtgctgggccaccacgcctggtgtggtgtcaccagagatgagccaccatgccctgcctgatacttttcttttatcatctgtttatttcttgtttatgggtgtttctgttctgattttatgactattctgtattctaagatttctctgagaatattatttgtttcctctaaggacagacttggtctctcttccatggggctggttcttgagccgccagggatggggggaggacctgggtagctgctgcgctgccccttctctgctgtggtggagtggcccgttgcctgcggggtctgtctctgaagggtggtttggagaagttctgtggaggcgaggcaggggtcagctcttgccccatggaccctcagagactgggaaaaggtaggcatcacctgggctgctgccagccacatcaagagcctttggggtgggtggggtgggggccggggaagggaaggttctagctgttgatttagaaaagacccattgatttcttgcctgagggaagaagtggcaccttgccactccaagtttgctctgctcaccagccccaacagcatcagcctcacctgggagcttattgaaggtgccctgccccaaagcttgtgggtcgggatctggcagtcagcagcccccaggtgttgcacacatgacagcactgcttgcccctcctctcgtctggtctggtctggtctggtctggtctggtctgagagcttctttggggctctgacaggtatacaggctctcatctgctctacagctctcttgtagtacattcctctctgttccattagtcaacatgttcttgcctacttccagcatctagaaatttgctgagtgtatcttatccgttcagaggtcctctcctgctattgcctctgttagaaatttcttccctttcatatgtctgtacttcggtttctttgaggtttgaagggtcaagtggcaattacatgtaggcagttggccatcctctggtgaaggctttaaagcccaggaataacaagatccattatgtctaaaactagcaaaaaccctacctgtcacatggtgaactgaattagaggtgatggggacagaagccagattggagtgagtggaaggtgagggagtggagattgggtatagacaactctctttaagaagttttgttgtgatggtgaccagaaaaataggagtggggtagagggggatgagggtgtttttcacgtgggtgaatatgagagcatgtttacatccttctgggaatggcccaggagagaggggagcgtgagaaggaggaaatggggacctggaggagcagactccttgtgtggaggggggaagcggcatctagagctgttgcaggaggtgggctttgagtaaatgcttcctctttggtaaagacggggaacgggaacggtagaagttgcacggaccctttgttaaagctcagaagctgagcgagaattagagcttaagtttatggagtagtcagaataaagtacccctaactgtattcttgcacagtgcaggaagccaggggtctgaaatcaagatgttgcagggctccattccccccagagcctctagcatggatccttccttgcctcttccagcttttggtggctgcctggcagtcctagactttccttggcttgcagttgcattgctccattctctgcttgtgtcttcacatggccttctctgtgtccccgtattcttctctggatgcttgtcactgtattaggcccaccctaaatccaggatgatctcatatcaagatccttcacttaattacagaagcaaagaccttccaaataaggtcagagccacagggtctgggggttaagacatacacctaactattcggggctaccatcgaacccctgtagaagcctgtccatttccaggatagcagagcccaaggaagggccagaagtccccccaaaacagttgtttgcattcaccagattctaagctataagcagatgggcagtggcagtcggtcctaatccatataccattggcaacaatagtttagttcactgtagacataatgagatgcttatcttctgctaagtagtcctcatggtaacagccatattactcctggctttgagtgacagcgctgtgctcttgtctggtgcccatatacttcagcagctggaaacaagacagtgctcatgattcaccggaaagtttctgtagttaaaatcaagtgatcccttgagtctattctaatatttgtctgtaccatgttctgtgacgagacatggaaacaaaacattaagaagtgaaagtatctttgattatgctcttgaagacaactttttgtttgtttgttttgtttgagacggagtttcactcttgttgcccaggctggagtgcaatggtgtgatctcggctcactgcaacctccgcattcccgggttcaagcgattctcctgcctcagcctcccaagtagccaggattacaggcatgcaccaccacgcctggctaattttttttattttagtagagacggggtttcaccatgctagtcagactggtctcaaactcctgacctcaggtgatccgcctgcctctgcctcccaaagtgccgggattacaggtgtgagccaccgtgcctggccgaagacaactttttaaagatgcatatgctctgggctgggtgtggtggctcacacctgtaatcccagcactttgggaggccaaggcgggcagatcacctgaggtcaggggttcaagaccagcctggccaacatggtgaaacaccgtctctactaaaagtataaaaattagccgggtgtggtggcgggtgcctgtaatcacagctactcaggaggctgaggcaggagaatcgcttgaaccccagaggcggaggttgcagtgaattgagactgtgccactgcactccagcctgggcgacagagtgagacttggtctcaataaataaaataaaataaagatgcatatatgctctgaaggctggctacattttattttttctcaaacaacttttacagtggatagtgctgtaaaagttgtttagctctggtcattttatcttttttgtgatctgcaaaaggagatccttttccttttcactgcctctaatacccaactccaatactcctttgacctcacaggcacttagaatccatcagtggctccatcttttctcagacttcacctccttcgtatccttattcctctcctttgtagcttcagtgccagtcagacgtcgttactccctggcacactacctcagcccttcggcactttcttgctttgttatattcagtcgacaaagccccagcctcatgaaattcagtcatgtctgccccatgcctgctccgtcctgaagctgaatgtgactccttcattgattccccctttaagttcatgtctaccccaggtaaacttcttgccgccaagcccacctgcatactgcagttccccggtctctcctagcccctcccaccctcctcatcagctgtcacacctccttgcagctgatatcttagttcccagagagcacagaagcaagctcaagagagtgtctacaggccagcgtctactccttcgctctgcctccctcatgctgtcacggagcgcctgtcccaggccctcactcctgttctaaggcatctctccagtcctctactgcactctcccccatcagagattcctccctcgcctgccctagaaacttgttgctacttctcccaccttgacaaaagctgctcccaaccccccacctgtctagcatctctgttttcctttaccagcaagactccagtccctgtctccacaccctcttcaaccttctccagttgttcctttgctgccacagctctgccaagctgctccatgaggtctccagtgatgaccttcatgttgttaaatctgggagctgcttgtcacttcttttcccagagctgtcgtcgtcagttaaccccaatacccatacgagacaatcctttccctcccttgagtctctgcactgatgtgcaccttctcagtgcaaaccacagcttttgtctctttctagctgaatacatgactgactgtgcttatcttagctgtcacccctgctggagcagaagctccacaggacaggattgtctccttgattcacagatgtagctcaagctcctagaacagtgcctggtgtctgtgggtcctcaggaagtcctaggtgagtgtgtgaatgtctgtcctcctcggtcttttctgtttcgcatgtgatgttggaaggcctcaggttcaggcttttcttctccaccctcactcccgaagtgattccgtccagcctcatggctcccaaatttatgtctccaggctgactgggtcacgggaactccttatcctccctagaccttctctttccctggtcttctcctttccagtaaacagcaactccaactcctgctcctcaggccagaaacctggcgctggttacctcatttgttcacaaatactgttactccacctgcaagatggatacaaaatctcatgagttcccctgcctccatggcccccaccctggtccaggtgtccagcttccctgcctctgcccttgccccctggttctttgtttagtcctgcaatattgtgctcttctgttcagaaccctccagtgggtccctgcttgctcagagtcacagcccaacaggatcacctctcttgccactctcccaccactcatgcactgcggcctcactggcctcctggctcctccctggaccctccaagtatgcccctgcctcaaggccttgacctctcctctgccctctgtcccaggtatcacacatgtctgctcaagtgtcaccttcccaatgtggccttccccgagcacacccatgtctgtaagtcaggcagcctgcctctgccccaccagttccccctgcctagcataggacttgtcaccatctgccacaagctgtgttactgcttggttttgtttgtgctctcccactcccttcccctccctccctctccccacccctatagaatctgagtcccatgaggacagagatttttttttttgcctcttcctcaatatatccccagtgcctagaatcatgcatattttaatttattgagtgaattaacaaataaattctgcagtgggacattgctctaaggttttgtcttataagagggacagaagaacatgcagcctgctctgctgttggctccttagcttctccatggctaacaggaacaatattgtttatgagataatcaaagccatagtcatgagttagaaggtacatataaaggcaaatatgtggagattgagttactttggcgggggcggaggggtgtgtagttatctgaaaacatggaacaaatcaatgagagtctaaatagcacccacatatttgcccctcttttaaaacatacctcctttatgagtgtagaatttaacagcacagtttcccagtgcagctttgcgaaacaagagaaatgaattttaaaggctgtcaggtgcctttgcaatctgtggcttagtatttgtgtaacaacatttgtgttttgccaacagatgtactgcttaaagtacccatgagaatggcctctgtggttttctactttctcggatggaaccttaggaactgattattgagaagaggctgatactgcccacctcagctcccaggcaggcttcagggccttggttactactcctttgggccctcactgacccttgcagacgtcttttgcaacctctgtagccagaagagacaactgctttctggcatgttgctctttccctaatggctttatgagcttcttgaacaccaaagcatgtgtgacttcctcacgccttcccctgtatagtatagcacccctaactgtatgtgtaaggagaaggagtgagcaattgatggcgtccccctggatctccaagggaatgggaaggggcagggtttctggattcagtcatgtggaatctggtcgttggtgtctaaatgtgcctgttacttgtgcccaatgtccaggttcaccaggaggcttagcctgctcatttccctgctagtagctatattttgggagagcattttttatgctctaattgaactttgtgggtctcagcaatttgaacaatgttttgtttttcttctggtcaggttacaaaggaaagaaaaggaatctggtgttgtaggaggtggtgtgttgtgtaattacttgttttttttttttaagtttttttatatttttgcaacaaggcaagttttctttgaataaataatgctgggagcttatcacatagaaggcatatgtgttgtactcagtacattctgaattatctgggtttatttttatctcttgaattcacttataaacaattcaaaggctgcttttttagctaacagaaataggaagagaatctcagaatctgttttgtcattttttcaatgggttgagttatagtgattatgctaactcggtggaaaagcagtgtagtgagtaaaccccacatacggcatatcatgaacattttgttgcttttttggcttctgaccatcttcatacctttttttgtgttaaaagtctccccattgtgtatatcttagtaagaggcaggtggaccctagtttctacctaagaaaacctgaagatggggttgggggcctgtggtgtacttccttctcatgctgtccatgaccactgcagtggctttgtaaggatccaggacccagggcccctcagtgggtgtcttccatttctcaagattgcctcttggttgtgagatgacggttgctgctctagtcattgcatccactcctccaggtaggaagaaagaggtcataggggaaaggcaaaatggcacttgacatcttaacttctaggcccattcaatatttccatttccatcttcacacccatcatcttgtcctagggaacaaacagcaccagcagctcagtagctataacagcaattattatttctcacacatgggtctgggtcagctgcaagatgggattcagatctgttctcaagcctgtcgttccaggacccaggagggagaagcagctgccaggggaagtctcttcgtaggcggaggtcaggagtccaagaggagtgagcagagtcacagaagcctcttaaagcctcttcttcccccatcccatcaacacgtgagcaagcccagagtcagtgggtgggaggtgtgctccgcccatagtcagtagaacaagagcaagcttgaaagagaacgatgaacaggagtgcactcggccactgtctccttagccataacgtagtcccatggtctgctgggaagcggggaataactctccttagctgagcgcagggtctcattagtaaggcagatggagaacatggatgttgggggacaactggcagtgcctgccacaggggaatggatatattccctccccttgctctctggaaactaggggatggcgatgaagcctaggtttggccaaacccattctgccttcagggactttgactcttgagggacagtgagggattagtcatggtggtggcagttgagtcacaaaaccagcagtggtggctaatgtccagtgatgacatgcaacagtgcccagggtgggtgtcccaaccagcaggtccctgcagtataaccttggctgtgtttgcagtggtgcagcctctattcctgctgcttttctgagcctagttctctagttctctctccatttccagatctgctgcccaagaactcctttgtgattgaatttaaccagagttgatttctgttgcttgaaactcaggaccttgatgcagtgtgcagggtctgggcaaggtaaaaacacactttcatgatttcgcctcaagtatagtagatgagcttaggctttttgagccaggtagccttgggattaattctcagctcttgcacctagcaggtgacctcagcaatcaagtcacttgccctccttgagcctcagtgttgccctcagttaaacattgctctcgtgtgttgctgagcattcagtgagattgtatataaagtgatcattgtgaaggtattgggacataatttgggaaagcgtcctggtctaagcttttgattggctctccatcatttgggtaatgggatagtgatttaggagtatcatagcagctcaaggggcccttctggaaagggtatgaggaaggtcagggacaagtctgaaatgaatcatcctaggcttaatgcctgtgactgggcagtgggtacaattatctcaggctagtcagtagtcatttattgtgagaatacatgggcagattttttaatttccttctcagtctagacttgaatgcaaacagttcttattgctaacttaccactagtcaccactaatgaacaaagactatgaacaggaaattcataaaagaagagatacagatggccaatgaagataggaaaagagttctgcctgctggtaatcaaagagatgcaaacgagaacaaaaatgatgccttttcacctaccaaatttgtcaagattaaaaagaaagcaaagagccagcgtcagctgatgttcatacctgcacctgctcggtagcttgctaatgttctgcctgctccacacgccaggccagcctccacggcgcagccaggtgaggcctttccttgtatacaggcacgtttggattcactgttgcataagtgagacatgtgcatgcttcacaattcaggaagtgcaaactccagagtgatgcaaggtctgagtgtccctgctgccctggtctcccagctgcctaggcctctcttcagggaacggctgcatccagggtcttgtctgtgtcttttgaggtgttctatgtacacgcagacacatctaaacctatttttattttccctgcacctgcttgggctactgtaagctgttaaatttttttttctaggaatttgtccattttgtctgactagcataaagttgttcatgttatagtttatacatttgcaacatctgtaattatgtctgctttttcattcctagtgtttgttgtttacttgtaccttctcccgtttttccttgtcttggtaaaagctcattaggttcattggtcttacaagaagcagacatgtaggcattattgccctgtattactctgtgtctcttttctagttcattaaattctgcttttgcttttatctttattattttttctatggtcttagagtacattctctgtgttttgttgttgttgttgttgttgtttgttttttgttttgagagagagagtcttgctctgtcgcccaggctggagtgcagtagtgcaatctcagctcactgcaacctccacctcctgggttcaagtgattctcgtgcctcaacctcccgagtagctgagatttacaggcatttgccccacacccggcaaattttttgtatttttagtagagatggggttttggcatgttgaccaggcgggtctcgaactgctgacgccaggtgctccacccgccttggcctcccaaagtgctgggattacaggcatgagccaccacgcctggccctaacttcttaagttataaatttggttcattgatttttctacccttttttcaaatgtaaacatttaaggctaaccctctggaactacttcaactgtatctagcaagttctgatagtattgtcactttaagttagcccaaagatattttaaattttctttgtttcttcctttgactcacatattattttaaaatgtgtttttcaatttccaagcacatggctttgggtttgttttttttttttcctagttgctctagaaaaaaaaattgactgcatgaggtggctcatgcctgtaatcccagcactttgggaggccgaggcgggcagatcacctgaggtcaggagttcgagaccagcctggccaacatgccaaaacctcgtctctactaaaaatacaaaattagccgggcatggtggcacacacctgtagttccagctactcgggaggctgaggcaggagaatcacttgaaccgggaggcagtggtcacagtgagccaagattgtgccagtgtactccagcctgggcaacaagagcaatactccgtctcaaaaaaaaaaaagaaaaaaagaaaaaatcaacttctaactaaatggcactgtgatcaaagaacttggtctgtgtgacaccagttcttgcagttggttgagaagtgctccatgacacattatccacaaccagtggacagaatatgtcaccaccaagcatgggtgcaggattctacatatattcattacctctgtcttatccgtttgttgtgaaagtattttctcttcttactgtcattttgtttacttgatttatcaactgatggaatacgtgttaaaacctactgtggtgatggacacatcagtttctccacagagtttggtcattttcattttattatttattttgaggccacattttcagttttagatacagtttcacattcctggtgtattgaaccctttggtattatgaagcgaccatactaatatgttatttttttttaaattattatttattttatttatttttctttcttttttttttttttgagacagggtctccctctgtcacccagtctggagtgcagtggtgcaatctcagctcactgcaacctccgcctcctgggctcaagtggtcctcccacctcagcctcctgagtagctgggattacaggcttgcaccagcgcgcctggctaagtttttgtatttttagtagagacagggttttgccatgttgcccagactggtctcaaactcctgggctcaagcagttcaccagccttggcctctaaaagtgttgggattacaggtgtgagccaccacgcccggccatcccagttttttattttcctcctttctgtgtctttatgcatcagtgaggtggagcttttgaaaatgtcagatagctagattttttttttttgagacggagttttgctcttgttgcccaggctggagtgcaatggcgtgatctcggctcactgcaacctccacctcccaggttcaaaacaattctcctgccgcagcctcctgagtagctgggactacaggcacgtgccaccacacccggctaattttgtatttttagtagagatgtggtttcaccatgttggccaggctggtctcaaactcctcacctcagctgatcacccgcctcagcctcccaaagtgttggaattacagacgtgagccaccatgcccagctgatagctagattttttttttttttttttttttgagacggagtcttgctctgtcgcccaggctggagtgcggtggcgcgatctcggctcactgcaagctccgccccccgggttcatgccattctcctgcttcagcctccagagtagctgggactacaggtgcccgccaccacgcgtggctgattttttttttttttttttttttgtatttttagtagagacggggtttcaccgtgtcagccaggatggtctcgatctcctgacctcgtgatccgcccgcctcagcctcccaaagtgctgggattacaggcgtgagccaccgcacccggcctcgagattttttaaaaaatccattgtctgtttcgtcctttaacatctatttgatttctgatgtatttagattcatttatagcatatttgtgcattctatttttccatattttctgttcttttaaattttccttctcctttcttgccttctcttagacttttaaaaaaattgtagtaaaatacacatcacctaaaatttaccatttttaaatgtacagttcagtggcattaaatacaaattggaggccaggcatggtggctcatgcctggaatcccagcactttgagaggctgaggtgggaggattgcttgaacctggaggtcgaggttgcagtgaggtgtgatcacactactgctatagcccaggcaacagagtgagaacctatctaaaaaaacaaacaaacaaacaaacaaacagattggcatcacacagtgtgtgtgctgctgtgctgtgctgttatcatttaacattaaaacataaacatcagcactgttatggactgaatgtttgtgtcccccaaaattccagtgttgaagctcaaacctccaatgtgatgttatttggagatggggtatttgagaggtggttaggtttagatgaaatcaggagggagggtgggtttcgcatgatgagattagtgtccttataacaagagacagcagagagcttgctttctccaccatgtgagtatgcaatgagaaggcagccatctccaagtcagaaagagagccctcaccaggggctgaatgtgctgacaccttgatcttggacttctagcctccagaactgtgagaaatttcagttgaataggccccccagtctgtactattttgttatagcttgagcagactaatacacccatgttatgaaaagctataaacatccctttaaaggccacctaacgcgtcgtattacctcatgcatcttctctgctgagctttccaaaagagtggcttaggctgggcctggtggctcatgcctgtaatcccagcactttgggaggccaaggcaggtggatcacctgaggtcaggagttcaagaccagcctgaccaacatggagaaatcccgtccctactaaaaatacaaaattagctgggcgtggtggcgcatgcctgtaatcccagctacttgggaggctgagccaggagaatcacttgaacctgggagatggagggtgcagtgagccgagatcgtgccattgcattccagcccggccaacaagagcgaaactccatctcaaaaaaaaagagtggctggccgggcgcagtggctcacgcctgtaatccccgcactgtgggaggccgaggtgggtggatcacgaggtcaggagttcaaaaccagcctggccgagatggtgaaaccccgtctctactaaaaatagaaaaactagccaggcgcagtggcaggcgcctgtaatcccagctacttgggtggctgaggcaggagaatcgcttgaacctggggggcggaggttgcagtgagccaagatggtgccactgcactccagcctgggtgacacagtgagaccccgtctcaaaaaaaaaaaaaaaaaaaaaaaaagtggcgtatgttcccggtctccacctctcattcgccagcccctgtgaccaaacccctgggattagatctccatcgggtccctcccctcaccctaacctcacatgcagtggttcctgagaagctgctgtttatctgatcacgggatccagcaggatctgagggctcattcactgaatctgtactacccaacaaggcaggcttgtccttacccacacttttcaggtgaaaacttaatcagattcaagcgtttatcttagtggcctcttcgtggtgtgtgatttccttcttgcagctctttactggctaaaactcttcactgggagttaaaccaggtgtggtccttgaccctcatcattttgtcccatctcctatgctgggctctgtatccttgtctccaagcagtctcgtgtgacagggaagttacctattattgtatggtcccctcttcttgtcacctctggtgtggcacttgttccatttcttgttcaatgaatgtgatttgtgaatgtgccacatctgtgggaggaaggcagttcgcagcaagagttgtagttcccttgctttgccctgagggccaggactttacactagatttttttgttgcattcctgcactcataaagtacacgtaaacttagaggtggtgtgttaaatgctagaacttaaaactgagttcagctaggctcaagtgccccacaatttttgtcccaccagacaatttcatgaatatctacagattgttccctcaatatgcctcaatattgaggcatattgatttggggagcacagacaagtcaaggttgatgtgcatccgctgaacatgatcttaagttgttgaagtaggtattattaatgaacgaacgtctattttagctccaagagcccctggtcttccagaagagactcccaatgatcttccagaagcagctgggcttcttttggtcctcccccacccaggtgcagtcccgttctccctgcctgggtgagtttgattcctctgccgtggaataggctaggctgctacctcttgagcctcttccaccaggccatccattaggtggcgacagagagcactaaaaggaactactatggaaataaaacttgttttgcttcttggggggaaaaaaaaagaaaaaggcttgtggggcgtgtgtgcattttagtcagattttactgtgcaaaacatttgagagatttctgccctctttctcccttccattcttctcaacccactgggcgccctaccacccctgtctccttcaagataaggtagatcagaagaccaaatagacaaatgccatgtccactgttttctgtcacagttgatagccataccagtcacccaagctggaaacccaacaggcccctgcccttcactgcccacatccaagggagccaccaagtcccacaaattgttcctttaactgtttgtccctcttttgtcttctgtcatcccttctaccgctgtcctggttcaatccctcatcttgctctgggactcccatgataacttatgatctttcctccacctctctatcttccacacaatccctatcatcaatctcattcccctgctttaaacccaagagtggcaccctgtgtttgagtgacatcagggcccctcatgtggctcctgcttctctttgtggccccttctgttgctgctgcttttcttatggacatagccctcagcagtccaggactgcttgtagttcctcccaggtaccatgtttcttgcactcctggcctttgtcattggctcccctgcccaagtccccttctcttctcctttccttcccctgtggccttgccttgtcgtgcttatccttgaagaccctgtcaggtatctcttccccaaagagccctgcctaaccaccgcccccctcccccccgcgacacacacacctgggttaggccctgcctctccacgcctgtgcctcctgccaagtcctcagaggtctctgatcccatgtgcctccaggcatggcatagggggactgtgacacagcctctcggcccacagacccctgattgtgggcttgctcactgccccagtcagtcctcttattgaggattccgtgccagttcctgactccagcacacacacgcatgtaggccgccctcctagtgcctggctccttccctgtctcttctgccactcattcccatggtcgtatcctggagttggtcatctctggaactccacccacggagttctaacttagctctgcctatgatgaggacttactgtcttcccagcttgcagtgtcaaccactgtttgatgcccctgggactccattggtcttccctcctcttgtgaactgtgcccatcaccagacgaacttgttttagaatttaccatcgtaactgagctcccttcagcgcatacctccttggctcctgctcagtctctgtttctccttttagccaaactctctaagagttctctccactcatgggccctcttccttgcctgctgctccttgctcagcttgctccatgaacacttgcttttccacattccatgaaataatcttaacagtcatcagtggctgtcactccttctcagccctttccttgtgtctcttctggtacctcatactctccaggtggccatctcacctcacatcttgaaccctctgggtttgggagaattctcacctcacgagttgatgggaggcctggcgacctctgattgtagtcactgcaaatgccagatgcttatttgcctagcttccctttcggtcagggcagcagttggcaaacggtatctcaagggccaagtccggcccactgcctgttttcgtaaatgaagctttaccaggacccagttccaccccgtcctttgtgcattgtccaagactgctctcctgtacaacagcaggtgggctggttgtgacagatactgtctggcccacaaggtggaaaatactatctggccccttacagaaagaaattacctgagttctacacgagggtgtaggtatgtaccctggcctctgccagtcagactcacatgctaggaggagcagggccaggcaggagagccgtgtctcctggcattggggctgcaggaaagacgagctcctaggccacagtgccagtggccagtgctgctgccttgcagggtcgcacaggcagtgctggctgtttggactggcttggcagaaggatttgaagtattgttcctagccaactggactcaaacctgttcctccaaccctctagggattctcttatcacccagtagccttttccccctagttttaaaaattgcagtaaaatacacaaaagataaaatgtactgccttaaccatttttaagtgtacaattctgtggtattgagcacatttatattgtgcaaccatcaccacatgcatcttcaatagcttttcatcagtccttgtctgcataaatcagctagagttggtttctattgattgccaccaataatcttgacagatatgtctgatcttccttctctgcactgactcctctttctctgtctcctctgctgattctttctcctcatcacaactccaaatagcagggggagggttgtttacacttatattcagcacgccctcacgcactcgcctggctcttcagacctctcccctgaactccagattcatacatccagctgccctttaggcctctagaaagctaaatacctcagtatcaaaaacatgagaaacggaagccagagtcctggatctctcgccctttcgctgtcccggtgcccatgcccttcagggatggcacctagaccagctccctgcatccctgcctagactctgcagtagtctcacgtggcagacccggaggtcactctcctctctggatgccctgcggacactccggttagcctcagctgcaagagcctcctcacccaaggtcacgccatttccaggacagcaccctggtgactgagcgaggtaagggtacaaggcccttatagggccttctctttgacttcttcccacctccctttatggatgtcagttcctgatgaacatcttacacctcaaaccgtgacccaacatctgcttctgcagagcccccctgtggcatcttgtgccctcctgccccactccctctactctatatcttcccatagttagaatgggctttttttttttttttttgagataaggtctccctttgtcacccaggctggaatgcaatggcacagtcacgactcactgcagcctcaacctcctgggctcaagcagtcctcccacctcagcctcccaagtagctgagactacaggtatgcaccaccacacctggctaatttttatattttttgtagagactggggtctccctatgttgcccgggctggtctcgaactcccaggctcaagcaatcctcccgccttggcctcccaaaatgcaggattacaggcgtgtaccagtgtgcccagcctcagatgggctctttgaaaaatgtttattagatcaggttactcccttgagaaaaaccctctcagaataaaacccgaagtccattacttgaaagcagagccagcttcatgggcctttgtaactgcccatgggcttgctggaacccaggcttggtttaatactctactctcaccatctcaaaattcttaatttttgaacaagaggccctgcattttcattttgcaccaggctccacaaattgtgtaactgggcctgcctcagcagccacatggaacatgatccctccttgcctatttgagctcattctctaccattctctcccttgctcacctggctcccactgctcttgctcttcctggaacttgccataatgttgctagagtcagagccttggctcttgctgctcctcattggctggacccctctttacttgacctgctccctcaccactcacttccttcagatctgtgttcagatttcgtcttctcagagaggcttttggcccctgtccatctctctgaatttacctctgacctctcccccaccaccactgcgctaagctgcctcagaactttgtagacattctgtctggtcttctgatgtttcccccttggaagaatcccaaggtgcctgaagaatgctttctttatccttgaagttgagtaggttgactagagtctggcttgctattgagcattctttatcaaattgtcctgggaacatggtgtattctttcagtctgcagatgtagtcgttgctgtttcaggtcagctctcttatggatctttgacagcatcttctgttccatttgttgagttctgtacttcagggacacaaattcctcatgttggattgtctttgtctctcttccaatgctattagctttgccgtaattggtttagcttttgtctttttcatctgcattcactttgtctaatttgattttcagctatgtatattctgtttctggctgtttttcaatgtatttattagtttcataatgatgtgttttggtctgcagtttgtttctctaggttggaaatttgtcttttcatcttattctgttttatcatcccatctttgaactcttttattgggaacatgttcttatgaagttgtggggaatttttttcccttccttgtgtattctcttcttggtgggagactttgcctttctcgtgccatctccctccctgggcctcttttttttcttctggccataatatgtttgcctagttaccatgtcacttcttttcgtcttggctcaggcttggatggctctgcatagtcgttctgtttgctttgagacagtggaggaattcttggctctctcttcccagtttcttggcatcttctcttgctgttttcccctctgagctatcgcgtgcaggcttgttatcttgtatccggagagaatttgcacgctggagggagctgcagccatgtagtcttcagccctatctggattcttctctttgttctaagaactgtgttggatgtcttactaaggctcactctagctgcacgagggatgtgtgtgccatttccatggggatagggggcacctcagtctctgggtggttccataatctgtgtatacctaagagcagttgcttcccacagagctgggctggctcactgggcactttgccatttctcctgcacctcccagctggagtttctgggtctaaaaggaaaaagtgaaggactcccacttggttgcttctctccagcttactgactgcaaattcccagggcgttgcccgctccctagggtggtttctgggggacggggcaggagcctggctttgctgctgctttgtcctctggagtcttttctcagactgctttgaattacacccctttcctttgtgtgctgaaatcttcccttcacactctccttccctgcctttcttttgtgtcttatcttactaggactggaagagggcagttgtgcaggaggtctgcatctaattccctaatccatgtgagagtgctcctgttgtgtgctttgtgacatgatggtgagaaatactccctagagcagtggctaccagaaggaagccatccccccccctgcacacacacacacacacacacacacacacacacacacacacacacactccttctggctgtcctcagatgcctattctaggtaaatgtcagattccaaagaaaatccagttgagatcttttttctttttttgagacgagagtcttgctgtgttgcccaggctggagtgcagtggcacaatctcggctcactgtaacctccgcctcctgggttcaagcgattctcctgcctcagcctcccaagtagctgggactacaggcgcgcaccaccacaccaggctaaaatttttttgtatttttagtagagacagggtttcactgtgttggccaggctggtctcgaactcctgacctcgtgttctgcccgcctcagcctcccagagtgctgggattacaggcttgagccatcgcgcccggcctccagttgggatcttgactggaatgactggtgttcaatcattatagtttccacctaatttgtatttgtacacaggacagttactaatttgttggtacttgtttgatccccagtccctagagttgtttatggggtggagcttcagtccctgctgcttcccctgtggcagcagctggagtcagggtggggacccagggtgctgctggcagattcttgagacaggtagaatctcctctatattggtgtctctctctgtcccagcagtgcccaggaaaacctggccagcctgtcactgacctctccacctagggcactggtggttcaggtccttctatttgccaccggcaaaccgtacttctgccagtctggctcttaggcccagtttctctgatcttgcagattttcttgggctctgctacggaatcctcatacctccggcaggtccctcctttgcccatgtgtttaactgtggtggaatcgtgtgagagctgcttctctcgcatggatcccagccacaccacattctacagcggttcctctgaaggcattgatagagatatttcctcctgttttgcatttcgttggtcatttcagtagaatcagggtgaaataaacatgggggctcagatgtcagcattacgaaccaagtacgtcaggcaggctgatgtggactgacctacactagtgagacgcaagatgacgaaaacaagggcactcactccaagttactgatgagatgtttggatcaaatgagccagtccttaagcagagttctctagtaaaagagatctcctttctgccctttcttgttccccaaaatgtgttgccttcatggtgaaaatttattttggcagattttctcttctttgataaaagcagccaacactttgttaaaagtctgtgaaacttatttacatgaagtatgtaaaggtaagaaaaaaacattatcaacaagaaatggagaaagccagcagctgaggacagaaaagtcatgcacagtgtcagtgtctatggaaacaggccacttggaccttgaggactaggtatttggaattggaggtgagcttggcctggtgagtctctaaccacttgtgtgtaggatcagtgtgagaaccctgctagaatatagtggcagagatgcaaggggaaatcattggagaagttaccagggaatgatgagctaatctgaaaaaaatacatgtttctaagttgggcgtggtagctcatctgtagtcccagctacttgagagcctgaggcaggaggatcgcttgagcccagcctgggcagcacagcgagaccctatctccctaaaaaaaactttttcgttgtttagttttgggatttttttttttcctggtcttttttccccctttttgtgaataacgggatctcactatgttgcccaggcagatctcgaactcctgggcccaagcaatcctcctgcctctgccttcctaagattacaggtatgagccactgtgttaagcaaaaaaacttttttaaatgaaaatcattttttaaaagacaggctttccaggggagggtattattccacttatatgaagtgtcaacagtaggcagatttgtggagacaaatagattagtggttaccaggggctgagaggagtgggagtggggagcaactgcttaatgggtaaagggttgtctttggaactagagagtagtgatggtcgcatgacattgtgaatgtactaaatgctattaatgataaattttatgttatgtgtattttaccacaattaaaaaaaaaagatcaaatgtcctcagaatagccaacaaccttccacttggctaaatgcctactcattaaacttcttgaactaaattcctttctgattgtcatggttattgtgtcctgggcttcagagtttcacattcaggttggcttggtccagtctgtcatgtatcactataggtccccacattggcctcttcctcagacggacagcccatctatctgccggggctctgtgccacagccagatagacttgctctgagacagctgtgtgggctctgagcactggccaggcatcacaaaacctatctttatgatttagaataattggtggtcagctgctgttttaatgttgttgttttttttaatttagatataattcacataccatgaaatttactcatttaaagtgtacaattcattcttcagtataattcataggctcacagaaaaaattgtttaaaaataaaatgtgcaattcagtgtcttttagtacattcacagagttgtgcaaccatcgcctctgtgtcattccagaacactttcagcacccaaaagaaaccccagacacaggagcagtcacctcttattacccgcagcccctggcaacaactcatccacttcctgtctctatggatttgcctattctggacatttcctataaatggaattatgcactatttggccttttgtgtctggcctctttcactgagcgtaatgtcctcaaggttcatctgcattgtagcatgtgtcagaatttctttcctttttgaggctgaatgatattatatcctatagataatgaggttttgattatccacccatcccttgggaatgcatatttgggttgcccccaccatttggctgttgtaaactgtgctgccatgaacactggtgtacggatatctgtttggttactggttttggttttttgtttgtttgttttggttttttgagacaaggtcttgctctgtcgcccaggctggattacagtggcacgatctctgctcactgcaacctccacctcccaggttcaagcaattctcctgcctcagtctcctgagtagctgggactacaggtagcactcaccaccatgcccggctaaatttttttgtatttttagtagagacaaggtttcgccatattggccaggctggtctcaaactcctgacctcaggtgatccacccacctcagcctcccaaagtgctgggattacagacgtgagccaccgcacccggcatagttgtggctttttgagagtgtatggctaggagtaaaattgccaggtcatatggtaactccatgtttaacatttgagaaactgccaaactgttctccacagcaggaattttttaacctgtatgtggtgggcttgtgtttcggttttcattttacacatctataaagatgagatttgctgtatggcactggttgcctgtatttggggagggttctgcttttggttggcaagaactgcattttatttaagcttagcaaaacataactggtttctcgcatcttctcaaaagtggaggattaagaaatggactgcgaattcagagcagggcagctgaacctcaggctccacccttgtagccttcaagctgaacctcattctctcttgctccctggagaccactgagacactctgcctgtgccagtttgatttctcacatttttaaagggccaaagcttgtgtctcaaagtgctatagcctttattgattcatgcagagaagcctccttgattccgtaattctgcagctaatactggaagtagaaagaattggaaacaccatctggatgacactttagggtggaagcagccagtacaagggggggctcattatttcctctggtcccagactgttcacctggagctgtagccaccaccctgcccttaggttaactgcctcgagtggtagtttagctctttgtgctgtgccgagggataactggaagtgaaaggtgctgagaaatgccatctcctgaaagtggcgagcatgagtgaatttacgaaaggttgggatattgctggggctctggaagtttctctggagctcactccaggggacagggagggggctggattccaattcaagtgaaaaatacctttcatctgccttgttcacctggcttttttgcctttttgtaaaatctgaaaacctcagggattgagtagtctttccttaactgcagttgcctgtctggccacacctgccagctgttgcttgtacccctgtaatttgcacggccttccgggcctttctcacaagatcactgcaggtcacattcatgaggaaaatgcaggcagttcctgccatcagacccctcaggatgtcatggtttggcctgaaaacaagattcctgcaactctaattttcctttgctagatcaaatgaaggatttgatctaatgtttgcattctagcagcaaaatcattgaatattttatttcttaagagccttacttcatattttgtaggtattttaagattttgtaaaggcctttctgcttcaacgtgtgatgtgtgcattcttagaaaaagatcttgtgttctgtaaatcacacaataaaaacatgagttcgtgcaggaaaaactggggcggggtggatcactccaaacttgtgtggtgtggtaactggagctcactgatgaaaccatgaacagttctggctgaaagaaccccacagtacactgaggtctgttggcatcgccgccagcaccgccccggtccctttgtgcgcgccaccacacctggctaattttttatttttagtagagagggggtttcaccatgttggtcaggatggcctcgaactgacctcgtgatccgcccacctcagcctcccaaagtgctgggattacaggtgtgagcctccgtgcccagccttcagctttttttcttaatgtctttgtgtaatatgaaggcattctctttaattgttaaaaagcttgcctaccactgcttcaaaatattactgtcagttggcatagcttctgattatattgatgtcatctcccttcttttaaacatgttaccatattggcactgtatttcccctagcccattgatcacttgagagttagtcatagtcctcgtgctgtttcactcctaaacgtttaagcatgcctttcctaagagcagacagtacagttaagacactcaggaagtttagcaatgagctaacacagaaccttacatttctccacataccccataaatgccttttttagagcctttgagcctggaatgcagagtccaggactgtgtgttgtattcgattgtgtcatcccttcagtctcctttatcagaaatgttcccccacccccttgttttctctcatcatcttgagtccagaccgtggttgcatggcacgccctctctggactcttcctgctgtctcctcacggtaagcttcagtctcctactcgtgatgctggttcatctcagcagcactgaggggcctgagctcagtttggtcgtgtgttaaggtggtgcctgccagatttctccacagaaaagggccccgtacttttatttgctcttcagcctgtgtattccttcctttcttgccagcttgtgggtggcttctctagcagcttctgtaagatactcagtttggcagttgtagttgtttcagcaggagaggtgtctgcatacctgaccaccacatggctagaagtcgatccatcctctggcgtaaccatcctccatgctactgtccctggggcactgaggccctcctcagtgacttcctccacctcatcttccgccatctccaagccaccagtgtccaacggactactgatatgtcccaaactcatcatttgtttattcaccaattcagagcccacctttttttcagcactgagctagcctctccttgctagaagcttacggtcgaaggtctccagccatcagaagaagcacgtggagcgctgcgtccgtgttgtggttattcatccagcatgtgttgagtaagggttgcacctgtgcctggcattatgcattgagcggggagatgggggttggcacgcacagtggggtgttctaagtacactgagggctcgggtgccctggctcatagagcagggagggaggcaggagcagggaaggtgtctcagaagtgccatctttttttttttttttttgggaagtggaatcttgttctatcgcctggtctggagtgcaatggcactatctcaactcactgcagcctccgcctcccaggttcaagcgattctcatgcctcagtccccgagtagctgggaccacaggcgcacaccaccacacccggcaaatattttgtatttttagtagaggcggagttttgccatgttggccaggctggtcttaaactcctggcctcaagtgatctgctcacctcggcctcctaaggtgttgggattacaggcatgagccactgcgcccggtctagaagtgccatcctaactgaacctgaaagatgaaagttctccagatgaacctgaaagttctccaaatgaaaaggtgggagggggtgacagggttaggcccagagcctctggtgacacagggtgggcatcattggtcactttttcctcgagggaggggcgtcacacgggtgatagggtgggagctataaccatgttgatagtgccgcctctgcccatctggcctggcatgccctgagccctctgtcccacctgtggaactcataagccctgacagcccactcactcctgattcattatccacacccctgtgcttccgctgtgcctggagcaagctttcttcagggggaagggaggctggaactatgttgtagttacctatttgtcctcccttccaaactgtgagttcttggaggtggaaggatgctgcaggatctggctcaggacgaaggcagttggtgaacagacacgtgtgtttttgactcacggtgatctcagacaagttcctctgtctagtcgaacttctttttttccatctgtaacactcaggagttgaataggtggtttttctgaggatacttcaactgtaaaatgtatgaacttgtgaactagctatttagttctcctcataatcaagattgtgtgtgtgtggggggttctgattagagggaggatgaagagaggtgtatggggttttttttgttttgttttctgtttgtttgtttgtttttgagatggagtctcactctgtcacccaggctggagtgcagtggcacgatttcggttcactgcaacctctgcctcctgggttcaagtgattctcctgcctcagcctcctgagtaactgggattacaggcatgcaccaccatgcccagctaatttttgtatttttaatagagatggggttttcgccatgttggccaggctggtctcgaactcctgacctcaggtgatccacctgcctcggcctcccaaagtgctgggattataggcatgagccaccacacctggcaggtttctttgaaaaagtttgtgtttcggcaaacaccataaaccccctgggggacagccttggggagtcacctggcaccctagcccagcctccctcccttgggtcctgcagtgaaggcttagtgagggtgtgcaaatgcccaggtcaccctgggactgggcaggccctctgggctaagggtaaactcatttggaatacctgttttctatcattgttttttatttgttaaatttaaagggtacaagtgcagttttgttgcgtggatatattgtatagtagtgaagtctgagctttcagtgtaaccatcacctgaatagtggacattgtacccgttaagtaatgtctcatccctcaccccctcccacccttcccagtctctccagtgtctgccattcctcactctgtccatgtgcacatgctattcagctcctgcttctaagtgagaacgtacggtatttgactttctgtgtctgagctgtgtcactgaagacaatggactccagctccatccacgttttttatcatttttacctgcactccacacccagcacaatccaggcttctttgtgggttttttgaaatttgtctttaattataaaagtagcagccagcaaattaacaaacacccatgtgcctttcattgcacagaattgaaaatcatcatactatatttgcttcaagtaatttccattagaaagaactagaatattacagtagagttaaagaccctttatttcccatcttcagtgctcttaaaagttcatttagggccaggcatggtggctcacacctataatcccagcactttgagaggcccaggtgggtggatcacctgaggtcaggagttcaagaccagcctggccaacatggcgaaaccccatctctactaaaaatacaaaaattagctgggcgtggtggtgcgcatctgtaatctcagctactcgggaggctgaggcaggagaatcgcttgaactcaggagggaggcagagcctgtatgcagtaagccgagattgcgccaccacaccccagcatgggtgacagagcaagactccgtctcaaaaaaaaaaaaaaaaaagttcattcattgtacacttagaaatagttaaaaaggtaaactttgttttgtgtgtgtgtgtatatatatatatatatatatatatatatatatatatatatatgtatttttttttgagacatatatgtgtctggtttgttcgcccaggcaggagtgcagtggcatgatcaacggctcactgcagcctcaacttcctaggctcaagtgatcctcctgcctcagcctcccgagtagctaggattacaggcacacaccaccatgcccagctaattttttttttttttttttttttttgtagagacagggttttgctatgttgcccaggctggtctcaaactcctgagctcaagcgatccacctgcctcacctcccaaagtgctgggattacaagtgtaagccaccacacctgacctgttttgtatattttaccacaataaaaagcctttaaaaccccaagcagacagttcattttcattcaggcccaactcagaatctgatcacagcggggtttcccccctttctagcgagtagctgaagaactgttttctctccttgatggtataactgtctctgtgggtgttgctcccctgccgctccagtggttttgtttttgtttttgtttttttgagacggagtcttgcgatctcagctcactgcgacctctgcctcctgggttcaggcgattcttctccctcagccttccatgtagctgggacttacaggcacctgccaccacgcccggctcatttttgtatttttagtagagacggagtttcaccatgttggccaggttgggctcgaactccagacctcaggtgatccacctgcctcagcctcccacagtgctgggattacaggtgagagccactgcacccagccggcccctcagtcttttccttctcaatcagtggcaccaccatcttcccaggctttggacatggtccctgactcacccttgcccctcacccccacactaatccacctgcgagctctgttgcttcaccacctagaccagccccaaatcctcaactgcccccaccctgggccacacctggaccactgctagaggcctctcatgggccctccctgtttttctcttgcactccccgggctttctggcacaagatgccccagaagcagaatcacatatctctcctgggagccaatctagtgtgtttactgcccctggagtgttattgttggccttagaatatgtcccactacaggtttgcagagcactgtagtcaaaagtcatttgaaataaatcttttctctgtggtatattgtcaatttgatatagaattaaatttgtttcttttcttttttcttttctttttttttttttttaagagacagggtcttggccaggcgtggtgtctcatgcctgtaatcccggcactttgggaagccaaggtgggtggatcgcctgaggtcaggaattcaagaccaacctggccagcatggtgaaaccccgtctctgctaaaaatacaaaaattagccgggcgtgatggcaggtacctgtaatcccagctactcgggaagctgaggcaggagaaggcttgaactcaggagtcggaggttgcagtgagccaagatcacgccatggcactctagcaagactctgtctcaaaaaaaaaaaaagagagagagagagacagggtcttgctctgtcactcaggctggagtgcagtgatgtagtcatggctcactgcagcctcatactcctgacctcaggtgatcgacccgcctcggcctcccaaagtgctgggatcgtaggctgaagccaccatgcctggcccgaactcatttgtttttatttgcattaagtgtaataaggttttgttacttttagtttgaattttattttgggtaatataaacatttacatgattcagaagtcagaattacactgaggcatgttcagctaggcctcactcctgtgcctgtacccttacctttttccccctaccccatgcagggaatcaatttcattagttcctggtgtgtccttccttaatacccccccttctttctttggtagaatgcagtagatatgtttgcgctttgctccctttgcttcacagtggatcctggaaatgactccatcgcagttcttagagctcttgtttagtccctttggatctgcacagtactccagtgtgtgggcgcaccataagtttattcagcaagtgccctggtgatagggatcgggggtattggaagcctttggctggtaaaaataatgttgtagcaaataacatcatgcatatgttctttgagatttctggaggtgtctctttagcatagatttctagaaggcattccttacgtcacgtttaggtttatagtttgacctcatggtgattaaggtatttgggaaatgcaaatgagagtttcgaagaagccagatctttcccattagttcactgtttttctctgacattaggaccgtccgggttctagggagcagccctggcgttaggcagtgccatgatggattgtgtagaagtagcgattcccatctgtctgctttcttggcccactctgctggtggctccccttccctccctcctttatggggagctggggagctgcctaggggtccattctcaaaggctgatctctggtgggcaacaggccacacctagctttccagggttcttcgtcatttcccattgagagctgtaagactcagagacatgaaaaggaagctctggctgggcacggtggctcacgcctgtaatcccagcactttgggaggctgaggcgggtcgatcacctgaggtcaggagttcgagaccagcctgcccaacatggtgaaaccccgtctccactaaacatacaaaaattagcctggcgtggtagcacacgcctgtgatcccagctactccggaggctgaggcaggagaataacttgaacccggcaggcggaggttgcgatgagccgatattatgccatcggcaacagagcgagactccatctcaaaaaaaaaacaaaaaacaaaacaaggcgagctctgtgctgggacagattagggacccctctttacagcaagaaagactgctctgtgggttgtaggatgcctttgtgtatgcagtggctctaggtgactctggcagccacactctgggccctaaacttctggaggaagatacaggatagggaggaactcaggggtgagtcatggtggggacaagacattccctcactctaagaccttgtcactagattggaacatctcttgcctccct

SEQ ID NO: 24 - DNA, 663 bp, Homo sapiens
tttaaccagagttgatttctgttgcttgaaactcaggaccttgatgcagtgtgcagggtctgggcaaggtaaaaacacactttcatgatttcgcctcaagtatagtagatgagcttaggctttttgagccaggtagccttgggattaattctcagctcttgcacctagcaggtgacctcagcaatcaagtcacttgccctccttgagcctcagtgttgccctcagttaaacattgctctcgtgtgttgctgagcattcagtgagattgtatataaagtgatcattgtgaaggtattgggacataatttgggaaagcgtcctggtctaagcttttgattggctctccatcatttgggtaatgggatagtgatttaggagtatcatagcagctcaaggggcccttctggaaagggtatgaggaaggtcagggacaagtctgaaatgaatcatcctaggcttaatgcctgtgactgggcagtgggtacaattatctcaggctagtcagtagtcatttattgtgagaatacatgggcagattttttaatttccttctcagtctagacttgaatgcaaacagttcttattgctaacttaccactagtcaccactaatgaacaaagactatgaacaggaaattcataaaagaagagatacagatggcca

SEQ ID NO: 25 - DNA, 6879 bp, Homo sapiens
aaagccgtccggaaaatggccgccgccgccgccgccgcgccgagcggaggaggaggaggaggcgaggaggagagactgtgagtgggaccgccgtggccgcgggcggggacccttgccggggggcgggggtcaggggcgggacgtggcgcgggaggggcccgcggggtcggacgacacggctggcggatggcgtccctcctctctaccctccccctcccgccgccgccggtggcgactctcccctcggcccgtcacccctgctcgcgggtgaccgtcctcggcgcggcctccctggagccgccttcgcctgacgcccctcttcctcccgccctcgacgcgcatcccggcccccggccccgcgggcgcccctgtcgccggggcttcgcctgtcggggctgcgcgcgctcctgcccttctcggggctttgggccgcggcgccgtcgcgcgcccgcggccccggcctctccctggatcgcgctctccccctccctccctcgcgcgccccctctcccgttactcggcccccccaccggcgcgcgtgcgcacttcgcctcccgtcgggagagtgcgccacaagggctcctgagctctcacccccatctctgggctttgcctccccctccttctcgcccattccatgaatttctgccccccgctacccccccgcgagcgagtaggtccaccggctcctttccccatctagcaggaacaagtaggtggggattattatccacaaaagggactagacattgtgttctgggtcccacaactcatcataaagaggtggttatagttcccatcaggagccgtgggtaggggactgtgcgtccagcagcacccgaggctcttcggcgccagaggctctaaggtgcgagcgtgtccccagggtgctcagaggttctttggagtgctgtggcctcggaatgtgagcaccctcccatcctaccctccccttcgccggcgatcttccagttacataagtggagtgggacatagtaggtaacgggctctcatcgccctggagcgctcgggatcaccggtaccagatggggcaagttcatcgcgacgctgtggctcctgttaattgtgcctgaaaggttatcctctgttcagtttggtcatgaccgaatcacccaaactgaaactcagatgacttttatatggcagtggcaatgtttctgtggttttgcactaaagacttaaggtcattatgaagagtgtaaaaggattgctgtcgcaggggagaccgtttatgacattgctaagtatggaccccgagggggaaaaagctcattctggaattgctctgtggcggttgcttctgttgcgagtgtgttcgggtgtgggttggtcacagcagaaatgggctccaccacaaaattgatattcctgactcatggtcaggcagatgtgtgcttctggttatttttccaggaacaggaatgggctctgccgagcctttcacacgttgtgtctctgctgtgcgggatcagtaccccagactgtgagataacaggatcgaattcaggggttggttggtgatccaggaaccatacctacttggatgtgatactgagtggcctagacgttgtaggactctcataagttttagacattttgttatactgtaaaaatgaagcatatacggcctcagtagtaacattgcactaataggtaattattactctagagaattttgggttccatggctggaatgttcatcagtatctcagcaatttcagttaataaccagattaagctgacctcttgagtcttttgaaatctgctgggtccctataataagacagggtctggattttttaatcttttgggaatttccaccaaggatttagggaaataggcttttatgggcttttcaggatttctatttcaaatcccaatgaggaagtctaggaaacacttgcttttattttcttgcctgaatatgtcagaaccttaaatcacccaatcaatctagaagtactacagttgattaaagtaagtcaccacaggtcacccattcgtggcaggtcagctaggtggctgatcactggaatacagtcatatccccaggcatacacacgagcctcacttgacgatcccaaagtttgtacatctgagcttgagacgtgacaagttgaggtctctgctttgttcttcatagttggcagtttgtctcctcgggtgcccctccggttagctgtttatcatacgtctagccctatcaacagtgcaggcagcttccagagtatagttttctctgcaaagtgcctggtggaggggtacctccttttccattgtcctaatggctccactgggcttccataccagccctttccagtgtcttaacagctcaaagaaacccatctgtggctttcttgttagcactggcctatcacaccttcctattgcctgttaactaaaattttgcctggaatgctttaagcttagagtactgggtctttgtttcacccgattgataggagagtgtcatgcagtcagccgaactccgacttctgtgctgtttaaatccttaggtaggtctggggcaaggcacaaaccactgtgtattcaaagggttatggtgcttgcattctgtgtgtatatgtttgtaatttccaaccagagtcgtttcccgtgcctgccctgcctctgtgcaatctagtctagtagggtagggaggcaagctgtggagtttgaaaaaaaaaaaaaaaagctagatgagtttaataggctgttaccccctccagaacattcctcccatgtggagatgaaacgagaagttcatttctttaacctaaaataaagaacaacagagataaaattgttagttccttattggagcctggtttccattgctaatgtacctgcttgggactctgcatgataaatgacgtgtcctggaacctgaaatcttttataaaggttaatatcagcagaaatcttttaattagctaagagcagcttgttctcaagctgcccgagttatcttggaggagagaatcacaggaaatgtttgatatttctagtaaccagtgttttcagtgcgtggggtaaagcacactcctagactggccagtcccaaagagtgtggcaggacacctgcttgttttccctgccctctgctatggtgacatccttgcagaccagtcttgcgtggctggcagacgcaatctttttttcttgggtagagcattatcaccgctgcgatggaaggaccttgtcctcggtgcctccataccagccctttccagtgaaactactgctgtcccggcaagcccctgtgcgtgtgcatcattccgggtaggacaagatgtgaacaggtccctcttctttgggcttaagtagaagttgtgctcttctgcttttacctgtgtgctcttctgcttttacctgttctcttctgcctttctcttgcaagaaacctgtcgaaagcttgctttgcatgccattgcttaaatactttgatggtatgtatggtatgtgggataactgagtgggagccggaattggggggtgggcagggcatccccacccccacccccacatcaaagggggaatgaccatttcgttagagaataaagcctgagtcttataacttcttcaagcacatgtatgctgggtctcctggcgtgtgaatgtgttcccgctgtgctgtgtggctgttttgcagttactgtagacactgtagtctgggctctcattattgcctctgaagttgacaggaccaagccttagtaaggatgcacttgtcttcctagcccaagagctaggggtgttttatatatatattaactttcttttttagatttcataaactgctctcattttctcttttctttctttctttttttttttttttttttgagacagtctcactctgtcacccatgctggagtgcagtggcacgatctcagctcactgcaacctctgcctcccgggctcaagcagttctctgcctcagcctcccaagtagctgggattacaggcacctgccaccacgcctggctaatttttgtatttttttttttttttttttttttttttagtcgagacggggtttcaccatcttggccacgctggtcttgaactcctgacctcgtgatccacccgcttcagcctcccaaagtgcagggattacaggcgtgagccaccgcacccagcctctggctcttttctttttgacatgaaatcttaagttaattatcttaaactttaagaactagaaggattcttagtccagcaccatcagtttacaaacaaaaaaaacttgtgtccctgagaagttgtgacttttccagggcctcctagccaggataccagtttggtttttattatatagctagccgagtaatactattaacttgacttctgggatttcaaagtattctatgacttgactgtttaagggaattatgaggcctcactgaacctcaaaagataattttaggtaccatcctggtagctgtagagcagcaacagaccagtaaaagacttggttggtgttgcccttcttctgggtttgattacatgagtaattgtgtgaatagtctctaagttgtatgctctgagctttcgtttttagcttataaaagtgctactcttgggccagcatagtatcagaaattagctaattcatatggggcagtttaggctttaactaggaaatgatggttatcttaatgacaaaaaaggtactgacaaaagtccttttttgaacatgtgttcaaaagaaaaagagaaactatcaaactaataactgagtttgttgaacatcgagattgactgatctgagaggcttaaaactgattgccctgaaatagacttgcatgttttggatgatggctttgggtctcccagagcacttggtttcccttggtgctgattttttctctcaggattaaagcccctttatgtgatgttgttacagcagcttattgcaacttcattcagctgcttgaaaaagaagggagactgcctctaggttccatgtgttctttcagggatggtattttgatgttgcgtattctcttgaacatgtattcttccctgagaatttctgtgtgccgtggtagaagaaatacttgccagaaatcgccactcatggtatgcttttgtagtgtcgaagtgtcccctagaggtgacaaggcttgtgatagtgttgattctaacaagcatgaatctttcctttattttagcactgtgtgttacgtgccagtaatttgcagcttatcctttgtttctagctaggtaagctgggaaatagcctagtactttgtctatgtgtttatcttcaaaatgtcccaaatagccctgggaaaaaggtcgtgcagctcaatgggggctttcaacttacaattttctttgttttaggctccataaaaatacagactcaccagttcctgctttgatgtgacatgtgactccccagaatacaccttgcttctgtagaccagctccaacaggattccatggtagctgggatgttagggctcaggtaagtaaccttcctttttttttttttagtatatgtcctggtttggccatctgttttttttttttttaaaaaaaaaaaaaaaaggaaaagaggaaaaaaatatactactcttggacagtataaaagtaccccaaagactaaagacataactgtgccaaactgtgccatataataaaaaaaagtcacttccctgagccctgaaaggtcagtgtgtgtagggttacttggtcgccacagcgtgatctgggggcgggcgtcagattagagccggaactggtgatctgcaacttcagttcaccttgaagcaggtcagctgagctgagagcgcttgcactgagcccttttgcgctgctgctgttgccttagcggtcttcagcatgtgtttgctttggtttggggtaaatggcttagtggtcaacattagtgagcagtggtaatgcattttcagatatgggaactggtatgtggttggttccctagaaggacaccctcctgaaagctgtctcagaacaccgggggccatggctaatgtcatgtgcttgctacactcctcccatggtaactaaagagagtacccagatatacatctggttcttgggactctagaggaggatgagtactttgtaaaaacctgggggccccagtcattctaggtctgacactcaggtgctgtatcagctgcagtttgaactacttggcaccattgtgtggactttagttttgtaaaaatgaatggttccttaatttctcaaccttcaggctcaacatctcaagctgtttgttgttgttgttgttgttgttgttttgttttgtctttttgattagtggtcactccgcatttgatgttttgacatgtggatttcagaacttctgtgtggtaaagcagaatgttccaattgaattttcccattttttttcccctaagcaaaaatgtgagttttcacttatgcggccattgtgattccgactgagaccctaagtcgttctttgttgtctctctagtggtttctgacacctcagtgtgaagctgttgtagacatccataagaaatagcctgcttagggattatgtgagggcaaggtttggctgaaggagaatagaaggtgtggaaggaagcggaagaccagaagagcatcacactgcctcaagtcccaaatttgattctgctcctgatcctgtgactcaaattgtcattctcttttactgctgtggggtgtgctctgggcccagctgacaggacattctttgtactccacgtatttatgctggtgggagttgtatggctagtgctttgtgctttgtctcagaaattgtgtggactaaatgtaatatgggcagtgaatgggtttcttctggaagatgttaggcctggagggtggttt

SEQ ID NO: 26 - DNA, 2549 bp, Homo sapiens
ctggaacctgaaatcttttataaaggttaatatcagcagaaatcttttaattagctaagagcagcttgttctcaagctgcccgagttatcttggaggagagaatcacaggaaatgtttgatatttctagtaaccagtgttttcagtgcgtggggtaaagcacactcctagactggccagtcccaaagagtgtggcaggacacctgcttgttttccctgccctctgctatggtgacatccttgcagaccagtcttgcgtggctggcagacgcaatctttttttcttgggtagagcattatcaccgctgcgatggaaggaccttgtcctcggtgcctccataccagccctttccagtgaaactactgctgtcccggcaagcccctgtgcgtgtgcatcattccgggtaggacaagatgtgaacaggtccctcttctttgggcttaagtagaagttgtgctcttctgcttttacctgtgtgctcttctgcttttacctgttctcttctgcctttctcttgcaagaaacctgtcgaaagcttgctttgcatgccattgcttaaatactttgatggtatgtatggtatgtgggataactgagtgggagccggaattggggggtgggcagggcatccccacccccacccccacatcaaagggggaatgaccatttcgttagagaataaagcctgagtcttataacttcttcaagcacatgtatgctgggtctcctggcgtgtgaatgtgttcccgctgtgctgtgtggctgttttgcagttactgtagacactgtagtctgggctctcattattgcctctgaagttgacaggaccaagccttagtaaggatgcacttgtcttcctagcccaagagctaggggtgttttatatatatattaactttcttttttagatttcataaactgctctcattttctcttttctttctttctttttttttttttttttttgagacagtctcactctgtcacccatgctggagtgcagtggcacgatctcagctcactgcaacctctgcctcccgggctcaagcagttctctgcctcagcctcccaagtagctgggattacaggcacctgccaccacgcctggctaatttttgtatttttttttttttttttttttttttttagtcgagacggggtttcaccatcttggccacgctggtcttgaactcctgacctcgtgatccacccgcttcagcctcccaaagtgcagggattacaggcgtgagccaccgcacccagcctctggctcttttctttttgacatgaaatcttaagttaattatcttaaactttaagaactagaaggattcttagtccagcaccatcagtttacaaacaaaaaaaacttgtgtccctgagaagttgtgacttttccagggcctcctagccaggataccagtttggtttttattatatagctagccgagtaatactattaacttgacttctgggatttcaaagtattctatgacttgactgtttaagggaattatgaggcctcactgaacctcaaaagataattttaggtaccatcctggtagctgtagagcagcaacagaccagtaaaagacttggttggtgttgcccttcttctgggtttgattacatgagtaattgtgtgaatagtctctaagttgtatgctctgagctttcgtttttagcttataaaagtgctactcttgggccagcatagtatcagaaattagctaattcatatggggcagtttaggctttaactaggaaatgatggttatcttaatgacaaaaaaggtactgacaaaagtccttttttgaacatgtgttcaaaagaaaaagagaaactatcaaactaataactgagtttgttgaacatcgagattgactgatctgagaggcttaaaactgattgccctgaaatagacttgcatgttttggatgatggctttgggtctcccagagcacttggtttcccttggtgctgattttttctctcaggattaaagcccctttatgtgatgttgttacagcagcttattgcaacttcattcagctgcttgaaaaagaagggagactgcctctaggttccatgtgttctttcagggatggtattttgatgttgcgtattctcttgaacatgtattcttccctgagaatttctgtgtgccgtggtagaagaaatacttgccagaaatcgccactcatggtatgcttttgtagtgtcgaagtgtcccctagaggtgacaaggcttgtgatagtgttgattctaacaagcatgaatctttcctttattttagcactgtgtgttacgtgccagtaatttgcagcttatcctttgtttctagctaggtaagctgggaaatagcctagtactttgtctatgtgtttatcttcaaaatgtcccaaatagccctgggaaaaaggtcgtgcagctcaatgggggctttcaacttacaattttctttgttttaggctccataaaaatacagactcaccagttcctgctttgatgtgacatgtgactccccagaatacaccttgcttctgt

SEQ ID NO: 27 - DNA, 2558 bp, Homo sapiens
cccgcggggtcggacgacacggctggcggatggcgtccctcctctctaccctccccctcccgccgccgccggtggcgactctcccctcggcccgtcacccctgctcgcgggtgaccgtcctcggcgcggcctccctggagccgccttcgcctgacgcccctcttcctcccgccctcgacgcgcatcccggcccccggccccgcgggcgcccctgtcgccggggcttcgcctgtcggggctgcgcgcgctcctgcccttctcggggctttgggccgcggcgccgtcgcgcgcccgcggccccggcctctccctggatcgcgctctccccctccctccctcgcgcgccccctctcccgttactcggcccccccaccggcgcgcgtgcgcacttcgcctcccgtcgggagagtgcgccacaagggctcctgagctctcacccccatctctgggctttgcctccccctccttctcgcccattccatgaatttctgccccccgctacccccccgcgagcgagtaggtccaccggctcctttccccatctagcaggaacaagtaggtggggattattatccacaaaagggactagacattgtgttctgggtcccacaactcatcataaagaggtggttatagttcccatcaggagccgtgggtaggggactgtgcgtccagcagcacccgaggctcttcggcgccagaggctctaaggtgcgagcgtgtccccagggtgctcagaggttctttggagtgctgtggcctcggaatgtgagcaccctcccatcctaccctccccttcgccggcgatcttccagttacataagtggagtgggacatagtaggtaacgggctctcatcgccctggagcgctcgggatcaccggtaccagatggggcaagttcatcgcgacgctgtggctcctgttaattgtgcctgaaaggttatcctctgttcagtttggtcatgaccgaatcacccaaactgaaactcagatgacttttatatggcagtggcaatgtttctgtggttttgcactaaagacttaaggtcattatgaagagtgtaaaaggattgctgtcgcaggggagaccgtttatgacattgctaagtatggaccccgagggggaaaaagctcattctggaattgctctgtggcggttgcttctgttgcgagtgtgttcgggtgtgggttggtcacagcagaaatgggctccaccacaaaattgatattcctgactcatggtcaggcagatgtgtgcttctggttatttttccaggaacaggaatgggctctgccgagcctttcacacgttgtgtctctgctgtgcgggatcagtaccccagactgtgagataacaggatcgaattcaggggttggttggtgatccaggaaccatacctacttggatgtgatactgagtggcctagacgttgtaggactctcataagttttagacattttgttatactgtaaaaatgaagcatatacggcctcagtagtaacattgcactaataggtaattattactctagagaattttgggttccatggctggaatgttcatcagtatctcagcaatttcagttaataaccagattaagctgacctcttgagtcttttgaaatctgctgggtccctataataagacagggtctggattttttaatcttttgggaatttccaccaaggatttagggaaataggcttttatgggcttttcaggatttctatttcaaatcccaatgaggaagtctaggaaacacttgcttttattttcttgcctgaatatgtcagaaccttaaatcacccaatcaatctagaagtactacagttgattaaagtaagtcaccacaggtcacccattcgtggcaggtcagctaggtggctgatcactggaatacagtcatatccccaggcatacacacgagcctcacttgacgatcccaaagtttgtacatctgagcttgagacgtgacaagttgaggtctctgctttgttcttcatagttggcagtttgtctcctcgggtgcccctccggttagctgtttatcatacgtctagccctatcaacagtgcaggcagcttccagagtatagttttctctgcaaagtgcctggtggaggggtacctccttttccattgtcctaatggctccactgggcttccataccagccctttccagtgtcttaacagctcaaagaaacccatctgtggctttcttgttagcactggcctatcacaccttcctattgcctgttaactaaaattttgcctggaatgctttaagcttagagtactgggtctttgtttcacccgattgataggagagtgtcatgcagtcagccgaactccgacttctgtgctgtttaaatccttaggtaggtctggggcaaggcacaaaccactgtgtattcaaagggttatggtgcttgcattctgtgtgtatatgtttgtaatttccaaccagagtcgtttcccgtgcctgccctgcctctgtgcaatctagtctagtagggtagggaggcaagctgtggagtttgaaaaaaaaaaaaaaaa

SEQ ID NO: 28 - DNA, 124 bp, Homo sapiens
gctccataaaaatacagactcaccagttcctgctttgatgtgacatgtgactccccagaatacaccttgcttctgtagaccagctccaacaggattccatggtagctgggatgttagggctcag

SEQ ID NO: 29 - DNA, 65046 bp, Homo sapiens
gtgagtgggaccgccgtggccgcgggcggggacccttgccggggggcgggggtcaggggcgggacgtggcgcgggaggggcccgcggggtcggacgacacggctggcggatggcgtccctcctctctaccctccccctcccgccgccgccggtggcgactctcccctcggcccgtcacccctgctcgcgggtgaccgtcctcggcgcggcctccctggagccgccttcgcctgacgcccctcttcctcccgccctcgacgcgcatcccggcccccggccccgcgggcgcccctgtcgccggggcttcgcctgtcggggctgcgcgcgctcctgcccttctcggggctttgggccgcggcgccgtcgcgcgcccgcggccccggcctctccctggatcgcgctctccccctccctccctcgcgcgccccctctcccgttactcggcccccccaccggcgcgcgtgcgcacttcgcctcccgtcgggagagtgcgccacaagggctcctgagctctcacccccatctctgggctttgcctccccctccttctcgcccattccatgaatttctgccccccgctacccccccgcgagcgagtaggtccaccggctcctttccccatctagcaggaacaagtaggtggggattattatccacaaaagggactagacattgtgttctgggtcccacaactcatcataaagaggtggttatagttcccatcaggagccgtgggtaggggactgtgcgtccagcagcacccgaggctcttcggcgccagaggctctaaggtgcgagcgtgtccccagggtgctcagaggttctttggagtgctgtggcctcggaatgtgagcaccctcccatcctaccctccccttcgccggcgatcttccagttacataagtggagtgggacatagtaggtaacgggctctcatcgccctggagcgctcgggatcaccggtaccagatggggcaagttcatcgcgacgctgtggctcctgttaattgtgcctgaaaggttatcctctgttcagtttggtcatgaccgaatcacccaaactgaaactcagatgacttttatatggcagtggcaatgtttctgtggttttgcactaaagacttaaggtcattatgaagagtgtaaaaggattgctgtcgcaggggagaccgtttatgacattgctaagtatggaccccgagggggaaaaagctcattctggaattgctctgtggcggttgcttctgttgcgagtgtgttcgggtgtgggttggtcacagcagaaatgggctccaccacaaaattgatattcctgactcatggtcaggcagatgtgtgcttctggttatttttccaggaacaggaatgggctctgccgagcctttcacacgttgtgtctctgctgtgcgggatcagtaccccagactgtgagataacaggatcgaattcaggggttggttggtgatccaggaaccatacctacttggatgtgatactgagtggcctagacgttgtaggactctcataagttttagacattttgttatactgtaaaaatgaagcatatacggcctcagtagtaacattgcactaataggtaattattactctagagaattttgggttccatggctggaatgttcatcagtatctcagcaatttcagttaataaccagattaagctgacctcttgagtcttttgaaatctgctgggtccctataataagacagggtctggattttttaatcttttgggaatttccaccaaggatttagggaaataggcttttatgggcttttcaggatttctatttcaaatcccaatgaggaagtctaggaaacacttgcttttattttcttgcctgaatatgtcagaaccttaaatcacccaatcaatctagaagtactacagttgattaaagtaagtcaccacaggtcacccattcgtggcaggtcagctaggtggctgatcactggaatacagtcatatccccaggcatacacacgagcctcacttgacgatcccaaagtttgtacatctgagcttgagacgtgacaagttgaggtctctgctttgttcttcatagttggcagtttgtctcctcgggtgcccctccggttagctgtttatcatacgtctagccctatcaacagtgcaggcagcttccagagtatagttttctctgcaaagtgcctggtggaggggtacctccttttccattgtcctaatggctccactgggcttccataccagccctttccagtgtcttaacagctcaaagaaacccatctgtggctttcttgttagcactggcctatcacaccttcctattgcctgttaactaaaattttgcctggaatgctttaagcttagagtactgggtctttgtttcacccgattgataggagagtgtcatgcagtcagccgaactccgacttctgtgctgtttaaatccttaggtaggtctggggcaaggcacaaaccactgtgtattcaaagggttatggtgcttgcattctgtgtgtatatgtttgtaatttccaaccagagtcgtttcccgtgcctgccctgcctctgtgcaatctagtctagtagggtagggaggcaagctgtggagtttgaaaaaaaaaaaaaaaagctagatgagtttaataggctgttaccccctccagaacattcctcccatgtggagatgaaacgagaagttcatttctttaacctaaaataaagaacaacagagataaaattgttagttccttattggagcctggtttccattgctaatgtacctgcttgggactctgcatgataaatgacgtgtcctggaacctgaaatcttttataaaggttaatatcagcagaaatcttttaattagctaagagcagcttgttctcaagctgcccgagttatcttggaggagagaatcacaggaaatgtttgatatttctagtaaccagtgttttcagtgcgtggggtaaagcacactcctagactggccagtcccaaagagtgtggcaggacacctgcttgttttccctgccctctgctatggtgacatccttgcagaccagtcttgcgtggctggcagacgcaatctttttttcttgggtagagcattatcaccgctgcgatggaaggaccttgtcctcggtgcctccataccagccctttccagtgaaactactgctgtcccggcaagcccctgtgcgtgtgcatcattccgggtaggacaagatgtgaacaggtccctcttctttgggcttaagtagaagttgtgctcttctgcttttacctgtgtgctcttctgcttttacctgttctcttctgcctttctcttgcaagaaacctgtcgaaagcttgctttgcatgccattgcttaaatactttgatggtatgtatggtatgtgggataactgagtgggagccggaattggggggtgggcagggcatccccacccccacccccacatcaaagggggaatgaccatttcgttagagaataaagcctgagtcttataacttcttcaagcacatgtatgctgggtctcctggcgtgtgaatgtgttcccgctgtgctgtgtggctgttttgcagttactgtagacactgtagtctgggctctcattattgcctctgaagttgacaggaccaagccttagtaaggatgcacttgtcttcctagcccaagagctaggggtgttttatatatatattaactttcttttttagatttcataaactgctctcattttctcttttctttctttctttttttttttttttttttgagacagtctcactctgtcacccatgctggagtgcagtggcacgatctcagctcactgcaacctctgcctcccgggctcaagcagttctctgcctcagcctcccaagtagctgggattacaggcacctgccaccacgcctggctaatttttgtatttttttttttttttttttttttttttagtcgagacggggtttcaccatcttggccacgctggtcttgaactcctgacctcgtgatccacccgcttcagcctcccaaagtgcagggattacaggcgtgagccaccgcacccagcctctggctcttttctttttgacatgaaatcttaagttaattatcttaaactttaagaactagaaggattcttagtccagcaccatcagtttacaaacaaaaaaaacttgtgtccctgagaagttgtgacttttccagggcctcctagccaggataccagtttggtttttattatatagctagccgagtaatactattaacttgacttctgggatttcaaagtattctatgacttgactgtttaagggaattatgaggcctcactgaacctcaaaagataattttaggtaccatcctggtagctgtagagcagcaacagaccagtaaaagacttggttggtgttgcccttcttctgggtttgattacatgagtaattgtgtgaatagtctctaagttgtatgctctgagctttcgtttttagcttataaaagtgctactcttgggccagcatagtatcagaaattagctaattcatatggggcagtttaggctttaactaggaaatgatggttatcttaatgacaaaaaaggtactgacaaaagtccttttttgaacatgtgttcaaaagaaaaagagaaactatcaaactaataactgagtttgttgaacatcgagattgactgatctgagaggcttaaaactgattgccctgaaatagacttgcatgttttggatgatggctttgggtctcccagagcacttggtttcccttggtgctgattttttctctcaggattaaagcccctttatgtgatgttgttacagcagcttattgcaacttcattcagctgcttgaaaaagaagggagactgcctctaggttccatgtgttctttcagggatggtattttgatgttgcgtattctcttgaacatgtattcttccctgagaatttctgtgtgccgtggtagaagaaatacttgccagaaatcgccactcatggtatgcttttgtagtgtcgaagtgtcccctagaggtgacaaggcttgtgatagtgttgattctaacaagcatgaatctttcctttattttagcactgtgtgttacgtgccagtaatttgcagcttatcctttgtttctagctaggtaagctgggaaatagcctagtactttgtctatgtgtttatcttcaaaatgtcccaaatagccctgggaaaaaggtcgtgcagctcaatgggggctttcaacttacaattttctttgttttaggctccataaaaatacagactcaccagttcctgctttgatgtgacatgtgactccccagaatacaccttgcttctgtagaccagctccaacaggattccatggtagctgggatgttagggctcaggtaagtaaccttcctttttttttttttagtatatgtcctggtttggccatctgttttttttttttttaaaaaaaaaaaaaaaaggaaaagaggaaaaaaatatactactcttggacagtataaaagtaccccaaagactaaagacataactgtgccaaactgtgccatataataaaaaaaagtcacttccctgagccctgaaaggtcagtgtgtgtagggttacttggtcgccacagcgtgatctgggggcgggcgtcagattagagccggaactggtgatctgcaacttcagttcaccttgaagcaggtcagctgagctgagagcgcttgcactgagcccttttgcgctgctgctgttgccttagcggtcttcagcatgtgtttgctttggtttggggtaaatggcttagtggtcaacattagtgagcagtggtaatgcattttcagatatgggaactggtatgtggttggttccctagaaggacaccctcctgaaagctgtctcagaacaccgggggccatggctaatgtcatgtgcttgctacactcctcccatggtaactaaagagagtacccagatatacatctggttcttgggactctagaggaggatgagtactttgtaaaaacctgggggccccagtcattctaggtctgacactcaggtgctgtatcagctgcagtttgaactacttggcaccattgtgtggactttagttttgtaaaaatgaatggttccttaatttctcaaccttcaggctcaacatctcaagctgtttgttgttgttgttgttgttgttgttttgttttgtctttttgattagtggtcactccgcatttgatgttttgacatgtggatttcagaacttctgtgtggtaaagcagaatgttccaattgaattttcccattttttttcccctaagcaaaaatgtgagttttcacttatgcggccattgtgattccgactgagaccctaagtcgttctttgttgtctctctagtggtttctgacacctcagtgtgaagctgttgtagacatccataagaaatagcctgcttagggattatgtgagggcaaggtttggctgaaggagaatagaaggtgtggaaggaagcggaagaccagaagagcatcacactgcctcaagtcccaaatttgattctgctcctgatcctgtgactcaaattgtcattctcttttactgctgtggggtgtgctctgggcccagctgacaggacattctttgtactccacgtatttatgctggtgggagttgtatggctagtgctttgtgctttgtctcagaaattgtgtggactaaatgtaatatgggcagtgaatgggtttcttctggaagatgttaggcctggagggtggtttgggtttttacgagtctttttctcagattacagattacgaatggatgttataaaacaggcagtgttgacaccatacagtttctcctaagaaatgtacagagagttcaacctgaggaagctaattgaaaataaacttttaaaaagaaatgtagaaagaggaaatttaaaaagtatcttatgaatgggaaagatgtagccatttgagcttcaaagaacttttgagggaattctcaaaggacagtacccgtctttagtagataaatgcttgatatctatttttcttcttttactttttaaagaattactaaaataatacatggatttatagaaaaatcaaaccacttaaaaattgatcaggtggctgggcaaggtggctcatgcctgtaatcacagcgctttgggaggcctaggcgggtggatcacctgaagtcaggagttcgagaccagcctggctaacacggcgaaaccccatctctattaaaaatacaaaaattagctggccatggtggcttgagcgtgtagtcccagctactcggaaggctgaggcaggagaatcacttgaacctgggaggcggaggttgcagtgagccaagatcacaccactgaactcctgcctgggtgacagagtgagactcggtctcaaaaaaaaaaaaaaaaaaaagtatcaggtaaaaaaatgaaagctccccgcttaatctctgctcccactacccagaataactgctgttaatagcttaatgtagatccttctaagtcttctaagactaaactgtgtactttttgtgttgtaattaacaggagggtttttgttttgttttgttttttctttttttgagatggagtcttgctctgtcatccaggctggagtacagtggcacaatcttggctcactgcaacctccacctcctgggttcaagtgattctcctgcctcagcctcctgagtagctgggattacaggcgcctgccaccacacccagctaatttttgtatttttagtagagatgggtttcaccatgttggccaggctggtgtcgaactcctgacctcaggcgatccacctgccttggcctcccaaagtgctgggattacaggcgtgagccaccgtgcctggcctcaggatggtgttatatatacatattctgcatttttccatctcatatattcatctctgcctcatttcttttaaatagcagtgtagtccagggctgacttaccgtcatgcatttcgttgtctctctatgttattaaaaatgctacaggattgaaattcctcatgtgccagtcattttgaagaatggctgcctagacttggaatttctggtggataccaccacatcactgtccaaaatggctatcccagttcccacaacagtctgagaaagtgccattttcccatatcgtcccagaattggatatacatcttttaaattggtgccgcttggattattactgaggctaaacctcaataatcattgtcatagctcttaatgtattaaagatgttaactctttgtcatgcagatattttcctgttttgtcttacgtcttgattcttgtctttctgatatataaaatttatgttatgatttattcttttgctttcatacttaggaaatccttttttactcttttttttttttttttttttttttttgagacggagtctcgctctgtcgcccaggttggagtgcaatggcgtgatcttggctcactgcaagctccatctcccgggttcattccattctcctgcctcagcctcccgagtagctgggactacaggcgcccgccaccacgcctggctaatttttttgtatttgtgagacagggtttcaccatgttagccaggctggtctcgatctcctgaccttgtgatccgcccgtctctgcctcccaaagtgctgggattacaggcgtgagccaccgcgccccgccaggaaatcctttcctactcttaacaacagatcaatagtcatctatattttcttcctaaaaaacctgatgatgtattatattcatacatacgtatttaatacatacaaaagggccagatgcggtggctcatgcctgtaatcccagcactttgggaggctgaggcgggtggatcacctgaggtcaagagttcaagaccagcctggccaagatggtgaaatcccgtctctactaaaaatacaaaaattagccaggcgtggtggcgggcacctgtaatctcaactactggggtgactgaggcaggagaatcgcttgaacccaggaggcagaagtttcggtgagccaagatcacgccactgcactcctgcctgggcgatagagtgaggctctgtctcaaaaataaaaaataaaaataataattttatagttaagttgccctgtgtttttcctgtgattaaaaaaaaaaatacctgttttgtatttaactttggggtgggataaggtatagcccacttagtcagttgtgtctaagccacttgatgaaccagtcaatccagtcttcacctttaacaaatgctgatttcttcaagtgagcaaaatatctcttaaactttttcctattttctctataaagttgcttttttctgaattttttctttatgaggcttgatgggcagccctatcagcagacaatcattcattcacccaacaaatatttgagtatctgcttcaagccaggggcagtgctaagccctggaagtggtatcttctccttatccgggagtggggctacagtgttcattccagaagactcaagaaaatagcagatcatcacaaaagtaggttttacataaatgaggaggaatccacagggttgtgtatatgtgtgtgtattttaaattctgacataagttggagctttagggtagactgtgacataagagtagtttgttttccaactcatgtaattgccggctgatttttgtcttgaattatgataatggtaacttctgttgaaacaattctgtattcatcttagcttggttgggatgcaataaaagttttgtactggtaaaaatgataattttcttccatgatgattttgaagcttttctgtaacacctgataaaaatagaggggccaggcatggtggctcatgcctgtagtcccagctactcgggaggatgaggtgagaggatcccatgagcccaggagttttaggctacagtgagccatcatcacaccactgtactcctgtactctagcctgggcagcctcgttctttagagtaagacactgtctctttaaaaaaaaaaaaaaagaaaaaagaaaaaaagaaaaggcttttagtgaatatatttttagggtagcaagtgtaatttttataaattgcattatttgaatctaataaataccctcaaagctgaagtcgaattctgattttgattgaaaatattttttacttaaaggaagagggatagaataaatgacacgattaaggaaaagacttcttgtataaggccggggttttttaaatgattttttgaatagttagatggacaatacggaattaaaaaggtggtgtaaaaagttatacggggctgggcacagtgactcacgcctgcaatcccagtactttgggaggccgaggtgggtggatcacctgaggtcaggagttcgagaccagcctagccaacatgacgaaacatcatttctactaaaaatacaaaaattagctgggcttggtggtatgcacctgtaatccagctactcgggaggctgaggcagaagaatcgtttgaacccaggaggcagaggttgcagtgagccaagatcgtgccattgcactccagcctgggcgacagagtgagactccatctcagaaaaataataatagaaaaaagttatatggggctgggcatggtggctcatgcctgtaatcccagcagtttgggaggctgaggcagcttgatcacttgaggtcaggaattcgagactagcctggccaacatggtgaaactccgtctccactaaaaatacaaaaattagccaagcgtggtggtgcgtgcctgtagtcccagctacttgggaagctgaggcaggagaatcgcctgaacctgggaggcagaggttgcagtgagccaagatcatgccgttgcactccagcctggacgacaagagcggaactccgtctcaaaaaaaaaaaaaaaagagttatattgtaaagtatctctgctaccctgccccaaacattcatttctttccctggaggcagccactattacctgtttctttaaaaaaaaaaaaaaattgtggccgggcacggtggctcacgcctgtaatcctagcactttgggaggtggaggtgggtggatcatgaggtcaagagatcgagaccatcttggccaacatggtaaaaccccatctctactaaaaatacaaaaaattagccgggcatggtggcgggcacctgtagtcccagctactcgggaggctgaggcaggagaatcgcttgaacctgggaggcagaggttgcagtgaactgagatcacgccgctgcactccagcctggcaacagaatgagactccatctcaaaaaaaaaagcgtgtgtgtacccgtgtgttaaatttttattataaaatatatataacaggctgggcgtggtggctcacgcctgtaatcccagcactttgggaggccgaggcaggctgatcacgaggtcaggagatcgagaccatcctggcgagcacggtgaaacctcgtctttactaaaaatacaaaaaattagccgggcatggtggcgggcgcctgtagtcccagctactctgagagcctgaggcaggagaatggcgtgaacccaggaggcggagcttgcagtgagccgagatcgcgtcactgcactccagcctgggcgacagaccgagactccgtctcaaaaaatatatatcgatatatataacaatttacagttttaatcatcttaactgtacagttcagtggcactgagtacattcacattgttgtacagccattactaccatccatctctacaacctttcgtcttgcaaaactgaaatttcatacctattaaacactaactcccacttctcccctttcccccaccccaccctctggcaactactattctactctttgtctctattggacatatttttgtgtgtttaggtttgtgtatatattttacatgtgtgtataaatacacaagggtatgtgggcgttgtgtttttacacatactataaaatattgtgcacatttgtttattttaatgtatcctgtagattatttagaatcggttcatacagagccgtatcattccttttaagggttgggtttaaatagtctgttatggatgtaccacaatttatttaaccagtttttaaattttttacttattttttttaatgtttttttagagacaggatcccactccatcacccagactggagtgcaacagcatgatcatagcttactgcagccttgaactccggggctgatgtgatcctcccacctcaggctctcttgtagctgggactacagggatgtgccgccatgcctggctaaattttttatttttatttttatttttatttttggtagacacggggtttcactgtgttgcccaggctggtcttgaactccttgggcttgagtaatcctcctgccttggcctcccaaagtgccgagattacaaccatgagccatggagcccgacaagagtagccttttatttgcagaccattagagaaaaagttgcgtgtaagtagataagcatacgaatttatcactgcaatactgtttgtagagatcacagagctgttaggctaggaagaagtttttagcagttagcactagaaagcaaaactttggaaacttccatttcatcaaaagtgacctcatctgagtagggcatgtgagggaaggacctttttactcgacaaggggaacttgcccagttcttgtttgtgaaccttgaagaaagtggagcatttttattttgggaccattctaggttgtggtagttccttggtactcggggttggagaatctccctctgctgctggaccttctgcctcctcatgctgtaatatgcataagaggtgtcctagaagtattcaggaacaggctgtggttgctttgttgttctgtgactgttgaactctttatatagcagtacttttttaagctgtactaattgagcatttattatgtgtcagttactgtgctagctgctggaaactatcctaccctcagcagtcttctggtctaatgggaggtacagacaggcaaatgggctatgactttacaagaggctaacttctgtgatggagagaagttccagccactaagggagcacataaaaatcagaggagatcctaccaagaattgggaggtaggtcagggaggagacttctttgaaaaatggcatctaagacctgaacagcaaggaaacattagctaggtcaaggacaaagcatcagtggggagagatgcatgagtcttttggaaggaccagcatgtgtagaggctctgacaggagagaatctctcaggcccattcagagagtccactgtgtgaagacgaggcatgaacaaccagccaggacatgtggagaggagcatttttctttttttcttttttctttctttttttttttttttttttttgagacgtctttctctgtcacccaggctggagtgcaatggcatgatctcggctcactgcaacccccacttccagggttcaagcaattcttctgccttagcctcccaagcagctaggattacaggcacccgccaccatgcccggttaatttttgtatttttagtagagacggagtttcaccatgttggcctcaaactcctgaccttaggtgatctacccgtctcggcctcccagagtgctgggattacaggtgagagcccccacgcccggccaggctcggctttctttccaggccccgtcacactcttagatgttccctgggccccagaaggcagcgtgaggtgctctgcccatctatgctgtccttttccaccccaccctatccactgggcccctggggctcccactccactccaggtctcttcatggacccttctttcccttcacttctgtcccaggagacctgggagactcatgggaacaggcatcatcttctccagcacagttcattgtctaatgcacgaaagtgctgggctgtgagaaggtcaggagcttacatggaatgggagtcagctgtggtacaaagtacgctgcttagttctactgattttttattttttatttttacataagactttgatggtaaaggaagcagtgtgtgagcaagctgactcctgtcttgtcaagtaccaggtccactctgatgagcccctgtggacagcactgctgtaactccccaagcctgggctcaggaggtgggccctaagcgctgttcccagctcttcctccatgctgtcagctcttccaccattcttcctggcgtcattctaaggtcctgtcttcccccgccctcttccttcctggcttctacgctcagctcaagtagtagctgtttgggtacttttcacccagacttaggaaatgttatcagttggtcgtattcctgtcagccctcttactatggaactcaaataggacagattcagctgaattcccagccctgtggttgcactctttgtctgccctgcttccccaaggtagcctgctccctaaaggtcaccgagatactccccatgcaaggtttttgttgtattacacatgacaacatggaataaagtgttttgcaaatttactggatgatatcctactatgtggaacatcctacaacttactcttttcactcaacatttgacttttgaacctggtctgtactgctccgtgcagaccaatgttcattcatttgatatgtctccttgtgccatagaaatagttttacaatagaagcctgtccagagccatgagggagaaggggattgtagagaaacaaggattggcatctggtttatgtttacatcctttagtcctgttaaccgagaagaagatatttttatttccatgtttgcgaaagctttccacaaaaaaagcatccattttctagacttattaatagggcagtccaaaggttttatttttagatttgaaagaaagcaaagtaggcttctgagatatgcacatttccctgtgtccctgtctcttttgcaacattccacattgctgctaaaacttgaacatgagcactttcaagcatgtgcttactttctatgtatgactcattttttaaaacattaaagcattttcggccgggtgtggtggctcacgcctatattcctagcactttagaaggccgaggcgggtagatcacttgaggtcaggagttcaagaccagcctagccaatatagtgaaaccccatctccactaaaaatacaaaaattagccgggcatggtggcgggcgcctgtaatcccagctactcgggaggctgaggcaggagaattgcttgaacccaggaggtggaggttgcagtgagcagagatcgagccactgcactctagcctaggtgacagagcgagactctgtctcaaaaaaataaaaataaagcattaaagcactttgtctggtggtatgtaagttttggcattacttagataagttgtattttaagtctttctacacacaataacttatttttaaaatacaagtttctgtgtacttccgggttttgtgtttttgtaaacagcagaaggtattagtccatattaagtactaatttgttctaatattttcagctgtttttggaattacacttggcaaaaaaatagacaaatgtctgcagttgtgacagtttgtttttttgttctttttaactccagaataaataattctagtgagtttttttcttggcttgtaagaacatgggaatgattagagtcatcataacacttaagtagttatagaaggttgaacatctgtagtcagttgtataaaatttcctagtcatccttccaggttgtttaagacaaacaaatacatagtatttattaagctcttataaattttaattgtaaaacatcattgtacaaaactttgaaaatgcgtataggtacaaagataaaaaattaggccaggcatgccatggctcacgcctgtaatcccagcactttgggaggccaaggtgggaggatcttttgagcccaggagttcaagaccagcctgagcaacatattgagaccctatctctacaaaaatatcataaaacaaaatagaatcactctggcgattccactatccaaaaaaaaaaaaaactgctgttaatatttggtatgtatctttctagaccaaggcctccaactttggttgagaattcagccgggtctgtgaccttggatgggaaaaacattcactctttattttcactaatgtctctgaaaacccagatttttagctgggcatggtggctcgtgcctgtaatcccagtgctttggaagcccgtggagggcagatcacttgagcccaggagtttgagaccagcctgggcaacatagcaagaccctgtcttttaaaaaaaaaaaaaatccagccgggtgtggtggctcatgcctgtaatcccagcactttgagaggctgaggcaggcagatcacctgaggtcaggagtttgagaccagcctgaccaacatggtgaaatcctgtctctactaaaaatacaaaaatcagccgggcatggtggtgggcgcctgtaatcccagctactccggaggctgaggcaggagaatcacttgaacccggaaggtagaggttgcagtgagccaagatcacaccattgcactccagcctgggcgacagagcgagactctgtctcaaaaaaaaaaaaaaaaatccacattttcttcaatgacaattgtaagcaacagatcatggtagtattagaatagcagtgactgtcaccagtagagatcaaagatactttcatatcatattatagttgttacagatattttgaaatatatatgtccatcactgcttcaaacttaaggtaattattagacccatctctagatctggttatttaatgatttactgaagaagcacatattatttgagaacgaactcttgaaatatgttgttaatttctgtgcattttacacatttcaaaacattcttctgaggaggggtccagaaggccaaaagggtccatggcagaaaaaggttaagaacacctgttctgtactttgtaccatgtggctacaaatataaaaacagacgttaagccgggtatggtgatgcacacctgtagttccacctacttgggaggctgaggtgggaaaatcacttgagcccaggagtttgaggccagcctgggcaacagagcaagaccccatctcttaaaaaccagtcagcacttgactagtcagttagtgggggaaaacacaggtacagtaaaaggagtcaaaattacacttaaacttaggtcatcttattatatcaaacatttattaacatgtttagtgttttgtgtatattatgcaaagtgtaatgcaactaaaactgtttaacacttctcgatatcacataaatttgttggtgcataatagcctaaaagttacttttgctgttggcattttattttattacttacttatttatttatttatttatttattttgagacagagtcacactgtcgccaggctggagtgcagtggtgcgatctcagctcactgcaacctctgcctccctggttcaagcgattctcccgcctcagcctcctgactagctgggactacaggtgcgcgccaccatgcccagctaatttttgtatttttagtagagatagggtttcgccatgttggccaggatggtcttcatctcttgaccttgtgatctgcccacctcggcctcccaaagtgctaggattacaggcatgagccaccacgctgggcctgctgttggcattttaaacatccttctagagtctttcttatttgcctgtaagcacgtacacatgttgttgttgttttgagacaaggtctgtcgcccaagctggagcacagtggtgcaatcacagctcactacagcttcgacctcttgggtgcaagtgatcctcccaatcagcctcccaagtaggtgggactacaggtgtccgctaccatgcccagctaatttttgtattttttttgtagagacggagtttcaccatgttgcccagactggtctcaaactcctttgctcaaacgatccttccgcctcggcctcccaaagtgccgggattacaagtgtgcacctctgtgcctggcccacatgttgttttagatgaatgagatcatatatgtacttttgtaacttgctacctttcctcaacaaaatgttgtaaatatccatgtccataaaaatagacgtatatcttcacttttccctaaaatgaaaataacttaacttgcattttcttttttgtttttgtttttgttttgagacaggctcttgctctgttgctcaggctggagtgcagtgatgtcacagctcactacagcctccacctccagtttcaagtattccacctacctcagcctccaagatagctaagactacaggcacatgtcacgacgcctggctaatttttaaaatattttttgcagaaatgggatttcactatgttgcccaggctggcctcaaactgctggcctcaagtgatcttcctgccttggcctcccaaagtgctgggattacagtcgtgagccactgtgcccagcctgcattttcttattataaaagtaatacatgttcaatggacaaaaaattttcagaaaatatgcaaagatgaaaagtaaaaattgtccataaatctgtcatctacagataaagataacttctggataatgtttttctaccatcatttttagtaatcacataacatttcgttgtatgtctatgccttcatttaattaagaggcatttccattatttctgcatgttcatgactctgaatgatgatatgtctgcctgctgatggctacaaccctgtttctgcatttcaaacctctctcttgagctccagatttgatggcctcgtcagcatttacttgagttgctcataagtgtctcaaatttaacaagtcccagtcttgatttttttcccccttcaaacctattcctcatgttgtctctatttcagtaaacaatatcaacatccacccagttactcagtccaaaattctaggagtcatccttgattctgctctttctttttttttttttttttgagacggagtctcgctctgtcgcccaggccggactgcggactgcagtggcgcgatctcggctcactgcaagctccgcttcccgggttcacgccattctcctgcctcagcctcccgagtagctgggactacaggcgcccgccaccgcgcccggctaattttttgtatttttagtagagacggggtttcaccttgttagccaggatggtctcgatctcctgacctcatgatccacccgcctcggcctcccaaagtgctgggattacaggcgtgagccaccgcgcccggcctcttttttttttttgatacggagtctcattctcgtcatccaggctggagtgcagtggtgcaatcttggctcactgcaacctccgcctcccgggttcaagcaattcttctgccccaacctcctgagtagctgggcctggctaattttttgtatttttagtagagatggggtttcaccatgttggccaggctggtcctgaactcctgaccttgtgatccgcccacctcagcctcccaaagtgctgggattacaggcgtgagccactgcacccgccctgattctgctctttctctcatcatccctgatctgtcagcaagtcctgttaggccaaccacttctcagcatctgcactgccagtatgctagtccaagccacaaaacacctctcagaggtacgcaacaggactttgttgttgttgtgtgtgtgtgtgtttttttttttttacggtagaattattttataacttgaagtgtagggatgaccttccttttaaaattttatttattttcttaattttttattcccatagattttaggggaacaggtggtatttggtgacatgagtaagttctttaatggtgatttctgagattttggtgcacccatcacccgagcagtgtacactgaacccaatttgtagtcttttatccctcaccccctcccaccctttccctcaagtccccaaagtccattgtatcattctgatgcctttgcatcctcatagcttagctcccacttatgagtgagaacatacagtgtttggttttccattcctgagttacttcacttagaataatagtctctagttccatccaggttgctgtgaatgccattaagtcattcctttttatggctgagtagtattcctttgtatatatatgccacaatttctctattcactttctgattgatgggcatttgggctggttctatatttttgtaattgtgaattgtgctgctataagcatgcgtgtgcaagtatcattatgcaacgggacttcggatgacatattgaacaacttcctcactgatatccttgtgaaacgctacatatttcatgggtctgtttgttataccaacactcaattctgaatgatggaattatttcacatttagtctctttttcatctagccattatagtttagtttaaacaccaagttccattcctgctgcatgctgaaggatttgcagtacatcaggctatagtccatcaattcattccacaattgagtaagtaaggtatctatagtacctcaggccctgtgttaggcagggatggggtaacctagacagatttggtacctgtcctcatggagcttgactttagcggcagagacagatcttagataattgtaccagtacttaagtgttcagaaggacaagtatggaggtgggagccactccagtcctctacagtcacgtgctgcacaacaacgtttcaaccgacaacagagcacacatacagtggtgttcccataagattagaatgccatatttttactgtaccttttctatgtttagatatacaaatacttaccattgtgttccagtgatctacagtattcagtatagtaccatgctgtacagttttatagcccaggagcaataggctatataccgtatagcctaggtgtgtagtatgctacaccatctagatttgtgtaagaacactctctgatgttagcacaaataaatcgcccaatgacacatttctcagaacatatccctgttgttgagcgactcatgactgtacaatgggggaacagctcagcctgccttccccaaggaggcaacgccgatgcagggaaccgagggttgaacagaagtgggcaaggtgcagagaggaaaaaggctttccagatggagaagagcatgtgtgaaggccctcagtctggcaagagcttagtcctgtgtggcaggagctgaacgaggggttaggggagagtggcaaagggtccgggccatcagagaggtcaacaggggctggatcatgcaggattttgaatgttaacatcagagcgatagaaaacatgaagggtaaggtggtttgggttttgaatttttatcaaaatattgcaactactcggcaacaagttagatataacaaaagaggtcatcgtaaaaacagcagtctaccccttccccttcccttccctgactcagacatgacagcttttaactgtttctgattttagttcctttgatggttacctccaaaattaaatcatatgcttatacatctttcttgatttgccaactttagggaactgtgttaactccctgaaatgaaagagaatgacttagcttacgttacctccccatgttgaaattcatattcacatttctctgtaattttttttttgagatggagtctcactctgtcgcccaggctggagtgcagtgatgtgatctcggctcactgaaacctctgcctcccgggttcaagcaattctcgtgcctcagcctcctgagtagctgggactacaggcgcacaccagtgcactgggctaatttttgtatttttagtagaggcggggtttcaccatgttggccaggctggtcttaaactcctgacctcaggtgatctgcctgccttggcctcccaaagtgctgggattacaggtgtgagctaccatgccaagcccacatttctctgtaaattttaaacagtattttagtccatatgtcagttcccctctgtttaagataaggatattaataaccctacttttccttccactttccctccttaacttctgcgtcttaaaagctgtacttgaccatacccattcttgcatttgttaacatgtgtgttctgccctgcaaccacagccaagttgtagcttaattctaaagtcgaaaataacattatttacattattacacatgtgagtattgttcttggcgagaccaaataatgaatgtgcccaggattacatttccttctttacagatctggaccactcaaaggagaatgaccaatcaaggtcaaatggattcccttttcttagactctgtcacctgcttaaaatccttgctaggatttaatctacttcatattcaaaccttggcttgcttatatagctctttgttttgcccaccatttctagttgcctttttattttgtttactattcctccttgattatgttgtaaaatgctattagcagtgctgtttatttcgtacgattcggctttttccccactgaagacctttctcttggaaggcctctgcccttctgcaatctgggcaagtatctgctctttgatttaaggttgcatatacagctgtacctggaccttctcctcactgggctcttgggttggagcccgtgtcttaaaacccatatcttcctttcacatggtttactccctcgttttctggactgcatccttaaataatgtgctcagatagagtgcatggggagtaaactgtagtggataccgttgtcacctaccccatatccatttcttctttgcccattcctaacagaatcctgatattattcacctttctaccttattcccaacttcagaaaggatccttaagtcattccacacattgcattcctttggcaactgttactggtcaaggatggacatacgatctaagttggttcactcagactgaagggaaggacttccatggcacgttcagggaagactttctctttttctctcactggagtaagtgagaaaggtgttgctgggggctcttctgtaacctcagactgagggacaaagcctgaggataaagcctgctcaccaaggaaggcggagcagagaaacgggaagaacctgggtcttgatgccgttgcttagctggtgattgcactgtggctggggcctgtcctacctgagctagggactcagataggatggactttcttactgaatgagccagcttcagttttcttttctgttacttgtaaccaaaagcattgtaacagataggtcttctgagtcactgcatgcctgaaatacctttcttctactcttacacttgattggctgagtatagggttccaagttgaaaatcattttttctcctaactttggaggcatctcttctagtatgcagagtaacaaatgcaacaaatgcctgatgccaatcttattatggttcttttgtaggtgcccttcttttctcttccttccctggaagtttttaggatttcgtctccttatttttagtgtcctgaaatctcatgagaatatgtctagagttgtgtcttgttcactcgttgtactgtggtcattcaatctgaatacttttgtcaactcttttttttaaaaaaaaattactaatttacatgctttcattttctctatggggactactgtttaactttggacctcttatattggtcttctgtcttctctcatatttttcatttattgggcggtggggggtgctctgaattttggaagatctcctgcatttattttctttttccttttttctttttttttgaggcagagtcttgctctgtcacccaggctggagtgcagtagcctgatctcggctcactgcaacctctgccttccaggttcaagcaattctgcctctgcctcccacgtagctgggattacagacctgcaccaccacgcccggctaatttttgtatttttaatagagatggggtttcaccatgttgccaggctggtctcgaactcctgacctcaagtgatccgcccgcctcagcctcccaaagtggtgtgagccaccgcacccagcctcctgactttattttctatcccttctgttaaattctttatttcagccaaacctttttttttttttttttaacttactgtgaagcctgtgtgcctactgcctagattagacaattgttaacattttggcgtattttcctggtctgtatagatagggtgcatttttatacctttttgctcaccatttaaaaggaactcacagatgtcacgacatttcacccctaagtacttcagtatacatctcctaaaaataaggacattttccaatataagcacaataccccgatcacatctttaaaagttaacaataattctctaatgttatcaggcacccactttaaattcagatttcctccaaatgtctcttatcgctgttgaggggctccaaagcaattaagatttatacattgcatttgaatatgcttcctttgtctcttatttatttatttattttattttgagacagagtctcgctgtctcccaggctggagtgcagtggtgtgatctcagctcactgcaacctccgccttccaggttcaagcgattctcctgcctcagcctcccaaatagctgggattacaggtacgcaccaccacgcccagctaacttttttgtatttttagtagagacagggtttctactaaaccatgttggccaggctggttttgaactcctgacctcaagtgatctgcccgcctcggcctcccaaagttctaggattataggcgtgagccaccatgcccagcccctttgtctcttttaacaagaacagcctacccacctctccttcacttgtgatactgactttttgaagcagtcagcccaattgtcatctagaagggcccacattttaagatacatatttttagagatggcgtgtcactatgttgcctaggctggccttgaactcctggcctcaagtaatcctcctgcctcagcctcccaggtagctgggactacaggcttgtgccaccacgactagctggcccacattttagatgtctctcttttcttgtgatataatttaacttgtttgtccatatatattacttgtagacaagaagttaggtctacaggcatgttcaggttaaacattttgggcaagaatatttcataggcagtactgtgtacttcatatagcatcagctcaccaggcacttaatggttggttaccctgtggtttgtgatgctacgttttaacacttgattaaagaaggaggtgactgccaaatctccccattgtagacatacagttttcctgtggtaattgatatataatctgtgatgtgatgctttggcaccatacaaatatcctattgcccaacagccatttgcataattattttagcattcattgatccttgcctgaaaccattattacattgggggttgcaaaatgatagtttttttaattgtcacctcttctacatttagtactgtcattcctctgtaatgaattttccctcatcaaataaggaggcattatatttcctcctaaaaagacagtatagatgcttaatctttgcctttattacatttcagagtaaggagttggtagaataatcacctcaaatggtggcaaaatatttgctgttgtgtttccttttctctttcatgtcaatatggactcatagggatttatttattaaatgttttacaattcaaattgggtcaacaagagtcccttcatgttggttcctatattctcctggcataccctcattaattagtctttgagcaatttcttgttttctggcacaagatattccatcccaatatgtgcttttcgtgtcctagaactgattccaaggagctctggttccttatagtggcaacggtatttagaatccaacatgtgggtactaaatgtgctgattcttactggggtaacattatatctaggcactttcagaggacatcgctagaaaatatattcagtttttattttttatttttaatttttttgtagagacaaggtctcactatgttgcccaagctggtttcgaactgagctcaagcgatcctcccacctcagcctcccaaagtgctgggattacatctgtcagggcaaactgctggtaaatattttcacaaaagaaaaataaaaaaaccaaagtgctgggattacagatgtgagccactgtgccctccattttttttttaagtcataaatacataatgatgtcttctatggcaatttaacattacagggttcttccttaacttttttttttttttttcttttttttgaggcagggtcttgctctattgcccaggctggagtggtgcagtggtacaatcctaattcactgcagcttcaaatgcctaggcttcaaacaatcctcctccctcagcctcccgagtagctaagactacaggtgcatatcaccatgcccagctaatttttaaaaattttttgtagagatggggggtctcgttgcgttgcccaggctggtctcgaactcctggcctcaagtgatcctcccatctcgatttcccaaagtgctgggattacaggtgtgagccaccatgcctggccaacttttatttgatctgtatatatcttttccttacactgaaaatgttgggtcttactaatgttaacatagttacttatttgctttatcttgtaatagacataaaattacaaaattataataccaatattacgataaatagctgggcatggcggcgctcgcctgtagtcccagctactcaggaagctgaggtggagggactgcttgaacctaagagtttgaagctgcagtgagctgtggttgtgccactgtactcctacccggacaacagagtgagtggggggaaaaaaaagaaataatggaagatccagagaaagccccaaatatttaaaaattaaacaatacactttgcagcttcctcacctctctcagccttcatagaattgaagagagttagggccttgcactagattaggctttgccttaaggaaatgttgtgtttgatttgatcttttatccagaccattaaaacttccttaacgtttattagtaataaggctatttcactttcatatcatttgtgtgttcactggagtagcacttttagtttccttcaagaactttgattcacaacttggctaactttggtacaagaggcctagcttttggcttctcggctttcaacatgcctctcactaagcctgatcatttggtttttggtttaaagagaaagacatatgactcttccttttacttgaatgcttagaggccattgtagggttattaattggcctaatttcagtactgtcttgtccaagggaatagggaggcccaaggagagagagagagatgggggaacagctgattggtggagtagtcagaatatacacatttatcacttaagttttgccatcttttctttttctttttcttttttttttttgagacagtcttgctctgtcacccaggctggcatgcagtggcatgatctcagttcactgcaacctctgcctcctgggctcaagcaattctcctgcctcaacctcccgagtagctggtattacaagcgtgcgccaccatacccagctaatttttatattttttagtagagacagggtttgccatgttggccaggctggtctcgaattcctgacctcaagtgatccacccgccttggcctcccaaagtgcggggattacaggcgtaagccactgccgcctggccaagtttgccaccttttttattttttttattttttgagatggagtctcactccatcacccaggctggagtgcagtgatgcaatctcggctcactgcagtctctgcctcctggattcaagcgattctcctgcctcagcctcccgagtagctgggactacaggcatgtgccagcacgcccagcttgttttttgtatttttagtagagacggggtttcaccatgttggccaggctggtctccaactcctgacctcaggtgatctgcccggctcagcctcccaaagtgctgggattacaggcgtgagccaccccgcccggccaagtttgccatcttttatgggtgcagtttgtggtgccgcaaaatgatgatagtagtaacatcagagagcattgatcacagatcaccataacaaatataataatgagaaatttgaaacattgtgaaaattaccaaaatgtgacagagacatgaagtaagcacatgctattggaaaaatggcactggtaaacttgcttgatgcagggttgccacacaccttcaatttgttaaaaactcagtatctgcgaagtacagtaaagcaaagcacaatcaaatgaggtgcgcctgcatattacaaccaagaggcttttcgcagaaacacgagtgtgcttcaacattcaaaaatcagttggtgtaattcaccacattaagataataaaggaggccgggtgcggtggctcacacctgtaatcccagcactttcagaagccgaggtggacagatcacttgaggccaggagtttgagagcagcctggccaacatagtgaaatcctgtctctactaaaaatagaaaaattagccgggcagggtggcacgcacctttagtcccagctattcgggaggctgaggcaggtgaatccttgaaaccaagaggcggaggttgcagtaagctgagatcacgccaatgcattctagcctgggcaacagtgagacccagtatcaaaaaaaaaaaaaaaaaaaaaaaaagataataaaggagaaaaaccatatagtctattcaataaatacagaaaacgcatctgacaaaattcagtgccctttcatgataaaaattcagcagattagaaatagaggaagtgcatgtatgaaagagctacagatagattgtacttaattgtgaaatattgaacatgttaccccgaaaatcaggaaaaaggcaaagatgtccactctaaccacttctattcaacattatactagaggtcatagccagtataatgaggcaagaaaaaacataagaggcattaatatttaaaggaagtaaaactgtttctatttgtaggtaatgtcgaaaatgtgaaagaaactatcagaacctgctagaactaaaaagtgaattcagcaaggtctcagggtacgagatcattcaaaaactaatcagaaatgaaatttcaaatgcaatatcgttaggaataatttaataagaaatgtacaagatttacacgctgaaactgaaaatgttgctgaaagaaattaaagacctaaataaatggaatgttgtaccatgttcatcagctgaaagactaagtgtctttacagtgtcagttctcccttcattgaactgtagattcataaccccagtcataactgcagggttttttttgtagaaattgattgtaaaatgtatatggaagctgggcacggtggcttatgcctgtaaaccagcactttgggaggctgaggcagacagatgacttgaggtcaggaatttgagaccagcctggctaacatgacgaaaccccgtctctacaaaaaatacaaaaattagccagacatggtggcacacacctgtaatcccagctacttgggaggctgaggcatgagaatcacttgaacccggaggtggaggttgcagtgagccaagatcatgccactgcacgcccgcctgggcaacagagtgagactttgcctcaaataaataaataaataaaacgtatatggaaatgcaaaggacctagaacatccaaagtaaacttgaaagagaacaaaattaaggggcttatgtgatgtgactttatagtcatttgatttttaacagaggcaccagaacagtccggtgcgggaaaggaaagtcttttagcacgtgccggatgatggcaaatgacatccataccagacaaaaatgaaccttgaccttaccctaaatattagtttcttagagttgccacaaactaggtggcttaaaaccacagaaatttggctgggtgcggtggctgacgcctgtaatcccggcctttgggaggccgagtcgggcagatcacctgaggtcaggagtgcaagactagcctggccaacgtggtgaaactttgtctctactaaaaatacaaaaaacttagtcaggtgtagtggtgcacacatataatcccagctagccaggaggctgaggcaggagaattgcatgaacctgggaggttgcactgagccaagattgcaccactgcactccagcctgggtgacagagtgagactccgtctcaaaacaaaaccacagaaatttgctgtctcataattccagagtctagaagtccaaaatcaactgtcatcagggccatggtctctgtgaaacctgtaggggagtccttccttgcctcttcctagcttccagtggttggcaacctttggcattctttgatttgcagctgcattacttcaatatctgtcttcctcatcacacagcattctccatgtatgtctctgtctttacatggcctccttcttgtaagaacaacagtaatattggattggggcctgccctactccagtgtgacctcaccttaactaattacacctgcaacaacgctgtttccaactaaggtctcagtgtgaggtactgagggttaggacttcaacatatcttttttgggggacatagtccaacccatgacactacttcacaccatacataaaaattaattcatgagagattatagacctaaatgttttaaaagctaaaaatataaagcttctgcaagaaaacataggagaatatctgtgcagtccaaagaataaggttttttttaaacacaatttcactctgttgcccaggctggagtgcagtggtgcgatctcagctcactgcaacctctgcctcccgagttcaagcgattcccatgcctcagccttccaagtagctgggattacaggtgtgcgccaccatgcctggctaatttttgtatttttagtagaggcagggttttgccatgttggccaggctggtctcaaactcctgacctcaagtgatctgcctgcctcggcctcccaaagtgctgggattacaggtatgagccaccgtgccaggccaaaaaaagatttattaggatacatgaagcaatagctattaaaagaaaaaataaattggacttcattaaaatttaaaacttttggtcctcaaaagataccattaagaaaatgaaaagacagagctgggcgtggtgaggcttgcctgtagtcactactgggtacttgagaggctgaggcaggaggatcacttgagcccaggagttctaggccaacataggcaatatagtgagacagtgtctcttaaaaaaaaaaagaaaaagaaaaaacaaaagaaaataggctgagagctgtggctcatgcttgtaatcccagcactttgggagtacaaggcagatggattgcttgagctcaggagttcaagaccagcctgggcaacagtgaaatcccatctctacaaaagatacaaaaaattagccaaccatggtggcgtgcacccgtagtccatagtcccagctactcgggaagcagaggcaggaggattgcttgatcccaaggaggtcaaggctgcagtgagctgaggtcgcgccaccgcaccccagcctgggtgactgagtgagaccctgtctcaaagaaaatgaaaagacaagtccaccaagaaaacagttgagaccagtcatagaaaaaatagaaagtcatatctgacaaaggatttgtattcagaagaattcctataactcggtaataaaaagacaacctgatttttaaagggtgaaaatattttaatggatacttttttttttttttttgagacagagtctcactgtgtcacctaggctggagtgcagtggtgccatcatacatagctcactgcagactcgaactcctgggctcaagtggtcttcctgcctcagcctcctgcgtagctaggactacaagcacgtgccactatgcctggctaatttttaaattttttgtagacatgggctggtgtgtgtctgtgttgtctaggctggtcttgaactcctgggctcaagtgatcctcccacctctgccccccaaagtgctgggccaccacgcctggtgtggtgtcaccagagatgagccaccatgccctgcctgatacttttcttttatcatctgtttatttcttgtttatgggtgtttctgttctgattttatgactattctgtattctaagatttctctgagaatattatttgtttcctctaaggacagacttggtctctcttccatggggctggttcttgagccgccagggatggggggaggacctgggtagctgctgcgctgccccttctctgctgtggtggagtggcccgttgcctgcggggtctgtctctgaagggtggtttggagaagttctgtggaggcgaggcaggggtcagctcttgccccatggaccctcagagactgggaaaaggtaggcatcacctgggctgctgccagccacatcaagagcctttggggtgggtggggtgggggccggggaagggaaggttctagctgttgatttagaaaagacccattgatttcttgcctgagggaagaagtggcaccttgccactccaagtttgctctgctcaccagccccaacagcatcagcctcacctgggagcttattgaaggtgccctgccccaaagcttgtgggtcgggatctggcagtcagcagcccccaggtgttgcacacatgacagcactgcttgcccctcctctcgtctggtctggtctggtctggtctggtctggtctgagagcttctttggggctctgacaggtatacaggctctcatctgctctacagctctcttgtagtacattcctctctgttccattagtcaacatgttcttgcctacttccagcatctagaaatttgctgagtgtatcttatccgttcagaggtcctctcctgctattgcctctgttagaaatttcttccctttcatatgtctgtacttcggtttctttgaggtttgaagggtcaagtggcaattacatgtaggcagttggccatcctctggtgaaggctttaaagcccaggaataacaagatccattatgtctaaaactagcaaaaaccctacctgtcacatggtgaactgaattagaggtgatggggacagaagccagattggagtgagtggaaggtgagggagtggagattgggtatagacaactctctttaagaagttttgttgtgatggtgaccagaaaaataggagtggggtagagggggatgagggtgtttttcacgtgggtgaatatgagagcatgtttacatccttctgggaatggcccaggagagaggggagcgtgagaaggaggaaatggggacctggaggagcagactccttgtgtggaggggggaagcggcatctagagctgttgcaggaggtgggctttgagtaaatgcttcctctttggtaaagacggggaacgggaacggtagaagttgcacggaccctttgttaaagctcagaagctgagcgagaattagagcttaagtttatggagtagtcagaataaagtacccctaactgtattcttgcacagtgcaggaagccaggggtctgaaatcaagatgttgcagggctccattccccccagagcctctagcatggatccttccttgcctcttccagcttttggtggctgcctggcagtcctagactttccttggcttgcagttgcattgctccattctctgcttgtgtcttcacatggccttctctgtgtccccgtattcttctctggatgcttgtcactgtattaggcccaccctaaatccaggatgatctcatatcaagatccttcacttaattacagaagcaaagaccttccaaataaggtcagagccacagggtctgggggttaagacatacacctaactattcggggctaccatcgaacccctgtagaagcctgtccatttccaggatagcagagcccaaggaagggccagaagtccccccaaaacagttgtttgcattcaccagattctaagctataagcagatgggcagtggcagtcggtcctaatccatataccattggcaacaatagtttagttcactgtagacataatgagatgcttatcttctgctaagtagtcctcatggtaacagccatattactcctggctttgagtgacagcgctgtgctcttgtctggtgcccatatacttcagcagctggaaacaagacagtgctcatgattcaccggaaagtttctgtagttaaaatcaagtgatcccttgagtctattctaatatttgtctgtaccatgttctgtgacgagacatggaaacaaaacattaagaagtgaaagtatctttgattatgctcttgaagacaactttttgtttgtttgttttgtttgagacggagtttcactcttgttgcccaggctggagtgcaatggtgtgatctcggctcactgcaacctccgcattcccgggttcaagcgattctcctgcctcagcctcccaagtagccaggattacaggcatgcaccaccacgcctggctaattttttttattttagtagagacggggtttcaccatgctagtcagactggtctcaaactcctgacctcaggtgatccgcctgcctctgcctcccaaagtgccgggattacaggtgtgagccaccgtgcctggccgaagacaactttttaaagatgcatatgctctgggctgggtgtggtggctcacacctgtaatcccagcactttgggaggccaaggcgggcagatcacctgaggtcaggggttcaagaccagcctggccaacatggtgaaacaccgtctctactaaaagtataaaaattagccgggtgtggtggcgggtgcctgtaatcacagctactcaggaggctgaggcaggagaatcgcttgaaccccagaggcggaggttgcagtgaattgagactgtgccactgcactccagcctgggcgacagagtgagacttggtctcaataaataaaataaaataaagatgcatatatgctctgaaggctggctacattttattttttctcaaacaacttttacagtggatagtgctgtaaaagttgtttagctctggtcattttatcttttttgtgatctgcaaaaggagatccttttccttttcactgcctctaatacccaactccaatactcctttgacctcacaggcacttagaatccatcagtggctccatcttttctcagacttcacctccttcgtatccttattcctctcctttgtagcttcagtgccagtcagacgtcgttactccctggcacactacctcagcccttcggcactttcttgctttgttatattcagtcgacaaagccccagcctcatgaaattcagtcatgtctgccccatgcctgctccgtcctgaagctgaatgtgactccttcattgattccccctttaagttcatgtctaccccaggtaaacttcttgccgccaagcccacctgcatactgcagttccccggtctctcctagcccctcccaccctcctcatcagctgtcacacctccttgcagctgatatcttagttcccagagagcacagaagcaagctcaagagagtgtctacaggccagcgtctactccttcgctctgcctccctcatgctgtcacggagcgcctgtcccaggccctcactcctgttctaaggcatctctccagtcctctactgcactctcccccatcagagattcctccctcgcctgccctagaaacttgttgctacttctcccaccttgacaaaagctgctcccaaccccccacctgtctagcatctctgttttcctttaccagcaagactccagtccctgtctccacaccctcttcaaccttctccagttgttcctttgctgccacagctctgccaagctgctccatgaggtctccagtgatgaccttcatgttgttaaatctgggagctgcttgtcacttcttttcccagagctgtcgtcgtcagttaaccccaatacccatacgagacaatcctttccctcccttgagtctctgcactgatgtgcaccttctcagtgcaaaccacagcttttgtctctttctagctgaatacatgactgactgtgcttatcttagctgtcacccctgctggagcagaagctccacaggacaggattgtctccttgattcacagatgtagctcaagctcctagaacagtgcctggtgtctgtgggtcctcaggaagtcctaggtgagtgtgtgaatgtctgtcctcctcggtcttttctgtttcgcatgtgatgttggaaggcctcaggttcaggcttttcttctccaccctcactcccgaagtgattccgtccagcctcatggctcccaaatttatgtctccaggctgactgggtcacgggaactccttatcctccctagaccttctctttccctggtcttctcctttccagtaaacagcaactccaactcctgctcctcaggccagaaacctggcgctggttacctcatttgttcacaaatactgttactccacctgcaagatggatacaaaatctcatgagttcccctgcctccatggcccccaccctggtccaggtgtccagcttccctgcctctgcccttgccccctggttctttgtttagtcctgcaatattgtgctcttctgttcagaaccctccagtgggtccctgcttgctcagagtcacagcccaacaggatcacctctcttgccactctcccaccactcatgcactgcggcctcactggcctcctggctcctccctggaccctccaagtatgcccctgcctcaaggccttgacctctcctctgccctctgtcccaggtatcacacatgtctgctcaagtgtcaccttcccaatgtggccttccccgagcacacccatgtctgtaagtcaggcagcctgcctctgccccaccagttccccctgcctagcataggacttgtcaccatctgccacaagctgtgttactgcttggttttgtttgtgctctcccactcccttcccctccctccctctccccacccctatagaatctgagtcccatgaggacagagatttttttttttgcctcttcctcaatatatccccagtgcctagaatcatgcatattttaatttattgagtgaattaacaaataaattctgcagtgggacattgctctaaggttttgtcttataagagggacagaagaacatgcagcctgctctgctgttggctccttagcttctccatggctaacaggaacaatattgtttatgagataatcaaagccatagtcatgagttagaaggtacatataaaggcaaatatgtggagattgagttactttggcgggggcggaggggtgtgtagttatctgaaaacatggaacaaatcaatgagagtctaaatagcacccacatatttgcccctcttttaaaacatacctcctttatgagtgtagaatttaacagcacagtttcccagtgcagctttgcgaaacaagagaaatgaattttaaaggctgtcaggtgcctttgcaatctgtggcttagtatttgtgtaacaacatttgtgttttgccaacagatgtactgcttaaagtacccatgagaatggcctctgtggttttctactttctcggatggaaccttaggaactgattattgagaagaggctgatactgcccacctcagctcccaggcaggcttcagggccttggttactactcctttgggccctcactgacccttgcagacgtcttttgcaacctctgtagccagaagagacaactgctttctggcatgttgctctttccctaatggctttatgagcttcttgaacaccaaagcatgtgtgacttcctcacgccttcccctgtatagtatagcacccctaactgtatgtgtaaggagaaggagtgagcaattgatggcgtccccctggatctccaagggaatgggaaggggcagggtttctggattcagtcatgtggaatctggtcgttggtgtctaaatgtgcctgttacttgtgcccaatgtccaggttcaccaggaggcttagcctgctcatttccctgctagtagctatattttgggagagcattttttatgctctaattgaactttgtgggtctcagcaatttgaacaatgttttgtttttcttctggtcaggttacaaaggaaagaaaaggaatctggtgttgtaggaggtggtgtgttgtgtaattacttgttttttttttttaagtttttttatatttttgcaacaaggcaagttttctttgaataaataatgctgggagcttatcacatagaaggcatatgtgttgtactcagtacattctgaattatctgggtttatttttatctcttgaattcacttataaacaattcaaaggctgcttttttagctaacagaaataggaagagaatctcagaatctgttttgtcattttttcaatgggttgagttatagtgattatgctaactcggtggaaaagcagtgtagtgagtaaaccccacatacggcatatcatgaacattttgttgcttttttggcttctgaccatcttcatacctttttttgtgttaaaagtctccccattgtgtatatcttagtaagaggcaggtggaccctagtttctacctaagaaaacctgaagatggggttgggggcctgtggtgtacttccttctcatgctgtccatgaccactgcagtggctttgtaaggatccaggacccagggcccctcagtgggtgtcttccatttctcaagattgcctcttggttgtgagatgacggttgctgctctagtcattgcatccactcctccaggtaggaagaaagaggtcataggggaaaggcaaaatggcacttgacatcttaacttctaggcccattcaatatttccatttccatcttcacacccatcatcttgtcctagggaacaaacagcaccagcagctcagtagctataacagcaattattatttctcacacatgggtctgggtcagctgcaagatgggattcagatctgttctcaagcctgtcgttccaggacccaggagggagaagcagctgccaggggaagtctcttcgtaggcggaggtcaggagtccaagaggagtgagcagagtcacagaagcctcttaaagcctcttcttcccccatcccatcaacacgtgagcaagcccagagtcagtgggtgggaggtgtgctccgcccatagtcagtagaacaagagcaagcttgaaagagaacgatgaacaggagtgcactcggccactgtctccttagccataacgtagtcccatggtctgctgggaagcggggaataactctccttagctgagcgcagggtctcattagtaaggcagatggagaacatggatgttgggggacaactggcagtgcctgccacaggggaatggatatattccctccccttgctctctggaaactaggggatggcgatgaagcctaggtttggccaaacccattctgccttcagggactttgactcttgagggacagtgagggattagtcatggtggtggcagttgagtcacaaaaccagcagtggtggctaatgtccagtgatgacatgcaacagtgcccagggtgggtgtcccaaccagcaggtccctgcagtataaccttggctgtgtttgcagtggtgcagcctctattcctgctgcttttctgagcctagttctctagttctctctccatttccagatctgctgcccaagaactcctttgtgattgaatttaaccagagttgatttctgttgcttgaaactcaggaccttgatgcagtgtgcagggtctgggcaaggtaaaaacacactttcatgatttcgcctcaagtatagtagatgagcttaggctttttgagccaggtagccttgggattaattctcagctcttgcacctagcaggtgacctcagcaatcaagtcacttgccctccttgagcctcagtgttgccctcagttaaacattgctctcgtgtgttgctgagcattcagtgagattgtatataaagtgatcattgtgaaggtattgggacataatttgggaaagcgtcctggtctaagcttttgattggctctccatcatttgggtaatgggatagtgatttaggagtatcatagcagctcaaggggcccttctggaaagggtatgaggaaggtcagggacaagtctgaaatgaatcatcctaggcttaatgcctgtgactgggcagtgggtacaattatctcaggctagtcagtagtcatttattgtgagaatacatgggcagattttttaatttccttctcagtctagacttgaatgcaaacagttcttattgctaacttaccactagtcaccactaatgaacaaagactatgaacaggaaattcataaaagaagagatacagatggccaatgaagataggaaaagagttctgcctgctggtaatcaaagagatgcaaacgagaacaaaaatgatgccttttcacctaccaaatttgtcaagattaaaaagaaagcaaagagccagcgtcagctgatgttcatacctgcacctgctcggtagcttgctaatgttctgcctgctccacacgccaggccagcctccacggcgcagccaggtgaggcctttccttgtatacaggcacgtttggattcactgttgcataagtgagacatgtgcatgcttcacaattcaggaagtgcaaactccagagtgatgcaaggtctgagtgtccctgctgccctggtctcccagctgcctaggcctctcttcagggaacggctgcatccagggtcttgtctgtgtcttttgaggtgttctatgtacacgcagacacatctaaacctatttttattttccctgcacctgcttgggctactgtaagctgttaaatttttttttctaggaatttgtccattttgtctgactagcataaagttgttcatgttatagtttatacatttgcaacatctgtaattatgtctgctttttcattcctagtgtttgttgtttacttgtaccttctcccgtttttccttgtcttggtaaaagctcattaggttcattggtcttacaagaagcagacatgtaggcattattgccctgtattactctgtgtctcttttctagttcattaaattctgcttttgcttttatctttattattttttctatggtcttagagtacattctctgtgttttgttgttgttgttgttgttgtttgttttttgttttgagagagagagtcttgctctgtcgcccaggctggagtgcagtagtgcaatctcagctcactgcaacctccacctcctgggttcaagtgattctcgtgcctcaacctcccgagtagctgagatttacaggcatttgccccacacccggcaaattttttgtatttttagtagagatggggttttggcatgttgaccaggcgggtctcgaactgctgacgccaggtgctccacccgccttggcctcccaaagtgctgggattacaggcatgagccaccacgcctggccctaacttcttaagttataaatttggttcattgatttttctacccttttttcaaatgtaaacatttaaggctaaccctctggaactacttcaactgtatctagcaagttctgatagtattgtcactttaagttagcccaaagatattttaaattttctttgtttcttcctttgactcacatattattttaaaatgtgtttttcaatttccaagcacatggctttgggtttgttttttttttttcctagttgctctagaaaaaaaaattgactgcatgaggtggctcatgcctgtaatcccagcactttgggaggccgaggcgggcagatcacctgaggtcaggagttcgagaccagcctggccaacatgccaaaacctcgtctctactaaaaatacaaaattagccgggcatggtggcacacacctgtagttccagctactcgggaggctgaggcaggagaatcacttgaaccgggaggcagtggtcacagtgagccaagattgtgccagtgtactccagcctgggcaacaagagcaatactccgtctcaaaaaaaaaaaagaaaaaaagaaaaaatcaacttctaactaaatggcactgtgatcaaagaacttggtctgtgtgacaccagttcttgcagttggttgagaagtgctccatgacacattatccacaaccagtggacagaatatgtcaccaccaagcatgggtgcaggattctacatatattcattacctctgtcttatccgtttgttgtgaaagtattttctcttcttactgtcattttgtttacttgatttatcaactgatggaatacgtgttaaaacctactgtggtgatggacacatcagtttctccacagagtttggtcattttcattttattatttattttgaggccacattttcagttttagatacagtttcacattcctggtgtattgaaccctttggtattatgaagcgaccatactaatatgttatttttttttaaattattatttattttatttatttttctttcttttttttttttttgagacagggtctccctctgtcacccagtctggagtgcagtggtgcaatctcagctcactgcaacctccgcctcctgggctcaagtggtcctcccacctcagcctcctgagtagctgggattacaggcttgcaccagcgcgcctggctaagtttttgtatttttagtagagacagggttttgccatgttgcccagactggtctcaaactcctgggctcaagcagttcaccagccttggcctctaaaagtgttgggattacaggtgtgagccaccacgcccggccatcccagttttttattttcctcctttctgtgtctttatgcatcagtgaggtggagcttttgaaaatgtcagatagctagattttttttttttgagacggagttttgctcttgttgcccaggctggagtgcaatggcgtgatctcggctcactgcaacctccacctcccaggttcaaaacaattctcctgccgcagcctcctgagtagctgggactacaggcacgtgccaccacacccggctaattttgtatttttagtagagatgtggtttcaccatgttggccaggctggtctcaaactcctcacctcagctgatcacccgcctcagcctcccaaagtgttggaattacagacgtgagccaccatgcccagctgatagctagattttttttttttttttttttttgagacggagtcttgctctgtcgcccaggctggagtgcggtggcgcgatctcggctcactgcaagctccgccccccgggttcatgccattctcctgcttcagcctccagagtagctgggactacaggtgcccgccaccacgcgtggctgattttttttttttttttttttttgtatttttagtagagacggggtttcaccgtgtcagccaggatggtctcgatctcctgacctcgtgatccgcccgcctcagcctcccaaagtgctgggattacaggcgtgagccaccgcacccggcctcgagattttttaaaaaatccattgtctgtttcgtcctttaacatctatttgatttctgatgtatttagattcatttatagcatatttgtgcattctatttttccatattttctgttcttttaaattttccttctcctttcttgccttctcttagacttttaaaaaaattgtagtaaaatacacatcacctaaaatttaccatttttaaatgtacagttcagtggcattaaatacaaattggaggccaggcatggtggctcatgcctggaatcccagcactttgagaggctgaggtgggaggattgcttgaacctggaggtcgaggttgcagtgaggtgtgatcacactactgctatagcccaggcaacagagtgagaacctatctaaaaaaacaaacaaacaaacaaacaaacagattggcatcacacagtgtgtgtgctgctgtgctgtgctgttatcatttaacattaaaacataaacatcagcactgttatggactgaatgtttgtgtcccccaaaattccagtgttgaagctcaaacctccaatgtgatgttatttggagatggggtatttgagaggtggttaggtttagatgaaatcaggagggagggtgggtttcgcatgatgagattagtgtccttataacaagagacagcagagagcttgctttctccaccatgtgagtatgcaatgagaaggcagccatctccaagtcagaaagagagccctcaccaggggctgaatgtgctgacaccttgatcttggacttctagcctccagaactgtgagaaatttcagttgaataggccccccagtctgtactattttgttatagcttgagcagactaatacacccatgttatgaaaagctataaacatccctttaaaggccacctaacgcgtcgtattacctcatgcatcttctctgctgagctttccaaaagagtggcttaggctgggcctggtggctcatgcctgtaatcccagcactttgggaggccaaggcaggtggatcacctgaggtcaggagttcaagaccagcctgaccaacatggagaaatcccgtccctactaaaaatacaaaattagctgggcgtggtggcgcatgcctgtaatcccagctacttgggaggctgagccaggagaatcacttgaacctgggagatggagggtgcagtgagccgagatcgtgccattgcattccagcccggccaacaagagcgaaactccatctcaaaaaaaaagagtggctggccgggcgcagtggctcacgcctgtaatccccgcactgtgggaggccgaggtgggtggatcacgaggtcaggagttcaaaaccagcctggccgagatggtgaaaccccgtctctactaaaaatagaaaaactagccaggcgcagtggcaggcgcctgtaatcccagctacttgggtggctgaggcaggagaatcgcttgaacctggggggcggaggttgcagtgagccaagatggtgccactgcactccagcctgggtgacacagtgagaccccgtctcaaaaaaaaaaaaaaaaaaaaaaaaagtggcgtatgttcccggtctccacctctcattcgccagcccctgtgaccaaacccctgggattagatctccatcgggtccctcccctcaccctaacctcacatgcagtggttcctgagaagctgctgtttatctgatcacgggatccagcaggatctgagggctcattcactgaatctgtactacccaacaaggcaggcttgtccttacccacacttttcaggtgaaaacttaatcagattcaagcgtttatcttagtggcctcttcgtggtgtgtgatttccttcttgcagctctttactggctaaaactcttcactgggagttaaaccaggtgtggtccttgaccctcatcattttgtcccatctcctatgctgggctctgtatccttgtctccaagcagtctcgtgtgacagggaagttacctattattgtatggtcccctcttcttgtcacctctggtgtggcacttgttccatttcttgttcaatgaatgtgatttgtgaatgtgccacatctgtgggaggaaggcagttcgcagcaagagttgtagttcccttgctttgccctgagggccaggactttacactagatttttttgttgcattcctgcactcataaagtacacgtaaacttagaggtggtgtgttaaatgctagaacttaaaactgagttcagctaggctcaagtgccccacaatttttgtcccaccagacaatttcatgaatatctacagattgttccctcaatatgcctcaatattgaggcatattgatttggggagcacagacaagtcaaggttgatgtgcatccgctgaacatgatcttaagttgttgaagtaggtattattaatgaacgaacgtctattttagctccaagagcccctggtcttccagaagagactcccaatgatcttccagaagcagctgggcttcttttggtcctcccccacccaggtgcagtcccgttctccctgcctgggtgagtttgattcctctgccgtggaataggctaggctgctacctcttgagcctcttccaccaggccatccattaggtggcgacagagagcactaaaaggaactactatggaaataaaacttgttttgcttcttggggggaaaaaaaaagaaaaaggcttgtggggcgtgtgtgcattttagtcagattttactgtgcaaaacatttgagagatttctgccctctttctcccttccattcttctcaacccactgggcgccctaccacccctgtctccttcaagataaggtagatcagaagaccaaatagacaaatgccatgtccactgttttctgtcacagttgatagccataccagtcacccaagctggaaacccaacaggcccctgcccttcactgcccacatccaagggagccaccaagtcccacaaattgttcctttaactgtttgtccctcttttgtcttctgtcatcccttctaccgctgtcctggttcaatccctcatcttgctctgggactcccatgataacttatgatctttcctccacctctctatcttccacacaatccctatcatcaatctcattcccctgctttaaacccaagagtggcaccctgtgtttgagtgacatcagggcccctcatgtggctcctgcttctctttgtggccccttctgttgctgctgcttttcttatggacatagccctcagcagtccaggactgcttgtagttcctcccaggtaccatgtttcttgcactcctggcctttgtcattggctcccctgcccaagtccccttctcttctcctttccttcccctgtggccttgccttgtcgtgcttatccttgaagaccctgtcaggtatctcttccccaaagagccctgcctaaccaccgcccccctcccccccgcgacacacacacctgggttaggccctgcctctccacgcctgtgcctcctgccaagtcctcagaggtctctgatcccatgtgcctccaggcatggcatagggggactgtgacacagcctctcggcccacagacccctgattgtgggcttgctcactgccccagtcagtcctcttattgaggattccgtgccagttcctgactccagcacacacacgcatgtaggccgccctcctagtgcctggctccttccctgtctcttctgccactcattcccatggtcgtatcctggagttggtcatctctggaactccacccacggagttctaacttagctctgcctatgatgaggacttactgtcttcccagcttgcagtgtcaaccactgtttgatgcccctgggactccattggtcttccctcctcttgtgaactgtgcccatcaccagacgaacttgttttagaatttaccatcgtaactgagctcccttcagcgcatacctccttggctcctgctcagtctctgtttctccttttagccaaactctctaagagttctctccactcatgggccctcttccttgcctgctgctccttgctcagcttgctccatgaacacttgcttttccacattccatgaaataatcttaacagtcatcagtggctgtcactccttctcagccctttccttgtgtctcttctggtacctcatactctccaggtggccatctcacctcacatcttgaaccctctgggtttgggagaattctcacctcacgagttgatgggaggcctggcgacctctgattgtagtcactgcaaatgccagatgcttatttgcctagcttccctttcggtcagggcagcagttggcaaacggtatctcaagggccaagtccggcccactgcctgttttcgtaaatgaagctttaccaggacccagttccaccccgtcctttgtgcattgtccaagactgctctcctgtacaacagcaggtgggctggttgtgacagatactgtctggcccacaaggtggaaaatactatctggccccttacagaaagaaattacctgagttctacacgagggtgtaggtatgtaccctggcctctgccagtcagactcacatgctaggaggagcagggccaggcaggagagccgtgtctcctggcattggggctgcaggaaagacgagctcctaggccacagtgccagtggccagtgctgctgccttgcagggtcgcacaggcagtgctggctgtttggactggcttggcagaaggatttgaagtattgttcctagccaactggactcaaacctgttcctccaaccctctagggattctcttatcacccagtagccttttccccctagttttaaaaattgcagtaaaatacacaaaagataaaatgtactgccttaaccatttttaagtgtacaattctgtggtattgagcacatttatattgtgcaaccatcaccacatgcatcttcaatagcttttcatcagtccttgtctgcataaatcagctagagttggtttctattgattgccaccaataatcttgacagatatgtctgatcttccttctctgcactgactcctctttctctgtctcctctgctgattctttctcctcatcacaactccaaatagcagggggagggttgtttacacttatattcagcacgccctcacgcactcgcctggctcttcagacctctcccctgaactccagattcatacatccagctgccctttaggcctctagaaagctaaatacctcagtatcaaaaacatgagaaacggaagccagagtcctggatctctcgccctttcgctgtcccggtgcccatgcccttcagggatggcacctagaccagctccctgcatccctgcctagactctgcagtagtctcacgtggcagacccggaggtcactctcctctctggatgccctgcggacactccggttagcctcagctgcaagagcctcctcacccaaggtcacgccatttccaggacagcaccctggtgactgagcgaggtaagggtacaaggcccttatagggccttctctttgacttcttcccacctccctttatggatgtcagttcctgatgaacatcttacacctcaaaccgtgacccaacatctgcttctgcagagcccccctgtggcatcttgtgccctcctgccccactccctctactctatatcttcccatagttagaatgggctttttttttttttttttgagataaggtctccctttgtcacccaggctggaatgcaatggcacagtcacgactcactgcagcctcaacctcctgggctcaagcagtcctcccacctcagcctcccaagtagctgagactacaggtatgcaccaccacacctggctaatttttatattttttgtagagactggggtctccctatgttgcccgggctggtctcgaactcccaggctcaagcaatcctcccgccttggcctcccaaaatgcaggattacaggcgtgtaccagtgtgcccagcctcagatgggctctttgaaaaatgtttattagatcaggttactcccttgagaaaaaccctctcagaataaaacccgaagtccattacttgaaagcagagccagcttcatgggcctttgtaactgcccatgggcttgctggaacccaggcttggtttaatactctactctcaccatctcaaaattcttaatttttgaacaagaggccctgcattttcattttgcaccaggctccacaaattgtgtaactgggcctgcctcagcagccacatggaacatgatccctccttgcctatttgagctcattctctaccattctctcccttgctcacctggctcccactgctcttgctcttcctggaacttgccataatgttgctagagtcagagccttggctcttgctgctcctcattggctggacccctctttacttgacctgctccctcaccactcacttccttcagatctgtgttcagatttcgtcttctcagagaggcttttggcccctgtccatctctctgaatttacctctgacctctcccccaccaccactgcgctaagctgcctcagaactttgtagacattctgtctggtcttctgatgtttcccccttggaagaatcccaaggtgcctgaagaatgctttctttatccttgaagttgagtaggttgactagagtctggcttgctattgagcattctttatcaaattgtcctgggaacatggtgtattctttcagtctgcagatgtagtcgttgctgtttcaggtcagctctcttatggatctttgacagcatcttctgttccatttgttgagttctgtacttcagggacacaaattcctcatgttggattgtctttgtctctcttccaatgctattagctttgccgtaattggtttagcttttgtctttttcatctgcattcactttgtctaatttgattttcagctatgtatattctgtttctggctgtttttcaatgtatttattagtttcataatgatgtgttttggtctgcagtttgtttctctaggttggaaatttgtcttttcatcttattctgttttatcatcccatctttgaactcttttattgggaacatgttcttatgaagttgtggggaatttttttcccttccttgtgtattctcttcttggtgggagactttgcctttctcgtgccatctccctccctgggcctcttttttttcttctggccataatatgtttgcctagttaccatgtcacttcttttcgtcttggctcaggcttggatggctctgcatagtcgttctgtttgctttgagacagtggaggaattcttggctctctcttcccagtttcttggcatcttctcttgctgttttcccctctgagctatcgcgtgcaggcttgttatcttgtatccggagagaatttgcacgctggagggagctgcagccatgtagtcttcagccctatctggattcttctctttgttctaagaactgtgttggatgtcttactaaggctcactctagctgcacgagggatgtgtgtgccatttccatggggatagggggcacctcagtctctgggtggttccataatctgtgtatacctaagagcagttgcttcccacagagctgggctggctcactgggcactttgccatttctcctgcacctcccagctggagtttctgggtctaaaaggaaaaagtgaaggactcccacttggttgcttctctccagcttactgactgcaaattcccagggcgttgcccgctccctagggtggtttctgggggacggggcaggagcctggctttgctgctgctttgtcctctggagtcttttctcagactgctttgaattacacccctttcctttgtgtgctgaaatcttcccttcacactctccttccctgcctttcttttgtgtcttatcttactaggactggaagagggcagttgtgcaggaggtctgcatctaattccctaatccatgtgagagtgctcctgttgtgtgctttgtgacatgatggtgagaaatactccctagagcagtggctaccagaaggaagccatccccccccctgcacacacacacacacacacacacacacacacacacacacacacacactccttctggctgtcctcagatgcctattctaggtaaatgtcagattccaaagaaaatccagttgagatcttttttctttttttgagacgagagtcttgctgtgttgcccaggctggagtgcagtggcacaatctcggctcactgtaacctccgcctcctgggttcaagcgattctcctgcctcagcctcccaagtagctgggactacaggcgcgcaccaccacaccaggctaaaatttttttgtatttttagtagagacagggtttcactgtgttggccaggctggtctcgaactcctgacctcgtgttctgcccgcctcagcctcccagagtgctgggattacaggcttgagccatcgcgcccggcctccagttgggatcttgactggaatgactggtgttcaatcattatagtttccacctaatttgtatttgtacacaggacagttactaatttgttggtacttgtttgatccccagtccctagagttgtttatggggtggagcttcagtccctgctgcttcccctgtggcagcagctggagtcagggtggggacccagggtgctgctggcagattcttgagacaggtagaatctcctctatattggtgtctctctctgtcccagcagtgcccaggaaaacctggccagcctgtcactgacctctccacctagggcactggtggttcaggtccttctatttgccaccggcaaaccgtacttctgccagtctggctcttaggcccagtttctctgatcttgcagattttcttgggctctgctacggaatcctcatacctccggcaggtccctcctttgcccatgtgtttaactgtggtggaatcgtgtgagagctgcttctctcgcatggatcccagccacaccacattctacagcggttcctctgaaggcattgatagagatatttcctcctgttttgcatttcgttggtcatttcagtagaatcagggtgaaataaacatgggggctcagatgtcagcattacgaaccaagtacgtcaggcaggctgatgtggactgacctacactagtgagacgcaagatgacgaaaacaagggcactcactccaagttactgatgagatgtttggatcaaatgagccagtccttaagcagagttctctagtaaaagagatctcctttctgccctttcttgttccccaaaatgtgttgccttcatggtgaaaatttattttggcagattttctcttctttgataaaagcagccaacactttgttaaaagtctgtgaaacttatttacatgaagtatgtaaaggtaagaaaaaaacattatcaacaagaaatggagaaagccagcagctgaggacagaaaagtcatgcacagtgtcagtgtctatggaaacaggccacttggaccttgaggactaggtatttggaattggaggtgagcttggcctggtgagtctctaaccacttgtgtgtaggatcagtgtgagaaccctgctagaatatagtggcagagatgcaaggggaaatcattggagaagttaccagggaatgatgagctaatctgaaaaaaatacatgtttctaagttgggcgtggtagctcatctgtagtcccagctacttgagagcctgaggcaggaggatcgcttgagcccagcctgggcagcacagcgagaccctatctccctaaaaaaaactttttcgttgtttagttttgggatttttttttttcctggtcttttttccccctttttgtgaataacgggatctcactatgttgcccaggcagatctcgaactcctgggcccaagcaatcctcctgcctctgccttcctaagattacaggtatgagccactgtgttaagcaaaaaaacttttttaaatgaaaatcattttttaaaagacaggctttccaggggagggtattattccacttatatgaagtgtcaacagtaggcagatttgtggagacaaatagattagtggttaccaggggctgagaggagtgggagtggggagcaactgcttaatgggtaaagggttgtctttggaactagagagtagtgatggtcgcatgacattgtgaatgtactaaatgctattaatgataaattttatgttatgtgtattttaccacaattaaaaaaaaaagatcaaatgtcctcagaatagccaacaaccttccacttggctaaatgcctactcattaaacttcttgaactaaattcctttctgattgtcatggttattgtgtcctgggcttcagagtttcacattcaggttggcttggtccagtctgtcatgtatcactataggtccccacattggcctcttcctcagacggacagcccatctatctgccggggctctgtgccacagccagatagacttgctctgagacagctgtgtgggctctgagcactggccaggcatcacaaaacctatctttatgatttagaataattggtggtcagctgctgttttaatgttgttgttttttttaatttagatataattcacataccatgaaatttactcatttaaagtgtacaattcattcttcagtataattcataggctcacagaaaaaattgtttaaaaataaaatgtgcaattcagtgtcttttagtacattcacagagttgtgcaaccatcgcctctgtgtcattccagaacactttcagcacccaaaagaaaccccagacacaggagcagtcacctcttattacccgcagcccctggcaacaactcatccacttcctgtctctatggatttgcctattctggacatttcctataaatggaattatgcactatttggccttttgtgtctggcctctttcactgagcgtaatgtcctcaaggttcatctgcattgtagcatgtgtcagaatttctttcctttttgaggctgaatgatattatatcctatagataatgaggttttgattatccacccatcccttgggaatgcatatttgggttgcccccaccatttggctgttgtaaactgtgctgccatgaacactggtgtacggatatctgtttggttactggttttggttttttgtttgtttgttttggttttttgagacaaggtcttgctctgtcgcccaggctggattacagtggcacgatctctgctcactgcaacctccacctcccaggttcaagcaattctcctgcctcagtctcctgagtagctgggactacaggtagcactcaccaccatgcccggctaaatttttttgtatttttagtagagacaaggtttcgccatattggccaggctggtctcaaactcctgacctcaggtgatccacccacctcagcctcccaaagtgctgggattacagacgtgagccaccgcacccggcatagttgtggctttttgagagtgtatggctaggagtaaaattgccaggtcatatggtaactccatgtttaacatttgagaaactgccaaactgttctccacagcaggaattttttaacctgtatgtggtgggcttgtgtttcggttttcattttacacatctataaagatgagatttgctgtatggcactggttgcctgtatttggggagggttctgcttttggttggcaagaactgcattttatttaagcttagcaaaacataactggtttctcgcatcttctcaaaagtggaggattaagaaatggactgcgaattcagagcagggcagctgaacctcaggctccacccttgtagccttcaagctgaacctcattctctcttgctccctggagaccactgagacactctgcctgtgccagtttgatttctcacatttttaaagggccaaagcttgtgtctcaaagtgctatagcctttattgattcatgcagagaagcctccttgattccgtaattctgcagctaatactggaagtagaaagaattggaaacaccatctggatgacactttagggtggaagcagccagtacaagggggggctcattatttcctctggtcccagactgttcacctggagctgtagccaccaccctgcccttaggttaactgcctcgagtggtagtttagctctttgtgctgtgccgagggataactggaagtgaaaggtgctgagaaatgccatctcctgaaagtggcgagcatgagtgaatttacgaaaggttgggatattgctggggctctggaagtttctctggagctcactccaggggacagggagggggctggattccaattcaagtgaaaaatacctttcatctgccttgttcacctggcttttttgcctttttgtaaaatctgaaaacctcagggattgagtagtctttccttaactgcagttgcctgtctggccacacctgccagctgttgcttgtacccctgtaatttgcacggccttccgggcctttctcacaagatcactgcaggtcacattcatgaggaaaatgcaggcagttcctgccatcagacccctcaggatgtcatggtttggcctgaaaacaagattcctgcaactctaattttcctttgctagatcaaatgaaggatttgatctaatgtttgcattctagcagcaaaatcattgaatattttatttcttaagagccttacttcatattttgtaggtattttaagattttgtaaaggcctttctgcttcaacgtgtgatgtgtgcattcttagaaaaagatcttgtgttctgtaaatcacacaataaaaacatgagttcgtgcaggaaaaactggggcggggtggatcactccaaacttgtgtggtgtggtaactggagctcactgatgaaaccatgaacagttctggctgaaagaaccccacagtacactgaggtctgttggcatcgccgccagcaccgccccggtccctttgtgcgcgccaccacacctggctaattttttatttttagtagagagggggtttcaccatgttggtcaggatggcctcgaactgacctcgtgatccgcccacctcagcctcccaaagtgctgggattacaggtgtgagcctccgtgcccagccttcagctttttttcttaatgtctttgtgtaatatgaaggcattctctttaattgttaaaaagcttgcctaccactgcttcaaaatattactgtcagttggcatagcttctgattatattgatgtcatctcccttcttttaaacatgttaccatattggcactgtatttcccctagcccattgatcacttgagagttagtcatagtcctcgtgctgtttcactcctaaacgtttaagcatgcctttcctaagagcagacagtacagttaagacactcaggaagtttagcaatgagctaacacagaaccttacatttctccacataccccataaatgccttttttagagcctttgagcctggaatgcagagtccaggactgtgtgttgtattcgattgtgtcatcccttcagtctcctttatcagaaatgttcccccacccccttgttttctctcatcatcttgagtccagaccgtggttgcatggcacgccctctctggactcttcctgctgtctcctcacggtaagcttcagtctcctactcgtgatgctggttcatctcagcagcactgaggggcctgagctcagtttggtcgtgtgttaaggtggtgcctgccagatttctccacagaaaagggccccgtacttttatttgctcttcagcctgtgtattccttcctttcttgccagcttgtgggtggcttctctagcagcttctgtaagatactcagtttggcagttgtagttgtttcagcaggagaggtgtctgcatacctgaccaccacatggctagaagtcgatccatcctctggcgtaaccatcctccatgctactgtccctggggcactgaggccctcctcagtgacttcctccacctcatcttccgccatctccaagccaccagtgtccaacggactactgatatgtcccaaactcatcatttgtttattcaccaattcagagcccacctttttttcagcactgagctagcctctccttgctagaagcttacggtcgaaggtctccagccatcagaagaagcacgtggagcgctgcgtccgtgttgtggttattcatccagcatgtgttgagtaagggttgcacctgtgcctggcattatgcattgagcggggagatgggggttggcacgcacagtggggtgttctaagtacactgagggctcgggtgccctggctcatagagcagggagggaggcaggagcagggaaggtgtctcagaagtgccatctttttttttttttttttgggaagtggaatcttgttctatcgcctggtctggagtgcaatggcactatctcaactcactgcagcctccgcctcccaggttcaagcgattctcatgcctcagtccccgagtagctgggaccacaggcgcacaccaccacacccggcaaatattttgtatttttagtagaggcggagttttgccatgttggccaggctggtcttaaactcctggcctcaagtgatctgctcacctcggcctcctaaggtgttgggattacaggcatgagccactgcgcccggtctagaagtgccatcctaactgaacctgaaagatgaaagttctccagatgaacctgaaagttctccaaatgaaaaggtgggagggggtgacagggttaggcccagagcctctggtgacacagggtgggcatcattggtcactttttcctcgagggaggggcgtcacacgggtgatagggtgggagctataaccatgttgatagtgccgcctctgcccatctggcctggcatgccctgagccctctgtcccacctgtggaactcataagccctgacagcccactcactcctgattcattatccacacccctgtgcttccgctgtgcctggagcaagctttcttcagggggaagggaggctggaactatgttgtagttacctatttgtcctcccttccaaactgtgagttcttggaggtggaaggatgctgcaggatctggctcaggacgaaggcagttggtgaacagacacgtgtgtttttgactcacggtgatctcagacaagttcctctgtctagtcgaacttctttttttccatctgtaacactcaggagttgaataggtggtttttctgaggatacttcaactgtaaaatgtatgaacttgtgaactagctatttagttctcctcataatcaagattgtgtgtgtgtggggggttctgattagagggaggatgaagagaggtgtatggggttttttttgttttgttttctgtttgtttgtttgtttttgagatggagtctcactctgtcacccaggctggagtgcagtggcacgatttcggttcactgcaacctctgcctcctgggttcaagtgattctcctgcctcagcctcctgagtaactgggattacaggcatgcaccaccatgcccagctaatttttgtatttttaatagagatggggttttcgccatgttggccaggctggtctcgaactcctgacctcaggtgatccacctgcctcggcctcccaaagtgctgggattataggcatgagccaccacacctggcaggtttctttgaaaaagtttgtgtttcggcaaacaccataaaccccctgggggacagccttggggagtcacctggcaccctagcccagcctccctcccttgggtcctgcagtgaaggcttagtgagggtgtgcaaatgcccaggtcaccctgggactgggcaggccctctgggctaagggtaaactcatttggaatacctgttttctatcattgttttttatttgttaaatttaaagggtacaagtgcagttttgttgcgtggatatattgtatagtagtgaagtctgagctttcagtgtaaccatcacctgaatagtggacattgtacccgttaagtaatgtctcatccctcaccccctcccacccttcccagtctctccagtgtctgccattcctcactctgtccatgtgcacatgctattcagctcctgcttctaagtgagaacgtacggtatttgactttctgtgtctgagctgtgtcactgaagacaatggactccagctccatccacgttttttatcatttttacctgcactccacacccagcacaatccaggcttctttgtgggttttttgaaatttgtctttaattataaaagtagcagccagcaaattaacaaacacccatgtgcctttcattgcacagaattgaaaatcatcatactatatttgcttcaagtaatttccattagaaagaactagaatattacagtagagttaaagaccctttatttcccatcttcagtgctcttaaaagttcatttagggccaggcatggtggctcacacctataatcccagcactttgagaggcccaggtgggtggatcacctgaggtcaggagttcaagaccagcctggccaacatggcgaaaccccatctctactaaaaatacaaaaattagctgggcgtggtggtgcgcatctgtaatctcagctactcgggaggctgaggcaggagaatcgcttgaactcaggagggaggcagagcctgtatgcagtaagccgagattgcgccaccacaccccagcatgggtgacagagcaagactccgtctcaaaaaaaaaaaaaaaaaagttcattcattgtacacttagaaatagttaaaaaggtaaactttgttttgtgtgtgtgtgtatatatatatatatatatatatatatatatatatatatatatgtatttttttttgagacatatatgtgtctggtttgttcgcccaggcaggagtgcagtggcatgatcaacggctcactgcagcctcaacttcctaggctcaagtgatcctcctgcctcagcctcccgagtagctaggattacaggcacacaccaccatgcccagctaattttttttttttttttttttttttgtagagacagggttttgctatgttgcccaggctggtctcaaactcctgagctcaagcgatccacctgcctcacctcccaaagtgctgggattacaagtgtaagccaccacacctgacctgttttgtatattttaccacaataaaaagcctttaaaaccccaagcagacagttcattttcattcaggcccaactcagaatctgatcacagcggggtttcccccctttctagcgagtagctgaagaactgttttctctccttgatggtataactgtctctgtgggtgttgctcccctgccgctccagtggttttgtttttgtttttgtttttttgagacggagtcttgcgatctcagctcactgcgacctctgcctcctgggttcaggcgattcttctccctcagccttccatgtagctgggacttacaggcacctgccaccacgcccggctcatttttgtatttttagtagagacggagtttcaccatgttggccaggttgggctcgaactccagacctcaggtgatccacctgcctcagcctcccacagtgctgggattacaggtgagagccactgcacccagccggcccctcagtcttttccttctcaatcagtggcaccaccatcttcccaggctttggacatggtccctgactcacccttgcccctcacccccacactaatccacctgcgagctctgttgcttcaccacctagaccagccccaaatcctcaactgcccccaccctgggccacacctggaccactgctagaggcctctcatgggccctccctgtttttctcttgcactccccgggctttctggcacaagatgccccagaagcagaatcacatatctctcctgggagccaatctagtgtgtttactgcccctggagtgttattgttggccttagaatatgtcccactacaggtttgcagagcactgtagtcaaaagtcatttgaaataaatcttttctctgtggtatattgtcaatttgatatagaattaaatttgtttcttttcttttttcttttctttttttttttttttaagagacagggtcttggccaggcgtggtgtctcatgcctgtaatcccggcactttgggaagccaaggtgggtggatcgcctgaggtcaggaattcaagaccaacctggccagcatggtgaaaccccgtctctgctaaaaatacaaaaattagccgggcgtgatggcaggtacctgtaatcccagctactcgggaagctgaggcaggagaaggcttgaactcaggagtcggaggttgcagtgagccaagatcacgccatggcactctagcaagactctgtctcaaaaaaaaaaaaagagagagagagagacagggtcttgctctgtcactcaggctggagtgcagtgatgtagtcatggctcactgcagcctcatactcctgacctcaggtgatcgacccgcctcggcctcccaaagtgctgggatcgtaggctgaagccaccatgcctggcccgaactcatttgtttttatttgcattaagtgtaataaggttttgttacttttagtttgaattttattttgggtaatataaacatttacatgattcagaagtcagaattacactgaggcatgttcagctaggcctcactcctgtgcctgtacccttacctttttccccctaccccatgcagggaatcaatttcattagttcctggtgtgtccttccttaatacccccccttctttctttggtagaatgcagtagatatgtttgcgctttgctccctttgcttcacagtggatcctggaaatgactccatcgcagttcttagagctcttgtttagtccctttggatctgcacagtactccagtgtgtgggcgcaccataagtttattcagcaagtgccctggtgatagggatcgggggtattggaagcctttggctggtaaaaataatgttgtagcaaataacatcatgcatatgttctttgagatttctggaggtgtctctttagcatagatttctagaaggcattccttacgtcacgtttaggtttatagtttgacctcatggtgattaaggtatttgggaaatgcaaatgagagtttcgaagaagccagatctttcccattagttcactgtttttctctgacattaggaccgtccgggttctagggagcagccctggcgttaggcagtgccatgatggattgtgtagaagtagcgattcccatctgtctgctttcttggcccactctgctggtggctccccttccctccctcctttatggggagctggggagctgcctaggggtccattctcaaaggctgatctctggtgggcaacaggccacacctagctttccagggttcttcgtcatttcccattgagagctgtaagactcagagacatgaaaaggaagctctggctgggcacggtggctcacgcctgtaatcccagcactttgggaggctgaggcgggtcgatcacctgaggtcaggagttcgagaccagcctgcccaacatggtgaaaccccgtctccactaaacatacaaaaattagcctggcgtggtagcacacgcctgtgatcccagctactccggaggctgaggcaggagaataacttgaacccggcaggcggaggttgcgatgagccgatattatgccatcggcaacagagcgagactccatctcaaaaaaaaaacaaaaaacaaaacaaggcgagctctgtgctgggacagattagggacccctctttacagcaagaaagactgctctgtgggttgtaggatgcctttgtgtatgcagtggctctaggtgactctggcagccacactctgggccctaaacttctggaggaagatacaggatagggaggaactcaggggtgagtcatggtggggacaagacattccctcactctaagaccttgtcactagattggaacatctcttgcctccctacacctgacctgatggttctggagagatacgtccttgcagcttctgagtcccagcactaagcagcctttggtaacttccctacatcatttgagttctggtttcctaaggatgcttgccagtgagtgccatggtgccctcattgcacagtctgtgcagtgtagacaagaggggaagtctcttggggtagaccagccgcaaggcggtgactagcactgatgtgaaccacatgggacaggggagttgtggggctgagaacacggagggtgggagtagtcatgctcttttccagaatgaactgctaacgaagggactcgcaggtggctgctgcttctttccaagctgcccctgttgttgcagaggctctggagtcctaggaggtttcacggtggcatactcgacagagtactagagcatcatggccagatagtgatgctggggtgtggggcctcacggtggccatttctgacgagaccccaccgggccaaagtgatgtgtagagaaggagctgcttcggtcaccagaaaagaacggggaagcctcccacactagaataggtagggtgctcttctccaccggcaggaaggggatgtatggctctgcctggaccacacctttttccttgctcttccctccgcatctgctgtggccgaggccattcctcatcagggaacatgtgttagaggctcacgccacctgggaccacttgtcttatcacccccaggaccctaggcggtagtttcctgtggcctgagttagctgatatttatatagtgccattgtgccttttctcctgtgatgctcacagtaaggatgcctagatggggttacctgttgtcaagataaggaaactgaagcacagaatgctgaggtcatttgctgggttcatgtttggaaagcggcaaaggatttcagtgcaggttggctggctccaaacctgtgtgtgctttccatgacactgtactgtgtgcctcattgagcctcattctagaaaaccaaaaacacacccaaggcccggccttcacaaaggagacccctcccccatttggctccctttccagcagtcgacggcctcttgtcagccatcgagcccagagtcccttgaagtgcgactcatgctggggtggtatgctcaggagccgcagtgtttccgctcagaggaaagggctctgattctcctgcagtgctaggagacttgtgggtggccacagtgcaggtcaggcacaccggccagcaccacccacagcccaaattcctaaagaaatatttgggtcccagcttggcccgagtctctgttgtcctggggaaggacatcaagatctgagtgtatgatggcctggggccttgcatgtggtgggggtccaagcctgcctctgctcacttgttctgcagactggcatgttctctgtgatacttacatacttgtttaacacttcag

SEQ ID NO: 30 - DNA, 5296 bp, Homo sapiens
gtgagtgggaccgccgtggccgcgggcggggacccttgccggggggcgggggtcaggggcgggacgtggcgcgggaggggcccgcggggtcggacgacacggctggcggatggcgtccctcctctctaccctccccctcccgccgccgccggtggcgactctcccctcggcccgtcacccctgctcgcgggtgaccgtcctcggcgcggcctccctggagccgccttcgcctgacgcccctcttcctcccgccctcgacgcgcatcccggcccccggccccgcgggcgcccctgtcgccggggcttcgcctgtcggggctgcgcgcgctcctgcccttctcggggctttgggccgcggcgccgtcgcgcgcccgcggccccggcctctccctggatcgcgctctccccctccctccctcgcgcgccccctctcccgttactcggcccccccaccggcgcgcgtgcgcacttcgcctcccgtcgggagagtgcgccacaagggctcctgagctctcacccccatctctgggctttgcctccccctccttctcgcccattccatgaatttctgccccccgctacccccccgcgagcgagtaggtccaccggctcctttccccatctagcaggaacaagtaggtggggattattatccacaaaagggactagacattgtgttctgggtcccacaactcatcataaagaggtggttatagttcccatcaggagccgtgggtaggggactgtgcgtccagcagcacccgaggctcttcggcgccagaggctctaaggtgcgagcgtgtccccagggtgctcagaggttctttggagtgctgtggcctcggaatgtgagcaccctcccatcctaccctccccttcgccggcgatcttccagttacataagtggagtgggacatagtaggtaacgggctctcatcgccctggagcgctcgggatcaccggtaccagatggggcaagttcatcgcgacgctgtggctcctgttaattgtgcctgaaaggttatcctctgttcagtttggtcatgaccgaatcacccaaactgaaactcagatgacttttatatggcagtggcaatgtttctgtggttttgcactaaagacttaaggtcattatgaagagtgtaaaaggattgctgtcgcaggggagaccgtttatgacattgctaagtatggaccccgagggggaaaaagctcattctggaattgctctgtggcggttgcttctgttgcgagtgtgttcgggtgtgggttggtcacagcagaaatgggctccaccacaaaattgatattcctgactcatggtcaggcagatgtgtgcttctggttatttttccaggaacaggaatgggctctgccgagcctttcacacgttgtgtctctgctgtgcgggatcagtaccccagactgtgagataacaggatcgaattcaggggttggttggtgatccaggaaccatacctacttggatgtgatactgagtggcctagacgttgtaggactctcataagttttagacattttgttatactgtaaaaatgaagcatatacggcctcagtagtaacattgcactaataggtaattattactctagagaattttgggttccatggctggaatgttcatcagtatctcagcaatttcagttaataaccagattaagctgacctcttgagtcttttgaaatctgctgggtccctataataagacagggtctggattttttaatcttttgggaatttccaccaaggatttagggaaataggcttttatgggcttttcaggatttctatttcaaatcccaatgaggaagtctaggaaacacttgcttttattttcttgcctgaatatgtcagaaccttaaatcacccaatcaatctagaagtactacagttgattaaagtaagtcaccacaggtcacccattcgtggcaggtcagctaggtggctgatcactggaatacagtcatatccccaggcatacacacgagcctcacttgacgatcccaaagtttgtacatctgagcttgagacgtgacaagttgaggtctctgctttgttcttcatagttggcagtttgtctcctcgggtgcccctccggttagctgtttatcatacgtctagccctatcaacagtgcaggcagcttccagagtatagttttctctgcaaagtgcctggtggaggggtacctccttttccattgtcctaatggctccactgggcttccataccagccctttccagtgtcttaacagctcaaagaaacccatctgtggctttcttgttagcactggcctatcacaccttcctattgcctgttaactaaaattttgcctggaatgctttaagcttagagtactgggtctttgtttcacccgattgataggagagtgtcatgcagtcagccgaactccgacttctgtgctgtttaaatccttaggtaggtctggggcaaggcacaaaccactgtgtattcaaagggttatggtgcttgcattctgtgtgtatatgtttgtaatttccaaccagagtcgtttcccgtgcctgccctgcctctgtgcaatctagtctagtagggtagggaggcaagctgtggagtttgaaaaaaaaaaaaaaaagctagatgagtttaataggctgttaccccctccagaacattcctcccatgtggagatgaaacgagaagttcatttctttaacctaaaataaagaacaacagagataaaattgttagttccttattggagcctggtttccattgctaatgtacctgcttgggactctgcatgataaatgacgtgtcctggaacctgaaatcttttataaaggttaatatcagcagaaatcttttaattagctaagagcagcttgttctcaagctgcccgagttatcttggaggagagaatcacaggaaatgtttgatatttctagtaaccagtgttttcagtgcgtggggtaaagcacactcctagactggccagtcccaaagagtgtggcaggacacctgcttgttttccctgccctctgctatggtgacatccttgcagaccagtcttgcgtggctggcagacgcaatctttttttcttgggtagagcattatcaccgctgcgatggaaggaccttgtcctcggtgcctccataccagccctttccagtgaaactactgctgtcccggcaagcccctgtgcgtgtgcatcattccgggtaggacaagatgtgaacaggtccctcttctttgggcttaagtagaagttgtgctcttctgcttttacctgtgtgctcttctgcttttacctgttctcttctgcctttctcttgcaagaaacctgtcgaaagcttgctttgcatgccattgcttaaatactttgatggtatgtatggtatgtgggataactgagtgggagccggaattggggggtgggcagggcatccccacccccacccccacatcaaagggggaatgaccatttcgttagagaataaagcctgagtcttataacttcttcaagcacatgtatgctgggtctcctggcgtgtgaatgtgttcccgctgtgctgtgtggctgttttgcagttactgtagacactgtagtctgggctctcattattgcctctgaagttgacaggaccaagccttagtaaggatgcacttgtcttcctagcccaagagctaggggtgttttatatatatattaactttcttttttagatttcataaactgctctcattttctcttttctttctttctttttttttttttttttttgagacagtctcactctgtcacccatgctggagtgcagtggcacgatctcagctcactgcaacctctgcctcccgggctcaagcagttctctgcctcagcctcccaagtagctgggattacaggcacctgccaccacgcctggctaatttttgtatttttttttttttttttttttttttttagtcgagacggggtttcaccatcttggccacgctggtcttgaactcctgacctcgtgatccacccgcttcagcctcccaaagtgcagggattacaggcgtgagccaccgcacccagcctctggctcttttctttttgacatgaaatcttaagttaattatcttaaactttaagaactagaaggattcttagtccagcaccatcagtttacaaacaaaaaaaacttgtgtccctgagaagttgtgacttttccagggcctcctagccaggataccagtttggtttttattatatagctagccgagtaatactattaacttgacttctgggatttcaaagtattctatgacttgactgtttaagggaattatgaggcctcactgaacctcaaaagataattttaggtaccatcctggtagctgtagagcagcaacagaccagtaaaagacttggttggtgttgcccttcttctgggtttgattacatgagtaattgtgtgaatagtctctaagttgtatgctctgagctttcgtttttagcttataaaagtgctactcttgggccagcatagtatcagaaattagctaattcatatggggcagtttaggctttaactaggaaatgatggttatcttaatgacaaaaaaggtactgacaaaagtccttttttgaacatgtgttcaaaagaaaaagagaaactatcaaactaataactgagtttgttgaacatcgagattgactgatctgagaggcttaaaactgattgccctgaaatagacttgcatgttttggatgatggctttgggtctcccagagcacttggtttcccttggtgctgattttttctctcaggattaaagcccctttatgtgatgttgttacagcagcttattgcaacttcattcagctgcttgaaaaagaagggagactgcctctaggttccatgtgttctttcagggatggtattttgatgttgcgtattctcttgaacatgtattcttccctgagaatttctgtgtgccgtggtagaagaaatacttgccagaaatcgccactcatggtatgcttttgtagtgtcgaagtgtcccctagaggtgacaaggcttgtgatagtgttgattctaacaagcatgaatctttcctttattttagcactgtgtgttacgtgccagtaatttgcagcttatcctttgtttctagctaggtaagctgggaaatagcctagtactttgtctatgtgtttatcttcaaaatgtcccaaatagccctgggaaaaaggtcgtgcagctcaatgggggctttcaacttacaattttctttgttttag

SEQ ID NO: 31 - DNA, 59626 bp, Homo sapiens
gtaagtaaccttcctttttttttttttagtatatgtcctggtttggccatctgttttttttttttttaaaaaaaaaaaaaaaaggaaaagaggaaaaaaatatactactcttggacagtataaaagtaccccaaagactaaagacataactgtgccaaactgtgccatataataaaaaaaagtcacttccctgagccctgaaaggtcagtgtgtgtagggttacttggtcgccacagcgtgatctgggggcgggcgtcagattagagccggaactggtgatctgcaacttcagttcaccttgaagcaggtcagctgagctgagagcgcttgcactgagcccttttgcgctgctgctgttgccttagcggtcttcagcatgtgtttgctttggtttggggtaaatggcttagtggtcaacattagtgagcagtggtaatgcattttcagatatgggaactggtatgtggttggttccctagaaggacaccctcctgaaagctgtctcagaacaccgggggccatggctaatgtcatgtgcttgctacactcctcccatggtaactaaagagagtacccagatatacatctggttcttgggactctagaggaggatgagtactttgtaaaaacctgggggccccagtcattctaggtctgacactcaggtgctgtatcagctgcagtttgaactacttggcaccattgtgtggactttagttttgtaaaaatgaatggttccttaatttctcaaccttcaggctcaacatctcaagctgtttgttgttgttgttgttgttgttgttttgttttgtctttttgattagtggtcactccgcatttgatgttttgacatgtggatttcagaacttctgtgtggtaaagcagaatgttccaattgaattttcccattttttttcccctaagcaaaaatgtgagttttcacttatgcggccattgtgattccgactgagaccctaagtcgttctttgttgtctctctagtggtttctgacacctcagtgtgaagctgttgtagacatccataagaaatagcctgcttagggattatgtgagggcaaggtttggctgaaggagaatagaaggtgtggaaggaagcggaagaccagaagagcatcacactgcctcaagtcccaaatttgattctgctcctgatcctgtgactcaaattgtcattctcttttactgctgtggggtgtgctctgggcccagctgacaggacattctttgtactccacgtatttatgctggtgggagttgtatggctagtgctttgtgctttgtctcagaaattgtgtggactaaatgtaatatgggcagtgaatgggtttcttctggaagatgttaggcctggagggtggtttgggtttttacgagtctttttctcagattacagattacgaatggatgttataaaacaggcagtgttgacaccatacagtttctcctaagaaatgtacagagagttcaacctgaggaagctaattgaaaataaacttttaaaaagaaatgtagaaagaggaaatttaaaaagtatcttatgaatgggaaagatgtagccatttgagcttcaaagaacttttgagggaattctcaaaggacagtacccgtctttagtagataaatgcttgatatctatttttcttcttttactttttaaagaattactaaaataatacatggatttatagaaaaatcaaaccacttaaaaattgatcaggtggctgggcaaggtggctcatgcctgtaatcacagcgctttgggaggcctaggcgggtggatcacctgaagtcaggagttcgagaccagcctggctaacacggcgaaaccccatctctattaaaaatacaaaaattagctggccatggtggcttgagcgtgtagtcccagctactcggaaggctgaggcaggagaatcacttgaacctgggaggcggaggttgcagtgagccaagatcacaccactgaactcctgcctgggtgacagagtgagactcggtctcaaaaaaaaaaaaaaaaaaaagtatcaggtaaaaaaatgaaagctccccgcttaatctctgctcccactacccagaataactgctgttaatagcttaatgtagatccttctaagtcttctaagactaaactgtgtactttttgtgttgtaattaacaggagggtttttgttttgttttgttttttctttttttgagatggagtcttgctctgtcatccaggctggagtacagtggcacaatcttggctcactgcaacctccacctcctgggttcaagtgattctcctgcctcagcctcctgagtagctgggattacaggcgcctgccaccacacccagctaatttttgtatttttagtagagatgggtttcaccatgttggccaggctggtgtcgaactcctgacctcaggcgatccacctgccttggcctcccaaagtgctgggattacaggcgtgagccaccgtgcctggcctcaggatggtgttatatatacatattctgcatttttccatctcatatattcatctctgcctcatttcttttaaatagcagtgtagtccagggctgacttaccgtcatgcatttcgttgtctctctatgttattaaaaatgctacaggattgaaattcctcatgtgccagtcattttgaagaatggctgcctagacttggaatttctggtggataccaccacatcactgtccaaaatggctatcccagttcccacaacagtctgagaaagtgccattttcccatatcgtcccagaattggatatacatcttttaaattggtgccgcttggattattactgaggctaaacctcaataatcattgtcatagctcttaatgtattaaagatgttaactctttgtcatgcagatattttcctgttttgtcttacgtcttgattcttgtctttctgatatataaaatttatgttatgatttattcttttgctttcatacttaggaaatccttttttactcttttttttttttttttttttttttttgagacggagtctcgctctgtcgcccaggttggagtgcaatggcgtgatcttggctcactgcaagctccatctcccgggttcattccattctcctgcctcagcctcccgagtagctgggactacaggcgcccgccaccacgcctggctaatttttttgtatttgtgagacagggtttcaccatgttagccaggctggtctcgatctcctgaccttgtgatccgcccgtctctgcctcccaaagtgctgggattacaggcgtgagccaccgcgccccgccaggaaatcctttcctactcttaacaacagatcaatagtcatctatattttcttcctaaaaaacctgatgatgtattatattcatacatacgtatttaatacatacaaaagggccagatgcggtggctcatgcctgtaatcccagcactttgggaggctgaggcgggtggatcacctgaggtcaagagttcaagaccagcctggccaagatggtgaaatcccgtctctactaaaaatacaaaaattagccaggcgtggtggcgggcacctgtaatctcaactactggggtgactgaggcaggagaatcgcttgaacccaggaggcagaagtttcggtgagccaagatcacgccactgcactcctgcctgggcgatagagtgaggctctgtctcaaaaataaaaaataaaaataataattttatagttaagttgccctgtgtttttcctgtgattaaaaaaaaaaatacctgttttgtatttaactttggggtgggataaggtatagcccacttagtcagttgtgtctaagccacttgatgaaccagtcaatccagtcttcacctttaacaaatgctgatttcttcaagtgagcaaaatatctcttaaactttttcctattttctctataaagttgcttttttctgaattttttctttatgaggcttgatgggcagccctatcagcagacaatcattcattcacccaacaaatatttgagtatctgcttcaagccaggggcagtgctaagccctggaagtggtatcttctccttatccgggagtggggctacagtgttcattccagaagactcaagaaaatagcagatcatcacaaaagtaggttttacataaatgaggaggaatccacagggttgtgtatatgtgtgtgtattttaaattctgacataagttggagctttagggtagactgtgacataagagtagtttgttttccaactcatgtaattgccggctgatttttgtcttgaattatgataatggtaacttctgttgaaacaattctgtattcatcttagcttggttgggatgcaataaaagttttgtactggtaaaaatgataattttcttccatgatgattttgaagcttttctgtaacacctgataaaaatagaggggccaggcatggtggctcatgcctgtagtcccagctactcgggaggatgaggtgagaggatcccatgagcccaggagttttaggctacagtgagccatcatcacaccactgtactcctgtactctagcctgggcagcctcgttctttagagtaagacactgtctctttaaaaaaaaaaaaaaagaaaaaagaaaaaaagaaaaggcttttagtgaatatatttttagggtagcaagtgtaatttttataaattgcattatttgaatctaataaataccctcaaagctgaagtcgaattctgattttgattgaaaatattttttacttaaaggaagagggatagaataaatgacacgattaaggaaaagacttcttgtataaggccggggttttttaaatgattttttgaatagttagatggacaatacggaattaaaaaggtggtgtaaaaagttatacggggctgggcacagtgactcacgcctgcaatcccagtactttgggaggccgaggtgggtggatcacctgaggtcaggagttcgagaccagcctagccaacatgacgaaacatcatttctactaaaaatacaaaaattagctgggcttggtggtatgcacctgtaatccagctactcgggaggctgaggcagaagaatcgtttgaacccaggaggcagaggttgcagtgagccaagatcgtgccattgcactccagcctgggcgacagagtgagactccatctcagaaaaataataatagaaaaaagttatatggggctgggcatggtggctcatgcctgtaatcccagcagtttgggaggctgaggcagcttgatcacttgaggtcaggaattcgagactagcctggccaacatggtgaaactccgtctccactaaaaatacaaaaattagccaagcgtggtggtgcgtgcctgtagtcccagctacttgggaagctgaggcaggagaatcgcctgaacctgggaggcagaggttgcagtgagccaagatcatgccgttgcactccagcctggacgacaagagcggaactccgtctcaaaaaaaaaaaaaaaagagttatattgtaaagtatctctgctaccctgccccaaacattcatttctttccctggaggcagccactattacctgtttctttaaaaaaaaaaaaaaattgtggccgggcacggtggctcacgcctgtaatcctagcactttgggaggtggaggtgggtggatcatgaggtcaagagatcgagaccatcttggccaacatggtaaaaccccatctctactaaaaatacaaaaaattagccgggcatggtggcgggcacctgtagtcccagctactcgggaggctgaggcaggagaatcgcttgaacctgggaggcagaggttgcagtgaactgagatcacgccgctgcactccagcctggcaacagaatgagactccatctcaaaaaaaaaagcgtgtgtgtacccgtgtgttaaatttttattataaaatatatataacaggctgggcgtggtggctcacgcctgtaatcccagcactttgggaggccgaggcaggctgatcacgaggtcaggagatcgagaccatcctggcgagcacggtgaaacctcgtctttactaaaaatacaaaaaattagccgggcatggtggcgggcgcctgtagtcccagctactctgagagcctgaggcaggagaatggcgtgaacccaggaggcggagcttgcagtgagccgagatcgcgtcactgcactccagcctgggcgacagaccgagactccgtctcaaaaaatatatatcgatatatataacaatttacagttttaatcatcttaactgtacagttcagtggcactgagtacattcacattgttgtacagccattactaccatccatctctacaacctttcgtcttgcaaaactgaaatttcatacctattaaacactaactcccacttctcccctttcccccaccccaccctctggcaactactattctactctttgtctctattggacatatttttgtgtgtttaggtttgtgtatatattttacatgtgtgtataaatacacaagggtatgtgggcgttgtgtttttacacatactataaaatattgtgcacatttgtttattttaatgtatcctgtagattatttagaatcggttcatacagagccgtatcattccttttaagggttgggtttaaatagtctgttatggatgtaccacaatttatttaaccagtttttaaattttttacttattttttttaatgtttttttagagacaggatcccactccatcacccagactggagtgcaacagcatgatcatagcttactgcagccttgaactccggggctgatgtgatcctcccacctcaggctctcttgtagctgggactacagggatgtgccgccatgcctggctaaattttttatttttatttttatttttatttttggtagacacggggtttcactgtgttgcccaggctggtcttgaactccttgggcttgagtaatcctcctgccttggcctcccaaagtgccgagattacaaccatgagccatggagcccgacaagagtagccttttatttgcagaccattagagaaaaagttgcgtgtaagtagataagcatacgaatttatcactgcaatactgtttgtagagatcacagagctgttaggctaggaagaagtttttagcagttagcactagaaagcaaaactttggaaacttccatttcatcaaaagtgacctcatctgagtagggcatgtgagggaaggacctttttactcgacaaggggaacttgcccagttcttgtttgtgaaccttgaagaaagtggagcatttttattttgggaccattctaggttgtggtagttccttggtactcggggttggagaatctccctctgctgctggaccttctgcctcctcatgctgtaatatgcataagaggtgtcctagaagtattcaggaacaggctgtggttgctttgttgttctgtgactgttgaactctttatatagcagtacttttttaagctgtactaattgagcatttattatgtgtcagttactgtgctagctgctggaaactatcctaccctcagcagtcttctggtctaatgggaggtacagacaggcaaatgggctatgactttacaagaggctaacttctgtgatggagagaagttccagccactaagggagcacataaaaatcagaggagatcctaccaagaattgggaggtaggtcagggaggagacttctttgaaaaatggcatctaagacctgaacagcaaggaaacattagctaggtcaaggacaaagcatcagtggggagagatgcatgagtcttttggaaggaccagcatgtgtagaggctctgacaggagagaatctctcaggcccattcagagagtccactgtgtgaagacgaggcatgaacaaccagccaggacatgtggagaggagcatttttctttttttcttttttctttctttttttttttttttttttttgagacgtctttctctgtcacccaggctggagtgcaatggcatgatctcggctcactgcaacccccacttccagggttcaagcaattcttctgccttagcctcccaagcagctaggattacaggcacccgccaccatgcccggttaatttttgtatttttagtagagacggagtttcaccatgttggcctcaaactcctgaccttaggtgatctacccgtctcggcctcccagagtgctgggattacaggtgagagcccccacgcccggccaggctcggctttctttccaggccccgtcacactcttagatgttccctgggccccagaaggcagcgtgaggtgctctgcccatctatgctgtccttttccaccccaccctatccactgggcccctggggctcccactccactccaggtctcttcatggacccttctttcccttcacttctgtcccaggagacctgggagactcatgggaacaggcatcatcttctccagcacagttcattgtctaatgcacgaaagtgctgggctgtgagaaggtcaggagcttacatggaatgggagtcagctgtggtacaaagtacgctgcttagttctactgattttttattttttatttttacataagactttgatggtaaaggaagcagtgtgtgagcaagctgactcctgtcttgtcaagtaccaggtccactctgatgagcccctgtggacagcactgctgtaactccccaagcctgggctcaggaggtgggccctaagcgctgttcccagctcttcctccatgctgtcagctcttccaccattcttcctggcgtcattctaaggtcctgtcttcccccgccctcttccttcctggcttctacgctcagctcaagtagtagctgtttgggtacttttcacccagacttaggaaatgttatcagttggtcgtattcctgtcagccctcttactatggaactcaaataggacagattcagctgaattcccagccctgtggttgcactctttgtctgccctgcttccccaaggtagcctgctccctaaaggtcaccgagatactccccatgcaaggtttttgttgtattacacatgacaacatggaataaagtgttttgcaaatttactggatgatatcctactatgtggaacatcctacaacttactcttttcactcaacatttgacttttgaacctggtctgtactgctccgtgcagaccaatgttcattcatttgatatgtctccttgtgccatagaaatagttttacaatagaagcctgtccagagccatgagggagaaggggattgtagagaaacaaggattggcatctggtttatgtttacatcctttagtcctgttaaccgagaagaagatatttttatttccatgtttgcgaaagctttccacaaaaaaagcatccattttctagacttattaatagggcagtccaaaggttttatttttagatttgaaagaaagcaaagtaggcttctgagatatgcacatttccctgtgtccctgtctcttttgcaacattccacattgctgctaaaacttgaacatgagcactttcaagcatgtgcttactttctatgtatgactcattttttaaaacattaaagcattttcggccgggtgtggtggctcacgcctatattcctagcactttagaaggccgaggcgggtagatcacttgaggtcaggagttcaagaccagcctagccaatatagtgaaaccccatctccactaaaaatacaaaaattagccgggcatggtggcgggcgcctgtaatcccagctactcgggaggctgaggcaggagaattgcttgaacccaggaggtggaggttgcagtgagcagagatcgagccactgcactctagcctaggtgacagagcgagactctgtctcaaaaaaataaaaataaagcattaaagcactttgtctggtggtatgtaagttttggcattacttagataagttgtattttaagtctttctacacacaataacttatttttaaaatacaagtttctgtgtacttccgggttttgtgtttttgtaaacagcagaaggtattagtccatattaagtactaatttgttctaatattttcagctgtttttggaattacacttggcaaaaaaatagacaaatgtctgcagttgtgacagtttgtttttttgttctttttaactccagaataaataattctagtgagtttttttcttggcttgtaagaacatgggaatgattagagtcatcataacacttaagtagttatagaaggttgaacatctgtagtcagttgtataaaatttcctagtcatccttccaggttgtttaagacaaacaaatacatagtatttattaagctcttataaattttaattgtaaaacatcattgtacaaaactttgaaaatgcgtataggtacaaagataaaaaattaggccaggcatgccatggctcacgcctgtaatcccagcactttgggaggccaaggtgggaggatcttttgagcccaggagttcaagaccagcctgagcaacatattgagaccctatctctacaaaaatatcataaaacaaaatagaatcactctggcgattccactatccaaaaaaaaaaaaaactgctgttaatatttggtatgtatctttctagaccaaggcctccaactttggttgagaattcagccgggtctgtgaccttggatgggaaaaacattcactctttattttcactaatgtctctgaaaacccagatttttagctgggcatggtggctcgtgcctgtaatcccagtgctttggaagcccgtggagggcagatcacttgagcccaggagtttgagaccagcctgggcaacatagcaagaccctgtcttttaaaaaaaaaaaaaatccagccgggtgtggtggctcatgcctgtaatcccagcactttgagaggctgaggcaggcagatcacctgaggtcaggagtttgagaccagcctgaccaacatggtgaaatcctgtctctactaaaaatacaaaaatcagccgggcatggtggtgggcgcctgtaatcccagctactccggaggctgaggcaggagaatcacttgaacccggaaggtagaggttgcagtgagccaagatcacaccattgcactccagcctgggcgacagagcgagactctgtctcaaaaaaaaaaaaaaaaatccacattttcttcaatgacaattgtaagcaacagatcatggtagtattagaatagcagtgactgtcaccagtagagatcaaagatactttcatatcatattatagttgttacagatattttgaaatatatatgtccatcactgcttcaaacttaaggtaattattagacccatctctagatctggttatttaatgatttactgaagaagcacatattatttgagaacgaactcttgaaatatgttgttaatttctgtgcattttacacatttcaaaacattcttctgaggaggggtccagaaggccaaaagggtccatggcagaaaaaggttaagaacacctgttctgtactttgtaccatgtggctacaaatataaaaacagacgttaagccgggtatggtgatgcacacctgtagttccacctacttgggaggctgaggtgggaaaatcacttgagcccaggagtttgaggccagcctgggcaacagagcaagaccccatctcttaaaaaccagtcagcacttgactagtcagttagtgggggaaaacacaggtacagtaaaaggagtcaaaattacacttaaacttaggtcatcttattatatcaaacatttattaacatgtttagtgttttgtgtatattatgcaaagtgtaatgcaactaaaactgtttaacacttctcgatatcacataaatttgttggtgcataatagcctaaaagttacttttgctgttggcattttattttattacttacttatttatttatttatttatttattttgagacagagtcacactgtcgccaggctggagtgcagtggtgcgatctcagctcactgcaacctctgcctccctggttcaagcgattctcccgcctcagcctcctgactagctgggactacaggtgcgcgccaccatgcccagctaatttttgtatttttagtagagatagggtttcgccatgttggccaggatggtcttcatctcttgaccttgtgatctgcccacctcggcctcccaaagtgctaggattacaggcatgagccaccacgctgggcctgctgttggcattttaaacatccttctagagtctttcttatttgcctgtaagcacgtacacatgttgttgttgttttgagacaaggtctgtcgcccaagctggagcacagtggtgcaatcacagctcactacagcttcgacctcttgggtgcaagtgatcctcccaatcagcctcccaagtaggtgggactacaggtgtccgctaccatgcccagctaatttttgtattttttttgtagagacggagtttcaccatgttgcccagactggtctcaaactcctttgctcaaacgatccttccgcctcggcctcccaaagtgccgggattacaagtgtgcacctctgtgcctggcccacatgttgttttagatgaatgagatcatatatgtacttttgtaacttgctacctttcctcaacaaaatgttgtaaatatccatgtccataaaaatagacgtatatcttcacttttccctaaaatgaaaataacttaacttgcattttcttttttgtttttgtttttgttttgagacaggctcttgctctgttgctcaggctggagtgcagtgatgtcacagctcactacagcctccacctccagtttcaagtattccacctacctcagcctccaagatagctaagactacaggcacatgtcacgacgcctggctaatttttaaaatattttttgcagaaatgggatttcactatgttgcccaggctggcctcaaactgctggcctcaagtgatcttcctgccttggcctcccaaagtgctgggattacagtcgtgagccactgtgcccagcctgcattttcttattataaaagtaatacatgttcaatggacaaaaaattttcagaaaatatgcaaagatgaaaagtaaaaattgtccataaatctgtcatctacagataaagataacttctggataatgtttttctaccatcatttttagtaatcacataacatttcgttgtatgtctatgccttcatttaattaagaggcatttccattatttctgcatgttcatgactctgaatgatgatatgtctgcctgctgatggctacaaccctgtttctgcatttcaaacctctctcttgagctccagatttgatggcctcgtcagcatttacttgagttgctcataagtgtctcaaatttaacaagtcccagtcttgatttttttcccccttcaaacctattcctcatgttgtctctatttcagtaaacaatatcaacatccacccagttactcagtccaaaattctaggagtcatccttgattctgctctttctttttttttttttttttgagacggagtctcgctctgtcgcccaggccggactgcggactgcagtggcgcgatctcggctcactgcaagctccgcttcccgggttcacgccattctcctgcctcagcctcccgagtagctgggactacaggcgcccgccaccgcgcccggctaattttttgtatttttagtagagacggggtttcaccttgttagccaggatggtctcgatctcctgacctcatgatccacccgcctcggcctcccaaagtgctgggattacaggcgtgagccaccgcgcccggcctcttttttttttttgatacggagtctcattctcgtcatccaggctggagtgcagtggtgcaatcttggctcactgcaacctccgcctcccgggttcaagcaattcttctgccccaacctcctgagtagctgggcctggctaattttttgtatttttagtagagatggggtttcaccatgttggccaggctggtcctgaactcctgaccttgtgatccgcccacctcagcctcccaaagtgctgggattacaggcgtgagccactgcacccgccctgattctgctctttctctcatcatccctgatctgtcagcaagtcctgttaggccaaccacttctcagcatctgcactgccagtatgctagtccaagccacaaaacacctctcagaggtacgcaacaggactttgttgttgttgtgtgtgtgtgtgtttttttttttttacggtagaattattttataacttgaagtgtagggatgaccttccttttaaaattttatttattttcttaattttttattcccatagattttaggggaacaggtggtatttggtgacatgagtaagttctttaatggtgatttctgagattttggtgcacccatcacccgagcagtgtacactgaacccaatttgtagtcttttatccctcaccccctcccaccctttccctcaagtccccaaagtccattgtatcattctgatgcctttgcatcctcatagcttagctcccacttatgagtgagaacatacagtgtttggttttccattcctgagttacttcacttagaataatagtctctagttccatccaggttgctgtgaatgccattaagtcattcctttttatggctgagtagtattcctttgtatatatatgccacaatttctctattcactttctgattgatgggcatttgggctggttctatatttttgtaattgtgaattgtgctgctataagcatgcgtgtgcaagtatcattatgcaacgggacttcggatgacatattgaacaacttcctcactgatatccttgtgaaacgctacatatttcatgggtctgtttgttataccaacactcaattctgaatgatggaattatttcacatttagtctctttttcatctagccattatagtttagtttaaacaccaagttccattcctgctgcatgctgaaggatttgcagtacatcaggctatagtccatcaattcattccacaattgagtaagtaaggtatctatagtacctcaggccctgtgttaggcagggatggggtaacctagacagatttggtacctgtcctcatggagcttgactttagcggcagagacagatcttagataattgtaccagtacttaagtgttcagaaggacaagtatggaggtgggagccactccagtcctctacagtcacgtgctgcacaacaacgtttcaaccgacaacagagcacacatacagtggtgttcccataagattagaatgccatatttttactgtaccttttctatgtttagatatacaaatacttaccattgtgttccagtgatctacagtattcagtatagtaccatgctgtacagttttatagcccaggagcaataggctatataccgtatagcctaggtgtgtagtatgctacaccatctagatttgtgtaagaacactctctgatgttagcacaaataaatcgcccaatgacacatttctcagaacatatccctgttgttgagcgactcatgactgtacaatgggggaacagctcagcctgccttccccaaggaggcaacgccgatgcagggaaccgagggttgaacagaagtgggcaaggtgcagagaggaaaaaggctttccagatggagaagagcatgtgtgaaggccctcagtctggcaagagcttagtcctgtgtggcaggagctgaacgaggggttaggggagagtggcaaagggtccgggccatcagagaggtcaacaggggctggatcatgcaggattttgaatgttaacatcagagcgatagaaaacatgaagggtaaggtggtttgggttttgaatttttatcaaaatattgcaactactcggcaacaagttagatataacaaaagaggtcatcgtaaaaacagcagtctaccccttccccttcccttccctgactcagacatgacagcttttaactgtttctgattttagttcctttgatggttacctccaaaattaaatcatatgcttatacatctttcttgatttgccaactttagggaactgtgttaactccctgaaatgaaagagaatgacttagcttacgttacctccccatgttgaaattcatattcacatttctctgtaattttttttttgagatggagtctcactctgtcgcccaggctggagtgcagtgatgtgatctcggctcactgaaacctctgcctcccgggttcaagcaattctcgtgcctcagcctcctgagtagctgggactacaggcgcacaccagtgcactgggctaatttttgtatttttagtagaggcggggtttcaccatgttggccaggctggtcttaaactcctgacctcaggtgatctgcctgccttggcctcccaaagtgctgggattacaggtgtgagctaccatgccaagcccacatttctctgtaaattttaaacagtattttagtccatatgtcagttcccctctgtttaagataaggatattaataaccctacttttccttccactttccctccttaacttctgcgtcttaaaagctgtacttgaccatacccattcttgcatttgttaacatgtgtgttctgccctgcaaccacagccaagttgtagcttaattctaaagtcgaaaataacattatttacattattacacatgtgagtattgttcttggcgagaccaaataatgaatgtgcccaggattacatttccttctttacagatctggaccactcaaaggagaatgaccaatcaaggtcaaatggattcccttttcttagactctgtcacctgcttaaaatccttgctaggatttaatctacttcatattcaaaccttggcttgcttatatagctctttgttttgcccaccatttctagttgcctttttattttgtttactattcctccttgattatgttgtaaaatgctattagcagtgctgtttatttcgtacgattcggctttttccccactgaagacctttctcttggaaggcctctgcccttctgcaatctgggcaagtatctgctctttgatttaaggttgcatatacagctgtacctggaccttctcctcactgggctcttgggttggagcccgtgtcttaaaacccatatcttcctttcacatggtttactccctcgttttctggactgcatccttaaataatgtgctcagatagagtgcatggggagtaaactgtagtggataccgttgtcacctaccccatatccatttcttctttgcccattcctaacagaatcctgatattattcacctttctaccttattcccaacttcagaaaggatccttaagtcattccacacattgcattcctttggcaactgttactggtcaaggatggacatacgatctaagttggttcactcagactgaagggaaggacttccatggcacgttcagggaagactttctctttttctctcactggagtaagtgagaaaggtgttgctgggggctcttctgtaacctcagactgagggacaaagcctgaggataaagcctgctcaccaaggaaggcggagcagagaaacgggaagaacctgggtcttgatgccgttgcttagctggtgattgcactgtggctggggcctgtcctacctgagctagggactcagataggatggactttcttactgaatgagccagcttcagttttcttttctgttacttgtaaccaaaagcattgtaacagataggtcttctgagtcactgcatgcctgaaatacctttcttctactcttacacttgattggctgagtatagggttccaagttgaaaatcattttttctcctaactttggaggcatctcttctagtatgcagagtaacaaatgcaacaaatgcctgatgccaatcttattatggttcttttgtaggtgcccttcttttctcttccttccctggaagtttttaggatttcgtctccttatttttagtgtcctgaaatctcatgagaatatgtctagagttgtgtcttgttcactcgttgtactgtggtcattcaatctgaatacttttgtcaactcttttttttaaaaaaaaattactaatttacatgctttcattttctctatggggactactgtttaactttggacctcttatattggtcttctgtcttctctcatatttttcatttattgggcggtggggggtgctctgaattttggaagatctcctgcatttattttctttttccttttttctttttttttgaggcagagtcttgctctgtcacccaggctggagtgcagtagcctgatctcggctcactgcaacctctgccttccaggttcaagcaattctgcctctgcctcccacgtagctgggattacagacctgcaccaccacgcccggctaatttttgtatttttaatagagatggggtttcaccatgttgccaggctggtctcgaactcctgacctcaagtgatccgcccgcctcagcctcccaaagtggtgtgagccaccgcacccagcctcctgactttattttctatcccttctgttaaattctttatttcagccaaacctttttttttttttttttaacttactgtgaagcctgtgtgcctactgcctagattagacaattgttaacattttggcgtattttcctggtctgtatagatagggtgcatttttatacctttttgctcaccatttaaaaggaactcacagatgtcacgacatttcacccctaagtacttcagtatacatctcctaaaaataaggacattttccaatataagcacaataccccgatcacatctttaaaagttaacaataattctctaatgttatcaggcacccactttaaattcagatttcctccaaatgtctcttatcgctgttgaggggctccaaagcaattaagatttatacattgcatttgaatatgcttcctttgtctcttatttatttatttattttattttgagacagagtctcgctgtctcccaggctggagtgcagtggtgtgatctcagctcactgcaacctccgccttccaggttcaagcgattctcctgcctcagcctcccaaatagctgggattacaggtacgcaccaccacgcccagctaacttttttgtatttttagtagagacagggtttctactaaaccatgttggccaggctggttttgaactcctgacctcaagtgatctgcccgcctcggcctcccaaagttctaggattataggcgtgagccaccatgcccagcccctttgtctcttttaacaagaacagcctacccacctctccttcacttgtgatactgactttttgaagcagtcagcccaattgtcatctagaagggcccacattttaagatacatatttttagagatggcgtgtcactatgttgcctaggctggccttgaactcctggcctcaagtaatcctcctgcctcagcctcccaggtagctgggactacaggcttgtgccaccacgactagctggcccacattttagatgtctctcttttcttgtgatataatttaacttgtttgtccatatatattacttgtagacaagaagttaggtctacaggcatgttcaggttaaacattttgggcaagaatatttcataggcagtactgtgtacttcatatagcatcagctcaccaggcacttaatggttggttaccctgtggtttgtgatgctacgttttaacacttgattaaagaaggaggtgactgccaaatctccccattgtagacatacagttttcctgtggtaattgatatataatctgtgatgtgatgctttggcaccatacaaatatcctattgcccaacagccatttgcataattattttagcattcattgatccttgcctgaaaccattattacattgggggttgcaaaatgatagtttttttaattgtcacctcttctacatttagtactgtcattcctctgtaatgaattttccctcatcaaataaggaggcattatatttcctcctaaaaagacagtatagatgcttaatctttgcctttattacatttcagagtaaggagttggtagaataatcacctcaaatggtggcaaaatatttgctgttgtgtttccttttctctttcatgtcaatatggactcatagggatttatttattaaatgttttacaattcaaattgggtcaacaagagtcccttcatgttggttcctatattctcctggcataccctcattaattagtctttgagcaatttcttgttttctggcacaagatattccatcccaatatgtgcttttcgtgtcctagaactgattccaaggagctctggttccttatagtggcaacggtatttagaatccaacatgtgggtactaaatgtgctgattcttactggggtaacattatatctaggcactttcagaggacatcgctagaaaatatattcagtttttattttttatttttaatttttttgtagagacaaggtctcactatgttgcccaagctggtttcgaactgagctcaagcgatcctcccacctcagcctcccaaagtgctgggattacatctgtcagggcaaactgctggtaaatattttcacaaaagaaaaataaaaaaaccaaagtgctgggattacagatgtgagccactgtgccctccattttttttttaagtcataaatacataatgatgtcttctatggcaatttaacattacagggttcttccttaacttttttttttttttttcttttttttgaggcagggtcttgctctattgcccaggctggagtggtgcagtggtacaatcctaattcactgcagcttcaaatgcctaggcttcaaacaatcctcctccctcagcctcccgagtagctaagactacaggtgcatatcaccatgcccagctaatttttaaaaattttttgtagagatggggggtctcgttgcgttgcccaggctggtctcgaactcctggcctcaagtgatcctcccatctcgatttcccaaagtgctgggattacaggtgtgagccaccatgcctggccaacttttatttgatctgtatatatcttttccttacactgaaaatgttgggtcttactaatgttaacatagttacttatttgctttatcttgtaatagacataaaattacaaaattataataccaatattacgataaatagctgggcatggcggcgctcgcctgtagtcccagctactcaggaagctgaggtggagggactgcttgaacctaagagtttgaagctgcagtgagctgtggttgtgccactgtactcctacccggacaacagagtgagtggggggaaaaaaaagaaataatggaagatccagagaaagccccaaatatttaaaaattaaacaatacactttgcagcttcctcacctctctcagccttcatagaattgaagagagttagggccttgcactagattaggctttgccttaaggaaatgttgtgtttgatttgatcttttatccagaccattaaaacttccttaacgtttattagtaataaggctatttcactttcatatcatttgtgtgttcactggagtagcacttttagtttccttcaagaactttgattcacaacttggctaactttggtacaagaggcctagcttttggcttctcggctttcaacatgcctctcactaagcctgatcatttggtttttggtttaaagagaaagacatatgactcttccttttacttgaatgcttagaggccattgtagggttattaattggcctaatttcagtactgtcttgtccaagggaatagggaggcccaaggagagagagagagatgggggaacagctgattggtggagtagtcagaatatacacatttatcacttaagttttgccatcttttctttttctttttcttttttttttttgagacagtcttgctctgtcacccaggctggcatgcagtggcatgatctcagttcactgcaacctctgcctcctgggctcaagcaattctcctgcctcaacctcccgagtagctggtattacaagcgtgcgccaccatacccagctaatttttatattttttagtagagacagggtttgccatgttggccaggctggtctcgaattcctgacctcaagtgatccacccgccttggcctcccaaagtgcggggattacaggcgtaagccactgccgcctggccaagtttgccaccttttttattttttttattttttgagatggagtctcactccatcacccaggctggagtgcagtgatgcaatctcggctcactgcagtctctgcctcctggattcaagcgattctcctgcctcagcctcccgagtagctgggactacaggcatgtgccagcacgcccagcttgttttttgtatttttagtagagacggggtttcaccatgttggccaggctggtctccaactcctgacctcaggtgatctgcccggctcagcctcccaaagtgctgggattacaggcgtgagccaccccgcccggccaagtttgccatcttttatgggtgcagtttgtggtgccgcaaaatgatgatagtagtaacatcagagagcattgatcacagatcaccataacaaatataataatgagaaatttgaaacattgtgaaaattaccaaaatgtgacagagacatgaagtaagcacatgctattggaaaaatggcactggtaaacttgcttgatgcagggttgccacacaccttcaatttgttaaaaactcagtatctgcgaagtacagtaaagcaaagcacaatcaaatgaggtgcgcctgcatattacaaccaagaggcttttcgcagaaacacgagtgtgcttcaacattcaaaaatcagttggtgtaattcaccacattaagataataaaggaggccgggtgcggtggctcacacctgtaatcccagcactttcagaagccgaggtggacagatcacttgaggccaggagtttgagagcagcctggccaacatagtgaaatcctgtctctactaaaaatagaaaaattagccgggcagggtggcacgcacctttagtcccagctattcgggaggctgaggcaggtgaatccttgaaaccaagaggcggaggttgcagtaagctgagatcacgccaatgcattctagcctgggcaacagtgagacccagtatcaaaaaaaaaaaaaaaaaaaaaaaaagataataaaggagaaaaaccatatagtctattcaataaatacagaaaacgcatctgacaaaattcagtgccctttcatgataaaaattcagcagattagaaatagaggaagtgcatgtatgaaagagctacagatagattgtacttaattgtgaaatattgaacatgttaccccgaaaatcaggaaaaaggcaaagatgtccactctaaccacttctattcaacattatactagaggtcatagccagtataatgaggcaagaaaaaacataagaggcattaatatttaaaggaagtaaaactgtttctatttgtaggtaatgtcgaaaatgtgaaagaaactatcagaacctgctagaactaaaaagtgaattcagcaaggtctcagggtacgagatcattcaaaaactaatcagaaatgaaatttcaaatgcaatatcgttaggaataatttaataagaaatgtacaagatttacacgctgaaactgaaaatgttgctgaaagaaattaaagacctaaataaatggaatgttgtaccatgttcatcagctgaaagactaagtgtctttacagtgtcagttctcccttcattgaactgtagattcataaccccagtcataactgcagggttttttttgtagaaattgattgtaaaatgtatatggaagctgggcacggtggcttatgcctgtaaaccagcactttgggaggctgaggcagacagatgacttgaggtcaggaatttgagaccagcctggctaacatgacgaaaccccgtctctacaaaaaatacaaaaattagccagacatggtggcacacacctgtaatcccagctacttgggaggctgaggcatgagaatcacttgaacccggaggtggaggttgcagtgagccaagatcatgccactgcacgcccgcctgggcaacagagtgagactttgcctcaaataaataaataaataaaacgtatatggaaatgcaaaggacctagaacatccaaagtaaacttgaaagagaacaaaattaaggggcttatgtgatgtgactttatagtcatttgatttttaacagaggcaccagaacagtccggtgcgggaaaggaaagtcttttagcacgtgccggatgatggcaaatgacatccataccagacaaaaatgaaccttgaccttaccctaaatattagtttcttagagttgccacaaactaggtggcttaaaaccacagaaatttggctgggtgcggtggctgacgcctgtaatcccggcctttgggaggccgagtcgggcagatcacctgaggtcaggagtgcaagactagcctggccaacgtggtgaaactttgtctctactaaaaatacaaaaaacttagtcaggtgtagtggtgcacacatataatcccagctagccaggaggctgaggcaggagaattgcatgaacctgggaggttgcactgagccaagattgcaccactgcactccagcctgggtgacagagtgagactccgtctcaaaacaaaaccacagaaatttgctgtctcataattccagagtctagaagtccaaaatcaactgtcatcagggccatggtctctgtgaaacctgtaggggagtccttccttgcctcttcctagcttccagtggttggcaacctttggcattctttgatttgcagctgcattacttcaatatctgtcttcctcatcacacagcattctccatgtatgtctctgtctttacatggcctccttcttgtaagaacaacagtaatattggattggggcctgccctactccagtgtgacctcaccttaactaattacacctgcaacaacgctgtttccaactaaggtctcagtgtgaggtactgagggttaggacttcaacatatcttttttgggggacatagtccaacccatgacactacttcacaccatacataaaaattaattcatgagagattatagacctaaatgttttaaaagctaaaaatataaagcttctgcaagaaaacataggagaatatctgtgcagtccaaagaataaggttttttttaaacacaatttcactctgttgcccaggctggagtgcagtggtgcgatctcagctcactgcaacctctgcctcccgagttcaagcgattcccatgcctcagccttccaagtagctgggattacaggtgtgcgccaccatgcctggctaatttttgtatttttagtagaggcagggttttgccatgttggccaggctggtctcaaactcctgacctcaagtgatctgcctgcctcggcctcccaaagtgctgggattacaggtatgagccaccgtgccaggccaaaaaaagatttattaggatacatgaagcaatagctattaaaagaaaaaataaattggacttcattaaaatttaaaacttttggtcctcaaaagataccattaagaaaatgaaaagacagagctgggcgtggtgaggcttgcctgtagtcactactgggtacttgagaggctgaggcaggaggatcacttgagcccaggagttctaggccaacataggcaatatagtgagacagtgtctcttaaaaaaaaaaagaaaaagaaaaaacaaaagaaaataggctgagagctgtggctcatgcttgtaatcccagcactttgggagtacaaggcagatggattgcttgagctcaggagttcaagaccagcctgggcaacagtgaaatcccatctctacaaaagatacaaaaaattagccaaccatggtggcgtgcacccgtagtccatagtcccagctactcgggaagcagaggcaggaggattgcttgatcccaaggaggtcaaggctgcagtgagctgaggtcgcgccaccgcaccccagcctgggtgactgagtgagaccctgtctcaaagaaaatgaaaagacaagtccaccaagaaaacagttgagaccagtcatagaaaaaatagaaagtcatatctgacaaaggatttgtattcagaagaattcctataactcggtaataaaaagacaacctgatttttaaagggtgaaaatattttaatggatacttttttttttttttttgagacagagtctcactgtgtcacctaggctggagtgcagtggtgccatcatacatagctcactgcagactcgaactcctgggctcaagtggtcttcctgcctcagcctcctgcgtagctaggactacaagcacgtgccactatgcctggctaatttttaaattttttgtagacatgggctggtgtgtgtctgtgttgtctaggctggtcttgaactcctgggctcaagtgatcctcccacctctgccccccaaagtgctgggccaccacgcctggtgtggtgtcaccagagatgagccaccatgccctgcctgatacttttcttttatcatctgtttatttcttgtttatgggtgtttctgttctgattttatgactattctgtattctaagatttctctgagaatattatttgtttcctctaaggacagacttggtctctcttccatggggctggttcttgagccgccagggatggggggaggacctgggtagctgctgcgctgccccttctctgctgtggtggagtggcccgttgcctgcggggtctgtctctgaagggtggtttggagaagttctgtggaggcgaggcaggggtcagctcttgccccatggaccctcagagactgggaaaaggtaggcatcacctgggctgctgccagccacatcaagagcctttggggtgggtggggtgggggccggggaagggaaggttctagctgttgatttagaaaagacccattgatttcttgcctgagggaagaagtggcaccttgccactccaagtttgctctgctcaccagccccaacagcatcagcctcacctgggagcttattgaaggtgccctgccccaaagcttgtgggtcgggatctggcagtcagcagcccccaggtgttgcacacatgacagcactgcttgcccctcctctcgtctggtctggtctggtctggtctggtctggtctgagagcttctttggggctctgacaggtatacaggctctcatctgctctacagctctcttgtagtacattcctctctgttccattagtcaacatgttcttgcctacttccagcatctagaaatttgctgagtgtatcttatccgttcagaggtcctctcctgctattgcctctgttagaaatttcttccctttcatatgtctgtacttcggtttctttgaggtttgaagggtcaagtggcaattacatgtaggcagttggccatcctctggtgaaggctttaaagcccaggaataacaagatccattatgtctaaaactagcaaaaaccctacctgtcacatggtgaactgaattagaggtgatggggacagaagccagattggagtgagtggaaggtgagggagtggagattgggtatagacaactctctttaagaagttttgttgtgatggtgaccagaaaaataggagtggggtagagggggatgagggtgtttttcacgtgggtgaatatgagagcatgtttacatccttctgggaatggcccaggagagaggggagcgtgagaaggaggaaatggggacctggaggagcagactccttgtgtggaggggggaagcggcatctagagctgttgcaggaggtgggctttgagtaaatgcttcctctttggtaaagacggggaacgggaacggtagaagttgcacggaccctttgttaaagctcagaagctgagcgagaattagagcttaagtttatggagtagtcagaataaagtacccctaactgtattcttgcacagtgcaggaagccaggggtctgaaatcaagatgttgcagggctccattccccccagagcctctagcatggatccttccttgcctcttccagcttttggtggctgcctggcagtcctagactttccttggcttgcagttgcattgctccattctctgcttgtgtcttcacatggccttctctgtgtccccgtattcttctctggatgcttgtcactgtattaggcccaccctaaatccaggatgatctcatatcaagatccttcacttaattacagaagcaaagaccttccaaataaggtcagagccacagggtctgggggttaagacatacacctaactattcggggctaccatcgaacccctgtagaagcctgtccatttccaggatagcagagcccaaggaagggccagaagtccccccaaaacagttgtttgcattcaccagattctaagctataagcagatgggcagtggcagtcggtcctaatccatataccattggcaacaatagtttagttcactgtagacataatgagatgcttatcttctgctaagtagtcctcatggtaacagccatattactcctggctttgagtgacagcgctgtgctcttgtctggtgcccatatacttcagcagctggaaacaagacagtgctcatgattcaccggaaagtttctgtagttaaaatcaagtgatcccttgagtctattctaatatttgtctgtaccatgttctgtgacgagacatggaaacaaaacattaagaagtgaaagtatctttgattatgctcttgaagacaactttttgtttgtttgttttgtttgagacggagtttcactcttgttgcccaggctggagtgcaatggtgtgatctcggctcactgcaacctccgcattcccgggttcaagcgattctcctgcctcagcctcccaagtagccaggattacaggcatgcaccaccacgcctggctaattttttttattttagtagagacggggtttcaccatgctagtcagactggtctcaaactcctgacctcaggtgatccgcctgcctctgcctcccaaagtgccgggattacaggtgtgagccaccgtgcctggccgaagacaactttttaaagatgcatatgctctgggctgggtgtggtggctcacacctgtaatcccagcactttgggaggccaaggcgggcagatcacctgaggtcaggggttcaagaccagcctggccaacatggtgaaacaccgtctctactaaaagtataaaaattagccgggtgtggtggcgggtgcctgtaatcacagctactcaggaggctgaggcaggagaatcgcttgaaccccagaggcggaggttgcagtgaattgagactgtgccactgcactccagcctgggcgacagagtgagacttggtctcaataaataaaataaaataaagatgcatatatgctctgaaggctggctacattttattttttctcaaacaacttttacagtggatagtgctgtaaaagttgtttagctctggtcattttatcttttttgtgatctgcaaaaggagatccttttccttttcactgcctctaatacccaactccaatactcctttgacctcacaggcacttagaatccatcagtggctccatcttttctcagacttcacctccttcgtatccttattcctctcctttgtagcttcagtgccagtcagacgtcgttactccctggcacactacctcagcccttcggcactttcttgctttgttatattcagtcgacaaagccccagcctcatgaaattcagtcatgtctgccccatgcctgctccgtcctgaagctgaatgtgactccttcattgattccccctttaagttcatgtctaccccaggtaaacttcttgccgccaagcccacctgcatactgcagttccccggtctctcctagcccctcccaccctcctcatcagctgtcacacctccttgcagctgatatcttagttcccagagagcacagaagcaagctcaagagagtgtctacaggccagcgtctactccttcgctctgcctccctcatgctgtcacggagcgcctgtcccaggccctcactcctgttctaaggcatctctccagtcctctactgcactctcccccatcagagattcctccctcgcctgccctagaaacttgttgctacttctcccaccttgacaaaagctgctcccaaccccccacctgtctagcatctctgttttcctttaccagcaagactccagtccctgtctccacaccctcttcaaccttctccagttgttcctttgctgccacagctctgccaagctgctccatgaggtctccagtgatgaccttcatgttgttaaatctgggagctgcttgtcacttcttttcccagagctgtcgtcgtcagttaaccccaatacccatacgagacaatcctttccctcccttgagtctctgcactgatgtgcaccttctcagtgcaaaccacagcttttgtctctttctagctgaatacatgactgactgtgcttatcttagctgtcacccctgctggagcagaagctccacaggacaggattgtctccttgattcacagatgtagctcaagctcctagaacagtgcctggtgtctgtgggtcctcaggaagtcctaggtgagtgtgtgaatgtctgtcctcctcggtcttttctgtttcgcatgtgatgttggaaggcctcaggttcaggcttttcttctccaccctcactcccgaagtgattccgtccagcctcatggctcccaaatttatgtctccaggctgactgggtcacgggaactccttatcctccctagaccttctctttccctggtcttctcctttccagtaaacagcaactccaactcctgctcctcaggccagaaacctggcgctggttacctcatttgttcacaaatactgttactccacctgcaagatggatacaaaatctcatgagttcccctgcctccatggcccccaccctggtccaggtgtccagcttccctgcctctgcccttgccccctggttctttgtttagtcctgcaatattgtgctcttctgttcagaaccctccagtgggtccctgcttgctcagagtcacagcccaacaggatcacctctcttgccactctcccaccactcatgcactgcggcctcactggcctcctggctcctccctggaccctccaagtatgcccctgcctcaaggccttgacctctcctctgccctctgtcccaggtatcacacatgtctgctcaagtgtcaccttcccaatgtggccttccccgagcacacccatgtctgtaagtcaggcagcctgcctctgccccaccagttccccctgcctagcataggacttgtcaccatctgccacaagctgtgttactgcttggttttgtttgtgctctcccactcccttcccctccctccctctccccacccctatagaatctgagtcccatgaggacagagatttttttttttgcctcttcctcaatatatccccagtgcctagaatcatgcatattttaatttattgagtgaattaacaaataaattctgcagtgggacattgctctaaggttttgtcttataagagggacagaagaacatgcagcctgctctgctgttggctccttagcttctccatggctaacaggaacaatattgtttatgagataatcaaagccatagtcatgagttagaaggtacatataaaggcaaatatgtggagattgagttactttggcgggggcggaggggtgtgtagttatctgaaaacatggaacaaatcaatgagagtctaaatagcacccacatatttgcccctcttttaaaacatacctcctttatgagtgtagaatttaacagcacagtttcccagtgcagctttgcgaaacaagagaaatgaattttaaaggctgtcaggtgcctttgcaatctgtggcttagtatttgtgtaacaacatttgtgttttgccaacagatgtactgcttaaagtacccatgagaatggcctctgtggttttctactttctcggatggaaccttaggaactgattattgagaagaggctgatactgcccacctcagctcccaggcaggcttcagggccttggttactactcctttgggccctcactgacccttgcagacgtcttttgcaacctctgtagccagaagagacaactgctttctggcatgttgctctttccctaatggctttatgagcttcttgaacaccaaagcatgtgtgacttcctcacgccttcccctgtatagtatagcacccctaactgtatgtgtaaggagaaggagtgagcaattgatggcgtccccctggatctccaagggaatgggaaggggcagggtttctggattcagtcatgtggaatctggtcgttggtgtctaaatgtgcctgttacttgtgcccaatgtccaggttcaccaggaggcttagcctgctcatttccctgctagtagctatattttgggagagcattttttatgctctaattgaactttgtgggtctcagcaatttgaacaatgttttgtttttcttctggtcaggttacaaaggaaagaaaaggaatctggtgttgtaggaggtggtgtgttgtgtaattacttgttttttttttttaagtttttttatatttttgcaacaaggcaagttttctttgaataaataatgctgggagcttatcacatagaaggcatatgtgttgtactcagtacattctgaattatctgggtttatttttatctcttgaattcacttataaacaattcaaaggctgcttttttagctaacagaaataggaagagaatctcagaatctgttttgtcattttttcaatgggttgagttatagtgattatgctaactcggtggaaaagcagtgtagtgagtaaaccccacatacggcatatcatgaacattttgttgcttttttggcttctgaccatcttcatacctttttttgtgttaaaagtctccccattgtgtatatcttagtaagaggcaggtggaccctagtttctacctaagaaaacctgaagatggggttgggggcctgtggtgtacttccttctcatgctgtccatgaccactgcagtggctttgtaaggatccaggacccagggcccctcagtgggtgtcttccatttctcaagattgcctcttggttgtgagatgacggttgctgctctagtcattgcatccactcctccaggtaggaagaaagaggtcataggggaaaggcaaaatggcacttgacatcttaacttctaggcccattcaatatttccatttccatcttcacacccatcatcttgtcctagggaacaaacagcaccagcagctcagtagctataacagcaattattatttctcacacatgggtctgggtcagctgcaagatgggattcagatctgttctcaagcctgtcgttccaggacccaggagggagaagcagctgccaggggaagtctcttcgtaggcggaggtcaggagtccaagaggagtgagcagagtcacagaagcctcttaaagcctcttcttcccccatcccatcaacacgtgagcaagcccagagtcagtgggtgggaggtgtgctccgcccatagtcagtagaacaagagcaagcttgaaagagaacgatgaacaggagtgcactcggccactgtctccttagccataacgtagtcccatggtctgctgggaagcggggaataactctccttagctgagcgcagggtctcattagtaaggcagatggagaacatggatgttgggggacaactggcagtgcctgccacaggggaatggatatattccctccccttgctctctggaaactaggggatggcgatgaagcctaggtttggccaaacccattctgccttcagggactttgactcttgagggacagtgagggattagtcatggtggtggcagttgagtcacaaaaccagcagtggtggctaatgtccagtgatgacatgcaacagtgcccagggtgggtgtcccaaccagcaggtccctgcagtataaccttggctgtgtttgcagtggtgcagcctctattcctgctgcttttctgagcctagttctctagttctctctccatttccagatctgctgcccaagaactcctttgtgattgaatttaaccagagttgatttctgttgcttgaaactcaggaccttgatgcagtgtgcagggtctgggcaaggtaaaaacacactttcatgatttcgcctcaagtatagtagatgagcttaggctttttgagccaggtagccttgggattaattctcagctcttgcacctagcaggtgacctcagcaatcaagtcacttgccctccttgagcctcagtgttgccctcagttaaacattgctctcgtgtgttgctgagcattcagtgagattgtatataaagtgatcattgtgaaggtattgggacataatttgggaaagcgtcctggtctaagcttttgattggctctccatcatttgggtaatgggatagtgatttaggagtatcatagcagctcaaggggcccttctggaaagggtatgaggaaggtcagggacaagtctgaaatgaatcatcctaggcttaatgcctgtgactgggcagtgggtacaattatctcaggctagtcagtagtcatttattgtgagaatacatgggcagattttttaatttccttctcagtctagacttgaatgcaaacagttcttattgctaacttaccactagtcaccactaatgaacaaagactatgaacaggaaattcataaaagaagagatacagatggccaatgaagataggaaaagagttctgcctgctggtaatcaaagagatgcaaacgagaacaaaaatgatgccttttcacctaccaaatttgtcaagattaaaaagaaagcaaagagccagcgtcagctgatgttcatacctgcacctgctcggtagcttgctaatgttctgcctgctccacacgccaggccagcctccacggcgcagccaggtgaggcctttccttgtatacaggcacgtttggattcactgttgcataagtgagacatgtgcatgcttcacaattcaggaagtgcaaactccagagtgatgcaaggtctgagtgtccctgctgccctggtctcccagctgcctaggcctctcttcagggaacggctgcatccagggtcttgtctgtgtcttttgaggtgttctatgtacacgcagacacatctaaacctatttttattttccctgcacctgcttgggctactgtaagctgttaaatttttttttctaggaatttgtccattttgtctgactagcataaagttgttcatgttatagtttatacatttgcaacatctgtaattatgtctgctttttcattcctagtgtttgttgtttacttgtaccttctcccgtttttccttgtcttggtaaaagctcattaggttcattggtcttacaagaagcagacatgtaggcattattgccctgtattactctgtgtctcttttctagttcattaaattctgcttttgcttttatctttattattttttctatggtcttagagtacattctctgtgttttgttgttgttgttgttgttgtttgttttttgttttgagagagagagtcttgctctgtcgcccaggctggagtgcagtagtgcaatctcagctcactgcaacctccacctcctgggttcaagtgattctcgtgcctcaacctcccgagtagctgagatttacaggcatttgccccacacccggcaaattttttgtatttttagtagagatggggttttggcatgttgaccaggcgggtctcgaactgctgacgccaggtgctccacccgccttggcctcccaaagtgctgggattacaggcatgagccaccacgcctggccctaacttcttaagttataaatttggttcattgatttttctacccttttttcaaatgtaaacatttaaggctaaccctctggaactacttcaactgtatctagcaagttctgatagtattgtcactttaagttagcccaaagatattttaaattttctttgtttcttcctttgactcacatattattttaaaatgtgtttttcaatttccaagcacatggctttgggtttgttttttttttttcctagttgctctagaaaaaaaaattgactgcatgaggtggctcatgcctgtaatcccagcactttgggaggccgaggcgggcagatcacctgaggtcaggagttcgagaccagcctggccaacatgccaaaacctcgtctctactaaaaatacaaaattagccgggcatggtggcacacacctgtagttccagctactcgggaggctgaggcaggagaatcacttgaaccgggaggcagtggtcacagtgagccaagattgtgccagtgtactccagcctgggcaacaagagcaatactccgtctcaaaaaaaaaaaagaaaaaaagaaaaaatcaacttctaactaaatggcactgtgatcaaagaacttggtctgtgtgacaccagttcttgcagttggttgagaagtgctccatgacacattatccacaaccagtggacagaatatgtcaccaccaagcatgggtgcaggattctacatatattcattacctctgtcttatccgtttgttgtgaaagtattttctcttcttactgtcattttgtttacttgatttatcaactgatggaatacgtgttaaaacctactgtggtgatggacacatcagtttctccacagagtttggtcattttcattttattatttattttgaggccacattttcagttttagatacagtttcacattcctggtgtattgaaccctttggtattatgaagcgaccatactaatatgttatttttttttaaattattatttattttatttatttttctttcttttttttttttttgagacagggtctccctctgtcacccagtctggagtgcagtggtgcaatctcagctcactgcaacctccgcctcctgggctcaagtggtcctcccacctcagcctcctgagtagctgggattacaggcttgcaccagcgcgcctggctaagtttttgtatttttagtagagacagggttttgccatgttgcccagactggtctcaaactcctgggctcaagcagttcaccagccttggcctctaaaagtgttgggattacaggtgtgagccaccacgcccggccatcccagttttttattttcctcctttctgtgtctttatgcatcagtgaggtggagcttttgaaaatgtcagatagctagattttttttttttgagacggagttttgctcttgttgcccaggctggagtgcaatggcgtgatctcggctcactgcaacctccacctcccaggttcaaaacaattctcctgccgcagcctcctgagtagctgggactacaggcacgtgccaccacacccggctaattttgtatttttagtagagatgtggtttcaccatgttggccaggctggtctcaaactcctcacctcagctgatcacccgcctcagcctcccaaagtgttggaattacagacgtgagccaccatgcccagctgatagctagattttttttttttttttttttttgagacggagtcttgctctgtcgcccaggctggagtgcggtggcgcgatctcggctcactgcaagctccgccccccgggttcatgccattctcctgcttcagcctccagagtagctgggactacaggtgcccgccaccacgcgtggctgattttttttttttttttttttttgtatttttagtagagacggggtttcaccgtgtcagccaggatggtctcgatctcctgacctcgtgatccgcccgcctcagcctcccaaagtgctgggattacaggcgtgagccaccgcacccggcctcgagattttttaaaaaatccattgtctgtttcgtcctttaacatctatttgatttctgatgtatttagattcatttatagcatatttgtgcattctatttttccatattttctgttcttttaaattttccttctcctttcttgccttctcttagacttttaaaaaaattgtagtaaaatacacatcacctaaaatttaccatttttaaatgtacagttcagtggcattaaatacaaattggaggccaggcatggtggctcatgcctggaatcccagcactttgagaggctgaggtgggaggattgcttgaacctggaggtcgaggttgcagtgaggtgtgatcacactactgctatagcccaggcaacagagtgagaacctatctaaaaaaacaaacaaacaaacaaacaaacagattggcatcacacagtgtgtgtgctgctgtgctgtgctgttatcatttaacattaaaacataaacatcagcactgttatggactgaatgtttgtgtcccccaaaattccagtgttgaagctcaaacctccaatgtgatgttatttggagatggggtatttgagaggtggttaggtttagatgaaatcaggagggagggtgggtttcgcatgatgagattagtgtccttataacaagagacagcagagagcttgctttctccaccatgtgagtatgcaatgagaaggcagccatctccaagtcagaaagagagccctcaccaggggctgaatgtgctgacaccttgatcttggacttctagcctccagaactgtgagaaatttcagttgaataggccccccagtctgtactattttgttatagcttgagcagactaatacacccatgttatgaaaagctataaacatccctttaaaggccacctaacgcgtcgtattacctcatgcatcttctctgctgagctttccaaaagagtggcttaggctgggcctggtggctcatgcctgtaatcccagcactttgggaggccaaggcaggtggatcacctgaggtcaggagttcaagaccagcctgaccaacatggagaaatcccgtccctactaaaaatacaaaattagctgggcgtggtggcgcatgcctgtaatcccagctacttgggaggctgagccaggagaatcacttgaacctgggagatggagggtgcagtgagccgagatcgtgccattgcattccagcccggccaacaagagcgaaactccatctcaaaaaaaaagagtggctggccgggcgcagtggctcacgcctgtaatccccgcactgtgggaggccgaggtgggtggatcacgaggtcaggagttcaaaaccagcctggccgagatggtgaaaccccgtctctactaaaaatagaaaaactagccaggcgcagtggcaggcgcctgtaatcccagctacttgggtggctgaggcaggagaatcgcttgaacctggggggcggaggttgcagtgagccaagatggtgccactgcactccagcctgggtgacacagtgagaccccgtctcaaaaaaaaaaaaaaaaaaaaaaaaagtggcgtatgttcccggtctccacctctcattcgccagcccctgtgaccaaacccctgggattagatctccatcgggtccctcccctcaccctaacctcacatgcagtggttcctgagaagctgctgtttatctgatcacgggatccagcaggatctgagggctcattcactgaatctgtactacccaacaaggcaggcttgtccttacccacacttttcaggtgaaaacttaatcagattcaagcgtttatcttagtggcctcttcgtggtgtgtgatttccttcttgcagctctttactggctaaaactcttcactgggagttaaaccaggtgtggtccttgaccctcatcattttgtcccatctcctatgctgggctctgtatccttgtctccaagcagtctcgtgtgacagggaagttacctattattgtatggtcccctcttcttgtcacctctggtgtggcacttgttccatttcttgttcaatgaatgtgatttgtgaatgtgccacatctgtgggaggaaggcagttcgcagcaagagttgtagttcccttgctttgccctgagggccaggactttacactagatttttttgttgcattcctgcactcataaagtacacgtaaacttagaggtggtgtgttaaatgctagaacttaaaactgagttcagctaggctcaagtgccccacaatttttgtcccaccagacaatttcatgaatatctacagattgttccctcaatatgcctcaatattgaggcatattgatttggggagcacagacaagtcaaggttgatgtgcatccgctgaacatgatcttaagttgttgaagtaggtattattaatgaacgaacgtctattttagctccaagagcccctggtcttccagaagagactcccaatgatcttccagaagcagctgggcttcttttggtcctcccccacccaggtgcagtcccgttctccctgcctgggtgagtttgattcctctgccgtggaataggctaggctgctacctcttgagcctcttccaccaggccatccattaggtggcgacagagagcactaaaaggaactactatggaaataaaacttgttttgcttcttggggggaaaaaaaaagaaaaaggcttgtggggcgtgtgtgcattttagtcagattttactgtgcaaaacatttgagagatttctgccctctttctcccttccattcttctcaacccactgggcgccctaccacccctgtctccttcaagataaggtagatcagaagaccaaatagacaaatgccatgtccactgttttctgtcacagttgatagccataccagtcacccaagctggaaacccaacaggcccctgcccttcactgcccacatccaagggagccaccaagtcccacaaattgttcctttaactgtttgtccctcttttgtcttctgtcatcccttctaccgctgtcctggttcaatccctcatcttgctctgggactcccatgataacttatgatctttcctccacctctctatcttccacacaatccctatcatcaatctcattcccctgctttaaacccaagagtggcaccctgtgtttgagtgacatcagggcccctcatgtggctcctgcttctctttgtggccccttctgttgctgctgcttttcttatggacatagccctcagcagtccaggactgcttgtagttcctcccaggtaccatgtttcttgcactcctggcctttgtcattggctcccctgcccaagtccccttctcttctcctttccttcccctgtggccttgccttgtcgtgcttatccttgaagaccctgtcaggtatctcttccccaaagagccctgcctaaccaccgcccccctcccccccgcgacacacacacctgggttaggccctgcctctccacgcctgtgcctcctgccaagtcctcagaggtctctgatcccatgtgcctccaggcatggcatagggggactgtgacacagcctctcggcccacagacccctgattgtgggcttgctcactgccccagtcagtcctcttattgaggattccgtgccagttcctgactccagcacacacacgcatgtaggccgccctcctagtgcctggctccttccctgtctcttctgccactcattcccatggtcgtatcctggagttggtcatctctggaactccacccacggagttctaacttagctctgcctatgatgaggacttactgtcttcccagcttgcagtgtcaaccactgtttgatgcccctgggactccattggtcttccctcctcttgtgaactgtgcccatcaccagacgaacttgttttagaatttaccatcgtaactgagctcccttcagcgcatacctccttggctcctgctcagtctctgtttctccttttagccaaactctctaagagttctctccactcatgggccctcttccttgcctgctgctccttgctcagcttgctccatgaacacttgcttttccacattccatgaaataatcttaacagtcatcagtggctgtcactccttctcagccctttccttgtgtctcttctggtacctcatactctccaggtggccatctcacctcacatcttgaaccctctgggtttgggagaattctcacctcacgagttgatgggaggcctggcgacctctgattgtagtcactgcaaatgccagatgcttatttgcctagcttccctttcggtcagggcagcagttggcaaacggtatctcaagggccaagtccggcccactgcctgttttcgtaaatgaagctttaccaggacccagttccaccccgtcctttgtgcattgtccaagactgctctcctgtacaacagcaggtgggctggttgtgacagatactgtctggcccacaaggtggaaaatactatctggccccttacagaaagaaattacctgagttctacacgagggtgtaggtatgtaccctggcctctgccagtcagactcacatgctaggaggagcagggccaggcaggagagccgtgtctcctggcattggggctgcaggaaagacgagctcctaggccacagtgccagtggccagtgctgctgccttgcagggtcgcacaggcagtgctggctgtttggactggcttggcagaaggatttgaagtattgttcctagccaactggactcaaacctgttcctccaaccctctagggattctcttatcacccagtagccttttccccctagttttaaaaattgcagtaaaatacacaaaagataaaatgtactgccttaaccatttttaagtgtacaattctgtggtattgagcacatttatattgtgcaaccatcaccacatgcatcttcaatagcttttcatcagtccttgtctgcataaatcagctagagttggtttctattgattgccaccaataatcttgacagatatgtctgatcttccttctctgcactgactcctctttctctgtctcctctgctgattctttctcctcatcacaactccaaatagcagggggagggttgtttacacttatattcagcacgccctcacgcactcgcctggctcttcagacctctcccctgaactccagattcatacatccagctgccctttaggcctctagaaagctaaatacctcagtatcaaaaacatgagaaacggaagccagagtcctggatctctcgccctttcgctgtcccggtgcccatgcccttcagggatggcacctagaccagctccctgcatccctgcctagactctgcagtagtctcacgtggcagacccggaggtcactctcctctctggatgccctgcggacactccggttagcctcagctgcaagagcctcctcacccaaggtcacgccatttccaggacagcaccctggtgactgagcgaggtaagggtacaaggcccttatagggccttctctttgacttcttcccacctccctttatggatgtcagttcctgatgaacatcttacacctcaaaccgtgacccaacatctgcttctgcagagcccccctgtggcatcttgtgccctcctgccccactccctctactctatatcttcccatagttagaatgggctttttttttttttttttgagataaggtctccctttgtcacccaggctggaatgcaatggcacagtcacgactcactgcagcctcaacctcctgggctcaagcagtcctcccacctcagcctcccaagtagctgagactacaggtatgcaccaccacacctggctaatttttatattttttgtagagactggggtctccctatgttgcccgggctggtctcgaactcccaggctcaagcaatcctcccgccttggcctcccaaaatgcaggattacaggcgtgtaccagtgtgcccagcctcagatgggctctttgaaaaatgtttattagatcaggttactcccttgagaaaaaccctctcagaataaaacccgaagtccattacttgaaagcagagccagcttcatgggcctttgtaactgcccatgggcttgctggaacccaggcttggtttaatactctactctcaccatctcaaaattcttaatttttgaacaagaggccctgcattttcattttgcaccaggctccacaaattgtgtaactgggcctgcctcagcagccacatggaacatgatccctccttgcctatttgagctcattctctaccattctctcccttgctcacctggctcccactgctcttgctcttcctggaacttgccataatgttgctagagtcagagccttggctcttgctgctcctcattggctggacccctctttacttgacctgctccctcaccactcacttccttcagatctgtgttcagatttcgtcttctcagagaggcttttggcccctgtccatctctctgaatttacctctgacctctcccccaccaccactgcgctaagctgcctcagaactttgtagacattctgtctggtcttctgatgtttcccccttggaagaatcccaaggtgcctgaagaatgctttctttatccttgaagttgagtaggttgactagagtctggcttgctattgagcattctttatcaaattgtcctgggaacatggtgtattctttcagtctgcagatgtagtcgttgctgtttcaggtcagctctcttatggatctttgacagcatcttctgttccatttgttgagttctgtacttcagggacacaaattcctcatgttggattgtctttgtctctcttccaatgctattagctttgccgtaattggtttagcttttgtctttttcatctgcattcactttgtctaatttgattttcagctatgtatattctgtttctggctgtttttcaatgtatttattagtttcataatgatgtgttttggtctgcagtttgtttctctaggttggaaatttgtcttttcatcttattctgttttatcatcccatctttgaactcttttattgggaacatgttcttatgaagttgtggggaatttttttcccttccttgtgtattctcttcttggtgggagactttgcctttctcgtgccatctccctccctgggcctcttttttttcttctggccataatatgtttgcctagttaccatgtcacttcttttcgtcttggctcaggcttggatggctctgcatagtcgttctgtttgctttgagacagtggaggaattcttggctctctcttcccagtttcttggcatcttctcttgctgttttcccctctgagctatcgcgtgcaggcttgttatcttgtatccggagagaatttgcacgctggagggagctgcagccatgtagtcttcagccctatctggattcttctctttgttctaagaactgtgttggatgtcttactaaggctcactctagctgcacgagggatgtgtgtgccatttccatggggatagggggcacctcagtctctgggtggttccataatctgtgtatacctaagagcagttgcttcccacagagctgggctggctcactgggcactttgccatttctcctgcacctcccagctggagtttctgggtctaaaaggaaaaagtgaaggactcccacttggttgcttctctccagcttactgactgcaaattcccagggcgttgcccgctccctagggtggtttctgggggacggggcaggagcctggctttgctgctgctttgtcctctggagtcttttctcagactgctttgaattacacccctttcctttgtgtgctgaaatcttcccttcacactctccttccctgcctttcttttgtgtcttatcttactaggactggaagagggcagttgtgcaggaggtctgcatctaattccctaatccatgtgagagtgctcctgttgtgtgctttgtgacatgatggtgagaaatactccctagagcagtggctaccagaaggaagccatccccccccctgcacacacacacacacacacacacacacacacacacacacacacacactccttctggctgtcctcagatgcctattctaggtaaatgtcagattccaaagaaaatccagttgagatcttttttctttttttgagacgagagtcttgctgtgttgcccaggctggagtgcagtggcacaatctcggctcactgtaacctccgcctcctgggttcaagcgattctcctgcctcagcctcccaagtagctgggactacaggcgcgcaccaccacaccaggctaaaatttttttgtatttttagtagagacagggtttcactgtgttggccaggctggtctcgaactcctgacctcgtgttctgcccgcctcagcctcccagagtgctgggattacaggcttgagccatcgcgcccggcctccagttgggatcttgactggaatgactggtgttcaatcattatagtttccacctaatttgtatttgtacacaggacagttactaatttgttggtacttgtttgatccccagtccctagagttgtttatggggtggagcttcagtccctgctgcttcccctgtggcagcagctggagtcagggtggggacccagggtgctgctggcagattcttgagacaggtagaatctcctctatattggtgtctctctctgtcccagcagtgcccaggaaaacctggccagcctgtcactgacctctccacctagggcactggtggttcaggtccttctatttgccaccggcaaaccgtacttctgccagtctggctcttaggcccagtttctctgatcttgcagattttcttgggctctgctacggaatcctcatacctccggcaggtccctcctttgcccatgtgtttaactgtggtggaatcgtgtgagagctgcttctctcgcatggatcccagccacaccacattctacagcggttcctctgaaggcattgatagagatatttcctcctgttttgcatttcgttggtcatttcagtagaatcagggtgaaataaacatgggggctcagatgtcagcattacgaaccaagtacgtcaggcaggctgatgtggactgacctacactagtgagacgcaagatgacgaaaacaagggcactcactccaagttactgatgagatgtttggatcaaatgagccagtccttaagcagagttctctagtaaaagagatctcctttctgccctttcttgttccccaaaatgtgttgccttcatggtgaaaatttattttggcagattttctcttctttgataaaagcagccaacactttgttaaaagtctgtgaaacttatttacatgaagtatgtaaaggtaagaaaaaaacattatcaacaagaaatggagaaagccagcagctgaggacagaaaagtcatgcacagtgtcagtgtctatggaaacaggccacttggaccttgaggactaggtatttggaattggaggtgagcttggcctggtgagtctctaaccacttgtgtgtaggatcagtgtgagaaccctgctagaatatagtggcagagatgcaaggggaaatcattggagaagttaccagggaatgatgagctaatctgaaaaaaatacatgtttctaagttgggcgtggtagctcatctgtagtcccagctacttgagagcctgaggcaggaggatcgcttgagcccagcctgggcagcacagcgagaccctatctccctaaaaaaaactttttcgttgtttagttttgggatttttttttttcctggtcttttttccccctttttgtgaataacgggatctcactatgttgcccaggcagatctcgaactcctgggcccaagcaatcctcctgcctctgccttcctaagattacaggtatgagccactgtgttaagcaaaaaaacttttttaaatgaaaatcattttttaaaagacaggctttccaggggagggtattattccacttatatgaagtgtcaacagtaggcagatttgtggagacaaatagattagtggttaccaggggctgagaggagtgggagtggggagcaactgcttaatgggtaaagggttgtctttggaactagagagtagtgatggtcgcatgacattgtgaatgtactaaatgctattaatgataaattttatgttatgtgtattttaccacaattaaaaaaaaaagatcaaatgtcctcagaatagccaacaaccttccacttggctaaatgcctactcattaaacttcttgaactaaattcctttctgattgtcatggttattgtgtcctgggcttcagagtttcacattcaggttggcttggtccagtctgtcatgtatcactataggtccccacattggcctcttcctcagacggacagcccatctatctgccggggctctgtgccacagccagatagacttgctctgagacagctgtgtgggctctgagcactggccaggcatcacaaaacctatctttatgatttagaataattggtggtcagctgctgttttaatgttgttgttttttttaatttagatataattcacataccatgaaatttactcatttaaagtgtacaattcattcttcagtataattcataggctcacagaaaaaattgtttaaaaataaaatgtgcaattcagtgtcttttagtacattcacagagttgtgcaaccatcgcctctgtgtcattccagaacactttcagcacccaaaagaaaccccagacacaggagcagtcacctcttattacccgcagcccctggcaacaactcatccacttcctgtctctatggatttgcctattctggacatttcctataaatggaattatgcactatttggccttttgtgtctggcctctttcactgagcgtaatgtcctcaaggttcatctgcattgtagcatgtgtcagaatttctttcctttttgaggctgaatgatattatatcctatagataatgaggttttgattatccacccatcccttgggaatgcatatttgggttgcccccaccatttggctgttgtaaactgtgctgccatgaacactggtgtacggatatctgtttggttactggttttggttttttgtttgtttgttttggttttttgagacaaggtcttgctctgtcgcccaggctggattacagtggcacgatctctgctcactgcaacctccacctcccaggttcaagcaattctcctgcctcagtctcctgagtagctgggactacaggtagcactcaccaccatgcccggctaaatttttttgtatttttagtagagacaaggtttcgccatattggccaggctggtctcaaactcctgacctcaggtgatccacccacctcagcctcccaaagtgctgggattacagacgtgagccaccgcacccggcatagttgtggctttttgagagtgtatggctaggagtaaaattgccaggtcatatggtaactccatgtttaacatttgagaaactgccaaactgttctccacagcaggaattttttaacctgtatgtggtgggcttgtgtttcggttttcattttacacatctataaagatgagatttgctgtatggcactggttgcctgtatttggggagggttctgcttttggttggcaagaactgcattttatttaagcttagcaaaacataactggtttctcgcatcttctcaaaagtggaggattaagaaatggactgcgaattcagagcagggcagctgaacctcaggctccacccttgtagccttcaagctgaacctcattctctcttgctccctggagaccactgagacactctgcctgtgccagtttgatttctcacatttttaaagggccaaagcttgtgtctcaaagtgctatagcctttattgattcatgcagagaagcctccttgattccgtaattctgcagctaatactggaagtagaaagaattggaaacaccatctggatgacactttagggtggaagcagccagtacaagggggggctcattatttcctctggtcccagactgttcacctggagctgtagccaccaccctgcccttaggttaactgcctcgagtggtagtttagctctttgtgctgtgccgagggataactggaagtgaaaggtgctgagaaatgccatctcctgaaagtggcgagcatgagtgaatttacgaaaggttgggatattgctggggctctggaagtttctctggagctcactccaggggacagggagggggctggattccaattcaagtgaaaaatacctttcatctgccttgttcacctggcttttttgcctttttgtaaaatctgaaaacctcagggattgagtagtctttccttaactgcagttgcctgtctggccacacctgccagctgttgcttgtacccctgtaatttgcacggccttccgggcctttctcacaagatcactgcaggtcacattcatgaggaaaatgcaggcagttcctgccatcagacccctcaggatgtcatggtttggcctgaaaacaagattcctgcaactctaattttcctttgctagatcaaatgaaggatttgatctaatgtttgcattctagcagcaaaatcattgaatattttatttcttaagagccttacttcatattttgtaggtattttaagattttgtaaaggcctttctgcttcaacgtgtgatgtgtgcattcttagaaaaagatcttgtgttctgtaaatcacacaataaaaacatgagttcgtgcaggaaaaactggggcggggtggatcactccaaacttgtgtggtgtggtaactggagctcactgatgaaaccatgaacagttctggctgaaagaaccccacagtacactgaggtctgttggcatcgccgccagcaccgccccggtccctttgtgcgcgccaccacacctggctaattttttatttttagtagagagggggtttcaccatgttggtcaggatggcctcgaactgacctcgtgatccgcccacctcagcctcccaaagtgctgggattacaggtgtgagcctccgtgcccagccttcagctttttttcttaatgtctttgtgtaatatgaaggcattctctttaattgttaaaaagcttgcctaccactgcttcaaaatattactgtcagttggcatagcttctgattatattgatgtcatctcccttcttttaaacatgttaccatattggcactgtatttcccctagcccattgatcacttgagagttagtcatagtcctcgtgctgtttcactcctaaacgtttaagcatgcctttcctaagagcagacagtacagttaagacactcaggaagtttagcaatgagctaacacagaaccttacatttctccacataccccataaatgccttttttagagcctttgagcctggaatgcagagtccaggactgtgtgttgtattcgattgtgtcatcccttcagtctcctttatcagaaatgttcccccacccccttgttttctctcatcatcttgagtccagaccgtggttgcatggcacgccctctctggactcttcctgctgtctcctcacggtaagcttcagtctcctactcgtgatgctggttcatctcagcagcactgaggggcctgagctcagtttggtcgtgtgttaaggtggtgcctgccagatttctccacagaaaagggccccgtacttttatttgctcttcagcctgtgtattccttcctttcttgccagcttgtgggtggcttctctagcagcttctgtaagatactcagtttggcagttgtagttgtttcagcaggagaggtgtctgcatacctgaccaccacatggctagaagtcgatccatcctctggcgtaaccatcctccatgctactgtccctggggcactgaggccctcctcagtgacttcctccacctcatcttccgccatctccaagccaccagtgtccaacggactactgatatgtcccaaactcatcatttgtttattcaccaattcagagcccacctttttttcagcactgagctagcctctccttgctagaagcttacggtcgaaggtctccagccatcagaagaagcacgtggagcgctgcgtccgtgttgtggttattcatccagcatgtgttgagtaagggttgcacctgtgcctggcattatgcattgagcggggagatgggggttggcacgcacagtggggtgttctaagtacactgagggctcgggtgccctggctcatagagcagggagggaggcaggagcagggaaggtgtctcagaagtgccatctttttttttttttttttgggaagtggaatcttgttctatcgcctggtctggagtgcaatggcactatctcaactcactgcagcctccgcctcccaggttcaagcgattctcatgcctcagtccccgagtagctgggaccacaggcgcacaccaccacacccggcaaatattttgtatttttagtagaggcggagttttgccatgttggccaggctggtcttaaactcctggcctcaagtgatctgctcacctcggcctcctaaggtgttgggattacaggcatgagccactgcgcccggtctagaagtgccatcctaactgaacctgaaagatgaaagttctccagatgaacctgaaagttctccaaatgaaaaggtgggagggggtgacagggttaggcccagagcctctggtgacacagggtgggcatcattggtcactttttcctcgagggaggggcgtcacacgggtgatagggtgggagctataaccatgttgatagtgccgcctctgcccatctggcctggcatgccctgagccctctgtcccacctgtggaactcataagccctgacagcccactcactcctgattcattatccacacccctgtgcttccgctgtgcctggagcaagctttcttcagggggaagggaggctggaactatgttgtagttacctatttgtcctcccttccaaactgtgagttcttggaggtggaaggatgctgcaggatctggctcaggacgaaggcagttggtgaacagacacgtgtgtttttgactcacggtgatctcagacaagttcctctgtctagtcgaacttctttttttccatctgtaacactcaggagttgaataggtggtttttctgaggatacttcaactgtaaaatgtatgaacttgtgaactagctatttagttctcctcataatcaagattgtgtgtgtgtggggggttctgattagagggaggatgaagagaggtgtatggggttttttttgttttgttttctgtttgtttgtttgtttttgagatggagtctcactctgtcacccaggctggagtgcagtggcacgatttcggttcactgcaacctctgcctcctgggttcaagtgattctcctgcctcagcctcctgagtaactgggattacaggcatgcaccaccatgcccagctaatttttgtatttttaatagagatggggttttcgccatgttggccaggctggtctcgaactcctgacctcaggtgatccacctgcctcggcctcccaaagtgctgggattataggcatgagccaccacacctggcaggtttctttgaaaaagtttgtgtttcggcaaacaccataaaccccctgggggacagccttggggagtcacctggcaccctagcccagcctccctcccttgggtcctgcagtgaaggcttagtgagggtgtgcaaatgcccaggtcaccctgggactgggcaggccctctgggctaagggtaaactcatttggaatacctgttttctatcattgttttttatttgttaaatttaaagggtacaagtgcagttttgttgcgtggatatattgtatagtagtgaagtctgagctttcagtgtaaccatcacctgaatagtggacattgtacccgttaagtaatgtctcatccctcaccccctcccacccttcccagtctctccagtgtctgccattcctcactctgtccatgtgcacatgctattcagctcctgcttctaagtgagaacgtacggtatttgactttctgtgtctgagctgtgtcactgaagacaatggactccagctccatccacgttttttatcatttttacctgcactccacacccagcacaatccaggcttctttgtgggttttttgaaatttgtctttaattataaaagtagcagccagcaaattaacaaacacccatgtgcctttcattgcacagaattgaaaatcatcatactatatttgcttcaagtaatttccattagaaagaactagaatattacagtagagttaaagaccctttatttcccatcttcagtgctcttaaaagttcatttagggccaggcatggtggctcacacctataatcccagcactttgagaggcccaggtgggtggatcacctgaggtcaggagttcaagaccagcctggccaacatggcgaaaccccatctctactaaaaatacaaaaattagctgggcgtggtggtgcgcatctgtaatctcagctactcgggaggctgaggcaggagaatcgcttgaactcaggagggaggcagagcctgtatgcagtaagccgagattgcgccaccacaccccagcatgggtgacagagcaagactccgtctcaaaaaaaaaaaaaaaaaagttcattcattgtacacttagaaatagttaaaaaggtaaactttgttttgtgtgtgtgtgtatatatatatatatatatatatatatatatatatatatatatgtatttttttttgagacatatatgtgtctggtttgttcgcccaggcaggagtgcagtggcatgatcaacggctcactgcagcctcaacttcctaggctcaagtgatcctcctgcctcagcctcccgagtagctaggattacaggcacacaccaccatgcccagctaattttttttttttttttttttttttgtagagacagggttttgctatgttgcccaggctggtctcaaactcctgagctcaagcgatccacctgcctcacctcccaaagtgctgggattacaagtgtaagccaccacacctgacctgttttgtatattttaccacaataaaaagcctttaaaaccccaagcagacagttcattttcattcaggcccaactcagaatctgatcacagcggggtttcccccctttctagcgagtagctgaagaactgttttctctccttgatggtataactgtctctgtgggtgttgctcccctgccgctccagtggttttgtttttgtttttgtttttttgagacggagtcttgcgatctcagctcactgcgacctctgcctcctgggttcaggcgattcttctccctcagccttccatgtagctgggacttacaggcacctgccaccacgcccggctcatttttgtatttttagtagagacggagtttcaccatgttggccaggttgggctcgaactccagacctcaggtgatccacctgcctcagcctcccacagtgctgggattacaggtgagagccactgcacccagccggcccctcagtcttttccttctcaatcagtggcaccaccatcttcccaggctttggacatggtccctgactcacccttgcccctcacccccacactaatccacctgcgagctctgttgcttcaccacctagaccagccccaaatcctcaactgcccccaccctgggccacacctggaccactgctagaggcctctcatgggccctccctgtttttctcttgcactccccgggctttctggcacaagatgccccagaagcagaatcacatatctctcctgggagccaatctagtgtgtttactgcccctggagtgttattgttggccttagaatatgtcccactacaggtttgcagagcactgtagtcaaaagtcatttgaaataaatcttttctctgtggtatattgtcaatttgatatagaattaaatttgtttcttttcttttttcttttctttttttttttttttaagagacagggtcttggccaggcgtggtgtctcatgcctgtaatcccggcactttgggaagccaaggtgggtggatcgcctgaggtcaggaattcaagaccaacctggccagcatggtgaaaccccgtctctgctaaaaatacaaaaattagccgggcgtgatggcaggtacctgtaatcccagctactcgggaagctgaggcaggagaaggcttgaactcaggagtcggaggttgcagtgagccaagatcacgccatggcactctagcaagactctgtctcaaaaaaaaaaaaagagagagagagagacagggtcttgctctgtcactcaggctggagtgcagtgatgtagtcatggctcactgcagcctcatactcctgacctcaggtgatcgacccgcctcggcctcccaaagtgctgggatcgtaggctgaagccaccatgcctggcccgaactcatttgtttttatttgcattaagtgtaataaggttttgttacttttagtttgaattttattttgggtaatataaacatttacatgattcagaagtcagaattacactgaggcatgttcagctaggcctcactcctgtgcctgtacccttacctttttccccctaccccatgcagggaatcaatttcattagttcctggtgtgtccttccttaatacccccccttctttctttggtagaatgcagtagatatgtttgcgctttgctccctttgcttcacagtggatcctggaaatgactccatcgcagttcttagagctcttgtttagtccctttggatctgcacagtactccagtgtgtgggcgcaccataagtttattcagcaagtgccctggtgatagggatcgggggtattggaagcctttggctggtaaaaataatgttgtagcaaataacatcatgcatatgttctttgagatttctggaggtgtctctttagcatagatttctagaaggcattccttacgtcacgtttaggtttatagtttgacctcatggtgattaaggtatttgggaaatgcaaatgagagtttcgaagaagccagatctttcccattagttcactgtttttctctgacattaggaccgtccgggttctagggagcagccctggcgttaggcagtgccatgatggattgtgtagaagtagcgattcccatctgtctgctttcttggcccactctgctggtggctccccttccctccctcctttatggggagctggggagctgcctaggggtccattctcaaaggctgatctctggtgggcaacaggccacacctagctttccagggttcttcgtcatttcccattgagagctgtaagactcagagacatgaaaaggaagctctggctgggcacggtggctcacgcctgtaatcccagcactttgggaggctgaggcgggtcgatcacctgaggtcaggagttcgagaccagcctgcccaacatggtgaaaccccgtctccactaaacatacaaaaattagcctggcgtggtagcacacgcctgtgatcccagctactccggaggctgaggcaggagaataacttgaacccggcaggcggaggttgcgatgagccgatattatgccatcggcaacagagcgagactccatctcaaaaaaaaaacaaaaaacaaaacaaggcgagctctgtgctgggacagattagggacccctctttacagcaagaaagactgctctgtgggttgtaggatgcctttgtgtatgcagtggctctaggtgactctggcagccacactctgggccctaaacttctggaggaagatacaggatagggaggaactcaggggtgagtcatggtggggacaagacattccctcactctaagaccttgtcactagattggaacatctcttgcctccctacacctgacctgatggttctggagagatacgtccttgcagcttctgagtcccagcactaagcagcctttggtaacttccctacatcatttgagttctggtttcctaaggatgcttgccagtgagtgccatggtgccctcattgcacagtctgtgcagtgtagacaagaggggaagtctcttggggtagaccagccgcaaggcggtgactagcactgatgtgaaccacatgggacaggggagttgtggggctgagaacacggagggtgggagtagtcatgctcttttccagaatgaactgctaacgaagggactcgcaggtggctgctgcttctttccaagctgcccctgttgttgcagaggctctggagtcctaggaggtttcacggtggcatactcgacagagtactagagcatcatggccagatagtgatgctggggtgtggggcctcacggtggccatttctgacgagaccccaccgggccaaagtgatgtgtagagaaggagctgcttcggtcaccagaaaagaacggggaagcctcccacactagaataggtagggtgctcttctccaccggcaggaaggggatgtatggctctgcctggaccacacctttttccttgctcttccctccgcatctgctgtggccgaggccattcctcatcagggaacatgtgttagaggctcacgccacctgggaccacttgtcttatcacccccaggaccctaggcggtagtttcctgtggcctgagttagctgatatttatatagtgccattgtgccttttctcctgtgatgctcacagtaaggatgcctagatggggttacctgttgtcaagataaggaaactgaagcacagaatgctgaggtcatttgctgggttcatgtttggaaagcggcaaaggatttcagtgcaggttggctggctccaaacctgtgtgtgctttccatgacactgtactgtgtgcctcattgagcctcattctagaaaaccaaaaacacacccaaggcccggccttcacaaaggagacccctcccccatttggctccctttccagcagtcgacggcctcttgtcagccatcgagcccagagtcccttgaagtgcgactcatgctggggtggtatgctcaggagccgcagtgtttccgctcagaggaaagggctctgattctcctgcagtgctaggagacttgtgggtggccacagtgcaggtcaggcacaccggccagcaccacccacagcccaaattcctaaagaaatatttgggtcccagcttggcccgagtctctgttgtcctggggaaggacatcaagatctgagtgtatgatggcctggggccttgcatgtggtgggggtccaagcctgcctctgctcacttgttctgcagactggcatgttctctgtgatacttacatacttgtttaacacttcag

SEQ ID NO: 32 - DNA, 351 bp, Homo sapiens
ggaagaaaagtcagaagaccaggacctccagggcctcaaggacaaacccctcaagtttaaaaaggtgaagaaagataagaaagaagagaaagagggcaagcatgagcccgtgcagccatcagcccaccactctgctgagcccgcagaggcaggcaaagcagagacatcagaagggtcaggctccgccccggctgtgccggaagcttctgcctcccccaaacagcggcgctccatcatccgtgaccggggacccatgtatgatgaccccaccctgcctgaaggctggacacggaagcttaagcaaaggaaatctggccgctctgctgggaagtatgatgtgtatttgatcaa

SEQ ID NO: 33 - DNA, 9878 bp, Homo sapiens
tccccagggaaaagcctttcgctctaaagtggagttgattgcgtacttcgaaaaggtaggcgacacatccctggaccctaatgattttgacttcacggtaactgggagagggagcccctcccggcgagagcagaaaccacctaagaagcccaaatctcccaaagctccaggaactggcagaggccggggacgccccaaagggagcggcaccacgagacccaaggcggccacgtcagagggtgtgcaggtgaaaagggtcctggagaaaagtcctgggaagctccttgtcaagatgccttttcaaacttcgccagggggcaaggctgaggggggtggggccaccacatccacccaggtcatggtgatcaaacgccccggcaggaagcgaaaagctgaggccgaccctcaggccattcccaagaaacggggccgaaagccggggagtgtggtggcagccgctgccgccgaggccaaaaagaaagccgtgaaggagtcttctatccgatctgtgcaggagaccgtactccccatcaagaagcgcaagacccgggagacggtcagcatcgaggtcaaggaagtggtgaagcccctgctggtgtccaccctcggtgagaagagcgggaaaggactgaagacctgtaagagccctgggcggaaaagcaaggagagcagccccaaggggcgcagcagcagcgcctcctcaccccccaagaaggagcaccaccaccatcaccaccactcagagtccccaaaggcccccgtgccactgctcccacccctgcccccacctccacctgagcccgagagctccgaggaccccaccagcccccctgagccccaggacttgagcagcagcgtctgcaaagaggagaagatgcccagaggaggctcactggagagcgacggctgccccaaggagccagctaagactcagcccgcggttgccaccgccgccacggccgcagaaaagtacaaacaccgaggggagggagagcgcaaagacattgtttcatcctccatgccaaggccaaacagagaggagcctgtggacagccggacgcccgtgaccgagagagttagctgactttacacggagcggattgcaaagcaaaccaacaagaataaaggcagctgttgtctcttctccttatgggtagggctctgacaaagcttcccgattaactgaaataaaaaatatttttttttctttcagtaaacttagagtttcgtggcttcagggtgggagtagttggagcattggggatgtttttcttaccgacaagcacagtcaggttgaagacctaaccagggccagaagtagctttgcacttttctaaactaggctccttcaacaaggcttgctgcagatactactgaccagacaagctgttgaccaggcacctcccctcccgcccaaacctttcccccatgtggtcgttagagacagagcgacagagcagttgagaggacactcccgttttcggtgccatcagtgccccgtctacagctcccccagctccccccacctcccccactcccaaccacgttgggacagggaggtgtgaggcaggagagacagttggattctttagagaagatggatatgaccagtggctatggcctgtgcgatcccacccgtggtggctcaagtctggccccacaccagccccaatccaaaactggcaaggacgcttcacaggacaggaaagtggcacctgtctgctccagctctggcatggctaggaggggggagtcccttgaactactgggtgtagactggcctgaaccacaggagaggatggcccagggtgaggtggcatggtccattctcaagggacgtcctccaacgggtggcgctagaggccatggaggcagtaggacaaggtgcaggcaggctggcctggggtcaggccgggcagagcacagcggggtgagagggattcctaatcactcagagcagtctgtgacttagtggacaggggagggggcaaagggggaggagaagaaaatgttcttccagttactttccaattctcctttagggacagcttagaattatttgcactattgagtcttcatgttcccacttcaaaacaaacagatgctctgagagcaaactggcttgaattggtgacatttagtccctcaagccaccagatgtgacagtgttgagaactacctggatttgtatatatacctgcgcttgttttaaagtgggctcagcacatagggttcccacgaagctccgaaactctaagtgtttgctgcaattttataaggacttcctgattggtttctcttctccccttccatttctgccttttgttcatttcatcctttcacttctttcccttcctccatcctcctccttcctagttcatcccttctcttccaggcagccgcggtgcccaaccacacttgtcggctccagtccccagaactctgcctgccctttgtcctcctgctgccagtaccagccccaccctgttttgagccctgaggaggccttgggctctgctgagtccgacctggcctgtctgtgaagagcaagagagcagcaaggtcttgctctcctaggtagccccctcttccctggtaagaaaaagcaaaaggcatttcccaccctgaacaacgagccttttcacccttctactctagagaagtggactggaggagctgggcccgatttggtagttgaggaaagcacagaggcctcctgtggcctgccagtcatcgagtggcccaacaggggctccatgccagccgaccttgacctcactcagaagtccagagtctagcgtagtgcagcagggcagtagcggtaccaatgcagaactcccaagacccgagctgggaccagtacctgggtccccagcccttcctctgctcccccttttccctcggagttcttcttgaatggcaatgttttgcttttgctcgatgcagacagggggccagaacaccacacatttcactgtctgtctggtccatagctgtggtgtaggggcttagaggcatgggcttgctgtgggtttttaattgatcagttttcatgtgggatcccatctttttaacctctgttcaggaagtccttatctagctgcatatcttcatcatattggtatatccttttctgtgtttacagagatgtctcttatatctaaatctgtccaactgagaagtaccttatcaaagtagcaaatgagacagcagtcttatgcttccagaaacacccacaggcatgtcccatgtgagctgctgccatgaactgtcaagtgtgtgttgtcttgtgtatttcagttattgtccctggcttccttactatggtgtaatcatgaaggagtgaaacatcatagaaactgtctagcacttccttgccagtctttagtgatcaggaaccatagttgacagttccaatcagtagcttaagaaaaaaccgtgtttgtctcttctggaatggttagaagtgagggagtttgccccgttctgtttgtagagtctcatagttggactttctagcatatatgtgtccatttccttatgctgtaaaagcaagtcctgcaaccaaactcccatcagcccaatccctgatccctgatcccttccacctgctctgctgatgacccccccagcttcacttctgactcttccccaggaagggaaggggggtcagaagagagggtgagtcctccagaactcttcctccaaggacagaaggctcctgcccccatagtggcctcgaactcctggcactaccaaaggacacttatccacgagagcgcagcatccgaccaggttgtcactgagaagatgtttattttggtcagttgggtttttatgtattatacttagtcaaatgtaatgtggcttctggaatcattgtccagagctgcttccccgtcacctgggcgtcatctggtcctggtaagaggagtgcgtggcccaccaggcccccctgtcacccatgacagttcattcagggccgatggggcagtcgtggttgggaacacagcatttcaagcgtcactttatttcattcgggccccacctgcagctccctcaaagaggcagttgcccagcctctttcccttccagtttattccagagctgccagtggggcctgaggctccttagggttttctctctatttccccctttcttcctcattccctcgtctttcccaaaggcatcacgagtcagtcgcctttcagcaggcagccttggcggtttatcgccctggcaggcaggggccctgcagctctcatgctgcccctgccttggggtcaggttgacaggaggttggagggaaagccttaagctgcaggattctcaccagctgtgtccggcccagttttggggtgtgacctcaatttcaattttgtctgtacttgaacattatgaagatgggggcctctttcagtgaatttgtgaacagcagaattgaccgacagctttccagtacccatggggctaggtcattaaggccacatccacagtctcccccacccttgttccagttgttagttactacctcctctcctgacaatactgtatgtcgtcgagctccccccaggtctacccctcccggccctgcctgctggtgggcttgtcatagccagtgggattgccggtcttgacagctcagtgagctggagatacttggtcacagccaggcgctagcacagctcccttctgttgatgctgtattcccatatcaaaagacacaggggacacccagaaacgccacatcccccaatccatcagtgccaaactagccaacggccccagcttctcagctcgctggatggcggaagctgctactcgtgagcgccagtgcgggtgcagacaatcttctgttgggtggcatcattccaggcccgaagcatgaacagtgcacctgggacagggagcagccccaaattgtcacctgcttctctgcccagcttttcattgctgtgacagtgatggcgaaagagggtaataaccagacacaaactgccaagttgggtggagaaaggagtttctttagctgacagaatctctgaattttaaatcacttagtaagcggctcaagcccaggagggagcagagggatacgagcggagtcccctgcgcgggaccatctggaattggtttagcccaagtggagcctgacagccagaactctgtgtcccccgtctaaccacagctccttttccagagcattccagtcaggctctctgggctgactgggccaggggaggttacaggtaccagttctttaagaagatctttgggcatatacatttttagcctgtgtcattgccccaaatggattcctgtttcaagttcacacctgcagattctaggacctgtgtcctagacttcagggagtcagctgtttctagagttcctaccatggagtgggtctggaggacctgcccggtgggggggcagagccctgctccctccgggtcttcctactcttctctctgctctgacgggatttgttgattctctccattttggtgtctttctcttttagatattgtatcaatctttagaaaaggcatagtctacttgttataaatcgttaggatactgcctcccccagggtctaaaattacatattagaggggaaaagctgaacactgaagtcagttctcaacaatttagaaggaaaacctagaaaacatttggcagaaaattacatttcgatgtttttgaatgaatacgagcaagcttttacaacagtgctgatctaaaaatacttagcacttggcctgagatgcctggtgagcattacaggcaaggggaatctggaggtagccgacctgaggacatggcttctgaacctgtcttttgggagtggtatggaaggtggagcgttcaccagtgacctggaaggcccagcaccaccctccttcccactcttctcatcttgacagagcctgccccagcgctgacgtgtcaggaaaacacccagggaactaggaaggcacttctgcctgaggggcagcctgccttgcccactcctgctctgctcgcctcggatcagctgagccttctgagctggcctctcactgcctccccaaggccccctgcctgccctgtcaggaggcagaaggaagcaggtgtgagggcagtgcaaggagggagcacaacccccagctcccgctccgggctccgacttgtgcacaggcagagcccagaccctggaggaaatcctacctttgaattcaagaacatttggggaatttggaaatctctttgcccccaaacccccattctgtcctacctttaatcaggtcctgctcagcagtgagagcagatgaggtgaaaaggccaagaggtttggctcctgcccactgatagcccctctccccgcagtgtttgtgtgtcaagtggcaaagctgttcttcctggtgaccctgattatatccagtaacacatagactgtgcgcataggcctgctttgtctcctctatcctgggcttttgttttgctttttagttttgcttttagtttttctgtcccttttatttaacgcaccgactagacacacaaagcagttgaatttttatatatatatctgtatattgcacaattataaactcattttgcttgtggctccacacacacaaaaaaagacctgttaaaattatacctgttgcttaattacaatatttctgataaccatagcataggacaagggaaaataaaaaaagaaaaaaaagaaaaaaaaacgacaaatctgtctgctggtcacttcttctgtccaagcagattcgtggtcttttcctcgcttctttcaagggctttcctgtgccaggtgaaggaggctccaggcagcacccaggttttgcactcttgtttctcccgtgcttgtgaaagaggtcccaaggttctgggtgcaggagcgctcccttgacctgctgaagtccggaacgtagtcggcacagcctggtcgccttccacctctgggagctggagtccactggggtggcctgactcccccagtccccttcccgtgacctggtcagggtgagcccatgtggagtcagcctcgcaggcctccctgccagtagggtccgagtgtgtttcatccttcccactctgtcgagcctgggggctggagcggagacgggaggcctggcctgtctcggaacctgtgagctgcaccaggtagaacgccagggaccccagaatcatgtgcgtcagtccaaggggtcccctccaggagtagtgaagactccagaaatgtccctttcttctcccccatcctacgagtaattgcatttgcttttgtaattcttaatgagcaatatctgctagagagtttagctgtaacagttctttttgatcatctttttttaataattagaaacaccaaaaaaatccagaaacttgttcttccaaagcagagagcattataatcaccagggccaaaagcttccctccctgctgtcattgcttcttctgaggcctgaatccaaaagaaaaacagccataggccctttcagtggccgggctacccgtgagcccttcggaggaccagggctggggcagcctctgggcccacatccggggccagctccggcgtgtgttcagtgttagcagtgggtcatgatgctctttcccacccagcctgggataggggcagaggaggcgaggaggccgttgccgctgatgtttggccgtgaacaggtgggtgtctgcgtgcgtccacgtgcgtgttttctgactgacatgaaatcgacgcccgagttagcctcacccggtgacctctagccctgcccggatggagcggggcccacccggttcagtgtttctggggagctggacagtggagtgcaaaaggcttgcagaacttgaagcctgctccttcccttgctaccacggcctcctttccgtttgatttgtcactgcttcaatcaataacagccgctccagagtcagtagtcaatgaatatatgaccaaatatcaccaggactgttactcaatgtgtgccgagcccttgcccatgctgggctcccgtgtatctggacactgtaacgtgtgctgtgtttgctccccttccccttccttctttgccctttacttgtctttctggggtttttctgtttgggtttggtttggtttttatttctccttttgtgttccaaacatgaggttctctctactggtcctcttaactgtggtgttgaggcttatatttgtgtaatttttggtgggtgaaaggaattttgctaagtaaatctcttctgtgtttgaactgaagtctgtattgtaactatgtttaaagtaattgttccagagacaaatatttctagacactttttctttacaaacaaaagcattcggagggagggggatggtgactgagatgagaggggagagctgaacagatgacccctgcccagatcagccagaagccacccaaagcagtggagcccaggagtcccactccaagccagcaagccgaatagctgatgtgttgccactttccaagtcactgcaaaaccaggttttgttccgcccagtggattcttgttttgcttcccctccccccgagattattaccaccatcccgtgcttttaaggaaaggcaagattgatgtttccttgaggggagccaggaggggatgtgtgtgtgcagagctgaagagctggggagaatggggctgggcccacccaagcaggaggctgggacgctctgctgtgggcacaggtcaggctaatgttggcagatgcagctcttcctggacaggccaggtggtgggcattctctctccaaggtgtgccccgtgggcattactgtttaagacacttccgtcacatcccaccccatcctccagggctcaacactgtgacatctctattccccaccctccccttcccagggcaataaaatgaccatggagggggcttgcactctcttggctgtcacccgatcgccagcaaaacttagatgtgagaaaaccccttcccattccatggcgaaaacatctccttagaaaagccattaccctcattaggcatggttttgggctcccaaaacacctgacagcccctccctcctctgagaggcggagagtgctgactgtagtgaccattgcatgccgggtgcagcatctggaagagctaggcagggtgtctgccccctcctgagttgaagtcatgctcccctgtgccagcccagaggccgagagctatggacagcattgccagtaacacaggccaccctgtgcagaagggagctggctccagcctggaaacctgtctgaggttgggagaggtgcacttggggcacagggagaggccgggacacacttagctggagatgtctctaaaagccctgtatcgtattcaccttcagtttttgtgttttgggacaattactttagaaaataagtaggtcgttttaaaaacaaaaattattgattgcttttttgtagtgttcagaaaaaaggttctttgtgtatagccaaatgactgaaagcactgatatatttaaaaacaaaaggcaatttattaaggaaatttgtaccatttcagtaaacctgtctgaatgtacctgtatacgtttcaaaaacaccccccccccactgaatccctgtaacctatttattatataaagagtttgccttataaatttacataaaaatgtccgtttgtgtcttttgttgtaaaaatcaagtgattttttcataaggttcttttactattggaaaagatgggcagcacgcagttttattttatttttgtaagttttttaatacatgtgaaagcaaagaatactcagcatgcctttctaagtgacgcgtttgcaccttttgttgggaagtactgtatcctgtgctgttagcattctcgataaatctctctgtgaaagtga

SEQ ID NO: 34 - DNA, 1217 bp, Homo sapiens
tccccagggaaaagcctttcgctctaaagtggagttgattgcgtacttcgaaaaggtaggcgacacatccctggaccctaatgattttgacttcacggtaactgggagagggagcccctcccggcgagagcagaaaccacctaagaagcccaaatctcccaaagctccaggaactggcagaggccggggacgccccaaagggagcggcaccacgagacccaaggcggccacgtcagagggtgtgcaggtgaaaagggtcctggagaaaagtcctgggaagctccttgtcaagatgccttttcaaacttcgccagggggcaaggctgaggggggtggggccaccacatccacccaggtcatggtgatcaaacgccccggcaggaagcgaaaagctgaggccgaccctcaggccattcccaagaaacggggccgaaagccggggagtgtggtggcagccgctgccgccgaggccaaaaagaaagccgtgaaggagtcttctatccgatctgtgcaggagaccgtactccccatcaagaagcgcaagacccgggagacggtcagcatcgaggtcaaggaagtggtgaagcccctgctggtgtccaccctcggtgagaagagcgggaaaggactgaagacctgtaagagccctgggcggaaaagcaaggagagcagccccaaggggcgcagcagcagcgcctcctcaccccccaagaaggagcaccaccaccatcaccaccactcagagtccccaaaggcccccgtgccactgctcccacccctgcccccacctccacctgagcccgagagctccgaggaccccaccagcccccctgagccccaggacttgagcagcagcgtctgcaaagaggagaagatgcccagaggaggctcactggagagcgacggctgccccaaggagccagctaagactcagcccgcggttgccaccgccgccacggccgcagaaaagtacaaacaccgaggggagggagagcgcaaagacattgtttcatcctccatgccaaggccaaacagagaggagcctgtggacagccggacgcccgtgaccgagagagttagctgactttacacggagcggattgcaaagcaaaccaacaagaataaaggcagctgttgtctcttctccttatgggtagggctctgacaaagcttcccgattaactgaaataaaaaatatttttttttctttcagtaaa

SEQ ID NO: 35 - DNA, 18 bp, Artificial Sequence
  Description of Artificial Sequence: Synthetic oligonucleotide
aacacatagacaaagtac

SEQ ID NO: 36 - DNA, 18 bp, Artificial Sequence
  Description of Artificial Sequence: Synthetic oligonucleotide
agataaacacatagacaa

SEQ ID NO: 37 - DNA, 18 bp, Artificial Sequence
  Description of Artificial Sequence: Synthetic oligonucleotide
tttgaagataaacacata

SEQ ID NO: 38 - DNA, 18 bp, Artificial Sequence
  Description of Artificial Sequence: Synthetic oligonucleotide
gacattttgaagataaac

SEQ ID NO: 39 - DNA, 18 bp, Artificial Sequence
  Description of Artificial Sequence: Synthetic oligonucleotide
tttgggacattttgaaga

SEQ ID NO: 40 - DNA, 18 bp, Artificial Sequence
  Description of Artificial Sequence: Synthetic oligonucleotide
ggctatttgggacatttt

SEQ ID NO: 41 - DNA, 18 bp, Artificial Sequence
  Description of Artificial Sequence: Synthetic oligonucleotide
cccagggctatttgggac

SEQ ID NO: 42 - DNA, 18 bp, Artificial Sequence
  Description of Artificial Sequence: Synthetic oligonucleotide
tttttcccagggctattt

SEQ ID NO: 43 - DNA, 18 bp, Artificial Sequence
  Description of Artificial Sequence: Synthetic oligonucleotide
cgacctttttcccagggc

SEQ ID NO: 44 - DNA, 18 bp, Artificial Sequence
  Description of Artificial Sequence: Synthetic oligonucleotide
ctgcacgacctttttccc

SEQ ID NO: 45 - DNA, 18 bp, Artificial Sequence
  Description of Artificial Sequence: Synthetic oligonucleotide
ttgagctgcacgaccttt

SEQ ID NO: 46 - DNA, 18 bp, Artificial Sequence
  Description of Artificial Sequence: Synthetic oligonucleotide
ccccattgagctgcacga

SEQ ID NO: 47 - DNA, 18 bp, Artificial Sequence
  Description of Artificial Sequence: Synthetic oligonucleotide
aaagcccccattgagctg

SEQ ID NO: 48 - DNA, 18 bp, Artificial Sequence
  Description of Artificial Sequence: Synthetic oligonucleotide
agttgaaagcccccattg

SEQ ID NO: 49 - DNA, 18 bp, Artificial Sequence
  Description of Artificial Sequence: Synthetic oligonucleotide
ttgtaagttgaaagcccc

SEQ ID NO: 50 - DNA, 18 bp, Artificial Sequence
  Description of Artificial Sequence: Synthetic oligonucleotide
gaaaattgtaagttgaaa

SEQ ID NO: 51 - DNA, 18 bp, Artificial Sequence
  Description of Artificial Sequence: Synthetic oligonucleotide
acaaagaaaattgtaagt

SEQ ID NO: 52 - DNA, 18 bp, Artificial Sequence
  Description of Artificial Sequence: Synthetic oligonucleotide
ctaaaacaaagaaaattg

SEQ ID NO: 53 - DNA, 18 bp, Artificial Sequence
  Description of Artificial Sequence: Synthetic oligonucleotide
ggagcctaaaacaaagaa

SEQ ID NO: 54 - DNA, 18 bp, Artificial Sequence
  Description of Artificial Sequence: Synthetic oligonucleotide
tttatggagcctaaaaca

SEQ ID NO: 55 - DNA, 18 bp, Artificial Sequence
  Description of Artificial Sequence: Synthetic oligonucleotide
gtatttttatggagccta

SEQ ID NO: 56 - DNA, 18 bp, Artificial Sequence
  Description of Artificial Sequence: Synthetic oligonucleotide
tctgtatttttatggagc

SEQ ID NO: 57 - DNA, 18 bp, Artificial Sequence
  Description of Artificial Sequence: Synthetic oligonucleotide
gtgagtctgtatttttat

SEQ ID NO: 58 - DNA, 18 bp, Artificial Sequence
  Description of Artificial Sequence: Synthetic oligonucleotide
aactggtgagtctgtatt

SEQ ID NO: 59 - DNA, 18 bp, Artificial Sequence
  Description of Artificial Sequence: Synthetic oligonucleotide
gcaggaactggtgagtct

SEQ ID NO: 60 - DNA, 18 bp, Artificial Sequence
  Description of Artificial Sequence: Synthetic oligonucleotide
tcaaagcaggaactggtg

SEQ ID NO: 61 - DNA, 18 bp, Artificial Sequence
  Description of Artificial Sequence: Synthetic oligonucleotide
tcacatcaaagcaggaac

SEQ ID NO: 62 - DNA, 18 bp, Artificial Sequence
  Description of Artificial Sequence: Synthetic oligonucleotide
acatgtcacatcaaagca

SEQ ID NO: 63 - DNA, 18 bp, Artificial Sequence
  Description of Artificial Sequence: Synthetic oligonucleotide
gagtcacatgtcacatca

SEQ ID NO: 64 - DNA, 18 bp, Artificial Sequence
  Description of Artificial Sequence: Synthetic oligonucleotide
ctggggagtcacatgtca

SEQ ID NO: 65 - DNA, 18 bp, Artificial Sequence
  Description of Artificial Sequence: Synthetic oligonucleotide
gtattctggggagtcaca

SEQ ID NO: 66 - DNA, 18 bp, Artificial Sequence
  Description of Artificial Sequence: Synthetic oligonucleotide
aaggtgtattctggggag

SEQ ID NO: 67 - DNA, 18 bp, Artificial Sequence
  Description of Artificial Sequence: Synthetic oligonucleotide
tctacagaagcaaggtgt

SEQ ID NO: 68 - DNA, 18 bp, Artificial Sequence
  Description of Artificial Sequence: Synthetic oligonucleotide
gctggtctacagaagcaa

SEQ ID NO: 69 - DNA, 18 bp, Artificial Sequence
  Description of Artificial Sequence: Synthetic oligonucleotide
ttggagctggtctacaga

SEQ ID NO: 70 - DNA, 18 bp, Artificial Sequence
  Description of Artificial Sequence: Synthetic oligonucleotide
tcctgttggagctggtct

SEQ ID NO: 71 - DNA, 18 bp, Artificial Sequence
  Description of Artificial Sequence: Synthetic oligonucleotide
tggaatcctgttggagct

SEQ ID NO: 72 - DNA, 18 bp, Artificial Sequence
  Description of Artificial Sequence: Synthetic oligonucleotide
taccatggaatcctgttg

SEQ ID NO: 73 - DNA, 18 bp, Artificial Sequence
  Description of Artificial Sequence: Synthetic oligonucleotide
ccagctaccatggaatcc

SEQ ID NO: 74 - DNA, 18 bp, Artificial Sequence
  Description of Artificial Sequence: Synthetic oligonucleotide
acatcccagctaccatgg

SEQ ID NO: 75 - DNA, 18 bp, Artificial Sequence
  Description of Artificial Sequence: Synthetic oligonucleotide
ccctaacatcccagctac

SEQ ID NO: 76 - DNA, 18 bp, Artificial Sequence
  Description of Artificial Sequence: Synthetic oligonucleotide
ctgagccctaacatccca

SEQ ID NO: 77 - DNA, 18 bp, Artificial Sequence
  Description of Artificial Sequence: Synthetic oligonucleotide
tacctgagccctaacatc

SEQ ID NO: 78 - DNA, 18 bp, Artificial Sequence
  Description of Artificial Sequence: Synthetic oligonucleotide
ttacttacctgagcccta

SEQ ID NO: 79 - DNA, 18 bp, Artificial Sequence
  Description of Artificial Sequence: Synthetic oligonucleotide
gaaggttacttacctgag

SEQ ID NO: 80 - DNA, 18 bp, Artificial Sequence
  Description of Artificial Sequence: Synthetic oligonucleotide
aaaaggaaggttacttac

SEQ ID NO: 81 - DNA, 18 bp, Artificial Sequence
  Description of Artificial Sequence: Synthetic oligonucleotide
aaaaaaaaaggaaggtta

SEQ ID NO: 82 - DNA, 18 bp, Artificial Sequence
  Description of Artificial Sequence: Synthetic oligonucleotide
taaaaaaaaaaaaaggaa

SEQ ID NO: 83 - DNA, 18 bp, Artificial Sequence
  Description of Artificial Sequence: Synthetic oligonucleotide
tatactaaaaaaaaaaaa

SEQ ID NO: 84 - DNA, 18 bp, Artificial Sequence
  Description of Artificial Sequence: Synthetic oligonucleotide
ggacatatactaaaaaaa

SEQ ID NO: 85 - DNA, 18 bp, Artificial Sequence
  Description of Artificial Sequence: Synthetic oligonucleotide
aaccaggacatatactaa

SEQ ID NO: 86 - DNA, 18 bp, Artificial Sequence
  Description of Artificial Sequence: Synthetic oligonucleotide
ggccaaaccaggacatat

SEQ ID NO: 87 - DNA, 18 bp, Artificial Sequence
  Description of Artificial Sequence: Synthetic oligonucleotide
cagatggccaaaccagga

SEQ ID NO: 88 - DNA, 18 bp, Artificial Sequence
  Description of Artificial Sequence: Synthetic oligonucleotide
aaaaacagatggccaaac

SEQ ID NO: 89 - DNA, 18 bp, Artificial Sequence
  Description of Artificial Sequence: Synthetic oligonucleotide
aaaaaaaaaacagatggc

SEQ ID NO: 90 - DNA, 18 bp, Artificial Sequence
  Description of Artificial Sequence: Synthetic oligonucleotide
taaaaaaaaaaaaaacag

SEQ ID NO: 91 - DNA, 18 bp, Artificial Sequence
  Description of Artificial Sequence: Synthetic oligonucleotide
ttttttaaaaaaaaaaaa

SEQ ID NO: 92 - DNA, 18 bp, Artificial Sequence
  Description of Artificial Sequence: Synthetic oligonucleotide
tttttttttttaaaaaaa

SEQ ID NO: 93 - DNA, 18 bp, Artificial Sequence
  Description of Artificial Sequence: Synthetic oligonucleotide
ttttttttttttttttaa

SEQ ID NO: 94 - DNA, 18 bp, Artificial Sequence
  Description of Artificial Sequence: Synthetic oligonucleotide
tttccttttttttttttt

SEQ ID NO: 95 - DNA, 18 bp, Artificial Sequence
  Description of Artificial Sequence: Synthetic oligonucleotide
cctcttttcctttttttt

SEQ ID NO: 96 - DNA, 18 bp, Artificial Sequence
  Description of Artificial Sequence: Synthetic oligonucleotide
tttttcctcttttccttt

SEQ ID NO: 97 - DNA, 18 bp, Artificial Sequence
  Description of Artificial Sequence: Synthetic oligonucleotide
atatttttttcctctttt

SEQ ID NO: 98 - DNA, 18 bp, Artificial Sequence
  Description of Artificial Sequence: Synthetic oligonucleotide
cacatgtcacatcaaagc

SEQ ID NO: 99 - DNA, 18 bp, Artificial Sequence
  Description of Artificial Sequence: Synthetic oligonucleotide
tcacatgtcacatcaaag

SEQ ID NO: 100 - DNA, 18 bp, Artificial Sequence
  Description of Artificial Sequence: Synthetic oligonucleotide
gtcacatgtcacatcaaa

SEQ ID NO: 101 - DNA, 18 bp, Artificial Sequence
  Description of Artificial Sequence: Synthetic oligonucleotide
agtcacatgtcacatcaa

SEQ ID NO: 102 - DNA, 18 bp, Artificial Sequence
  Description of Artificial Sequence: Synthetic oligonucleotide
ggagtcacatgtcacatc

SEQ ID NO: 103 - DNA, 18 bp, Artificial Sequence
  Description of Artificial Sequence: Synthetic oligonucleotide
gggagtcacatgtcacat

SEQ ID NO: 104 - DNA, 18 bp, Artificial Sequence
  Description of Artificial Sequence: Synthetic oligonucleotide
ggggagtcacatgtcaca

SEQ ID NO: 105 - DNA, 18 bp, Artificial Sequence
  Description of Artificial Sequence: Synthetic oligonucleotide
tggggagtcacatgtcac

SEQ ID NO: 106 - DNA, 18 bp, Artificial Sequence
  Description of Artificial Sequence: Synthetic oligonucleotide
tctggggagtcacatgtc

SEQ ID NO: 107 - DNA, 18 bp, Artificial Sequence
  Description of Artificial Sequence: Synthetic oligonucleotide
ttctggggagtcacatgt

SEQ ID NO: 108 - DNA, 18 bp, Artificial Sequence
  Description of Artificial Sequence: Synthetic oligonucleotide
attctggggagtcacatg

SEQ ID NO: 109 - DNA, 18 bp, Artificial Sequence
  Description of Artificial Sequence: Synthetic oligonucleotide
tattctggggagtcacat

SEQ ID NO: 110 - DNA, 18 bp, Artificial Sequence
  Description of Artificial Sequence: Synthetic oligonucleotide
tgtattctggggagtcac

SEQ ID NO: 111 - DNA, 18 bp, Artificial Sequence
  Description of Artificial Sequence: Synthetic oligonucleotide
gtgtattctggggagtca

SEQ ID NO: 112 - DNA, 18 bp, Artificial Sequence
  Description of Artificial Sequence: Synthetic oligonucleotide
ggtgtattctggggagtc

SEQ ID NO: 113 - DNA, 18 bp, Artificial Sequence
  Description of Artificial Sequence: Synthetic oligonucleotide
aggtgtattctggggagt

SEQ ID NO: 114 - DNA, 18 bp, Artificial Sequence
  Description of Artificial Sequence: Synthetic oligonucleotide
caaggtgtattctgggga

SEQ ID NO: 115 - DNA, 18 bp, Artificial Sequence
  Description of Artificial Sequence: Synthetic oligonucleotide
gcaaggtgtattctgggg

SEQ ID NO: 116 - DNA, 18 bp, Artificial Sequence
  Description of Artificial Sequence: Synthetic oligonucleotide
agcaaggtgtattctggg

SEQ ID NO: 117 - DNA, 18 bp, Artificial Sequence
  Description of Artificial Sequence: Synthetic oligonucleotide
aagcaaggtgtattctgg

SEQ ID NO: 118 - DNA, 18 bp, Artificial Sequence
  Description of Artificial Sequence: Synthetic oligonucleotide
cagaagcaaggtgtattc

SEQ ID NO: 119 - DNA, 18 bp, Artificial Sequence
  Description of Artificial Sequence: Synthetic oligonucleotide
acagaagcaaggtgtatt

SEQ ID NO: 120 - DNA, 18 bp, Artificial Sequence
  Description of Artificial Sequence: Synthetic oligonucleotide
tacagaagcaaggtgtat

SEQ ID NO: 121 - DNA, 18 bp, Artificial Sequence
  Description of Artificial Sequence: Synthetic oligonucleotide
ctacagaagcaaggtgta

SEQ ID NO: 122 - DNA, 18 bp, Artificial Sequence
  Description of Artificial Sequence: Synthetic oligonucleotide
gtctacagaagcaaggtg

SEQ ID NO: 123 - DNA, 18 bp, Artificial Sequence
  Description of Artificial Sequence: Synthetic oligonucleotide
ggtctacagaagcaaggt

SEQ ID NO: 124 - DNA, 18 bp, Artificial Sequence
  Description of Artificial Sequence: Synthetic oligonucleotide
tggtctacagaagcaagg

SEQ ID NO: 125 - DNA, 18 bp, Artificial Sequence
  Description of Artificial Sequence: Synthetic oligonucleotide
ctggtctacagaagcaag

SEQ ID NO: 126 - DNA, 18 bp, Artificial Sequence
  Description of Artificial Sequence: Synthetic oligonucleotide
agctggtctacagaagca

SEQ ID NO: 127 - DNA, 18 bp, Artificial Sequence
  Description of Artificial Sequence: Synthetic oligonucleotide
gagctggtctacagaagc

SEQ ID NO: 128 - DNA, 18 bp, Artificial Sequence
  Description of Artificial Sequence: Synthetic oligonucleotide
ggagctggtctacagaag

SEQ ID NO: 129 - DNA, 18 bp, Artificial Sequence
  Description of Artificial Sequence: Synthetic oligonucleotide
tggagctggtctacagaa

SEQ ID NO: 130 - DNA, 62 bp, Homo sapiens
aaagggataaacagcacttccagggggagaaaaaaaatcatgttatcagaaagcaaagaagg

SEQ ID NO: 131 - DNA, 115 bp, Homo sapiens
acattcacggcatggtgtaactcccacctccggaaggcggggacacagatcgagaacatcgaagaggacttccgggatggcctgaagctcatgctgctgctggaggtcatctcag

SEQ ID NO: 132 - DNA, 86 bp, Homo sapiens
acatcgtgaacacccctaaacccgatgaaagagccatcatgacgtacgtctcttgcttctaccacgcttttgcgggcgcggagcag

SEQ ID NO: 133 - DNA, 140 bp, Homo sapiens
attttgatttagtggatttgaggcagggctttcatctctaacaaattcccaagtgatgtgaataaatgcttgtccgaggaccacacttcgagttgcagagatgtaaaacacatctattctccagcaattatctgactcag

SEQ ID NO: 134 - DNA, 140 bp, Homo sapiens; identical to SEQ ID NO: 133

SEQ ID NO: 135 - DNA, 131 bp, Homo sapiens
agcctgtgcctctggaggaggtccaattggtggtggagccagaaggtggagcagtagctcctggtggaaccgtaaccctgacctgtgaagtccctgcccagccctctcctcaaatccactggatgaaggat

SEQ ID NO: 136 - DNA, 78 bp, Homo sapiens
aatcatctcttttgaaaaatcgattcatcaaatgaatcttcagccaacaactgttcaagaaggatgcaaatatcacag

SEQ ID NO: 137 - DNA, 97 bp, Homo sapiens
gtgtgaaaattggacttgctggcagaatcctttttgggagaagatgaagaatcagtgtgagactgtttggttaaaatccccaataaaactgaaactg

SEQ ID NO: 138 - DNA, 58 bp, Homo sapiens
ggccaagactgaaagcgtggaaaccaagaagcaaccatgaaatggtggtgtgtataca

SEQ ID NO: 139 - DNA, 353 bp, Homo sapiens
gcccagccaccatcagtcacgtcactcctgggactgaggaggcaggggagggataaggggcagagatggaggccccactccccgaggttgcctagacaacatgagaaatcgtggccagggcctcttccgcctgcggagccgctgcttcctgcatcagtcactcccgctgggggcggggcggaggaaggggttggatgtggcagagccaggccccagccggtgccgctcagactcccccgctgtcgccgccgtggtcccagccatggcatcctatccatctggctctggcaagcccaaggccaaatatccctttaagaagcgggccagcctgcaggcctccactgcagctccag

SEQ ID NO: 140 - DNA, 154 bp, Homo sapiens
gacaccgctctatgacttccacctggcccacggcgggaaaatggtggcgtttgcgggttggagtctgccagtgcagtaccgggacagtcacactgactcgcacctgcacacacgccagcactgctcgctctttgacgtgtctcatatgctgcag

SEQ ID NO: 141 - DNA, 154 bp, Homo sapiens; identical to SEQ ID NO: 140

SEQ ID NO: 142 - DNA, 154 bp, Homo sapiens; identical to SEQ ID NO: 140

SEQ ID NO: 143 - DNA, 146 bp, Homo sapiens
cagacggttgatgatgaagcgccggccgtgtaaatgaagatcgggtgaggagcaggacgatgcccaagggtgggtgccctaaagcaccacagcaggaagagcttcccctcagcagcgacatggtggagaagcagactgggaaaaag

SEQ ID NO: 144 - DNA, 146 bp, Homo sapiens; identical to SEQ ID NO: 143

SEQ ID NO: 145 - DNA, 146 bp, Homo sapiens; identical to SEQ ID NO: 143

SEQ ID NO: 146 - DNA, 143 bp, Homo sapiens
acggttgatgatgaagcgccggccgtgtaaatgaagatcgggtgaggagcaggacgatgcccaagggtgggtgccctaaagcaccacagcaggaagagcttcccctcagcagcgacatggtggagaagcagactgggaaaaag

SEQ ID NO: 147 - DNA, 146 bp, Homo sapiens; identical to SEQ ID NO: 143

SEQ ID NO: 148 - DNA, 146 bp, Homo sapiens; identical to SEQ ID NO: 143

SEQ ID NO: 149 - DNA, 143 bp, Homo sapiens; identical to SEQ ID NO: 146

SEQ ID NO: 150 - DNA, 146 bp, Homo sapiens; identical to SEQ ID NO: 143

SEQ ID NO: 151 - DNA, 146 bp, Homo sapiens; identical to SEQ ID NO: 143

SEQ ID NO: 152 - DNA, 143 bp, Homo sapiens; identical to SEQ ID NO: 146

SEQ ID NO: 153 - DNA, 146 bp, Homo sapiens; identical to SEQ ID NO: 143

SEQ ID NO: 154 - DNA, 143 bp, Homo sapiens; identical to SEQ ID NO: 146

SEQ ID NO: 155 - DNA, 146 bp, Homo sapiens; identical to SEQ ID NO: 143

SEQ ID NO: 156 - DNA, 146 bp, Homo sapiens; identical to SEQ ID NO: 143

SEQ ID NO: 157 - DNA, 122 bp, Homo sapiens
caaggtgcagagctagaaatgaaagacatccagggctggacagccctcttccactgtaccagcgccgggcaccagcacatggtcaggttcctcttggacagtggagccaatgccaacgtgag

SEQ ID NO: 158 - DNA, 97 bp, Homo sapiens
cctcaacattcagcagaggccccagatcagcgtctgagccaggccaacaatgaccaaggaggatgggatcctgggtgcagctcatcacaagcgtcgg

SEQ ID NO: 159 - DNA, 54 bp, Homo sapiens
aatagagtccaagaagcagagcagcaaagaatatgaagacttttaaagctcatg

SEQ ID NO: 160 - DNA, 164 bp, Homo sapiens
ataacttgatttaaaacatcgtccagtgtacctgagagatggcagaatgtaatttggtggcaatcctaataagttctattgacaaccctttagataagaacttggataatggggggaattcatgcttggactttaggccactgaacagcttttctcagcctcag

SEQ ID NO: 161 - DNA, 76 bp, Homo sapiens
gaccaggaatgaaagttactgggagataacttcgaaggattttgcaacaaattcgagctgtccgactctgagaatg

SEQ ID NO: 162 - DNA, 76 bp, Homo sapiens; identical to SEQ ID NO: 161

SEQ ID NO: 163 - DNA, 71 bp, Homo sapiens
ttcacaggtcgaatttggggagcacaatggctggaggtcagatgcccactaggagatgctatgattaatat

SEQ ID NO: 164 - DNA, 71 bp, Homo sapiens; identical to SEQ ID NO: 163

SEQ ID NO: 165 - DNA, 178 bp, Homo sapiens
agtgttgccagggacggcagtatctctttgtgtgaccctggcggcttatgggacgttggcttcagacctttgtgatacaccatgctgcgtgggacgatgacggcgtggagaggaatgaggcctgaggtcacactggcttgcctcctcctagccacagcaggctgctttgctgacttga

SEQ ID NO: 166 - DNA, 178 bp, Homo sapiens; identical to SEQ ID NO: 165

SEQ ID NO: 167 - DNA, 178 bp, Homo sapiens; identical to SEQ ID NO: 165

SEQ ID NO: 168 - DNA, 178 bp, Homo sapiens; identical to SEQ ID NO: 165

SEQ ID NO: 169 - DNA, 78 bp, Homo sapiens
attttgcatgctgaaacttctcaaccagaagaaagggccttcacagtgtcctttatgtaagaatgatataaccaaaag

SEQ ID NO: 170 - DNA, 78 bp, Homo sapiens; identical to SEQ ID NO: 169

SEQ ID NO: 171 - DNA, 129 bp, Homo sapiens
gatcaagtccaggatcatggttttcgaggatccctgtgaccgaatctagcctacatttccagcacaatggacacttgtatgactctggccttcactctctctgggcgtttcttcatgctgctttctcag

SEQ ID NO: 172 - DNA, 129 bp, Homo sapiens; identical to SEQ ID NO: 171

SEQ ID NO: 173 - DNA, 97 bp, Homo sapiens
gcatccttctttaaaagagaaatccacgttagctctccttgaggtctcgagttccctcggctggaggcacaggttcagtggagaccaaataatgcag

SEQ ID NO: 174 - DNA, 136 bp, Homo sapiens
gaggccttctccctctttgacaaggatggagatggcactatcaccaccaaggagttggggacagtgatgagatccctgggacagaaccccactgaagcagagctgcaggatatgatcaatgaggtggatgcagatg

SEQ ID NO: 175 - DNA, 247 bp, Homo sapiens
agctttgtctaaagcaagggcaaaactctttaagctgtgcccagagttgaaggagtctttatatttctgatagaagacagtggcaaaaaaaaaaggcgtaagaattttgaagctatgttcaaaggtatccttcagagtggattggataacttcgtgataaaccacatgctaaagaacaacgtggctggacaaacatctatccagaccctagtacctaatacggatcaaaagtcgaccagtgtaaaaa

SEQ ID NO: 176 - DNA, 106 bp, Homo sapiens
ataaaataaaattatacctggggctgtgctcttatattaggccattccagtcagccaacagatggaaggaccacatcttcctaacaagaaaaaacacaaaaaacag

SEQ ID NO: 177 - DNA, 200 bp, Homo sapiens
caggaagtcattatgcaacttacacatattcatcagatttcctctgacttacccggacatgtacatgggaatgatgtgcactgccaagaaatgtgggattaggtttcagcctccagctattatcttaatctatgagagtgaaatcaaggggaaaattcgccagcgcattatgccagttcgaaacttttcaaagttttcag

SEQ ID NO: 178 - DNA, 44 bp, Homo sapiens
tgtgcagactagggaaatgaagtacaatgttgaccagaattgat

SEQ ID NO: 179 - DNA, 224 bp, Homo sapiens
agttcaacttgctgtgaatagagtaactgaagaagcagtcgcagtgaagattgtagatatgaagcgtgccgtagactgtccagaaaatattaagaaagagatctgtatcaataaaatgctaaatcatgaaaatgtagtaaaattctatggtcacaggagagaaggcaatatccaatatttatttctggagtactgtagtggaggagagctttttgacagaatag

SEQ ID NO: 180 - DNA, 112 bp, Homo sapiens
gctgcattcgcgattctatgagctggcccccaacctcgtcccaatggactacaggaagagccccatcgtccacgtgcccatgagcctcatcatccagatgccagagctccgg

SEQ ID NO: 181 - DNA, 112 bp, Homo sapiens; identical to SEQ ID NO: 180

SEQ ID NO: 182 - DNA, 164 bp, Homo sapiens
tgttgtgaagagcgaagacttttcgctcccagcttatatggatcggcgtgaccaccccttgccggaggtggcccatgtcaagcacctgtctgccagccagaaggcattgaaggagaaggagaaggcctcctggagcagcctctccatggatgagaaagtcgagt

SEQ ID NO: 183 - DNA, 60 bp, Homo sapiens
atatctattgaaatcgagactcctacccagatatctttagtggatgaagcatcaggagag

SEQ ID NO: 184 - DNA, 78 bp, Homo sapiens
gcaccttactagggatatgaaggtgagaagaagagctgattcctgctgtcaagaagcatagagtccaatggcattatg

SEQ ID NO: 185 - DNA, 126 bp, Homo sapiens
gtgatgaacagcctccttctaaatcattgaccacatttcttattctttcctgaggataaatttcaagatatcctgaaccaactgatgacagcctatttagctacaggaatactctggaaggaaatg

SEQ ID NO: 186 - DNA, 106 bp, Homo sapiens
gtaaacagaatctggtgattatgggtaagaagacctggttctccattcctgagaagaatcgacctttaaagggtagaattaatttagttctcagcagagaactcaa

SEQ ID NO: 187 - DNA, 151 bp, Homo sapiens
gcctacccttgtagcagtgataaggagtgtgaagttgggaggtattgccacagtccccaccaaggatcatcggcctgcatggtgtgtcggagaaaaaagaagcgctgccaccgagatggcatgtgctgccccagtacccgctgcaataatg

SEQ ID NO: 188 - DNA, 92 bp, Homo sapiens
gtgccgatatcacataagatttcaccagggcttcttctagccagaagacatgtcctttgacagccaatgtgaccttcgtagctctgagccag

SEQ ID NO: 189 - DNA, 185 bp, Homo sapiens
tcggcccccacaaggaatttgctgtgaccatgagacctacagaagccagtgagaggtgccacctgcgggggtcctataccctccgggctggggagagtgccctggagctgtggggtgggcccgagccagggacccagctgtacgactggccctacaggtttctgcggcgctttgggcgggacaag

SEQ ID NO: 190 - DNA, 144 bp, Homo sapiens
gccctttcaagaatcctatgaaagttgtggatcatctccccggaaaacacgcatatagatgtgaacatctgcctatggttttatggggttcacagacctggaagagcccatctctggatgccctggaggcccatgggctctagg

SEQ ID NO: 191 - DNA, 144 bp, Homo sapiens; identical to SEQ ID NO: 190

SEQ ID NO: 192 - DNA, 131 bp, Homo sapiens
agatgtgcttagagtgtttgggagagtttcagccaggccttccaatttcctagaccccatgtgtggtactgtgtcttcacctggaattgtgacctttgtgcagttacaaatccaacagagcaaggagccta

SEQ ID NO: 193 - DNA, 131 bp, Homo sapiens; identical to SEQ ID NO: 192

SEQ ID NO: 194 - DNA, 179 bp, Homo sapiens
ccaaatatgaggtgacgtttaagctgctacttgaaagagaagtgggagttaggcagagcagtaggggaatcatgtttggggaagagtgaagagtgtacttgagagagtgtggaggtgccttggaggagctggagcccagaggtgccccatgagaacaacacaggaggctgcaggtggag

SEQ ID NO: 195 - DNA, 97 bp, Homo sapiens
gttaaaagccaactgcaaggtctaatgactgcaggatctagctatccattgtttctggccgcctatgcgtgcactgggtgtctggcagagaggctgg

SEQ ID NO: 196 - DNA, 85 bp, Homo sapiens
catcaccctcattgttctgtcatctgaggtgggcatctctgagctgaggctggagagactactccaaatggtgtttggagccatg

SEQ ID NO: 197 - DNA, 128 bp, Homo sapiens
gtgttgctggtgctagagcttcaggggcttcaaaagaacatgactcggttcaggattgatgagctggagcctcggcgaccccgataccgtgtaccagatgttttggtggctgatccaccaatagcccg

SEQ ID NO: 198 - DNA, 96 bp, Homo sapiens
agctagggccatgagtaccttgtttttgactggaaggagctgtggggtggaccgtttccctgaaagctagaagaatgtttgaagcctgttcccaag

SEQ ID NO: 199 - DNA, 124 bp, Homo sapiens
tacctgggggacagggtgtctgagaaagtgaagaccaaggttattgagctgctgtacagctggaccatggccctgccagaagaagcaaagatcaaagacgcctaccacatgctgaagagacagg

SEQ ID NO: 200 - DNA, 208 bp, Homo sapiens
ggttcatctatattgtagcctgttaccagaatttcattctgttttatgacggaataatattccgttttatgtgtctaccacattttgttatccattcatctgttgatggacacttgagttgtttccaccattgggctgttgagaataatactgctatgaactctggtgtagaagtatctgttttagtttctcttctcaattttttgag

SEQ ID NO: 201 - DNA, 59 bp, Homo sapiens
attctactgaagaaaggtagccatggaagagaatatggaagagggacagacacaaaaag

SEQ ID NO: 202 - DNA, 116 bp, Homo sapiens
gttctgaaaatattgtgcacagggcaggctgaggacacagccacgtgatacccactgtagagagagggagagagagacctcctatgcaagctgccggccctctgttccgtagtaag

SEQ ID NO: 203 - DNA, 71 bp, Homo sapiens
ttcttgcagatacagcgctaggaaaaggggagtaattcaggtctagaatggaaaaactgttttgttgcttt

SEQ ID NO: 204 - DNA, 53 bp, Homo sapiens
gccagtatggtgcattctttgattgaagcatatgcactgcataagcagatgag

SEQ ID NO: 205 - DNA, 171 bp, Homo sapiens
gaaacgtggtgggtgccgttttgacaccgacctatcctttgtgaggttgaagaattttggaagagcatgagagcagcacttggtgttcagaagaaaggcttagcatgttgtcctgggttccgtggagaagggtcactggactgcacggggtggctcttccgcatggtcttg

SEQ ID NO: 206 - DNA, 93 bp, Homo sapiens
cattgttgatgctcttgagagcatcagccaggacattaatgtgcaccactgtggtggcgtggaaagatggcaaaaagagccctgcatgatttt

SEQ ID NO: 207 - DNA, 93 bp, Homo sapiens; identical to SEQ ID NO: 206

SEQ ID NO: 208 - DNA, 111 bp, Homo sapiens
tggccataatataattgtgataatgtaataaaatcaggaaacattacctgaagcagatgcttttgaagtcaccagaaaatagtcttctccaattccaatttaaatatggag

SEQ ID NO: 209 - DNA, 123 bp, Homo sapiens
agttagcacgacatcagtatgagctggtcaccttccctgacaacgcagacatgtggggcctgggaaatgaaagagcgccttgggacagggggatttggaaatgtcatccgatggcacaatcag

SEQ ID NO: 210 - DNA, 123 bp, Homo sapiens; identical to SEQ ID NO: 209

SEQ ID NO: 211 - DNA, 123 bp, Homo sapiens; identical to SEQ ID NO: 209

SEQ ID NO: 212 - DNA, 123 bp, Homo sapiens; identical to SEQ ID NO: 209

SEQ ID NO: 213 - DNA, 96 bp, Homo sapiens
gtatctcaaatctgtgaagtattgtagaggagacacaaaaggaattgggggtcacaaatggttctcattgacatgagtgtagacctttctactcag

SEQ ID NO: 214 - DNA, 180 bp, Homo sapiens
gtggtggtaatcattagttccagggtgctctgccatgttgacgcaagctgctgtaaggcttgttagggggtccctgcgcaaaacctcctgggcagagtggggtcacagggaactgcgactgggtcaacttgctcctttcacagcgcctcacaaggacaagtcattttctgatcaaagaag

SEQ ID NO: 215 - DNA, 180 bp, Homo sapiens; identical to SEQ ID NO: 214

SEQ ID NO: 216 - DNA, 91 bp, Homo sapiens
tttgcttatggtggatgcactcatggcaaaaaaatcactggtgagcatcatttaagaagacccatgactagactgggctggccgagcccat

SEQ ID NO: 217 - DNA, 71 bp, Homo sapiens
gttcatcagacttaacttctgctagaaattgttaccagcctctattagaaaatcccatggtgtcagaaagt

SEQ ID NO: 218 - DNA, 71 bp, Homo sapiens; identical to SEQ ID NO: 217

SEQ ID NO: 219 - DNA, 63 bp, Homo sapiens
tgaaaagaagagattggacctggaaaagaaactttatgaatataatcagtctgatacatgcag

SEQ ID NO: 220 - DNA, 248 bp, Homo sapiens
gaatcttcaggtcttcctggggaagcataaccttcggcaaagggagagttcccaggagcagagttctgttgtccgggctgtgatccaccctgactatgatgccgccagccatgaccaggacatcatgctgttgcgcctggcacgcccagccaaactctctgaactcatccagccccttcccctggagagggactgctcagccaacaccaccagctgccacatcctgggctggggcaagacagcagatg

SEQ ID NO: 221 - DNA, 180 bp, Homo sapiens
atttgccagtgatgggaagagttagaaacaggatgcccagcccttctcgcctcaagaggccactgggatgcagccactcctgtgcttggggaacctggaggatgcaagggaaaggactggcactctgctggcacagcacccggcctggggcaggacacgggcgaagccagggtctcccct

SEQ ID NO: 222 - DNA, 119 bp, Homo sapiens
gaaagaaaagagacttcttttctagccaagatgaaagatacacaagacattcaggaagcttcgaaggcaatgcagaataaagtccatgagcaggaagataagaatgagaaacaaaaaca

SEQ ID NO: 223 - DNA, 119 bp, Homo sapiens; identical to SEQ ID NO: 222

SEQ ID NO: 224 - DNA, 77 bp, Homo sapiens
gagcccgctacatgaaaaaaaatgcaagtcaaagtggtcacaacctagaagtctgcagagacaggaataactagcaa

SEQ ID NO: 225 - DNA, 137 bp, Homo sapiens
gctgaacccagactcccagggcacctgcttgcacctttgaatgatggcctgaactatgaacaaacgggactatatgaacacttcggtacaggagccccctcttgactactccttcagaagcatccacgtcattcaag

SEQ ID NO: 226 - DNA, 137 bp, Homo sapiens; identical to SEQ ID NO: 225

SEQ ID NO: 227 - DNA, 137 bp, Homo sapiens; identical to SEQ ID NO: 225

SEQ ID NO: 228 - DNA, 137 bp, Homo sapiens; identical to SEQ ID NO: 225

SEQ ID NO: 229 - DNA, 137 bp, Homo sapiens; identical to SEQ ID NO: 225

SEQ ID NO: 230 - DNA, 137 bp, Homo sapiens; identical to SEQ ID NO: 225

SEQ ID NO: 231 - DNA, 137 bp, Homo sapiens; identical to SEQ ID NO: 225

SEQ ID NO: 232 - DNA, 137 bp, Homo sapiens; identical to SEQ ID NO: 225

SEQ ID NO: 233 - DNA, 137 bp, Homo sapiens; identical to SEQ ID NO: 225

SEQ ID NO: 234 - DNA, 137 bp, Homo sapiens; identical to SEQ ID NO: 225

SEQ ID NO: 235 - DNA, 137 bp, Homo sapiens; identical to SEQ ID NO: 225

SEQ ID NO: 236 - DNA, 125 bp, Homo sapiens
gcagagttgggcctaaatgagcaccatcaaaatgaagttattaattatatgcgttttgctcgttcaaagagaggcttgagactcaaaactgtagattcctgcttccaagacctcaaggagagcag

SEQ ID NO: 237 - DNA, 105 bp, Homo sapiens
ggagggtacctcttgaatgagggtcctatgacctgcttcaggggaaggttagaaaattcttcctgggatttatggccgccttccggggagatgggcgagaagaag

SEQ ID NO: 238 - DNA, 124 bp, Homo sapiens; identical to SEQ ID NO: 28

SEQ ID NO: 239 - DNA, 124 bp, Homo sapiens; identical to SEQ ID NO: 28

SEQ ID NO: 240 - DNA, 101 bp, Homo sapiens
cataaccagtgtgcagcgttcagacaatgggtcgtatatctgtaagatgaaaataaacaatgaagagatcgtgtctgatcccatctacatcgaagtacaag

SEQ ID NO: 241 - DNA, 124 bp, Homo sapiens
gatcatcttctccacgcccctggccgtcattgcctacttcctcatctggttcgtgcccgacttcccacacggccagacctattggtacctgcttttctattgcctctttgaaacaatggtcacg

SEQ ID NO: 242 - DNA, 148 bp, Homo sapiens
tgagtccattcttgcacaccgagaaaatatgcgacagatgataagaagtttttctgaaccctttggaagagacttgctcagtatctctgatggtagagggagagctcataatcgtagaggacataatgatggtgaagattctttgact

SEQ ID NO: 243 - DNA, 148 bp, Homo sapiens; identical to SEQ ID NO: 242

SEQ ID NO: 244 - DNA, 148 bp, Homo sapiens; identical to SEQ ID NO: 242

SEQ ID NO: 245 - DNA, 148 bp, Homo sapiens; identical to SEQ ID NO: 242

SEQ ID NO: 246 - DNA, 148 bp, Homo sapiens; identical to SEQ ID NO: 242

SEQ ID NO: 247 - DNA, 112 bp, Homo sapiens
gagttctcagcctgaagttgactggaactttcagttaacaagtatttatcgaatacctgatctgtagtgttggacttagacctatggaaggagctactgatgtgaatgaaag

SEQ ID NO: 248 - DNA, 127 bp, Homo sapiens
ctcttgcccctgttctttgcttctcgttttgttggtgaagatatcacagtgatgtctgcattcaacctgctgcatttggtgacaaagagccagccagtagcccttcgagcctgtgggcttccctcag

SEQ ID NO: 249 - DNA, 140 bp, Homo sapiens
gagtctgtgacagccaccccaacacgtgacgtcatggccagtagggaagatgagctgaggaactgtgtggtatgtggggaccaagccacaggctaccactttaatgcgctgacttgtgagggctgcaagggtttcttcag

SEQ ID NO: 250 - DNA, 140 bp, Homo sapiens; identical to SEQ ID NO: 249

SEQ ID NO: 251 - DNA, 140 bp, Homo sapiens; identical to SEQ ID NO: 249

SEQ ID NO: 252 - DNA, 140 bp, Homo sapiens; identical to SEQ ID NO: 249

SEQ ID NO: 253 - DNA, 140 bp, Homo sapiens; identical to SEQ ID NO: 249

SEQ ID NO: 254 - DNA, 140 bp, Homo sapiens; identical to SEQ ID NO: 249

SEQ ID NO: 255 - DNA, 140 bp, Homo sapiens; identical to SEQ ID NO: 249

SEQ ID NO: 256 - DNA, 140 bp, Homo sapiens; identical to SEQ ID NO: 249

SEQ ID NO: 257 - DNA, 140 bp, Homo sapiens; identical to SEQ ID NO: 249

SEQ ID NO: 258 - DNA, 140 bp, Homo sapiens; identical to SEQ ID NO: 249

SEQ ID NO: 259 - DNA, 140 bp, Homo sapiens; identical to SEQ ID NO: 249

SEQ ID NO: 260 - DNA, 140 bp, Homo sapiens; identical to SEQ ID NO: 249

SEQ ID NO: 261 - DNA, 140 bp, Homo sapiens; identical to SEQ ID NO: 249

SEQ ID NO: 262 - DNA, 55 bp, Homo sapiens
aagattggataaccaagaaatgactaatcaagagtctgccgtacatgtgaaaatg

SEQ ID NO: 263 - DNA, 55 bp, Homo sapiens; identical to SEQ ID NO: 262

SEQ ID NO: 264 - DNA, 179 bp, Homo sapiens
aatgccttgagttccgtattctagttctgtgtgatctgatctttaccttcccttccttggatccctgtgcacctactggagccaggttactctgggtcctggacctgactgcctcattctggaggcttccagacagccacagttagtgcccaaacctgagaggatggcttcagatggag

SEQ ID NO: 265 - DNA, 101 bp, Homo sapiens
gaagaaggcctgaacgacatacaggagatgatcaaaacggagaagtcctaccctgagcgtcgcctgcggggcgtcctggaggagctgagctgtggctgctg

SEQ ID NO: 266 - DNA, 101 bp, Homo sapiens; identical to SEQ ID NO: 265

SEQ ID NO: 267 - DNA, 84 bp, Homo sapiens
ggtattttccctaattctccatggtgcttcaatagcatgttattatcataaaaatgaacagttttgtggaatagatgaccaaat

SEQ ID NO: 268 - DNA, 98 bp, Homo sapiens
ggaccttaaaccggaaaacattttgttaaatgaagatatgcacatccagatcacagattttggaacagcaaaagtcttatccccagagagcaaacaag

SEQ ID NO: 269 - DNA, 95 bp, Homo sapiens
cttagcctgcgacgcttatgattagagccaacaatttgaaatggcctgctcacctgatgcagtcgtctctccgtcttccgctttcttaaggtctg

SEQ ID NO: 270 - DNA, 112 bp, Homo sapiens
ttttaaaattgctatagcttagcctgcgacgcttatgattagagccaacaatttgaaatggcctgctcacctgatgcagtcgtctctccgtcttccgctttcttaaggtctg

SEQ ID NO: 271 - DNA, 777 bp, Homo sapiens
gtaatagaggacacatctcttaactgggttgctctaagaactgatgtctaaaccgtctcagcatggcctgtagaggaggagctgggaatggccaccgtgcctcagctacactctctcgggttagccctggaagtctttacacatgtagaacccgtacccataatatatgcatggtatctgactttttctacccaaatatgggaggcgtggaaagccacatttaccagctctctcagtgcctgattgaaagagggcataaggttataattgtcacccatgcttatggaaatcgaaaaggcatccgttacctcaccagtggcctcaaagtctattacttgcctctgaaagtcatgtacaaccagtctacagccacgaccctctttcacagtctgccattgctcaggtacatatttgttcgggagagagtcacgataatccattcacatagttctttttctgctatggcccatgatgctctcttccacgccaagacaatggggcttcagacagtcttcacggaccattccctttttggatttgctgatgtcagctcggtgcttacaaacaagcttctaaccgtgtctctttgtgatacaaaccacatcatttgtgtgtcttatactagtaaggaaaatactgtactaagagcagcactgaatcctgaaatagtgtccgtcattcctaatgctgtagatcctactgacttcactccagacccatttagaaggcatgatagtataactattgttgttgtcagcagacttgtttacagaaaag

SEQ ID NO: 272 - DNA, 777 bp, Homo sapiens; identical to SEQ ID NO: 271

SEQ ID NO: 273 - DNA, 92 bp, Homo sapiens
ataaattattagtcataactgtagcaacaaaagaaagtgatggattccatcgatttatgcagtcagccaaatatttcaattatactgtgaag

SEQ ID NO: 274 - DNA, 98 bp, Homo sapiens
ttttagtagtgacggggttcaccgtgttagccaggatggtctcgatctcctgccttgtgatccgcccgcctcggcctcccaaagtgctgggattacag

SEQ ID NO: 275 - DNA, 93 bp, Homo sapiens
ttttgggctatgatgcattaggcttctgcgagtatttatatacagattttgaacatgtttttattgccaagactacagttgctgggtcaaatg

SEQ ID NO: 276 - DNA, 241 bp, Homo sapiens
aattgtgacctggatcagcagagcattgttcacattgtgcagagaccgtggagaaaaggtcaagaaatgaatgcaactggaggcgacgaccccagaaacgcggcgggaggctgtgagcgggagccccagagcttgactcgggtggacctcagcagctcagtcctcccaggagactctgtggggctggctgtcattctgcacactgacagcaggaaggactcaccaccagctggaagtccag

SEQ ID NO: 277 - DNA, 95 bp, Homo sapiens
gactgaccactgagcagatgctgagaaaagaccagaagactatctatagacaaggcgtcaaggtggccattagtgcaatatatatggatttggag

SEQ ID NO: 278 - DNA, 82 bp, Homo sapiens
gacaaattattggattccagcacagtgactcacttattcaagataactgaaaacattggttgtgtgatgaccggaatgacag

SEQ ID NO: 279 - DNA, 146 bp, Homo sapiens
agctcaaggaattatctagtgccctgaccacaccagagatgcagaaagaaatccaggagttaaagaaggaatgcgctggctacagagagagattgaagaacattaaagcagctaccaatcatgtgactccagaagagaaagagcag

SEQ ID NO: 280 - DNA, 101 bp, Homo sapiens
ttgaccatagtcggattaaactacatcaagaagataatgactatatcaacgctagtttgataaaaatggaagaagcccaaaggagttacattcttacccag

SEQ ID NO: 281 - DNA, 194 bp, Homo sapiens
gtactaccgtggtgcagtgggcgccctgctggtgtacgacatcgccaagcacctgacctatgagaacgtggagcgctggctgaaggagctgcgggaccacgcagacagcaacatcgtcatcatgctggtgggcaacaagagtgacctgcgccacctgcgggctgtgcccactgacgaggcccgcgccttcgcag

SEQ ID NO: 282 - DNA, 116 bp, Homo sapiens
tctccacgtacgtccctcaaagcgcgtcctaaaacccggataaccggagcgctccccatggaccacacggagggctcgcccgcggaggagccgcctgcgcatgctccatcgcctgg

SEQ ID NO: 283 - DNA, 116 bp, Homo sapiens; identical to SEQ ID NO: 282

SEQ ID NO: 284 - DNA, 188 bp, Homo sapiens
gctgctctttggcgtaaattgcaatcgattagggatcgtttctcagaatcaagttagaagtgagagttcagataagtgaggccgccattgctgctttgaacacctcagaaggggagaatggatttatcaggagtgaaaaagaagagcttgctaggagtcaaagaaaataataaaaagtccagcactag

SEQ ID NO: 285 - DNA, 188 bp, Homo sapiens; identical to SEQ ID NO: 284

SEQ ID NO: 286 - DNA, 188 bp, Homo sapiens; identical to SEQ ID NO: 284

SEQ ID NO: 287 - DNA, 188 bp, Homo sapiens; identical to SEQ ID NO: 284

SEQ ID NO: 288 - DNA, 116 bp, Homo sapiens
agggtaaaactgattattatgctcggaaacgcttggtgatacaagataaaaataaatacaacacacccaaatacaggatgatagttcgtgtgacaaacagagatatcatttgtcag

SEQ ID NO: 289 - DNA, 74 bp, Homo sapiens
tgtgtgctgacttgataagaggcgcaaaagaaaagaatctcaaagtgaaaggaccagttcgaatgcctaccaag

SEQ ID NO: 290 - DNA, 250 bp, Homo sapiens
gcagaaaatatatactgaagacatggcctttggagcttcaacttttccacctcagtatttatcttctgagataactcttcatccatatgcctattctccttatacccttgactccacacagaatgtttactcagtgcctggctcccagtatctttataaccaacccagttgttaccgaggttttcaaacagtgaagcatcgaaatgagaacacatgccctctcccacaagaaatgaaagctctgtttaag

SEQ ID NO: 291 - DNA, 266 bp, Homo sapiens
gtcatgtgtctccagctcttcccagcacaacctcaccctcctcagggctctgagggggcggagaggacaggccagagcgatgaggctggagtggggacctaggccagccgcactgccgtggcccgctgggatgtgtgctgcagaacgtgcggagggagccttcaccctccagagcgtggcccagccaatgcgccccattgcttccacagctacgaaatgtgggaattgtggacccggctactccacccctctggaggccatgaaag

SEQ ID NO: 292 - DNA, 266 bp, Homo sapiens; identical to SEQ ID NO: 291

SEQ ID NO: 293 - DNA, 158 bp, Homo sapiens
tctacatcggtaaactctgcaaaactccagcagttacagagcctgtgctaggagctacagggtgaagagggggaagaagactcaagaaacctgtaaaactaatggaggagaggaaaccagctcatgtgctgagaagttttaaatatgctgcatttatg

SEQ ID NO: 294 - DNA, 49 bp, Homo sapiens
gactcagattcagactctgagggaggagccgctggtggagaagcagaca

SEQ ID NO: 295 - DNA, 49 bp, Homo sapiens; identical to SEQ ID NO: 294

SEQ ID NO: 296 - DNA, 49 bp, Homo sapiens; identical to SEQ ID NO: 294

SEQ ID NO: 297 - DNA, 49 bp, Homo sapiens; identical to SEQ ID NO: 294

SEQ ID NO: 298 - DNA, 49 bp, Homo sapiens; identical to SEQ ID NO: 294

SEQ ID NO: 299 - DNA, 110 bp, Homo sapiens
ctgctgcattttttatcacctatgaatatgtgaagtggtttttgcatgctgattcatcttcatatttgacacctatgaaacatatgttggctgcctctgctggagaagtg

SEQ ID NO: 300 - DNA, 110 bp, Homo sapiens; identical to SEQ ID NO: 299

SEQ ID NO: 301 - DNA, 75 bp, Homo sapiens
tggctatacaggtggagctgaacaattgagattctgacctcaaagagctaaccatgtacttcagctttggaaatg

SEQ ID NO: 302 - DNA, 146 bp, Homo sapiens
cccagcgtcctctctcgcctcgcattggtacactccaactcctttctactcttctctggaggcggcacttttgaatttcagacccagcgctccagtctttagaatgcttgaggtgtcgatccccaccccccaccgctatgtcagag

SEQ ID NO: 303 - DNA, 58 bp, Homo sapiens
attgacttgatgcaaaacatcacaaaggctccatattatacagtatgcgatttttgag

SEQ ID NO: 304 - DNA, 230 bp, Homo sapiens
agtctcactctgttgccagactggagtgcagaggcgcctctcgatttcttgacctcatggtccgcccgcctcagcctcccaaagtgctgggactacaggcatgagccaccgtgcctggccaataacaccttaatcttcaggtgcaggctgtgaagatgggaaaaggctgtcaatgctctggcttcttcccactgacaggggacgtagtgggaatgggaatgaaccccaag

SEQ ID NO: 305 - DNA, 175 bp, Homo sapiens
taatagttatgcacgagtgcgagctgtggtgatgacccgagatgactcaagtggtggatggttaccacttggagggagtggactaagcagcgtcactgtcttcaaagtccctcatcaggaagagaatggctgtgctgacttttttatccgtggagagcgactcagggacaaaatg

SEQ ID NO: 306 - DNA, 85 bp, Homo sapiens
gtctgctattgatcttgaagagatggcatctggtcttaacaaaagaaaaatgattcagcatgctgtatttaaagaacttgtgaag

SEQ ID NO: 307 - DNA, 64 bp, Homo sapiens
aaatcaagcagaagattgagctgctgatgtcagttaactctgagaagtcgtcctcttcagaaag

SEQ ID NO: 308 - DNA, 101 bp, Homo sapiens
agaaggagctgaggaatttgcaacgagagattgaaataatgcggggtctgcggcatcccaacattgtgcatatgcttgacagctttgaaactgataaagag

SEQ ID NO: 309 - DNA, 103 bp, Homo sapiens
accaatgatgcgagctcagagtcaatagcatccttctctaaacaggaggtcatgagtagctttctgccagagggagggtgttacgagctgctcactgtgatag

SEQ ID NO: 310 - DNA, 103 bp, Homo sapiens; identical to SEQ ID NO: 309

SEQ ID NO: 311 - DNA, 103 bp, Homo sapiens; identical to SEQ ID NO: 309

SEQ ID NO: 312 - DNA, 103 bp, Homo sapiens; identical to SEQ ID NO: 309

SEQ ID NO: 313 - DNA, 103 bp, Homo sapiens; identical to SEQ ID NO: 309

SEQ ID NO: 314 - DNA, 103 bp, Homo sapiens; identical to SEQ ID NO: 309

SEQ ID NO: 315 - DNA, 103 bp, Homo sapiens; identical to SEQ ID NO: 309

SEQ ID NO: 316 - DNA, 103 bp, Homo sapiens; identical to SEQ ID NO: 309

SEQ ID NO: 317 - DNA, 103 bp, Homo sapiens; identical to SEQ ID NO: 309

SEQ ID NO: 318 - DNA, 73 bp, Homo sapiens
cagtgagattcacttcaaagtgaaaatgacaacacatctcaagaaactcaaagaatcatactgtcaaagacag

SEQ ID NO: 319 - DNA, 103 bp, Homo sapiens
ggttatatcctgtgttgtgacctcatggtttaagtgggaataaagatgagtataagcagtgatgaggtcaacttcttggtatatagatacttgcaagagtcag

SEQ ID NO: 320 - DNA, 103 bp, Homo sapiens; identical to SEQ ID NO: 319

SEQ ID NO: 321 - DNA, 103 bp, Homo sapiens; identical to SEQ ID NO: 319

SEQ ID NO: 322 - DNA, 103 bp, Homo sapiens; identical to SEQ ID NO: 319

SEQ ID NO: 323 - DNA, 137 bp, Homo sapiens
gttctcttgacacttcagtgttagggaacatcagcaagacccatcccaggagaccttgaaggaagcctttgaaagggagaatgaaggagtcatctttgcaaaatagctcctgcagcctgggaaaggagactaaaaag

SEQ ID NO: 324 - DNA, 90 bp, Homo sapiens
ggcagagtggagggcagcaaacaggagaatgagcaacctacctaggtccttgggatgcccctcaggaggacgagctctagggggaatgct

SEQ ID NO: 325 - DNA, 65 bp, Homo sapiens
agagttacagtggaggtaaaaggagtggcttgcaggatggagaagctgcaccagtgttattggaa

SEQ ID NO: 326 - DNA, 65 bp, Homo sapiens; identical to SEQ ID NO: 325

SEQ ID NO: 327 - DNA, 229 bp, Homo sapiens
gtcgaaggtttcctttaagatcacgctgacgtcggacccacggctgccgtacaaagtgtgagtagctcggccgagatgggccttttggggccggacaagacggggctgggttggggatgatccgagcttttccaacaactaccccacgcagtcttcatctcttcacttcatctactttcctggctcgcgcccttccaggagcctttcccaccggagcctgcgaggagag

SEQ ID NO: 328 - DNA, 196 bp, Homo sapiens
gcacttaagtattcatcgaagagtcaccccagtagcggtgatcacagacatgaaaagatgcgagacgccggagatccttcaccaccaaataaaatgttgcggagatctgatagtcctgaaaacaaatacagtgacagcacaggtcacagtaaggccaaaaatgtgcatactcacagagttagagagagggatggtg

SEQ ID NO: 329 - DNA, 637 bp, Homo sapiens
gtgctggcgggcgcagaggcctcccaggaggagagcaaggacctggcaggggctgctgaggaggaggagagcgggctgcccggggccgggcctggctcctgtgcttttggggaggagattcccatggatggggagcctcctgcctcctcgggcctggggctcccagactacacgtctggcgtcagcttccacgaccaggctgacctccctgagacagaggacttccaagccgggctctatgtgactgagtctccccagccccaggaggctgaggctgtgagcctgggccggctgagtgacaagagcagcaccagcgagacctccctgggtgaggagcgggctccagacgaggggggtgcccccgtggacaagagcagccttcgatcaggtgacagcagccaggacttgaagcaaagcgagggctccgaggaggaagaggaggaggaggacagctgcgtggtgctagaggaggaggagggggagcaggaggaggtcaccggggcatctgagctcactctgtctgacacggtgctgtccatggagacggttgtggccggcggcagtgggggagatggagaagaagaggaggaggcactgcctgagcagtcagaaggcaaagaacagaagatcctccttg

SEQ ID NO: 330 - DNA, 55 bp, Homo sapiens
tactggctaacaaactgaagcagctgcttgttattgggcatcagttatgtaccag

SEQ ID NO: 331 - DNA, 109 bp, Homo sapiens
gtggaaccagcagcatgagaacctggagaagctgaacatgcaagccatcctcgatgccacagtcagccagggcgagcccattcaggagctgctggtcacccatgggaag

SEQ ID NO: 332 - protein, 583 aa, Homo sapiens
MLSESKEGEEKEEVTMDTSENRPENDVPEPPMPIADQVSNDDRPEGSVEDEEKKESSLPKSFKRKISVVSATKGVPAGNSDTEGGQPGRKRRWGASTATTQKKPSISITTESLKSLIPDIKPLAGQEAVVDLHADDSRISEDETERNGDDGTHDKGLKICRTVTQVVPAEGQENGQREEEEEEKEPEAEPPVPPQVSVEVALPPPAEHEVKKVTLGDTLTRRSISQQKSGVSITIDDPVRTAQVPSPPRGKISNIVHISNLVRPFTLGQLKELLGRTGTLVEEAFWIDKIKSHCFVTYSTVEEAVATRTALHGVKWPQSNPKFLCADYAEQDELDYHRGLLVDRPSETKTEEQGIPRPLHPPPPPPVQPPQHPRAEQREQERAVREQWAEREREMERRERTRSEREWDRDKVREGPRSRSRSRDRRRKERAKSKEKKSEKKEKAQEEPPAKLLDDLFRKTKAAPCIYWLPLTDSQIVQKEAERAERAKEREKRRKEQEEEEQKEREKEAERERNRQLEREKRREHSRERDRERERERERDRGDRDRDRERDRERGRERDRRDTKRHSRSRSRSTPVRDRGGRR

SEQ ID NO: 333 - protein, 238 aa, Homo sapiens
MLLLEVISGERLAKPERGKMRVHKISNVNKALDFIASKGVKLVSIGAEEIVDGNVKMTLGMIWTIILRFAIQDISVEETSAKEGLLLWCQRKTAPYKNVNIQNFHISWKDGLGFCALIHRHRPELIDYGKLRKDDPLTNLNTAFDVAEKYLDIPKMLDAEDIVGTARPDEKAIMTYVSSFYHAFSGAQKAETAANRICKVLAVNQENEQLMEDYEKLASDLLEWIRRTIPWLENRVPE

SEQ ID NO: 334 - protein, 686 aa, Homo sapiens
MTYVSCFYHAFAGAEQVRQSLKAHSALWKDPPPESSTCSYQEMRRSSVNSSAMAETAANRICKVLAVNQENERLMEEYERLASELLEWIRRTIPWLENRTPEKTMQAMQKKLEDFRDYRRKHKPPKVQEKCQLEINFNTLQTKLRISNRPAFMPSEGKMVSDIAGAWQRLEQAEKGYEEWLLNEIRRLERLEHLAEKFRQKASTHETWAYGKEQILLQKDYESASLTEVRALLRKHEAFESDLAAHQDRVEQIAAIAQELNELDYHDAVNVNDRCQKICDQWDRLGTLTQKRREALERMEKLLETIDQLHLEFAKRAAPFNNWMEGAMEDLQDMFIVHSIEEIQSLITAHEQFKATLPEADGERQSIMAIQNEVEKVIQSYNIRISSSNPYSTVTMDELRTKWDKVKQLVPIRDQSLQEELARQHANERLRRQFAAQANAIGPWIQNKMEEIARSSIQITGALEDQMNQLKQYEHNIINYKNNIDKLEGDHQLIQEALVFDNKHTNYTMEHIRVGWELLLTTIARTINEVETQILTRDAKGITQEQMNEFRASFNHFDRRKNGLMDHEDFRACLISMGYDLGEAEFARIMTLVDPNGQGTVTFQSFIDFMTRETADTDTAEQVIASFRILASDKPYILAEELRRELPPDQAQYCIKRMPAYSGPGSVPGALDYAAFSSALYGESDL

SEQ ID NO: 335 - protein, 36 aa, Homo sapiens
MLVRGPHFELQRCKTHLFSSNYLTQREKLETLYQGY

SEQ ID NO: 336 - protein, 399 aa, Homo sapiens
MLVRGPHFELQRCKTHLFSSNYLTQVIKCKAAIAWEAGKPLCIEEVEVAPPKAHEVRIQIIATSLCHTDATVIDSKFEGLAFPVIVGHEAAGIVESIGPGVTNVKPGDKVIPLYAPLCRKCKFCLSPLTNLCGKISNLKSPASDQQLMEDKTSRFTCKGKPVYHFFGTSTFSQYTVVSDINLAKIDDDANLERVCLLGCGFSTGYGAAINNAKVTPGSTCAVFGLGGVGLSAVMGCKAAGASRIIGIDINSEKFVKAKALGATDCLNPRDLHKPIQEVIIELTKGGVDFALDCAGGSETMKAALDCTTAGWGSCTFIGVAAGSKGLTIFPEELIIGRTINGTFFGGWKSVDSIPKLVTDYKNKKFNLDALVTHTLPFDKISEAFDLMNQGKSVRTILIF

SEQ ID NO: 337 - protein, 133 aa, Homo sapiens
MKDGVPLPLPPSPVLILPEIGPQDQGTYSCVATHSSHGPQESRAVSISIIEPGEEGPTAGSVGGSGLGTLALALGILGGLGTAALLIGVILWQRRQRRGEERKAPENQEEEEERAELNQSEEPEAGESSTGGP

SEQ ID NO: 338 - protein, 155 aa, Homo sapiens
MQISQVPRSKALEVTKLAIEAGFRHIDSAHLYNNEEQVGLAIRSKIADGSVKREDIFYTSKLWSTFHRPELVRPALENSLKKAQLDYVDLYLIHSPMSLKPGEELSPTDENGKVIFDIVDLCTTWEAMEKCKDAGLAKSIGVSNFNRRQLEMILN

SEQ ID NO: 339 - protein, 497 aa, Homo sapiens
MKNQCETVWLKSPIKLKLIFINNEWQNSESGRVFPVYNPATGEQVCEVQEADKADIDKAVQAARLAFSLGSVWRRMDASERGRLLDKLADLVERDRAVLATMESLNGGKPFLQAFYVDLQGVIKTFRYYAGWADKIHGMTIPVDGDYFTFTRHEPIGVCGQIIPWNFPLLMFAWKIAPALCCGNTVVIKPAEQTPLSALYMGALIKEAGFPPGVINILPGYGPTAGAAIASHIGIDKIAFTGSTEVGKLIQEAAGRSNLKRVTLELGGKSPNIIFADADLDYAVEQAHQGVFFNQGQCCTAGSRIFVEESIYEEFVRRSVERAKRRVVGSPFDPTTEQGPQIDKKQYNKILELIQSGVAEGAKLECGGKGLGRKGFFIEPTVFSNVTDDMRIAKEEIFGPVQEILRFKTMDEVIERANNSDFGLVAAVFTNDINKALTVSSAMQAGTVWINCYNALNAQSPFGGFKMSGNGREMGEFGLREYSEVKTVTVKIPQKNS

SEQ ID NO: 340 - protein, 96 aa, Homo sapiens
MVVCIHHSTDFEVHRNWLAITHSLPISQWYYEATSEWTLDYPPFFAWFEYILSHVAKYFDQEMLNVHNLNYSSSRTLLFQRFSVIFMDVLFVYAVR

SEQ ID NO: 341 - protein, 879 aa, Homo sapiens
MRNRGQGLFRLRSRCFLHQSLPLGAGRRKGLDVAEPGPSRCRSDSPAVAAVVPAMASYPSGSGKPKAKYPFKKRASLQASTAAPEARGGLGAPPLQSARSLPGPAPCLKHFPLDLRTSMDGKCKEIAEELFTRSLAESELRSAPYEFPEESPIEQLEERRQRLERQISQDVKLEPDILLRAKQDFLKTDSDSDLQLYKEQGEGQGDRSLRERDVLEREFQRVTISGEEKCGVPFTDLLDAAKSVVRALFIREKYMALSLQSFCPTTRRYLQQLAEKPLETRTYEQGPDTPVSADAPVHPPALEQHPYEHCEPSTMPGDLGLGLRMVRGVVHVYTRREPDEHCSEVELPYPDLQEFVADVNVLMALIINGPIKSFCYRRLQYLSSKFQMHVLLNEMKELAAQKKVPHRDFYNIRKVDTHIHASSCMNQKHLLRFIKRAMKRHLEEIVHVEQGREQTLREVFESMNLTAYDLSVDTLDVHADRNTFHRFDKFNAKYNPIGESVLREIFIKTDNRVSGKYFAHIIKEVMSDLEESKYQNAELRLSIYGRSRDEWDKLARWAVMHRVHSPNVRWLVQVPRLFDVYRTKGQLANFQEMLENIFLPLFEATVHPASHPELHLFLEHVDGFDSVDDESKPENHVFNLESPLPEAWVEEDNPPYAYYLYYTFANMAMLNHLRRQRGFHTFVLRPHCGEAGPIHHLVSAFMLAENISHGLLLRKAPVLQYLYYLAQIGIAMSPLSNNSLFLSYHRNPLPEYLSRGLMVSLSTDDPLQFHFTKEPLMEEYSIATQVWKLSSCDMCELARNSVLMSGFSHKVKSHWLGPNYTKEGPEGNDIRRTNVPDIRVGYRYETLCQELALITQAVQSEMLETIPEEAGITMSPGPQ

SEQ ID NO: 342 - protein, 355 aa, Homo sapiens
MVAFAGWSLPVQYRDSHTDSHLHTRQHCSLFDVSHMLQTKILGSDRVKLMESLVVGDIAELRPNQGTLSLFTNEAGGILDDLIVTNTSEGHLYVVSNAGCWEKDLALMQDKVRELQNQGRDVGLEVLDNALLALQGPTAAQVLQAGVADDLRKLPFMTSAVMEVFGVSGCRVTRCGYTGEDGVEISVPVAGAVHLATAILKNPEVKLAGLAARDSLRLEAGLCLYGNDIDEHTTPVEGSLSWTLGKRRRAAMDFPGAKVIVPQLKGRVQRRRVGLMCEGAPMRAHSPILNMEGTKIGTVTSGCPSPSLKKNVAMGYVPCEYSRPGTMLLVEVRRKQQMAVVSKMPFVPTNYYTLK

SEQ ID NO: 343 - protein, 338 aa, Homo sapiens
MVAFAGWSLPVQYRDSHTDSHLHTRQHCSLFDVSHMLQTKILGSDRVKLMESLVVGDIAELRPNQGTLSLFTNEAGGILDDLIVTNTSEGHLYVVSNAGCWEKDLALMQDKVRELQNQGRDVGLEVLDNALLALQGPTAAQVLQAGVADDLRKLPFMTSAVMEVFGVSGCRVTRCGYTGEDGVEISVPVAGAVHLATAILKNPEVKLAGLAARDSLRLEAGLCLYGNDIDEHTTPVEGSLSWTLGKRRRAAMDFPGAKVIVPQLKGRVQRRRVGLMCEGAPMRAHSPILNMEGTKIGTVTSGCPSPSLKKNVAMGYVPCEYSRPGTMLLVELPSGPCF

SEQ ID NO: 344 - protein, 351 aa, Homo sapiens
MVAFAGWSLPVQYRDSHTDSHLHTRQHCSLFDVSHMLQTKILGSDRVKLMESLVVGDIAELRPNQGTLSLFTNEAGGILDDLIVTNTSEGHLYVVSNAGCWEKDLALMQDKVRELQNQGRDVGLEVLDNALLALQAQVLQAGVADDLRKLPFMTSAVMEVFGVSGCRVTRCGYTGEDGVEISVPVAGAVHLATAILKNPEVKLAGLAARDSLRLEAGLCLYGNDIDEHTTPVEGSLSWTLGKRRRAAMDFPGAKVIVPQLKGRVQRRRVGLMCEGAPMRAHSPILNMEGTKIGTVTSGCPSPSLKKNVAMGYVPCEYSRPGTMLLVEVRRKQQMAVVSKMPFVPTNYYTLK

SEQ ID NO: 345 - protein, 944 aa, Homo sapiens
MPKGGCPKAPQQEELPLSSDMVEKQTGKKDKDKVSLTKTPKLERGDGGKEVRERASKRKLPFTAGANGEQKDSDTGWTALHEACNRGYYDVAKQLLAAGAEVNTKGLDDDTPLHDAANNGHYKVVKLLLRYGGNPQQSNRKGETPLKVANSPTMVNLLLGKGTYTSSEESSTESSEEEDAPSFAPSSSVDGNNTDSEFEKGLKHKAKNPEPQKATAPVKDEYEFDEDDEQDRVPPVDDKHLLKKDYRKETKSNSFISIPKMEVKSYTKNNTIAPKKASHRILSDTSDEEDASVTVGTGEKLRLSAHTILPGSKTREPSNAKQQKEKNKVKKKRKKETKGREVRFGKRSDKFCSSESESESSESGEDDRDSLGSSGCLKGSPLVLKDPSLFSSLSASSTSSHGSSAAQKQNPSHTDQHTKHWRTDNWKTISSPAWSEVSSLSDSTRTRLTSESDYSSEGSSVESLKPVRKRQEHRKRASLSEKKSPFLSSAEGAVPKLDKEGKVVKKHKTKHKHKNKEKGQCSISQELKLKSFTYEYEDSKQKSDKAILLENDLSTENKLKVLKHDRDHFKKEEKLSKMKLEEKEWLFKDEKSLKRIKDTNKDISRSFREEKDRSNKAEKERSLKEKSPKEEKLRLYKEERKKKSKDRPSKLEKKNDLKEDKISKEKEKIFKEDKEKLKKEKVYREDSAFDEYCNKNQFLENEDTKFSLSDDQRDRWFSDLSDSSFDFKGEDSWDSPVTDYRDMKSDSVAKLILETVKEDSKERRRDSRAREKRDYREPFFRKKDRDYLDKNSEKRKEQTEKHKSVPGYLSEKDKKRRESAEAGRDRKDALESCKERRDGRAKPEEAHREELKECGCESGFKDKSDGDFGKGLEPWERHHPAREKEKKDGPDKERKEKTKPERYKEKSSDKDKSEKSILEKCQKDKEFDKCFKEKKDTKEKHKDT

SEQ ID NO: 346 - protein, 2663 aa, Homo sapiens
MPKGGCPKAPQQEELPLSSDMVEKQTGKKDKDKVSLTKTPKLERGDGGKEVRERASKRKLPFTAGANGEQKDSDTEKQGPERKRIKKEPVTRKAGLLFGMGLSGIRAGYPLSERQQVALLMQMTAEESANSPVDTTPKHPSQSTVCQKGTPNSASKTKDKVNKRNERGETRLHRAAIRGDARRIKELISEGADVNVKDFAGWTALHEACNRGYYDVAKQLLAAGAEVNTKGLDDDTPLHDAANNGHYKVVKLLLRYGGNPQQSNRKGETPLKVANSPTMVNLLLGKGTYTSSEESSTESSEEEDAPSFAPSSSVDGNNTDSEFEKGLKHKAKNPEPQKATAPVKDEYEFDEDDEQDRVPPVDDKHLLKKDYRKETKSNSFISIPKMEVKSYTKNNTIAPKKASHRILSDTSDEEDASVTVGTGEKLRLSAHTILPGSKTREPSNAKQQKEKNKVKKKRKKETKGREVRFGKRSDKFCSSESESESSESGEDDRDSLGSSGCLKGSPLVLKDPSLFSSLSASSTSSHGSSAAQKQNPSHTDQHTKHWRTDNWKTISSPAWSEVSSLSDSTRTRLTSESDYSSEGSSVESLKPVRKRQEHRKRASLSEKKSPFLSSAEGAVPKLDKEGKVVKKHKTKHKHKNKEKGQCSISQELKLKSFTYEYEDSKQKSDKAILLENDLSTENKLKVLKHDRDHFKKEEKLSKMKLEEKEWLFKDEKSLKRIKDTNKDISRSFREEKDRSNKAEKERSLKEKSPKEEKLRLYKEERKKKSKDRPSKLEKKNDLKEDKISKEKEKIFKEDKEKLKKEKVYREDSAFDEYCNKNQFLENEDTKFSLSDDQRDRWFSDLSDSSFDFKGEDSWDSPVTDYRDMKSDSVAKLILETVKEDSKERRRDSRAREKRDYREPFFRKKDRDYLDKNSEKRKEQTEKHKSVPGYLSEKDKKRRESAEAGRDRKDALESCKERRDGRAKPEEAHREELKECGCESGFKDKSDGDFGKGLEPWERHHPAREKEKKDGPDKERKEKTKPERYKEKSSDKDKSEKSILEKCQKDKEFDKCFKEKKDTKEKHKDTHGKDKERKASLDQGKEKKEKAFPGIISEDFSEKKDDKKGKEKSWYIADIFTDESEDDRDSCMGSGFKMGEASDLPRTDGLQEKEEGREAYASDRHRKSSDKQHPERQKDKEPRDRRKDRGAADAGRDKKEKVFEKHKEKKDKESTEKYKDRKDRASVDSTQDKKNKQKLPEKAEKKHAAEDKAKSKHKEKSDKEHSKERKSSRSADAEKSLLEKLEEEALHEYREDSNDKISEVSSDSFTDRGQEPGLTAFLEVSFTEPPGDDKPRESACLPEKLKEKERHRHSSSSSKKSHDRERAKKEKAEKKEKGEDYKEGGSRKDSGQYEKDFLEADAYGVSYNMKADIEDELDKTIELFSTEKKDKNDSEREPSKKIEKELKPYGSSAINILKEKKKREKHREKWRDEKERHRDRHADGLLRHHRDELLRHHRDEQKPATRDKDSPPRVLKDKSRDEGPRLGDAKLKEKFKDGAEKEKGDPVKMSNGNDKVAPSKDPGKKDARPREKLLGDGDLMMTSFERMLSQKDLEIEERHKRHKERMKQMEKLRHRSGDPKLKEKAKPADDGRKKGLDIPAKKPPGLDPPFKDKKLKESTPIPPAAENKLHPASGADSKDWLAGPHMKEVLPASPRPDQSRPTGVPTPTSVLSCPSYEEVMHTPRTPSCSADDYADLVFDCADSQHSTPVPTAPTSACSPSFFDRFSVASSGLSENASQAPARPLSTNLYRSVSVDIRRTPEEEFSVGDKLFRQQSVPAASSYDSPMPPSMEDRAPLPPVPAEKFACLSPGYYSPDYGLPSPKVDALHCPPAAVVTVTPSPEGVFSSLQAKPSPSPRAELLVPSLEGALPPDLDTSEDQQATAAIIPPEPSYLEPLDEGPFSAVITEEPVEWAHPSEQALASSLIGGTSENPVSWPVGSDLLLKSPQRFPESPKRFCPADPLHSAAPGPFSASEAPYPAPPASPAPYALPVAEPGLEDVKDGVDAVPAAISTSEAAPYAPPSGLESFFSNCKSLPEAPLDVAPEPACVAAVAQVEALGPLENSFLDGSRGLSHLGQVEPVPWADAFAGPEDDLDLGPFSLPELPLQTKDAADGEAEPVEESLAPPEEMPPGAPGVINGGDVSTVVAEEPPALPPDQASTRLPAELEPEPSGEPKLDVALEAAVEAETVPEERARGDPDSSVEPAPVPPEQRPLGSGDQGAEAEGPPAASLCAPDGPAPNTVAQAQAADGAGPEDDTEASRAAAPAEGPPGGIQPEAAEPKPTAEAPKAPRVEEIPQRMTRNRAQMLANQSKQGPPPSEKECAPTPAPVTRAKARGSEDDDAQAQHPRKRRFQRSTQQLQQQLNTSTQQTREVIQQTLAAIVDAIKLDAIEPYHSDRANPYFEYLQIRKKIEEKRKILCCITPQAPQCYAEYVTYTGSYLLDGKPLSKLHIPVIAPPPSLAEPLKELFRQQEAVRGKLRLQHSIEREKLIVSCEQEILRVHCRAARTIANQAVPFSACTMLLDSEVYNMPLESQGDENKSVRDRFNARQFISWLQDVDDKYDRMKTCLLMRQQHEAAALNAVQRMEWQLKVQELDPAGHKSLCVNEVPSFYVPMVDVNDDFVLLPA

SEQ ID NO: 347 - protein, 162 aa, Homo sapiens
MPKGGCPKAPQQEELPLSSDMVEKQTGKKDKDKVSLTKTPKLERGDGGKEVRERASKRKLPFTAGANGEQKDSDTVLCVDAFRCLQPSPCCGAARLVRSSKHHGMRWRFLEARRKRSRALSGRGLRRSLSPGRPGCCLAWGCLESEPATPSPSASRWPFSCR

SEQ ID NO: 348 - protein, 97 aa, Homo sapiens
MPKGGCPKAPQQEELPLSSDMVEKQTGKKDKDKVSLTKTPKLERGDGGKEVRERASKRKLPFTAGANGEQKDSDTDASSPVPVVVLQGWYAPRSTMA

SEQ ID NO: 349 - protein, 366 aa, Homo sapiens [sequence omitted]

SEQ ID NO: 350 - protein, 272 aa, Homo sapiens
MPKGGCPKAPQQEELPLSSDMVEKQTGKKDKDKVSLTKTPKLERGDGGKEVRERASKRKLPFTAGANGEQKDSDTEKQGPERKRIKKEPVTRKAGLLFGMGLSGIRAGYPLSERQQVALLMQMTAEESANSPVDTTPKHPSQSTVCQKGTPNSASKTKDKVNKRNERGETRLHRAAIRGDARRIKELISEGADVNVKDFAGWTALHEACNRGYYDVAKQLLAAGAEVNTKGLDDDTPLHDAANNGHYKVKDYTKWKEACRSCCRSPSPLWDC

SEQ ID NO: 351 - protein, 2663 aa, Homo sapiens; identical to SEQ ID NO: 346

SEQ ID NO: 352 - protein, 97 aa, Homo sapiens; identical to SEQ ID NO: 348

SEQ ID NO: 353 - protein, 88 aa, Homo sapiens
MPKGGCPKAPQQEELPLSSDMVEKQTGKKDKDKVSLTKTPKLERGDGGKEVRERASKRKLPFTAGANGEQKDSDTERWARARPRTRPL

SEQ ID NO: 354 - protein, 267 aa, Homo sapiens
MPKGGCPKAPQQEELPLSSDMVEKQTGKKDKDKVSLTKTPKLERGDGGKEVRERASKRKLPFTAGANGEQKDSDTEKQGPERKRIKKEPVTRKAGLLFGMGLSGIRAGYPLSERQQVALLMQMTAEESANSPVDTTPKHPSQSTVCQKGTPNSASKTKDKVNKRNERGETRLHRAAIRGDARRIKELISEGADVNVKDFAGWTALHEACNRGYYDVAKQLLAAGAEVNTKGLDDDTPLHDAANNGHYKVGIPPFFTHPACPGIWVVL

SEQ ID NO: 355 - protein, 267 aa, Homo sapiens; identical to SEQ ID NO: 354

SEQ ID NO: 356 - protein, 97 aa, Homo sapiens; identical to SEQ ID NO: 348

SEQ ID NO: 357 - protein, 124 aa, Homo sapiens
MPKGGCPKAPQQEELPLSSDMVEKQTGKKDKDKVSLTKTPKLERGDGGKEVRERASKRKLPFTAGANGEQKDSDTGPPGSCLSWGSHEGALVRSAMGRSCLPSARGCFFGTRGKIMIFLFCFDL

SEQ ID NO: 358 - protein, 2663 aa, Homo sapiens; identical to SEQ ID NO: 346

SEQ ID NO: 359 - protein, 527 aa, Homo sapiens
MKDIQGWTALFHCTSAGHQHMVRFLLDSGANANVREPICGFTPLMEAAAAGHEIIVQYFLNHGVKVDARDHSGATARMLAKQYGHMKIVALMDTYSPSLPKSLYRSPEKYEDLSSSDESCPAPQRQRPCRKKGVSIHEGPRALARITGIGLGGRAPRPRYEQAPPRGYVTFNSSGENPLEEEGLCCRDVTSPINERDVESSSSSSSREEHAFCANLGPVQSSSSSEGLARAQGLSSEASVESNEDSDHACKSSARKQAKSYMKTKNPDSQWPPRAATDREGFLAESSPQTQRAPYSGPQDLAALLEQIGCLKYLQVFEEQDVDLRIFLTLTESDLKEIGITLFGPKRKMTSAIARWHSSARPPGDALELAYADRLEAEMQELAIQLHKRCEEVEATRGQVCQEQELRAVVESCLLEQDRAREDLQARLRETWALARDAALVLDQLRACQAELSSRVRQDQPPGAATLGLAVPPADSKGWQASLQAMSLPELSGALEDRVREMGQALCLVTQSLEKLQVLNGKKWRET

SEQ ID NO: 360 - protein, 72 aa, Homo sapiens
MGSWVQLITSVGVQQNHPGWTVAGQFQEKKRFTEEVIEYFQKKVSPVHLKILLTSDEAWKRFVRVAELPREE

SEQ ID NO: 361 - protein, 133 aa, Homo sapiens
MTRSLLGVFEEDATAISNYMNQLYQAMHRIYDAQNELSAATHLTSKLLKEYEKQRFPLGGDDEVMSSTLQQFSKVIDELSSCHAVLSTQLADAMMFPITQFKERDLKEILTLKEVFQIASNDHDAAINRYSRL

SEQ ID NO: 362 - protein, 552 aa, Homo sapiens
MAECNLVAILISSIDNPLDKNLDNGGNSCLDFRPLNSFSQPQVLLAAAVCTKAGKAIVSRQFVEMTRTRIEGLLAAFPKLMNTGKQHTFVETESVRYVYQPMEKLYMVLITTKNSNILEDLETLRLFSRVIPEYCRALEENEISEHCFDLIFAFDEIVALGYRENVNLAQIRTFTEMDSHEEKVFRAVRETQEREAKAEMRRKAKELQQARRDAERQGKKAPGFGGFGSSAVSGGSTAAMITETIIETDKPKVAPAPARPSGPSKALKLGAKGKEVDNFVDKLKSEGETIMSSSMGKRTSEATKMHAPPINMESVHMKIEEKITLTCGRDGGLQNMELHGMIMLRISDDKYGRIRLHVENEDKKGVQLQTHPNVDKKLFTAESLIGLKNPEKSFPVNSDVGVLKWRLQTTEESFIPLTINCWPSESGNGCDVNIEYELQEDNLELNDVVITIPLPSGVGAPVIGEIDGEYRHDSRRNTLEWCLPVIDAKNKSGSLEFSIAGQPNDFFPVQVSFVSKKNYCNIQVTKVTQVDGNSPVRFSTETTFLVDKYEIL

SEQ ID NO: 363 - protein, 659 aa, Homo sapiens
MEVTASSRHYVDRLFDPDPQKVLQGVIDMKNAVIGNNKQKANLIVLGAVPRLLYLLQQETSSTELKTECAVVLGSLAMGTENNVKSLLDCHIIPALLQGLLSPDLKFIEACLRCLRTIFTSPVTPEELLYTDATVIPHLMALLSRSRYTQEYICQIFSHCCKGPDHQTILFNHGAVQNIAHLLTSLSYKVRMQALKCFSVLAFENPQVSMTLVNVLVDGELLPQIFVKMLQRDKPIEMQLTSAKCLTYMCRAGAIRTDDNCIVLKTLPCLVRMCSKERLLEERVEGAETLAYLIEPDVELQRIASITDHLIAMLADYFKYPSSVSAITDIKRLDHDLKHAHELRQAAFKLYASLGANDEDIRKKIIETENMMDRIVTGLSESSVKVRLAAVRCLHSLSRSVQQLRTSFQDHAVWKPLMKVLQNAPDEILVVASSMLCNLLLEFSPSKEPILESGAVELLCGLTQSENPALRVNGIWALMNMAFQAEQKIKADILRSLSTEQLFRLLSDSDLNVLMKTLGLLRNLLSTRPHIDKIMSTHGKQIMQAVTLILEGEHNIEVKEQTLCILANIADGTTAKDLIMTNDDILQKIKYYMGHSHVKLQLAAMFCISNLIWNEEEGSQERQDKLRDMGIVDILHKLSQSPDSNLCDKAKMALQQYLA

SEQ ID NO: 364 - protein, 385 aa, Homo sapiens
MEVTASSRHYVDRLFDPDPQKVLQGVIDMKNAVIGNNKQKANLIVLGAVPRLLYLLQQETSSTELKTECAVVLGSLAMGTENNVKSLLDCHIIPALLQGLLSPDLKFIEACLRCLRTIFTSPVTPEELLYTDATVIPHLMALLSRSRYTQEYICQIFSHCCKGPDHQTILFNHGAVQNIAHLLTSLSYKVRMQALKCFSVLAFENPQVSMTLVNVLVDGELLPQIFVKMLQRDKPIEMQLTSAKCLTYMCRAGAIRTDDNCIVLKTLPCLVRMCSKERLLEERVEGAETLAYLIEPDVELQRIASITDHLIAMLADYFKYPSSVSAITDIKRLDHDLKHAHELRQAAFKLYASLGANDEDIRKKVSLGEGRPPVLTASRQGVTST

SEQ ID NO: 365 - protein, 582 aa, Homo sapiens
MINIESMDTDKDDPHGRLEYTEHQGRIKNAREAHSQIEKRRRDKMNSFIDELASLVPTCNAMSRKLDKLTVLRMAVQHMKTLRGATNPYTEANYKPTFLSDDELKHLILRAADGFLFVVGCDRGKILFVSESVFKILNYSQNDLIGQSLFDYLHPKDIAKVKEQLSSSDTAPRERLIDAKTGLPVKTDITPGPSRLCSGARRSFFCRMKCNRPSVKVEDKDFPSTCSKKKDRKSFCTIHSTGYLKSWPPTKMGLDEDNEPDNEGCNLSCLVAIGRLHSHVVPQPVNGEIRVKSMEYVSRHAIDGKFVFVDQRATAILAYLPQELLGTSCYEYFHQDDIGHLAECHRQVLQTREKITTNCYKFKIKDGSFITLRSRWFSFMNPWTKEVEYIVSTNTVVLANVLEGGDPTFPQLTASPHSMDSMLPSGEGGPKRTHPTVPGIPGGTRAGAGKIGRMIAEEIMEIHRIRGSSPSSCGSSPLNITSTPPPDASSPGGKKILNGGTPDIPSSGLLSGQAQENPGYPYSDSSSILGENPHIGIDMIDNDQGSSSPSNDEAAMAVIMSLLEADAGLGGPVDFSDLPWPL

SEQ ID NO: 366 - protein, 141 aa, Homo sapiens
MINIESMDTDKDDPHGRLEYTEHQGRIKNAREAHSQIEKRRRDKMNSFIDELASLVPTCNAMSRKLDKLTVLRMAVQHMKTLRGATNPYTEANYKPTFLSDDELKHLILRAADGFLFVVGCDRGKILFVSESVFKILNYSQ

SEQ ID NO: 367 - protein, 84 aa, Homo sapiens
MLRGTMTAWRGMRPEVTLACLLLATAGCFADLNEVPQVTVQPASTVQKPGGTVILGCVVEPPRMNVTWRLNGKELNGSDDALGV

SEQ ID NO: 368 - protein, 1115 aa, Homo sapiens
MLRGTMTAWRGMRPEVTLACLLLATAGCFADLNEVPQVTVQPASTVQKPGGTVILGCVVEPPRMNVTWRLNGKELNGSDDALGVLITHGTLVITALNNHTVGRYQCVARMPAGAVASVPATVTLANLQDFKLDVQHVIEVDEGNTAVIACHLPESHPKAQVRYSVKQEWLEASRGNYLIMPSGNLQIVNASQEDEGMYKCAAYNPVTQEVKTSGSSDRLRVRRSTAEAARIIYPPEAQTIIVTKGQSLILECVASGIPPPRVTWAKDGSSVTGYNKTRFLLSNLLIDTTSEEDSGTYRCMADNGVGQPGAAVILYNVQVFEPPEVTMELSQLVIPWGQSAKLTCEVRGNPPPSVLWLRNAVPLISSQRLRLSRRALRVLSMGPEDEGVYQCMAENEVGSAHAVVQLRTSRPSITPRLWQDAELATGTPPVSPSKLGNPEQMLRGQPALPRPPTSVGPASPQCPGEKGQGAPAEAPIILSSPRTSKTDSYELVWRPRHEGSGRAPILYYVVKHRKQVTNSSDDWTISGIPANQHRLTLTRLDPGSLYEVEMAAYNCAGEGQTAMVTFRTGRRPKPEIMASKEQQIQRDDPGASPQSSSQPDHGRLSPPEAPDRPTISTASETSVYVTWIPRGNGGFPIQSFRVEYKKLKKVGDWILATSAIPPSRLSVEITGLEKGTSYKFRVRALNMLGESEPSAPSRPYVVSGYSGRVYERPVAGPYITFTDAVNETTIMLKWMYIPASNNNTPIHGFYIYYRPTDSDNDSDYKKDMVEGDKYWHSISHLQPETSYDIKMQCFNEGGESEFSNVMICETKARKSSGQPGRLPPPTLAPPQPPLPETIERPVGTGAMVARSSDLPYLIVGVVLGSIVLIIVTFIPFCLWRAWSKQKHTTDLGFPRSALPPSCPYTMVPLGGLPGHQASGQPYLSGISGRACANGIHMNRGCPSAAVGYPGMKPQQHCPGELQQQSDTSSLLRQTHLGNGYDPQSHQITRGPKSSPDEGSFLYTLPDDSTHQLLQPHHDCCQRQEQPAAVGQSGVRRAPDSPVLEAVWDPPFHSGPPCCLGLVPVEEVDSPDSCQVSGGDWCPQHPVGAYVGQEPGMQLSPGPLVRVSFETPPLTI

SEQ ID NO: 369 - protein, 157 aa, Homo sapiens
MLRGTMTAWRGMRPEVTLACLLLATAGCFADLNEVPQVTVQPASTVQKPGGTVILGCVVEPPRMNVTWRLNGKELNGSDDALGVLITHGTLVITALNNHTVGRYQCVARMPAGAVASVPATVTLASESAPLPPCHGAVPPHLSHPEAPTIHAASCYS

SEQ ID NO: 370 - protein, 1114 aa, Homo sapiens
MLRGTMTAWRGMRPEVTLACLLLATAGCFADLNEVPQVTVQPASTVQKPGGTVILGCVVEPPRMNVTWRLNGKELNGSDDALGVLITHGTLVITALNNHTVGRYQCVARMPAGAVASVPATVTLANLQDFKLDVQHVIEVDEGNTAVIACHLPESHPKAQVRYSVKQEWLEASRGNYLIMPSGNLQIVNASQEDEGMYKCAAYNPVTQEVKTSGSSDRLRVRRSTAEAARIIYPPEAQTIIVTKGQSLILECVASGIPPPRVTWAKDGSSVTGYNKTRFLLSNLLIDTTSEEDSGTYRCMADNGVGQPGAAVILYNVQVFEPPEVTMELSQLVIPWGQSAKLTCEVRGNPPPSVLWLRNAVPLISSQRLRLSRRALRVLSMGPEDEGVYQCMAENEVGSAHAVVQLRTSRPSITPRLWQDAELATGTPPVSPSKLGNPEQMLRGQPALPRPPTSVGPASPQCPGEKGQGAPAEAPIILSSPRTSKTDSYELVWRPRHEGSGRAPILYYVVKHRKVTNSSDDWTISGIPANQHRLTLTRLDPGSLYEVEMAAYNCAGEGQTAMVTFRTGRRPKPEIMASKEQQIQRDDPGASPQSSSQPDHGRLSPPEAPDRPTISTASETSVYVTWIPRGNGGFPIQSFRVEYKKLKKVGDWILATSAIPPSRLSVEITGLEKGTSYKFRVRALNMLGESEPSAPSRPYVVSGYSGRVYERPVAGPYITFTDAVNETTIMLKWMYIPASNNNTPIHGFYIYYRPTDSDNDSDYKKDMVEGDKYWHSISHLQPETSYDIKMQCFNEGGESEFSNVMICETKARKSSGQPGRLPPPTLAPPQPPLPETIERPVGTGAMVARSSDLPYLIVGVVLGSIVLIIVTFIPFCLWRAWSKQKHTTDLGFPRSALPPSCPYTMVPLGGLPGHQASGQPYLSGISGRACANGIHMNRGCPSAAVGYPGMKPQQHCPGELQQQSDTSSLLRQTHLGNGYDPQSHQITRGPKSSPDEGSFLYTLPDDSTHQLLQPHHDCCQRQEQPAAVGQSGVRRAPDSPVLEAVWDPPFHSGPPCCLGLVPVEEVDSPDSCQVSGGDWCPQHPVGAYVGQEPGMQLSPGPLVRVSFETPPLTI

SEQ ID NO: 371 - protein, 1816 aa, Homo sapiens
MLKLLNQKKGPSQCPLCKNDITKRSLQESTRFSQLVEELLKIICAFQLDTGLEYANSYNFAKKENNSPEHLKDEVSIIQSMGYRNRAKRLLQSEPENPSLQETSLSVQLSNLGTVRTLRTKQRIQPQKTSVYIELGSDSSEDTVNKATYCSVGDQELLQITPQGTRDEISLDSAKKAACEFSETDVTNTEHHQPSNNDLNTTEKRAAERHPEKYQGSSVSNLHVEPCGTNTHASSLQHENSSLLLTKDRMNVEKAEFCNKSKQPGLARSQHNRWAGSKETCNDRRTPSTEKKVDLNADPLCERKEWNKQKLPCSENPRDTEDVPWITLNSSIQKVNEWFSRSDELLGSDDSHDGESESNAKVADVLDVLNEVDEYSGSSEKIDLLASDPHEALICKSERVHSKSVESNIEDKIFGKTYRKKASLPNLSHVTENLIIGAFVTEPQIIQERPLTNKLKRKRRPTSGLHPEDFIKKADLAVQKTPEMINQGTNQTEQNGQVMNITNSGHENKTKGDSIQNEKNPNPIESLEKESAFKTKAEPISSSISNMELELNIHNSKAPKKNRLRRKSSTRHIHALELVVSRNLSPPNCTELQIDSCSSSEEIKKKKYNQMPVRHSRNLQLMEGKEPATGAKKSNKPNEQTSKRHDSDTFPELKLTNAPGSFTKCSNTSELKEFVNPSLPREEKEEKLETVKVSNNAEDPKDLMLSGERVLQTERSVESSSISLVPGTDYGTQESISLLEVSTLGKAKTEPNKCVSQCAAFENPKGLIHGCSKDNRNDTEGFKYPLGHEVNHSRETSIEMEESELDAQYLQNTFKVSKRQSFAPFSNPGNAEEECATFSAHSGSLKKQSPKVTFECEQKEENQGKNESNIKPVQTVNITAGFPVVGQKDKPVDNAKCSIKGGSRFCLSSQFRGNETGLITPNKHGLLQNPYRIPPLFPIKSFVKTKCKKNLLEENFEEHSMSPEREMGNENIPSTVSTISRNNIRENVFKEASSSNINEVGSSTNEVGSSINEIGSSDENIQAELGRNRGPKLNAMLRLGVLQPEVYKQSLPGSNCKHPEIKKQEYEEVVQTVNTDFSPYLISDNLEQPMGSSHASQVCSETPDDLLDDGEIKEDTSFAENDIKESSAVFSKSVQKGELSRSPSPFTHTHLAQGYRRGAKKLESSEENLSSEDEELPCFQHLLFGKVNNIPSQSTRHSTVATECLSKNTEENLLSLKNSLNDCSNQVILAKASQEHHLSEETKCSASLFSSQCSELEDLTANTNTQDPFLIGSSKQMRHQSESQGVGLSDKELVSDDEERGTGLEENNQEEQSMDSNLGEAASGCESETSVSEDCSGLSSQSDILTTQQRDTMQHNLIKLQQEMAELEAVLEQHGSQPSNSYPSIISDSSALEDLRNPEQSTSEKAVLTSQKSSEYPISQNPEGLSADKFEVSADSSTSKNKEPGVERSSPSKCPSLDDRWYMHSCSGSLQNRNYPSQEELIKVVDVEEQQLEESGPHDLTETSYLPRQDLEGTPYLESGISLFSDDPESDPSEDRAPESARVGNIPSSTSALKVPQLKVAESAQSPAAAHTTDTAGYNAMEESVSREKPELTASTERVNKRMSMVVSGLTPEEFMLVYKFARKHHITLTNLITEETTHVVMKTDAEFVCERTLKYFLGIAGGKWVVSYFWVTQSIKERKMLNEHDFEVRGDVVNGRNHQGPKRARESQDRKIFRGLEICCYGPFTNMPTDQLEWMVQLCGASVVKELSSFTLGTGVHPIVVVQPDAWTEDNGFHAIGQMCEAPVVTREWVLDSVALYQCQELDTYLIPQIPHSHY

SEQ ID NO: 372 - protein, 572 aa, Homo sapiens
MLKLLNQKKGPSQCPLCKNDITKRSLQESTRFSQLVEELLKIICAFQLDTGLEYANSYNFAKKENNSPEHLKDEVSIIQSMGYRNRAKRLLQSEPENPSLQETSLSVQLSNLGTVRTLRTKQRIQPQKTSVYIELGSDSSEDTVNKATYCSVGDQELLQITPQGTRDEISLDSAKKAACEFSETDVTNTEHHQPSNNDLNTTEKRAAERHPEKYQGEAASGCESETSVSEDCSGLSSQSDILTTQQRDTMQHNLIKLQQEMAELEAVLEQHGSQPSNSYPSIISDSSALEDLRNPEQSTSEKAVLTSQKSSEYPISQNPEGLSADKFEVSADSSTSKNKEPGVERSSPSKCPSLDDRWYMHSCSGSLQNRNYPSQEELIKVVDVEEQQLEESGPHDLTETSYLPRQDLEGTPYLESGISLFSDDPESDPSEDRAPESARVGNIPSSTSALKVPQLKVAESAQSPAAAHTTDTAGYNAMEESVSREKPELTASTERVNKRMSMVVSGLTPEEFMLVYKFARKHHITLTNLITEETTHVVMKTDAEFVCERTLKYFLGIAGGKWVVSYFWVTQS

SEQ ID NO: 373 - protein, 529 aa, Homo sapiens
MDTCMTLAFTLSGRFFMLLSQYRYAYLLQPSQFHGEPCNFSDKEVEDCVTNRPCGSQVRCEGFVCAQTGRCVNRRLLCNGDNDCGDQSDEANCRRIYKKCQHEMDQYWGIGSLASGINLFTNSFEGPVLDHRYYAGGCSPHYILNTRFRKPYNVESYTPQTQGKYEFILKEYESYSDFERNVTEKMASKSGFSFGFKIPGIFELGISSQSDRGKHYIRRTKRFSHTKSVFLHARSDLEVAHYKLKPRSLMLHYEFLQRVKRLPLEYSYGEYRDLFRDFGTHYITEAVLGGIYEYTLVMNKEAMERGDYTLNNVHACAKNDFKIGGAIEEVYVSLGVSVGKCRGILNEIKDRNKRDTMVEDLVVLVRGGASEHITTLAYQELPTADLMQEWGDAVQYNPAIIKVKVEPLYELVTATDFAYSSTVRQNMKQALEEFQKEVSSCHCAPCQGNGVPVLKGSRCDCICPVGSQGLACEVSYRKNTPIDGKWNCWSNWSSCSGRRKTRQRQCNNPPPQNGGSPCSGPASETLDCS

SEQ ID NO: 374 - protein, 529 aa, Homo sapiens; identical to SEQ ID NO: 373

SEQ ID NO: 375 - protein, 150 aa, Homo sapiens
MQADQLTEEQIAEFKEAFSLFDKDGDGTITTKELGTVMRSLGQNPTEAELQDMINEVDADGNGTIDFPEFLTMMARKMKDTDSEEEIREAFRVFDKDGNGYISAAELRHVMTNLGEKLTDEEVDEMIREADIDGDGQVNYEEFVQMMTAK

SEQ ID NO: 376 - protein, 113 aa, Homo sapiens
MRSLGQNPTEAELQDMINEVDADGNGTIDFPEFLTMMARKMKDTDSEEEIREAFRVFDKDGNGYISAAELRHVMTNLGEKLTDEEVDEMIREADIDGDGQVNYEEFVQMMTAK

SEQ ID NO: 377 - protein, 165 aa, Homo sapiens
MFKGILQSGLDNFVINHMLKNNVAGQTSIQTLVPNTDQKSTSVKKDNHKKKTVKMLEYLGKDVLHGVFNYLAKHDVLTLKEEEKKKYYDTKIEDKALILVDSLRKNRVAHQMFTQTLLNMDQKITSVKPLLQIEAGPPESAESTNILKLCPREEFLRLCKKNHDE

SEQ ID NO: 378 - protein, 693 aa, Homo sapiens
MEGPHLPNKKKHKKQAVKTEPEKKSQSTKLSVVHEKKSQEGKPKEHTEPKSLPKQASDTGSNDAHNKKAVSRSAEQQPSEKSTEPKTKPQDMISAGGESVAGITAISGKPGDKKKEKKSLTPAVPVESKPDKPSGKSGMDAALDDLIDTLGGPEETEEENTTYTGPEVSDPMSSTYIEELGKREVTIPPKYRELLAKKEGITGPPADSSKPIGPDDAIDALSSDFTCGSPTAAGKKTEKEESTEVLKAQSAGTVRSAAPPQEKKRKVEKDTMSDQALEALSASLGTRQAEPELDLRSIKEVDEAKAKEEKLEKCGEDDETIPSEYRLKPATDKDGKPLLPEPEEKPKPRSESELIDELSEDFDRSECKEKPSKPTEKTEESKAAAPAPVSEAVCRTSMCSIQSAPPEPATLKGTVPDDAVEALADSLGKKEADPEDGKPVMDKVKEKAKEEDREKLGEKEETIPPDYRLEEVKDKDGKPLLPKESKEQLPPMSEDFLLDALSEDFSGPQNASSLKFEDAKLAAAISEVVSQTPASTTQAGAPPRDTSSDKDLDDALDKLSDSLGQRQPDPDENKPMEDKVKEKAKAEHRDKLGERDDTIPPEYRHLLDDNGQDKPVKPPTKKSEDSKKPADDQDPIDALSGDLDSCPSTTETSQNTAKDKCKKAASSSKAPKNGGKAKDSAKTTEETSKPKDD

SEQ ID NO: 379 - protein, 167 aa, Homo sapiens
MYMGMMCTAKKCGIRFQPPAIILIYESEIKGKIRQRIMPVRNFSKFSDCTRAAEQLKNNPRHKSYLEQVSLRQLEKLFSFLRGYLSGQSLAETMEQIQRETTIDPEEDLNKLDDKELAKRKSIMDELFEKNQKKKDDPNFVYDIEVEFPQDDQLQSCGWDTESADEF

SEQ ID NO: 380 - protein, 198 aa, Homo sapiens
MLTRIDNSFAEPSRSNGSMVRHSSSPYVVYPSDKPFLNSDLRRSPSKPTLAYPESNSRAIFSALKNLQDKIRRLELERIQAEESVKTLSRETIEYKKVLDEQIQERENSKNEESKHNQELTSQLLAAENKCNLLEKQLEYMRNMIKHAEMERTSVLEKQVSLERERQHDQTHVQSQLEKLDLLEQEYNKLTTMQALAE

SEQ ID NO: 381 - protein, 110 aa, Homo sapiens
MKRAVDCPENIKKEICINKMLNHENVVKFYGHRREGNIQYLFLEYCSGGELFDRIEPDIGMPEPDAQRFFHQLMAGVVYLHGIGITHRDIKPENLLLDERDNLKISDFGL

SEQ ID NO: 382 - protein, 144 aa, Homo sapiens
MDYRKSPIVHVPMSLIIQMPELRENPFKERIVAAFSEDGEGNLTFNDFVDMFSVLCESAPRELKANYAFKIYDFNTDNFICKEDLELTLARLTKSELDEEEVVLVCDKVIEEADLDGDGKLGFADFEDMIAKAPDFLSTFHIRI

SEQ ID NO: 383 - protein, 167 aa, Homo sapiens
MDYRKSPIVHVPMSLIIQMPELRENPFKERIVAAFSEDGEGNLTFNDFVDMFSVLCESAPRELKANYAFKIYDFNTDNFICKEDLELTLARLTKSELDEEEVVLVCDKVIEEADLDGDGKLGFADFEDMIAKAPDFLRCCHYRGRAWAGQSRAGRDVGAEAPITRYL

SEQ ID NO: 384 - protein, 108 aa, Homo sapiens
MDRRDHPLPEVAHVKHLSASQKALKEKEKASWSSLSMDEKVELYRIKFKESFAEMNRGSNEWKTVVGGAMFFIGFTALVIMWQKHYVYGPLPQSFDKEWVAKQTKRML

SEQ ID NO: 385 - protein, 577 aa, Homo sapiens
MKHQERFLFQGNNGTVLYTGDFRLAQGEAARMELLHSGGRVKDIQSVYLDTTFCDPRFYQIPSREECLSGVLELVRSWITRSPYHVVWLNCKAAYGYEYLFTNLSEELGVQVHVNKLDMFRNMPEILHHLTTDRNTQIHACRHPKAEEYFQWSKLPCGITSRNRIPLHIISIKPSTMWFGERSRKTNVIVRTGESSYRACFSFHSSYSEIKDFLSYLCPVNAYPNVIPVGTTMDKVVEILKPLCRSSQSTEPKYKPLGKLKRARTVHRDSEEEDDYLFDDPLPIPLRHKVPYPETFHPEVFSMTAVSEKQPEKLRQTPGCCRAECMQSSRFTNFVDCEESNSESEEEVGIPASLQGDLGSVLHLQKADGDVPQWEVFFKRNDEITDESLENFPSSTVAGGSQSPKLFSDSDGESTHISSQNSSQSTHITEQGSQGWDSQSDTVLLSSQERNSGDITSLDKADYRPTIKENIPASLMEQNVICPKDTYSDLKSRDKDVTIVPSTGEPTTLSSETHIPEEKSLLNLSTNADSQSSSDFEVPSTPEAELPKREHLQYLYEKLATGESIAVKKRKCSLLDT

SEQ ID NO: 386 - protein, 181 aa, Homo sapiens
MFFSYGTKILYQNTEALQSKFFSPLQKAMLPPNSFQGKVAFITGGGTGLGKGMTTLLSSLGAQCVIASRKMDVLKATAEQISSQTGNKVHAIQCDVRDPDMVQNTVSELIKVAGHPNIVINNAAGNFISPTERLSPNAWKTITDIVLNGTAFVTLEIGKQLIKAQKGAAFLSITTIYAETG

SEQ ID NO: 387 - protein, 205 aa, Homo sapiens
MTAYLATGILWKEMFFSYGTKILYQNTEALQSKFFSPLQKAMLPPNSFQGKVAFITGGGTGLGKGMTTLLSSLGAQCVIASRKMDVLKATAEQISSQTGNKVHAIQCDVRDPDMVQNTVSELIKVAGHPNIVINNAAGNFISPTERLSPNAWKTITDIVLNGTAFVTLEIGKQLIKAQKGAAFLSITTIYAETGSGFVVPSASAK

SEQ ID NO: 388 - protein, 135 aa, Homo sapiens
MGKKTWFSIPEKNRPLKGRINLVLSRELKEPPQGAHFLSRSLDDALKLTEQPELANKVDMVWIVGGSSVYKEAMNHPGHLKLFVTRIMQDFESDTFFPEIDLEKYKLLPEYPGVLSDVQEEKGIKYKFEVYEKND

SEQ ID NO: 389 - protein, 159 aa, Homo sapiens
MVCRRKKKRCHRDGMCCPSTRCNNGICIPVTESILTPHIPALDGTRHRDRNHGHYSNHDLGWQNLGRPHTKMSHIKGHEGDPCLRSSDCIEGFCCARHFWTKICKPVLHQGEVCTKQRKKGSHGLEIFQRCDCAKGLSCKVWKDATYSSKARLHVCQKI

SEQ ID NO: 390 - protein, 108 aa, Homo sapiens
MSFDSQCDLRSSEPDYARFEAKIHDLREQMMNHSMSSGSGSLRTNQKRSLYVRAMFDYDKSKDSGLPSQGLSFKYGDILHVINASDDEWWQARRVMLEGDSEEMGVIP

SEQ ID NO: 391 - protein, 151 aa, Homo sapiens
MRPTEASERCHLRGSYTLRAGESALELWGGPEPGTQLYDWPYRFLRRFGRDKVTFSFEAGRRCVSGEGNFEFETRQGNEIFLALEEAISAQKNAAPATPQPQPATIPASLPRPDSPYSRPHDSLPPPSPTTPVPAPRPRGQEGEYAVPFDA

SEQ ID NO: 392 - protein, 367 aa, Homo sapiens
MGFTDLEEPISGCPGGPWALGLGDQFYKEAIEHCRSYNSRLCAERSVRLPFLDSQTGVAQNNCYIWMEKRHRGPGLAPGQLYTYPARCWRKKRRLHPPEDPKLRLLEIKPEVELPLKKDGFTSESTTLEALLRGEGVEKKVDAREEESIQEIQRVLENDENVEEGNEEEDLEEDIPKRKNRTRGRARGSAGGRRRHDAASQEDHDKPYVCDICGKRYKNRPGLSYHYAHTHLASEEGDEAQDQETRSPPNHRNENHRPQKGPDGTVIPNNYCDFCLGGSNMNKKSGRPEELVSCADCGRSAHLGGEGRKEKEAAAAARTTEDLFGSTSESDTSTFHGFDEDDLEEPRSCRGRRSGRGSPTADKKGSC

SEQ ID NO: 393 - protein, 367 aa, Homo sapiens; identical to SEQ ID NO: 392

SEQ ID NO: 394 - protein, 101 aa, Homo sapiens
MCGTVSSPGIVTFVQLQIQQSKEPRAQDLDRIRLSTYRTACKLRFVQKKCNLHLVDIWNVIEALRENALNNLDPNTELNVSRLEAVLSTIFYQLNKRMPTT

SEQ ID NO: 395 - protein, 101 aa, Homo sapiens; identical to SEQ ID NO: 394

SEQ ID NO: 396 - protein, 519 aa, Homo sapiens
MRTTQEAAGGGGETSACKPSSVRLAPSFSFHAAGLQMAGQMPHSHQYSDRRQPNISDQQVSALSYSDQIQQPLTNQVMPDIVMLQRRMPQTFRDPATAPLRKLSVDLIKTYKHINEVYYAKKKRRHQQGQGDDSSHKKERKVYNDGYDDDNYDYIVKNGEKWMDRYEIDSLIGKGSFGQVVKAYDRVEQEWVAIKIIKNKKAFLNQAQIEVRLLELMNKHDTEMKYYIVHLKRHFMFRNHLCLVFEMLSYNLYDLLRNTNFRGVSLNLTRKFAQQMCTALLFLATPELSIIHCDLKPENILLCNPKRSAIKIVDFGSSCQLGQRIYQYIQSRFYRSPEVLLGMPYDLAIDMWSLGCILVEMHTGEPLFSGANEVLLFLFLIQVDQMNKIVEVLGIPPAHILDQAPKARKFFEKLPDGTWNLKKTKDGKREYKPPGTRKLHNILGVETGGPGGRRAGESGHTVADYLKFKDLILRMLDYDPKTRIQPYYALQHSFFKKTADEGTNTSNSVSTSPAMEQSQ

SEQ ID NO: 397 - protein, 735 aa, Homo sapiens
MTAGSSYPLFLAAYACTGCLAERLGWFIKSSNEATNITPKHNMKAFLDELKAENIKKFLYNFTQIPHLAGTEQNFQLAKQIQSQWKEFGLDSVELAHYDVLLSYPNKTHPNYISIINEDGNEIFNTSLFEPPPPGYENVSDIVPPFSAFSPQGMPEGDLVYVNYARTEDFFKLERDMKINCSGKIVIARYGKVFRGNKVKNAQLAGAKGVILYSDPADYFAPGVKSYPDGWNLPGGGVQRGNILNLNGAGDPLTPGYPANEYAYRRGIAEAVGLPSIPVHPIGYYDAQKLLEKMGGSAPPDSSWRGSLKVPYNVGPGFTGNFSTQKVKMHIHSTNEVTRIYNVIGTLRGAVEPDRYVILGGHRDSWVFGGIDPQSGAAVVHEIVRSFGTLKKEGWRPRRTILFASWDAEEFGLLGSTEWAEENSRLLQERGVAYINADSSIEGNYTLRVDCTPLMYSLVHNLTKELKSPDEGFEGKSLYESWTKKSPSPEFSGMPRISKLGSGNDFEVFFQRLGIASGRARYTKNWETNKFSGYPLYHSVYETYELVEKFYDPMFKYHLTVAQVRGGMVFELANSIVLPFDCRDYAVVLRKYADKIYSISMKHPQEMKTYSVSFDSLFSAVKNFTEIASKFSERLQDFDKSNPIVLRMMNDQLMFLERAFIDPLGLPDRPFYRHVIYAPSSHNKYAGESFPGIYDALFDIESKVDPSKAWGEVKRQIYVAAFTVQAAAETLSEVA

SEQ ID NO: 398 - protein, 58 aa, Homo sapiens
MVFGAMVLLVGLEELTNIRNVERLKKDLRASYCLIDSFLGDSELIGDLTQCVDCVIPP

SEQ ID NO: 399 - protein, 847 aa, Homo sapiens
MTRFRIDELEPRRPRYRVPDVLVADPPIARLSVSGRDENSVELTMAEGPYKIILTARPFRLDLLEDRSLLLSVNARGLLEFEHQRAPRVSQGSKDPAEGDGAQPEETPRDGDKPEETQGKAEKDEPGAWEETFKTHSDSKPYGPMSVGLDFSLPGMEHVYGIPEHADNLRLKVTEGGEPYRLYNLDVFQYELYNPMALYGSVPVLLAHNPHRDLGIFWLNAAETWVDISSNTAGKTLFGKMMDYLQGSGETPQTDVRWMSETGIIDVFLLLGPSISDVFRQYASLTGTQALPPLFSLGYHQSRWNYRDEADVLEVDQGFDDHNLPCDVIWLDIEHADGKRYFTWDPSRFPQPRTMLERLASKRRKLVAIVDPHIKVDSGYRVHEELRNLGLYVKTRDGSDYEGWCWPGSAGYPDFTNPTMRAWWANMFSYDNYEGSAPNLFVWNDMNEPSVFNGPEVTMLKDAQHYGGWEHRDVHNIYGLYVHMATADGLRQRSGGMERPFVLARAFFAGSQRFGAVWTGDNTAEWDHLKISIPMCLSLGLVGLSFCGADVGGFFKNPEPELLVRWYQMGAYQPFFRAHAHLDTGRREPWLLPSQHNDIIRDALGQRYSLLPFWYTLLYQAHREGIPVMRPLWVQYPQDVTTFNIDDQYLLGDALLVHPVSDSGAHGVQVYLPGQGEVWYDIQSYQKHHGPQTLYLPVTLSSIPVFQRGGTIVPRWMRVRRSSECMKDDPITLFVALSPQGTAQGELFLDDGHTFNYQTRQEFLLRRFSFSGNTLVSSSADPEGHFETPIWIERVVIIGAGKPAAVVLQTKGSPESRLSFQHDPETSVLVLRKPGINVASDWSIHLR

SEQ ID NO: 400 - protein, 296 aa, Homo sapiens
MFEACSQGPLNICEEMTILHGGFLLAEQLFHPKALAELTKSDWERVGRPIVEALREISSAAAHSQPFAWKKKALIIIWAKVLQPHPVTPSDTETRWQEDLFFSVGNMIPTINHTILFELLKSLEASGLFIQLLMALPTTICHAELERFLEHVTVDTSAEDVAFFLDVWWEVMKHKGHPQDPLLSQFSAMAHKYLPALDEFPHPPKRLRSDPDACPTMPLLAMLLRGLTQIQSRILGPGRKCCALANLADMLTVFALTEDDPQEVSATVYLDKLATVISVWNSDTQNPYHQQALAEK

SEQ ID NO: 401 - protein, 136 aa, Homo sapiens
MALPEEAKIKDAYHMLKRQGIVQSDPPIPVDRTLIPSPPPRPKNPVFDDEEKSKLLAKLLKSKNPDDLQEANKLIKSMVKEDEARIQKVTKRLHTLEEVNNNVRLLSEMLLHYSQEDSSDGDRELMKELFDQCENK

SEQ ID NO: 402 - protein, 197 aa, Homo sapiens
MCLPHFVIHSSVDGHLSCFHHWAVENNTAMNSGVEVSVLVSLLNFLRQVHEIQSCMGRLETADKQSVHIVENEIQASIDQIFSRLERLEILSSKEPPNKRQNARLRVDQLKYDVQHLQTALRNFQHRRHAREQQERQREELLSRTFTTNDSDTTIPMDESLQFNSSLQKVHNGMDDLILDGHNILDGLRTQRLTLKG

SEQ ID NO: 403 - protein, 278 aa, Homo sapiens
MEENMEEGQTQKGCFECCIKCLGGIPYASLIATILLYAGVALFCGCGHEALSGTVNILQTYFEMARTAGDTLDVFTMIDIFKYVIYGIAAAFFVYGILLMVEGFFTTGAIKDLYGDFKITTCGRCVSAWFIMLTYLFMLAWLGVTAFTSLPVYMYFNLWTICRNTTLVEGANLCLDLRQFGIVTIGEEKKICTVSENFLRMCESTELNMTFHLFIVALAGAGAAVIAMVHYLMVLSANWAYVKDACRMQKYEDIKSKEEQELHDIHSTRSKERLNAYT

SEQ ID NO: 404 - protein, 588 aa, Homo sapiens
MQAAGPLFRSKDKVEQTPRSQQDPAGPGLPAQSDRLANHQEDDVDLEALVNDMNASLESLYSACSMQSDTVPLLQNGQHARSQPRASGPPRSIQPQVSPRQRVQRSQPVHILAVRRLQEEDQQFRTSSLPAIPNPFPELCGPGSPPVLTPGSLPPSQAAAKQDVKVFSEDGTSKVVEILADMTARDLCQLLVYKSHCVDDNSWTLVEHHPHLGLERCLEDHELVVQVESTMASESKFLFRKNYAKYEFFKNPMNFFPEQMVTWCQQSNGSQTQLLQNFLNSSSCPEIQGFLHVKELGKKSWKKLYVCLRRSGLYCSTKGTSKEPRHLQLLADLEDSNIFSLIAGRKQYNAPTDHGLCIKPNKVRNETKELRLLCAEDEQTRTCWMTAFRLLKYGMLLYQNYRIPQQRKALLSPFSTPVRSVSENSLVAMDFSGQTGRVIENPAEAQSAALEEGHAWRKRSTRMNILGSQSPLHPSTLSTVIHRTQHWFHGRISREESHRIIKQQGLVDGLFLLRDSQSNPKAFVLTLCHHQKIKNFQILPCEDDGQTFFSLDDGNTKFSDLIQLVDFYQLNKGVLPCKLKHHCIRVAL

SEQ ID NO: 405 - protein, 232 aa, Homo sapiens
MEKLFCCFPNSMVVEHPEFLKAGKEPGLQIWRVEKFDLVPVPTNLYGDFFTGDAYVILKTVQLRNGNLQYDLHYWLGNECSQDESGAAAIFTVQLDDYLNGRAVQHREVQGFESATFLGYFKSGLKYKKGGVASGFKHVVPNEVVVQRLFQVKGRRVVRATEVPVSWESFNNGDCFILDLGNNIHQWCGSNSNRYERLKATQVSKGIRDNERSGRARVHVSEEGTEPEAMLQ

SEQ ID NO: 406 - protein, 129 aa, Homo sapiens
MRIVKPKVASMEEMATFHTDAYLQHLQKVSQEGDDDHPDSIEYGLGYDCPATEGIFDYAAAIGGATITAAQCLIDGMCKVAINWSGGWHHAKKDEASGFCYLNDAVLGILRLRRKFERILYVDLDLHHG

SEQ ID NO: 407 - protein, 240 aa, Homo sapiens
MLSWVPWRRVTGLHGVALPHGLDKIEEAQKELNGAEVSKKEILQAGVKGTSESLKGNLTKHMKSKAHSKKCVDLGVSVGLIDEQDTEESDEKQRFSYERSGYDLEESDGPDEDDNENEDDDEDSQAESVLSATPSVTASPQHLPSRSSLQDPVSTDEDVRITDCFSGVHTDPMDVLPRALLTRMTVLSTAQSDYNRKTLSPGKARQRAARDENDTIPSVDTSRSPCHQMSVDYPESEEIL

SEQ ID NO: 408 - protein, 114 aa, Homo sapiens
MAKRALHDFIDKYLYAMRLSDETLIDIMTRFRKEMKNGLSRDFNPTATVKMLPTFVRSIPDGSEKGDFIALDLGGSSFRILRVQVNHEKNQNVHMESEVYDTPENIVHGSGSQL

SEQ ID NO: 409 - protein, 905 aa, Homo sapiens
MAKRALHDFIDKYLYAMRLSDETLIDIMTRFRKEMKNGLSRDFNPTATVKMLPTFVRSIPDGSEKGDFIALDLGGSSFRILRVQVNHEKNQNVHMESEVYDTPENIVHGSGSQLFDHVAECLGDFMEKRKIKDKKLPVGFTFSFPCQQSKIDEAILITWTKRFKASGVEGADVVKLLNKAIKKRGDYDANIVAVVNDTVGTMMTCGYDDQHCEVGLIIGTGTNACYMEELRHIDLVEGDEGRMCINTEWGAFGDDGSLEDIRTEFDREIDRGSLNPGKQLFEKMVSGMYLGELVRLILVKMAKEGLLFEGRITPELLTRGKFNTSDVSAIEKNKEGLHNAKEILTRLGVEPSDDDCVSVQHVCTIVSFRSANLVAATLGAILNRLRDNKGTPRLRTTVGVDGSLYKTHPQYSRRFHKTLRRLVPDSDVRFLLSESGSGKGAAMVTAVAYRLAEQHRQIEETLAHFHLTKDMLLEVKKRMRAEMELGLRKQTHNNAVVKMLPSFVRRTPDGTENGDFLALDLGGTNFRVLLVKIRSGKKRTVEMHNKIYAIPIEIMQGTGEELFDHIVSCISDFLDYMGIKGPRMPLGFTFSFPCQQTSLDAGILITWTKGFKATDCVGHDVVTLLRDAIKRREEFDLDVVAVVNDTVGTMMTCAYEEPTCEVGLIVGTGSNACYMEEMKNVEMVEGDQGQMCINMEWGAFGDNGCLDDIRTHYDRLVDEYSLNAGKQRYEKMISGMYLGEIVRNILIDFTKKGFLFRGQISETLKTRGIFETKFLSQIESDRLALLQVRAILQQLGLNSTCDDSILVKTVCGVVSRRAAQLCGAGMAAVVDKIRENRGLDRLNVTVGVDGTLYKLHPHFSRIMHQTVKELSPKCNVSFLLSEDGSGKGAALITAVGVRLRTEASS

SEQ ID NO: 410 - protein, 161 aa, Homo sapiens
MLLKSPENSLLQFQFKYGVPTPTNVTIESYNMNPIVYWEYQIMPQVPVFTVEVKNYGVKNSEWIDACINISHHYCNISDHVGDPSNSLWVRVKARVGQKESAYAKSEEFAVCRDGKIGPPKLDIRKEEKQIMIDIFHPSVFVNGDEQEVDYDPETTCYIRV

SEQ ID NO: 411 - protein, 164 aa, Homo sapiens
MSWSPSLTTQTCGAWEMKERLGTGGFGNVIRWHNQETGEQIAIKQCRQELSPRNRERWCLEIQIMRRLTHPNVVAARDVPEGMQNLAPNDLPLLAMEYCQGGDLRKYLNQFENCCGLREGAILTLLSDIGKSQSRNSGRVLQGECGAPPLRLDTFMKTESSIGI

SEQ ID NO: 412 - protein, 756 aa, Homo sapiens
MSWSPSLTTQTCGAWEMKERLGTGGFGNVIRWHNQETGEQIAIKQCRQELSPRNRERWCLEIQIMRRLTHPNVVAARDVPEGMQNLAPNDLPLLAMEYCQGGDLRKYLNQFENCCGLREGAILTLLSDIASALRYLHENRIIHRDLKPENIVLQQGEQRLIHKIIDLGYAKELDQGSLCTSFVGTLQYLAPELLEQQKYTVTVDYWSFGTLAFECITGFRPFLPNWQPVQWHSKVRQKSEVDIVVSEDLNGTVKFSSSLPYPNNLNSVLAERLEKWLQLMLMWHPRQRGTDPTYGPNGCFKALDDILNLKLVHILNMVTGTIHTYPVTEDESLQSLKARIQQDTGIPEEDQELLQEAGLALIPDKPATQCISDGKLNEGHTLDMDLVFLFDNSKITYETQISPRPQPESVSCILQEPKRNLAFFQLRKVWGQVWHSIQTLKEDCNRLQQGQRAAMMNLLRNNSCLSKMKNSMASMSQQLKAKLDFFKTSIQIDLEKYSEQTEFGITSDKLLLAWREMEQAVELCGRENEVKLLVERMMALQTDIVDLQRSPMGRKQGGTLDDLEEQARELYRRLREKPRDQRTEGDSQEMVRLLLQAIQSFEKKVRVIYTQLSKTVVCKQKALELLPKVEEVVSLMNEDEKTVVRLQEKRQKELWNLLKIACSKVRGPVSGSPDSMNASRLSQPGQLMSQPSTASNSLPEPAKKSEELVAEAHNLCTLLENAIQDTVREQDQSFTALDWSWLQTEEEEHSCLEQAS

SEQ ID NO: 413 - protein, 756 aa, Homo sapiens; identical to SEQ ID NO: 412

SEQ ID NO: 414 - protein, 562 aa, Homo sapiens
MSWSPSLTTQTCGAWEMKERLGTGGFGNVIRWHNQETGEQIAIKQCRQELSPRNRERWCLEIQIMRRLTHPNVVAARDVPEGMQNLAPNDLPLLAMEYCQGGDLRKYLNQFENCCGLREGAILTLLSDIASALRYLHENRIIHRDLKPENIVLQQGEQRLIHKIIDLGYAKELDQGSLCTSFVGTLQYLAPELLEQQKYTVTVDYWSFGTLAFECITGFRPFLPNWQPVQWHSKVRQKSEVDIVVSEDLNGTVKFSSSLPYPNNLNSVLAERLEKWLQLMLMWHPRQRGTDPTYGPNGCFKALDDILNLKLVHILNMVTGTIHTYPVTEDESLQSLKARIQQDTGIPEEDQELLQEAGLALIPDKPATQCISDGKLNEGHTLDMDLVFLFDNSKITYETQISPRPQPESVSCILQEPKRNLAFFQLRKVWGQVWHSIQTLKEDCNRLQQGQRAAMMNLLRNNSCLSKMKNSMASMSQQLKAKLDFFKTSIQIDLEKYSEQTEFGIRERSETPGRTDDGSADRHCGLTEEPHGPEAGGNAGRPRGASKGAVQETKGKTSRPAN

SEQ ID NO: 415 - protein, 142 aa, Homo sapiens
MVLIDMSVDLSTQVVDHYENPRNVGSLDKTSKNVGTGLVGAPACGDVMKLQIQVDEKGKIVDARFKTFGCGSAIASSSLATEWVKGKTVEEALTIKNTDIAKELCLPPVKLHCSMLAEDAIKAALADYKLKQEPKKGEAEKK

SEQ ID NO: 416 - protein, 124 aa, Homo sapiens
MLTQAAVRLVRGSLRKTSWAEWGHRELRLGQLAPFTAPHKDKSFSDQRSELKRRLKAEKKVAEKEAKQKELSEKQLSQATAAATNHTTDNGVGPEEESVDPNVGSMPKELLGESSSSMIFEERG

SEQ ID NO: 417 - protein, 625 aa, Homo sapiens
MLTQAAVRLVRGSLRKTSWAEWGHRELRLGQLAPFTAPHKDKSFSDQRSELKRRLKAEKKVAEKEAKQKELSEKQLSQATAAATNHTTDNGVGPEEESVDPNQYYKIRSQAIHQLKVNGEDPYPHKFHVDISLTDFIQKYSHLQPGDHLTDITLKVAGRIHAKRASGGKLIFYDLRGEGVKLQVMANSRNYKSEEEFIHINNKLRRGDIIGVQGNPGKTKKGELSIIPYEITLLSPCLHMLPHLHFGLKDKETRYRQRYLDLILNDFVRQKFIIRSKIITYIRSFLDELGFLEIETPMMNIIPGGAVAKPFITYHNELDMNLYMRIAPELYHKMLVVGGIDRVYEIGRQFRNEGIDLTHNPEFTTCEFYMAYADYHDLMEITEKMVSGMVKHITGSYKVTYHPDGPEGQAYDVDFTPPFRRINMVEELEKALGMKLPETNLFETEETRKILDDICVAKAVECPPPRTTARLLDKLVGEFLEVTCINPTFICDHPQIMSPLAKWHRSKEGLTERFELFVMKKEICNAYTELNDPMRQRQLFEEQAKAKAAGDDEAMFIDENFCTALEYGLPPTAGWGMGIDRVAMFLTDSNNIKEVLLFPAMKPEDKKENVATTDTLESTTVGTSV

SEQ ID NO: 418 - protein, 1063 aa, Homo sapiens
MTRLGWPSPCCARKQCSEGRTYSNAVISPNLETTRIMRVSHTFPVVDCTAACCDLSSCDLAWWFEGRCYLVSCPHKENCEPKKMGPIRSYLTFVLRPVQRPAQLLDYGDMMLNRGSPSGIWGDSPEDIRKDLTFLGKDWGLEEMSEYSDDYRELEKDLLQPSGKQEPRGSAEYTDWGLLPGSEGAFNSSVGDSPAVPAETQQDPELHYLNESASTPAPKLPERSVLLPLPTTPSSGEVLEKEKASQLQEQSSNSSGKEVLMPSHSLPPASLELSSVTVEKSPVLTVTPGSTEHSIPTPPTSAAPSESTPSELPISPTTAPRTVKELTVSAGDNLIITLPDNEVELKAFVAPAPPVETTYNYEWNLISHPTDYQGEIKQGHKQTLNLSQLSVGLYVFKVTVSSENAFGEGFVNVTVKPARRVNLPPVAVVSPQLQELTLPLTSALIDGSQSTDDTEIVSYHWEEINGPFIEEKTSVDSPVLRLSNLDPGNYSFRLTVTDSDGATNSTTAALIVNNAVDYPPVANAGPNHTITLPQNSITLNGNQSSDDHQIVLYEWSLGPGSEGKHVVMQGVQTPYLHLSAMQEGDYTFQLKVTDSSRQQSTAVVTVIVQPENNRPPVAVAGPDKELIFPVESATLDGSSSSDDHGIVFYHWEHVRGPSAVEMENIDKAIATVTGLQVGTYHFRLTVKDQQGLSSTSTLTVAVKKENNSPPRARAGGRHVLVLPNNSITLDGSRSTDDQRIVSYLWIRDGQSPAAGDVIDGSDHSVALQLTNLVEGVYTFHLRVTDSQGASDTDTATVEVQPDPRKSGLVELTLQVGVGQLTEQRKDTLVRQLAVLLNVLDSDIKVQKIRAHSDLSTVIVFYVQSRPPFKVLKAAEVARNLHMRLSKEKADFLLFKVLRVDTAGCLLKCSGHGHCDPLTKRCICSHLWMENLIQRYIWDGESNCEWSIFYVTVLAFTLIVLTGGFTWLCICCCKRQKRTKIRKKTKYTILDNMDEQERMELRPKYGIKHRSTEHNSSLMVSESEFDSDQDTIFSREKMERGNPKVSMNGSIRNGASFSYCSKDR

SEQ ID NO: 419 - protein, 1463 aa, Homo sapiens
MVSESDFSKDVAVQVLPLDKIEENNKQKANDIFISQYTMGQKDALRTVLKQKAQSMPVFKEVKVHLLEDAGIEKDAVTQETRISPSGIDSATTVAAATAAAIATAAPLIKVQSDLEAKVNSVTELLSKLQETDKHLQRVTEQQTSIQRKQEKLHCHDHEKQMNVFMEQHIRHLEKLQQQQIDIQTHFISAALKTSSFQPVSMPSSRAVEKYSVKPEHPNLGSCNPSLYNTFASKQAPLKEVEDTSFDKQKSPLETPAPRRFAPVPVSRDDELSKRENLLEEKENMEVSCHRGNVRLLEQILNNNDSLTRKSESSNTTSLTRSKIGWTPEKTNRFPSCEELETTKVTMQKSDDVLHDLGQKEKETNSMVQPKESLSMLKLPDLPQNSVKLQTTNTTRSVLKDAEKILRGVQNNKKVLEENLEAIIRAKDGAAMYSLINALSTNREMSEKIRIRKTVDEWIKTISAEIQDELSRTDYEQKRFDQKNQRTKKGQNMTKDIRTNTQDKTVNKSVIPRKHSQKQIEEHFRNLPMRGMPASSLQKERKEGLLKATTVIQDEDYMLQVYGKPVYQGHRSTLKKGPYLRFNSPSPKSRPQRPKVIERVKGTKVKSIRTQTDFYATKPKKMDSKMKHSVPVLPHGDQQYLFSPSREMPTFSGTLEGHLIPMAILLGQTQSNSDTMPPAGVIVSKPHPVTVTTSIPPSSRKVETGVKKPNIAIVEMKSEKKDPPQLTVQVLPSVDIDSISNSSADVLSPLSSPKEASLPPVQTWIKTPEIMKVDEEEVKFPGTNFDEIIDVIQEEEKCDEIPDSEPILEFNRSVKADSTKYNGPPFPPVASTFQPTADILDKVIERKETLENSLIQWVEQEIMSRIISGLFPVQQQIAPSISVSVSETSEPLTSDIVEGTSSGALQLFVDAGVPVNSNVIKHFVNEALAETIAVMLGDREAKKQGPVATGVSGDASTNETYLPARVCTPLPTPQPTPPCSPSSPAKECVLVKTPDSSPCDSDHDMAFPVKEICAEKGDDMPAIMLVNTPTVTPTTTPPPAAAVFTPTLSDISIDKLKVSSPELPKPWGDGDLPLEEENPNSPQEELHPRAIVMSVAKDEEPESMDFPAQPPPPEPVPFMPFPAGTKAPSPSQMPGSDSSTLESTLSVTVTETETLDKPISEGEILFSCGQKLAPKILEDIGLYLTNLNDSLSSTLHDAVEMEDDPPSEGQVIRMSHKKFHADAILSFAKQNQESAVSQQAVYHSEDLENSVGELSEGQRPQLTAAAENILMGHSLYMQPPVTNTQSLDQQCDPKPLSRQFDTVSGSIYEDSCASHGPMSLGELELEPNSKLVLPTTLLTAQENDVNLPVAAEDFSQYQLKQNQDVKQVEHKPSQSYLRVRNKSDIAPSQQQVSPGDMDRTQIELNPYLTCVFSGGKAVPLSASQMPPAKMSVMLPSVNLEDCSQSLSLSTMQEDMESSGADTF

SEQ ID NO: 420 - protein, 1504 aa, Homo sapiens
MVSESDFSKDVAVQVLPLDKIEENNKQKANDIFISQYTMGQKDALRTVLKQNVSLCLTGWSDHSGVITTHCSLYLLRLMRSSHLSLPSSWDYRAQSMPVFKEVKVHLLEDAGIEKDAVTQETRISPSGIDSATTVAAATAAAIATAAPLIKVQSDLEAKVNSVTELLSKLQETDKHLQRVTEQQTSIQRKQEKLHCHDHEKQMNVFMEQHIRHLEKLQQQQIDIQTHFISAALKTSSFQPVSMPSSRAVEKYSVKPEHPNLGSCNPSLYNTFASKQAPLKEVEDTSFDKQKSPLETPAPRRFAPVPVSRDDELSKRENLLEEKENMEVSCHRGNVRLLEQILNNNDSLTRKSESSNTTSLTRSKIGWTPEKTNRFPSCEELETTKVTMQKSDDVLHDLGQKEKETNSMVQPKESLSMLKLPDLPQNSVKLQTTNTTRSVLKDAEKILRGVQNNKKVLEENLEAIIRAKDGAAMYSLINALSTNREMSEKIRIRKTVDEWIKTISAEIQDELSRTDYEQKRFDQKNQRTKKGQNMTKDIRTNTQDKTVNKSVIPRKHSQKQIEEHFRNLPMRGMPASSLQKERKEGLLKATTVIQDEDYMLQVYGKPVYQGHRSTLKKGPYLRFNSPSPKSRPQRPKVIERVKGTKVKSIRTQTDFYATKPKKMDSKMKHSVPVLPHGDQQYLFSPSREMPTFSGTLEGHLIPMAILLGQTQSNSDTMPPAGVIVSKPHPVTVTTSIPPSSRKVETGVKKPNIAIVEMKSEKKDPPQLTVQVLPSVDIDSISNSSADVLSPLSSPKEASLPPVQTWIKTPEIMKVDEEEVKFPGTNFDEIIDVIQEEEKCDEIPDSEPILEFNRSVKADSTKYNGPPFPPVASTFQPTADILDKVIERKETLENSLIQWVEQEIMSRIISGLFPVQQQIAPSISVSVSETSEPLTSDIVEGTSSGALQLFVDAGVPVNSNVIKHFVNEALAETIAVMLGDREAKKQGPVATGVSGDASTNETYLPARVCTPLPTPQPTPPCSPSSPAKECVLVKTPDSSPCDSDHDMAFPVKEICAEKGDDMPAIMLVNTPTVTPTTTPPPAAAVFTPTLSDISIDKLKVSSPELPKPWGDGDLPLEEENPNSPQEELHPRAIVMSVAKDEEPESMDFPAQPPPPEPVPFMPFPAGTKAPSPSQMPGSDSSTLESTLSVTVTETETLDKPISEGEILFSCGQKLAPKILEDIGLYLTNLNDSLSSTLHDAVEMEDDPPSEGQVIRMSHKKFHADAILSFAKQNQESAVSQQAVYHSEDLENSVGELSEGQRPQLTAAAENILMGHSLYMQPPVTNTQSLDQQCDPKPLSRQFDTVSGSIYEDSCASHGPMSLGELELEPNSKLVLPTTLLTAQENDVNLPVAAEDFSQYQLKQNQDVKQVEHKPSQSYLRVRNKSDIAPSQQQVSPGDMDRTQIELNPYLTCVFSGGKAVPLSASQMPPAKMSVMLPSVNLEDCSQSLSLSTMQEDMESSGADTF

SEQ ID NO: 421 - protein, 570 aa, Homo sapiens
MQLEYETQIKKMLCSKDSLGLKEELTDEDREKVAVHEGINSGTAMSRGLYQPATIFMGRQMSAILSMRDFSTEHKSPQPTKNFSIPDPHSHRQTAQSSNVTDSCVVQTSNDTQCLNKSDNIDGKASLQIGEKMPVTASVLSEEEQTHCLEIGSNTRHGKSNLSEGKKSAELNSPLRERLSPENRTTDLKCDSSSGSEGEILTREHIEVEEKRASPPVSPIPVSEYCESENKWSQEKHSPWEGVSDHLAHREPKSQKPFRKMQEEEEESWSTSSDLTISISEDDLILESPEPQPNPGGKMEGEDGIEALKLIHAEQERVALSTEKNCILQTLSSPDSEKESSTNAPTREPGQTPDSDVPRAQVGQHVATLKEHDNSVKEEATALLRKALTEECGRRSAIHSSESSCSLPSILNDNSGIKEAKPAVWLNSVPTREQEVSSGCGDKSKKENVAADIPITETEAYQLLKKATLQDNTNQTENRFQKTDASVSHLSGLNIGSGAFETKTANKIASEASFSSSEGSPLSRHENKKKPVINLKSNALWDESDDSNSEIEAALRPRNHNTDDSDDFYD

SEQ ID NO: 422 - protein, 137 aa, Homo sapiens
MLLRLARPAKLSELIQPLPLERDCSANTTSCHILGWGKTADGDFPDTIQCAYIHLVSREECEHAYPGQITQNMLCAGDEKYGKDSCQGDSGGPLVCGDHLRGLVSWGNIPCGSKEKPGVYTNVCRYTNWIQKTIQAK

SEQ ID NO: 423 - protein, 491 aa, Homo sapiens
MQPLLCLGNLEDARERTGTLLAQHPAWGRTRAKPGSPLNTKKEGDLIAAQARLKDLEALLNSKEAALSTALSEKRTLEGELHDLRGQVAKLEAALGEAKKQLQDEMLRRVDAENRLQTMKEELDFQKNIYSEELRETKRRHETRLVEIDNGKQREFESRLADALQELRAQHEDQVEQYKKELEKTYSAKLDNARQSAERNSNLVGAAHEELQQSRIRIDSLSAQLSQLQKQLAAKEAKLRDLEDSLARERDTSRRLLAEKEREMAEMRARMQQQLDEYQELLDIKLALDMEIHAYRKLLEGEEERLRLSPSPTSQRSRGRASSHSSQTQGGGSVTKKRKLESTESRSSFSQHARTSGRVAVEEVDEEGKFVRLRNKSNEDQSMGNWQIKRQNGDDPLLTYRFPPKFTLKAGQVVTIWAAGAGATHSPPTDLVWKAQNTWGCGNSLRTALINSTGEEVAMRKLVRSVTVVEDDEDEDGDDLLHHHHVSGSRR

SEQ ID NO: 424 - protein, 409 aa, Homo sapiens
MKDTQDIQEASKAMQNKVHEQEDKNEKQKQREDKLGVYSLVHFSPKMLGSVATTLPLSSSNSSGMPLGYYLSSPQISRVTISTTGQLTSKATVGSCSRVENSLDASPFSVPKKQDESPMIGDGEDYFLSLFGDSKKLTAHSNYTQKTLKYFSMILEEVGQFTSSSLGDVEIAEVNVKGLFVKLINSSLDKEMAIGDHILQQNVNGQTISLYRFLPNIVMQANSTVTVWAAASEAKHQPPSDFLWKEQDKFRASPDCITILCKPNGQAIAWYTPIHWKQAWEKLDADVEFNRCSVVSPTFRKRVFQWTASTATITKEKQDQPKKDISNYQVEQAQVLLKREKEIPPTVFPNRSPWCQNPYVSAHPYCPLIEPHNTSTAGGRLDRQPRTRSTRPNRASGSKKKKTSESQKQ

SEQ ID NO: 425 - protein, 369 aa, Homo sapiens
MKDTQDIQEASKAMQNKVHEQEDKNEKQKQREDKLGVYSLVHFSPKMLGSVATTLPLSSSNSSGMPLGYYLSSPQISRVTISTTGQLTSKATVGSCSRVENSLDASPFSVPKKQDESPMIGDGEDYFLSLFGDSKKLTAHSNYTQKTLKYFSMILEEVGQFTSSSLGDVEIAEVNVKGLFVKLINSSLDKEMAIGDHILQQNVNGQTISLYRFLPNIVMQANSTVTAIAWYTPIHWKQAWEKLDADVEFNRCSVVSPTFRKRVFQWTASTATITKEKQDQPKKDISNYQVEQAQVLLKREKEIPPTVFPNRSPWCQNPYVSAHPYCPLIEPHNTSTAGGRLDRQPRTRSTRPNRASGSKKKKTSESQKQ

SEQ ID NO: 426 - protein, 1495 aa, Homo sapiens
MQCLEMTTKRKIIGRLVPCRCFRGEEEIISVLDYSHCSLQQVPKEVFNFERTLEELYLDANQIEELPKQLFNCQALRKLSIPDNDLSNLPTTIASLVNLKELDISKNGVQEFPENIKCCKCLTIIEASVNPISKLPDGFTQLLNLTQLYLNDAFLEFLPANFGRLVKLRILELRENHLKTLPKSMHKLAQLERLDLGNNEFGELPEVLDQIQNLRELWMDNNALQVLPGSIGKLKMLVYLDMSKNRIETVDMDISGCEALEDLLLSSNMLQQLPDSIGLLKKLTTLKVDDNQLTMLPNTIGNLSLLEEFDCSCNELESLPSTIGYLHSLRTLAVDENFLPELPREIGSCKNVTVMSLRSNKLEFLPEEIGQMQKLRVLNLSDNRLKNLPFSFTKLKELAALWLSDNQSKALIPLQTEAHPETKQRVLTNYMFPQQPRGDEDFQSDSDSFNPTLWEEQRQQRMTVAFEFEDKKEDDENAGKVKDLSCQAPWERGQRGITLQPARLSGDCCTPWARCDQQIQDMPVPQNDPQLAWGCISGLQQERSMCTPLPVAAQSTTLPSLSGRQVEINLKRYPTPYPEDLKNMVKSVQNLVGKPSHGVRVENSNPTANTEQTVKEKYEHKWPVAPKEITVEDSFVHPANEMRIGELHPSLAETPLYPPKLVLLGKDKKESTDESEVDKTHCLNNSVSSGTYSDYSPSQASSGSSNTRVKVGSLQTTAKDAVHNSLWGNRIAPSFPQPLDSKPLLSQREAVPPGNIPQRPDRLPMSDTFTDNWTDGSHYDNTGFVAEETTAENANSNPLLSSKSRSTSSHGRRPLIRQDRIVGVPLELEQSTHRHTPETEVPPSNPWQNWTRTPSPFEDRTAFPSKLETTPTTSPLPERKEHIKESTEIPSPFSPGVPWEYHDSNPNRSLSNVFSQIHCRPESSKGVISISKSTERLSPLMKDIKSNKFKKSQSIDEIDIGTYKVYNIPLENYASGSDHLGSHERPDKMLGPEHGMSSMSRSQSVPMLDDEMLTYGSSKGPQQQKASMTKKVYQFDQSFNPQGSVEVKAEKRIPPPFQHNPEYVQQASKNIAKDLISPRAYRGYPPMEQMFSFSQPSVNEDAVVNAQFASQGARAGFLRRADSLVSATEMAMFRRVNEPHELPPTDRYGRPPYRGGLDRQSSVTVTESQFLKRNGRYEDEHPSYQEVKAQAGSFPVKNLTQRRPLSARSYSTESYGASQTRPVSARPTMAALLEKIPSDYNLGNYGDKPSDNSDLKTRPTPVKGEESCGKMPADWRQQLLRHIEARRLDRTPSQQSNILDNGQEDVSPSGQWNPYPLGRRDVPPDTITKKAGSHIQTLMGSQSLQHRSREQQPYEGNINKVTIQQFQSPLPIQIPSSQATRGPQPGRCLIQTKGQRSMDGYPEQFCVRIEKNPGLGFSISGGISGQGNPFKPSDKGIFVTRVQPDGPASNLLQPGDKILQANGHSFVHMEHEKAVLLLKSFQNTVDLVIQRELTV

SEQ ID NO: 427 - protein, 158 aa, Homo sapiens
MNKRDYMNTSVQEPPLDYSFRSIHVIQDLVNEEPRTGLRPLKRSKSGKSLTQSLWLNNNVLNDLRDFNQVASQLLEHPENLAWIDLSFNDLTSIDPVLTTFFNLSVLYLHGNSIQRLGEVNKLAVLPRLRSLTLHGNPMEEEKGYRVPGSVEMPHRPP

SEQ ID NO: 428 - protein, 192 aa, Homo sapiens
MNKRDYMNTSVQEPPLDYSFRSIHVIQDLVNEEPRTGLRPLKRSKSGKSLTQSLWLNNNVLNDLRDFNQVASQLLEHPENLAWIDLSFNDLTSIDPVLTTFFNLSVLYLHGNSIQRLGEVNKLAVLPRLRSLTLHGNPMEEEKGYRQYVLCTLSRITTFDFSGVTKADRTTAEVWKRMNIKPKKAWTKQNTL

SEQ ID NO: 429 - protein, 103 aa, Homo sapiens
MNKRDYMNTSVQEPPLDYSFRSIHVIQDLVNEEPRTGLRPLKRSKSGKSLTQSLWLNNNVLNDLRDFNQVASQLLEHPENLAWIDLSFNDLTSIDPVLTTFFN

SEQ ID NO: 430 - protein, 38 aa, Homo sapiens
MNKRDYMNTSVQEPPLDYSFRSIHVIQANLKGNRGLSQ

SEQ ID NO: 431 - protein, 146 aa, Homo sapiens
MNKRDYMNTSVQEPPLDYSFRSIHVIQDLVNEEPRTGLRPLKRSKSGKSLTQSLWLNNNVLNDLRDFNQVASQLLEHPENLAWIDLSFNDLTSIDPVLTTFFNLSVLYLHGNSIQRLGEVNKLAVLPRLRSLTLHGNPMEEEKGYR

SEQ ID NO: 432 - protein, 192 aa, Homo sapiens; identical to SEQ ID NO: 428

SEQ ID NO: 433 - protein, 192 aa, Homo sapiens; identical to SEQ ID NO: 428

SEQ ID NO: 434 - protein, 38 aa, Homo sapiens; identical to SEQ ID NO: 430

SEQ ID NO: 435 - protein, 146 aa, Homo sapiens; identical to SEQ ID NO: 431

SEQ ID NO: 436 - protein, 38 aa, Homo sapiens; identical to SEQ ID NO: 430

SEQ ID NO: 437 - protein, 192 aa, Homo sapiens; identical to SEQ ID NO: 428

SEQ ID NO: 438 - protein, 282 aa, Homo sapiens
MRFARSKRGLRLKTVDSCFQDLKESRLVEDTFTIDEVSEVLNGLQAVVHSEVESELINTAYTNVLLLRQLFAQAEKWYLKLQTDISELENRELLEQVAEFEKAEITSSNKKPILDVTKPKLAPLNEGGTAELLNKEILRLQEENEKLKSRLKTIEIQATNALDEKSKLEKALQDLQLDQGNQKDFIKAQDLSNLENTVAALKSEFQKTLNDKTENQKSLEENLATAKHDLLRVQEQLHMAEKELEKKFQQTAAYRNMKEILTKKNDQIKDLRKRLAQYEPED

SEQ ID NO: 439 - protein, 487 aa, Homo sapiens
MAAFRGDGREEDNYYGTPKPPAEPAPLLLNVTDQILPGATPSAEGKRKRNKSVSNMEKASIEPPEEEEEERPVVNGNGVVVTPESSEHEDKSAGASGEMPSQPYPAPVYSQPEELKEQMDDTKPTKPEDNEEPDPLPDNWEMAYTEKGEVYFIDHNTKTTSWLDPRLAKKAKPPEECKENELPYGWEKIDDPIYGTYYVDHINRRTQFENPVLEAKRKLQQHNMPHTELGTKPLQAPGFREKPLFTRDASQLKGTFLSTTLKKSNMGFGFTIIGGDEPDEFLQVKSVIPDGPAAQDGKMETGDVIVYINEVCVLGHTHADVVKLFQSVPIGQSVNLVLCRGYPLPFDPEDPANSMVPPLAIMERPPPVMVNGRHNYETYLEYISRTSQSVPDITDRPPHSLHSMPTDGQLDGTYPPPVHDDNVSMASSGATQAELMTLTIVKGAQGFGFTIADSPTGQRVKQILDIQGCPGLCEGDLIVEINQQNVQ

SEQ ID NO: 440 - protein, 172 aa, Homo sapiens
MVAGMLGLREEKSEDQDLQGLKDKPLKFKKVKKDKKEEKEGKHEPVQPSAHHSAEPAEAGKAETSEGSGSAPAVPEASASPKQRRSIIRDRGPMYDDPTLPEGWTRKLKQRKSGRSAGKYDVYLINPQGKAFRSKVELIAYFEKLQELAEAGDAPKGAAPRDPRRPRQRVCR

SEQ ID NO: 441 - protein, 486 aa, Homo sapiens
MVAGMLGLREEKSEDQDLQGLKDKPLKFKKVKKDKKEEKEGKHEPVQPSAHHSAEPAEAGKAETSEGSGSAPAVPEASASPKQRRSIIRDRGPMYDDPTLPEGWTRKLKQRKSGRSAGKYDVYLINPQGKAFRSKVELIAYFEKVGDTSLDPNDFDFTVTGRGSPSRREQKPPKKPKSPKAPGTGRGRGRPKGSGTTRPKAATSEGVQVKRVLEKSPGKLLVKMPFQTSPGGKAEGGGATTSTQVMVIKRPGRKRKAEADPQAIPKKRGRKPGSVVAAAAAEAKKKAVKESSIRSVQETVLPIKKRKTRETVSIEVKEVVKPLLVSTLGEKSGKGLKTCKSPGRKSKESSPKGRSSSASSPPKKEHHHHHHHSESPKAPVPLLPPLPPPPPEPESSEDPTSPPEPQDLSSSVCKEEKMPRGGSLESDGCPKEPAKTQPAVATAATAAEKYKHRGEGERKDIVSSSMPRPNREEPVDSRTPVTERVS

SEQ ID NO: 442 - protein, 823 aa, Homo sapiens
MKINNEEIVSDPIYIEVQGLPHFTKQPESMNVTRNTAFNLTCQAVGPPEPVNIFWVQNSSRVNEQPEKSPSVLTVPGLTEMAVFSCEAHNDKGLTVSKGVQINIKAIPSPPTEVSIRNSTAHSILISWVPGFDGYSPFRNCSIQVKEADPLSNGSVMIFNTSALPHLYQIKQLQALANYSIGVSCMNEIGWSAVSPWILASTTEGAPSVAPLNVTVFLNESSDNVDIRWMKPPTKQQDGELVGYRISHVWQSAGISKELLEEVGQNGSRARISVQVHNATCTVRIAAVTRGGVGPFSDPVKIFIPAHGWVDYAPSSTPAPGNADPVLIIFGCFCGFILIGLILYISLAIRKRVQETKFGNAFTEEDSELVVNYIAKKSFCRRAIELTLHSLGVSEELQNKLEDVVIDRNLLILGKILGEGEFGSVMEGNLKQEDGTSLKVAVKTMKLDNSSQREIEEFLSEAACMKDFSHPNVIRLLGVCIEMSSQGIPKPMVILPFMKYGDLHTYLLYSRLETGPKHIPLQTLLKFMVDIALGMEYLSNRNFLHRDLAARNCMLRDDMTVCVADFGLSKKIYSGDYYRQGRIAKMPVKWIAIESLADRVYTSKSDVWAFGVTMWEIATRGMTPYPGVQNHEMYDYLLHGHRLKQPEDCLDELYEIMYSCWRTDPLDRPTFSVLRLQLEKLLESLPDVRNQADVIYVNTQLLESSEGLAQGSTLAPLDLNIDPDSIIASCTPRAAISVVTAEVHDSKPHEGRYILNGGSEEWEDLTSAPSAAVTAEKNSVLPGERLVRNGVSWSHSSMLPLGSSLPDELLFADDSSEGSEVLM

SEQ ID NO: 443 - protein, 374 aa, Homo sapiens
MVTCFHVPYSALTMFISTEQTERDSATAYRMTVEVLGTVLGTAIQGQIVGQADTPCFQDLNSSTVASQSANHTHGTTSHRETQKAYLLAAGVIVCIYIICAVILILGVREQREPYEAQQSEPIAYFRGLRLVMSHGPYIKLITGFLFTSLAFMLVEGNFVLFCTYTLGFRNEFQNLLLAIMLSATLTIPIWQWFLTRFGKKTAVYVGISSAVPFLILVALMESNLIITYAVAVAAGISVAAAFLLPWSMLPDVIDDFHLKQPHFHGTEPIFFSFYVFFTKFASGVSLGISTLSLDFAGYQTRGCSQPERVKFTLNMLVTMAPIVLILLGLLLFKMYPIDEERRRQNKKALQALRDEASSSGCSETDSTELASIL

SEQ ID NO: 444 - protein, 243 aa, Homo sapiens
MRQMIRSFSEPFGRDLLSISDGRGRAHNRRGHNDGEDSLTHTDVSSFQTMDQMVSNMRNYMQKLERNFGQLSVDPNGHSFCSSSVMTYSKIGDEPPKVFQASTQTRRAPGGIKETRKAMRDSDSGLEKMAIGHHIHDRAHVIKKSKNKKTGDEEVNQEFINMNESDAHAFDEEWQSEVLKYKPGRHNLGNTRMRSVGHENPGSRELKRREKPQQSPAIEHGRRSNVLGDKLHIKGSSVKSNKK

SEQ ID NO: 445 - protein, 258 aa, Homo sapiens
MRQMIRSFSEPFGRDLLSISDGRGRAHNRRGHNDGEDSLTATSCSLVPFGDFGGMHTDVSSFQTMDQMVSNMRNYMQKLERNFGQLSVDPNGHSFCSSSVMTYSKIGDEPPKVFQASTQTRRAPGGIKETRKAMRDSDSGLEKMAIGHHIHDRAHVIKKSKNKKTGDEEVNQEFINMNESDAHAFDEEWQSEVLKYKPGRHNLGNTRMRSVGHENPGSRELKRREKPQQSPAIEHGRRSNVLGDKLHIKGSSVKSNKK

SEQ ID NO: 446 - protein, 243 aa, Homo sapiens; identical to SEQ ID NO: 444

SEQ ID NO: 447 - protein, 200 aa, Homo sapiens
MRQMIRSFSEPFGRDLLSISDGRGRAHNRRGHNDGEDSLTHTDVSSFQTMDQMVSNMRNYMQKLERNFIKETRKAMRDSDSGLEKMAIGHHIHDRAHVIKKSKNKKTGDEEVNQEFINMNESDAHAFDEEWQSEVLKYKPGRHNLGNTRMRSVGHENPGSRELKRREKPQQSPAIEHGRRSNVLGDKLHIKGSSVKSNKK

SEQ ID NO: 448 - protein, 174 aa, Homo sapiens
MRQMIRSFSEPFGRDLLSISDGRGRAHNRRGHNDGEDSLTATSCSLVPFGDFGGMHTDVSSFQTMDQMVSNMRNYMQKLERNFGQLSVDPNGHSFCSSSVMTYSKIGDEPPKVFQASTQTRRAPGGIKETRKAMRDSDSGLEKMAIGHHIHDRAHVIKKSKNKKTGDEEVNQEF

SEQ ID NO: 449 - protein, 221 aa, Homo sapiens
MEGATDVNESGSRSSKTFKPKKNIPEGSHQYELLKHAEATLGSGNLRMAVMLPEGEDLNEWVAVNTVDFFNQINMLYGTITDFCTEESCPVMSAGPKYEYHWADGTNIKKPIKCSAPKYIDYLMTWVQDQLDDETLFPSKIGVPFPKNFMSVAKTILKRLFRVYAHIYHQHFDPVIQLQEEAHLNTSFKHFIFFVQEFNLIDRRELAPLQELIEKLTSKDR

SEQ ID NO: 450 - protein, 185 aa, Homo sapiens
MSAFNLLHLVTKSQPVALRACGLPSGSCRDKKNCKVVFSQQELRKRLTPLQYHVTQEKGTESAFEGEYTHHKDPGIYKCVVCGTPLFKSETKFDSGSGWPSFHDVINSEAITFTDDFSYGMHRVETSCSQCGAHLGHIFDDGPRPTGKRYCINSAALSFTPADSSGTAEGGSGVASPAQADKAEL

SEQ ID NO: 451 - protein, 119 aa, Homo sapiens
MASREDELRNCVVCGDQATGYHFNALTCEGCKGFFRRTVSKSIGPTCPFAGSCEVSKTQRRHCPACRLQKCLDAGMRKDTSSSSVHPSPALAHPGPCAASGHTLRRHQHFHGTASHQVY

SEQ ID NO: 452 - protein, 238 aa, Homo sapiens
MASREDELRNCVVCGDQATGYHFNALTCEGCKGFFRRTVSKSIGPTCPFAGSCEVSKTQRRHCPACRLQKCLDAGMRKDMILSAEALALRRAKQAQRRAQQTPVQLSKEQEELIRTLLGAHTRHMGTMFEQFVQFRPPAHLFIHHQPLPTLAPVLPLVTHFADINTFMVLQVIKFTKDLPVFRSLPIEDQISLLKGAAVEICHIVLNTTFCLQTQNFLCGPLRYTIEDGARGEMVLEQ

SEQ ID NO: 453 - protein, 348 aa, Homo sapiens
MASREDELRNCVVCGDQATGYHFNALTCEGCKGFFRRTVSKSIGPTCPFAGSCEVSKTQRRHCPACRLQKCLDAGMRKDMILSAEALALRRAKQAQRRAQQTPVQLSKEQEELIRTLLGAHTRHMGTMFEQFVQFRPPAHLFIHHQPLPTLAPVLPLVTHFADINTFMVLQVIKFTKDLPVFRSLPIEDQISLLKGAAVEICHIVLNTTFCLQTQNFLCGPLRYTIEDGARVGFQVEFLELLFHFHGTLRKLQLQEPEYVLLAAMALFSPDRPGVTQRDEIDQLQEEMALTLQSYIKGQQRRPRDRFLYAKLLGLLAELRSINEAYGYQIQHIQGLSAMMPLLQEICS

SEQ ID NO: 454 - protein, 352 aa, Homo sapiens
MASREDELRNCVVCGDQATGYHFNALTCEGCKGFFRRTVSKSIGPTCPFAGSCEVSKTQRRHCPACRLQKCLDAGMRKDMILSAEALALRRAKQAQRRAQQTPVQLSKEQEELIRTLLGAHTRHMGTMFEQFVQFRPPAHLFIHHQPLPTLAPVLPLVTHFADINTFMVLQVIKFTKDLPVFRSLPIEDQISLLKGAAVEICHIVLNTTFCLQTQNFLCGPLRYTIEDGARVSPTVGFQVEFLELLFHFHGTLRKLQLQEPEYVLLAAMALFSPDRPGVTQRDEIDQLQEEMALTLQSYIKGQQRRPRDRFLYAKLLGLLAELRSINEAYGYQIQHIQGLSAMMPLLQEICS

SEQ ID NO: 455 - protein, 147 aa, Homo sapiens
MASREDELRNCVVCGDQATGYHFNALTCEGCKGFFRRTVSKSIGPTCPFAGSCEVSKTQRRHCPACRLQKCLDAGMRKDIPCPLKTRSPFSREQLWKSVTSYSIPLSVSKHKTSSAGLFATQLKMEPVTDLELPREMRLISCKRRWH

SEQ ID NO: 456 - protein, 357 aa, Homo sapiens
MASREDELRNCVVCGDQATGYHFNALTCEGCKGFFRRTVSKSIGPTCPFAGSCEVSKTQRRHCPACRLQKCLDAGMRKDMILSAEALALRRAKQAQRRAQQTPVQLSKEQEELIRTLLGAHTRHMGTMFEQFVQFRPPAHLFIHHQPLPTLAPVLPLVTHFADINTFMVLQVIKFTKDLPVFRSLPIEDQISLLKGAAVEICHIVLNTTFCLQTQNFLCGPLRYTIEDGARVSPTVGFQVEFLELLFHFHGTLRKLQLQEPEYVLLAAMALFSPAPYLTDRPGVTQRDEIDQLQEEMALTLQSYIKGQQRRPRDRFLYAKLLGLLAELRSINEAYGYQIQHIQGLSAMMPLLQEICS

SEQ ID NO: 457 - protein, 309 aa, Homo sapiens
MASREDELRNCVVCGDQATGYHFNALTCEGCKGFFRRTVSKSIGPTCPFAGSCEVSKTQRRHCPACRLQKCLDAGMRKDMILSAEALALRRAKQAQRRAQQTPVQLSKEQEELIRTLLGAHTRHMGTMFEQFVQFRPPAHLFIHHQPLPTLAPVLPLVTHFADINTFMVLQVIKFTKDLPVFRSLPIEDQISLLKGAAVEICHIVLNTTFCLQTQNFLCGPLRYTIEDGARDRPGVTQRDEIDQLQEEMALTLQSYIKGQQRRPRDRFLYAKLLGLLAELRSINEAYGYQIQHIQGLSAMMPLLQEICS

SEQ ID NO: 458 - protein, 296 aa, Homo sapiens
MASREDELRNCVVCGDQATGYHFNALTCEGCKGFFRRTVSKSIGPTCPFAGSCEVSKTQRRHCPACRLQKCLDAGMRKDMILSAEALALRRAKQAQRRAQQTPVQLSKEQEELIRTLLGAHTRHMGTMFEQFVQFRPPAHLFIHHQPLPTLAPVLPLVTHFADINTFMVLQVIKFTKDLPVFRSLPIEDQISLLKGAAVEICHIVLNTTFCLQTQNFLCGPLRYTIEDGARDRPGVTQRDEIDQLQEEMALTLQSYIKGQQRRPRDRSPGTPWIHWSGKMLGPKIGPGSKGAQWLQ

SEQ ID NO: 459 - protein, 147 aa, Homo sapiens; identical to SEQ ID NO: 455

SEQ ID NO: 460 - protein, 340 aa, Homo sapiens
MASREDELRNCVVCGDQATGYHFNALTCEGCKGFFRRTVSKSIGPTCPFAGSCEVSKTQRRHCPACRLQKCLDAGMRKDMILSAEALALRRAKQAQRRAQQTPVQLSKEQEELIRTLLGAHTRHMGTMFEQFVQFRPPAHLFIHHQPLPTLAPVLPLVTHFADINTFMVLQVIKFTKDLPVFRSLPIEDQISLLKGAAVEICHIVLNTTFCLQTQNFLCGPLRYTIEDGARVGFQVEFLELLFHFHGTLRKLQLQEPEYVLLAAMALFSPAPYLTDRPGVTQRDEIDQLQEEMALTLQSYIKGQQRRPRDRSPGTPWIHWSGKMLGPKIGPGSKGAQWLQ

SEQ ID NO: 461 - protein, 314 aa, Homo sapiens
MASREDELRNCVVCGDQATGYHFNALTCEGCKGFFRRTVSKSIGPTCPFAGSCEVSKTQRRHCPACRLQKCLDAGMRKDMILSAEALALRRAKQAQRRAQQTPVQLSKEQEELIRTLLGAHTRHMGTMFEQFVQFRPPAHLFIHHQPLPTLAPVLPLVTHFADINTFMVLQVIKFTKDLPVFRSLPIEDQISLLKGAAVEICHIVLNTTFCLQTQNFLCGPLRYTIEDGARAPYLTDRPGVTQRDEIDQLQEEMALTLQSYIKGQQRRPRDRFLYAKLLGLLAELRSINEAYGYQIQHIQGLSAMMPLLQEICS

SEQ ID NO: 462 - protein, 119 aa, Homo sapiens; identical to SEQ ID NO: 451

SEQ ID NO: 463 - protein, 339 aa, Homo sapiens
MASREDELRNCVVCGDQATGYHFNALTCEGCKGFFRRTVSKSIGPTCPFAGSCEVSKTQRRHCPACRLQKCLDAGMRKDMILSAEALALRRAKQAQRRAQQTPVQLSKEQEELIRTLLGAHTRHMGTMFEQFVQFRPPAHLFIHHQPLPTLAPVLPLVTHFADINTFMVLQVIKFTKDLPVFRSLPIEDQISLLKGAAVEICHIVLNTTFCLQTQNFLCGPLRYTIEDGARVSPTVGFQVEFLELLFHFHGTLRKLQLQEPEYVLLAAMALFSPDRPGVTQRDEIDQLQEEMALTLQSYIKGQQRRPRDRSPGTPWIHWSGKMLGPKIGPGSKGAQWLQ

SEQ ID NO: 464 - protein, 297 aa, Homo sapiens
MTNQESAVHVKMMPEFQKSSVRIKNPTRVEEIICGLIKGGAAKLQIITDFDMTLSRFSYKGKRCPTCHNIIDNCKLVTDECRKKLLQLKEKYYAIEVDPVLTVEEKYPYMVEWYTKSHGLLVQQALPKAKLKEIVAESDVMLKEGYENFFDKLQQHSIPVFIFSAGIGDVLEEVIRQAGVYHPNVKVVSNFMDFDETGVLKGFKGELIHVFNKHDGALRNTEYFNQLKDNSNIILLGDSQGDLRMADGVANVEHILKIGYLNDRVDELLEKYMDSYDIVLVQDESLEVANSILQKIL

SEQ ID NO: 465 - protein, 297 aa, Homo sapiens; identical to SEQ ID NO: 464

SEQ ID NO: 466 - protein, 1132 aa, Homo sapiens
MASDGASALPGPDMSMKPSAAPSPSPALPFLPPTSDPPDHPPREPPPQPIMPSVFSPDNPLMLSAFPSSLLVTGDGGPCLSGAGAGKVIVKVKTEGGSAEPSQTQNFILTQTALNSTAPGTPCGGLEGPAPPFVTASNVKTILPSKAVGVSQEGPPGLPPQPPPPVAQLVPIVPLEKAWPGPHGTTGEGGPVATLSKPSLGDRSKISKDVYENFRQWQRYKALARRHLSQSPDTEALSCFLIPVLRSLARLKPTMTLEEGLPLAVQEWEHTSNFDRMIFYEMAERFMEFEAEEMQIQNTQLMNGSQGLSPATPLKLDPLGPLASEVCQQPVYIPKKAASKTRAPRRRQRKAQRPPAPEAPKEIPPEAVKEYVDIMEWLVGTHLATGESDGKQEEEGQQQEEEGMYPDPGLLSYINELCSQKVFVSKVEAVIHPQFLADLLSPEKQRDPLALIEELEQEEGLTLAQLVQKRLMALEEEEDAEAPPSFSGAQLDSSPSGSVEDEDGDGRLRPSPGLQGAGGAACLGKVSSSGKRAREVHGGQEQALDSPRGMHRDGNTLPSPSSWDLQPELAAPQGTPGPLGVERRGSGKVINQVSLHQDGHLGGAGPPGHCLVADRTSEALPLCWQGGFQPESTPSLDAGLAELAPLQGQGLEKQVLGLQKGQQTGGRGVLPQGKEPLAVPWEGSSGAMWGDDRGTPMAQSYDQNPSPRAAGERDDVCLSPGVWLSSEMDAVGLELPVQIEEVIESFQVEKCVTEYQEGCQGLGSRGNISLGPGETLVPGDTESSVIPCGGTVAAAALEKRNYCSLPGPLRANSPPLRSKENQEQSCETVGHPSDLWAEGCFPLLESGDSTLGSSKETLPPTCQGNLLIMGTEDASSLPEASQEAGSRGNSFSPLLETIEPVNILDVKDDCGLQLRVSEDTCPLNVHSYDPQGEGRVDPDLSKPKNLAPLQESQESYTTGTPKATSSHQGLGSTLPRRGTRNAIVPRETSVSKTHRSADRAKGKEKKKKEAEEEDEELSNFAYLLASKLSLSPREHPLSPHHASGGQGSQRASHLLPAGAKGPSKLPYPVAKSGKRALAGGPAPTEKTPHSGAQLGVPREKPLALGVVRPSQPRKRRCDSFVTGRRKKRRRSQ

SEQ ID NO: 467 - protein, 1230 aa, Homo sapiens
MIKTEKSYPERRLRGVLEELSCGCCRFLSLADKDQGHSSRTRLDRERLKSCMRELENMGQQARMLRAQVKRHTVRDKLRLCQNFLQKLRFLADEPQHSIPDIFIWMMSNNKRVAYARVPSKDLLFSIVEEETGKDCAKVKTLFLKLPGKRGFGSAGWTVQAKVELYLWLGLSKQRKEFLCGLPCGFQEVKAAQGLGLHAFPPVSLVYTKKQAFQLRAHMYQARSLFAADSSGLSDPFARVFFINQSQCTEVLNETLCPTWDQMLVFDNLELYGEAHELRDDPPIIVIEIYDQDSMGKADFMGRTFAKPLVKMADEAYCPPRFPPQLEYYQIYRGNATAGDLLAAFELLQIGPAGKADLPPINGPVDVDRGPIMPVPMGIRPVLSKYRVEVLFWGLRDLKRVNLAQVDRPRVDIECAGKGVQSSLIHNYKKNPNFNTLVKWFEVDLPENELLHPPLNIRVVDCRAFGRYTLVGSHAVSSLRRFIYRPPDRSAPSWNTTGEVVVTMEPEVPIKKLETMVKLDATSEAVVKVDVAEEEKEKKKKKKGTAEEPEEEEPDESMLDWWSKYFASIDTMKEQLRQQEPSGIDLEEKEEVDNTEGLKGSMKGKEKARAAKEEKKKKTQSSGSGQGSEAPEKKKPKIDELKVYPKELESEFDNFEDWLHTFNLLRGKTGDDEDGSTEEERIVGRFKGSLCVYKVPLPEDVSREAGYDSTYGMFQGIPSNDPINVLVRVYVVRATDLHPADINGKADPYIAIRLGKTDIRDKENYISKQLNPVFGKSFDIEASFPMESMLTVAVYDWDLVGTDDLIGETKIDLENRFYSKHRATCGIAQTYSTHGYNIWRDPMKPSQILTRLCKDGKVDGPHFGPPGRVKVANRVFTGPSEIEDENGQRKPTDEHVALLALRHWEDIPRAGCRLVPEHVETRPLLNPDKPGIEQGRLELWVDMFPMDMPAPGTPLDISPRKPKKYELRVIIWNTDEVVLEDDDFFTGEKSSDIFVRGWLKGQQEDKQDTDVHYHSLTGEGNFNWRYLFPFDYLAAEEKIVISKKESMFSWDETEYKIPARLTLQIWDADHFSADDFLGAIELDLNRFPRGAKTAKQCTMEMATGEVDVPLVSIFKQKRVKGWWPLLARNENDEFELTGKVEAELHLLTAEEAEKNPVGLARNEPDPLEKPNRPDTSFIWFLNPLKSARYFLWHTYRWLLLKLLLLLLLLLLLALFLYSVPGYLVKKILGA

SEQ ID NO: 468 - protein, 1230 aa, Homo sapiens
MIKTEKSYPERRLRGVLEELSCGCCRFLSLADKDQGHSSRTRLDRERLKSCMRELENMGQQARMLRAQVKRHTVRDKLRLCQNFLQKLRFLADEPQHSIPDIFIWMMSNNKRVAYARVPSKDLLFSIVEEETGKDCAKVKTLFLKLPGKRGFGSAGWTVQAKVELYLWLGLSKQRKEFLCGLPCGFQEVKAAQGLGLHAFPPVSLVYTKKQAFQLRAHMYQARSLFAADSSGLSDPFARVFFINQSQCTEVLNETLCPTWDQMLVFDNLELYGEAHELRDDPPIIVIEIYDQDSMGKADFMGRTFAKPLVKMADEAYCPPRFPPQLEYYQIYRGNATAGDLLAAFELLQIGPAGKADLPPINGPVDVDRGPIMPVPMGIRPVLSKYRVEVLFWGLRDLKRVNLAQVDRPRVDIECAGKGVQSSLIHNYKKNPNFNTLVKWFEVDLPENELLHPPLNIRVVDCRAFGRYTLVGSHAVSSLRRFIYRPPDRSAPSWNTTGEVVVTMEPEVPIKKLETMVKLDATSEAVVKVDVAEEEKEKKKKKKGTAEEPEEEEPDESMLDWWSKYFASIDTMKEQLRQQEPSGIDLEEKEEVDNTEGLKGSMKGKEKARAAKEEKKKKTQSSGSGQGSEAPEKKKPKIDELKVYPKELESEFDNFEDWLHTFNLLRGKTGDDEDGSTEEERIVGRFKGSLCVYKVPLPEDVSREAGYDSTYGMFQGIPSNDPINVLVRVYVVRATDLHPADINGKADPYIAIRLGKTDIRDKENYISKQLNPVFGKSFDIEASFPMESMLTVAVYDWDLVGTDDLIGETKIDLENRFYSKHRATCGIAQTYSTHGYNIWRDPMKPSQILTRLCKDGKVDGPHFGPPGRVKVANRVFTGPSEIEDENGQRKPTDEHVALLALRHWEDIPRAGCRLVPEHVETRPLLNPDKPGIEQGRLELWVDMFPMDMPAPGTPLDISPRKPKKYELRVIIWNTDEVVLEDDDFFTGEKSSDIFVRGWLKGQQEDKQDTDVHYHSLTGEGNFNWRYLFPFDYLAAEEKIVISKKESMFSWDETEYKIPARLTLQIWDADHFSADDFLGAIELDLNRFPRGAKTAKQCTMEMATGEVDVPLVSIFKQKRVKGWWPLLARNENDEFELTGKVEAELHLLTAEEAEKNPVGLARNEPDPLEKPNRPDTAFVWFLNPLKSIKYLICTRYKWLIIKIVLALLGLLMLGLFLYSLPGYMVKKLLGA

SEQ ID NO: 469 - protein, 458 aa, Homo sapiens
MTKYPDNLSDSLFSGDEENAGTEEIKNEINGNWISASSINEARINAKAKRRLRKNSSRDSGRGDSVSDSGSDALRSGLTVPTSPKGRLLDRRSRSGKGRGLPKKGGAGGKGVWGTPGQVYDVEEVDVKDPNYDDDQENCVYETVVLPLDERAFEKTLTPIIQEYFEHGDTNEVAEMLRDLNLGEMKSGVPVLAVSLALEGKASHREMTSKLLSDLCGTVMSTTDVEKSFDKLLKDLPELALDTPRAPQLVGQFIARAVGDGILCNTYIDSYKGTVDCVQARAALDKATVLLSMSKGGKRKDSVWGSGGGQQSVNHLVKEIDMLLKEYLLSGDISEAEHCLKELEVPHFHHELVYEAIIMVLESTGESTFKMILDLLKSLWKSSTITVDQMKRGYERIYNEIPDINLDVPHSYSVLERFVEECFQAGIISKQLRDLCPSRGRKRFVSEGDGGRLKPESY

SEQ ID NO: 470 - protein, 88 aa, Homo sapiens
MKICTSRSQILEQQKSYPQRANKPGPTHSWEQRSTFLQSCSRRSPPVRDLWALGCIIYQLVAGLPPFRAGNEYLIFQKIIKLEYDFPE

SEQ ID NO: 471 - protein, 229 aa, Homo sapiens
MACSPDAVVSPSSAFLRSGSVYEPLKSINLPRPDNETLWDKLDHYYRIVKSTLLLYQSPTTGLFPTKTCGGDQKAKIQDSLYCAAGAWALALAYRRIDDDKGRTHELEHSAIKCMRGILYCYMRQADKVQQFKQDPRPTTCLHSVFNVHTGDELLSYEEYGHLQINAVSLYLLYLVEMISSGLQIIYNTDEVSFIQNLVFCVERVYRVPDFGVWERGSKYNNGSTELHS

SEQ ID NO: 472 - protein, 1086 aa, Homo sapiens
MACSPDAVVSPSSAFLRSGSVYEPLKSINLPRPDNETLWDKLDHYYRIVKSTLLLYQSPTTGLFPTKTCGGDQKAKIQDSLYCAAGAWALALAYRRIDDDKGRTHELEHSAIKCMRGILYCYMRQADKVQQFKQDPRPTTCLHSVFNVHTGDELLSYEEYGHLQINAVSLYLLYLVEMISSGLQIIYNTDEVSFIQNLVFCVERVYRVPDFGVWERGSKYNNGSTELHSSSVGLAKAALEAINGFNLFGNQGCSWSVIFVDLDAHNRNRQTLCSLLPRESRSHNTDAALLPCISYPAFALDDEVLFSQTLDKVVRKLKGKYGFKRFLRDGYRTSLEDPNRCYYKPAEIKLFDGIECEFPIFFLYMMIDGVFRGNPKQVQEYQDLLTPVLHHTTEGYPVVPKYYYVPADFVEYEKNNPGSQKRFPSNCGRDGKLFLWGQALYIIAKLLADELISPKDIDPVQRYVPLKDQRNVSMRFSNQGPLENDLVVHVALIAESQRLQVFLNTYGIQTQTPQQVEPIQIWPQQELVKAYLQLGINEKLGLSGRPDRPIGCLGTSKIYRILGKTVVCYPIIFDLSDFYMSQDVFLLIDDIKNALQFIKQYWKMHGRPLFLVLIREDNIRGSRFNPILDMLAALKKGIIGGVKVHVDRLQTLISGAVVEQLDFLRISDTEELPEFKSFEELEPPKHSKVKRQSSTPSAPELGQQPDVNISEWKDKPTHEILQKLNDCSCLASQAILLGILLKREGPNFITKEGTVSDHIERVYRRAGSQKLWSVVRRAASLLSKVVDSLAPSITNVLVQGKQVTLGAFGHEEEVISNPLSPRVIQNIIYYKCNTHDEREAVIQQELVIHIGWIISNNPELFSGMLKIRIGWIIHAMEYELQIRGGDKPALDLYQLSPSEVKQLLLDILQPQQNGRCWLNRRQIDGSLNRTPTGFYDRVWQILERTPNGIIVAGKHLPQQPTLSDMTMYEMNFSLLVEDTLGNIDQPQYRQIVVELLMVVSIVLERNPELEFQDKVDLDRLVKEAFNEFQKDQSRLKEIEKQDDMTSFYNTPPLGKRGTCSYLTKAVMNLLLEGEVKPNNDDPCLIS

SEQ ID NO: 473 - protein, 484 aa, Homo sapiens
MACRGGAGNGHRASATLSRVSPGSLYTCRTRTHNICMVSDFFYPNMGGVESHIYQLSQCLIERGHKVIIVTHAYGNRKGIRYLTSGLKVYYLPLKVMYNQSTATTLFHSLPLLRYIFVRERVTIIHSHSSFSAMAHDALFHAKTMGLQTVFTDHSLFGFADVSSVLTNKLLTVSLCDTNHIICVSYTSKENTVLRAALNPEIVSVIPNAVDPTDFTPDPFRRHDSITIVVVSRLVYRKGIDLLSGIIPELCQKYPDLNFIIGGEGPKRIILEEVRERYQLHDRVRLLGALEHKDVRNVLVQGHIFLNTSLTEAFCMAIVEAASCGLQVVSTRVGGIPEVLPENLIILCEPSVKSLCEGLEKAIFQLKSGTLPAPENIHNIVKTFYTWRNVAERTEKVYDRVSVEAVLPMDKRLDRLISHCGPVTGYIFALLAVFNFLFLIFLRWMTPDSIIDVAIDATGPRGAWTNNYSHSKRGGENNEISETR

SEQ ID NO: 474 - protein, 274 aa, Homo sapiens
MACRGGAGNGHRASATLSRVSPGSLYTCRTRTHNICMVSDFFYPNMGGVESHIYQLSQCLIERGHKVIIVTHAYGNRKGIRYLTSGLKVYYLPLKVMYNQSTATTLFHSLPLLRYIFVRERVTIIHSHSSFSAMAHDALFHAKTMGLQTVFTDHSLFGFADVSSVLTNKLLTVSLCDTNHIICVSYTSKENTVLRAALNPEIVSVIPNAVDPTDFTPDPFRRHDSITIVVVSRLVYRKDGVSLCLPGWSAVAQSRLTANSASRVHAILLPQPPE

SEQ ID NO: 475 - protein, 703 aa, Homo sapiens
MQSAKYFNYTVKVLGQGEEWRGGDGINSIGGGQKVRLMKEVMEHYADQDDLVVMFTECFDVIFAGGPEEVLKKFQKANHKVVFAADGILWPDKRLADKYPVVHIGKRYLNSGGFIGYAPYVNRIVQQWNLQDNDDDQLFYTKVYIDPLKREAINITLDHKCKIFQTLNGAVDEVVLKFENGKARAKNTFYETLPVAINGNGPTKILLNYFGNYVPNSWTQDNGCTLCEFDTVDLSAVDVHPNVSIGVFIEQPTPFLPRFLDILLTLDYPKEALKLFIHNKEVYHEKDIKVFFDKAKHEIKTIKIVGPEENLSQAEARNMGMDFCRQDEKCDYYFSVDADVVLTNPRTLKILIEQNRKIIAPLVTRHGKLWSNFWGALSPDGYYARSEDYVDIVQGNRVGVWNVPYMANVYLIKGKTLRSEMNERNYFVRDKLDPDMALCRNAREMTLQREKDSPTPETFQMLSPPKGVFMYISNRHEFGRLLSTANYNTSHYNNDLWQIFENPVDWKEKYINRDYSKIFTENIVEQPCPDVFWFPIFSEKACDELVEEMEHYGKWSGGKHHDSRISGGYENVPTDDIHMKQVDLENVWLHFIREFIAPVTLKVFAGYYTKGFALLNFVVKYSPERQRSLRPHHDASTFTINIALNNVGEDFQGGGCKFLRYNCSIESPRKGWSFMHPGRLTHLHEGLPVKNGTRYIAVSFIDP

SEQ ID NO: 476 - protein, 112 aa, Homo sapiens
MVSISCLVIRPPRPPKVLGLQEGQENVEILPSGERPQANQKRITTPYMTKYERARVLGTRALQIAMCAPVMVELEGETDPLLIAMKELKARKIPIIIRRYLPDGSYEDWGVD

SEQ ID NO: 477 - protein, 125 aa, Homo sapiens
MFLLPRLQLLGQMRLCDYVCDLLLEESNVQPVSTPVTVCGDIHGQFYDLCELFRTGGQVPDTNYIFMGDFVDRGYYSLETFTYLLALKAKWPDRITLLRGNHESRQITQVYGFYDECQTKYGNAN

SEQ ID NO: 478 - protein, 218 aa, Homo sapiens
MNATGGDDPRNAAGGCEREPQSLTRVDLSSSVLPGDSVGLAVILHTDSRKDSPPAGSPAGRSIYNSFYVYCKGPCQRVQPGKLRVQCSTCRQATLTLTQGPSCWDDVLIPNRMSGECQSPHCPGTSAEFFFKCGAHPTSDKETSVALHLIATNSRNITCITCTDVRSPVLVFQCNSRHVICLDCFHLYCVTRLNDRQFVHDPQLGYSLPCVVCLLPGM

SEQ ID NO: 479 - protein, 168 aa, Homo sapiens
MLRKDQKTIYRQGVKVAISAIYMDLEICEVLERSHSPPLKLTPASSTHPNLHAYLQGNTQVSRKKLLPLLQEALSAYFDSMKIPSGQPETADVSREQVDKELDRASNSLISGLSQDEEDPPLPPTPMNSLVDECPLDQGLPKLSAEAVFEKCSQISLSQSTTASLSKK

SEQ ID NO: 480 - protein, 167 aa, Homo sapiens
MTGMTADSRSQVQRARYEAANWKYKYGYEIPVDMLCKRIADISQVYTQNAEMRPLGCCMILIGIDEEQGPQVYKCDPAGYYCGFKATAAGVKQTESTSFLEKKVKKKFDWTFEQTVETAITCLSTVLSIDFKPSEIEVGVVTVENPKFRILTEAEIDAHLVALAERD

SEQ ID NO: 481 - protein, 92 aa, Homo sapiens
MQKEIQELKKECAGYRERLKNIKAATNHVTPEEKEQVYRERQKYCKEWRKRKRMATELSDAILEGYPKSKKQFFEEVGIETDEDYNVTLPDP

SEQ ID NO: 482 - protein, 362 aa, Homo sapiens
MEEAQRSYILTQGPLPNTCGHFWEMVWEQKSRGVVMLNRVMEKGSLKCAQYWPQKEEKEMIFEDTNLKLTLISEDIKSYYTVRQLELENLTTQETREILHFHYTTWPDFGVPESPASFLNFLFKVRESGSLSPEHGPVVVHCSAGIGRSGTFCLADTCLLLMDKRKDPSSVDIKKVLLEMRKFRMGLIQTADQLRFSYLAVIEGAKFIMGDSSVQDQWKELSHEDLEPPPEHIPPPPRPPKRILEPHNGKCREFFPNHQWVKEETQEDKDCPIKEEKGSPLNAAPYGIESMSQDTEVRSRVVGGSLRGAQAASPAKGEPSLPEKDEDHALSYWKPFLVNMCVATVLTAGAYLCYRFLFNSNT

SEQ ID NO: 483 - protein, 60 aa, Homo sapiens
MLVGNKSDLRHLRAVPTDEARAFAEKNNLSFIETSALDSTNVEEAFKNILTGGRGPDGCG

SEQ ID NO: 484 - protein, 178 aa, Homo sapiens
MDHTEGSPAEEPPAHAPSPGKFGERPPPKRLTREAMRNYLKERGDQTVLILHAKVAQKSYGNEKRFFCPPPCVYLMGSGWKKKKEQMERDGCSEQESQPCAFIGIGNSDQEMQQLNLEGKNYCTAKTLYISDSDKRKHFMLSVKMFYGNSDDIGVFLSKRIKVISKPSKKKQSLKNAD

SEQ ID NO: 485 - protein, 500 aa, Homo sapiens
MDHTEGSPAEEPPAHAPSPGKFGERPPPKRLTREAMRNYLKERGDQTVLILHAKVAQKSYGNEKRFFCPPPCVYLMGSGWKKKKEQMERDGCSEQESQPCAFIGIGNSDQEMQQLNLEGKNYCTAKTLYISDSDKRKHFMLSVKMFYGNSDDIGVFLSKRIKVISKPSKKKQSLKNADLCIASGTKVALFNRLRSQTVSTRYLHVEGGNFHASSQQWGAFFIHLLDDDESEGEEFTVRDGYIHYGQTVKLVCSVTGMALPRLIIRKVDKQTALLDADDPVSQLHKCAFYLKDTERMYLCLSQERIIQFQATPCPKEPNKEMINDGASWTIISTDKAEYTFYEGMGPVLAPVTPVPVVESLQLNGGGDVAMLELTGQNFTPNLRVWFGDVEAETMYRCGESMLCVVPDISAFREGWRWVRQPVQVPVTLVRNDGIIYSTSLTFTYTPEPGPRPHCSAAGAILRANSSQVPPNESNTNSEGSYTNASTNSTSVTSSTATVVS

SEQ ID NO: 486 - protein, 305 aa, Homo sapiens
MDLSGVKKKSLLGVKENNKKSSTRAPSPTKRKDRSDEKSKDRSKDKGATKESSEKDRGRDKTRKRRSASSGSSSTRSRSSSTSSSGSSTSTGSSSGSSSSSASSRSGSSSTSRSSSSSSSSGSPSPSRRRHDNRRRSRSKSKPPKRDEKERKRRSPSPKPTKVHIGRLTRNVTKDHIMEIFSTYGKIKMIDMPVERMHPHLSKGYAYVEFENPDEAEKALKHMDGGQIDGQEITATAVLAPWPRPPPRRFSPPRRMLPPPPMWRRSPPRMRRRSRSPRRRSPVRRRSRSPGRRRHRSRSSSNSSR

SEQ ID NO: 487 - protein, 305 aa, Homo sapiens; identical to SEQ ID NO: 486

SEQ ID NO: 488 - protein, 156 aa, Homo sapiens
MDLSGVKKKSLLGVKENNKKSSTRAPSPTKRKDRSDEKSKDRSKDKGATKESSEKDRGRDKTRKRRSASSGSSSTRSRSSSTSSSGSSTSTGSSSGSSSSSASSRSGSSSTSRSSSSSSSSGSPNPNHLKEMKRRGKGGAHLLSPPKCTLGDSPGM

SEQ ID NO: 489 - protein, 211 aa, Homo sapiens
MDLSGVKKKSLLGVKENNKKSSTSSSSGSPSPSRRRHDNRRRSRSKSKPPKRDEKERKRRSPSPKPTKVHIGRLTRNVTKDHIMEIFSTYGKIKMIDMPVERMHPHLSKGYAYVEFENPDEAEKALKHMDGGQIDGQEITATAVLAPWPRPPPRRFSPPRRMLPPPPMWRRSPPRMRRRSRSPRRRSPVRRRSRSPGRRRHRSRSSSNSSR

SEQ ID NO: 490 - protein, 238 aa, Homo sapiens
MIVRVTNRDIICQIAYARIEGDMIVCAAYAHELPKYGVKVGLTNYAAAYCTGLLLARRLLNRFGMDKIYEGQVEVTGDEYNVESIDGQPGAFTCYLDAGLARTTTGNKVFGALKGAVDGGLSIPHSTKRFPGYDSESKEFNAEVHRKHIMGQNVADYMRYLMEEDEDAYKKQFSQYIKNSVTPDMMEEMYKKAHAAIRENPVYEKKPKKEVKKKRWNRPKMSLAQKKDRVAQKKASFL

SEQ ID NO: 491 - protein, 64 aa, Homo sapiens
MPTKTLRITTRKTPCGEGSKTWDRFQMRIHKRLIDLHSPSEIVKQITSISIEPGVEVEVTIADA

SEQ ID NO: 492 - protein, 786 aa, Homo sapiens
MAFGASTFPPQYLSSEITLHPYAYSPYTLDSTQNVYSVPGSQYLYNQPSCYRGFQTVKHRNENTCPLPQEMKALFKKKTYDEKKTYDQQKFDSERADGTISSEIKSARGSHHLSIYAENSLKSDGYHKRTDRKSRIIAKNVSTSKPEFEFTTLDFPELQGAENNMSEIQKQPKWGPVHSVSTDISLLREVVKPAAVLSKGEIVVKNNPNESVTANAATNSPSCTRELSWTPMGYVVRQTLSTELSAAPKNVTSMINLKTIASSADPKNVSIPSSEALSSDPSYNKEKHIIHPTQKSKASQGSDLEQNEASRKNKKKKEKSTSKYEVLTVQEPPRIEDAEEFPNLAVASERRDRIETPKFQSKQQPQDNFKNNVKKSQLPVQLDLGGMLTALEKKQHSQHAKQSSKPVVVSVGAVPVLSKECASGERGRRMSQMKTPHNPLDSSAPLMKKGKQREIPKAKKPTSLKKIILKERQERKQRLQENAVSPAFTSDDTQDGESGGDDQFPEQAELSGPEGMDELISTPSVEDKSEEPPGTELQRDTEASHLAPNHTTFPKIHSRRFRDYCSQMLSKEVDACVTDLLKELVRFQDRMYQKDPVKAKTKRRLVLGLREVLKHLKLKKLKCVIISPNCEKIQSKGGLDDTLHTIIDYACEQNIPFVFALNRKALGRSLNKAVPVSVVGIFSYDGAQDQFHKMVELTVAARQAYKTMLENVQQELVGEPRPQAPPSLPTQGPSCPAEDGPPALKEKEEPHYIEIWKKHLEAYSGCTLELEESLEASTSQMMNLNL

SEQ ID NO: 493 - protein, 514 aa, Homo sapiens
MRLEWGPRPAALPWPAGMCAAERAEGAFTLQSVAQPMRPIASTATKCGNCGPGYSTPLEAMKGPREEIVYLPCIYRNTGTEAPDYLATVDVDPKSPQYCQVIHRLPMPNLKDELHHSGWNTCSSCFGDSTKSRTKLVLPSLISSRIYVVDVGSEPRAPKLHKVIEPKDIHAKCELAFLHTSHCLASGEVMISSLGDVKGNGKGGFVLLDGETFEVKGTWERPGGAAPLGYDFWYQPRHNVMISTEWAAPNVLRDGFNPADVEAGLYGSHLYVWDWQRHEIVQTLSLKDGLIPLEIRFLHNPDAAQGFVGCALSSTIQRFYKNEGGTWSVEKVIQVPPKKVKGWLLPEMPGLITDILLSLDDRFLYFSNWLHGDLRQYDISDPQRPRLTGQLFLGGSIVKGGPVQVLEDEELKSQPEPLVVKGKRVAGGPQMIQLSLDGKRLYITTSLYSAWDKQFYPDLIREGSVMLQVDVDTVKGGLKLNPNFLVDFGKEPLGPALAHELRYPGGDCSSDIWI

SEQ ID NO: 494 - protein, 165 aa, Homo sapiens
MRLEWGPRPAALPWPAGMCAAERAEGAFTLQSVAQPMRPIASTATKCGNCGPGYSTPLEAMKGPREEIVYLPCIYRNTGTEAPDYLATVDVDPKSPQYCQVIHRLPMPNLKDELHHSGWNTCSSCFGDSTKSRTKLVLPSLISSRIYVVDVGSEPRAPKLHKACH

SEQ ID NO: 495 - protein, 126 aa, Homo sapiens
MEERKPAHVLRSFKYAAFMNEELRNLSLSGHVGFDSLPDQLVNKSTSQGFCFNILCVGETGIGKSTLMDTLFNTKFESDPATHNEPGVRLKARSYELQESNVRLKLTIVDTVGFGDQINKDDSYKP

SEQ ID NO: 496 - protein, 52 aa, Homo sapiens
MDFLRNLFSQTLSLGSQKERLLDELTLEGVARYMQSERSATVSLLRQPGLLP

SEQ ID NO: 497 - protein, 352 aa, Homo sapiens
MDFLRNLFSQTLSLGSQKERLLDELTLEGVARYMQSERCRRVICLVGAGISTSAGIPDFRSPSTGLYDNLEKYHLPYPEAIFEISYFKKHPEPFFALAKELYPGQFKPTICHYFMRLLKDKGLLLRCYTQNIDTLERIAGLEQEDLVEAHGTFYTSHCVSASCRHEYPLSWMKEKIFSEVTPKCEDCQSLVKPDIVFFGESLPARFFSCMQSDFLKVDLLLVMGTSLQVQPFASLISKAPLSTPRLLINKEKAGQSDPFLGMIMGLGGGMDFDSKKAYRDVAWLGECDQGCLALAELLGWKKELEDLVRREHASIDAQSGAGVPNPSTSASPKKSPPPAKDEARTTEREKPQ

SEQ ID NO: 498 - protein, 234 aa, Homo sapiens
MDFLRNLFSQTLSLGSQKERLLDELTLEGVARYMQSERCRRVICLVGAGISTSAGIPDFRSPSTGLYDNLEKYHLPYPEAIFEISYFKKHPEPFFALAKELYPGQFKPTICHYFMRLLKDKGLLLRCYTQNIDTLERIAGLEQEDLVEAHGTFYTSHCVSASCRHEYPLSWMKEKIFSEVTPKCEDCQSLVKPDIVFFGESLPARFFSCMQSDFLKVDLLLVMGTSLQGRGLAG

SEQ ID NO: 499 - protein, 39 aa, Homo sapiens
MDFLRNLFSQTLSLGSQKERLLDELTLEGVARYMQSERC

SEQ ID NO: 500 - protein, 111 aa, Homo sapiens
MDFLRNLFSQTLSLGSQKERLLDELTLEGVARYMQSERCRRVICLVGAGISTSAGIPDFRSPSTGLYDNLEKYHLPYPEAIFEISYFKKHPEPFFALAKELYPGQFKFPHL

SEQ ID NO: 501 - protein, 86 aa, Homo sapiens
MKHMLAASAGEVVACLIRVPSEVVKQRAQVSASTRTFQIFSNILYEEGIQGLYRGYKSTVLREIPFSLVQFPLWESLKGWKPYNCF

SEQ ID NO: 502 - protein, 186 aa, Homo sapiens
MKHMLAASAGEVVACLIRVPSEVVKQRAQVSASTRTFQIFSNILYEEGIQGLYRGYKSTVLREIPFSLVQFPLWESLKALWSWRQDHVVDSWQSAVCGAFAGGFAAAVTTPLDVAKTRITLAKAGSSTADGNVLSVLHGVWRSQGLAGLFAGVFPRMAAISLGGFIFLGAYDRTHSLLLEVGRKSP

SEQ ID NO: 503 - protein, 287 aa, Homo sapiens
MQMPSTPGFVGYNPYSHLAYNNYRLGGNPGTNSRVTASSGITIPKPPKPPDKPLMPYMRYSRKVWDQVKASNPDLKLWEIGKIIGGMWRDLTDEEKQEYLNEYEAEKIEYNESMKAYHNSPAYLAYINAKSRAEAALEEESRQRQSRMEKGEPYMSIQPAEDPDDYDDGFSMKHTATARFQRNHRLISEILSESVVPDVRSVVTTARMQVLKRQVQSLMVHQRKLEAELLQIEERHQEKKRKFLESTDSFNNELKRLCGLKVEVDMEKIAAEIAQAEEQARKRQEER

SEQ ID NO: 504 - protein, 1211 aa, Homo sapiens
MLEVSIPTPHRYVRGKSNLMDAISFVLGEKTSNLRVKTLRDLIHGAPVGKPAANRAFVSMVYSEEGAEDRTFARVIVGGSSEYKINNKVVQLHEYSEELEKLGILIKARNFLVFQGAVESIAMKNPKERTALFEEISRSGELAQEYDKRKKEMVKAEEDTQFNYHRKKNIAAERKEAKQEKEEADRYQRLKDEVVRAQVQLQLFKLYHNEVEIEKLNKELASKNKEIEKDKKRMDKVEDELKEKKKELGKMMREQQQIEKEIKEKDSELNQKRPQYIKAKENTSHKIKKLEAAKKSLQNAQKHYKKRKGDMDELEKEMLSVEKARQEFEERMEEESQSQGRDLTLEENQVKKYHRLKEEASKRAATLAQELEKFNRDQKADQDRLDLEERKKVETEAKIKQKLREIEENQKRIEKLEEYITTSKQSLEEQKKLEGELTEEVEMAKRRIDEINKELNQVMEQLGDARIDRQESSRQQRKAEIMESIKRLYPGSVYGRLIDLCQPTQKKYQIAVTKVLGKNMDAIIVDSEKTGRDCIQYIKEQRGEPETFLPLDYLEVKPTDEKLRELKGAKLVIDVIRYEPPHIKKALQYACGNALVCDNVEDARRIAFGGHQRHKTVALDGTLFQKSGVISGGASDLKAKARRWDEKAVDKLKEKKERLTEELKEQMKAKRKEAELRQVQSQAHGLQMRLKYSQSDLEQTKTRHLALNLQEKSKLESELANFGPRINDIKRIIQSREREMKDLKEKMNQVEDEVFEEFCREIGVRNIREFEEEKVKRQNEIAKKRLEFENQKTRLGIQLDFEKNQLKEDQDKVHMWEQTVKKDENEIEKLKKEEQRHMKIIDETMAQLQDLKNQHLAKKSEVNDKNHEMEEIRKKLGGANKEMTHLQKEVTAIETKLEQKRSDRHNLLQACKMQDIKLPLSKGTMDDISQEEGSSQGEDSVSGSQRISSIYAREALIEIDYGDLCEDLKDAQAEEEIKQEMNTLQQKLNEQQSVLQRIAAPNMKAMEKLESVRDKFQETSDEFEAARKRAKKAKQAFEQIKKERFDRFNACFESVATNIDEIYKALSRNSSAQAFLGPENPEEPYLDGINYNCVAPGKRFRPMDNLSGGEKTVAALALLFAIHSYKPAPFFVLDEIDAALDNTNIGKVANYIKEQSTCNFQAIVISLKEEFYTKAESLIGVYPEQGDCVISKVLTFDLTKYPDANPNPNEQ

SEQ ID NO: 505 - protein, 335 aa, Homo sapiens
MRFLRTDSASADPDNLKYSSSRDRGGSSSYGLQPSNSAVVSRQRHDDTRVHADIQNDEKGGYSVNGGSGENTYGRKSLGQELRVNNVTSPEFTSVQHGSRALATKDMRKSQERSMSYSDESRLSNLLRRITREDDRDRRLATVKQLKEFIQQPENKLVLVKQLDNILAAVHDVLNESSKLLQELRQEGACCLGLLCASLSYEAEKIFKWIFSKFSSSAKDEVKLLYLCATYKALETVGEKKAFSSVMQLVMTSLQSILENVDTPELLCKCVKCILLVARCYPHIFSTNFRDTVDILVGWHIDHTQKPSLTQQVSGWLQSLEPFWVADLAFSTTLL

SEQ ID NO: 506 - protein, 104 aa, Homo sapiens
MLWLLPTDRGRSGNGNEPQGSPTEIPFSSKQEDMSELLDEILVQEILDLNKTTPSEMPSTASTLSTPLHAGIDENYQAGGSENYHELLENLQFSPGIEVKISND

SEQ ID NO: 507 - protein, 131 aa, Homo sapiens
MTRDDSSGGWLPLGGSGLSSVTVFKVPHQEENGCADFFIRGERLRDKMVVLECMLKKDLIYNKVTPTFHHWKIDDKKFGLTFQSPADARAFDRGIRRAIEDISQGCPESKNEAEGADDLQANEEDSSSSLV

SEQ ID NO: 508 - protein, 440 aa, Homo sapiens
MASGLNKRKMIQHAVFKELVKLVDPGVKAWTPTKGKQNVIMFVGLQGSGKTTTCSKLAYYYQRKGWKTCLICADTFRAGAFDQLKQNATKARIPFYGSYTEMDPVIIASEGVEKFKNENFEIIIVDTSGRHKQEDSLFEEMLQVANAIQPDNIVYVMDASIGQACEAQAKAFKDKVDVASVIVTKLDGHAKGGGALSAVAATKSPIIFIGTGEHIDDFEPFKTQPFISKLLGMGDIEGLIDKVNELKLDDNEALIEKLKHGQFTLRDMYEQFQNIMKMGPFSQILGMIPGFGTDFMSKGNEQESMARLKKLMTIMDSMNDQELDSTDGAKVFSKQPGRIQRVARGSGVSTRDVQELLTQYTKFAQMVKKMGGIKGLFKGGDMSKNVSQSQMAKLNQQMAKMMDPRVLHHMGGMAGLQSMMRQFQQGAAGNMKGMMGFNNM

SEQ ID NO: 509 - protein, 160 aa, Homo sapiens [sequence omitted]

SEQ ID NO: 510 - protein, 75 aa, Homo sapiens
MRGLRHPNIVHMLDSFETDKEVVVVTDYAEGELFQILEDDGKLPEDQVQAIAAQLVSALYYLHSHRILHRDMKPQ

SEQ ID NO: 511 - protein, 149 aa, Homo sapiens
MSSFLPEGGCYELLTVIGKGFEDLMTVNLARYKPTGEYVTVRRINLEACSNEMVTFLQGELHVSKLFNHPNIVPYRATFIADNELWVVTSFMAYGSAKDLICTHFMDGMNELAIAYILQGVLKALDYIHHMGYVHRSVKASHILISVDG

SEQ ID NO: 512 - protein, 78 aa, Homo sapiens
MSSFLPEGGCYELLTVIGKGFEDLMTVNLARYKPTGEYVTVRRINLEACSNEMVTFLQGELHVSKLFNHPNIVPYRAT

SEQ ID NO: 513 - protein, 173 aa, Homo sapiens
MSSFLPEGGCYELLTVIGKGFEDLMTVNLARYKPTGEYVTVRRINLEACSNEMVTFLQGELHVSKLFNHPNIVPYRATFIADNELWVVTSFMAYGSAKDLICTHFMDGMNELAIAYILQGVLKALDYIHHMGYVHRISRVMMPSLTSTVWESQPVNWPTAMSPLRICLPPRCC

SEQ ID NO: 514 - protein, 345 aa, Homo sapiens
MSSFLPEGGCYELLTVIGKGFEDLMTVNLARYKPTGEYVTVRRINLEACSNEMVTFLQGELHVSKLFNHPNIVPYRATFIADNELWVVTSFMAYGSAKDLICTHFMDGMNELAIAYILQGVLKALDYIHHMGYVHRSVKASHILISVDGKVYLSGLRSNLSMISHGQRQRVVHDFPKYSVKVLPWLSPEVLQQNLQGYDAKSDIYSVGITACELANGHVPFKDMPATQMLLEKLNGTVPCLLDTSTIPAEELTMSPSRSVANSGLSDSLTTSTPRPSNGDSPSHPYHRTFSPHFHHFVEQCLQRNPDARSSDVPQRLCPNCFVLSPPSPILRAASLRTTVESLAW

SEQ ID NO: 515 - protein, 50 aa, Homo sapiens
MSSFLPEGGCYELLTVIGKGFEDLMTVNLARYKPTGEYVTVRRINLEACS

SEQ ID NO: 516 - protein, 285 aa, Homo sapiens
MSSFLPEGGCYELLTVIGKGFEDLMTVNLARYKPTGEYVTVRRINLEACSNEMVTFLQGELHVSKLFNHPNIVPYRATFIADNELWVVTSFMAYGSAKDLICTHFMDGMNELAIAYILQGVLKALDYIHHMGYVHRSVKASHILISVDGKVYLSGLRSNLSMISHGQRQRVVHDFPKYSVKVLPWLSPEVLQQNLQGYDAKSDIYSVGITACELANGHVPFKDMPATQMLLEKLNGTVPCLLDTSTIPAEELTMSPSRSVANSGLSDSLTTSTPRPSNGPVPAPS

SEQ ID NO: 517 - protein, 373 aa, Homo sapiens
MSSFLPEGGCYELLTVIGKGFEDLMTVNLARYKPTGEYVTVRRINLEACSNEMVTFLQGELHVSKLFNHPNIVPYRATFIADNELWVVTSFMAYGSAKDLICTHFMDGMNELAIAYILQGVLKALDYIHHMGYVHRSVKASHILISVDGKVYLSGLRSNLSMISHGQRQRVVHDFPKYSVKVLPWLSPEVLQQNLQGYDAKSDIYSVGITACELANGHVPFKDMPATQMLLEKLNGTVPCLLDTSTIPAEELTMSPSRSVANSGLSDSLTTSTPRPSNGDSPSHPYHRTFSPHFHHFVEQCLQRNPDARPSASTLLNHSFFKQIKRRASEALPELLRPVTPITNFEGSQSQDHSGIFGLVTNLEELEVDDWEF

SEQ ID NO: 518 - protein, 373 aa, Homo sapiens; identical to SEQ ID NO: 517

SEQ ID NO: 519 - protein, 234 aa, Homo sapiens
MSSFLPEGGCYELLTVIGKGFEDLMTVNLARYKPTGEYVTVRRINLEACSNEMVTFLQGELHVSKLFNHPNIVPYRATFIADNELWVVTSFMAYGSAKDLICTHFMDGMNELAIAYILQGVLKALDYIHHMGYVHRSVKASHILISVDGKVYLSGLRSNLSMISHGQRQRVVHDFPKYSVKVLPWLSPEVLQQGYDAKSDIYSVGITACELANGHVPFKDMPATQGEDSTVKGI

SEQ ID NO: 520 - protein, 62 aa, Homo sapiens
MTTHLKKLKESYCQRQGVPMNSLRFLFEGQRIADNHTPKELGMEEEDVIEVYQEQTGGHSTV

SEQ ID NO: 521 - protein, 72 aa, Homo sapiens
MSISSDEVNFLVYRYLQESGFSHSAFTFGIESHISQSNINGALVPPAALISIIQKGLQYVEAEVSINEDGTL

SEQ ID NO: 522 - protein, 120 aa, Homo sapiens
MSISSDEVNFLVYRYLQESGFSHSAFTFGIESHISQSNINGALVPPAALISIIQKGLQYVEAEVSINEDGTLFDGRPIESLSLIDAVMPDVVQTRQQAYRDKLAQQQAAAAAAAAAAASQ

SEQ ID NO: 523 - protein, 131 aa, Homo sapiens
MSISSDEVNFLVYRYLQESGFSHSAFTFGIESHISQSNINGALVPPAALISIIQKGLQYVEAEVSINEDGTLFDGRPIESLSLIDAVMPDVVQTRQQAYRDKLAQQQAAAAAAAAAAASQQGSAKNGENTA

SEQ ID NO: 524 - protein, 81 aa, Homo sapiens
MSISSDEVNFLVYRYLQESGFSHSAFTFGIESHISQSNINGALVPPAALISIIQKGLQYVEAEVSINEDGTLFDGRPIESL

SEQ ID NO: 525 - protein, 1059 aa, Homo sapiens
MKESSLQNSSCSLGKETKKENMFLQSSMLTCIFLLISGSCELCAEENFSRSYPCDEKKQNDSVIAECSNRRLQEVPQTVGKYVTELDLSDNFITHITNESFQGLQNLTKINLNHNPNVQHQNGNPGIQSNGLNITDGAFLNLKNLRELLLEDNQLPQIPSGLPESLTELSLIQNNIYNITKEGISRLINLKNLYLAWNCYFNKVCEKTNIEDGVFETLTNLELLSLSFNSLSHVPPKLPSSLRKLFLSNTQIKYISEEDFKGLINLTLLDLSGNCPRCFNAPFPCVPCDGGASINIDRFAFQNLTQLRYLNLSSTSLRKINAAWFKNMPHLKVLDLEFNYLVGEIASGAFLTMLPRLEILDLSFNYIKGSYPQHINISRNFSKLLSLRALHLRGYVFQELREDDFQPLMQLPNLSTINLGINFIKQIDFKLFQNFSNLEIIYLSENRISPLVKDTRQSYANSSSFQRHIRKRRSTDFEFDPHSNFYHFTRPLIKPQCAAYGKALDLSLNSIFFIGPNQFENLPDIACLNLSANSNAQVLSGTEFSAIPHVKYLDLTNNRLDFDNASALTELSDLEVLDLSYNSHYFRIAGVTHHLEFIQNFTNLKVLNLSHNNIYTLTDKYNLESKSLVELVFSGNRLDILWNDDDNRYISIFKGLKNLTRLDLSLNRLKHIPNEAFLNLPASLTELHINDNMLKFFNWTLLQQFPRLELLDLRGNKLLFLTDSLSDFTSSLRTLLLSHNRISHLPSGFLSEVSSLKHLDLSSNLLKTINKSALETKTTTKLSMLELHGNPFECTCDIGDFRRWMDEHLNVKIPRLVDVICASPGDQRGKSIVSLELTTCVSDVTAVILFFFTFFITTMVMLAALAHHLFYWDVWFIYNVCLAKVKGYRSLSTSQTFYDAYISYDTKDASVTDWVINELRYHLEESRDKNVLLCLEERDWDPGLAIIDNLMQSINQSKKTVFVLTKKYAKSWNFKTAFYLALQRLMDENMDVIIFILLEPVLQHSQYLRLRQRICKSSILQWPDNPKAEGLFWQTLRNVVLTENDSRYNNMYVDSIKQY

SEQ ID NO: 526 - protein, 172 aa, Homo sapiens
MPLRRTSSRGNAGRPELTPIAIMAGRLLVQRLFGGSSDLMDYDNVPTTVFTPLEYGCVGLSEEEAVARHGQEHVEVYHAHYKPLEFTVAGRDASQCYVKMVCLREPPQLVLGLHFLGPNAGEVTQGFALGIKCGASYAQVMRTVGIHPTCSEEVVKLRISKRSGLDPTVTGC

SEQ ID NO: 527 - protein, 875 aa, Homo sapiens
MEKLHQCYWKSGEPQSDDIEASRMKRAAAKHLIERYYHQLTEGCGNEACTNEFCASCPTFLRMDNNAAAIKALELYKINAKLCDPHPSKKGASSAYLENSKGAPNNSCSEIKMNKKGARIDFKDVTYLTEEKVYEILELCREREDYSPLIRVIGRVFSSAEALVQSFRKVKQHTKEELKSLQAKDEDKDEDEKEKAACSAAAMEEDSEASSSRIGDSSQGDNNLQKLGPDDVSVDIDAIRRVYTRLLSNEKIETAFLNALVYLSPNVECDLTYHNVYSRDPNYLNLFIIVMENRNLHSPEYLEMALPLFCKAMSKLPLAAQGKLIRLWSKYNADQIRRMMETFQQLITYKVISNEFNSRNLVNDDDAIVAASKCLKMVYYANVVGGEVDTNHNEEDDEEPIPESSELTLQELLGEERRNKKGPRVDPLETELGVKTLDCRKPLIPFEEFINEPLNEVLEMDKDYTFFKVETENKFSFMTCPFILNAVTKNLGLYYDNRIRMYSERRITVLYSLVQGQQLNPYLRLKVRRDHIIDDALVRLEMIAMENPADLKKQLYVEFEGEQGVDEGGVSKEFFQLVVEEIFNPDIGMFTYDESTKLFWFNPSSFETEGQFTLIGIVLGLAIYNNCILDVHFPMVVYRKLMGKKGTFRDLGDSHPVLYQSLKDLLEYEGNVEDDMMITFQISQTDLFGNPMMYDLKENGDKIPITNENRKEFVNLYSDYILNKSVEKQFKAFRRGFHMVTNESPLKYLFRPEEIELLICGSRNLDFQALEETTEYDGGYTRDSVLIREFWEIVHSFTDEQKRLFLQFTTGTDRAPVGGLGKLKMIIAKNGPDTERLPTSHTCFNVLLLPEYSSKEKLKERLLKAITYAKGFGML

SEQ ID NO: 528 - protein, 875 aa, Homo sapiens; identical to SEQ ID NO: 527

SEQ ID NO: 529 - protein, 103 aa, Homo sapiens
MIRAFPTTTPRSLHLFTSSTFLARALPGAFPTGACEERLSVPESTPFTAVLKFAAEEFKVPAATSAIITNDGIGINPAQTAGNVFLKHGSELRIIPRDRVGSC

SEQ ID NO: 530 - protein, 204 aa, Homo sapiens
MRDAGDPSPPNKMLRRSDSPENKYSDSTGHSKAKNVHTHRVRERDGGTSYSPQENSHNHSALHSSNSHSSNPSNNPSKTSDAPYDSADDWSEHISSSGKKYYYNCRTEVSQWEKPKEWLEREQRQKEANKMAVNSFPKDRDYRREVMQATATSGFASGMEDKHSSDASSLLPQNILSQTSRHNDRDYRLPRAETHSSSTPVQHP

SEQ ID NO: 531 - protein, 890 aa, Homo sapiens
MDGEPPASSGLGLPDYTSGVSFHDQADLPETEDFQAGLYVTESPQPQEAEAVSLGRLSDKSSTSETSLGEERAPDEGGAPVDKSSLRSGDSSQDLKQSEGSEEEEEEEDSCVVLEEEEGEQEEVTGASELTLSDTVLSMETVVAGGSGGDGEEEEEALPEQSEGKEQKILLDTACKMVRWLSAKLGPTVASRHVARNLLRLLTSCYVGPTRQQFTVSSGESPPLSAGNIYQKRPVLGDIVSGPVLSCLLHIARLYGEPVLTYQYLPYISYLVAPGSASGPSRLNSRKEAGLLAAVTLTQKIIVYLSDTTLMDILPRISHEVLLPVLSFLTSLVTGFPSGAQARTILCVKTISLIALICLRIGQEMVQQHLSEPVATFFQVFSQLHELRQQDLKLDPAGRGEGQLPQVVFSDGQQRPVDPALLDELQKVFTLEMAYTIYVPFSCLLGDIIRKIIPNHELVGELAALYLESISPSSRNPASVEPTMPGTGPEWDPHGGGCPQDDGHSGTFGSVLVGNRIQIPNDSRPENPGPLGPISGVGGGGLGSGSDDNALKQELPRSVHGLSGNWLAYWQYEIGVSQQDAHFHFHQIRLQSFPGHSGAVKCVAPLSSEDFFLSGSKDRTVRLWPLYNYGDGTSETAPRLVYTQHRKSVFFVGQLEAPQHVVSCDGAVHVWDPFTGKTLRTVEPLDSRVPLTAVAVMPAPHTSITMASSDSTLRFVDCRKPGLQHEFRLGGGLNPGLVRALAISPSGRSVVAGFSSGFMVLLDTRTGLVLRGWPAHEGDILQIKAVEGSVLVSSSSDHSLTVWKELEQKPTHHYKSASDPIHTFDLYGSEVVTGTVSNKIGVCSLLEPPSQATTKLSSENFRGTLTSLALLPTKRHLLLGSDNGVIRLLA

SEQ ID NO: 532 - protein, 248 aa, Homo sapiens
MYQVTVPLSHLINAFHTPKNTSVSLSGVSVSQNQHRDVVPEHEAPSSEPSLNLRDLGLSELKIGQIDQLVENLLPGFCKGKNISSHWHTSHVSAQSFFENKYGNLDIFSTLRSSCLYRHHSRALQSICSDLQYWPVFIQSRGFKTLKSRTRRLQSTSERLAETQNIAPSFVKGFLLRDRGSDVESLDKLMKTKNIPEAHQDAFKTGFAEGFLKAQALTQKTNDSLRRTRLILFVLLLFGIYGLLKNPF

SEQ ID NO: 533 - protein, 282 aa, Homo sapiens
MQAILDATVSQGEPIQELLVTHGKVPTLVEELIAVEMWKQKVFPVFCRVEDFKPQNTFPIYMVVHHEASIINLLETVFFHKEVCESAEDTVLDLVDYCHRKLTLLVAQSGCGGPPEGEGSQDSNPMQELQKQAELMEFEIALKALSVLRYITDCVDSLSLSTLSRMLSTHNLPCLLVELLEHSPWSRREGGKLQQFEGSRWHTVAPSEQQKLSKLDGQVWIALYNLLLSPEAQARYCLTSFAKGRLLKLRAFLTDTLLDQLPNLAHLQSFLAHLTLTETQPP

SEQ ID NO: 534 - DNA, 18 bp, Artificial Sequence
  Description of Artificial Sequence: Synthetic oligonucleotide
tcccaccacctcctcccc

SEQ ID NO: 535 - DNA, 18 bp, Artificial Sequence
  Description of Artificial Sequence: Synthetic oligonucleotide
caagatcccaccacctcc

SEQ ID NO: 536 - DNA, 18 bp, Artificial Sequence
  Description of Artificial Sequence: Synthetic oligonucleotide
tgttccaagatcccacca

SEQ ID NO: 537 - DNA, 18 bp, Artificial Sequence
  Description of Artificial Sequence: Synthetic oligonucleotide
ttccttgttccaagatcc

SEQ ID NO: 538 - DNA, 18 bp, Artificial Sequence
  Description of Artificial Sequence: Synthetic oligonucleotide
acaccttccttgttccaa

SEQ ID NO: 539 - DNA, 18 bp, Artificial Sequence
  Description of Artificial Sequence: Synthetic oligonucleotide
aaaccacaccttccttgt

SEQ ID NO: 540 - DNA, 18 bp, Artificial Sequence
  Description of Artificial Sequence: Synthetic oligonucleotide
aaaaaaaaccacaccttc

SEQ ID NO: 541 - DNA, 18 bp, Artificial Sequence
  Description of Artificial Sequence: Synthetic oligonucleotide
taaagaaaaaaaaccaca

SEQ ID NO: 542 - DNA, 18 bp, Artificial Sequence
  Description of Artificial Sequence: Synthetic oligonucleotide
aaaaataaagaaaaaaaa

SEQ ID NO: 543 - DNA, 18 bp, Artificial Sequence
  Description of Artificial Sequence: Synthetic oligonucleotide
ctaaaaaaaataaagaaa

SEQ ID NO: 544 - DNA, 18 bp, Artificial Sequence
  Description of Artificial Sequence: Synthetic oligonucleotide
aaatcctaaaaaaaataa

SEQ ID NO: 545 - DNA, 18 bp, Artificial Sequence
  Description of Artificial Sequence: Synthetic oligonucleotide
aaaaaaaatcctaaaaaa

SEQ ID NO: 546 - DNA, 18 bp, Artificial Sequence
  Description of Artificial Sequence: Synthetic oligonucleotide
caaacaaaaaaaatccta

SEQ ID NO: 547 - DNA, 18 bp, Artificial Sequence
  Description of Artificial Sequence: Synthetic oligonucleotide
aaaaccaaacaaaaaaaa

SEQ ID NO: 548 - DNA, 18 bp, Artificial Sequence
  Description of Artificial Sequence: Synthetic oligonucleotide
taacaaaaaccaaacaaa

SEQ ID NO: 549 - DNA, 18 bp, Artificial Sequence
  Description of Artificial Sequence: Synthetic oligonucleotide
agaaataacaaaaaccaa

SEQ ID NO: 550 - DNA, 18 bp, Artificial Sequence
  Description of Artificial Sequence: Synthetic oligonucleotide
atggaagaaataacaaaa

SEQ ID NO: 551 - DNA, 18 bp, Artificial Sequence
  Description of Artificial Sequence: Synthetic oligonucleotide
ctggaatggaagaaataa

SEQ ID NO: 552 - DNA, 18 bp, Artificial Sequence
  Description of Artificial Sequence: Synthetic oligonucleotide
cctttctggaatggaaga

SEQ ID NO: 553 - DNA, 18 bp, Artificial Sequence
  Description of Artificial Sequence: Synthetic oligonucleotide
ttatccctttctggaatg

SEQ ID NO: 554 - DNA, 18 bp, Artificial Sequence
  Description of Artificial Sequence: Synthetic oligonucleotide
gctgtttatccctttctg

SEQ ID NO: 555 - DNA, 18 bp, Artificial Sequence
  Description of Artificial Sequence: Synthetic oligonucleotide
agtgctgtttatcccttt

SEQ ID NO: 556 - DNA, 18 bp, Artificial Sequence
  Description of Artificial Sequence: Synthetic oligonucleotide
ctggaagtgctgtttatc

SEQ ID NO: 557 - DNA, 18 bp, Artificial Sequence
  Description of Artificial Sequence: Synthetic oligonucleotide
tccccctggaagtgctgt

SEQ ID NO: 558 - DNA, 18 bp, Artificial Sequence
  Description of Artificial Sequence: Synthetic oligonucleotide
ttttctccccctggaagt

SEQ ID NO: 559 - DNA, 18 bp, Artificial Sequence
  Description of Artificial Sequence: Synthetic oligonucleotide
attttttttctccccctg

SEQ ID NO: 560 - DNA, 18 bp, Artificial Sequence
  Description of Artificial Sequence: Synthetic oligonucleotide
acatgattttttttctcc

SEQ ID NO: 561 - DNA, 18 bp, Artificial Sequence
  Description of Artificial Sequence: Synthetic oligonucleotide
tttctgataacatgattt

SEQ ID NO: 562 - DNA, 18 bp, Artificial Sequence
  Description of Artificial Sequence: Synthetic oligonucleotide
tttgctttctgataacat

SEQ ID NO: 563 - DNA, 18 bp, Artificial Sequence
  Description of Artificial Sequence: Synthetic oligonucleotide
ccttctttgctttctgat

SEQ ID NO: 564 - DNA, 18 bp, Artificial Sequence
  Description of Artificial Sequence: Synthetic oligonucleotide
cacccttctttgctttct

SEQ ID NO: 565 - DNA, 18 bp, Artificial Sequence
  Description of Artificial Sequence: Synthetic oligonucleotide
gctctcacccttctttgc

SEQ ID NO: 566 - DNA, 18 bp, Artificial Sequence
  Description of Artificial Sequence: Synthetic oligonucleotide
gtgaagctctcacccttc

SEQ ID NO: 567 - DNA, 18 bp, Artificial Sequence
  Description of Artificial Sequence: Synthetic oligonucleotide
gaaatgtgaagctctcac

SEQ ID NO: 568 - DNA, 18 bp, Artificial Sequence
  Description of Artificial Sequence: Synthetic oligonucleotide
acatggaaatgtgaagct

SEQ ID NO: 569 - DNA, 18 bp, Artificial Sequence
  Description of Artificial Sequence: Synthetic oligonucleotide
ggcatacatggaaatgtg

SEQ ID NO: 570 - DNA, 18 bp, Artificial Sequence
  Description of Artificial Sequence: Synthetic oligonucleotide
gaaaaggcatacatggaa

SEQ ID NO: 571 - DNA, 18 bp, Artificial Sequence
  Description of Artificial Sequence: Synthetic oligonucleotide
gcggggaaaaggcataca

SEQ ID NO: 572 - DNA, 18 bp, Artificial Sequence
  Description of Artificial Sequence: Synthetic oligonucleotide
gggcggcggggaaaaggc

SEQ ID NO: 573 - DNA, 18 bp, Artificial Sequence
  Description of Artificial Sequence: Synthetic oligonucleotide
agctagggcggcggggaa

SEQ ID NO: 574 - DNA, 18 bp, Artificial Sequence
  Description of Artificial Sequence: Synthetic oligonucleotide
aagggagctagggcggcg

SEQ ID NO: 575 - DNA, 18 bp, Artificial Sequence
  Description of Artificial Sequence: Synthetic oligonucleotide
agacgaagggagctaggg

SEQ ID NO: 576 - DNA, 18 bp, Artificial Sequence
  Description of Artificial Sequence: Synthetic oligonucleotide
aaggaagacgaagggagc

SEQ ID NO: 577 - DNA, 18 bp, Artificial Sequence
  Description of Artificial Sequence: Synthetic oligonucleotide
aagagaaggaagacgaag

SEQ ID NO: 578 - DNA, 18 bp, Artificial Sequence
  Description of Artificial Sequence: Synthetic oligonucleotide
tgaggaagagaaggaaga

SEQ ID NO: 579 - DNA, 18 bp, Artificial Sequence
  Description of Artificial Sequence: Synthetic oligonucleotide
agccatgaggaagagaag

SEQ ID NO: 580 - DNA, 18 bp, Artificial Sequence
  Description of Artificial Sequence: Synthetic oligonucleotide
atgaaagccatgaggaag

SEQ ID NO: 581 - DNA, 18 bp, Artificial Sequence
  Description of Artificial Sequence: Synthetic oligonucleotide
acggaatgaaagccatga

SEQ ID NO: 582 - DNA, 18 bp, Artificial Sequence
  Description of Artificial Sequence: Synthetic oligonucleotide
gaaagacggaatgaaagc

SEQ ID NO: 583 - DNA, 18 bp, Artificial Sequence
  Description of Artificial Sequence: Synthetic oligonucleotide
aaaacgaaagacggaatg

SEQ ID NO: 584 - DNA, 18 bp, Artificial Sequence
  Description of Artificial Sequence: Synthetic oligonucleotide
aaaccaaaacgaaagacg

SEQ ID NO: 585 - DNA, 18 bp, Artificial Sequence
  Description of Artificial Sequence: Synthetic oligonucleotide
ggaggtggacacctactc

SEQ ID NO: 586 - DNA, 18 bp, Artificial Sequence
  Description of Artificial Sequence: Synthetic oligonucleotide
gggtgggaggtggacacc

SEQ ID NO: 587 - DNA, 18 bp, Artificial Sequence
  Description of Artificial Sequence: Synthetic oligonucleotide
ccagggggtgggaggtgg

SEQ ID NO: 588 - DNA, 18 bp, Artificial Sequence
  Description of Artificial Sequence: Synthetic oligonucleotide
tggtgccagggggtggga

SEQ ID NO: 589 - DNA, 18 bp, Artificial Sequence
  Description of Artificial Sequence: Synthetic oligonucleotide
tttaatggtgccaggggg

SEQ ID NO: 590 - DNA, 18 bp, Artificial Sequence
  Description of Artificial Sequence: Synthetic oligonucleotide
agccatttaatggtgcca

SEQ ID NO: 591 - DNA, 18 bp, Artificial Sequence
  Description of Artificial Sequence: Synthetic oligonucleotide
ggacaagccatttaatgg

SEQ ID NO: 592 - DNA, 18 bp, Artificial Sequence
  Description of Artificial Sequence: Synthetic oligonucleotide
tcattggacaagccattt

SEQ ID NO: 593 - DNA, 18 bp, Artificial Sequence
  Description of Artificial Sequence: Synthetic oligonucleotide
caccctcattggacaagc

SEQ ID NO: 594 - DNA, 18 bp, Artificial Sequence
  Description of Artificial Sequence: Synthetic oligonucleotide
gttgtcaccctcattgga

SEQ ID NO: 595 - DNA, 18 bp, Artificial Sequence
  Description of Artificial Sequence: Synthetic oligonucleotide
ctggtgttgtcaccctca

SEQ ID NO: 596 - DNA, 18 bp, Artificial Sequence
  Description of Artificial Sequence: Synthetic oligonucleotide
gggggctggtgttgtcac

SEQ ID NO: 597 - DNA, 18 bp, Artificial Sequence
  Description of Artificial Sequence: Synthetic oligonucleotide
ggtcagggggctggtgtt

SEQ ID NO: 598 - DNA, 18 bp, Artificial Sequence
  Description of Artificial Sequence: Synthetic oligonucleotide
caagtggtcagggggctg

SEQ ID NO: 599 - DNA, 18 bp, Artificial Sequence
  Description of Artificial Sequence: Synthetic oligonucleotide
aagggcaagtggtcaggg

SEQ ID NO: 600 - DNA, 18 bp, Artificial Sequence
  Description of Artificial Sequence: Synthetic oligonucleotide
acaagaagggcaagtggt

SEQ ID NO: 601 - DNA, 18 bp, Artificial Sequence
  Description of Artificial Sequence: Synthetic oligonucleotide
cagagacaagaagggcaa

SEQ ID NO: 602 - DNA, 18 bp, Artificial Sequence
  Description of Artificial Sequence: Synthetic oligonucleotide
ctgggcagagacaagaag

SEQ ID NO: 603 - DNA, 18 bp, Artificial Sequence
  Description of Artificial Sequence: Synthetic oligonucleotide
aatgtctgggcagagaca

SEQ ID NO: 604 - DNA, 18 bp, Artificial Sequence
  Description of Artificial Sequence: Synthetic oligonucleotide
ccgtgaatgtctgggcag

SEQ ID NO: 605 - DNA, 18 bp, Artificial Sequence
  Description of Artificial Sequence: Synthetic oligonucleotide
ccatgccgtgaatgtctg

SEQ ID NO: 606 - DNA, 18 bp, Artificial Sequence
  Description of Artificial Sequence: Synthetic oligonucleotide
acaccatgccgtgaatgt

SEQ ID NO: 607 - DNA, 18 bp, Artificial Sequence
  Description of Artificial Sequence: Synthetic oligonucleotide
gagttacaccatgccgtg

SEQ ID NO: 608 - DNA, 18 bp, Artificial Sequence
  Description of Artificial Sequence: Synthetic oligonucleotide
ggtgggagttacaccatg

SEQ ID NO: 609 - DNA, 18 bp, Artificial Sequence
  Description of Artificial Sequence: Synthetic oligonucleotide
ccggaggtgggagttaca

SEQ ID NO: 610 - DNA, 18 bp, Artificial Sequence
  Description of Artificial Sequence: Synthetic oligonucleotide
gccttccggaggtgggag

SEQ ID NO: 611 - DNA, 18 bp, Artificial Sequence
  Description of Artificial Sequence: Synthetic oligonucleotide
tccccgccttccggaggt

SEQ ID NO: 612 - DNA, 18 bp, Artificial Sequence
  Description of Artificial Sequence: Synthetic oligonucleotide
ctgtgtccccgccttccg

SEQ ID NO: 613 - DNA, 18 bp, Artificial Sequence
  Description of Artificial Sequence: Synthetic oligonucleotide
tcgatctgtgtccccgcc

SEQ ID NO: 614 - DNA, 18 bp, Artificial Sequence
  Description of Artificial Sequence: Synthetic oligonucleotide
tgttctcgatctgtgtcc

SEQ ID NO: 615 - DNA, 18 bp, Artificial Sequence
  Description of Artificial Sequence: Synthetic oligonucleotide
ttcgatgttctcgatctg

SEQ ID NO: 616 - DNA, 18 bp, Artificial Sequence
  Description of Artificial Sequence: Synthetic oligonucleotide
tcctcttcgatgttctcg

SEQ ID NO: 617 - DNA, 18 bp, Artificial Sequence
  Description of Artificial Sequence: Synthetic oligonucleotide
ccggaagtcctcttcgat

SEQ ID NO: 618 - DNA, 18 bp, Artificial Sequence
  Description of Artificial Sequence: Synthetic oligonucleotide
ccatcccggaagtcctct

SEQ ID NO: 619 - DNA, 18 bp, Artificial Sequence
  Description of Artificial Sequence: Synthetic oligonucleotide
tcaggccatcccggaagt

SEQ ID NO: 620 - DNA, 18 bp, Artificial Sequence
  Description of Artificial Sequence: Synthetic oligonucleotide
gagcttcaggccatcccg

SEQ ID NO: 621 - DNA, 18 bp, Artificial Sequence
  Description of Artificial Sequence: Synthetic oligonucleotide
agcatgagcttcaggcca

SEQ ID NO: 622 - DNA, 18 bp, Artificial Sequence
  Description of Artificial Sequence: Synthetic oligonucleotide
gcagcagcatgagcttca

SEQ ID NO: 623 - DNA, 18 bp, Artificial Sequence
  Description of Artificial Sequence: Synthetic oligonucleotide
ctccagcagcagcatgag

SEQ ID NO: 624 - DNA, 18 bp, Artificial Sequence
  Description of Artificial Sequence: Synthetic oligonucleotide
atgacctccagcagcagc

SEQ ID NO: 625 - DNA, 18 bp, Artificial Sequence
  Description of Artificial Sequence: Synthetic oligonucleotide
ctgagatgacctccagca

SEQ ID NO: 626 - DNA, 18 bp, Artificial Sequence
  Description of Artificial Sequence: Synthetic oligonucleotide
cacctgagatgacctcca

SEQ ID NO: 627 - DNA, 18 bp, Artificial Sequence
  Description of Artificial Sequence: Synthetic oligonucleotide
cgcctcacctgagatgac

SEQ ID NO: 628 - DNA, 18 bp, Artificial Sequence
  Description of Artificial Sequence: Synthetic oligonucleotide
ggttccgcctcacctgag

SEQ ID NO: 629 - DNA, 18 bp, Artificial Sequence
  Description of Artificial Sequence: Synthetic oligonucleotide
ggccaggttccgcctcac

SEQ ID NO: 630 - DNA, 18 bp, Artificial Sequence
  Description of Artificial Sequence: Synthetic oligonucleotide
tcctgggccaggttccgc

SEQ ID NO: 631 - DNA, 18 bp, Artificial Sequence
  Description of Artificial Sequence: Synthetic oligonucleotide
tctcgtcctgggccaggt

SEQ ID NO: 632 - DNA, 18 bp, Artificial Sequence
  Description of Artificial Sequence: Synthetic oligonucleotide
cagtatctcgtcctgggc

SEQ ID NO: 633 - DNA, 18 bp, Artificial Sequence
  Description of Artificial Sequence: Synthetic oligonucleotide
atagacagtatctcgtcc

SEQ ID NO: 634 - DNA, 18 bp, Artificial Sequence
  Description of Artificial Sequence: Synthetic oligonucleotide
caccaatagacagtatct

SEQ ID NO: 635 - DNA, 18 bp, Artificial Sequence
  Description of Artificial Sequence: Synthetic oligonucleotide
ggcagcaccaatagacag

SEQ ID NO: 636 - DNA, 18 bp, Artificial Sequence
  Description of Artificial Sequence: Synthetic oligonucleotide
tgtcaggcagcaccaata

SEQ ID NO: 637 - DNA, 18 bp, Artificial Sequence
  Description of Artificial Sequence: Synthetic oligonucleotide
caaggtgtcaggcagcac

SEQ ID NO: 638 - DNA, 18 bp, Artificial Sequence
  Description of Artificial Sequence: Synthetic oligonucleotide
gatgccaaggtgtcaggc

SEQ ID NO: 639 - DNA, 18 bp, Artificial Sequence
  Description of Artificial Sequence: Synthetic oligonucleotide
gagcagatgccaaggtgt

SEQ ID NO: 640 - DNA, 18 bp, Artificial Sequence
  Description of Artificial Sequence: Synthetic oligonucleotide
aggcagagcagatgccaa

SEQ ID NO: 641 - DNA, 18 bp, Artificial Sequence
  Description of Artificial Sequence: Synthetic oligonucleotide
ctcataggcagagcagat

SEQ ID NO: 642 - DNA, 18 bp, Artificial Sequence
  Description of Artificial Sequence: Synthetic oligonucleotide
ctgcgctcataggcagag

SEQ ID NO: 643 - DNA, 18 bp, Artificial Sequence
  Description of Artificial Sequence: Synthetic oligonucleotide
accagctgcgctcatagg

SEQ ID NO: 644 - DNA, 18 bp, Artificial Sequence
  Description of Artificial Sequence: Synthetic oligonucleotide
ccaaaaccagctgcgctc

SEQ ID NO: 645 - DNA, 18 bp, Artificial Sequence
  Description of Artificial Sequence: Synthetic oligonucleotide
agagaccaaaaccagctg

SEQ ID NO: 646 - DNA, 18 bp, Artificial Sequence
  Description of Artificial Sequence: Synthetic oligonucleotide
tttcaagagaccaaaacc

SEQ ID NO: 647 - DNA, 18 bp, Artificial Sequence
  Description of Artificial Sequence: Synthetic oligonucleotide
agggaagaacaaattggt

SEQ ID NO: 648 - DNA, 18 bp, Artificial Sequence
  Description of Artificial Sequence: Synthetic oligonucleotide
aacagagggaagaacaaa

SEQ ID NO: 649 - DNA, 18 bp, Artificial Sequence
  Description of Artificial Sequence: Synthetic oligonucleotide
gggagaacagagggaaga

SEQ ID NO: 650 - DNA, 18 bp, Artificial Sequence
  Description of Artificial Sequence: Synthetic oligonucleotide
aaccagggagaacagagg

SEQ ID NO: 651 - DNA, 18 bp, Artificial Sequence
  Description of Artificial Sequence: Synthetic oligonucleotide
agagaaaccagggagaac

SEQ ID NO: 652 - DNA, 18 bp, Artificial Sequence
  Description of Artificial Sequence: Synthetic oligonucleotide
gaaggagagaaaccaggg

SEQ ID NO: 653 - DNA, 18 bp, Artificial Sequence
  Description of Artificial Sequence: Synthetic oligonucleotide
cagacgaaggagagaaac

SEQ ID NO: 654 - DNA, 18 bp, Artificial Sequence
  Description of Artificial Sequence: Synthetic oligonucleotide
acatacagacgaaggaga

SEQ ID NO: 655 - DNA, 18 bp, Artificial Sequence
  Description of Artificial Sequence: Synthetic oligonucleotide
cacacacatacagacgaa

SEQ ID NO: 656 - DNA, 18 bp, Artificial Sequence
  Description of Artificial Sequence: Synthetic oligonucleotide
cacaccacacacatacag

SEQ ID NO: 657 - DNA, 18 bp, Artificial Sequence
  Description of Artificial Sequence: Synthetic oligonucleotide
acacacacaccacacaca

SEQ ID NO: 658 - DNA, 18 bp, Artificial Sequence
  Description of Artificial Sequence: Synthetic oligonucleotide
cgcacacacacacaccac

SEQ ID NO: 659 - DNA, 18 bp, Artificial Sequence
  Description of Artificial Sequence: Synthetic oligonucleotide
acgcgcgcacacacacac

SEQ ID NO: 660 - DNA, 18 bp, Artificial Sequence
  Description of Artificial Sequence: Synthetic oligonucleotide
acaggacgcgcgcacaca

SEQ ID NO: 661 - DNA, 18 bp, Artificial Sequence
  Description of Artificial Sequence: Synthetic oligonucleotide
ataacacaggacgcgcgc

SEQ ID NO: 662 - DNA, 18 bp, Artificial Sequence
  Description of Artificial Sequence: Synthetic oligonucleotide
agaaaataacacaggacg

SEQ ID NO: 663 - DNA, 18 bp, Artificial Sequence
  Description of Artificial Sequence: Synthetic oligonucleotide
gggggagaaaataacaca

SEQ ID NO: 664 - DNA, 18 bp, Artificial Sequence
  Description of Artificial Sequence: Synthetic oligonucleotide
ctgaagggggagaaaata

SEQ ID NO: 665 - DNA, 18 bp, Artificial Sequence
  Description of Artificial Sequence: Synthetic oligonucleotide
gatgtctgaagggggaga

SEQ ID NO: 666 - DNA, 18 bp, Artificial Sequence
  Description of Artificial Sequence: Synthetic oligonucleotide
ttcacgatgtctgaaggg

SEQ ID NO: 667 - DNA, 18 bp, Artificial Sequence
  Description of Artificial Sequence: Synthetic oligonucleotide
gggtgttcacgatgtctg

SEQ ID NO: 668 - DNA, 18 bp, Artificial Sequence
  Description of Artificial Sequence: Synthetic oligonucleotide
taggggtgttcacgatgt

SEQ ID NO: 669 - DNA, 18 bp, Artificial Sequence
  Description of Artificial Sequence: Synthetic oligonucleotide
gggtttaggggtgttcac

SEQ ID NO: 670 - DNA, 18 bp, Artificial Sequence
  Description of Artificial Sequence: Synthetic oligonucleotide
tcatcgggtttaggggtg

SEQ ID NO: 671 - DNA, 18 bp, Artificial Sequence
  Description of Artificial Sequence: Synthetic oligonucleotide
ctctttcatcgggtttag

SEQ ID NO: 672 - DNA, 18 bp, Artificial Sequence
  Description of Artificial Sequence: Synthetic oligonucleotide
gatggctctttcatcggg

SEQ ID NO: 673 - DNA, 18 bp, Artificial Sequence
  Description of Artificial Sequence: Synthetic oligonucleotide
gtcatgatggctctttca

SEQ ID NO: 674 - DNA, 18 bp, Artificial Sequence
  Description of Artificial Sequence: Synthetic oligonucleotide
cgtacgtcatgatggctc

SEQ ID NO: 675 - DNA, 18 bp, Artificial Sequence
  Description of Artificial Sequence: Synthetic oligonucleotide
agagacgtacgtcatgat

SEQ ID NO: 676 - DNA, 18 bp, Artificial Sequence
  Description of Artificial Sequence: Synthetic oligonucleotide
tagaagcaagagacgtac

SEQ ID NO: 677 - DNA, 18 bp, Artificial Sequence
  Description of Artificial Sequence: Synthetic oligonucleotide
cgtggtagaagcaagaga

SEQ ID NO: 678 - DNA, 18 bp, Artificial Sequence
  Description of Artificial Sequence: Synthetic oligonucleotide
aaaagcgtggtagaagca

SEQ ID NO: 679 - DNA, 18 bp, Artificial Sequence
  Description of Artificial Sequence: Synthetic oligonucleotide
cccgcaaaagcgtggtag

SEQ ID NO: 680 - DNA, 18 bp, Artificial Sequence
  Description of Artificial Sequence: Synthetic oligonucleotide
ccgcgcccgcaaaagcgt

SEQ ID NO: 681 - DNA, 18 bp, Artificial Sequence
  Description of Artificial Sequence: Synthetic oligonucleotide
ctgctccgcgcccgcaaa

SEQ ID NO: 682 - DNA, 18 bp, Artificial Sequence
  Description of Artificial Sequence: Synthetic oligonucleotide
tacctgctccgcgcccgc

SEQ ID NO: 683 - DNA, 18 bp, Artificial Sequence
  Description of Artificial Sequence: Synthetic oligonucleotide
ttgagtacctgctccgcg

SEQ ID NO: 684 - DNA, 18 bp, Artificial Sequence
  Description of Artificial Sequence: Synthetic oligonucleotide
aagtgttgagtacctgct

SEQ ID NO: 685 - DNA, 18 bp, Artificial Sequence
  Description of Artificial Sequence: Synthetic oligonucleotide
cggacaagtgttgagtac

SEQ ID NO: 686 - DNA, 18 bp, Artificial Sequence
  Description of Artificial Sequence: Synthetic oligonucleotide
ccggacggacaagtgttg

SEQ ID NO: 687 - DNA, 18 bp, Artificial Sequence
  Description of Artificial Sequence: Synthetic oligonucleotide
acagcccggacggacaag

SEQ ID NO: 688 - DNA, 18 bp, Artificial Sequence
  Description of Artificial Sequence: Synthetic oligonucleotide
acacaacagcccggacgg

SEQ ID NO: 689 - DNA, 18 bp, Artificial Sequence
  Description of Artificial Sequence: Synthetic oligonucleotide
gagtaacacaacagcccg

SEQ ID NO: 690 - DNA, 18 bp, Artificial Sequence
  Description of Artificial Sequence: Synthetic oligonucleotide
acagagagtaacacaaca

SEQ ID NO: 691 - DNA, 18 bp, Artificial Sequence
  Description of Artificial Sequence: Synthetic oligonucleotide
aaccaacagagagtaaca

SEQ ID NO: 692 - DNA, 18 bp, Artificial Sequence
  Description of Artificial Sequence: Synthetic oligonucleotide
actaaaaccaacagagag

SEQ ID NO: 693 - DNA, 18 bp, Artificial Sequence
  Description of Artificial Sequence: Synthetic oligonucleotide
acacaactaaaaccaaca

SEQ ID NO: 694 - DNA, 18 bp, Artificial Sequence
  Description of Artificial Sequence: Synthetic oligonucleotide
tgcacacacaactaaaac

SEQ ID NO: 695 - DNA, 18 bp, Artificial Sequence
  Description of Artificial Sequence: Synthetic oligonucleotide
aagtatgcacacacaact

SEQ ID NO: 696 - DNA, 18 bp, Artificial Sequence
  Description of Artificial Sequence: Synthetic oligonucleotide
cactcaagtatgcacaca

SEQ ID NO: 697 - DNA, 18 bp, Artificial Sequence
  Description of Artificial Sequence: Synthetic oligonucleotide
acacacactcaagtatgc

SEQ ID NO: 698 - DNA, 18 bp, Artificial Sequence
  Description of Artificial Sequence: Synthetic oligonucleotide
cacaaacacacactcaag

SEQ ID NO: 699 - DNA, 18 bp, Artificial Sequence
  Description of Artificial Sequence: Synthetic oligonucleotide
aagcgcacaaacacacac

SEQ ID NO: 700 - DNA, 18 bp, Artificial Sequence
  Description of Artificial Sequence: Synthetic oligonucleotide
atgtgaagcgcacaaaca

SEQ ID NO: 701 - DNA, 18 bp, Artificial Sequence
  Description of Artificial Sequence: Synthetic oligonucleotide
gtaagatgtgaagcgcac

SEQ ID NO: 702 - DNA, 18 bp, Artificial Sequence
  Description of Artificial Sequence: Synthetic oligonucleotide
ccaaggtaagatgtgaag

SEQ ID NO: 703 - DNA, 18 bp, Artificial Sequence
  Description of Artificial Sequence: Synthetic oligonucleotide
aaattaaataaaaatttc

SEQ ID NO: 704 - DNA, 18 bp, Artificial Sequence
  Description of Artificial Sequence: Synthetic oligonucleotide
gatataaattaaataaaa

SEQ ID NO: 705 - DNA, 18 bp, Artificial Sequence
  Description of Artificial Sequence: Synthetic oligonucleotide
tgtaggatataaattaaa

SEQ ID NO: 706 - DNA, 18 bp, Artificial Sequence
  Description of Artificial Sequence: Synthetic oligonucleotide
ttatctgtaggatataaa

SEQ ID NO: 707 - DNA, 18 bp, Artificial Sequence
  Description of Artificial Sequence: Synthetic oligonucleotide
taaatttatctgtaggat

SEQ ID NO: 708 - DNA, 18 bp, Artificial Sequence
  Description of Artificial Sequence: Synthetic oligonucleotide
attattaaatttatctgt

SEQ ID NO: 709 - DNA, 18 bp, Artificial Sequence
  Description of Artificial Sequence: Synthetic oligonucleotide
acatcattattaaattta

SEQ ID NO: 710 - DNA, 18 bp, Artificial Sequence
  Description of Artificial Sequence: Synthetic oligonucleotide
ggcttacatcattattaa

SEQ ID NO: 711 - DNA, 18 bp, Artificial Sequence
  Description of Artificial Sequence: Synthetic oligonucleotide
aatgaggcttacatcatt

SEQ ID NO: 712 - DNA, 18 bp, Artificial Sequence
  Description of Artificial Sequence: Synthetic oligonucleotide
tgagaaatgaggcttaca

SEQ ID NO: 713 - DNA, 18 bp, Artificial Sequence
  Description of Artificial Sequence: Synthetic oligonucleotide
aagtctgagaaatgaggc

SEQ ID NO: 714 - DNA, 18 bp, Artificial Sequence
  Description of Artificial Sequence: Synthetic oligonucleotide
attaaaagtctgagaaat

SEQ ID NO: 715 - DNA, 18 bp, Artificial Sequence
  Description of Artificial Sequence: Synthetic oligonucleotide
aattcattaaaagtctga

SEQ ID NO: 716 - DNA, 18 bp, Artificial Sequence
  Description of Artificial Sequence: Synthetic oligonucleotide
cagagaattcattaaaag

SEQ ID NO: 717 - DNA, 18 bp, Artificial Sequence
  Description of Artificial Sequence: Synthetic oligonucleotide
atccccagagaattcatt

SEQ ID NO: 718 - DNA, 18 bp, Artificial Sequence
  Description of Artificial Sequence: Synthetic oligonucleotide
acaatatccccagagaat

SEQ ID NO: 719 - DNA, 18 bp, Artificial Sequence
  Description of Artificial Sequence: Synthetic oligonucleotide
tttgaacaatatccccag

SEQ ID NO: 720 - DNA, 18 bp, Artificial Sequence
  Description of Artificial Sequence: Synthetic oligonucleotide
ctgcatttgaacaatatc

SEQ ID NO: 721 - DNA, 18 bp, Artificial Sequence
  Description of Artificial Sequence: Synthetic oligonucleotide
aaaatctgcatttgaaca

SEQ ID NO: 722 - DNA, 18 bp, Artificial Sequence
  Description of Artificial Sequence: Synthetic oligonucleotide
aaatcaaaatctgcattt

SEQ ID NO: 723 - DNA, 18 bp, Artificial Sequence
  Description of Artificial Sequence: Synthetic oligonucleotide
ccactaaatcaaaatctg

SEQ ID NO: 724 - DNA, 18 bp, Artificial Sequence
  Description of Artificial Sequence: Synthetic oligonucleotide
aatccactaaatcaaaat

SEQ ID NO: 725 - DNA, 18 bp, Artificial Sequence
  Description of Artificial Sequence: Synthetic oligonucleotide
cctcaaatccactaaatc

SEQ ID NO: 726 - DNA, 18 bp, Artificial Sequence
  Description of Artificial Sequence: Synthetic oligonucleotide
ccctgcctcaaatccact

SEQ ID NO: 727 - DNA, 18 bp, Artificial Sequence
  Description of Artificial Sequence: Synthetic oligonucleotide
gaaagccctgcctcaaat

SEQ ID NO: 728 - DNA, 18 bp, Artificial Sequence
  Description of Artificial Sequence: Synthetic oligonucleotide
gagatgaaagccctgcct

SEQ ID NO: 729 - DNA, 18 bp, Artificial Sequence
  Description of Artificial Sequence: Synthetic oligonucleotide
tgttagagatgaaagccc

SEQ ID NO: 730 - DNA, 18 bp, Artificial Sequence
  Description of Artificial Sequence: Synthetic oligonucleotide
gaatttgttagagatgaa

SEQ ID NO: 731 - DNA, 18 bp, Artificial Sequence
  Description of Artificial Sequence: Synthetic oligonucleotide
cttgggaatttgttagag

SEQ ID NO: 732 - DNA, 18 bp, Artificial Sequence
  Description of Artificial Sequence: Synthetic oligonucleotide
catcacttgggaatttgt

SEQ ID NO: 733 - DNA, 18 bp, Artificial Sequence
  Description of Artificial Sequence: Synthetic oligonucleotide
attcacatcacttgggaa

SEQ ID NO: 734 - DNA, 18 bp, Artificial Sequence
  Description of Artificial Sequence: Synthetic oligonucleotide
catttattcacatcactt

SEQ ID NO: 735 - DNA, 18 bp, Artificial Sequence
  Description of Artificial Sequence: Synthetic oligonucleotide
acaagcatttattcacat

SEQ ID NO: 736 - DNA, 18 bp, Artificial Sequence
  Description of Artificial Sequence: Synthetic oligonucleotide
ctcggacaagcatttatt

SEQ ID NO: 737 - DNA, 18 bp, Artificial Sequence
  Description of Artificial Sequence: Synthetic oligonucleotide
tggtcctcggacaagcat

SEQ ID NO: 738 - DNA, 18 bp, Artificial Sequence
  Description of Artificial Sequence: Synthetic oligonucleotide
cgaagtgtggtcctcgga

SEQ ID NO: 739 - DNA, 18 bp, Artificial Sequence
  Description of Artificial Sequence: Synthetic oligonucleotide
caactcgaagtgtggtcc

SEQ ID NO: 740 - DNA, 18 bp, Artificial Sequence
  Description of Artificial Sequence: Synthetic oligonucleotide
ctctgcaactcgaagtgt

SEQ ID NO: 741 - DNA, 18 bp, Artificial Sequence
  Description of Artificial Sequence: Synthetic oligonucleotide
tacatctctgcaactcga

SEQ ID NO: 742 - DNA, 18 bp, Artificial Sequence
  Description of Artificial Sequence: Synthetic oligonucleotide
tgttttacatctctgcaa

SEQ ID NO: 743 - DNA, 18 bp, Artificial Sequence
  Description of Artificial Sequence: Synthetic oligonucleotide
agatgtgttttacatctc

SEQ ID NO: 744 - DNA, 18 bp, Artificial Sequence
  Description of Artificial Sequence: Synthetic oligonucleotide
agaatagatgtgttttac

SEQ ID NO: 745 - DNA, 18 bp, Artificial Sequence
  Description of Artificial Sequence: Synthetic oligonucleotide
gctggagaatagatgtgt

SEQ ID NO: 746 - DNA, 18 bp, Artificial Sequence
  Description of Artificial Sequence: Synthetic oligonucleotide
taattgctggagaataga

SEQ ID NO: 747 - DNA, 18 bp, Artificial Sequence
  Description of Artificial Sequence: Synthetic oligonucleotide
tcagataattgctggaga

SEQ ID NO: 748 - DNA, 18 bp, Artificial Sequence
  Description of Artificial Sequence: Synthetic oligonucleotide
ctgagtcagataattgct

SEQ ID NO: 749 - DNA, 18 bp, Artificial Sequence
  Description of Artificial Sequence: Synthetic oligonucleotide
tacctgagtcagataatt

SEQ ID NO: 750 - DNA, 18 bp, Artificial Sequence
  Description of Artificial Sequence: Synthetic oligonucleotide
tgaattacctgagtcaga

SEQ ID NO: 751 - DNA, 18 bp, Artificial Sequence
  Description of Artificial Sequence: Synthetic oligonucleotide
acctctgaattacctgag

SEQ ID NO: 752 - DNA, 18 bp, Artificial Sequence
  Description of Artificial Sequence: Synthetic oligonucleotide
aaatcacctctgaattac

SEQ ID NO: 753 - DNA, 18 bp, Artificial Sequence
  Description of Artificial Sequence: Synthetic oligonucleotide
gtttgaaatcacctctga

SEQ ID NO: 754 - DNA, 18 bp, Artificial Sequence
  Description of Artificial Sequence: Synthetic oligonucleotide
gaactgtttgaaatcacc

SEQ ID NO: 755 - DNA, 18 bp, Artificial Sequence
  Description of Artificial Sequence: Synthetic oligonucleotide
tgagtgaactgtttgaaa

SEQ ID NO: 756 - DNA, 18 bp, Artificial Sequence
  Description of Artificial Sequence: Synthetic oligonucleotide
tctattgagtgaactgtt

SEQ ID NO: 757 - DNA, 18 bp, Artificial Sequence
  Description of Artificial Sequence: Synthetic oligonucleotide
aaaaatctattgagtgaa

SEQ ID NO: 758 - DNA, 18 bp, Artificial Sequence
  Description of Artificial Sequence: Synthetic oligonucleotide
cctataaaaatctattga

SEQ ID NO: 759 - DNA, 18 bp, Artificial Sequence
  Description of Artificial Sequence: Synthetic oligonucleotide
gatggcctataaaaatct

SEQ ID NO: 760 - DNA, 18 bp, Artificial Sequence
  Description of Artificial Sequence: Synthetic oligonucleotide
aggtagatggcctataaa

SEQ ID NO: 761 - DNA, 18 bp, Artificial Sequence
  Description of Artificial Sequence: Synthetic oligonucleotide
gaataaggtagatggcct

SEQ ID NO: 762 - DNA, 18 bp, Artificial Sequence
  Description of Artificial Sequence: Synthetic oligonucleotide
agtttgaataaggtagat

SEQ ID NO: 763 - DNA, 18 bp, Artificial Sequence
  Description of Artificial Sequence: Synthetic oligonucleotide
tatggagtttgaataagg

SEQ ID NO: 764 - DNA, 18 bp, Artificial Sequence
  Description of Artificial Sequence: Synthetic oligonucleotide
agatttatggagtttgaa

SEQ ID NO: 765 - DNA, 18 bp, Artificial Sequence
  Description of Artificial Sequence: Synthetic oligonucleotide
agaatagatttatggagt

SEQ ID NO: 766 - DNA, 18 bp, Artificial Sequence
  Description of Artificial Sequence: Synthetic oligonucleotide
cagagagaatagatttat

SEQ ID NO: 767 - DNA, 18 bp, Artificial Sequence
  Description of Artificial Sequence: Synthetic oligonucleotide
tataacagagagaataga

SEQ ID NO: 768 - DNA, 18 bp, Artificial Sequence
  Description of Artificial Sequence: Synthetic oligonucleotide
ccctctataacagagaga

SEQ ID NO: 769 - DNA, 18 bp, Artificial Sequence
  Description of Artificial Sequence: Synthetic oligonucleotide
tttttccctctataacag

SEQ ID NO: 770 - DNA, 18 bp, Artificial Sequence
  Description of Artificial Sequence: Synthetic oligonucleotide
cggtcagatttgcttcaa

SEQ ID NO: 771 - DNA, 18 bp, Artificial Sequence
  Description of Artificial Sequence: Synthetic oligonucleotide
aaaatcggtcagatttgc

SEQ ID NO: 772 - DNA, 18 bp, Artificial Sequence
  Description of Artificial Sequence: Synthetic oligonucleotide
cattgaaaatcggtcaga

SEQ ID NO: 773 - DNA, 18 bp, Artificial Sequence
  Description of Artificial Sequence: Synthetic oligonucleotide
ttttacattgaaaatcgg

SEQ ID NO: 774 - DNA, 18 bp, Artificial Sequence
  Description of Artificial Sequence: Synthetic oligonucleotide
gttatttttacattgaaa

SEQ ID NO: 775 - DNA, 18 bp, Artificial Sequence
  Description of Artificial Sequence: Synthetic oligonucleotide
tatatgttatttttacat

SEQ ID NO: 776 - DNA, 18 bp, Artificial Sequence
  Description of Artificial Sequence: Synthetic oligonucleotide
gtttttatatgttatttt

SEQ ID NO: 777 - DNA, 18 bp, Artificial Sequence
  Description of Artificial Sequence: Synthetic oligonucleotide
gaacagtttttatatgtt

SEQ ID NO: 778 - DNA, 18 bp, Artificial Sequence
  Description of Artificial Sequence: Synthetic oligonucleotide
tccgagaacagtttttat

SEQ ID NO: 779 - DNA, 18 bp, Artificial Sequence
  Description of Artificial Sequence: Synthetic oligonucleotide
ataactccgagaacagtt

SEQ ID NO: 780 - DNA, 18 bp, Artificial Sequence
  Description of Artificial Sequence: Synthetic oligonucleotide
tagaaataactccgagaa

SEQ ID NO: 781 - DNA, 18 bp, Artificial Sequence
  Description of Artificial Sequence: Synthetic oligonucleotide
ctgtttagaaataactcc

SEQ ID NO: 782 - DNA, 18 bp, Artificial Sequence
  Description of Artificial Sequence: Synthetic oligonucleotide
tagttctgtttagaaata

SEQ ID NO: 783 - DNA, 18 bp, Artificial Sequence
  Description of Artificial Sequence: Synthetic oligonucleotide
gatcttagttctgtttag

SEQ ID NO: 784 - DNA, 18 bp, Artificial Sequence
  Description of Artificial Sequence: Synthetic oligonucleotide
attctgatcttagttctg

SEQ ID NO: 785 - DNA, 18 bp, Artificial Sequence
  Description of Artificial Sequence: Synthetic oligonucleotide
aaagaattctgatcttag

SEQ ID NO: 786 - DNA, 18 bp, Artificial Sequence
  Description of Artificial Sequence: Synthetic oligonucleotide
gattcaaagaattctgat

SEQ ID NO: 787 - DNA, 18 bp, Artificial Sequence
  Description of Artificial Sequence: Synthetic oligonucleotide
ctgatgattcaaagaatt

SEQ ID NO: 788 - DNA, 18 bp, Artificial Sequence
  Description of Artificial Sequence: Synthetic oligonucleotide
tgattctgatgattcaaa

SEQ ID NO: 789 - DNA, 18 bp, Artificial Sequence
  Description of Artificial Sequence: Synthetic oligonucleotide
agagatgattctgatgat

SEQ ID NO: 790 - DNA, 18 bp, Artificial Sequence
  Description of Artificial Sequence: Synthetic oligonucleotide
tcaaaagagatgattctg

SEQ ID NO: 791 - DNA, 18 bp, Artificial Sequence
  Description of Artificial Sequence: Synthetic oligonucleotide
ttttcaaaagagatgatt

SEQ ID NO: 792 - DNA, 18 bp, Artificial Sequence
  Description of Artificial Sequence: Synthetic oligonucleotide
tcgatttttcaaaagaga

SEQ ID NO: 793 - DNA, 18 bp, Artificial Sequence
  Description of Artificial Sequence: Synthetic oligonucleotide
atgaatcgatttttcaaa

SEQ ID NO: 794 - DNA, 18 bp, Artificial Sequence
  Description of Artificial Sequence: Synthetic oligonucleotide
atttgatgaatcgatttt

SEQ ID NO: 795 - DNA, 18 bp, Artificial Sequence
  Description of Artificial Sequence: Synthetic oligonucleotide
gattcatttgatgaatcg

SEQ ID NO: 796 - DNA, 18 bp, Artificial Sequence
  Description of Artificial Sequence: Synthetic oligonucleotide
ctgaagattcatttgatg

SEQ ID NO: 797 - DNA, 18 bp, Artificial Sequence
  Description of Artificial Sequence: Synthetic oligonucleotide
gttggctgaagattcatt

SEQ ID NO: 798 - DNA, 18 bp, Artificial Sequence
  Description of Artificial Sequence: Synthetic oligonucleotide
cagttgttggctgaagat

SEQ ID NO: 799 - DNA, 18 bp, Artificial Sequence
  Description of Artificial Sequence: Synthetic oligonucleotide
ttgaacagttgttggctg

SEQ ID NO: 800 - DNA, 18 bp, Artificial Sequence
  Description of Artificial Sequence: Synthetic oligonucleotide
ccttcttgaacagttgtt

SEQ ID NO: 801 - DNA, 18 bp, Artificial Sequence
  Description of Artificial Sequence: Synthetic oligonucleotide
tgcatccttcttgaacag

SEQ ID NO: 802 - DNA, 18 bp, Artificial Sequence
  Description of Artificial Sequence: Synthetic oligonucleotide
atatttgcatccttcttg

SEQ ID NO: 803 - DNA, 18 bp, Artificial Sequence
  Description of Artificial Sequence: Synthetic oligonucleotide
ctgtgatatttgcatcct

SEQ ID NO: 804 - DNA, 18 bp, Artificial Sequence
  Description of Artificial Sequence: Synthetic oligonucleotide
tacctgtgatatttgcat

SEQ ID NO: 805 - DNA, 18 bp, Artificial Sequence
  Description of Artificial Sequence: Synthetic oligonucleotide
attcttacctgtgatatt

SEQ ID NO: 806 - DNA, 18 bp, Artificial Sequence
  Description of Artificial Sequence: Synthetic oligonucleotide
gtaggattcttacctgtg

SEQ ID NO: 807 - DNA, 18 bp, Artificial Sequence
  Description of Artificial Sequence: Synthetic oligonucleotide
aaaatgtaggattcttac

SEQ ID NO: 808 - DNA, 18 bp, Artificial Sequence
  Description of Artificial Sequence: Synthetic oligonucleotide
cttagaaaatgtaggatt

SEQ ID NO: 809 - DNA, 18 bp, Artificial Sequence
  Description of Artificial Sequence: Synthetic oligonucleotide
cacatcttagaaaatgta

SEQ ID NO: 810 - DNA, 18 bp, Artificial Sequence
  Description of Artificial Sequence: Synthetic oligonucleotide
aatgtcacatcttagaaa

SEQ ID NO: 811 - DNA, 18 bp, Artificial Sequence
  Description of Artificial Sequence: Synthetic oligonucleotide
ctgacaatgtcacatctt

SEQ ID NO: 812 - DNA, 18 bp, Artificial Sequence
  Description of Artificial Sequence: Synthetic oligonucleotide
gctcactgacaatgtcac

SEQ ID NO: 813 - DNA, 18 bp, Artificial Sequence
  Description of Artificial Sequence: Synthetic oligonucleotide
tttcagctcactgacaat

SEQ ID NO: 814 - DNA, 18 bp, Artificial Sequence
  Description of Artificial Sequence: Synthetic oligonucleotide
catattttcagctcactg

SEQ ID NO: 815 - DNA, 18 bp, Artificial Sequence
  Description of Artificial Sequence: Synthetic oligonucleotide
gtaatcatattttcagct

SEQ ID NO: 816 - DNA, 18 bp, Artificial Sequence
  Description of Artificial Sequence: Synthetic oligonucleotide
atatagtaatcatatttt

SEQ ID NO: 817 - DNA, 18 bp, Artificial Sequence
  Description of Artificial Sequence: Synthetic oligonucleotide
acaaaatatagtaatcat

SEQ ID NO: 818 - DNA, 18 bp, Artificial Sequence
  Description of Artificial Sequence: Synthetic oligonucleotide
catttacaaaatatagta

SEQ ID NO: 819 - DNA, 18 bp, Artificial Sequence
  Description of Artificial Sequence: Synthetic oligonucleotide
atttccatttacaaaata

SEQ ID NO: 820 - DNA, 18 bp, Artificial Sequence
  Description of Artificial Sequence: Synthetic oligonucleotide
atggtatttccatttaca

SEQ ID NO: 821 - DNA, 18 bp, Artificial Sequence
  Description of Artificial Sequence: Synthetic oligonucleotide
ttgtaatggtatttccat

SEQ ID NO: 822 - DNA, 18 bp, Artificial Sequence
  Description of Artificial Sequence: Synthetic oligonucleotide
tgtttttgtaatggtatt

SEQ ID NO: 823 - DNA, 18 bp, Artificial Sequence
  Description of Artificial Sequence: Synthetic oligonucleotide
ctttctgtttttgtaatg

SEQ ID NO: 824 - DNA, 18 bp, Artificial Sequence
  Description of Artificial Sequence: Synthetic oligonucleotide
tatagctttctgtttttg

SEQ ID NO: 825 - DNA, 18 bp, Artificial Sequence
  Description of Artificial Sequence: Synthetic oligonucleotide
ctccttcccacctgaaat

SEQ ID NO: 826 - DNA, 18 bp, Artificial Sequence
  Description of Artificial Sequence: Synthetic oligonucleotide
ccctcctccttcccacct

SEQ ID NO: 827 - DNA, 18 bp, Artificial Sequence
  Description of Artificial Sequence: Synthetic oligonucleotide
ccttcccctcctccttcc

SEQ ID NO: 828 - DNA, 18 bp, Artificial Sequence
  Description of Artificial Sequence: Synthetic oligonucleotide
caaagccttcccctcctc

SEQ ID NO: 829 - DNA, 18 bp, Artificial Sequence
  Description of Artificial Sequence: Synthetic oligonucleotide
ccaggcaaagccttcccc

SEQ ID NO: 830 - DNA, 18 bp, Artificial Sequence
  Description of Artificial Sequence: Synthetic oligonucleotide
ccttcccaggcaaagcct

SEQ ID NO: 831 - DNA, 18 bp, Artificial Sequence
  Description of Artificial Sequence: Synthetic oligonucleotide
tttcaccttcccaggcaa

SEQ ID NO: 832 - DNA, 18 bp, Artificial Sequence
  Description of Artificial Sequence: Synthetic oligonucleotide
cataatttcaccttccca

SEQ ID NO: 833 - DNA, 18 bp, Artificial Sequence
  Description of Artificial Sequence: Synthetic oligonucleotide
catttcataatttcacct

SEQ ID NO: 834 - DNA, 18 bp, Artificial Sequence
  Description of Artificial Sequence: Synthetic oligonucleotide
acaggcatttcataattt

SEQ ID NO: 835 - DNA, 18 bp, Artificial Sequence
  Description of Artificial Sequence: Synthetic oligonucleotide
ttcatacaggcatttcat

SEQ ID NO: 836 - DNA, 18 bp, Artificial Sequence
  Description of Artificial Sequence: Synthetic oligonucleotide
ataaattcatacaggcat

SEQ ID NO: 837 - DNA, 18 bp, Artificial Sequence
  Description of Artificial Sequence: Synthetic oligonucleotide
tctccataaattcataca

SEQ ID NO: 838 - DNA, 18 bp, Artificial Sequence
  Description of Artificial Sequence: Synthetic oligonucleotide
gttgttctccataaattc

SEQ ID NO: 839 - DNA, 18 bp, Artificial Sequence
  Description of Artificial Sequence: Synthetic oligonucleotide
tttcagttgttctccata

SEQ ID NO: 840 - DNA, 18 bp, Artificial Sequence
  Description of Artificial Sequence: Synthetic oligonucleotide
aagactttcagttgttct

SEQ ID NO: 841 - DNA, 18 bp, Artificial Sequence
  Description of Artificial Sequence: Synthetic oligonucleotide
gaaataagactttcagtt

SEQ ID NO: 842 - DNA, 18 bp, Artificial Sequence
  Description of Artificial Sequence: Synthetic oligonucleotide
ctagagaaataagacttt

SEQ ID NO: 843 - DNA, 18 bp, Artificial Sequence
  Description of Artificial Sequence: Synthetic oligonucleotide
cacacctagagaaataag

SEQ ID NO: 844 - DNA, 18 bp, Artificial Sequence
  Description of Artificial Sequence: Synthetic oligonucleotide
attttcacacctagagaa

SEQ ID NO: 845 - DNA, 18 bp, Artificial Sequence
  Description of Artificial Sequence: Synthetic oligonucleotide
gtccaattttcacaccta

SEQ ID NO: 846 - DNA, 18 bp, Artificial Sequence
  Description of Artificial Sequence: Synthetic oligonucleotide
caagtccaattttcacac

SEQ ID NO: 847 - DNA, 18 bp, Artificial Sequence
  Description of Artificial Sequence: Synthetic oligonucleotide
gccagcaagtccaatttt

SEQ ID NO: 848 - DNA, 18 bp, Artificial Sequence
  Description of Artificial Sequence: Synthetic oligonucleotide
attctgccagcaagtcca

SEQ ID NO: 849 - DNA, 18 bp, Artificial Sequence
  Description of Artificial Sequence: Synthetic oligonucleotide
aaaggattctgccagcaa

SEQ ID NO: 850 - DNA, 18 bp, Artificial Sequence
  Description of Artificial Sequence: Synthetic oligonucleotide
cccaaaaaggattctgcc

SEQ ID NO: 851 - DNA, 18 bp, Artificial Sequence
  Description of Artificial Sequence: Synthetic oligonucleotide
cttctcccaaaaaggatt

SEQ ID NO: 852 - DNA, 18 bp, Artificial Sequence
  Description of Artificial Sequence: Synthetic oligonucleotide
ttcatcttctcccaaaaa

SEQ ID NO: 853 - DNA, 18 bp, Artificial Sequence
  Description of Artificial Sequence: Synthetic oligonucleotide
gattcttcatcttctccc

SEQ ID NO: 854 - DNA, 18 bp, Artificial Sequence
  Description of Artificial Sequence: Synthetic oligonucleotide
acactgattcttcatctt

SEQ ID NO: 855 - DNA, 18 bp, Artificial Sequence
  Description of Artificial Sequence: Synthetic oligonucleotide
aacagtctcacactgatt

SEQ ID NO: 856 - DNA, 18 bp, Artificial Sequence
  Description of Artificial Sequence: Synthetic oligonucleotide
aaccaaacagtctcacac

SEQ ID NO: 857 - DNA, 18 bp, Artificial Sequence
  Description of Artificial Sequence: Synthetic oligonucleotide
attttaaccaaacagtct

SEQ ID NO: 858 - DNA, 18 bp, Artificial Sequence
  Description of Artificial Sequence: Synthetic oligonucleotide
tggggattttaaccaaac

SEQ ID NO: 859 - DNA, 18 bp, Artificial Sequence
  Description of Artificial Sequence: Synthetic oligonucleotide
tttattggggattttaac

SEQ ID NO: 860 - DNA, 18 bp, Artificial Sequence
  Description of Artificial Sequence: Synthetic oligonucleotide
tcagttttattggggatt

SEQ ID NO: 861 - DNA, 18 bp, Artificial Sequence
  Description of Artificial Sequence: Synthetic oligonucleotide
cagtttcagttttattgg

SEQ ID NO: 862 - DNA, 18 bp, Artificial Sequence
  Description of Artificial Sequence: Synthetic oligonucleotide
caccagtttcagttttat

SEQ ID NO: 863 - DNA, 18 bp, Artificial Sequence
  Description of Artificial Sequence: Synthetic oligonucleotide
gaattcaccagtttcagt

SEQ ID NO: 864 - DNA, 18 bp, Artificial Sequence
  Description of Artificial Sequence: Synthetic oligonucleotide
aggcagaattcaccagtt

SEQ ID NO: 865 - DNA, 18 bp, Artificial Sequence
  Description of Artificial Sequence: Synthetic oligonucleotide
agatgaggcagaattcac

SEQ ID NO: 866 - DNA, 18 bp, Artificial Sequence
  Description of Artificial Sequence: Synthetic oligonucleotide
aacatagatgaggcagaa

SEQ ID NO: 867 - DNA, 18 bp, Artificial Sequence
  Description of Artificial Sequence: Synthetic oligonucleotide
tgtaaaacatagatgagg

SEQ ID NO: 868 - DNA, 18 bp, Artificial Sequence
  Description of Artificial Sequence: Synthetic oligonucleotide
caaactgtaaaacataga

SEQ ID NO: 869 - DNA, 18 bp, Artificial Sequence
  Description of Artificial Sequence: Synthetic oligonucleotide
attatcaaactgtaaaac

SEQ ID NO: 870 - DNA, 18 bp, Artificial Sequence
  Description of Artificial Sequence: Synthetic oligonucleotide
attatattatcaaactgt

SEQ ID NO: 871 - DNA, 18 bp, Artificial Sequence
  Description of Artificial Sequence: Synthetic oligonucleotide
atacaattatattatcaa

SEQ ID NO: 872 - DNA, 18 bp, Artificial Sequence
  Description of Artificial Sequence: Synthetic oligonucleotide
aaataatacaattatatt

SEQ ID NO: 873 - DNA, 18 bp, Artificial Sequence
  Description of Artificial Sequence: Synthetic oligonucleotide
aaattaaataatacaatt

SEQ ID NO: 874 - DNA, 18 bp, Artificial Sequence
  Description of Artificial Sequence: Synthetic oligonucleotide
taataaaattaaataata

SEQ ID NO: 875 - DNA, 18 bp, Artificial Sequence
  Description of Artificial Sequence: Synthetic oligonucleotide
ttttataataaaattaaa

SEQ ID NO: 876 - DNA, 18 bp, Artificial Sequence
  Description of Artificial Sequence: Synthetic oligonucleotide
ttaaattttataataaaa

SEQ ID NO: 877 - DNA, 18 bp, Artificial Sequence
  Description of Artificial Sequence: Synthetic oligonucleotide
taaaattaaattttataa

SEQ ID NO: 878 - DNA, 18 bp, Artificial Sequence
  Description of Artificial Sequence: Synthetic oligonucleotide
aaaattaaaattaaattt

SEQ ID NO: 879 - DNA, 18 bp, Artificial Sequence
  Description of Artificial Sequence: Synthetic oligonucleotide
taataaaaattaaaatta

SEQ ID NO: 880 - DNA, 18 bp, Artificial Sequence
  Description of Artificial Sequence: Synthetic oligonucleotide
tgagataataaaaattaa

SEQ ID NO: 881 - DNA, 18 bp, Artificial Sequence
  Description of Artificial Sequence: Synthetic oligonucleotide
gaccctgagataataaaa

SEQ ID NO: 882 - DNA, 18 bp, Artificial Sequence
  Description of Artificial Sequence: Synthetic oligonucleotide
aaaatgaccctgagataa

SEQ ID NO: 883 - DNA, 18 bp, Artificial Sequence
  Description of Artificial Sequence: Synthetic oligonucleotide
tcctctccctcaatgctc

SEQ ID NO: 884 - DNA, 18 bp, Artificial Sequence
  Description of Artificial Sequence: Synthetic oligonucleotide
gccactcctctccctcaa

SEQ ID NO: 885 - DNA, 18 bp, Artificial Sequence
  Description of Artificial Sequence: Synthetic oligonucleotide
gctgtgccactcctctcc

SEQ ID NO: 886 - DNA, 18 bp, Artificial Sequence
  Description of Artificial Sequence: Synthetic oligonucleotide
cccatgctgtgccactcc

SEQ ID NO: 887 - DNA, 18 bp, Artificial Sequence
  Description of Artificial Sequence: Synthetic oligonucleotide
tgcaccccatgctgtgcc

SEQ ID NO: 888 - DNA, 18 bp, Artificial Sequence
  Description of Artificial Sequence: Synthetic oligonucleotide
cccagtgcaccccatgct

SEQ ID NO: 889 - DNA, 18 bp, Artificial Sequence
  Description of Artificial Sequence: Synthetic oligonucleotide
ctgtccccagtgcacccc

SEQ ID NO: 890 - DNA, 18 bp, Artificial Sequence
  Description of Artificial Sequence: Synthetic oligonucleotide
gttatctgtccccagtgc

SEQ ID NO: 891 - DNA, 18 bp, Artificial Sequence
  Description of Artificial Sequence: Synthetic oligonucleotide
cctgtgttatctgtcccc

SEQ ID NO: 892 - DNA, 18 bp, Artificial Sequence
  Description of Artificial Sequence: Synthetic oligonucleotide
gaaaccctgtgttatctg

SEQ ID NO: 893 - DNA, 18 bp, Artificial Sequence
  Description of Artificial Sequence: Synthetic oligonucleotide
tcttcgaaaccctgtgtt

SEQ ID NO: 894 - DNA, 18 bp, Artificial Sequence
  Description of Artificial Sequence: Synthetic oligonucleotide
tgtggtcttcgaaaccct

SEQ ID NO: 895 - DNA, 18 bp, Artificial Sequence
  Description of Artificial Sequence: Synthetic oligonucleotide
ctaactgtggtcttcgaa

SEQ ID NO: 896 - DNA, 18 bp, Artificial Sequence
  Description of Artificial Sequence: Synthetic oligonucleotide
gcagtctaactgtggtct

SEQ ID NO: 897 - DNA, 18 bp, Artificial Sequence
  Description of Artificial Sequence: Synthetic oligonucleotide
acacagcagtctaactgt

SEQ ID NO: 898 - DNA, 18 bp, Artificial Sequence
  Description of Artificial Sequence: Synthetic oligonucleotide
tttttacacagcagtcta

SEQ ID NO: 899 - DNA, 18 bp, Artificial Sequence
  Description of Artificial Sequence: Synthetic oligonucleotide
tccattttttacacagca

SEQ ID NO: 900 - DNA, 18 bp, Artificial Sequence
  Description of Artificial Sequence: Synthetic oligonucleotide
ctacatccattttttaca

SEQ ID NO: 901 - DNA, 18 bp, Artificial Sequence
  Description of Artificial Sequence: Synthetic oligonucleotide
tggccctacatccatttt

SEQ ID NO: 902 - DNA, 18 bp, Artificial Sequence
  Description of Artificial Sequence: Synthetic oligonucleotide
agtcttggccctacatcc

SEQ ID NO: 903 - DNA, 18 bp, Artificial Sequence
  Description of Artificial Sequence: Synthetic oligonucleotide
ctttcagtcttggcccta

SEQ ID NO: 904 - DNA, 18 bp, Artificial Sequence
  Description of Artificial Sequence: Synthetic oligonucleotide
acgctttcagtcttggcc

SEQ ID NO: 905 - DNA, 18 bp, Artificial Sequence
  Description of Artificial Sequence: Synthetic oligonucleotide
tttccacgctttcagtct

SEQ ID NO: 906 - DNA, 18 bp, Artificial Sequence
  Description of Artificial Sequence: Synthetic oligonucleotide
cttggtttccacgctttc

SEQ ID NO: 907 - DNA, 18 bp, Artificial Sequence
  Description of Artificial Sequence: Synthetic oligonucleotide
tgcttcttggtttccacg

SEQ ID NO: 908 - DNA, 18 bp, Artificial Sequence
  Description of Artificial Sequence: Synthetic oligonucleotide
atggttgcttcttggttt

SEQ ID NO: 909 - DNA, 18 bp, Artificial Sequence
  Description of Artificial Sequence: Synthetic oligonucleotide
atttcatggttgcttctt

SEQ ID NO: 910 - DNA, 18 bp, Artificial Sequence
  Description of Artificial Sequence: Synthetic oligonucleotide
ccaccatttcatggttgc

SEQ ID NO: 911 - DNA, 18 bp, Artificial Sequence
  Description of Artificial Sequence: Synthetic oligonucleotide
acacaccaccatttcatg

SEQ ID NO: 912 - DNA, 18 bp, Artificial Sequence
  Description of Artificial Sequence: Synthetic oligonucleotide
tgtatacacaccaccatt

SEQ ID NO: 913 - DNA, 18 bp, Artificial Sequence
  Description of Artificial Sequence: Synthetic oligonucleotide
tactgtatacacaccacc

SEQ ID NO: 914 - DNA, 18 bp, Artificial Sequence
  Description of Artificial Sequence: Synthetic oligonucleotide
gtacctactgtatacaca

SEQ ID NO: 915 - DNA, 18 bp, Artificial Sequence
  Description of Artificial Sequence: Synthetic oligonucleotide
actgagtacctactgtat

SEQ ID NO: 916 - DNA, 18 bp, Artificial Sequence
  Description of Artificial Sequence: Synthetic oligonucleotide
taaatactgagtacctac

SEQ ID NO: 917 - DNA, 18 bp, Artificial Sequence
  Description of Artificial Sequence: Synthetic oligonucleotide
attaataaatactgagta

SEQ ID NO: 918 - DNA, 18 bp, Artificial Sequence
  Description of Artificial Sequence: Synthetic oligonucleotide
ccaatattaataaatact

SEQ ID NO: 919 - DNA, 18 bp, Artificial Sequence
  Description of Artificial Sequence: Synthetic oligonucleotide
ggaagccaatattaataa

SEQ ID NO: 920 - DNA, 18 bp, Artificial Sequence
  Description of Artificial Sequence: Synthetic oligonucleotide
aaggcggaagccaatatt

SEQ ID NO: 921 - DNA, 18 bp, Artificial Sequence
  Description of Artificial Sequence: Synthetic oligonucleotide
aagggaaggcggaagcca

SEQ ID NO: 922 - DNA, 18 bp, Artificial Sequence
  Description of Artificial Sequence: Synthetic oligonucleotide
ggatgaagggaaggcgga

SEQ ID NO: 923 - DNA, 18 bp, Artificial Sequence
  Description of Artificial Sequence: Synthetic oligonucleotide
aggaaggatgaagggaag

SEQ ID NO: 924 - DNA, 18 bp, Artificial Sequence
  Description of Artificial Sequence: Synthetic oligonucleotide
aaaagaggaaggatgaag

SEQ ID NO: 925 - DNA, 18 bp, Artificial Sequence
  Description of Artificial Sequence: Synthetic oligonucleotide
aagaaaaaagaggaagga

SEQ ID NO: 926 - DNA, 18 bp, Artificial Sequence
  Description of Artificial Sequence: Synthetic oligonucleotide
agaaaaagaaaaaagagg

SEQ ID NO: 927 - DNA, 18 bp, Artificial Sequence
  Description of Artificial Sequence: Synthetic oligonucleotide
gagggagaaaaagaaaaa

SEQ ID NO: 928 - DNA, 18 bp, Artificial Sequence
  Description of Artificial Sequence: Synthetic oligonucleotide
gggatgagggagaaaaag

SEQ ID NO: 929 - DNA, 18 bp, Artificial Sequence
  Description of Artificial Sequence: Synthetic oligonucleotide
gaaaagggatgagggaga

SEQ ID NO: 930 - DNA, 18 bp, Artificial Sequence
  Description of Artificial Sequence: Synthetic oligonucleotide
aaggagaaaagggatgag

SEQ ID NO: 931 - DNA, 18 bp, Artificial Sequence
  Description of Artificial Sequence: Synthetic oligonucleotide
agggaaaggagaaaaggg

SEQ ID NO: 932 - DNA, 18 bp, Artificial Sequence
  Description of Artificial Sequence: Synthetic oligonucleotide
gtgggagggaaaggagaa

SEQ ID NO: 933 - DNA, 18 bp, Artificial Sequence
  Description of Artificial Sequence: Synthetic oligonucleotide
aggaagtgggagggaaag

SEQ ID NO: 934 - DNA, 18 bp, Artificial Sequence
  Description of Artificial Sequence: Synthetic oligonucleotide
caccccatcatgccaggg

SEQ ID NO: 935 - DNA, 18 bp, Artificial Sequence
  Description of Artificial Sequence: Synthetic oligonucleotide
gccctcaccccatcatgc

SEQ ID NO: 936 - DNA, 18 bp, Artificial Sequence
  Description of Artificial Sequence: Synthetic oligonucleotide
caagagccctcaccccat

SEQ ID NO: 937 - DNA, 18 bp, Artificial Sequence
  Description of Artificial Sequence: Synthetic oligonucleotide
cccaccaagagccctcac

SEQ ID NO: 938 - DNA, 18 bp, Artificial Sequence
  Description of Artificial Sequence: Synthetic oligonucleotide
actaacccaccaagagcc

SEQ ID NO: 939 - DNA, 18 bp, Artificial Sequence
  Description of Artificial Sequence: Synthetic oligonucleotide
tctccactaacccaccaa

SEQ ID NO: 940 - DNA, 18 bp, Artificial Sequence
  Description of Artificial Sequence: Synthetic oligonucleotide
ccagctctccactaaccc

SEQ ID NO: 941 - DNA, 18 bp, Artificial Sequence
  Description of Artificial Sequence: Synthetic oligonucleotide
agcccccagctctccact

SEQ ID NO: 942 - DNA, 18 bp, Artificial Sequence
  Description of Artificial Sequence: Synthetic oligonucleotide
gggccagcccccagctct

SEQ ID NO: 943 - DNA, 18 bp, Artificial Sequence
  Description of Artificial Sequence: Synthetic oligonucleotide
gggaagggccagccccca

SEQ ID NO: 944 - DNA, 18 bp, Artificial Sequence
  Description of Artificial Sequence: Synthetic oligonucleotide
agatggggaagggccagc

SEQ ID NO: 945 - DNA, 18 bp, Artificial Sequence
  Description of Artificial Sequence: Synthetic oligonucleotide
aaagaagatggggaaggg

SEQ ID NO: 946 - DNA, 18 bp, Artificial Sequence
  Description of Artificial Sequence: Synthetic oligonucleotide
gtagaaaagaagatgggg

SEQ ID NO: 947 - DNA, 18 bp, Artificial Sequence
  Description of Artificial Sequence: Synthetic oligonucleotide
ggtgggtagaaaagaaga

SEQ ID NO: 948 - DNA, 18 bp, Artificial Sequence
  Description of Artificial Sequence: Synthetic oligonucleotide
gagggggtgggtagaaaa

SEQ ID NO: 949 - DNA, 18 bp, Artificial Sequence
  Description of Artificial Sequence: Synthetic oligonucleotide
gcggggagggggtgggta

SEQ ID NO: 950 - DNA, 18 bp, Artificial Sequence
  Description of Artificial Sequence: Synthetic oligonucleotide
ggggggcggggagggggt

SEQ ID NO: 951 - DNA, 18 bp, Artificial Sequence
  Description of Artificial Sequence: Synthetic oligonucleotide
ctggcggggggcggggag

SEQ ID NO: 952 - DNA, 18 bp, Artificial Sequence
  Description of Artificial Sequence: Synthetic oligonucleotide
tgggcctggcggggggcg

SEQ ID NO: 953 - DNA, 18 bp, Artificial Sequence
  Description of Artificial Sequence: Synthetic oligonucleotide
gtggctgggcctggcggg

SEQ ID NO: 954 - DNA, 18 bp, Artificial Sequence
  Description of Artificial Sequence: Synthetic oligonucleotide
tgatggtggctgggcctg

SEQ ID NO: 955 - DNA, 18 bp, Artificial Sequence
  Description of Artificial Sequence: Synthetic oligonucleotide
gactgatggtggctgggc

SEQ ID NO: 956 - DNA, 18 bp, Artificial Sequence
  Description of Artificial Sequence: Synthetic oligonucleotide
gacgtgactgatggtggc

SEQ ID NO: 957 - DNA, 18 bp, Artificial Sequence
  Description of Artificial Sequence: Synthetic oligonucleotide
ggagtgacgtgactgatg

SEQ ID NO: 958 - DNA, 18 bp, Artificial Sequence
  Description of Artificial Sequence: Synthetic oligonucleotide
tcccaggagtgacgtgac

SEQ ID NO: 959 - DNA, 18 bp, Artificial Sequence
  Description of Artificial Sequence: Synthetic oligonucleotide
ctcagtcccaggagtgac

SEQ ID NO: 960 - DNA, 18 bp, Artificial Sequence
  Description of Artificial Sequence: Synthetic oligonucleotide
gcctcctcagtcccagga

SEQ ID NO: 961 - DNA, 18 bp, Artificial Sequence
  Description of Artificial Sequence: Synthetic oligonucleotide
cccctgcctcctcagtcc

SEQ ID NO: 962 - DNA, 18 bp, Artificial Sequence
  Description of Artificial Sequence: Synthetic oligonucleotide
tccctcccctgcctcctc

SEQ ID NO: 963 - DNA, 18 bp, Artificial Sequence
  Description of Artificial Sequence: Synthetic oligonucleotide
ccttatccctcccctgcc

SEQ ID NO: 964 - DNA, 18 bp, Artificial Sequence
  Description of Artificial Sequence: Synthetic oligonucleotide
ctgccccttatccctccc

SEQ ID NO: 965 - DNA, 18 bp, Artificial Sequence
  Description of Artificial Sequence: Synthetic oligonucleotide
catctctgccccttatcc

SEQ ID NO: 966 - DNA, 18 bp, Artificial Sequence
  Description of Artificial Sequence: Synthetic oligonucleotide
gcctccatctctgcccct

SEQ ID NO: 967 - DNA, 18 bp, Artificial Sequence
  Description of Artificial Sequence: Synthetic oligonucleotide
gtggggcctccatctctg

SEQ ID NO: 968 - DNA, 18 bp, Artificial Sequence
  Description of Artificial Sequence: Synthetic oligonucleotide
ggggagtggggcctccat

SEQ ID NO: 969 - DNA, 18 bp, Artificial Sequence
  Description of Artificial Sequence: Synthetic oligonucleotide
acctcggggagtggggcc

SEQ ID NO: 970 - DNA, 18 bp, Artificial Sequence
  Description of Artificial Sequence: Synthetic oligonucleotide
aggcaacctcggggagtg

SEQ ID NO: 971 - DNA, 18 bp, Artificial Sequence
  Description of Artificial Sequence: Synthetic oligonucleotide
tgtctaggcaacctcggg

SEQ ID NO: 972 - DNA, 18 bp, Artificial Sequence
  Description of Artificial Sequence: Synthetic oligonucleotide
catgttgtctaggcaacc

SEQ ID NO: 973 - DNA, 18 bp, Artificial Sequence
  Description of Artificial Sequence: Synthetic oligonucleotide
tttctcatgttgtctagg

SEQ ID NO: 974 - DNA, 18 bp, Artificial Sequence
  Description of Artificial Sequence: Synthetic oligonucleotide
cacgatttctcatgttgt

SEQ ID NO: 975 - DNA, 18 bp, Artificial Sequence
  Description of Artificial Sequence: Synthetic oligonucleotide
ctggccacgatttctcat

SEQ ID NO: 976 - DNA, 18 bp, Artificial Sequence
  Description of Artificial Sequence: Synthetic oligonucleotide
aggccctggccacgattt

SEQ ID NO: 977 - DNA, 18 bp, Artificial Sequence
  Description of Artificial Sequence: Synthetic oligonucleotide
ggaagaggccctggccac

SEQ ID NO: 978 - DNA, 18 bp, Artificial Sequence
  Description of Artificial Sequence: Synthetic oligonucleotide
caggcggaagaggccctg

SEQ ID NO: 979 - DNA, 18 bp, Artificial Sequence
  Description of Artificial Sequence: Synthetic oligonucleotide
ctccgcaggcggaagagg

SEQ ID NO: 980 - DNA, 18 bp, Artificial Sequence
  Description of Artificial Sequence: Synthetic oligonucleotide
agcggctccgcaggcgga

SEQ ID NO: 981 - DNA, 18 bp, Artificial Sequence
  Description of Artificial Sequence: Synthetic oligonucleotide
gaagcagcggctccgcag

SEQ ID NO: 982 - DNA, 18 bp, Artificial Sequence
  Description of Artificial Sequence: Synthetic oligonucleotide
tgcaggaagcagcggctc

SEQ ID NO: 983 - DNA, 18 bp, Artificial Sequence
  Description of Artificial Sequence: Synthetic oligonucleotide
actgatgcaggaagcagc

SEQ ID NO: 984 - DNA, 18 bp, Artificial Sequence
  Description of Artificial Sequence: Synthetic oligonucleotide
gagtgactgatgcaggaa

SEQ ID NO: 985 - DNA, 18 bp, Artificial Sequence
  Description of Artificial Sequence: Synthetic oligonucleotide
agcgggagtgactgatgc

SEQ ID NO: 986 - DNA, 18 bp, Artificial Sequence
  Description of Artificial Sequence: Synthetic oligonucleotide
cccccagcgggagtgact

SEQ ID NO: 987 - DNA, 18 bp, Artificial Sequence
  Description of Artificial Sequence: Synthetic oligonucleotide
ccccgcccccagcgggag

SEQ ID NO: 988 - DNA, 18 bp, Artificial Sequence
  Description of Artificial Sequence: Synthetic oligonucleotide
ctccgccccgcccccagc

SEQ ID NO: 989 - DNA, 18 bp, Artificial Sequence
  Description of Artificial Sequence: Synthetic oligonucleotide
ccttcctccgccccgccc

SEQ ID NO: 990 - DNA, 18 bp, Artificial Sequence
  Description of Artificial Sequence: Synthetic oligonucleotide
caaccccttcctccgccc

SEQ ID NO: 991 - DNA, 18 bp, Artificial Sequence
  Description of Artificial Sequence: Synthetic oligonucleotide
acatccaaccccttcctc

SEQ ID NO: 992 - DNA, 18 bp, Artificial Sequence
  Description of Artificial Sequence: Synthetic oligonucleotide
ctgccacatccaacccct

SEQ ID NO: 993 - DNA, 18 bp, Artificial Sequence
  Description of Artificial Sequence: Synthetic oligonucleotide
tggctctgccacatccaa

SEQ ID NO: 994 - DNA, 18 bp, Artificial Sequence
  Description of Artificial Sequence: Synthetic oligonucleotide
gggcctggctctgccaca

SEQ ID NO: 995 - DNA, 18 bp, Artificial Sequence
  Description of Artificial Sequence: Synthetic oligonucleotide
ggctggggcctggctctg

SEQ ID NO: 996 - DNA, 18 bp, Artificial Sequence
  Description of Artificial Sequence: Synthetic oligonucleotide
gcaccggctggggcctgg

SEQ ID NO: 997 - DNA, 18 bp, Artificial Sequence
  Description of Artificial Sequence: Synthetic oligonucleotide
gagcggcaccggctgggg

SEQ ID NO: 998 - DNA, 18 bp, Artificial Sequence
  Description of Artificial Sequence: Synthetic oligonucleotide
agtctgagcggcaccggc

SEQ ID NO: 999 - DNA, 18 bp, Artificial Sequence
  Description of Artificial Sequence: Synthetic oligonucleotide
gggggagtctgagcggca

SEQ ID NO: 1000 - DNA, 18 bp, Artificial Sequence
  Description of Artificial Sequence: Synthetic oligonucleotide
acagcgggggagtctgag

SEQ ID NO: 1001 - DNA, 18 bp, Artificial Sequence
  Description of Artificial Sequence: Synthetic oligonucleotide
cggcgacagcgggggagt

SEQ ID NO: 1002 - DNA, 18 bp, Artificial Sequence
  Description of Artificial Sequence: Synthetic oligonucleotide
cacggcggcgacagcggg

SEQ ID NO: 1003 - DNA, 18 bp, Artificial Sequence
  Description of Artificial Sequence: Synthetic oligonucleotide
gggaccacggcggcgaca

SEQ ID NO: 1004 - DNA, 18 bp, Artificial Sequence
  Description of Artificial Sequence: Synthetic oligonucleotide
tggctgggaccacggcgg

SEQ ID NO: 1005 - DNA, 18 bp, Artificial Sequence
  Description of Artificial Sequence: Synthetic oligonucleotide
tgccatggctgggaccac

SEQ ID NO: 1006 - DNA, 18 bp, Artificial Sequence
  Description of Artificial Sequence: Synthetic oligonucleotide
taggatgccatggctggg

SEQ ID NO: 1007 - DNA, 18 bp, Artificial Sequence
  Description of Artificial Sequence: Synthetic oligonucleotide
atggataggatgccatgg

SEQ ID NO: 1008 - DNA, 18 bp, Artificial Sequence
  Description of Artificial Sequence: Synthetic oligonucleotide
gccagatggataggatgc

SEQ ID NO: 1009 - DNA, 18 bp, Artificial Sequence
  Description of Artificial Sequence: Synthetic oligonucleotide
ccagagccagatggatag

SEQ ID NO: 1010 - DNA, 18 bp, Artificial Sequence
  Description of Artificial Sequence: Synthetic oligonucleotide
gcttgccagagccagatg

SEQ ID NO: 1011 - DNA, 18 bp, Artificial Sequence
  Description of Artificial Sequence: Synthetic oligonucleotide
cttgggcttgccagagcc

SEQ ID NO: 1012 - DNA, 18 bp, Artificial Sequence
  Description of Artificial Sequence: Synthetic oligonucleotide
ttggccttgggcttgcca

SEQ ID NO: 1013 - DNA, 18 bp, Artificial Sequence
  Description of Artificial Sequence: Synthetic oligonucleotide
gatatttggccttgggct

SEQ ID NO: 1014 - DNA, 18 bp, Artificial Sequence
  Description of Artificial Sequence: Synthetic oligonucleotide
aaagggatatttggcctt

SEQ ID NO: 1015 - DNA, 18 bp, Artificial Sequence
  Description of Artificial Sequence: Synthetic oligonucleotide
ttcttaaagggatatttg

SEQ ID NO: 1016 - DNA, 18 bp, Artificial Sequence
  Description of Artificial Sequence: Synthetic oligonucleotide
cccgcttcttaaagggat

SEQ ID NO: 1017 - DNA, 18 bp, Artificial Sequence
  Description of Artificial Sequence: Synthetic oligonucleotide
gctggcccgcttcttaaa

SEQ ID NO: 1018 - DNA, 18 bp, Artificial Sequence
  Description of Artificial Sequence: Synthetic oligonucleotide
tgcaggctggcccgcttc

SEQ ID NO: 1019 - DNA, 18 bp, Artificial Sequence
  Description of Artificial Sequence: Synthetic oligonucleotide
aggcctgcaggctggccc

SEQ ID NO: 1020 - DNA, 18 bp, Artificial Sequence
  Description of Artificial Sequence: Synthetic oligonucleotide
agtggaggcctgcaggct

SEQ ID NO: 1021 - DNA, 18 bp, Artificial Sequence
  Description of Artificial Sequence: Synthetic oligonucleotide
gctgcagtggaggcctgc

SEQ ID NO: 1022 - DNA, 18 bp, Artificial Sequence
  Description of Artificial Sequence: Synthetic oligonucleotide
ctggagctgcagtggagg

SEQ ID NO: 1023 - DNA, 18 bp, Artificial Sequence
  Description of Artificial Sequence: Synthetic oligonucleotide
cacctggagctgcagtgg

SEQ ID NO: 1024 - DNA, 18 bp, Artificial Sequence
  Description of Artificial Sequence: Synthetic oligonucleotide
acactcacctggagctgc

SEQ ID NO: 1025 - DNA, 18 bp, Artificial Sequence
  Description of Artificial Sequence: Synthetic oligonucleotide
agcacacactcacctgga

SEQ ID NO: 1026 - DNA, 18 bp, Artificial Sequence
  Description of Artificial Sequence: Synthetic oligonucleotide
caggaagcacacactcac

SEQ ID NO: 1027 - DNA, 18 bp, Artificial Sequence
  Description of Artificial Sequence: Synthetic oligonucleotide
gaggccaggaagcacaca

SEQ ID NO: 1028 - DNA, 18 bp, Artificial Sequence
  Description of Artificial Sequence: Synthetic oligonucleotide
atcctgaggccaggaagc

SEQ ID NO: 1029 - DNA, 18 bp, Artificial Sequence
  Description of Artificial Sequence: Synthetic oligonucleotide
catctatcctgaggccag

SEQ ID NO: 1030 - DNA, 18 bp, Artificial Sequence
  Description of Artificial Sequence: Synthetic oligonucleotide
cccagcatctatcctgag

SEQ ID NO: 1031 - DNA, 18 bp, Artificial Sequence
  Description of Artificial Sequence: Synthetic oligonucleotide
cagagcccagcatctatc

SEQ ID NO: 1032 - DNA, 18 bp, Artificial Sequence
  Description of Artificial Sequence: Synthetic oligonucleotide
caagacagagcccagcat

SEQ ID NO: 1033 - DNA, 18 bp, Artificial Sequence
  Description of Artificial Sequence: Synthetic oligonucleotide
ggtggcaagacagagccc

SEQ ID NO: 1034 - DNA, 18 bp, Artificial Sequence
  Description of Artificial Sequence: Synthetic oligonucleotide
cgagaggtggcaagacag

SEQ ID NO: 1035 - DNA, 18 bp, Artificial Sequence
  Description of Artificial Sequence: Synthetic oligonucleotide
ttgggcgagaggtggcaa

SEQ ID NO: 1036 - DNA, 18 bp, Artificial Sequence
  Description of Artificial Sequence: Synthetic oligonucleotide
gcaccttgggcgagaggt

SEQ ID NO: 1037 - DNA, 18 bp, Artificial Sequence
  Description of Artificial Sequence: Synthetic oligonucleotide
gaccagcaccttgggcga

SEQ ID NO: 1038 - DNA, 18 bp, Artificial Sequence
  Description of Artificial Sequence: Synthetic oligonucleotide
gaggggaccagcaccttg

SEQ ID NO: 1039 - DNA, 18 bp, Artificial Sequence
  Description of Artificial Sequence: Synthetic oligonucleotide
cctctgaggggaccagca

SEQ ID NO: 1040 - DNA, 18 bp, Artificial Sequence
  Description of Artificial Sequence: Synthetic oligonucleotide
ggccccctctgaggggac

SEQ ID NO: 1041 - DNA, 18 bp, Artificial Sequence
  Description of Artificial Sequence: Synthetic oligonucleotide
gaggtggccccctctgag

SEQ ID NO: 1042 - DNA, 18 bp, Artificial Sequence
  Description of Artificial Sequence: Synthetic oligonucleotide
cggaggaggtggccccct

SEQ ID NO: 1043 - DNA, 18 bp, Artificial Sequence
  Description of Artificial Sequence: Synthetic oligonucleotide
gatgccggaggaggtggc

SEQ ID NO: 1044 - DNA, 18 bp, Artificial Sequence
  Description of Artificial Sequence: Synthetic oligonucleotide
cagcaccctctatcccac

SEQ ID NO: 1045 - DNA, 18 bp, Artificial Sequence
  Description of Artificial Sequence: Synthetic oligonucleotide
aagatcagcaccctctat

SEQ ID NO: 1046 - DNA, 18 bp, Artificial Sequence
  Description of Artificial Sequence: Synthetic oligonucleotide
cctccaagatcagcaccc

SEQ ID NO: 1047 - DNA, 18 bp, Artificial Sequence
  Description of Artificial Sequence: Synthetic oligonucleotide
cccaccctccaagatcag

SEQ ID NO: 1048 - DNA, 18 bp, Artificial Sequence
  Description of Artificial Sequence: Synthetic oligonucleotide
cctcccccaccctccaag

SEQ ID NO: 1049 - DNA, 18 bp, Artificial Sequence
  Description of Artificial Sequence: Synthetic oligonucleotide
gcttccctcccccaccct

SEQ ID NO: 1050 - DNA, 18 bp, Artificial Sequence
  Description of Artificial Sequence: Synthetic oligonucleotide
cagccgcttccctccccc

SEQ ID NO: 1051 - DNA, 18 bp, Artificial Sequence
  Description of Artificial Sequence: Synthetic oligonucleotide
gcccccagccgcttccct

SEQ ID NO: 1052 - DNA, 18 bp, Artificial Sequence
  Description of Artificial Sequence: Synthetic oligonucleotide
ccctagcccccagccgct

SEQ ID NO: 1053 - DNA, 18 bp, Artificial Sequence
  Description of Artificial Sequence: Synthetic oligonucleotide
cagggccctagcccccag

SEQ ID NO: 1054 - DNA, 18 bp, Artificial Sequence
  Description of Artificial Sequence: Synthetic oligonucleotide
gccaccagggccctagcc

SEQ ID NO: 1055 - DNA, 18 bp, Artificial Sequence
  Description of Artificial Sequence: Synthetic oligonucleotide
ttagtgccaccagggccc

SEQ ID NO: 1056 - DNA, 18 bp, Artificial Sequence
  Description of Artificial Sequence: Synthetic oligonucleotide
tgggcttagtgccaccag

SEQ ID NO: 1057 - DNA, 18 bp, Artificial Sequence
  Description of Artificial Sequence: Synthetic oligonucleotide
gcggctgggcttagtgcc

SEQ ID NO: 1058 - DNA, 18 bp, Artificial Sequence
  Description of Artificial Sequence: Synthetic oligonucleotide
tgtgggcggctgggctta

SEQ ID NO: 1059 - DNA, 18 bp, Artificial Sequence
  Description of Artificial Sequence: Synthetic oligonucleotide
cctcctgtgggcggctgg

SEQ ID NO: 1060 - DNA, 18 bp, Artificial Sequence
  Description of Artificial Sequence: Synthetic oligonucleotide
gagcacctcctgtgggcg

SEQ ID NO: 1061 - DNA, 18 bp, Artificial Sequence
  Description of Artificial Sequence: Synthetic oligonucleotide
ctgcggagcacctcctgt

SEQ ID NO: 1062 - DNA, 18 bp, Artificial Sequence
  Description of Artificial Sequence: Synthetic oligonucleotide
gtgtcctgcggagcacct

SEQ ID NO: 1063 - DNA, 18 bp, Artificial Sequence
  Description of Artificial Sequence: Synthetic oligonucleotide
gagcggtgtcctgcggag

SEQ ID NO: 1064 - DNA, 18 bp, Artificial Sequence
  Description of Artificial Sequence: Synthetic oligonucleotide
tcatagagcggtgtcctg

SEQ ID NO: 1065 - DNA, 18 bp, Artificial Sequence
  Description of Artificial Sequence: Synthetic oligonucleotide
aagtcatagagcggtgtc

SEQ ID NO: 1066 - DNA, 18 bp, Artificial Sequence
  Description of Artificial Sequence: Synthetic oligonucleotide
ggtggaagtcatagagcg

SEQ ID NO: 1067 - DNA, 18 bp, Artificial Sequence
  Description of Artificial Sequence: Synthetic oligonucleotide
ggccaggtggaagtcata

SEQ ID NO: 1068 - DNA, 18 bp, Artificial Sequence
  Description of Artificial Sequence: Synthetic oligonucleotide
ccgtgggccaggtggaag

SEQ ID NO: 1069 - DNA, 18 bp, Artificial Sequence
  Description of Artificial Sequence: Synthetic oligonucleotide
tcccgccgtgggccaggt

SEQ ID NO: 1070 - DNA, 18 bp, Artificial Sequence
  Description of Artificial Sequence: Synthetic oligonucleotide
cattttcccgccgtgggc

SEQ ID NO: 1071 - DNA, 18 bp, Artificial Sequence
  Description of Artificial Sequence: Synthetic oligonucleotide
gccaccattttcccgccg

SEQ ID NO: 1072 - DNA, 18 bp, Artificial Sequence
  Description of Artificial Sequence: Synthetic oligonucleotide
caaacgccaccattttcc

SEQ ID NO: 1073 - DNA, 18 bp, Artificial Sequence
  Description of Artificial Sequence: Synthetic oligonucleotide
acccgcaaacgccaccat

SEQ ID NO: 1074 - DNA, 18 bp, Artificial Sequence
  Description of Artificial Sequence: Synthetic oligonucleotide
ctccaacccgcaaacgcc

SEQ ID NO: 1075 - DNA, 18 bp, Artificial Sequence
  Description of Artificial Sequence: Synthetic oligonucleotide
gcagactccaacccgcaa

SEQ ID NO: 1076 - DNA, 18 bp, Artificial Sequence
  Description of Artificial Sequence: Synthetic oligonucleotide
cactggcagactccaacc

SEQ ID NO: 1077 - DNA, 18 bp, Artificial Sequence
  Description of Artificial Sequence: Synthetic oligonucleotide
tactgcactggcagactc

SEQ ID NO: 1078 - DNA, 18 bp, Artificial Sequence
  Description of Artificial Sequence: Synthetic oligonucleotide
cccggtactgcactggca

SEQ ID NO: 1079 - DNA, 18 bp, Artificial Sequence
  Description of Artificial Sequence: Synthetic oligonucleotide
actgtcccggtactgcac

SEQ ID NO: 1080 - DNA, 18 bp, Artificial Sequence
  Description of Artificial Sequence: Synthetic oligonucleotide
gtgtgactgtcccggtac

SEQ ID NO: 1081 - DNA, 18 bp, Artificial Sequence
  Description of Artificial Sequence: Synthetic oligonucleotide
gagtcagtgtgactgtcc

SEQ ID NO: 1082 - DNA, 18 bp, Artificial Sequence
  Description of Artificial Sequence: Synthetic oligonucleotide
ggtgcgagtcagtgtgac

SEQ ID NO: 1083 - DNA, 18 bp, Artificial Sequence
  Description of Artificial Sequence: Synthetic oligonucleotide
gtgcaggtgcgagtcagt

SEQ ID NO: 1084 - DNA, 18 bp, Artificial Sequence
  Description of Artificial Sequence: Synthetic oligonucleotide
cgtgtgtgcaggtgcgag

SEQ ID NO: 1085 - DNA, 18 bp, Artificial Sequence
  Description of Artificial Sequence: Synthetic oligonucleotide
gctggcgtgtgtgcaggt

SEQ ID NO: 1086 - DNA, 18 bp, Artificial Sequence
  Description of Artificial Sequence: Synthetic oligonucleotide
gcagtgctggcgtgtgtg

SEQ ID NO: 1087 - DNA, 18 bp, Artificial Sequence
  Description of Artificial Sequence: Synthetic oligonucleotide
agcgagcagtgctggcgt

SEQ ID NO: 1088 - DNA, 18 bp, Artificial Sequence
  Description of Artificial Sequence: Synthetic oligonucleotide
caaagagcgagcagtgct

SEQ ID NO: 1089 - DNA, 18 bp, Artificial Sequence
  Description of Artificial Sequence: Synthetic oligonucleotide
cacgtcaaagagcgagca

SEQ ID NO: 1090 - DNA, 18 bp, Artificial Sequence
  Description of Artificial Sequence: Synthetic oligonucleotide
tgagacacgtcaaagagc

SEQ ID NO: 1091 - DNA, 18 bp, Artificial Sequence
  Description of Artificial Sequence: Synthetic oligonucleotide
gcatatgagacacgtcaa

SEQ ID NO: 1092 - DNA, 18 bp, Artificial Sequence
  Description of Artificial Sequence: Synthetic oligonucleotide
ctgcagcatatgagacac

SEQ ID NO: 1093 - DNA, 18 bp, Artificial Sequence
  Description of Artificial Sequence: Synthetic oligonucleotide
cacctgcagcatatgaga

SEQ ID NO: 1094 - DNA, 18 bp, Artificial Sequence
  Description of Artificial Sequence: Synthetic oligonucleotide
tggctcacctgcagcata

SEQ ID NO: 1095 - DNA, 18 bp, Artificial Sequence
  Description of Artificial Sequence: Synthetic oligonucleotide
tcccctggctcacctgca

SEQ ID NO: 1096 - DNA, 18 bp, Artificial Sequence
  Description of Artificial Sequence: Synthetic oligonucleotide
tgtgctcccctggctcac

SEQ ID NO: 1097 - DNA, 18 bp, Artificial Sequence
  Description of Artificial Sequence: Synthetic oligonucleotide
gccagtgtgctcccctgg

SEQ ID NO: 1098 - DNA, 18 bp, Artificial Sequence
  Description of Artificial Sequence: Synthetic oligonucleotide
agatggccagtgtgctcc

SEQ ID NO: 1099 - DNA, 18 bp, Artificial Sequence
  Description of Artificial Sequence: Synthetic oligonucleotide
tgatcagatggccagtgt

SEQ ID NO: 1100 - DNA, 18 bp, Artificial Sequence
  Description of Artificial Sequence: Synthetic oligonucleotide
aggcctgatcagatggcc

SEQ ID NO: 1101 - DNA, 18 bp, Artificial Sequence
  Description of Artificial Sequence: Synthetic oligonucleotide
gaggaaggcctgatcaga

SEQ ID NO: 1102 - DNA, 18 bp, Artificial Sequence
  Description of Artificial Sequence: Synthetic oligonucleotide
acagggaggaaggcctga

SEQ ID NO: 1103 - DNA, 18 bp, Artificial Sequence
  Description of Artificial Sequence: Synthetic oligonucleotide
tgtaaacagggaggaagg

SEQ ID NO: 1104 - DNA, 18 bp, Artificial Sequence
  Description of Artificial Sequence: Synthetic oligonucleotide
accactgtaaacagggag

SEQ ID NO: 1105 - DNA, 18 bp, Artificial Sequence
  Description of Artificial Sequence: Synthetic oligonucleotide
agtggaccactgtaaaca

SEQ ID NO: 1106 - DNA, 18 bp, Artificial Sequence
  Description of Artificial Sequence: Synthetic oligonucleotide
caaggagtggaccactgt

SEQ ID NO: 1107 - DNA, 18 bp, Artificial Sequence
  Description of Artificial Sequence: Synthetic oligonucleotide
aaagccaaggagtggacc

SEQ ID NO: 1108 - DNA, 18 bp, Artificial Sequence
  Description of Artificial Sequence: Synthetic oligonucleotide
caaacaaagccaaggagt

SEQ ID NO: 1109 - DNA, 18 bp, Artificial Sequence
  Description of Artificial Sequence: Synthetic oligonucleotide
cacagcaaacaaagccaa

SEQ ID NO: 1110 - DNA, 18 bp, Artificial Sequence
  Description of Artificial Sequence: Synthetic oligonucleotide
cagttcacagcaaacaaa

SEQ ID NO: 1111 - DNA, 18 bp, Artificial Sequence
  Description of Artificial Sequence: Synthetic oligonucleotide
gaatccagttcacagcaa

SEQ ID NO: 1112 - DNA, 18 bp, Artificial Sequence
  Description of Artificial Sequence: Synthetic oligonucleotide
ccttggaatccagttcac

SEQ ID NO: 1113 - DNA, 18 bp, Artificial Sequence
  Description of Artificial Sequence: Synthetic oligonucleotide
gctgtccttggaatccag

SEQ ID NO: 1114 - DNA, 18 bp, Artificial Sequence
  Description of Artificial Sequence: Synthetic oligonucleotide
aactagtcaaggcaggca

SEQ ID NO: 1115 - DNA, 18 bp, Artificial Sequence
  Description of Artificial Sequence: Synthetic oligonucleotide
tcagtaactagtcaaggc

SEQ ID NO: 1116 - DNA, 18 bp, Artificial Sequence
  Description of Artificial Sequence: Synthetic oligonucleotide
cagactcagtaactagtc

SEQ ID NO: 1117 - DNA, 18 bp, Artificial Sequence
  Description of Artificial Sequence: Synthetic oligonucleotide
ctcaacagactcagtaac

SEQ ID NO: 1118 - DNA, 18 bp, Artificial Sequence
  Description of Artificial Sequence: Synthetic oligonucleotide
ccgcactcaacagactca

SEQ ID NO: 1119 - DNA, 18 bp, Artificial Sequence
  Description of Artificial Sequence: Synthetic oligonucleotide
tcacaccgcactcaacag

SEQ ID NO: 1120 - DNA, 18 bp, Artificial Sequence
  Description of Artificial Sequence: Synthetic oligonucleotide
cactctcacaccgcactc

SEQ ID NO: 1121 - DNA, 18 bp, Artificial Sequence
  Description of Artificial Sequence: Synthetic oligonucleotide
tcatccactctcacaccg

SEQ ID NO: 1122 - DNA, 18 bp, Artificial Sequence
  Description of Artificial Sequence: Synthetic oligonucleotide
aaaactcatccactctca

SEQ ID NO: 1123 - DNA, 18 bp, Artificial Sequence
  Description of Artificial Sequence: Synthetic oligonucleotide
agctcaaaactcatccac

SEQ ID NO: 1124 - DNA, 18 bp, Artificial Sequence
  Description of Artificial Sequence: Synthetic oligonucleotide
gaggcagctcaaaactca

SEQ ID NO: 1125 - DNA, 18 bp, Artificial Sequence
  Description of Artificial Sequence: Synthetic oligonucleotide
attcagaggcagctcaaa

SEQ ID NO: 1126 - DNA, 18 bp, Artificial Sequence
  Description of Artificial Sequence: Synthetic oligonucleotide
actgaattcagaggcagc

SEQ ID NO: 1127 - DNA, 18 bp, Artificial Sequence
  Description of Artificial Sequence: Synthetic oligonucleotide
aattcactgaattcagag

SEQ ID NO: 1128 - DNA, 18 bp, Artificial Sequence
  Description of Artificial Sequence: Synthetic oligonucleotide
cacacaattcactgaatt

SEQ ID NO: 1129 - DNA, 18 bp, Artificial Sequence
  Description of Artificial Sequence: Synthetic oligonucleotide
gaagacacacaattcact

SEQ ID NO: 1130 - DNA, 18 bp, Artificial Sequence
  Description of Artificial Sequence: Synthetic oligonucleotide
aaagagaagacacacaat

SEQ ID NO: 1131 - DNA, 18 bp, Artificial Sequence
  Description of Artificial Sequence: Synthetic oligonucleotide
cttcaaaagagaagacac

SEQ ID NO: 1132 - DNA, 18 bp, Artificial Sequence
  Description of Artificial Sequence: Synthetic oligonucleotide
gtctgcttcaaaagagaa

SEQ ID NO: 1133 - DNA, 18 bp, Artificial Sequence
  Description of Artificial Sequence: Synthetic oligonucleotide
caaccgtctgcttcaaaa

SEQ ID NO: 1134 - DNA, 18 bp, Artificial Sequence
  Description of Artificial Sequence: Synthetic oligonucleotide
atcatcaaccgtctgctt

SEQ ID NO: 1135 - DNA, 18 bp, Artificial Sequence
  Description of Artificial Sequence: Synthetic oligonucleotide
ttcatcatcaaccgtctg

SEQ ID NO: 1136 - DNA, 18 bp, Artificial Sequence
  Description of Artificial Sequence: Synthetic oligonucleotide
ggcgcttcatcatcaacc

SEQ ID NO: 1137 - DNA, 18 bp, Artificial Sequence
  Description of Artificial Sequence: Synthetic oligonucleotide
cggccggcgcttcatcat

SEQ ID NO: 1138 - DNA, 18 bp, Artificial Sequence
  Description of Artificial Sequence: Synthetic oligonucleotide
ttacacggccggcgcttc

SEQ ID NO: 1139 - DNA, 18 bp, Artificial Sequence
  Description of Artificial Sequence: Synthetic oligonucleotide
ttcatttacacggccggc

SEQ ID NO: 1140 - DNA, 18 bp, Artificial Sequence
  Description of Artificial Sequence: Synthetic oligonucleotide
cgatcttcatttacacgg

SEQ ID NO: 1141 - DNA, 18 bp, Artificial Sequence
  Description of Artificial Sequence: Synthetic oligonucleotide
tcacccgatcttcattta

SEQ ID NO: 1142 - DNA, 18 bp, Artificial Sequence
  Description of Artificial Sequence: Synthetic oligonucleotide
gctcctcacccgatcttc

SEQ ID NO: 1143 - DNA, 18 bp, Artificial Sequence
  Description of Artificial Sequence: Synthetic oligonucleotide
gtcctgctcctcacccga

SEQ ID NO: 1144 - DNA, 18 bp, Artificial Sequence
  Description of Artificial Sequence: Synthetic oligonucleotide
gcatcgtcctgctcctca

SEQ ID NO: 1145 - DNA, 18 bp, Artificial Sequence
  Description of Artificial Sequence: Synthetic oligonucleotide
cttgggcatcgtcctgct

SEQ ID NO: 1146 - DNA, 18 bp, Artificial Sequence
  Description of Artificial Sequence: Synthetic oligonucleotide
ccacccttgggcatcgtc

SEQ ID NO: 1147 - DNA, 18 bp, Artificial Sequence
  Description of Artificial Sequence: Synthetic oligonucleotide
ggcacccacccttgggca

SEQ ID NO: 1148 - DNA, 18 bp, Artificial Sequence
  Description of Artificial Sequence: Synthetic oligonucleotide
tttagggcacccaccctt

SEQ ID NO: 1149 - DNA, 18 bp, Artificial Sequence
  Description of Artificial Sequence: Synthetic oligonucleotide
tgtggtgctttagggcac

SEQ ID NO: 1150 - DNA, 18 bp, Artificial Sequence
  Description of Artificial Sequence: Synthetic oligonucleotide
cctgctgtggtgctttag

SEQ ID NO: 1151 - DNA, 18 bp, Artificial Sequence
  Description of Artificial Sequence: Synthetic oligonucleotide
ctcttcctgctgtggtgc

SEQ ID NO: 1152 - DNA, 18 bp, Artificial Sequence
  Description of Artificial Sequence: Synthetic oligonucleotide
ggaagctcttcctgctgt

SEQ ID NO: 1153 - DNA, 18 bp, Artificial Sequence
  Description of Artificial Sequence: Synthetic oligonucleotide
tgaggggaagctcttcct

SEQ ID NO: 1154 - DNA, 18 bp, Artificial Sequence
  Description of Artificial Sequence: Synthetic oligonucleotide
gctgctgaggggaagctc

SEQ ID NO: 1155 - DNA, 18 bp, Artificial Sequence
  Description of Artificial Sequence: Synthetic oligonucleotide
atgtcgctgctgagggga

SEQ ID NO: 1156 - DNA, 18 bp, Artificial Sequence
  Description of Artificial Sequence: Synthetic oligonucleotide
ccaccatgtcgctgctga

SEQ ID NO: 1157 - DNA, 18 bp, Artificial Sequence
  Description of Artificial Sequence: Synthetic oligonucleotide
cttctccaccatgtcgct

SEQ ID NO: 1158 - DNA, 18 bp, Artificial Sequence
  Description of Artificial Sequence: Synthetic oligonucleotide
gtctgcttctccaccatg

SEQ ID NO: 1159 - DNA, 18 bp, Artificial Sequence
  Description of Artificial Sequence: Synthetic oligonucleotide
tcccagtctgcttctcca

SEQ ID NO: 1160 - DNA, 18 bp, Artificial Sequence
  Description of Artificial Sequence: Synthetic oligonucleotide
ctttttcccagtctgctt

SEQ ID NO: 1161 - DNA, 18 bp, Artificial Sequence
  Description of Artificial Sequence: Synthetic oligonucleotide
tacctttttcccagtctg

SEQ ID NO: 1162 - DNA, 18 bp, Artificial Sequence
  Description of Artificial Sequence: Synthetic oligonucleotide
agcattacctttttccca

SEQ ID NO: 1163 - DNA, 18 bp, Artificial Sequence
  Description of Artificial Sequence: Synthetic oligonucleotide
ggggcagcattacctttt

SEQ ID NO: 1164 - DNA, 18 bp, Artificial Sequence
  Description of Artificial Sequence: Synthetic oligonucleotide
gggagggggcagcattac

SEQ ID NO: 1165 - DNA, 18 bp, Artificial Sequence
  Description of Artificial Sequence: Synthetic oligonucleotide
gggctgggagggggcagc

SEQ ID NO: 1166 - DNA, 18 bp, Artificial Sequence
  Description of Artificial Sequence: Synthetic oligonucleotide
atgcagggctgggagggg

SEQ ID NO: 1167 - DNA, 18 bp, Artificial Sequence
  Description of Artificial Sequence: Synthetic oligonucleotide
tgagcatgcagggctggg

SEQ ID NO: 1168 - DNA, 18 bp, Artificial Sequence
  Description of Artificial Sequence: Synthetic oligonucleotide
tgcggtgagcatgcaggg

SEQ ID NO: 1169 - DNA, 18 bp, Artificial Sequence
  Description of Artificial Sequence: Synthetic oligonucleotide
ctgggtgcggtgagcatg

SEQ ID NO: 1170 - DNA, 18 bp, Artificial Sequence
  Description of Artificial Sequence: Synthetic oligonucleotide
cccatctgggtgcggtga

SEQ ID NO: 1171 - DNA, 18 bp, Artificial Sequence
  Description of Artificial Sequence: Synthetic oligonucleotide
tcatccccatctgggtgc

SEQ ID NO: 1172 - DNA, 18 bp, Artificial Sequence
  Description of Artificial Sequence: Synthetic oligonucleotide
ccacctcatccccatctg

SEQ ID NO: 1173 - DNA, 18 bp, Artificial Sequence
  Description of Artificial Sequence: Synthetic oligonucleotide
cattcccacctcatcccc

SEQ ID NO: 1174 - DNA, 18 bp, Artificial Sequence
  Description of Artificial Sequence: Synthetic oligonucleotide
caccccattcccacctca

SEQ ID NO: 1175 - DNA, 18 bp, Artificial Sequence
  Description of Artificial Sequence: Synthetic oligonucleotide
ggcagcaccccattccca

SEQ ID NO: 1176 - DNA, 18 bp, Artificial Sequence
  Description of Artificial Sequence: Synthetic oligonucleotide
aggcgggcagcaccccat

SEQ ID NO: 1177 - DNA, 18 bp, Artificial Sequence
  Description of Artificial Sequence: Synthetic oligonucleotide
gccacaggcgggcagcac

SEQ ID NO: 1178 - DNA, 18 bp, Artificial Sequence
  Description of Artificial Sequence: Synthetic oligonucleotide
aacaggccacaggcgggc

SEQ ID NO: 1179 - DNA, 18 bp, Artificial Sequence
  Description of Artificial Sequence: Synthetic oligonucleotide
cggagaacaggccacagg

SEQ ID NO: 1180 - DNA, 18 bp, Artificial Sequence
  Description of Artificial Sequence: Synthetic oligonucleotide
gagggcggagaacaggcc

SEQ ID NO: 1181 - DNA, 18 bp, Artificial Sequence
  Description of Artificial Sequence: Synthetic oligonucleotide
ggccggagggcggagaac

SEQ ID NO: 1182 - DNA, 18 bp, Artificial Sequence
  Description of Artificial Sequence: Synthetic oligonucleotide
agaagtgattacacgagc

SEQ ID NO: 1183 - DNA, 18 bp, Artificial Sequence
  Description of Artificial Sequence: Synthetic oligonucleotide
gaatcagaagtgattaca

SEQ ID NO: 1184 - DNA, 18 bp, Artificial Sequence
  Description of Artificial Sequence: Synthetic oligonucleotide
tgcaagaatcagaagtga

SEQ ID NO: 1185 - DNA, 18 bp, Artificial Sequence
  Description of Artificial Sequence: Synthetic oligonucleotide
catgctgcaagaatcaga

SEQ ID NO: 1186 - DNA, 18 bp, Artificial Sequence
  Description of Artificial Sequence: Synthetic oligonucleotide
gcggccatgctgcaagaa

SEQ ID NO: 1187 - DNA, 18 bp, Artificial Sequence
  Description of Artificial Sequence: Synthetic oligonucleotide
tccaggcggccatgctgc

SEQ ID NO: 1188 - DNA, 18 bp, Artificial Sequence
  Description of Artificial Sequence: Synthetic oligonucleotide
cgccctccaggcggccat

SEQ ID NO: 1189 - DNA, 18 bp, Artificial Sequence
  Description of Artificial Sequence: Synthetic oligonucleotide
gcgggcgccctccaggcg

SEQ ID NO: 1190 - DNA, 18 bp, Artificial Sequence
  Description of Artificial Sequence: Synthetic oligonucleotide
gtggggcgggcgccctcc

SEQ ID NO: 1191 - DNA, 18 bp, Artificial Sequence
  Description of Artificial Sequence: Synthetic oligonucleotide
tctgcgtggggcgggcgc

SEQ ID NO: 1192 - DNA, 18 bp, Artificial Sequence
  Description of Artificial Sequence: Synthetic oligonucleotide
tctcctctgcgtggggcg

SEQ ID NO: 1193 - DNA, 18 bp, Artificial Sequence
  Description of Artificial Sequence: Synthetic oligonucleotide
cctcatctcctctgcgtg

SEQ ID NO: 1194 - DNA, 18 bp, Artificial Sequence
  Description of Artificial Sequence: Synthetic oligonucleotide
tacggcctcatctcctct

SEQ ID NO: 1195 - DNA, 18 bp, Artificial Sequence
  Description of Artificial Sequence: Synthetic oligonucleotide
tgcgttacggcctcatct

SEQ ID NO: 1196 - DNA, 18 bp, Artificial Sequence
  Description of Artificial Sequence: Synthetic oligonucleotide
gaacgtgcgttacggcct

SEQ ID NO: 1197 - DNA, 18 bp, Artificial Sequence
  Description of Artificial Sequence: Synthetic oligonucleotide
acacagaacgtgcgttac

SEQ ID NO: 1198 - DNA, 18 bp, Artificial Sequence
  Description of Artificial Sequence: Synthetic oligonucleotide
agagaacacagaacgtgc

SEQ ID NO: 1199 - DNA, 18 bp, Artificial Sequence
  Description of Artificial Sequence: Synthetic oligonucleotide
cttcaagagaacacagaa

SEQ ID NO: 1200 - DNA, 18 bp, Artificial Sequence
  Description of Artificial Sequence: Synthetic oligonucleotide
ccttgcttcaagagaaca

SEQ ID NO: 1201 - DNA, 18 bp, Artificial Sequence
  Description of Artificial Sequence: Synthetic oligonucleotide
ctgcaccttgcttcaaga

SEQ ID NO: 1202 - DNA, 18 bp, Artificial Sequence
  Description of Artificial Sequence: Synthetic oligonucleotide
tagctctgcaccttgctt

SEQ ID NO: 1203 - DNA, 18 bp, Artificial Sequence
  Description of Artificial Sequence: Synthetic oligonucleotide
ttctagctctgcaccttg

SEQ ID NO: 1204 - DNA, 18 bp, Artificial Sequence
  Description of Artificial Sequence: Synthetic oligonucleotide
ttcatttctagctctgca

SEQ ID NO: 1205 - DNA, 18 bp, Artificial Sequence
  Description of Artificial Sequence: Synthetic oligonucleotide
tgtctttcatttctagct

SEQ ID NO: 1206 - DNA, 18 bp, Artificial Sequence
  Description of Artificial Sequence: Synthetic oligonucleotide
ctggatgtctttcatttc

SEQ ID NO: 1207 - DNA, 18 bp, Artificial Sequence
  Description of Artificial Sequence: Synthetic oligonucleotide
cagccctggatgtctttc

SEQ ID NO: 1208 - DNA, 18 bp, Artificial Sequence
  Description of Artificial Sequence: Synthetic oligonucleotide
ctgtccagccctggatgt

SEQ ID NO: 1209 - DNA, 18 bp, Artificial Sequence
  Description of Artificial Sequence: Synthetic oligonucleotide
gagggctgtccagccctg

SEQ ID NO: 1210 - DNA, 18 bp, Artificial Sequence
  Description of Artificial Sequence: Synthetic oligonucleotide
tggaagagggctgtccag

SEQ ID NO: 1211 - DNA, 18 bp, Artificial Sequence
  Description of Artificial Sequence: Synthetic oligonucleotide
tacagtggaagagggctg

SEQ ID NO: 1212 - DNA, 18 bp, Artificial Sequence
  Description of Artificial Sequence: Synthetic oligonucleotide
gctggtacagtggaagag

SEQ ID NO: 1213 - DNA, 18 bp, Artificial Sequence
  Description of Artificial Sequence: Synthetic oligonucleotide
ccggcgctggtacagtgg

SEQ ID NO: 1214 - DNA, 18 bp, Artificial Sequence
  Description of Artificial Sequence: Synthetic oligonucleotide
ggtgcccggcgctggtac

SEQ ID NO: 1215 - DNA, 18 bp, Artificial Sequence
  Description of Artificial Sequence: Synthetic oligonucleotide
ccatgtgctggtgcccgg

SEQ ID NO: 1216 - DNA, 18 bp, Artificial Sequence
  Description of Artificial Sequence: Synthetic oligonucleotide
cctgaccatgtgctggtg

SEQ ID NO: 1217 - DNA, 18 bp, Artificial Sequence
  Description of Artificial Sequence: Synthetic oligonucleotide
aggaacctgaccatgtgc

SEQ ID NO: 1218 - DNA, 18 bp, Artificial Sequence
  Description of Artificial Sequence: Synthetic oligonucleotide
ccaagaggaacctgacca

SEQ ID NO: 1219 - DNA, 18 bp, Artificial Sequence
  Description of Artificial Sequence: Synthetic oligonucleotide
actgtccaagaggaacct

SEQ ID NO: 1220 - DNA, 18 bp, Artificial Sequence
  Description of Artificial Sequence: Synthetic oligonucleotide
gctccactgtccaagagg

SEQ ID NO: 1221 - DNA, 18 bp, Artificial Sequence
  Description of Artificial Sequence: Synthetic oligonucleotide
cattggctccactgtcca

SEQ ID NO: 1222 - DNA, 18 bp, Artificial Sequence
  Description of Artificial Sequence: Synthetic oligonucleotide
gttggcattggctccact

SEQ ID NO: 1223 - DNA, 18 bp, Artificial Sequence
  Description of Artificial Sequence: Synthetic oligonucleotide
ctcacgttggcattggct

SEQ ID NO: 1224 - DNA, 18 bp, Artificial Sequence
  Description of Artificial Sequence: Synthetic oligonucleotide
cacctcacgttggcattg

SEQ ID NO: 1225 - DNA, 18 bp, Artificial Sequence
  Description of Artificial Sequence: Synthetic oligonucleotide
gcaatcacctcacgttgg

SEQ ID NO: 1226 - DNA, 18 bp, Artificial Sequence
  Description of Artificial Sequence: Synthetic oligonucleotide
atgtggcaatcacctcac

SEQ ID NO: 1227 - DNA, 18 bp, Artificial Sequence
  Description of Artificial Sequence: Synthetic oligonucleotide
taaagatgtggcaatcac

SEQ ID NO: 1228 - DNA, 18 bp, Artificial Sequence
  Description of Artificial Sequence: Synthetic oligonucleotide
gccactaaagatgtggca

SEQ ID NO: 1229 - DNA, 18 bp, Artificial Sequence
  Description of Artificial Sequence: Synthetic oligonucleotide
ctgtggccactaaagatg

SEQ ID NO: 1230 - DNA, 18 bp, Artificial Sequence
  Description of Artificial Sequence: Synthetic oligonucleotide
cactcctgtggccactaa

SEQ ID NO: 1231 - DNA, 18 bp, Artificial Sequence
  Description of Artificial Sequence: Synthetic oligonucleotide
taggccactcctgtggcc

SEQ ID NO: 1232 - DNA, 18 bp, Artificial Sequence
  Description of Artificial Sequence: Synthetic oligonucleotide
acacctaggccactcctg

SEQ ID NO: 1233 - DNA, 18 bp, Artificial Sequence
  Description of Artificial Sequence: Synthetic oligonucleotide
agatgacacctaggccac

SEQ ID NO: 1234 - DNA, 18 bp, Artificial Sequence
  Description of Artificial Sequence: Synthetic oligonucleotide
gagtcagatgacacctag

SEQ ID NO: 1235 - DNA, 18 bp, Artificial Sequence
  Description of Artificial Sequence: Synthetic oligonucleotide
ccttagagtcagatgaca

SEQ ID NO: 1236 - DNA, 18 bp, Artificial Sequence
  Description of Artificial Sequence: Synthetic oligonucleotide
accctccttagagtcaga

SEQ ID NO: 1237 - DNA, 18 bp, Artificial Sequence
  Description of Artificial Sequence: Synthetic oligonucleotide
gagccaccctccttagag

SEQ ID NO: 1238 - DNA, 18 bp, Artificial Sequence
  Description of Artificial Sequence: Synthetic oligonucleotide
ctccagagccaccctcct

SEQ ID NO: 1239 - DNA, 18 bp, Artificial Sequence
  Description of Artificial Sequence: Synthetic oligonucleotide
gctgcctccagagccacc

SEQ ID NO: 1240 - DNA, 18 bp, Artificial Sequence
  Description of Artificial Sequence: Synthetic oligonucleotide
ggttagctgcctccagag

SEQ ID NO: 1241 - DNA, 18 bp, Artificial Sequence
  Description of Artificial Sequence: Synthetic oligonucleotide
actctggttagctgcctc

SEQ ID NO: 1242 - DNA, 18 bp, Artificial Sequence
  Description of Artificial Sequence: Synthetic oligonucleotide
cctaaactctggttagct

SEQ ID NO: 1243 - DNA, 18 bp, Artificial Sequence
  Description of Artificial Sequence: Synthetic oligonucleotide
gtggccctaaactctggt

SEQ ID NO: 1244 - DNA, 18 bp, Artificial Sequence
  Description of Artificial Sequence: Synthetic oligonucleotide
gcagggtggccctaaact

SEQ ID NO: 1245 - DNA, 18 bp, Artificial Sequence
  Description of Artificial Sequence: Synthetic oligonucleotide
ttggttcctagaaaaacc

SEQ ID NO: 1246 - DNA, 18 bp, Artificial Sequence
  Description of Artificial Sequence: Synthetic oligonucleotide
tgattttggttcctagaa

SEQ ID NO: 1247 - DNA, 18 bp, Artificial Sequence
  Description of Artificial Sequence: Synthetic oligonucleotide
ggaagtgattttggttcc

SEQ ID NO: 1248 - DNA, 18 bp, Artificial Sequence
  Description of Artificial Sequence: Synthetic oligonucleotide
ttccgggaagtgattttg

SEQ ID NO: 1249 - DNA, 18 bp, Artificial Sequence
  Description of Artificial Sequence: Synthetic oligonucleotide
gtcaattccgggaagtga

SEQ ID NO: 1250 - DNA, 18 bp, Artificial Sequence
  Description of Artificial Sequence: Synthetic oligonucleotide
agttggtcaattccggga

SEQ ID NO: 1251 - DNA, 18 bp, Artificial Sequence
  Description of Artificial Sequence: Synthetic oligonucleotide
ctaccagttggtcaattc

SEQ ID NO: 1252 - DNA, 18 bp, Artificial Sequence
  Description of Artificial Sequence: Synthetic oligonucleotide
cgagtctaccagttggtc

SEQ ID NO: 1253 - DNA, 18 bp, Artificial Sequence
  Description of Artificial Sequence: Synthetic oligonucleotide
ctaggcgagtctaccagt

SEQ ID NO: 1254 - DNA, 18 bp, Artificial Sequence
  Description of Artificial Sequence: Synthetic oligonucleotide
cccctctaggcgagtcta

SEQ ID NO: 1255 - DNA, 18 bp, Artificial Sequence
  Description of Artificial Sequence: Synthetic oligonucleotide
tgcgtcccctctaggcga

SEQ ID NO: 1256 - DNA, 18 bp, Artificial Sequence
  Description of Artificial Sequence: Synthetic oligonucleotide
cacagtgcgtcccctcta

SEQ ID NO: 1257 - DNA, 18 bp, Artificial Sequence
  Description of Artificial Sequence: Synthetic oligonucleotide
taggacacagtgcgtccc

SEQ ID NO: 1258 - DNA, 18 bp, Artificial Sequence
  Description of Artificial Sequence: Synthetic oligonucleotide
tcaactaggacacagtgc

SEQ ID NO: 1259 - DNA, 18 bp, Artificial Sequence
  Description of Artificial Sequence: Synthetic oligonucleotide
tagcctcaactaggacac

SEQ ID NO: 1260 - DNA, 18 bp, Artificial Sequence
  Description of Artificial Sequence: Synthetic oligonucleotide
actgttagcctcaactag

SEQ ID NO: 1261 - DNA, 18 bp, Artificial Sequence
  Description of Artificial Sequence: Synthetic oligonucleotide
tactgactgttagcctca

SEQ ID NO: 1262 - DNA, 18 bp, Artificial Sequence
  Description of Artificial Sequence: Synthetic oligonucleotide
ctggatactgactgttag

SEQ ID NO: 1263 - DNA, 18 bp, Artificial Sequence
  Description of Artificial Sequence: Synthetic oligonucleotide
tgaggctggatactgact

SEQ ID NO: 1264 - DNA, 18 bp, Artificial Sequence
  Description of Artificial Sequence: Synthetic oligonucleotide
aatgttgaggctggatac

SEQ ID NO: 1265 - DNA, 18 bp, Artificial Sequence
  Description of Artificial Sequence: Synthetic oligonucleotide
tgctgaatgttgaggctg

SEQ ID NO: 1266 - DNA, 18 bp, Artificial Sequence
  Description of Artificial Sequence: Synthetic oligonucleotide
ctctgctgaatgttgagg

SEQ ID NO: 1267 - DNA, 18 bp, Artificial Sequence
  Description of Artificial Sequence: Synthetic oligonucleotide
ggggcctctgctgaatgt

SEQ ID NO: 1268 - DNA, 18 bp, Artificial Sequence
  Description of Artificial Sequence: Synthetic oligonucleotide
gatctggggcctctgctg

SEQ ID NO: 1269 - DNA, 18 bp, Artificial Sequence
  Description of Artificial Sequence: Synthetic oligonucleotide
acgctgatctggggcctc

SEQ ID NO: 1270 - DNA, 18 bp, Artificial Sequence
  Description of Artificial Sequence: Synthetic oligonucleotide
ctcagacgctgatctggg

SEQ ID NO: 1271 - DNA, 18 bp, Artificial Sequence
  Description of Artificial Sequence: Synthetic oligonucleotide
cctggctcagacgctgat

SEQ ID NO: 1272 - DNA, 18 bp, Artificial Sequence
  Description of Artificial Sequence: Synthetic oligonucleotide
gttggcctggctcagacg

SEQ ID NO: 1273 - DNA, 18 bp, Artificial Sequence
  Description of Artificial Sequence: Synthetic oligonucleotide
tcattgttggcctggctc

SEQ ID NO: 1274 - DNA, 18 bp, Artificial Sequence
  Description of Artificial Sequence: Synthetic oligonucleotide
cttggtcattgttggcct

SEQ ID NO: 1275 - DNA, 18 bp, Artificial Sequence
  Description of Artificial Sequence: Synthetic oligonucleotide
cccatcctccttggtcat

SEQ ID NO: 1276 - DNA, 18 bp, Artificial Sequence
  Description of Artificial Sequence: Synthetic oligonucleotide
aggatcccatcctccttg

SEQ ID NO: 1277 - DNA, 18 bp, Artificial Sequence
  Description of Artificial Sequence: Synthetic oligonucleotide
cacccaggatcccatcct

SEQ ID NO: 1278 - DNA, 18 bp, Artificial Sequence
  Description of Artificial Sequence: Synthetic oligonucleotide
agctgcacccaggatccc

SEQ ID NO: 1279 - DNA, 18 bp, Artificial Sequence
  Description of Artificial Sequence: Synthetic oligonucleotide
tgatgagctgcacccagg

SEQ ID NO: 1280 - DNA, 18 bp, Artificial Sequence
  Description of Artificial Sequence: Synthetic oligonucleotide
gcttgtgatgagctgcac

SEQ ID NO: 1281 - DNA, 18 bp, Artificial Sequence
  Description of Artificial Sequence: Synthetic oligonucleotide
ccgacgcttgtgatgagc

SEQ ID NO: 1282 - DNA, 18 bp, Artificial Sequence
  Description of Artificial Sequence: Synthetic oligonucleotide
cacccgacgcttgtgatg

SEQ ID NO: 1283 - DNA, 18 bp, Artificial Sequence
  Description of Artificial Sequence: Synthetic oligonucleotide
ggactcacccgacgcttg

SEQ ID NO: 1284 - DNA, 18 bp, Artificial Sequence
  Description of Artificial Sequence: Synthetic oligonucleotide
gcctcggactcacccgac

SEQ ID NO: 1285 - DNA, 18 bp, Artificial Sequence
  Description of Artificial Sequence: Synthetic oligonucleotide
ctggggcctcggactcac

SEQ ID NO: 1286 - DNA, 18 bp, Artificial Sequence
  Description of Artificial Sequence: Synthetic oligonucleotide
gagagctggggcctcgga

SEQ ID NO: 1287 - DNA, 18 bp, Artificial Sequence
  Description of Artificial Sequence: Synthetic oligonucleotide
gggcagagagctggggcc

SEQ ID NO: 1288 - DNA, 18 bp, Artificial Sequence
  Description of Artificial Sequence: Synthetic oligonucleotide
caggagggcagagagctg

SEQ ID NO: 1289 - DNA, 18 bp, Artificial Sequence
  Description of Artificial Sequence: Synthetic oligonucleotide
aggagcaggagggcagag

SEQ ID NO: 1290 - DNA, 18 bp, Artificial Sequence
  Description of Artificial Sequence: Synthetic oligonucleotide
agcagaggagcaggaggg

SEQ ID NO: 1291 - DNA, 18 bp, Artificial Sequence
  Description of Artificial Sequence: Synthetic oligonucleotide
gagagagcagaggagcag

SEQ ID NO: 1292 - DNA, 18 bp, Artificial Sequence
  Description of Artificial Sequence: Synthetic oligonucleotide
accaggagagagcagagg

SEQ ID NO: 1293 - DNA, 18 bp, Artificial Sequence
  Description of Artificial Sequence: Synthetic oligonucleotide
ggaggaccaggagagagc

SEQ ID NO: 1294 - DNA, 18 bp, Artificial Sequence
  Description of Artificial Sequence: Synthetic oligonucleotide
aactgggaggaccaggag

SEQ ID NO: 1295 - DNA, 18 bp, Artificial Sequence
  Description of Artificial Sequence: Synthetic oligonucleotide
agtagaactgggaggacc

SEQ ID NO: 1296 - DNA, 18 bp, Artificial Sequence
  Description of Artificial Sequence: Synthetic oligonucleotide
gagccagtagaactggga

SEQ ID NO: 1297 - DNA, 18 bp, Artificial Sequence
  Description of Artificial Sequence: Synthetic oligonucleotide
accatgagccagtagaac

SEQ ID NO: 1298 - DNA, 18 bp, Artificial Sequence
  Description of Artificial Sequence: Synthetic oligonucleotide
tcaacaccatgagccagt

SEQ ID NO: 1299 - DNA, 18 bp, Artificial Sequence
  Description of Artificial Sequence: Synthetic oligonucleotide
ccatctcaacaccatgag

SEQ ID NO: 1300 - DNA, 18 bp, Artificial Sequence
  Description of Artificial Sequence: Synthetic oligonucleotide
ggcaaccatctcaacacc

SEQ ID NO: 1301 - DNA, 18 bp, Artificial Sequence
  Description of Artificial Sequence: Synthetic oligonucleotide
gccaaggcaaccatctca

SEQ ID NO: 1302 - DNA, 18 bp, Artificial Sequence
  Description of Artificial Sequence: Synthetic oligonucleotide
cctaggccaaggcaacca

SEQ ID NO: 1303 - DNA, 18 bp, Artificial Sequence
  Description of Artificial Sequence: Synthetic oligonucleotide
aaactctaaaagtccagc

SEQ ID NO: 1304 - DNA, 18 bp, Artificial Sequence
  Description of Artificial Sequence: Synthetic oligonucleotide
tgggaaaactctaaaagt

SEQ ID NO: 1305 - DNA, 18 bp, Artificial Sequence
  Description of Artificial Sequence: Synthetic oligonucleotide
aactttgggaaaactcta

SEQ ID NO: 1306 - DNA, 18 bp, Artificial Sequence
  Description of Artificial Sequence: Synthetic oligonucleotide
agcaaaactttgggaaaa

SEQ ID NO: 1307 - DNA, 18 bp, Artificial Sequence
  Description of Artificial Sequence: Synthetic oligonucleotide
ataaaagcaaaactttgg

SEQ ID NO: 1308 - DNA, 18 bp, Artificial Sequence
  Description of Artificial Sequence: Synthetic oligonucleotide
tatttataaaagcaaaac

SEQ ID NO: 1309 - DNA, 18 bp, Artificial Sequence
  Description of Artificial Sequence: Synthetic oligonucleotide
agccctatttataaaagc

SEQ ID NO: 1310 - DNA, 18 bp, Artificial Sequence
  Description of Artificial Sequence: Synthetic oligonucleotide
atctcagccctatttata

SEQ ID NO: 1311 - DNA, 18 bp, Artificial Sequence
  Description of Artificial Sequence: Synthetic oligonucleotide
cattaatctcagccctat

SEQ ID NO: 1312 - DNA, 18 bp, Artificial Sequence
  Description of Artificial Sequence: Synthetic oligonucleotide
caaagcattaatctcagc

SEQ ID NO: 1313 - DNA, 18 bp, Artificial Sequence
  Description of Artificial Sequence: Synthetic oligonucleotide
tgctccaaagcattaatc

SEQ ID NO: 1314 - DNA, 18 bp, Artificial Sequence
  Description of Artificial Sequence: Synthetic oligonucleotide
atttatgctccaaagcat

SEQ ID NO: 1315 - DNA, 18 bp, Artificial Sequence
  Description of Artificial Sequence: Synthetic oligonucleotide
agaaaatttatgctccaa

SEQ ID NO: 1316 - DNA, 18 bp, Artificial Sequence
  Description of Artificial Sequence: Synthetic oligonucleotide
tgagaagaaaatttatgc

SEQ ID NO: 1317 - DNA, 18 bp, Artificial Sequence
  Description of Artificial Sequence: Synthetic oligonucleotide
caaactgagaagaaaatt

SEQ ID NO: 1318 - DNA, 18 bp, Artificial Sequence
  Description of Artificial Sequence: Synthetic oligonucleotide
tagttcaaactgagaaga

SEQ ID NO: 1319 - DNA, 18 bp, Artificial Sequence
  Description of Artificial Sequence: Synthetic oligonucleotide
taaaatagttcaaactga

SEQ ID NO: 1320 - DNA, 18 bp, Artificial Sequence
  Description of Artificial Sequence: Synthetic oligonucleotide
ctagataaaatagttcaa

SEQ ID NO: 1321 - DNA, 18 bp, Artificial Sequence
  Description of Artificial Sequence: Synthetic oligonucleotide
ctattctagataaaatag

SEQ ID NO: 1322 - DNA, 18 bp, Artificial Sequence
  Description of Artificial Sequence: Synthetic oligonucleotide
ggactctattctagataa

SEQ ID NO: 1323 - DNA, 18 bp, Artificial Sequence
  Description of Artificial Sequence: Synthetic oligonucleotide
ttcttggactctattcta

SEQ ID NO: 1324 - DNA, 18 bp, Artificial Sequence
  Description of Artificial Sequence: Synthetic oligonucleotide
tgcttcttggactctatt

SEQ ID NO: 1325 - DNA, 18 bp, Artificial Sequence
  Description of Artificial Sequence: Synthetic oligonucleotide
tgctctgcttcttggact

SEQ ID NO: 1326 - DNA, 18 bp, Artificial Sequence
  Description of Artificial Sequence: Synthetic oligonucleotide
tttgctgctctgcttctt

SEQ ID NO: 1327 - DNA, 18 bp, Artificial Sequence
  Description of Artificial Sequence: Synthetic oligonucleotide
tattctttgctgctctgc

SEQ ID NO: 1328 - DNA, 18 bp, Artificial Sequence
  Description of Artificial Sequence: Synthetic oligonucleotide
cttcatattctttgctgc

SEQ ID NO: 1329 - DNA, 18 bp, Artificial Sequence
  Description of Artificial Sequence: Synthetic oligonucleotide
aaagtcttcatattcttt

SEQ ID NO: 1330 - DNA, 18 bp, Artificial Sequence
  Description of Artificial Sequence: Synthetic oligonucleotide
gctttaaaagtcttcata

SEQ ID NO: 1331 - DNA, 18 bp, Artificial Sequence
  Description of Artificial Sequence: Synthetic oligonucleotide
catgagctttaaaagtct

SEQ ID NO: 1332 - DNA, 18 bp, Artificial Sequence
  Description of Artificial Sequence: Synthetic oligonucleotide
taccatgagctttaaaag

SEQ ID NO: 1333 - DNA, 18 bp, Artificial Sequence
  Description of Artificial Sequence: Synthetic oligonucleotide
aaacttaccatgagcttt

SEQ ID NO: 1334 - DNA, 18 bp, Artificial Sequence
  Description of Artificial Sequence: Synthetic oligonucleotide
acaaaaaacttaccatga

SEQ ID NO: 1335 - DNA, 18 bp, Artificial Sequence
  Description of Artificial Sequence: Synthetic oligonucleotide
aaaaaacaaaaaacttac

SEQ ID NO: 1336 - DNA, 18 bp, Artificial Sequence
  Description of Artificial Sequence: Synthetic oligonucleotide
caaaaaaaaaacaaaaaa

SEQ ID NO: 1337 - DNA, 18 bp, Artificial Sequence
  Description of Artificial Sequence: Synthetic oligonucleotide
tgtctcaaaaaaaaaaca

SEQ ID NO: 1338 - DNA, 18 bp, Artificial Sequence
  Description of Artificial Sequence: Synthetic oligonucleotide
gactctgtctcaaaaaaa

SEQ ID NO: 1339 - DNA, 18 bp, Artificial Sequence
  Description of Artificial Sequence: Synthetic oligonucleotide
agtgagactctgtctcaa

SEQ ID NO: 1340 - DNA, 18 bp, Artificial Sequence
  Description of Artificial Sequence: Synthetic oligonucleotide
gtgacagtgagactctgt

SEQ ID NO: 1341 - DNA, 18 bp, Artificial Sequence
  Description of Artificial Sequence: Synthetic oligonucleotide
cctacgtgacagtgagac

SEQ ID NO: 1342 - DNA, 18 bp, Artificial Sequence
  Description of Artificial Sequence: Synthetic oligonucleotide
tccaacctacgtgacagt

SEQ ID NO: 1343 - DNA, 18 bp, Artificial Sequence
  Description of Artificial Sequence: Synthetic oligonucleotide
tgcaatccaacctacgtg

SEQ ID NO: 1344 - DNA, 18 bp, Artificial Sequence
  Description of Artificial Sequence: Synthetic oligonucleotide
gccactgcaatccaacct

SEQ ID NO: 1345 - DNA, 18 bp, Artificial Sequence
  Description of Artificial Sequence: Synthetic oligonucleotide
gctgtgccactgcaatcc

SEQ ID NO: 1346 - DNA, 18 bp, Artificial Sequence
  Description of Artificial Sequence: Synthetic oligonucleotide
ctatggctgtgccactgc

SEQ ID NO: 1347 - DNA, 18 bp, Artificial Sequence
  Description of Artificial Sequence: Synthetic oligonucleotide
cagagctatggctgtgcc

SEQ ID NO: 1348 - DNA, 18 bp, Artificial Sequence
  Description of Artificial Sequence: Synthetic oligonucleotide
ggtttcagagctatggct

SEQ ID NO: 1349 - DNA, 18 bp, Artificial Sequence
  Description of Artificial Sequence: Synthetic oligonucleotide
tttgaggtttcagagcta

SEQ ID NO: 1350 - DNA, 18 bp, Artificial Sequence
  Description of Artificial Sequence: Synthetic oligonucleotide
aggagtttgaggtttcag

SEQ ID NO: 1351 - DNA, 18 bp, Artificial Sequence
  Description of Artificial Sequence: Synthetic oligonucleotide
tgcccaggagtttgaggt

SEQ ID NO: 1352 - DNA, 18 bp, Artificial Sequence
  Description of Artificial Sequence: Synthetic oligonucleotide
gcgtgtgcccaggagttt

SEQ ID NO: 1353 - DNA, 18 bp, Artificial Sequence
  Description of Artificial Sequence: Synthetic oligonucleotide
agcttttttgaaaccaaa

SEQ ID NO: 1354 - DNA, 18 bp, Artificial Sequence
  Description of Artificial Sequence: Synthetic oligonucleotide
ttactagcttttttgaaa

SEQ ID NO: 1355 - DNA, 18 bp, Artificial Sequence
  Description of Artificial Sequence: Synthetic oligonucleotide
ataaattactagcttttt

SEQ ID NO: 1356 - DNA, 18 bp, Artificial Sequence
  Description of Artificial Sequence: Synthetic oligonucleotide
gaaaaataaattactagc

SEQ ID NO: 1357 - DNA, 18 bp, Artificial Sequence
  Description of Artificial Sequence: Synthetic oligonucleotide
gcactgaaaaataaatta

SEQ ID NO: 1358 - DNA, 18 bp, Artificial Sequence
  Description of Artificial Sequence: Synthetic oligonucleotide
aaggtgcactgaaaaata

SEQ ID NO: 1359 - DNA, 18 bp, Artificial Sequence
  Description of Artificial Sequence: Synthetic oligonucleotide
gacataaggtgcactgaa

SEQ ID NO: 1360 - DNA, 18 bp, Artificial Sequence
  Description of Artificial Sequence: Synthetic oligonucleotide
taaaggacataaggtgca

SEQ ID NO: 1361 - DNA, 18 bp, Artificial Sequence
  Description of Artificial Sequence: Synthetic oligonucleotide
aagactaaaggacataag

SEQ ID NO: 1362 - DNA, 18 bp, Artificial Sequence
  Description of Artificial Sequence: Synthetic oligonucleotide
ttcaaaagactaaaggac

SEQ ID NO: 1363 - DNA, 18 bp, Artificial Sequence
  Description of Artificial Sequence: Synthetic oligonucleotide
catccttcaaaagactaa

SEQ ID NO: 1364 - DNA, 18 bp, Artificial Sequence
  Description of Artificial Sequence: Synthetic oligonucleotide
cagaacatccttcaaaag

SEQ ID NO: 1365 - DNA, 18 bp, Artificial Sequence
  Description of Artificial Sequence: Synthetic oligonucleotide
cagaacagaacatccttc

SEQ ID NO: 1366 - DNA, 18 bp, Artificial Sequence
  Description of Artificial Sequence: Synthetic oligonucleotide
aagaacagaacagaacat

SEQ ID NO: 1367 - DNA, 18 bp, Artificial Sequence
  Description of Artificial Sequence: Synthetic oligonucleotide
taaaaaagaacagaacag

SEQ ID NO: 1368 - DNA, 18 bp, Artificial Sequence
  Description of Artificial Sequence: Synthetic oligonucleotide
aagaataaaaaagaacag

SEQ ID NO: 1369 - DNA, 18 bp, Artificial Sequence
  Description of Artificial Sequence: Synthetic oligonucleotide
gacaaaagaataaaaaag

SEQ ID NO: 1370 - DNA, 18 bp, Artificial Sequence
  Description of Artificial Sequence: Synthetic oligonucleotide
ctattgacaaaagaataa

SEQ ID NO: 1371 - DNA, 18 bp, Artificial Sequence
  Description of Artificial Sequence: Synthetic oligonucleotide
gttatctattgacaaaag

SEQ ID NO: 1372 - DNA, 18 bp, Artificial Sequence
  Description of Artificial Sequence: Synthetic oligonucleotide
atcaagttatctattgac

SEQ ID NO: 1373 - DNA, 18 bp, Artificial Sequence
  Description of Artificial Sequence: Synthetic oligonucleotide
tttaaatcaagttatcta

SEQ ID NO: 1374 - DNA, 18 bp, Artificial Sequence
  Description of Artificial Sequence: Synthetic oligonucleotide
tgttttaaatcaagttat

SEQ ID NO: 1375 - DNA, 18 bp, Artificial Sequence
  Description of Artificial Sequence: Synthetic oligonucleotide
gacgatgttttaaatcaa

SEQ ID NO: 1376 - DNA, 18 bp, Artificial Sequence
  Description of Artificial Sequence: Synthetic oligonucleotide
cactggacgatgttttaa

SEQ ID NO: 1377 - DNA, 18 bp, Artificial Sequence
  Description of Artificial Sequence: Synthetic oligonucleotide
aggtacactggacgatgt

SEQ ID NO: 1378 - DNA, 18 bp, Artificial Sequence
  Description of Artificial Sequence: Synthetic oligonucleotide
ctctcaggtacactggac

SEQ ID NO: 1379 - DNA, 18 bp, Artificial Sequence
  Description of Artificial Sequence: Synthetic oligonucleotide
gccatctctcaggtacac

SEQ ID NO: 1380 - DNA, 18 bp, Artificial Sequence
  Description of Artificial Sequence: Synthetic oligonucleotide
attctgccatctctcagg

SEQ ID NO: 1381 - DNA, 18 bp, Artificial Sequence
  Description of Artificial Sequence: Synthetic oligonucleotide
attacattctgccatctc

SEQ ID NO: 1382 - DNA, 18 bp, Artificial Sequence
  Description of Artificial Sequence: Synthetic oligonucleotide
accaaattacattctgcc

SEQ ID NO: 1383 - DNA, 18 bp, Artificial Sequence
  Description of Artificial Sequence: Synthetic oligonucleotide
ttgccaccaaattacatt

SEQ ID NO: 1384 - DNA, 18 bp, Artificial Sequence
  Description of Artificial Sequence: Synthetic oligonucleotide
taggattgccaccaaatt

SEQ ID NO: 1385 - DNA, 18 bp, Artificial Sequence
  Description of Artificial Sequence: Synthetic oligonucleotide
cttattaggattgccacc

SEQ ID NO: 1386 - DNA, 18 bp, Artificial Sequence
  Description of Artificial Sequence: Synthetic oligonucleotide
tagaacttattaggattg

SEQ ID NO: 1387 - DNA, 18 bp, Artificial Sequence
  Description of Artificial Sequence: Synthetic oligonucleotide
gtcaatagaacttattag

SEQ ID NO: 1388 - DNA, 18 bp, Artificial Sequence
  Description of Artificial Sequence: Synthetic oligonucleotide
gggttgtcaatagaactt

SEQ ID NO: 1389 - DNA, 18 bp, Artificial Sequence
  Description of Artificial Sequence: Synthetic oligonucleotide
ctaaagggttgtcaatag

SEQ ID NO: 1390 - DNA, 18 bp, Artificial Sequence
  Description of Artificial Sequence: Synthetic oligonucleotide
cttatctaaagggttgtc

SEQ ID NO: 1391 - DNA, 18 bp, Artificial Sequence
  Description of Artificial Sequence: Synthetic oligonucleotide
caagttcttatctaaagg

SEQ ID NO: 1392 - DNA, 18 bp, Artificial Sequence
  Description of Artificial Sequence: Synthetic oligonucleotide
ttatccaagttcttatct

SEQ ID NO: 1393 - DNA, 18 bp, Artificial Sequence
  Description of Artificial Sequence: Synthetic oligonucleotide
ccccattatccaagttct

SEQ ID NO: 1394 - DNA, 18 bp, Artificial Sequence
  Description of Artificial Sequence: Synthetic oligonucleotide
attccccccattatccaa

SEQ ID NO: 1395 - DNA, 18 bp, Artificial Sequence
  Description of Artificial Sequence: Synthetic oligonucleotide
catgaattccccccatta

SEQ ID NO: 1396 - DNA, 18 bp, Artificial Sequence
  Description of Artificial Sequence: Synthetic oligonucleotide
ccaagcatgaattccccc

SEQ ID NO: 1397 - DNA, 18 bp, Artificial Sequence
  Description of Artificial Sequence: Synthetic oligonucleotide
aaagtccaagcatgaatt

SEQ ID NO: 1398 - DNA, 18 bp, Artificial Sequence
  Description of Artificial Sequence: Synthetic oligonucleotide
ggcctaaagtccaagcat

SEQ ID NO: 1399 - DNA, 18 bp, Artificial Sequence
  Description of Artificial Sequence: Synthetic oligonucleotide
tcagtggcctaaagtcca

SEQ ID NO: 1400 - DNA, 18 bp, Artificial Sequence
  Description of Artificial Sequence: Synthetic oligonucleotide
gctgttcagtggcctaaa

SEQ ID NO: 1401 - DNA, 18 bp, Artificial Sequence
  Description of Artificial Sequence: Synthetic oligonucleotide
gaaaagctgttcagtggc

SEQ ID NO: 1402 - DNA, 18 bp, Artificial Sequence
  Description of Artificial Sequence: Synthetic oligonucleotide
gctgagaaaagctgttca

SEQ ID NO: 1403 - DNA, 18 bp, Artificial Sequence
  Description of Artificial Sequence: Synthetic oligonucleotide
ctgaggctgagaaaagct

SEQ ID NO: 1404 - DNA, 18 bp, Artificial Sequence
  Description of Artificial Sequence: Synthetic oligonucleotide
tacctgaggctgagaaaa

SEQ ID NO: 1405 - DNA, 18 bp, Artificial Sequence
  Description of Artificial Sequence: Synthetic oligonucleotide
ttatatacctgaggctga

SEQ ID NO: 1406 - DNA, 18 bp, Artificial Sequence
  Description of Artificial Sequence: Synthetic oligonucleotide
gcaatttatatacctgag

SEQ ID NO: 1407 - DNA, 18 bp, Artificial Sequence
  Description of Artificial Sequence: Synthetic oligonucleotide
ttgatgcaatttatatac

SEQ ID NO: 1408 - DNA, 18 bp, Artificial Sequence
  Description of Artificial Sequence: Synthetic oligonucleotide
cctgtttgatgcaattta

SEQ ID NO: 1409 - DNA, 18 bp, Artificial Sequence
  Description of Artificial Sequence: Synthetic oligonucleotide
gcaaacctgtttgatgca

SEQ ID NO: 1410 - DNA, 18 bp, Artificial Sequence
  Description of Artificial Sequence: Synthetic oligonucleotide
aggaggcaaacctgtttg

SEQ ID NO: 1411 - DNA, 18 bp, Artificial Sequence
  Description of Artificial Sequence: Synthetic oligonucleotide
attttaggaggcaaacct

SEQ ID NO: 1412 - DNA, 18 bp, Artificial Sequence
  Description of Artificial Sequence: Synthetic oligonucleotide
caaaaattttaggaggca

SEQ ID NO: 1413 - DNA, 18 bp, Artificial Sequence
  Description of Artificial Sequence: Synthetic oligonucleotide
caacacaaaaattttagg

SEQ ID NO: 1414 - DNA, 18 bp, Artificial Sequence
  Description of Artificial Sequence: Synthetic oligonucleotide
gtgtccaacacaaaaatt

SEQ ID NO: 1415 - DNA, 18 bp, Artificial Sequence
  Description of Artificial Sequence: Synthetic oligonucleotide
attttgtgtccaacacaa

SEQ ID NO: 1416 - DNA, 18 bp, Artificial Sequence
  Description of Artificial Sequence: Synthetic oligonucleotide
tggaaattttgtgtccaa

SEQ ID NO: 1417 - DNA, 18 bp, Artificial Sequence
  Description of Artificial Sequence: Synthetic oligonucleotide
gtttctggaaattttgtg

SEQ ID NO: 1418 - DNA, 18 bp, Artificial Sequence
  Description of Artificial Sequence: Synthetic oligonucleotide
tacaagtttctggaaatt

SEQ ID NO: 1419 - DNA, 18 bp, Artificial Sequence
  Description of Artificial Sequence: Synthetic oligonucleotide
gaaaatacaagtttctgg

SEQ ID NO: 1420 - DNA, 18 bp, Artificial Sequence
  Description of Artificial Sequence: Synthetic oligonucleotide
aaactgaaaatacaagtt

SEQ ID NO: 1421 - DNA, 18 bp, Artificial Sequence
  Description of Artificial Sequence: Synthetic oligonucleotide
tggagaaactgaaaatac

SEQ ID NO: 1422 - DNA, 18 bp, Artificial Sequence
  Description of Artificial Sequence: Synthetic oligonucleotide
cctcctggagaaactgaa

SEQ ID NO: 1423 - DNA, 18 bp, Artificial Sequence
  Description of Artificial Sequence: Synthetic oligonucleotide
cagaacctcctggagaaa

SEQ ID NO: 1424 - DNA, 18 bp, Artificial Sequence
  Description of Artificial Sequence: Synthetic oligonucleotide
aaatacagaacctcctgg

SEQ ID NO: 1425 - DNA, 18 bp, Artificial Sequence
  Description of Artificial Sequence: Synthetic oligonucleotide
cttcctggcatgtcaata

SEQ ID NO: 1426 - DNA, 18 bp, Artificial Sequence
  Description of Artificial Sequence: Synthetic oligonucleotide
ttttacttcctggcatgt

SEQ ID NO: 1427 - DNA, 18 bp, Artificial Sequence
  Description of Artificial Sequence: Synthetic oligonucleotide
acaggttttacttcctgg

SEQ ID NO: 1428 - DNA, 18 bp, Artificial Sequence
  Description of Artificial Sequence: Synthetic oligonucleotide
aaaaaacaggttttactt

SEQ ID NO: 1429 - DNA, 18 bp, Artificial Sequence
  Description of Artificial Sequence: Synthetic oligonucleotide
aaaaaaaaaaacaggttt

SEQ ID NO: 1430 - DNA, 18 bp, Artificial Sequence
  Description of Artificial Sequence: Synthetic oligonucleotide
ttaaaaaaaaaaaaaaca

SEQ ID NO: 1431 - DNA, 18 bp, Artificial Sequence
  Description of Artificial Sequence: Synthetic oligonucleotide
tttttttaaaaaaaaaaa

SEQ ID NO: 1432 - DNA, 18 bp, Artificial Sequence
  Description of Artificial Sequence: Synthetic oligonucleotide
aaaactttttttaaaaaa

SEQ ID NO: 1433 - DNA, 18 bp, Artificial Sequence
  Description of Artificial Sequence: Synthetic oligonucleotide
ttaaaaaaacttttttta

SEQ ID NO: 1434 - DNA, 18 bp, Artificial Sequence
  Description of Artificial Sequence: Synthetic oligonucleotide
tttctttaaaaaaacttt

SEQ ID NO: 1435 - DNA, 18 bp, Artificial Sequence
  Description of Artificial Sequence: Synthetic oligonucleotide
gtctttttctttaaaaaa

SEQ ID NO: 1436 - DNA, 18 bp, Artificial Sequence
  Description of Artificial Sequence: Synthetic oligonucleotide
aagtcgtctttttcttta

SEQ ID NO: 1437 - DNA, 18 bp, Artificial Sequence
  Description of Artificial Sequence: Synthetic oligonucleotide
ggtgaaagtcgtcttttt

SEQ ID NO: 1438 - DNA, 18 bp, Artificial Sequence
  Description of Artificial Sequence: Synthetic oligonucleotide
tgaaaggtgaaagtcgtc

SEQ ID NO: 1439 - DNA, 18 bp, Artificial Sequence
  Description of Artificial Sequence: Synthetic oligonucleotide
catagtgaaaggtgaaag

SEQ ID NO: 1440 - DNA, 18 bp, Artificial Sequence
  Description of Artificial Sequence: Synthetic oligonucleotide
agcaacatagtgaaaggt

SEQ ID NO: 1441 - DNA, 18 bp, Artificial Sequence
  Description of Artificial Sequence: Synthetic oligonucleotide
tcaagagcaacatagtga

SEQ ID NO: 1442 - DNA, 18 bp, Artificial Sequence
  Description of Artificial Sequence: Synthetic oligonucleotide
ctggttcaagagcaacat

SEQ ID NO: 1443 - DNA, 18 bp, Artificial Sequence
  Description of Artificial Sequence: Synthetic oligonucleotide
tggtcctggttcaagagc

SEQ ID NO: 1444 - DNA, 18 bp, Artificial Sequence
  Description of Artificial Sequence: Synthetic oligonucleotide
attcctggtcctggttca

SEQ ID NO: 1445 - DNA, 18 bp, Artificial Sequence
  Description of Artificial Sequence: Synthetic oligonucleotide
ctttcattcctggtcctg

SEQ ID NO: 1446 - DNA, 18 bp, Artificial Sequence
  Description of Artificial Sequence: Synthetic oligonucleotide
taactttcattcctggtc

SEQ ID NO: 1447 - DNA, 18 bp, Artificial Sequence
  Description of Artificial Sequence: Synthetic oligonucleotide
cccagtaactttcattcc

SEQ ID NO: 1448 - DNA, 18 bp, Artificial Sequence
  Description of Artificial Sequence: Synthetic oligonucleotide
tatctcccagtaactttc

SEQ ID NO: 1449 - DNA, 18 bp, Artificial Sequence
  Description of Artificial Sequence: Synthetic oligonucleotide
gaagttatctcccagtaa

SEQ ID NO: 1450 - DNA, 18 bp, Artificial Sequence
  Description of Artificial Sequence: Synthetic oligonucleotide
ccttcgaagttatctccc

SEQ ID NO: 1451 - DNA, 18 bp, Artificial Sequence
  Description of Artificial Sequence: Synthetic oligonucleotide
aaaatccttcgaagttat

SEQ ID NO: 1452 - DNA, 18 bp, Artificial Sequence
  Description of Artificial Sequence: Synthetic oligonucleotide
gttgcaaaatccttcgaa

SEQ ID NO: 1453 - DNA, 18 bp, Artificial Sequence
  Description of Artificial Sequence: Synthetic oligonucleotide
tcgaatttgttgcaaaat

SEQ ID NO: 1454 - DNA, 18 bp, Artificial Sequence
  Description of Artificial Sequence: Synthetic oligonucleotide
acagctcgaatttgttgc

SEQ ID NO: 1455 - DNA, 18 bp, Artificial Sequence
  Description of Artificial Sequence: Synthetic oligonucleotide
gtcggacagctcgaattt

SEQ ID NO: 1456 - DNA, 18 bp, Artificial Sequence
  Description of Artificial Sequence: Synthetic oligonucleotide
tcagagtcggacagctcg

SEQ ID NO: 1457 - DNA, 18 bp, Artificial Sequence
  Description of Artificial Sequence: Synthetic oligonucleotide
cattctcagagtcggaca

SEQ ID NO: 1458 - DNA, 18 bp, Artificial Sequence
  Description of Artificial Sequence: Synthetic oligonucleotide
gaccattctcagagtcgg

SEQ ID NO: 1459 - DNA, 18 bp, Artificial Sequence
  Description of Artificial Sequence: Synthetic oligonucleotide
aaactgaccattctcaga

SEQ ID NO: 1460 - DNA, 18 bp, Artificial Sequence
  Description of Artificial Sequence: Synthetic oligonucleotide
ttggtaaactgaccattc

SEQ ID NO: 1461 - DNA, 18 bp, Artificial Sequence
  Description of Artificial Sequence: Synthetic oligonucleotide
aaccattggtaaactgac

SEQ ID NO: 1462 - DNA, 18 bp, Artificial Sequence
  Description of Artificial Sequence: Synthetic oligonucleotide
aaatgaaccattggtaaa

SEQ ID NO: 1463 - DNA, 18 bp, Artificial Sequence
  Description of Artificial Sequence: Synthetic oligonucleotide
atagcaaatgaaccattg

SEQ ID NO: 1464 - DNA, 18 bp, Artificial Sequence
  Description of Artificial Sequence: Synthetic oligonucleotide
caacaatagcaaatgaac

SEQ ID NO: 1465 - DNA, 18 bp, Artificial Sequence
  Description of Artificial Sequence: Synthetic oligonucleotide
gtttccaacaatagcaaa

SEQ ID NO: 1466 - DNA, 18 bp, Artificial Sequence
  Description of Artificial Sequence: Synthetic oligonucleotide
tgcttgtttccaacaata

SEQ ID NO: 1467 - DNA, 18 bp, Artificial Sequence
  Description of Artificial Sequence: Synthetic oligonucleotide
ttgcctgcttgtttccaa

SEQ ID NO: 1468 - DNA, 18 bp, Artificial Sequence
  Description of Artificial Sequence: Synthetic oligonucleotide
agtatttgcctgcttgtt

SEQ ID NO: 1469 - DNA, 18 bp, Artificial Sequence
  Description of Artificial Sequence: Synthetic oligonucleotide
caatcagtatttgcctgc

SEQ ID NO: 1470 - DNA, 18 bp, Artificial Sequence
  Description of Artificial Sequence: Synthetic oligonucleotide
atggtcaatcagtatttg

SEQ ID NO: 1471 - DNA, 18 bp, Artificial Sequence
  Description of Artificial Sequence: Synthetic oligonucleotide
aaaagatggtcaatcagt

SEQ ID NO: 1472 - DNA, 18 bp, Artificial Sequence
  Description of Artificial Sequence: Synthetic oligonucleotide
agtctaaaagatggtcaa

SEQ ID NO: 1473 - DNA, 18 bp, Artificial Sequence
  Description of Artificial Sequence: Synthetic oligonucleotide
ccacaagtctaaaagatg

SEQ ID NO: 1474 - DNA, 18 bp, Artificial Sequence
  Description of Artificial Sequence: Synthetic oligonucleotide
ggcttccacaagtctaaa

SEQ ID NO: 1475 - DNA, 18 bp, Artificial Sequence
  Description of Artificial Sequence: Synthetic oligonucleotide
agactggcttccacaagt

SEQ ID NO: 1476 - DNA, 18 bp, Artificial Sequence
  Description of Artificial Sequence: Synthetic oligonucleotide
gtatcagactggcttcca

SEQ ID NO: 1477 - DNA, 18 bp, Artificial Sequence
  Description of Artificial Sequence: Synthetic oligonucleotide
tctcagtatcagactggc

SEQ ID NO: 1478 - DNA, 18 bp, Artificial Sequence
  Description of Artificial Sequence: Synthetic oligonucleotide
taccctctcagtatcaga

SEQ ID NO: 1479 - DNA, 18 bp, Artificial Sequence
  Description of Artificial Sequence: Synthetic oligonucleotide
catttgggtaagattcca

SEQ ID NO: 1480 - DNA, 18 bp, Artificial Sequence
  Description of Artificial Sequence: Synthetic oligonucleotide
atggacatttgggtaaga

SEQ ID NO: 1481 - DNA, 18 bp, Artificial Sequence
  Description of Artificial Sequence: Synthetic oligonucleotide
cttaaatggacatttggg

SEQ ID NO: 1482 - DNA, 18 bp, Artificial Sequence
  Description of Artificial Sequence: Synthetic oligonucleotide
aacctcttaaatggacat

SEQ ID NO: 1483 - DNA, 18 bp, Artificial Sequence
  Description of Artificial Sequence: Synthetic oligonucleotide
aagaaaacctcttaaatg

SEQ ID NO: 1484 - DNA, 18 bp, Artificial Sequence
  Description of Artificial Sequence: Synthetic oligonucleotide
aacaaaagaaaacctctt

SEQ ID NO: 1485 - DNA, 18 bp, Artificial Sequence
  Description of Artificial Sequence: Synthetic oligonucleotide
cattaaacaaaagaaaac

SEQ ID NO: 1486 - DNA, 18 bp, Artificial Sequence
  Description of Artificial Sequence: Synthetic oligonucleotide
tccctcattaaacaaaag

SEQ ID NO: 1487 - DNA, 18 bp, Artificial Sequence
  Description of Artificial Sequence: Synthetic oligonucleotide
gattttccctcattaaac

SEQ ID NO: 1488 - DNA, 18 bp, Artificial Sequence
  Description of Artificial Sequence: Synthetic oligonucleotide
tcggagattttccctcat

SEQ ID NO: 1489 - DNA, 18 bp, Artificial Sequence
  Description of Artificial Sequence: Synthetic oligonucleotide
cctcctcggagattttcc

SEQ ID NO: 1490 - DNA, 18 bp, Artificial Sequence
  Description of Artificial Sequence: Synthetic oligonucleotide
gtatacctcctcggagat

SEQ ID NO: 1491 - DNA, 18 bp, Artificial Sequence
  Description of Artificial Sequence: Synthetic oligonucleotide
agggggtatacctcctcg

SEQ ID NO: 1492 - DNA, 18 bp, Artificial Sequence
  Description of Artificial Sequence: Synthetic oligonucleotide
gctgtagggggtatacct

SEQ ID NO: 1493 - DNA, 18 bp, Artificial Sequence
  Description of Artificial Sequence: Synthetic oligonucleotide
catctgctgtagggggta

SEQ ID NO: 1494 - DNA, 18 bp, Artificial Sequence
  Description of Artificial Sequence: Synthetic oligonucleotide
aaggacatctgctgtagg

SEQ ID NO: 1495 - DNA, 18 bp, Artificial Sequence
  Description of Artificial Sequence: Synthetic oligonucleotide
gcagaaaggacatctgct

SEQ ID NO: 1496 - DNA, 18 bp, Artificial Sequence
  Description of Artificial Sequence: Synthetic oligonucleotide
cttcagcagaaaggacat

SEQ ID NO: 1497 - DNA, 18 bp, Artificial Sequence
  Description of Artificial Sequence: Synthetic oligonucleotide
gtgaacttcagcagaaag

SEQ ID NO: 1498 - DNA, 18 bp, Artificial Sequence
  Description of Artificial Sequence: Synthetic oligonucleotide
gacctgtgaacttcagca

SEQ ID NO: 1499 - DNA, 18 bp, Artificial Sequence
  Description of Artificial Sequence: Synthetic oligonucleotide
aattcgacctgtgaactt

SEQ ID NO: 1500 - DNA, 18 bp, Artificial Sequence
  Description of Artificial Sequence: Synthetic oligonucleotide
ccaaattcgacctgtgaa

SEQ ID NO: 1501 - DNA, 18 bp, Artificial Sequence
  Description of Artificial Sequence: Synthetic oligonucleotide
gctccccaaattcgacct

SEQ ID NO: 1502 - DNA, 18 bp, Artificial Sequence
  Description of Artificial Sequence: Synthetic oligonucleotide
attgtgctccccaaattc

SEQ ID NO: 1503 - DNA, 18 bp, Artificial Sequence
  Description of Artificial Sequence: Synthetic oligonucleotide
cagccattgtgctcccca

SEQ ID NO: 1504 - DNA, 18 bp, Artificial Sequence
  Description of Artificial Sequence: Synthetic oligonucleotide
acctccagccattgtgct

SEQ ID NO: 1505 - DNA, 18 bp, Artificial Sequence
  Description of Artificial Sequence: Synthetic oligonucleotide
atctgacctccagccatt

SEQ ID NO: 1506 - DNA, 18 bp, Artificial Sequence
  Description of Artificial Sequence: Synthetic oligonucleotide
tgggcatctgacctccag

SEQ ID NO: 1507 - DNA, 18 bp, Artificial Sequence
  Description of Artificial Sequence: Synthetic oligonucleotide
tctcctagtgggcatctg

SEQ ID NO: 1508 - DNA, 18 bp, Artificial Sequence
  Description of Artificial Sequence: Synthetic oligonucleotide
tagcatctcctagtgggc

SEQ ID NO: 1509 - DNA, 18 bp, Artificial Sequence
  Description of Artificial Sequence: Synthetic oligonucleotide
aatcatagcatctcctag

SEQ ID NO: 1510 - DNA, 18 bp, Artificial Sequence
  Description of Artificial Sequence: Synthetic oligonucleotide
atattaatcatagcatct

SEQ ID NO: 1511 - DNA, 18 bp, Artificial Sequence
  Description of Artificial Sequence: Synthetic oligonucleotide
tacatattaatcatagca

SEQ ID NO: 1512 - DNA, 18 bp, Artificial Sequence
  Description of Artificial Sequence: Synthetic oligonucleotide
taacttacatattaatca

SEQ ID NO: 1513 - DNA, 18 bp, Artificial Sequence
  Description of Artificial Sequence: Synthetic oligonucleotide
tgggataacttacatatt

SEQ ID NO: 1514 - DNA, 18 bp, Artificial Sequence
  Description of Artificial Sequence: Synthetic oligonucleotide
tcatctgggataacttac

SEQ ID NO: 1515 - DNA, 18 bp, Artificial Sequence
  Description of Artificial Sequence: Synthetic oligonucleotide
cttaatcatctgggataa

SEQ ID NO: 1516 - DNA, 18 bp, Artificial Sequence
  Description of Artificial Sequence: Synthetic oligonucleotide
gctgtcttaatcatctgg

SEQ ID NO: 1517 - DNA, 18 bp, Artificial Sequence
  Description of Artificial Sequence: Synthetic oligonucleotide
tgttggctgtcttaatca

SEQ ID NO: 1518 - DNA, 18 bp, Artificial Sequence
  Description of Artificial Sequence: Synthetic oligonucleotide
ctgggtgttggctgtctt

SEQ ID NO: 1519 - DNA, 18 bp, Artificial Sequence
  Description of Artificial Sequence: Synthetic oligonucleotide
agcccctgggtgttggct

SEQ ID NO: 1520 - DNA, 18 bp, Artificial Sequence
  Description of Artificial Sequence: Synthetic oligonucleotide
tctccagcccctgggtgt

SEQ ID NO: 1521 - DNA, 18 bp, Artificial Sequence
  Description of Artificial Sequence: Synthetic oligonucleotide
cccactctccagcccctg

SEQ ID NO: 1522 - DNA, 18 bp, Artificial Sequence
  Description of Artificial Sequence: Synthetic oligonucleotide
tcatacccactctccagc

SEQ ID NO: 1523 - DNA, 18 bp, Artificial Sequence
  Description of Artificial Sequence: Synthetic oligonucleotide
agccctcatacccactct

SEQ ID NO: 1524 - DNA, 18 bp, Artificial Sequence
  Description of Artificial Sequence: Synthetic oligonucleotide
ctcacagccctcataccc

SEQ ID NO: 1525 - DNA, 18 bp, Artificial Sequence
  Description of Artificial Sequence: Synthetic oligonucleotide
acgccctcacagccctca

SEQ ID NO: 1526 - DNA, 18 bp, Artificial Sequence
  Description of Artificial Sequence: Synthetic oligonucleotide
gaagaacgccctcacagc

SEQ ID NO: 1527 - DNA, 18 bp, Artificial Sequence
  Description of Artificial Sequence: Synthetic oligonucleotide
ctatggaagaacgccctc

SEQ ID NO: 1528 - DNA, 18 bp, Artificial Sequence
  Description of Artificial Sequence: Synthetic oligonucleotide
tactgctatggaagaacg

SEQ ID NO: 1529 - DNA, 18 bp, Artificial Sequence
  Description of Artificial Sequence: Synthetic oligonucleotide
ggagttactgctatggaa

SEQ ID NO: 1530 - DNA, 18 bp, Artificial Sequence
  Description of Artificial Sequence: Synthetic oligonucleotide
gctggggagttactgcta

SEQ ID NO: 1531 - DNA, 18 bp, Artificial Sequence
  Description of Artificial Sequence: Synthetic oligonucleotide
tttctgctggggagttac

SEQ ID NO: 1532 - DNA, 18 bp, Artificial Sequence
  Description of Artificial Sequence: Synthetic oligonucleotide
ccttgttccctgttggca

SEQ ID NO: 1533 - DNA, 18 bp, Artificial Sequence
  Description of Artificial Sequence: Synthetic oligonucleotide
ttgtcccttgttccctgt

SEQ ID NO: 1534 - DNA, 18 bp, Artificial Sequence
  Description of Artificial Sequence: Synthetic oligonucleotide
tggctttgtcccttgttc

SEQ ID NO: 1535 - DNA, 18 bp, Artificial Sequence
  Description of Artificial Sequence: Synthetic oligonucleotide
gggcttggctttgtccct

SEQ ID NO: 1536 - DNA, 18 bp, Artificial Sequence
  Description of Artificial Sequence: Synthetic oligonucleotide
ccacagggcttggctttg

SEQ ID NO: 1537 - DNA, 18 bp, Artificial Sequence
  Description of Artificial Sequence: Synthetic oligonucleotide
ggtggccacagggcttgg

SEQ ID NO: 1538 - DNA, 18 bp, Artificial Sequence
  Description of Artificial Sequence: Synthetic oligonucleotide
cctgtggtggccacaggg

SEQ ID NO: 1539 - DNA, 18 bp, Artificial Sequence
  Description of Artificial Sequence: Synthetic oligonucleotide
gtgcacctgtggtggcca

SEQ ID NO: 1540 - DNA, 18 bp, Artificial Sequence
  Description of Artificial Sequence: Synthetic oligonucleotide
ctggggtgcacctgtggt

SEQ ID NO: 1541 - DNA, 18 bp, Artificial Sequence
  Description of Artificial Sequence: Synthetic oligonucleotide
gatgcctggggtgcacct

SEQ ID NO: 1542 - DNA, 18 bp, Artificial Sequence
  Description of Artificial Sequence: Synthetic oligonucleotide
atgaggatgcctggggtg

SEQ ID NO: 1543 - DNA, 18 bp, Artificial Sequence
  Description of Artificial Sequence: Synthetic oligonucleotide
ccatgatgaggatgcctg

SEQ ID NO: 1544 - DNA, 18 bp, Artificial Sequence
  Description of Artificial Sequence: Synthetic oligonucleotide
aatggccatgatgaggat

SEQ ID NO: 1545 - DNA, 18 bp, Artificial Sequence
  Description of Artificial Sequence: Synthetic oligonucleotide
agagcaatggccatgatg

SEQ ID NO: 1546 - DNA, 18 bp, Artificial Sequence
  Description of Artificial Sequence: Synthetic oligonucleotide
aagggagagcaatggcca

SEQ ID NO: 1547 - DNA, 18 bp, Artificial Sequence
  Description of Artificial Sequence: Synthetic oligonucleotide
agagaaagggagagcaat

SEQ ID NO: 1548 - DNA, 18 bp, Artificial Sequence
  Description of Artificial Sequence: Synthetic oligonucleotide
gtaagagagaaagggaga

SEQ ID NO: 1549 - DNA, 18 bp, Artificial Sequence
  Description of Artificial Sequence: Synthetic oligonucleotide
ctgttgtaagagagaaag

SEQ ID NO: 1550 - DNA, 18 bp, Artificial Sequence
  Description of Artificial Sequence: Synthetic oligonucleotide
acactctgttgtaagaga

SEQ ID NO: 1551 - DNA, 18 bp, Artificial Sequence
  Description of Artificial Sequence: Synthetic oligonucleotide
tggcaacactctgttgta

SEQ ID NO: 1552 - DNA, 18 bp, Artificial Sequence
  Description of Artificial Sequence: Synthetic oligonucleotide
gtccctggcaacactctg

SEQ ID NO: 1553 - DNA, 18 bp, Artificial Sequence
  Description of Artificial Sequence: Synthetic oligonucleotide
gccgtccctggcaacact

SEQ ID NO: 1554 - DNA, 18 bp, Artificial Sequence
  Description of Artificial Sequence: Synthetic oligonucleotide
atactgccgtccctggca

SEQ ID NO: 1555 - DNA, 18 bp, Artificial Sequence
  Description of Artificial Sequence: Synthetic oligonucleotide
aagagatactgccgtccc

SEQ ID NO: 1556 - DNA, 18 bp, Artificial Sequence
  Description of Artificial Sequence: Synthetic oligonucleotide
acacaaagagatactgcc

SEQ ID NO: 1557 - DNA, 18 bp, Artificial Sequence
  Description of Artificial Sequence: Synthetic oligonucleotide
gggtcacacaaagagata

SEQ ID NO: 1558 - DNA, 18 bp, Artificial Sequence
  Description of Artificial Sequence: Synthetic oligonucleotide
cgccagggtcacacaaag

SEQ ID NO: 1559 - DNA, 18 bp, Artificial Sequence
  Description of Artificial Sequence: Synthetic oligonucleotide
taagccgccagggtcaca

SEQ ID NO: 1560 - DNA, 18 bp, Artificial Sequence
  Description of Artificial Sequence: Synthetic oligonucleotide
tcccataagccgccaggg

SEQ ID NO: 1561 - DNA, 18 bp, Artificial Sequence
  Description of Artificial Sequence: Synthetic oligonucleotide
caacgtcccataagccgc

SEQ ID NO: 1562 - DNA, 18 bp, Artificial Sequence
  Description of Artificial Sequence: Synthetic oligonucleotide
gaagccaacgtcccataa

SEQ ID NO: 1563 - DNA, 18 bp, Artificial Sequence
  Description of Artificial Sequence: Synthetic oligonucleotide
ggtctgaagccaacgtcc

SEQ ID NO: 1564 - DNA, 18 bp, Artificial Sequence
  Description of Artificial Sequence: Synthetic oligonucleotide
acaaaggtctgaagccaa

SEQ ID NO: 1565 - DNA, 18 bp, Artificial Sequence
  Description of Artificial Sequence: Synthetic oligonucleotide
gtatcacaaaggtctgaa

SEQ ID NO: 1566 - DNA, 18 bp, Artificial Sequence
  Description of Artificial Sequence: Synthetic oligonucleotide
atggtgtatcacaaaggt

SEQ ID NO: 1567 - DNA, 18 bp, Artificial Sequence
  Description of Artificial Sequence: Synthetic oligonucleotide
gcagcatggtgtatcaca

SEQ ID NO: 1568 - DNA, 18 bp, Artificial Sequence
  Description of Artificial Sequence: Synthetic oligonucleotide
cccacgcagcatggtgta

SEQ ID NO: 1569 - DNA, 18 bp, Artificial Sequence
  Description of Artificial Sequence: Synthetic oligonucleotide
atcgtcccacgcagcatg

SEQ ID NO: 1570 - DNA, 18 bp, Artificial Sequence
  Description of Artificial Sequence: Synthetic oligonucleotide
ccgtcatcgtcccacgca

SEQ ID NO: 1571 - DNA, 18 bp, Artificial Sequence
  Description of Artificial Sequence: Synthetic oligonucleotide
ccacgccgtcatcgtccc

SEQ ID NO: 1572 - DNA, 18 bp, Artificial Sequence
  Description of Artificial Sequence: Synthetic oligonucleotide
cctctccacgccgtcatc

SEQ ID NO: 1573 - DNA, 18 bp, Artificial Sequence
  Description of Artificial Sequence: Synthetic oligonucleotide
tcattcctctccacgccg

SEQ ID NO: 1574 - DNA, 18 bp, Artificial Sequence
  Description of Artificial Sequence: Synthetic oligonucleotide
aggcctcattcctctcca

SEQ ID NO: 1575 - DNA, 18 bp, Artificial Sequence
  Description of Artificial Sequence: Synthetic oligonucleotide
acctcaggcctcattcct

SEQ ID NO: 1576 - DNA, 18 bp, Artificial Sequence
  Description of Artificial Sequence: Synthetic oligonucleotide
gtgtgacctcaggcctca

SEQ ID NO: 1577 - DNA, 18 bp, Artificial Sequence
  Description of Artificial Sequence: Synthetic oligonucleotide
agccagtgtgacctcagg

SEQ ID NO: 1578 - DNA, 18 bp, Artificial Sequence
  Description of Artificial Sequence: Synthetic oligonucleotide
aggcaagccagtgtgacc

SEQ ID NO: 1579 - DNA, 18 bp, Artificial Sequence
  Description of Artificial Sequence: Synthetic oligonucleotide
ggaggaggcaagccagtg

SEQ ID NO: 1580 - DNA, 18 bp, Artificial Sequence
  Description of Artificial Sequence: Synthetic oligonucleotide
ggctaggaggaggcaagc

SEQ ID NO: 1581 - DNA, 18 bp, Artificial Sequence
  Description of Artificial Sequence: Synthetic oligonucleotide
gctgtggctaggaggagg

SEQ ID NO: 1582 - DNA, 18 bp, Artificial Sequence
  Description of Artificial Sequence: Synthetic oligonucleotide
agcctgctgtggctagga

SEQ ID NO: 1583 - DNA, 18 bp, Artificial Sequence
  Description of Artificial Sequence: Synthetic oligonucleotide
aaagcagcctgctgtggc

SEQ ID NO: 1584 - DNA, 18 bp, Artificial Sequence
  Description of Artificial Sequence: Synthetic oligonucleotide
tcagcaaagcagcctgct

SEQ ID NO: 1585 - DNA, 18 bp, Artificial Sequence
  Description of Artificial Sequence: Synthetic oligonucleotide
tcaagtcagcaaagcagc

SEQ ID NO: 1586 - DNA, 18 bp, Artificial Sequence
  Description of Artificial Sequence: Synthetic oligonucleotide
cactcaagtcagcaaagc

SEQ ID NO: 1587 - DNA, 18 bp, Artificial Sequence
  Description of Artificial Sequence: Synthetic oligonucleotide
gcactcactcaagtcagc

SEQ ID NO: 1588 - DNA, 18 bp, Artificial Sequence
  Description of Artificial Sequence: Synthetic oligonucleotide
ggaaagcactcactcaag

SEQ ID NO: 1589 - DNA, 18 bp, Artificial Sequence
  Description of Artificial Sequence: Synthetic oligonucleotide
gggaaggaaagcactcac

SEQ ID NO: 1590 - DNA, 18 bp, Artificial Sequence
  Description of Artificial Sequence: Synthetic oligonucleotide
ggaaagggaaggaaagca

SEQ ID NO: 1591 - DNA, 18 bp, Artificial Sequence
  Description of Artificial Sequence: Synthetic oligonucleotide
ggcagggaaagggaagga

SEQ ID NO: 1592 - DNA, 18 bp, Artificial Sequence
  Description of Artificial Sequence: Synthetic oligonucleotide
gtaagggcagggaaaggg

SEQ ID NO: 1593 - DNA, 18 bp, Artificial Sequence
  Description of Artificial Sequence: Synthetic oligonucleotide
tgactgtaagggcaggga

SEQ ID NO: 1594 - DNA, 18 bp, Artificial Sequence
  Description of Artificial Sequence: Synthetic oligonucleotide
ccatttgactgtaagggc

SEQ ID NO: 1595 - DNA, 18 bp, Artificial Sequence
  Description of Artificial Sequence: Synthetic oligonucleotide
tgtttccatttgactgta

SEQ ID NO: 1596 - DNA, 18 bp, Artificial Sequence
  Description of Artificial Sequence: Synthetic oligonucleotide
cggaatgtttccatttga

SEQ ID NO: 1597 - DNA, 18 bp, Artificial Sequence
  Description of Artificial Sequence: Synthetic oligonucleotide
gaatgcggaatgtttcca

SEQ ID NO: 1598 - DNA, 18 bp, Artificial Sequence
  Description of Artificial Sequence: Synthetic oligonucleotide
ttgtagaatgcggaatgt

SEQ ID NO: 1599 - DNA, 18 bp, Artificial Sequence
  Description of Artificial Sequence: Synthetic oligonucleotide
agttattgtagaatgcgg

SEQ ID NO: 1600 - DNA, 18 bp, Artificial Sequence
  Description of Artificial Sequence: Synthetic oligonucleotide
taaagagttattgtagaa

SEQ ID NO: 1601 - DNA, 18 bp, Artificial Sequence
  Description of Artificial Sequence: Synthetic oligonucleotide
ctttttaaagagttattg

SEQ ID NO: 1602 - DNA, 18 bp, Artificial Sequence
  Description of Artificial Sequence: Synthetic oligonucleotide
aaggcctttttaaagagt

SEQ ID NO: 1603 - DNA, 18 bp, Artificial Sequence
  Description of Artificial Sequence: Synthetic oligonucleotide
taaagaaggcctttttaa

SEQ ID NO: 1604 - DNA, 18 bp, Artificial Sequence
  Description of Artificial Sequence: Synthetic oligonucleotide
ccaggtaaagaaggcctt

SEQ ID NO: 1605 - DNA, 18 bp, Artificial Sequence
  Description of Artificial Sequence: Synthetic oligonucleotide
gaaatccaggtaaagaag

SEQ ID NO: 1606 - DNA, 18 bp, Artificial Sequence
  Description of Artificial Sequence: Synthetic oligonucleotide
tctttgaaatccaggtaa

SEQ ID NO: 1607 - DNA, 18 bp, Artificial Sequence
  Description of Artificial Sequence: Synthetic oligonucleotide
taatctcacaactgccct

SEQ ID NO: 1608 - DNA, 18 bp, Artificial Sequence
  Description of Artificial Sequence: Synthetic oligonucleotide
aaagataatctcacaact

SEQ ID NO: 1609 - DNA, 18 bp, Artificial Sequence
  Description of Artificial Sequence: Synthetic oligonucleotide
catgaaaagataatctca

SEQ ID NO: 1610 - DNA, 18 bp, Artificial Sequence
  Description of Artificial Sequence: Synthetic oligonucleotide
atagccatgaaaagataa

SEQ ID NO: 1611 - DNA, 18 bp, Artificial Sequence
  Description of Artificial Sequence: Synthetic oligonucleotide
ggcaaatagccatgaaaa

SEQ ID NO: 1612 - DNA, 18 bp, Artificial Sequence
  Description of Artificial Sequence: Synthetic oligonucleotide
caaaaggcaaatagccat

SEQ ID NO: 1613 - DNA, 18 bp, Artificial Sequence
  Description of Artificial Sequence: Synthetic oligonucleotide
atactcaaaaggcaaata

SEQ ID NO: 1614 - DNA, 18 bp, Artificial Sequence
  Description of Artificial Sequence: Synthetic oligonucleotide
aaagaatactcaaaaggc

SEQ ID NO: 1615 - DNA, 18 bp, Artificial Sequence
  Description of Artificial Sequence: Synthetic oligonucleotide
tgtagaaagaatactcaa

SEQ ID NO: 1616 - DNA, 18 bp, Artificial Sequence
  Description of Artificial Sequence: Synthetic oligonucleotide
ccttttgtagaaagaata

SEQ ID NO: 1617 - DNA, 18 bp, Artificial Sequence
  Description of Artificial Sequence: Synthetic oligonucleotide
tacttccttttgtagaaa

SEQ ID NO: 1618 - DNA, 18 bp, Artificial Sequence
  Description of Artificial Sequence: Synthetic oligonucleotide
taatttacttccttttgt

SEQ ID NO: 1619 - DNA, 18 bp, Artificial Sequence
  Description of Artificial Sequence: Synthetic oligonucleotide
caatttaatttacttcct

SEQ ID NO: 1620 - DNA, 18 bp, Artificial Sequence
  Description of Artificial Sequence: Synthetic oligonucleotide
aagaacaatttaatttac

SEQ ID NO: 1621 - DNA, 18 bp, Artificial Sequence
  Description of Artificial Sequence: Synthetic oligonucleotide
aaagaaagaacaatttaa

SEQ ID NO: 1622 - DNA, 18 bp, Artificial Sequence
  Description of Artificial Sequence: Synthetic oligonucleotide
taaagaaagaaagaacaa

SEQ ID NO: 1623 - DNA, 18 bp, Artificial Sequence
  Description of Artificial Sequence: Synthetic oligonucleotide
aattataaagaaagaaag

SEQ ID NO: 1624 - DNA, 18 bp, Artificial Sequence
  Description of Artificial Sequence: Synthetic oligonucleotide
ctataaattataaagaaa

SEQ ID NO: 1625 - DNA, 18 bp, Artificial Sequence
  Description of Artificial Sequence: Synthetic oligonucleotide
aaaatctataaattataa

SEQ ID NO: 1626 - DNA, 18 bp, Artificial Sequence
  Description of Artificial Sequence: Synthetic oligonucleotide
catgcaaaatctataaat

SEQ ID NO: 1627 - DNA, 18 bp, Artificial Sequence
  Description of Artificial Sequence: Synthetic oligonucleotide
ttcagcatgcaaaatcta

SEQ ID NO: 1628 - DNA, 18 bp, Artificial Sequence
  Description of Artificial Sequence: Synthetic oligonucleotide
agtttcagcatgcaaaat

SEQ ID NO: 1629 - DNA, 18 bp, Artificial Sequence
  Description of Artificial Sequence: Synthetic oligonucleotide
tgagaagtttcagcatgc

SEQ ID NO: 1630 - DNA, 18 bp, Artificial Sequence
  Description of Artificial Sequence: Synthetic oligonucleotide
ctggttgagaagtttcag

SEQ ID NO: 1631 - DNA, 18 bp, Artificial Sequence
  Description of Artificial Sequence: Synthetic oligonucleotide
ttcttctggttgagaagt

SEQ ID NO: 1632 - DNA, 18 bp, Artificial Sequence
  Description of Artificial Sequence: Synthetic oligonucleotide
gccctttcttctggttga

SEQ ID NO: 1633 - DNA, 18 bp, Artificial Sequence
  Description of Artificial Sequence: Synthetic oligonucleotide
tgaaggccctttcttctg

SEQ ID NO: 1634 - DNA, 18 bp, Artificial Sequence
  Description of Artificial Sequence: Synthetic oligonucleotide
cactgtgaaggccctttc

SEQ ID NO: 1635 - DNA, 18 bp, Artificial Sequence
  Description of Artificial Sequence: Synthetic oligonucleotide
aaggacactgtgaaggcc

SEQ ID NO: 1636 - DNA, 18 bp, Artificial Sequence
  Description of Artificial Sequence: Synthetic oligonucleotide
acataaaggacactgtga

SEQ ID NO: 1637 - DNA, 18 bp, Artificial Sequence
  Description of Artificial Sequence: Synthetic oligonucleotide
ttcttacataaaggacac

SEQ ID NO: 1638 - DNA, 18 bp, Artificial Sequence
  Description of Artificial Sequence: Synthetic oligonucleotide
tatcattcttacataaag

SEQ ID NO: 1639 - DNA, 18 bp, Artificial Sequence
  Description of Artificial Sequence: Synthetic oligonucleotide
ggttatatcattcttaca

SEQ ID NO: 1640 - DNA, 18 bp, Artificial Sequence
  Description of Artificial Sequence: Synthetic oligonucleotide
cttttggttatatcattc

SEQ ID NO: 1641 - DNA, 18 bp, Artificial Sequence
  Description of Artificial Sequence: Synthetic oligonucleotide
taccttttggttatatca

SEQ ID NO: 1642 - DNA, 18 bp, Artificial Sequence
  Description of Artificial Sequence: Synthetic oligonucleotide
ttatataccttttggtta

SEQ ID NO: 1643 - DNA, 18 bp, Artificial Sequence
  Description of Artificial Sequence: Synthetic oligonucleotide
ccaaattatatacctttt

SEQ ID NO: 1644 - DNA, 18 bp, Artificial Sequence
  Description of Artificial Sequence: Synthetic oligonucleotide
cattaccaaattatatac

SEQ ID NO: 1645 - DNA, 18 bp, Artificial Sequence
  Description of Artificial Sequence: Synthetic oligonucleotide
agcatcattaccaaatta

SEQ ID NO: 1646 - DNA, 18 bp, Artificial Sequence
  Description of Artificial Sequence: Synthetic oligonucleotide
aacctagcatcattacca

SEQ ID NO: 1647 - DNA, 18 bp, Artificial Sequence
  Description of Artificial Sequence: Synthetic oligonucleotide
cttccaacctagcatcat

SEQ ID NO: 1648 - DNA, 18 bp, Artificial Sequence
  Description of Artificial Sequence: Synthetic oligonucleotide
ggttgcttccaacctagc

SEQ ID NO: 1649 - DNA, 18 bp, Artificial Sequence
  Description of Artificial Sequence: Synthetic oligonucleotide
actgtggttgcttccaac

SEQ ID NO: 1650 - DNA, 18 bp, Artificial Sequence
  Description of Artificial Sequence: Synthetic oligonucleotide
ttcctactgtggttgctt

SEQ ID NO: 1651 - DNA, 18 bp, Artificial Sequence
  Description of Artificial Sequence: Synthetic oligonucleotide
actttttcctactgtggt

SEQ ID NO: 1652 - DNA, 18 bp, Artificial Sequence
  Description of Artificial Sequence: Synthetic oligonucleotide
tttctactttttcctact

SEQ ID NO: 1653 - DNA, 18 bp, Artificial Sequence
  Description of Artificial Sequence: Synthetic oligonucleotide
aataatttctactttttc

SEQ ID NO: 1654 - DNA, 18 bp, Artificial Sequence
  Description of Artificial Sequence: Synthetic oligonucleotide
tattaaataatttctact

SEQ ID NO: 1655 - DNA, 18 bp, Artificial Sequence
  Description of Artificial Sequence: Synthetic oligonucleotide
tatgttattaaataattt

SEQ ID NO: 1656 - DNA, 18 bp, Artificial Sequence
  Description of Artificial Sequence: Synthetic oligonucleotide
aacgctatgttattaaat

SEQ ID NO: 1657 - DNA, 18 bp, Artificial Sequence
  Description of Artificial Sequence: Synthetic oligonucleotide
ataggaacgctatgttat

SEQ ID NO: 1658 - DNA, 18 bp, Artificial Sequence
  Description of Artificial Sequence: Synthetic oligonucleotide
gttttataggaacgctat

SEQ ID NO: 1659 - DNA, 18 bp, Artificial Sequence
  Description of Artificial Sequence: Synthetic oligonucleotide
gaatggttttataggaac

SEQ ID NO: 1660 - DNA, 18 bp, Artificial Sequence
  Description of Artificial Sequence: Synthetic oligonucleotide
ctgatgaatggttttata

SEQ ID NO: 1661 - DNA, 18 bp, Artificial Sequence
  Description of Artificial Sequence: Synthetic oligonucleotide
tttttctgatgaatggtt

SEQ ID NO: 1662 - DNA, 18 bp, Artificial Sequence
  Description of Artificial Sequence: Synthetic oligonucleotide
gatgaaagattgattgaa

SEQ ID NO: 1663 - DNA, 18 bp, Artificial Sequence
  Description of Artificial Sequence: Synthetic oligonucleotide
ttcatgatgaaagattga

SEQ ID NO: 1664 - DNA, 18 bp, Artificial Sequence
  Description of Artificial Sequence: Synthetic oligonucleotide
cctgtttcatgatgaaag

SEQ ID NO: 1665 - DNA, 18 bp, Artificial Sequence
  Description of Artificial Sequence: Synthetic oligonucleotide
cttcccctgtttcatgat

SEQ ID NO: 1666 - DNA, 18 bp, Artificial Sequence
  Description of Artificial Sequence: Synthetic oligonucleotide
gattgcttcccctgtttc

SEQ ID NO: 1667 - DNA, 18 bp, Artificial Sequence
  Description of Artificial Sequence: Synthetic oligonucleotide
actatgattgcttcccct

SEQ ID NO: 1668 - DNA, 18 bp, Artificial Sequence
  Description of Artificial Sequence: Synthetic oligonucleotide
catacactatgattgctt

SEQ ID NO: 1669 - DNA, 18 bp, Artificial Sequence
  Description of Artificial Sequence: Synthetic oligonucleotide
tcagacatacactatgat

SEQ ID NO: 1670 - DNA, 18 bp, Artificial Sequence
  Description of Artificial Sequence: Synthetic oligonucleotide
acaactcagacatacact

SEQ ID NO: 1671 - DNA, 18 bp, Artificial Sequence
  Description of Artificial Sequence: Synthetic oligonucleotide
caaagacaactcagacat

SEQ ID NO: 1672 - DNA, 18 bp, Artificial Sequence
  Description of Artificial Sequence: Synthetic oligonucleotide
gtgggcaaagacaactca

SEQ ID NO: 1673 - DNA, 18 bp, Artificial Sequence
  Description of Artificial Sequence: Synthetic oligonucleotide
tccaagtgggcaaagaca

SEQ ID NO: 1674 - DNA, 18 bp, Artificial Sequence
  Description of Artificial Sequence: Synthetic oligonucleotide
tggtttccaagtgggcaa

SEQ ID NO: 1675 - DNA, 18 bp, Artificial Sequence
  Description of Artificial Sequence: Synthetic oligonucleotide
gtgaatggtttccaagtg

SEQ ID NO: 1676 - DNA, 18 bp, Artificial Sequence
  Description of Artificial Sequence: Synthetic oligonucleotide
agactgtgaatggtttcc

SEQ ID NO: 1677 - DNA, 18 bp, Artificial Sequence
  Description of Artificial Sequence: Synthetic oligonucleotide
tgggtagactgtgaatgg

SEQ ID NO: 1678 - DNA, 18 bp, Artificial Sequence
  Description of Artificial Sequence: Synthetic oligonucleotide
ggtcatgggtagactgtg

SEQ ID NO: 1679 - DNA, 18 bp, Artificial Sequence
  Description of Artificial Sequence: Synthetic oligonucleotide
ctaagggtcatgggtaga

SEQ ID NO: 1680 - DNA, 18 bp, Artificial Sequence
  Description of Artificial Sequence: Synthetic oligonucleotide
tgatcctaagggtcatgg

SEQ ID NO: 1681 - DNA, 18 bp, Artificial Sequence
  Description of Artificial Sequence: Synthetic oligonucleotide
ggacttgatcctaagggt

SEQ ID NO: 1682 - DNA, 18 bp, Artificial Sequence
  Description of Artificial Sequence: Synthetic oligonucleotide
atcctggacttgatccta

SEQ ID NO: 1683 - DNA, 18 bp, Artificial Sequence
  Description of Artificial Sequence: Synthetic oligonucleotide
atgatcctggacttgatc

SEQ ID NO: 1684 - DNA, 18 bp, Artificial Sequence
  Description of Artificial Sequence: Synthetic oligonucleotide
aaaccatgatcctggact

SEQ ID NO: 1685 - DNA, 18 bp, Artificial Sequence
  Description of Artificial Sequence: Synthetic oligonucleotide
ctcgaaaaccatgatcct

SEQ ID NO: 1686 - DNA, 18 bp, Artificial Sequence
  Description of Artificial Sequence: Synthetic oligonucleotide
ggatcctcgaaaaccatg

SEQ ID NO: 1687 - DNA, 18 bp, Artificial Sequence
  Description of Artificial Sequence: Synthetic oligonucleotide
cacagggatcctcgaaaa

SEQ ID NO: 1688 - DNA, 18 bp, Artificial Sequence
  Description of Artificial Sequence: Synthetic oligonucleotide
tcggtcacagggatcctc

SEQ ID NO: 1689 - DNA, 18 bp, Artificial Sequence
  Description of Artificial Sequence: Synthetic oligonucleotide
tagattcggtcacaggga

SEQ ID NO: 1690 - DNA, 18 bp, Artificial Sequence
  Description of Artificial Sequence: Synthetic oligonucleotide
taggctagattcggtcac

SEQ ID NO: 1691 - DNA, 18 bp, Artificial Sequence
  Description of Artificial Sequence: Synthetic oligonucleotide
aaatgtaggctagattcg

SEQ ID NO: 1692 - DNA, 18 bp, Artificial Sequence
  Description of Artificial Sequence: Synthetic oligonucleotide
gctggaaatgtaggctag

SEQ ID NO: 1693 - DNA, 18 bp, Artificial Sequence
  Description of Artificial Sequence: Synthetic oligonucleotide
attgtgctggaaatgtag

SEQ ID NO: 1694 - DNA, 18 bp, Artificial Sequence
  Description of Artificial Sequence: Synthetic oligonucleotide
tgtccattgtgctggaaa

SEQ ID NO: 1695 - DNA, 18 bp, Artificial Sequence
  Description of Artificial Sequence: Synthetic oligonucleotide
acaagtgtccattgtgct

SEQ ID NO: 1696 - DNA, 18 bp, Artificial Sequence
  Description of Artificial Sequence: Synthetic oligonucleotide
agtcatacaagtgtccat

SEQ ID NO: 1697 - DNA, 18 bp, Artificial Sequence
  Description of Artificial Sequence: Synthetic oligonucleotide
gccagagtcatacaagtg

SEQ ID NO: 1698 - DNA, 18 bp, Artificial Sequence
  Description of Artificial Sequence: Synthetic oligonucleotide
tgaaggccagagtcatac

SEQ ID NO: 1699 - DNA, 18 bp, Artificial Sequence
  Description of Artificial Sequence: Synthetic oligonucleotide
gagagtgaaggccagagt

SEQ ID NO: 1700 - DNA, 18 bp, Artificial Sequence
  Description of Artificial Sequence: Synthetic oligonucleotide
ccagagagagtgaaggcc

SEQ ID NO: 1701 - DNA, 18 bp, Artificial Sequence
  Description of Artificial Sequence: Synthetic oligonucleotide
aacgcccagagagagtga

SEQ ID NO: 1702 - DNA, 18 bp, Artificial Sequence
  Description of Artificial Sequence: Synthetic oligonucleotide
gaagaaacgcccagagag

SEQ ID NO: 1703 - DNA, 18 bp, Artificial Sequence
  Description of Artificial Sequence: Synthetic oligonucleotide
agcatgaagaaacgccca

SEQ ID NO: 1704 - DNA, 18 bp, Artificial Sequence
  Description of Artificial Sequence: Synthetic oligonucleotide
aaagcagcatgaagaaac

SEQ ID NO: 1705 - DNA, 18 bp, Artificial Sequence
  Description of Artificial Sequence: Synthetic oligonucleotide
ctgagaaagcagcatgaa

SEQ ID NO: 1706 - DNA, 18 bp, Artificial Sequence
  Description of Artificial Sequence: Synthetic oligonucleotide
tacctgagaaagcagcat

SEQ ID NO: 1707 - DNA, 18 bp, Artificial Sequence
  Description of Artificial Sequence: Synthetic oligonucleotide
catcctacctgagaaagc

SEQ ID NO: 1708 - DNA, 18 bp, Artificial Sequence
  Description of Artificial Sequence: Synthetic oligonucleotide
aatgtcatcctacctgag

SEQ ID NO: 1709 - DNA, 18 bp, Artificial Sequence
  Description of Artificial Sequence: Synthetic oligonucleotide
tgggaaatgtcatcctac

SEQ ID NO: 1710 - DNA, 18 bp, Artificial Sequence
  Description of Artificial Sequence: Synthetic oligonucleotide
ggaagtgggaaatgtcat

SEQ ID NO: 1711 - DNA, 18 bp, Artificial Sequence
  Description of Artificial Sequence: Synthetic oligonucleotide
gtgaaggaagtgggaaat

SEQ ID NO: 1712 - DNA, 18 bp, Artificial Sequence
  Description of Artificial Sequence: Synthetic oligonucleotide
caccagtgaaggaagtgg

SEQ ID NO: 1713 - DNA, 18 bp, Artificial Sequence
  Description of Artificial Sequence: Synthetic oligonucleotide
gtgttcaccagtgaagga

SEQ ID NO: 1714 - DNA, 18 bp, Artificial Sequence
  Description of Artificial Sequence: Synthetic oligonucleotide
agtaggtgttcaccagtg

SEQ ID NO: 1715 - DNA, 18 bp, Artificial Sequence
  Description of Artificial Sequence: Synthetic oligonucleotide
ttgtgagtaggtgttcac

SEQ ID NO: 1716 - DNA, 18 bp, Artificial Sequence
  Description of Artificial Sequence: Synthetic oligonucleotide
tcaaattgtgagtaggtg

SEQ ID NO: 1717 - DNA, 18 bp, Artificial Sequence
  Description of Artificial Sequence: Synthetic oligonucleotide
gagtttcaaattgtgagt

SEQ ID NO: 1718 - DNA, 18 bp, Artificial Sequence
  Description of Artificial Sequence: Synthetic oligonucleotide
agtaggagtttcaaattg

SEQ ID NO: 1719 - DNA, 18 bp, Artificial Sequence
  Description of Artificial Sequence: Synthetic oligonucleotide
tcctgagtaggagtttca

SEQ ID NO: 1720 - DNA, 18 bp, Artificial Sequence
  Description of Artificial Sequence: Synthetic oligonucleotide
gcagctcctgagtaggag

SEQ ID NO: 1721 - DNA, 18 bp, Artificial Sequence
  Description of Artificial Sequence: Synthetic oligonucleotide
aagaggcagctcctgagt

SEQ ID NO: 1722 - DNA, 18 bp, Artificial Sequence
  Description of Artificial Sequence: Synthetic oligonucleotide
ctcaaaagaggcagctcc

SEQ ID NO: 1723 - DNA, 18 bp, Artificial Sequence
  Description of Artificial Sequence: Synthetic oligonucleotide
gctttctcaaaagaggca

SEQ ID NO: 1724 - DNA, 18 bp, Artificial Sequence
  Description of Artificial Sequence: Synthetic oligonucleotide
aaaaagctttctcaaaag

SEQ ID NO: 1725 - DNA, 18 bp, Artificial Sequence
  Description of Artificial Sequence: Synthetic oligonucleotide
gagtcaaaaagctttctc

SEQ ID NO: 1726 - DNA, 18 bp, Artificial Sequence
  Description of Artificial Sequence: Synthetic oligonucleotide
aggaggagtcaaaaagct

SEQ ID NO: 1727 - DNA, 18 bp, Artificial Sequence
  Description of Artificial Sequence: Synthetic oligonucleotide
gttccaatatattgattc

SEQ ID NO: 1728 - DNA, 18 bp, Artificial Sequence
  Description of Artificial Sequence: Synthetic oligonucleotide
atggtgttccaatatatt

SEQ ID NO: 1729 - DNA, 18 bp, Artificial Sequence
  Description of Artificial Sequence: Synthetic oligonucleotide
taggaatggtgttccaat

SEQ ID NO: 1730 - DNA, 18 bp, Artificial Sequence
  Description of Artificial Sequence: Synthetic oligonucleotide
aacagtaggaatggtgtt

SEQ ID NO: 1731 - DNA, 18 bp, Artificial Sequence
  Description of Artificial Sequence: Synthetic oligonucleotide
actttaacagtaggaatg

SEQ ID NO: 1732 - DNA, 18 bp, Artificial Sequence
  Description of Artificial Sequence: Synthetic oligonucleotide
tgaaaactttaacagtag

SEQ ID NO: 1733 - DNA, 18 bp, Artificial Sequence
  Description of Artificial Sequence: Synthetic oligonucleotide
ttaagtgaaaactttaac

SEQ ID NO: 1734 - DNA, 18 bp, Artificial Sequence
  Description of Artificial Sequence: Synthetic oligonucleotide
tactcttaagtgaaaact

SEQ ID NO: 1735 - DNA, 18 bp, Artificial Sequence
  Description of Artificial Sequence: Synthetic oligonucleotide
gtttatactcttaagtga

SEQ ID NO: 1736 - DNA, 18 bp, Artificial Sequence
  Description of Artificial Sequence: Synthetic oligonucleotide
atgaagtttatactctta

SEQ ID NO: 1737 - DNA, 18 bp, Artificial Sequence
  Description of Artificial Sequence: Synthetic oligonucleotide
agctgatgaagtttatac

SEQ ID NO: 1738 - DNA, 18 bp, Artificial Sequence
  Description of Artificial Sequence: Synthetic oligonucleotide
tagaaagctgatgaagtt

SEQ ID NO: 1739 - DNA, 18 bp, Artificial Sequence
  Description of Artificial Sequence: Synthetic oligonucleotide
cctaatagaaagctgatg

SEQ ID NO: 1740 - DNA, 18 bp, Artificial Sequence
  Description of Artificial Sequence: Synthetic oligonucleotide
taagtcctaatagaaagc

SEQ ID NO: 1741 - DNA, 18 bp, Artificial Sequence
  Description of Artificial Sequence: Synthetic oligonucleotide
caaaataagtcctaatag

SEQ ID NO: 1742 - DNA, 18 bp, Artificial Sequence
  Description of Artificial Sequence: Synthetic oligonucleotide
aattacaaaataagtcct

SEQ ID NO: 1743 - DNA, 18 bp, Artificial Sequence
  Description of Artificial Sequence: Synthetic oligonucleotide
aagccaattacaaaataa

SEQ ID NO: 1744 - DNA, 18 bp, Artificial Sequence
  Description of Artificial Sequence: Synthetic oligonucleotide
ctaagaagccaattacaa

SEQ ID NO: 1745 - DNA, 18 bp, Artificial Sequence
  Description of Artificial Sequence: Synthetic oligonucleotide
gatgcctaagaagccaat

SEQ ID NO: 1746 - DNA, 18 bp, Artificial Sequence
  Description of Artificial Sequence: Synthetic oligonucleotide
agaaggatgcctaagaag

SEQ ID NO: 1747 - DNA, 18 bp, Artificial Sequence
  Description of Artificial Sequence: Synthetic oligonucleotide
tttaaagaaggatgccta

SEQ ID NO: 1748 - DNA, 18 bp, Artificial Sequence
  Description of Artificial Sequence: Synthetic oligonucleotide
tcttttaaagaaggatgc

SEQ ID NO: 1749 - DNA, 18 bp, Artificial Sequence
  Description of Artificial Sequence: Synthetic oligonucleotide
atttctcttttaaagaag

SEQ ID NO: 1750 - DNA, 18 bp, Artificial Sequence
  Description of Artificial Sequence: Synthetic oligonucleotide
cgtggatttctcttttaa

SEQ ID NO: 1751 - DNA, 18 bp, Artificial Sequence
  Description of Artificial Sequence: Synthetic oligonucleotide
gctaacgtggatttctct

SEQ ID NO: 1752 - DNA, 18 bp, Artificial Sequence
  Description of Artificial Sequence: Synthetic oligonucleotide
ggagagctaacgtggatt

SEQ ID NO: 1753 - DNA, 18 bp, Artificial Sequence
  Description of Artificial Sequence: Synthetic oligonucleotide
ctcaaggagagctaacgt

SEQ ID NO: 1754 - DNA, 18 bp, Artificial Sequence
  Description of Artificial Sequence: Synthetic oligonucleotide
gagacctcaaggagagct

SEQ ID NO: 1755 - DNA, 18 bp, Artificial Sequence
  Description of Artificial Sequence: Synthetic oligonucleotide
aactcgagacctcaagga

SEQ ID NO: 1756 - DNA, 18 bp, Artificial Sequence
  Description of Artificial Sequence: Synthetic oligonucleotide
gagggaactcgagacctc

SEQ ID NO: 1757 - DNA, 18 bp, Artificial Sequence
  Description of Artificial Sequence: Synthetic oligonucleotide
cctccagccgagggaact

SEQ ID NO: 1758 - DNA, 18 bp, Artificial Sequence
  Description of Artificial Sequence: Synthetic oligonucleotide
ctgtgcctccagccgagg

SEQ ID NO: 1759 - DNA, 18 bp, Artificial Sequence
  Description of Artificial Sequence: Synthetic oligonucleotide
tgaacctgtgcctccagc

SEQ ID NO: 1760 - DNA, 18 bp, Artificial Sequence
  Description of Artificial Sequence: Synthetic oligonucleotide
tccactgaacctgtgcct

SEQ ID NO: 1761 - DNA, 18 bp, Artificial Sequence
  Description of Artificial Sequence: Synthetic oligonucleotide
tggtctccactgaacctg

SEQ ID NO: 1762 - DNA, 18 bp, Artificial Sequence
  Description of Artificial Sequence: Synthetic oligonucleotide
ttatttggtctccactga

SEQ ID NO: 1763 - DNA, 18 bp, Artificial Sequence
  Description of Artificial Sequence: Synthetic oligonucleotide
ctgcattatttggtctcc

SEQ ID NO: 1764 - DNA, 18 bp, Artificial Sequence
  Description of Artificial Sequence: Synthetic oligonucleotide
cacctgcattatttggtc

SEQ ID NO: 1765 - DNA, 18 bp, Artificial Sequence
  Description of Artificial Sequence: Synthetic oligonucleotide
taattcacctgcattatt

SEQ ID NO: 1766 - DNA, 18 bp, Artificial Sequence
  Description of Artificial Sequence: Synthetic oligonucleotide
gaaggtaattcacctgca

SEQ ID NO: 1767 - DNA, 18 bp, Artificial Sequence
  Description of Artificial Sequence: Synthetic oligonucleotide
gccacgaaggtaattcac

SEQ ID NO: 1768 - DNA, 18 bp, Artificial Sequence
  Description of Artificial Sequence: Synthetic oligonucleotide
taatggccacgaaggtaa

SEQ ID NO: 1769 - DNA, 18 bp, Artificial Sequence
  Description of Artificial Sequence: Synthetic oligonucleotide
ggcagtaatggccacgaa

SEQ ID NO: 1770 - DNA, 18 bp, Artificial Sequence
  Description of Artificial Sequence: Synthetic oligonucleotide
ttggaggcagtaatggcc

SEQ ID NO: 1771 - DNA, 18 bp, Artificial Sequence
  Description of Artificial Sequence: Synthetic oligonucleotide
cttcgttggaggcagtaa

SEQ ID NO: 1772 - DNA, 18 bp, Artificial Sequence
  Description of Artificial Sequence: Synthetic oligonucleotide
acacacttcgttggaggc

SEQ ID NO: 1773 - DNA, 18 bp, Artificial Sequence
  Description of Artificial Sequence: Synthetic oligonucleotide
aataaacacacttcgttg

SEQ ID NO: 1774 - DNA, 18 bp, Artificial Sequence
  Description of Artificial Sequence: Synthetic oligonucleotide
ttcttaataaacacactt

SEQ ID NO: 1775 - DNA, 18 bp, Artificial Sequence
  Description of Artificial Sequence: Synthetic oligonucleotide
aactgttcttaataaaca

SEQ ID NO: 1776 - DNA, 18 bp, Artificial Sequence
  Description of Artificial Sequence: Synthetic oligonucleotide
ataagaactgttcttaat

SEQ ID NO: 1777 - DNA, 18 bp, Artificial Sequence
  Description of Artificial Sequence: Synthetic oligonucleotide
atgacataagaactgttc

SEQ ID NO: 1778 - DNA, 18 bp, Artificial Sequence
  Description of Artificial Sequence: Synthetic oligonucleotide
taagaatgacataagaac

SEQ ID NO: 1779 - DNA, 18 bp, Artificial Sequence
  Description of Artificial Sequence: Synthetic oligonucleotide
taccttaagaatgacata

SEQ ID NO: 1780 - DNA, 18 bp, Artificial Sequence
  Description of Artificial Sequence: Synthetic oligonucleotide
ctacctaccttaagaatg

SEQ ID NO: 1781 - DNA, 18 bp, Artificial Sequence
  Description of Artificial Sequence: Synthetic oligonucleotide
taaccctacctaccttaa

SEQ ID NO: 1782 - DNA, 18 bp, Artificial Sequence
  Description of Artificial Sequence: Synthetic oligonucleotide
agtattaaccctacctac

SEQ ID NO: 1783 - DNA, 18 bp, Artificial Sequence
  Description of Artificial Sequence: Synthetic oligonucleotide
tggagagtattaacccta

SEQ ID NO: 1784 - DNA, 18 bp, Artificial Sequence
  Description of Artificial Sequence: Synthetic oligonucleotide
tttgctggagagtattaa

SEQ ID NO: 1785 - DNA, 18 bp, Artificial Sequence
  Description of Artificial Sequence: Synthetic oligonucleotide
cctggaggaaggccaagg

SEQ ID NO: 1786 - DNA, 18 bp, Artificial Sequence
  Description of Artificial Sequence: Synthetic oligonucleotide
ccttccctggaggaaggc

SEQ ID NO: 1787 - DNA, 18 bp, Artificial Sequence
  Description of Artificial Sequence: Synthetic oligonucleotide
ggatgccttccctggagg

SEQ ID NO: 1788 - DNA, 18 bp, Artificial Sequence
  Description of Artificial Sequence: Synthetic oligonucleotide
atgctggatgccttccct

SEQ ID NO: 1789 - DNA, 18 bp, Artificial Sequence
  Description of Artificial Sequence: Synthetic oligonucleotide
tctggatgctggatgcct

SEQ ID NO: 1790 - DNA, 18 bp, Artificial Sequence
  Description of Artificial Sequence: Synthetic oligonucleotide
ttacctctggatgctgga

SEQ ID NO: 1791 - DNA, 18 bp, Artificial Sequence
  Description of Artificial Sequence: Synthetic oligonucleotide
aatccttacctctggatg

SEQ ID NO: 1792 - DNA, 18 bp, Artificial Sequence
  Description of Artificial Sequence: Synthetic oligonucleotide
aggagaatccttacctct

SEQ ID NO: 1793 - DNA, 18 bp, Artificial Sequence
  Description of Artificial Sequence: Synthetic oligonucleotide
tccacaggagaatcctta

SEQ ID NO: 1794 - DNA, 18 bp, Artificial Sequence
  Description of Artificial Sequence: Synthetic oligonucleotide
caaggtccacaggagaat

SEQ ID NO: 1795 - DNA, 18 bp, Artificial Sequence
  Description of Artificial Sequence: Synthetic oligonucleotide
ggtcacaaggtccacagg

SEQ ID NO: 1796 - DNA, 18 bp, Artificial Sequence
  Description of Artificial Sequence: Synthetic oligonucleotide
tcagaggtcacaaggtcc

SEQ ID NO: 1797 - DNA, 18 bp, Artificial Sequence
  Description of Artificial Sequence: Synthetic oligonucleotide
aggagtcagaggtcacaa

SEQ ID NO: 1798 - DNA, 18 bp, Artificial Sequence
  Description of Artificial Sequence: Synthetic oligonucleotide
gggggaggagtcagaggt

SEQ ID NO: 1799 - DNA, 18 bp, Artificial Sequence
  Description of Artificial Sequence: Synthetic oligonucleotide
aagaagggggaggagtca

SEQ ID NO: 1800 - DNA, 18 bp, Artificial Sequence
  Description of Artificial Sequence: Synthetic oligonucleotide
gggggaagaagggggagg

SEQ ID NO: 1801 - DNA, 18 bp, Artificial Sequence
  Description of Artificial Sequence: Synthetic oligonucleotide
actctgggggaagaaggg

SEQ ID NO: 1802 - DNA, 18 bp, Artificial Sequence
  Description of Artificial Sequence: Synthetic oligonucleotide
cttgaactctgggggaag

SEQ ID NO: 1803 - DNA, 18 bp, Artificial Sequence
  Description of Artificial Sequence: Synthetic oligonucleotide
gcctccttgaactctggg

SEQ ID NO: 1804 - DNA, 18 bp, Artificial Sequence
  Description of Artificial Sequence: Synthetic oligonucleotide
agaaggcctccttgaact

SEQ ID NO: 1805 - DNA, 18 bp, Artificial Sequence
  Description of Artificial Sequence: Synthetic oligonucleotide
gagggagaaggcctcctt

SEQ ID NO: 1806 - DNA, 18 bp, Artificial Sequence
  Description of Artificial Sequence: Synthetic oligonucleotide
aaagagggagaaggcctc

SEQ ID NO: 1807 - DNA, 18 bp, Artificial Sequence
  Description of Artificial Sequence: Synthetic oligonucleotide
ttgtcaaagagggagaag

SEQ ID NO: 1808 - DNA, 18 bp, Artificial Sequence
  Description of Artificial Sequence: Synthetic oligonucleotide
catccttgtcaaagaggg

SEQ ID NO: 1809 - DNA, 18 bp, Artificial Sequence
  Description of Artificial Sequence: Synthetic oligonucleotide
atctccatccttgtcaaa

SEQ ID NO: 1810 - DNA, 18 bp, Artificial Sequence
  Description of Artificial Sequence: Synthetic oligonucleotide
gtgccatctccatccttg

SEQ ID NO: 1811 - DNA, 18 bp, Artificial Sequence
  Description of Artificial Sequence: Synthetic oligonucleotide
tgatagtgccatctccat

SEQ ID NO: 1812 - DNA, 18 bp, Artificial Sequence
  Description of Artificial Sequence: Synthetic oligonucleotide
ggtggtgatagtgccatc

SEQ ID NO: 1813 - DNA, 18 bp, Artificial Sequence
  Description of Artificial Sequence: Synthetic oligonucleotide
tccttggtggtgatagtg

SEQ ID NO: 1814 - DNA, 18 bp, Artificial Sequence
  Description of Artificial Sequence: Synthetic oligonucleotide
ccaactccttggtggtga

SEQ ID NO: 1815 - DNA, 18 bp, Artificial Sequence
  Description of Artificial Sequence: Synthetic oligonucleotide
tgtccccaactccttggt

SEQ ID NO: 1816 - DNA, 18 bp, Artificial Sequence
  Description of Artificial Sequence: Synthetic oligonucleotide
atcactgtccccaactcc

SEQ ID NO: 1817 - DNA, 18 bp, Artificial Sequence
  Description of Artificial Sequence: Synthetic oligonucleotide
atctcatcactgtcccca

SEQ ID NO: 1818 - DNA, 18 bp, Artificial Sequence
  Description of Artificial Sequence: Synthetic oligonucleotide
cagggatctcatcactgt

SEQ ID NO: 1819 - DNA, 18 bp, Artificial Sequence
  Description of Artificial Sequence: Synthetic oligonucleotide
ttctgtcccagggatctc

SEQ ID NO: 1820 - DNA, 18 bp, Artificial Sequence
  Description of Artificial Sequence: Synthetic oligonucleotide
tggggttctgtcccaggg

SEQ ID NO: 1821 - DNA, 18 bp, Artificial Sequence
  Description of Artificial Sequence: Synthetic oligonucleotide
ttcagtggggttctgtcc

SEQ ID NO: 1822 - DNA, 18 bp, Artificial Sequence
  Description of Artificial Sequence: Synthetic oligonucleotide
tctgcttcagtggggttc

SEQ ID NO: 1823 - DNA, 18 bp, Artificial Sequence
  Description of Artificial Sequence: Synthetic oligonucleotide
gcagctctgcttcagtgg

SEQ ID NO: 1824 - DNA, 18 bp, Artificial Sequence
  Description of Artificial Sequence: Synthetic oligonucleotide
atcctgcagctctgcttc

SEQ ID NO: 1825 - DNA, 18 bp, Artificial Sequence
  Description of Artificial Sequence: Synthetic oligonucleotide
atcatatcctgcagctct

SEQ ID NO: 1826 - DNA, 18 bp, Artificial Sequence
  Description of Artificial Sequence: Synthetic oligonucleotide
cattgatcatatcctgca

SEQ ID NO: 1827 - DNA, 18 bp, Artificial Sequence
  Description of Artificial Sequence: Synthetic oligonucleotide
cacctcattgatcatatc

SEQ ID NO: 1828 - DNA, 18 bp, Artificial Sequence
  Description of Artificial Sequence: Synthetic oligonucleotide
gcatccacctcattgatc

SEQ ID NO: 1829 - DNA, 18 bp, Artificial Sequence
  Description of Artificial Sequence: Synthetic oligonucleotide
catctgcatccacctcat

SEQ ID NO: 1830 - DNA, 18 bp, Artificial Sequence
  Description of Artificial Sequence: Synthetic oligonucleotide
caccatctgcatccacct

SEQ ID NO: 1831 - DNA, 18 bp, Artificial Sequence
  Description of Artificial Sequence: Synthetic oligonucleotide
gggctcaccatctgcatc

SEQ ID NO: 1832 - DNA, 18 bp, Artificial Sequence
  Description of Artificial Sequence: Synthetic oligonucleotide
ctgtggggctcaccatct

SEQ ID NO: 1833 - DNA, 18 bp, Artificial Sequence
  Description of Artificial Sequence: Synthetic oligonucleotide
gcgctctgtggggctcac

SEQ ID NO: 1834 - DNA, 18 bp, Artificial Sequence
  Description of Artificial Sequence: Synthetic oligonucleotide
cccacgcgctctgtgggg

SEQ ID NO: 1835 - DNA, 18 bp, Artificial Sequence
  Description of Artificial Sequence: Synthetic oligonucleotide
ggctgcccacgcgctctg

SEQ ID NO: 1836 - DNA, 18 bp, Artificial Sequence
  Description of Artificial Sequence: Synthetic oligonucleotide
agcagggctgcccacgcg

SEQ ID NO: 1837 - DNA, 18 bp, Artificial Sequence
  Description of Artificial Sequence: Synthetic oligonucleotide
ccaggagcagggctgccc

SEQ ID NO: 1838 - DNA, 18 bp, Artificial Sequence
  Description of Artificial Sequence: Synthetic oligonucleotide
ggtgaccaggagcagggc

SEQ ID NO: 1839 - DNA, 18 bp, Artificial Sequence
  Description of Artificial Sequence: Synthetic oligonucleotide
ctcggggtgaccaggagc

SEQ ID NO: 1840 - DNA, 18 bp, Artificial Sequence
  Description of Artificial Sequence: Synthetic oligonucleotide
agtcactcggggtgacca

SEQ ID NO: 1841 - DNA, 18 bp, Artificial Sequence
  Description of Artificial Sequence: Synthetic oligonucleotide
cctgcagtcactcggggt

SEQ ID NO: 1842 - DNA, 18 bp, Artificial Sequence
  Description of Artificial Sequence: Synthetic oligonucleotide
ggctccctgcagtcactc

SEQ ID NO: 1843 - DNA, 18 bp, Artificial Sequence
  Description of Artificial Sequence: Synthetic oligonucleotide
agagaggctccctgcagt

SEQ ID NO: 1844 - DNA, 18 bp, Artificial Sequence
  Description of Artificial Sequence: Synthetic oligonucleotide
ccctgagagaggctccct

SEQ ID NO: 1845 - DNA, 18 bp, Artificial Sequence
  Description of Artificial Sequence: Synthetic oligonucleotide
catcaccctgagagaggc

SEQ ID NO: 1846 - DNA, 18 bp, Artificial Sequence
  Description of Artificial Sequence: Synthetic oligonucleotide
tcatccatcaccctgaga

SEQ ID NO: 1847 - DNA, 18 bp, Artificial Sequence
  Description of Artificial Sequence: Synthetic oligonucleotide
cgggctcatccatcaccc

SEQ ID NO: 1848 - DNA, 18 bp, Artificial Sequence
  Description of Artificial Sequence: Synthetic oligonucleotide
agacacgggctcatccat

SEQ ID NO: 1849 - DNA, 18 bp, Artificial Sequence
  Description of Artificial Sequence: Synthetic oligonucleotide
ctgagagacacgggctca

SEQ ID NO: 1850 - DNA, 18 bp, Artificial Sequence
  Description of Artificial Sequence: Synthetic oligonucleotide
gggccctgagagacacgg

SEQ ID NO: 1851 - DNA, 18 bp, Artificial Sequence
  Description of Artificial Sequence: Synthetic oligonucleotide
ctctcacccatcaaattc

SEQ ID NO: 1852 - DNA, 18 bp, Artificial Sequence
  Description of Artificial Sequence: Synthetic oligonucleotide
gcattctctcacccatca

SEQ ID NO: 1853 - DNA, 18 bp, Artificial Sequence
  Description of Artificial Sequence: Synthetic oligonucleotide
ctgtagcattctctcacc

SEQ ID NO: 1854 - DNA, 18 bp, Artificial Sequence
  Description of Artificial Sequence: Synthetic oligonucleotide
tgtacctgtagcattctc

SEQ ID NO: 1855 - DNA, 18 bp, Artificial Sequence
  Description of Artificial Sequence: Synthetic oligonucleotide
ttctttgtacctgtagca

SEQ ID NO: 1856 - DNA, 18 bp, Artificial Sequence
  Description of Artificial Sequence: Synthetic oligonucleotide
attatttctttgtacctg

SEQ ID NO: 1857 - DNA, 18 bp, Artificial Sequence
  Description of Artificial Sequence: Synthetic oligonucleotide
tactcattatttctttgt

SEQ ID NO: 1858 - DNA, 18 bp, Artificial Sequence
  Description of Artificial Sequence: Synthetic oligonucleotide
acaaatactcattatttc

SEQ ID NO: 1859 - DNA, 18 bp, Artificial Sequence
  Description of Artificial Sequence: Synthetic oligonucleotide
cttcaacaaatactcatt

SEQ ID NO: 1860 - DNA, 18 bp, Artificial Sequence
  Description of Artificial Sequence: Synthetic oligonucleotide
catgtcttcaacaaatac

SEQ ID NO: 1861 - DNA, 18 bp, Artificial Sequence
  Description of Artificial Sequence: Synthetic oligonucleotide
cttaccatgtcttcaaca

SEQ ID NO: 1862 - DNA, 18 bp, Artificial Sequence
  Description of Artificial Sequence: Synthetic oligonucleotide
tctgtcttaccatgtctt

SEQ ID NO: 1863 - DNA, 18 bp, Artificial Sequence
  Description of Artificial Sequence: Synthetic oligonucleotide
tacattctgtcttaccat

SEQ ID NO: 1864 - DNA, 18 bp, Artificial Sequence
  Description of Artificial Sequence: Synthetic oligonucleotide
gaaaatacattctgtctt

SEQ ID NO: 1865 - DNA, 18 bp, Artificial Sequence
  Description of Artificial Sequence: Synthetic oligonucleotide
cccttgaaaatacattct

SEQ ID NO: 1866 - DNA, 18 bp, Artificial Sequence
  Description of Artificial Sequence: Synthetic oligonucleotide
aaacacccttgaaaatac

SEQ ID NO: 1867 - DNA, 18 bp, Artificial Sequence
  Description of Artificial Sequence: Synthetic oligonucleotide
atgtgaaacacccttgaa

SEQ ID NO: 1868 - DNA, 18 bp, Artificial Sequence
  Description of Artificial Sequence: Synthetic oligonucleotide
ctgtaatgtgaaacaccc

SEQ ID NO: 1869 - DNA, 18 bp, Artificial Sequence
  Description of Artificial Sequence: Synthetic oligonucleotide
aagctctgtaatgtgaaa

SEQ ID NO: 1870 - DNA, 18 bp, Artificial Sequence
  Description of Artificial Sequence: Synthetic oligonucleotide
agacaaagctctgtaatg

SEQ ID NO: 1871 - DNA, 18 bp, Artificial Sequence
  Description of Artificial Sequence: Synthetic oligonucleotide
gctttagacaaagctctg

SEQ ID NO: 1872 - DNA, 18 bp, Artificial Sequence
  Description of Artificial Sequence: Synthetic oligonucleotide
cttgctttagacaaagct

SEQ ID NO: 1873 - DNA, 18 bp, Artificial Sequence
  Description of Artificial Sequence: Synthetic oligonucleotide
ttgcccttgctttagaca

SEQ ID NO: 1874 - DNA, 18 bp, Artificial Sequence
  Description of Artificial Sequence: Synthetic oligonucleotide
gagttttgcccttgcttt

SEQ ID NO: 1875 - DNA, 18 bp, Artificial Sequence
  Description of Artificial Sequence: Synthetic oligonucleotide
ttaaagagttttgccctt

SEQ ID NO: 1876 - DNA, 18 bp, Artificial Sequence
  Description of Artificial Sequence: Synthetic oligonucleotide
acagcttaaagagttttg

SEQ ID NO: 1877 - DNA, 18 bp, Artificial Sequence
  Description of Artificial Sequence: Synthetic oligonucleotide
tgggcacagcttaaagag

SEQ ID NO: 1878 - DNA, 18 bp, Artificial Sequence
  Description of Artificial Sequence: Synthetic oligonucleotide
aactctgggcacagctta

SEQ ID NO: 1879 - DNA, 18 bp, Artificial Sequence
  Description of Artificial Sequence: Synthetic oligonucleotide
ccttcaactctgggcaca

SEQ ID NO: 1880 - DNA, 18 bp, Artificial Sequence
  Description of Artificial Sequence: Synthetic oligonucleotide
agactccttcaactctgg

SEQ ID NO: 1881 - DNA, 18 bp, Artificial Sequence
  Description of Artificial Sequence: Synthetic oligonucleotide
tataaagactccttcaac

SEQ ID NO: 1882 - DNA, 18 bp, Artificial Sequence
  Description of Artificial Sequence: Synthetic oligonucleotide
agaaatataaagactcct

SEQ ID NO: 1883 - DNA, 18 bp, Artificial Sequence
  Description of Artificial Sequence: Synthetic oligonucleotide
ctatcagaaatataaaga

SEQ ID NO: 1884 - DNA, 18 bp, Artificial Sequence
  Description of Artificial Sequence: Synthetic oligonucleotide
gtcttctatcagaaatat

SEQ ID NO: 1885 - DNA, 18 bp, Artificial Sequence
  Description of Artificial Sequence: Synthetic oligonucleotide
ccactgtcttctatcaga

SEQ ID NO: 1886 - DNA, 18 bp, Artificial Sequence
  Description of Artificial Sequence: Synthetic oligonucleotide
ttttgccactgtcttcta

SEQ ID NO: 1887 - DNA, 18 bp, Artificial Sequence
  Description of Artificial Sequence: Synthetic oligonucleotide
tttttttttgccactgtc

SEQ ID NO: 1888 - DNA, 18 bp, Artificial Sequence
  Description of Artificial Sequence: Synthetic oligonucleotide
cgccttttttttttgcca

SEQ ID NO: 1889 - DNA, 18 bp, Artificial Sequence
  Description of Artificial Sequence: Synthetic oligonucleotide
tcttacgccttttttttt

SEQ ID NO: 1890 - DNA, 18 bp, Artificial Sequence
  Description of Artificial Sequence: Synthetic oligonucleotide
aaaattcttacgcctttt

SEQ ID NO: 1891 - DNA, 18 bp, Artificial Sequence
  Description of Artificial Sequence: Synthetic oligonucleotide
gcttcaaaattcttacgc

SEQ ID NO: 1892 - DNA, 18 bp, Artificial Sequence
  Description of Artificial Sequence: Synthetic oligonucleotide
acatagcttcaaaattct

SEQ ID NO: 1893 - DNA, 18 bp, Artificial Sequence
  Description of Artificial Sequence: Synthetic oligonucleotide
tttgaacatagcttcaaa

SEQ ID NO: 1894 - DNA, 18 bp, Artificial Sequence
  Description of Artificial Sequence: Synthetic oligonucleotide
atacctttgaacatagct

SEQ ID NO: 1895 - DNA, 18 bp, Artificial Sequence
  Description of Artificial Sequence: Synthetic oligonucleotide
gaaggatacctttgaaca

SEQ ID NO: 1896 - DNA, 18 bp, Artificial Sequence
  Description of Artificial Sequence: Synthetic oligonucleotide
atccactctgaaggatac

SEQ ID NO: 1897 - DNA, 18 bp, Artificial Sequence
  Description of Artificial Sequence: Synthetic oligonucleotide
atccaatccactctgaag

SEQ ID NO: 1898 - DNA, 18 bp, Artificial Sequence
  Description of Artificial Sequence: Synthetic oligonucleotide
aagttatccaatccactc

SEQ ID NO: 1899 - DNA, 18 bp, Artificial Sequence
  Description of Artificial Sequence: Synthetic oligonucleotide
tcacgaagttatccaatc

SEQ ID NO: 1900 - DNA, 18 bp, Artificial Sequence
  Description of Artificial Sequence: Synthetic oligonucleotide
gtttatcacgaagttatc

SEQ ID NO: 1901 - DNA, 18 bp, Artificial Sequence
  Description of Artificial Sequence: Synthetic oligonucleotide
atgtggtttatcacgaag

SEQ ID NO: 1902 - DNA, 18 bp, Artificial Sequence
  Description of Artificial Sequence: Synthetic oligonucleotide
ttagcatgtggtttatca

SEQ ID NO: 1903 - DNA, 18 bp, Artificial Sequence
  Description of Artificial Sequence: Synthetic oligonucleotide
gttctttagcatgtggtt

SEQ ID NO: 1904 - DNA, 18 bp, Artificial Sequence
  Description of Artificial Sequence: Synthetic oligonucleotide
acgttgttctttagcatg

SEQ ID NO: 1905 - DNA, 18 bp, Artificial Sequence
  Description of Artificial Sequence: Synthetic oligonucleotide
cagccacgttgttcttta

SEQ ID NO: 1906 - DNA, 18 bp, Artificial Sequence
  Description of Artificial Sequence: Synthetic oligonucleotide
ttgtccagccacgttgtt

SEQ ID NO: 1907 - DNA, 18 bp, Artificial Sequence
  Description of Artificial Sequence: Synthetic oligonucleotide
gatgtttgtccagccacg

SEQ ID NO: 1908 - DNA, 18 bp, Artificial Sequence
  Description of Artificial Sequence: Synthetic oligonucleotide
ggatagatgtttgtccag

SEQ ID NO: 1909 - DNA, 18 bp, Artificial Sequence
  Description of Artificial Sequence: Synthetic oligonucleotide
ggtctggatagatgtttg

SEQ ID NO: 1910 - DNA, 18 bp, Artificial Sequence
  Description of Artificial Sequence: Synthetic oligonucleotide
actagggtctggatagat

SEQ ID NO: 1911 - DNA, 18 bp, Artificial Sequence
  Description of Artificial Sequence: Synthetic oligonucleotide
taggtactagggtctgga

SEQ ID NO: 1912 - DNA, 18 bp, Artificial Sequence
  Description of Artificial Sequence: Synthetic oligonucleotide
cgtattaggtactagggt

SEQ ID NO: 1913 - DNA, 18 bp, Artificial Sequence
  Description of Artificial Sequence: Synthetic oligonucleotide
tgatccgtattaggtact

SEQ ID NO: 1914 - DNA, 18 bp, Artificial Sequence
  Description of Artificial Sequence: Synthetic oligonucleotide
acttttgatccgtattag

SEQ ID NO: 1915 - DNA, 18 bp, Artificial Sequence
  Description of Artificial Sequence: Synthetic oligonucleotide
ggtcgacttttgatccgt

SEQ ID NO: 1916 - DNA, 18 bp, Artificial Sequence
  Description of Artificial Sequence: Synthetic oligonucleotide
acactggtcgacttttga

SEQ ID NO: 1917 - DNA, 18 bp, Artificial Sequence
  Description of Artificial Sequence: Synthetic oligonucleotide
tttttacactggtcgact

SEQ ID NO: 1918 - DNA, 18 bp, Artificial Sequence
  Description of Artificial Sequence: Synthetic oligonucleotide
tactttttacactggtcg

SEQ ID NO: 1919 - DNA, 18 bp, Artificial Sequence
  Description of Artificial Sequence: Synthetic oligonucleotide
agtcttactttttacact

SEQ ID NO: 1920 - DNA, 18 bp, Artificial Sequence
  Description of Artificial Sequence: Synthetic oligonucleotide
tatccagtcttacttttt

SEQ ID NO: 1921 - DNA, 18 bp, Artificial Sequence
  Description of Artificial Sequence: Synthetic oligonucleotide
taaaatatccagtcttac

SEQ ID NO: 1922 - DNA, 18 bp, Artificial Sequence
  Description of Artificial Sequence: Synthetic oligonucleotide
cattgtaaaatatccagt

SEQ ID NO: 1923 - DNA, 18 bp, Artificial Sequence
  Description of Artificial Sequence: Synthetic oligonucleotide
atatccattgtaaaatat

SEQ ID NO: 1924 - DNA, 18 bp, Artificial Sequence
  Description of Artificial Sequence: Synthetic oligonucleotide
tggaaatatccattgtaa

SEQ ID NO: 1925 - DNA, 18 bp, Artificial Sequence
  Description of Artificial Sequence: Synthetic oligonucleotide
aaaattggaaatatccat

SEQ ID NO: 1926 - DNA, 18 bp, Artificial Sequence
  Description of Artificial Sequence: Synthetic oligonucleotide
tctaaaaaattggaaata

SEQ ID NO: 1927 - DNA, 18 bp, Artificial Sequence
  Description of Artificial Sequence: Synthetic oligonucleotide
cagattctaaaaaattgg

SEQ ID NO: 1928 - DNA, 18 bp, Artificial Sequence
  Description of Artificial Sequence: Synthetic oligonucleotide
ttgaacagattctaaaaa

SEQ ID NO: 1929 - DNA, 18 bp, Artificial Sequence
  Description of Artificial Sequence: Synthetic oligonucleotide
tataattgaacagattct

SEQ ID NO: 1930 - DNA, 18 bp, Artificial Sequence
  Description of Artificial Sequence: Synthetic oligonucleotide
ggacttataattgaacag

SEQ ID NO: 1931 - DNA, 18 bp, Artificial Sequence
  Description of Artificial Sequence: Synthetic oligonucleotide
gcatgggacttataattg

SEQ ID NO: 1932 - DNA, 18 bp, Artificial Sequence
  Description of Artificial Sequence: Synthetic oligonucleotide
tcactgcatgggacttat

SEQ ID NO: 1933 - DNA, 18 bp, Artificial Sequence
  Description of Artificial Sequence: Synthetic oligonucleotide
agaagtcactgcatggga

SEQ ID NO: 1934 - DNA, 18 bp, Artificial Sequence
  Description of Artificial Sequence: Synthetic oligonucleotide
atcacagaagtcactgca

SEQ ID NO: 1935 - DNA, 18 bp, Artificial Sequence
  Description of Artificial Sequence: Synthetic oligonucleotide
gggggatcacagaagtca

SEQ ID NO: 1936 - DNA, 18 bp, Artificial Sequence
  Description of Artificial Sequence: Synthetic oligonucleotide
ggatagggggatcacaga

SEQ ID NO: 1937 - DNA, 18 bp, Artificial Sequence
  Description of Artificial Sequence: Synthetic oligonucleotide
aaggaggatagggggatc

SEQ ID NO: 1938 - DNA, 18 bp, Artificial Sequence
  Description of Artificial Sequence: Synthetic oligonucleotide
aaaggaaggaggataggg

SEQ ID NO: 1939 - DNA, 18 bp, Artificial Sequence
  Description of Artificial Sequence: Synthetic oligonucleotide
tgtgtataactccaagaa

SEQ ID NO: 1940 - DNA, 18 bp, Artificial Sequence
  Description of Artificial Sequence: Synthetic oligonucleotide
gcatatgtgtataactcc

SEQ ID NO: 1941 - DNA, 18 bp, Artificial Sequence
  Description of Artificial Sequence: Synthetic oligonucleotide
tcgatgcatatgtgtata

SEQ ID NO: 1942 - DNA, 18 bp, Artificial Sequence
  Description of Artificial Sequence: Synthetic oligonucleotide
tctactcgatgcatatgt

SEQ ID NO: 1943 - DNA, 18 bp, Artificial Sequence
  Description of Artificial Sequence: Synthetic oligonucleotide
ttgcatctactcgatgca

SEQ ID NO: 1944 - DNA, 18 bp, Artificial Sequence
  Description of Artificial Sequence: Synthetic oligonucleotide
atctattgcatctactcg

SEQ ID NO: 1945 - DNA, 18 bp, Artificial Sequence
  Description of Artificial Sequence: Synthetic oligonucleotide
tattcatctattgcatct

SEQ ID NO: 1946 - DNA, 18 bp, Artificial Sequence
  Description of Artificial Sequence: Synthetic oligonucleotide
aattctattcatctattg

SEQ ID NO: 1947 - DNA, 18 bp, Artificial Sequence
  Description of Artificial Sequence: Synthetic oligonucleotide
atatcaattctattcatc

SEQ ID NO: 1948 - DNA, 18 bp, Artificial Sequence
  Description of Artificial Sequence: Synthetic oligonucleotide
tgattatatcaattctat

SEQ ID NO: 1949 - DNA, 18 bp, Artificial Sequence
  Description of Artificial Sequence: Synthetic oligonucleotide
taaaatgattatatcaat

SEQ ID NO: 1950 - DNA, 18 bp, Artificial Sequence
  Description of Artificial Sequence: Synthetic oligonucleotide
agggttaaaatgattata

SEQ ID NO: 1951 - DNA, 18 bp, Artificial Sequence
  Description of Artificial Sequence: Synthetic oligonucleotide
caaaaagggttaaaatga

SEQ ID NO: 1952 - DNA, 18 bp, Artificial Sequence
  Description of Artificial Sequence: Synthetic oligonucleotide
atgtacaaaaagggttaa

SEQ ID NO: 1953 - DNA, 18 bp, Artificial Sequence
  Description of Artificial Sequence: Synthetic oligonucleotide
gtaacatgtacaaaaagg

SEQ ID NO: 1954 - DNA, 18 bp, Artificial Sequence
  Description of Artificial Sequence: Synthetic oligonucleotide
aataagtaacatgtacaa

SEQ ID NO: 1955 - DNA, 18 bp, Artificial Sequence
  Description of Artificial Sequence: Synthetic oligonucleotide
agtcaaataagtaacatg

SEQ ID NO: 1956 - DNA, 18 bp, Artificial Sequence
  Description of Artificial Sequence: Synthetic oligonucleotide
ctgtcagtcaaataagta

SEQ ID NO: 1957 - DNA, 18 bp, Artificial Sequence
  Description of Artificial Sequence: Synthetic oligonucleotide
tttatctgtcagtcaaat

SEQ ID NO: 1958 - DNA, 18 bp, Artificial Sequence
  Description of Artificial Sequence: Synthetic oligonucleotide
tttattttatctgtcagt

SEQ ID NO: 1959 - DNA, 18 bp, Artificial Sequence
  Description of Artificial Sequence: Synthetic oligonucleotide
ataattttattttatctg

SEQ ID NO: 1960 - DNA, 18 bp, Artificial Sequence
  Description of Artificial Sequence: Synthetic oligonucleotide
ggtataattttattttat

SEQ ID NO: 1961 - DNA, 18 bp, Artificial Sequence
  Description of Artificial Sequence: Synthetic oligonucleotide
ccccaggtataattttat

SEQ ID NO: 1962 - DNA, 18 bp, Artificial Sequence
  Description of Artificial Sequence: Synthetic oligonucleotide
cacagccccaggtataat

SEQ ID NO: 1963 - DNA, 18 bp, Artificial Sequence
  Description of Artificial Sequence: Synthetic oligonucleotide
aagagcacagccccaggt

SEQ ID NO: 1964 - DNA, 18 bp, Artificial Sequence
  Description of Artificial Sequence: Synthetic oligonucleotide
aatataagagcacagccc

SEQ ID NO: 1965 - DNA, 18 bp, Artificial Sequence
  Description of Artificial Sequence: Synthetic oligonucleotide
ggcctaatataagagcac

SEQ ID NO: 1966 - DNA, 18 bp, Artificial Sequence
  Description of Artificial Sequence: Synthetic oligonucleotide
ggaatggcctaatataag

SEQ ID NO: 1967 - DNA, 18 bp, Artificial Sequence
  Description of Artificial Sequence: Synthetic oligonucleotide
tgactggaatggcctaat

SEQ ID NO: 1968 - DNA, 18 bp, Artificial Sequence
  Description of Artificial Sequence: Synthetic oligonucleotide
ttggctgactggaatggc

SEQ ID NO: 1969 - DNA, 18 bp, Artificial Sequence
  Description of Artificial Sequence: Synthetic oligonucleotide
atctgttggctgactgga

SEQ ID NO: 1970 - DNA, 18 bp, Artificial Sequence
  Description of Artificial Sequence: Synthetic oligonucleotide
gtccttccatctgttggc

SEQ ID NO: 1971 - DNA, 18 bp, Artificial Sequence
  Description of Artificial Sequence: Synthetic oligonucleotide
atgtggtccttccatctg

SEQ ID NO: 1972 - DNA, 18 bp, Artificial Sequence
  Description of Artificial Sequence: Synthetic oligonucleotide
ggaagatgtggtccttcc

SEQ ID NO: 1973 - DNA, 18 bp, Artificial Sequence
  Description of Artificial Sequence: Synthetic oligonucleotide
tgttaggaagatgtggtc

SEQ ID NO: 1974 - DNA, 18 bp, Artificial Sequence
  Description of Artificial Sequence: Synthetic oligonucleotide
tttcttgttaggaagatg

SEQ ID NO: 1975 - DNA, 18 bp, Artificial Sequence
  Description of Artificial Sequence: Synthetic oligonucleotide
tgttttttcttgttagga

SEQ ID NO: 1976 - DNA, 18 bp, Artificial Sequence
  Description of Artificial Sequence: Synthetic oligonucleotide
ttttgtgttttttcttgt

SEQ ID NO: 1977 - DNA, 18 bp, Artificial Sequence
  Description of Artificial Sequence: Synthetic oligonucleotide
ctgttttttgtgtttttt

SEQ ID NO: 1978 - DNA, 18 bp, Artificial Sequence
  Description of Artificial Sequence: Synthetic oligonucleotide
cacctgttttttgtgttt

SEQ ID NO: 1979 - DNA, 18 bp, Artificial Sequence
  Description of Artificial Sequence: Synthetic oligonucleotide
aacatcacctgttttttg

SEQ ID NO: 1980 - DNA, 18 bp, Artificial Sequence
  Description of Artificial Sequence: Synthetic oligonucleotide
tgaacaacatcacctgtt

SEQ ID NO: 1981 - DNA, 18 bp, Artificial Sequence
  Description of Artificial Sequence: Synthetic oligonucleotide
tacaatgaacaacatcac

SEQ ID NO: 1982 - DNA, 18 bp, Artificial Sequence
  Description of Artificial Sequence: Synthetic oligonucleotide
cctagtacaatgaacaac

SEQ ID NO: 1983 - DNA, 18 bp, Artificial Sequence
  Description of Artificial Sequence: Synthetic oligonucleotide
gatgccctagtacaatga

SEQ ID NO: 1984 - DNA, 18 bp, Artificial Sequence
  Description of Artificial Sequence: Synthetic oligonucleotide
acagagatgccctagtac

SEQ ID NO: 1985 - DNA, 18 bp, Artificial Sequence
  Description of Artificial Sequence: Synthetic oligonucleotide
agtaaacagagatgccct

SEQ ID NO: 1986 - DNA, 18 bp, Artificial Sequence
  Description of Artificial Sequence: Synthetic oligonucleotide
ccgttagtaaacagagat

SEQ ID NO: 1987 - DNA, 18 bp, Artificial Sequence
  Description of Artificial Sequence: Synthetic oligonucleotide
tgtaaccgttagtaaaca

SEQ ID NO: 1988 - DNA, 18 bp, Artificial Sequence
  Description of Artificial Sequence: Synthetic oligonucleotide
ggtgatgtaaccgttagt

SEQ ID NO: 1989 - DNA, 18 bp, Artificial Sequence
  Description of Artificial Sequence: Synthetic oligonucleotide
gagcgggtgatgtaaccg

SEQ ID NO: 1990 - DNA, 18 bp, Artificial Sequence
  Description of Artificial Sequence: Synthetic oligonucleotide
atgctgagcgggtgatgt

SEQ ID NO: 1991 - DNA, 18 bp, Artificial Sequence
  Description of Artificial Sequence: Synthetic oligonucleotide
agcacatgctgagcgggt

SEQ ID NO: 1992 - DNA, 18 bp, Artificial Sequence
  Description of Artificial Sequence: Synthetic oligonucleotide
ttattagcacatgctgag

SEQ ID NO: 1993 - DNA, 18 bp, Artificial Sequence
  Description of Artificial Sequence: Synthetic oligonucleotide
tgcagttattagcacatg

SEQ ID NO: 1994 - DNA, 18 bp, Artificial Sequence
  Description of Artificial Sequence: Synthetic oligonucleotide
tgaattgcagttattagc

SEQ ID NO: 1995 - DNA, 18 bp, Artificial Sequence
  Description of Artificial Sequence: Synthetic oligonucleotide
gactgtgaattgcagtta

SEQ ID NO: 1996 - DNA, 18 bp, Artificial Sequence
  Description of Artificial Sequence: Synthetic oligonucleotide
cagaagactgtgaattgc

SEQ ID NO: 1997 - DNA, 18 bp, Artificial Sequence
  Description of Artificial Sequence: Synthetic oligonucleotide
gttaacagaagactgtga

SEQ ID NO: 1998 - DNA, 18 bp, Artificial Sequence
  Description of Artificial Sequence: Synthetic oligonucleotide
tcagtgttaacagaagac

SEQ ID NO: 1999 - DNA, 18 bp, Artificial Sequence
  Description of Artificial Sequence: Synthetic oligonucleotide
ctctggccacacacgctc

SEQ ID NO: 2000 - DNA, 18 bp, Artificial Sequence
  Description of Artificial Sequence: Synthetic oligonucleotide
tccggctctggccacaca

SEQ ID NO: 2001 - DNA, 18 bp, Artificial Sequence
  Description of Artificial Sequence: Synthetic oligonucleotide
tctagtccggctctggcc

SEQ ID NO: 2002 - DNA, 18 bp, Artificial Sequence
  Description of Artificial Sequence: Synthetic oligonucleotide
ctggttctagtccggctc

SEQ ID NO: 2003 - DNA, 18 bp, Artificial Sequence
  Description of Artificial Sequence: Synthetic oligonucleotide
aagatctggttctagtcc

SEQ ID NO: 2004 - DNA, 18 bp, Artificial Sequence
  Description of Artificial Sequence: Synthetic oligonucleotide
cccagaagatctggttct

SEQ ID NO: 2005 - DNA, 18 bp, Artificial Sequence
  Description of Artificial Sequence: Synthetic oligonucleotide
tttgccccagaagatctg

SEQ ID NO: 2006 - DNA, 18 bp, Artificial Sequence
  Description of Artificial Sequence: Synthetic oligonucleotide
gcccctttgccccagaag

SEQ ID NO: 2007 - DNA, 18 bp, Artificial Sequence
  Description of Artificial Sequence: Synthetic oligonucleotide
ccctcgcccctttgcccc

SEQ ID NO: 2008 - DNA, 18 bp, Artificial Sequence
  Description of Artificial Sequence: Synthetic oligonucleotide
cattcccctcgccccttt

SEQ ID NO: 2009 - DNA, 18 bp, Artificial Sequence
  Description of Artificial Sequence: Synthetic oligonucleotide
tcattcattcccctcgcc

SEQ ID NO: 2010 - DNA, 18 bp, Artificial Sequence
  Description of Artificial Sequence: Synthetic oligonucleotide
aaatgtcattcattcccc

SEQ ID NO: 2011 - DNA, 18 bp, Artificial Sequence
  Description of Artificial Sequence: Synthetic oligonucleotide
tggataaatgtcattcat

SEQ ID NO: 2012 - DNA, 18 bp, Artificial Sequence
  Description of Artificial Sequence: Synthetic oligonucleotide
ggtgttggataaatgtca

SEQ ID NO: 2013 - DNA, 18 bp, Artificial Sequence
  Description of Artificial Sequence: Synthetic oligonucleotide
aactaggtgttggataaa

SEQ ID NO: 2014 - DNA, 18 bp, Artificial Sequence
  Description of Artificial Sequence: Synthetic oligonucleotide
aaaacaactaggtgttgg

SEQ ID NO: 2015 - DNA, 18 bp, Artificial Sequence
  Description of Artificial Sequence: Synthetic oligonucleotide
gggaaaaaacaactaggt

SEQ ID NO: 2016 - DNA, 18 bp, Artificial Sequence
  Description of Artificial Sequence: Synthetic oligonucleotide
ctaaagggaaaaaacaac

SEQ ID NO: 2017 - DNA, 18 bp, Artificial Sequence
  Description of Artificial Sequence: Synthetic oligonucleotide
tcctgctaaagggaaaaa

SEQ ID NO: 2018 - DNA, 18 bp, Artificial Sequence
  Description of Artificial Sequence: Synthetic oligonucleotide
tgacttcctgctaaaggg

SEQ ID NO: 2019 - DNA, 18 bp, Artificial Sequence
  Description of Artificial Sequence: Synthetic oligonucleotide
cataatgacttcctgcta

SEQ ID NO: 2020 - DNA, 18 bp, Artificial Sequence
  Description of Artificial Sequence: Synthetic oligonucleotide
ttgcataatgacttcctg

SEQ ID NO: 2021 - DNA, 18 bp, Artificial Sequence
  Description of Artificial Sequence: Synthetic oligonucleotide
gtaagttgcataatgact

SEQ ID NO: 2022 - DNA, 18 bp, Artificial Sequence
  Description of Artificial Sequence: Synthetic oligonucleotide
tatgtgtaagttgcataa

SEQ ID NO: 2023 - DNA, 18 bp, Artificial Sequence
  Description of Artificial Sequence: Synthetic oligonucleotide
atgaatatgtgtaagttg

SEQ ID NO: 2024 - DNA, 18 bp, Artificial Sequence
  Description of Artificial Sequence: Synthetic oligonucleotide
atctgatgaatatgtgta

SEQ ID NO: 2025 - DNA, 18 bp, Artificial Sequence
  Description of Artificial Sequence: Synthetic oligonucleotide
aggaaatctgatgaatat

SEQ ID NO: 2026 - DNA, 18 bp, Artificial Sequence
  Description of Artificial Sequence: Synthetic oligonucleotide
gtcagaggaaatctgatg

SEQ ID NO: 2027 - DNA, 18 bp, Artificial Sequence
  Description of Artificial Sequence: Synthetic oligonucleotide
ggtaagtcagaggaaatc

SEQ ID NO: 2028 - DNA, 18 bp, Artificial Sequence
  Description of Artificial Sequence: Synthetic oligonucleotide
gtccgggtaagtcagagg

SEQ ID NO: 2029 - DNA, 18 bp, Artificial Sequence
  Description of Artificial Sequence: Synthetic oligonucleotide
tacatgtccgggtaagtc

SEQ ID NO: 2030 - DNA, 18 bp, Artificial Sequence
  Description of Artificial Sequence: Synthetic oligonucleotide
ccatgtacatgtccgggt

SEQ ID NO: 2031 - DNA, 18 bp, Artificial Sequence
  Description of Artificial Sequence: Synthetic oligonucleotide
cattcccatgtacatgtc

SEQ ID NO: 2032 - DNA, 18 bp, Artificial Sequence
  Description of Artificial Sequence: Synthetic oligonucleotide
cacatcattcccatgtac

SEQ ID NO: 2033 - DNA, 18 bp, Artificial Sequence
  Description of Artificial Sequence: Synthetic oligonucleotide
cagtgcacatcattccca

SEQ ID NO: 2034 - DNA, 18 bp, Artificial Sequence
  Description of Artificial Sequence: Synthetic oligonucleotide
cttggcagtgcacatcat

SEQ ID NO: 2035 - DNA, 18 bp, Artificial Sequence
  Description of Artificial Sequence: Synthetic oligonucleotide
catttcttggcagtgcac

SEQ ID NO: 2036 - DNA, 18 bp, Artificial Sequence
  Description of Artificial Sequence: Synthetic oligonucleotide
tcccacatttcttggcag

SEQ ID NO: 2037 - DNA, 18 bp, Artificial Sequence
  Description of Artificial Sequence: Synthetic oligonucleotide
cctaatcccacatttctt

SEQ ID NO: 2038 - DNA, 18 bp, Artificial Sequence
  Description of Artificial Sequence: Synthetic oligonucleotide
tgaaacctaatcccacat

SEQ ID NO: 2039 - DNA, 18 bp, Artificial Sequence
  Description of Artificial Sequence: Synthetic oligonucleotide
gaggctgaaacctaatcc

SEQ ID NO: 2040 - DNA, 18 bp, Artificial Sequence
  Description of Artificial Sequence: Synthetic oligonucleotide
atagctggaggctgaaac

SEQ ID NO: 2041 - DNA, 18 bp, Artificial Sequence
  Description of Artificial Sequence: Synthetic oligonucleotide
agataatagctggaggct

SEQ ID NO: 2042 - DNA, 18 bp, Artificial Sequence
  Description of Artificial Sequence: Synthetic oligonucleotide
gattaagataatagctgg

SEQ ID NO: 2043 - DNA, 18 bp, Artificial Sequence
  Description of Artificial Sequence: Synthetic oligonucleotide
tcatagattaagataata

SEQ ID NO: 2044 - DNA, 18 bp, Artificial Sequence
  Description of Artificial Sequence: Synthetic oligonucleotide
cactctcatagattaaga

SEQ ID NO: 2045 - DNA, 18 bp, Artificial Sequence
  Description of Artificial Sequence: Synthetic oligonucleotide
gatttcactctcatagat

SEQ ID NO: 2046 - DNA, 18 bp, Artificial Sequence
  Description of Artificial Sequence: Synthetic oligonucleotide
cccttgatttcactctca

SEQ ID NO: 2047 - DNA, 18 bp, Artificial Sequence
  Description of Artificial Sequence: Synthetic oligonucleotide
ttttccccttgatttcac

SEQ ID NO: 2048 - DNA, 18 bp, Artificial Sequence
  Description of Artificial Sequence: Synthetic oligonucleotide
gcgaattttccccttgat

SEQ ID NO: 2049 - DNA, 18 bp, Artificial Sequence
  Description of Artificial Sequence: Synthetic oligonucleotide
cgctggcgaattttcccc

SEQ ID NO: 2050 - DNA, 18 bp, Artificial Sequence
  Description of Artificial Sequence: Synthetic oligonucleotide
taatgcgctggcgaattt

SEQ ID NO: 2051 - DNA, 18 bp, Artificial Sequence
  Description of Artificial Sequence: Synthetic oligonucleotide
tggcataatgcgctggcg

SEQ ID NO: 2052 - DNA, 18 bp, Artificial Sequence
  Description of Artificial Sequence: Synthetic oligonucleotide
cgaactggcataatgcgc

SEQ ID NO: 2053 - DNA, 18 bp, Artificial Sequence
  Description of Artificial Sequence: Synthetic oligonucleotide
agtttcgaactggcataa

SEQ ID NO: 2054 - DNA, 18 bp, Artificial Sequence
  Description of Artificial Sequence: Synthetic oligonucleotide
tgaaaagtttcgaactgg

SEQ ID NO: 2055 - DNA, 18 bp, Artificial Sequence
  Description of Artificial Sequence: Synthetic oligonucleotide
aactttgaaaagtttcga

SEQ ID NO: 2056 - DNA, 18 bp, Artificial Sequence
  Description of Artificial Sequence: Synthetic oligonucleotide
ctgaaaactttgaaaagt

SEQ ID NO: 2057 - DNA, 18 bp, Artificial Sequence
  Description of Artificial Sequence: Synthetic oligonucleotide
tacctgaaaactttgaaa

SEQ ID NO: 2058 - DNA, 18 bp, Artificial Sequence
  Description of Artificial Sequence: Synthetic oligonucleotide
tgaggtacctgaaaactt

SEQ ID NO: 2059 - DNA, 18 bp, Artificial Sequence
  Description of Artificial Sequence: Synthetic oligonucleotide
agacatgaggtacctgaa

SEQ ID NO: 2060 - DNA, 18 bp, Artificial Sequence
  Description of Artificial Sequence: Synthetic oligonucleotide
agataagacatgaggtac

SEQ ID NO: 2061 - DNA, 18 bp, Artificial Sequence
  Description of Artificial Sequence: Synthetic oligonucleotide
aggcaagataagacatga

SEQ ID NO: 2062 - DNA, 18 bp, Artificial Sequence
  Description of Artificial Sequence: Synthetic oligonucleotide
acaggaggcaagataaga

SEQ ID NO: 2063 - DNA, 18 bp, Artificial Sequence
  Description of Artificial Sequence: Synthetic oligonucleotide
ttaagacaggaggcaaga

SEQ ID NO: 2064 - DNA, 18 bp, Artificial Sequence
  Description of Artificial Sequence: Synthetic oligonucleotide
aatatttaagacaggagg

SEQ ID NO: 2065 - DNA, 18 bp, Artificial Sequence
  Description of Artificial Sequence: Synthetic oligonucleotide
tagagaatatttaagaca

SEQ ID NO: 2066 - DNA, 18 bp, Artificial Sequence
  Description of Artificial Sequence: Synthetic oligonucleotide
gtatttagagaatattta

SEQ ID NO: 2067 - DNA, 18 bp, Artificial Sequence
  Description of Artificial Sequence: Synthetic oligonucleotide
aacctgtatttagagaat

SEQ ID NO: 2068 - DNA, 18 bp, Artificial Sequence
  Description of Artificial Sequence: Synthetic oligonucleotide
atgtgaacctgtatttag

SEQ ID NO: 2069 - DNA, 18 bp, Artificial Sequence
  Description of Artificial Sequence: Synthetic oligonucleotide
tcatgatgtgaacctgta

SEQ ID NO: 2070 - DNA, 18 bp, Artificial Sequence
  Description of Artificial Sequence: Synthetic oligonucleotide
cagagtcatgatgtgaac

SEQ ID NO: 2071 - DNA, 18 bp, Artificial Sequence
  Description of Artificial Sequence: Synthetic oligonucleotide
cctgacagagtcatgatg

SEQ ID NO: 2072 - DNA, 18 bp, Artificial Sequence
  Description of Artificial Sequence: Synthetic oligonucleotide
cagtccctgacagagtca

SEQ ID NO: 2073 - DNA, 18 bp, Artificial Sequence
  Description of Artificial Sequence: Synthetic oligonucleotide
acatccagtccctgacag

SEQ ID NO: 2074 - DNA, 18 bp, Artificial Sequence
  Description of Artificial Sequence: Synthetic oligonucleotide
gtcacacatccagtccct

SEQ ID NO: 2075 - DNA, 18 bp, Artificial Sequence
  Description of Artificial Sequence: Synthetic oligonucleotide
ccagtgtcacacatccag

SEQ ID NO: 2076 - DNA, 18 bp, Artificial Sequence
  Description of Artificial Sequence: Synthetic oligonucleotide
ttcatccagtgtcacaca

SEQ ID NO: 2077 - DNA, 18 bp, Artificial Sequence
  Description of Artificial Sequence: Synthetic oligonucleotide
agtaattcatccagtgtc

SEQ ID NO: 2078 - DNA, 18 bp, Artificial Sequence
  Description of Artificial Sequence: Synthetic oligonucleotide
aaaatcctcaattatgag

SEQ ID NO: 2079 - DNA, 18 bp, Artificial Sequence
  Description of Artificial Sequence: Synthetic oligonucleotide
aacaaaaaatcctcaatt

SEQ ID NO: 2080 - DNA, 18 bp, Artificial Sequence
  Description of Artificial Sequence: Synthetic oligonucleotide
aacaaaacaaaaaatcct

SEQ ID NO: 2081 - DNA, 18 bp, Artificial Sequence
  Description of Artificial Sequence: Synthetic oligonucleotide
aatagaacaaaacaaaaa

SEQ ID NO: 2082 - DNA, 18 bp, Artificial Sequence
  Description of Artificial Sequence: Synthetic oligonucleotide
gactaaatagaacaaaac

SEQ ID NO: 2083 - DNA, 18 bp, Artificial Sequence
  Description of Artificial Sequence: Synthetic oligonucleotide
atcatgactaaatagaac

SEQ ID NO: 2084 - DNA, 18 bp, Artificial Sequence
  Description of Artificial Sequence: Synthetic oligonucleotide
ttcgtatcatgactaaat

SEQ ID NO: 2085 - DNA, 18 bp, Artificial Sequence
  Description of Artificial Sequence: Synthetic oligonucleotide
ccaatttcgtatcatgac

SEQ ID NO: 2086 - DNA, 18 bp, Artificial Sequence
  Description of Artificial Sequence: Synthetic oligonucleotide
gaatcccaatttcgtatc

SEQ ID NO: 2087 - DNA, 18 bp, Artificial Sequence
  Description of Artificial Sequence: Synthetic oligonucleotide
aggaagaatcccaatttc

SEQ ID NO: 2088 - DNA, 18 bp, Artificial Sequence
  Description of Artificial Sequence: Synthetic oligonucleotide
tgaaaaggaagaatccca

SEQ ID NO: 2089 - DNA, 18 bp, Artificial Sequence
  Description of Artificial Sequence: Synthetic oligonucleotide
aagattgaaaaggaagaa

SEQ ID NO: 2090 - DNA, 18 bp, Artificial Sequence
  Description of Artificial Sequence: Synthetic oligonucleotide
ctattaagattgaaaagg

SEQ ID NO: 2091 - DNA, 18 bp, Artificial Sequence
  Description of Artificial Sequence: Synthetic oligonucleotide
aacagctattaagattga

SEQ ID NO: 2092 - DNA, 18 bp, Artificial Sequence
  Description of Artificial Sequence: Synthetic oligonucleotide
agaataacagctattaag

SEQ ID NO: 2093 - DNA, 18 bp, Artificial Sequence
  Description of Artificial Sequence: Synthetic oligonucleotide
aaaaaagaataacagcta

SEQ ID NO: 2094 - DNA, 18 bp, Artificial Sequence
  Description of Artificial Sequence: Synthetic oligonucleotide
aaaaaaaaaaagaataac

SEQ ID NO: 2095 - DNA, 18 bp, Artificial Sequence
  Description of Artificial Sequence: Synthetic oligonucleotide
ctaagaaaaaaaaaaaga

SEQ ID NO: 2096 - DNA, 18 bp, Artificial Sequence
  Description of Artificial Sequence: Synthetic oligonucleotide
gcacactaagaaaaaaaa

SEQ ID NO: 2097 - DNA, 18 bp, Artificial Sequence
  Description of Artificial Sequence: Synthetic oligonucleotide
agtctgcacactaagaaa

SEQ ID NO: 2098 - DNA, 18 bp, Artificial Sequence
  Description of Artificial Sequence: Synthetic oligonucleotide
tccctagtctgcacacta

SEQ ID NO: 2099 - DNA, 18 bp, Artificial Sequence
  Description of Artificial Sequence: Synthetic oligonucleotide
atttccctagtctgcaca

SEQ ID NO: 2100 - DNA, 18 bp, Artificial Sequence
  Description of Artificial Sequence: Synthetic oligonucleotide
acttcatttccctagtct

SEQ ID NO: 2101 - DNA, 18 bp, Artificial Sequence
  Description of Artificial Sequence: Synthetic oligonucleotide
attgtacttcatttccct

SEQ ID NO: 2102 - DNA, 18 bp, Artificial Sequence
  Description of Artificial Sequence: Synthetic oligonucleotide
tcaacattgtacttcatt

SEQ ID NO: 2103 - DNA, 18 bp, Artificial Sequence
  Description of Artificial Sequence: Synthetic oligonucleotide
tctggtcaacattgtact

SEQ ID NO: 2104 - DNA, 18 bp, Artificial Sequence
  Description of Artificial Sequence: Synthetic oligonucleotide
atcaattctggtcaacat

SEQ ID NO: 2105 - DNA, 18 bp, Artificial Sequence
  Description of Artificial Sequence: Synthetic oligonucleotide
tacatcaattctggtcaa

SEQ ID NO: 2106 - DNA, 18 bp, Artificial Sequence
  Description of Artificial Sequence: Synthetic oligonucleotide
atacctacatcaattctg

SEQ ID NO: 2107 - DNA, 18 bp, Artificial Sequence
  Description of Artificial Sequence: Synthetic oligonucleotide
caaagatacctacatcaa

SEQ ID NO: 2108 - DNA, 18 bp, Artificial Sequence
  Description of Artificial Sequence: Synthetic oligonucleotide
taagacaaagatacctac

SEQ ID NO: 2109 - DNA, 18 bp, Artificial Sequence
  Description of Artificial Sequence: Synthetic oligonucleotide
aggagtaagacaaagata

SEQ ID NO: 2110 - DNA, 18 bp, Artificial Sequence
  Description of Artificial Sequence: Synthetic oligonucleotide
aaatcaggagtaagacaa

SEQ ID NO: 2111 - DNA, 18 bp, Artificial Sequence
  Description of Artificial Sequence: Synthetic oligonucleotide
ttttaaaatcaggagtaa

SEQ ID NO: 2112 - DNA, 18 bp, Artificial Sequence
  Description of Artificial Sequence: Synthetic oligonucleotide
attccttttaaaatcagg

SEQ ID NO: 2113 - DNA, 18 bp, Artificial Sequence
  Description of Artificial Sequence: Synthetic oligonucleotide
gaaatattccttttaaaa

SEQ ID NO: 2114 - DNA, 18 bp, Artificial Sequence
  Description of Artificial Sequence: Synthetic oligonucleotide
aacttgaaatattccttt

SEQ ID NO: 2115 - DNA, 18 bp, Artificial Sequence
  Description of Artificial Sequence: Synthetic oligonucleotide
tggaaaacttgaaatatt

SEQ ID NO: 2116 - DNA, 18 bp, Artificial Sequence
  Description of Artificial Sequence: Synthetic oligonucleotide
aatggtggaaaacttgaa

SEQ ID NO: 2117 - DNA, 18 bp, Artificial Sequence
  Description of Artificial Sequence: Synthetic oligonucleotide
tacttaatggtggaaaac

SEQ ID NO: 2118 - DNA, 18 bp, Artificial Sequence
  Description of Artificial Sequence: Synthetic oligonucleotide
aaacatacttaatggtgg

SEQ ID NO: 2119 - DNA, 18 bp, Artificial Sequence
  Description of Artificial Sequence: Synthetic oligonucleotide
atggcaaacatacttaat

SEQ ID NO: 2120 - DNA, 18 bp, Artificial Sequence
  Description of Artificial Sequence: Synthetic oligonucleotide
aaaagatggcaaacatac

SEQ ID NO: 2121 - DNA, 18 bp, Artificial Sequence
  Description of Artificial Sequence: Synthetic oligonucleotide
acaagaaaagatggcaaa

SEQ ID NO: 2122 - DNA, 18 bp, Artificial Sequence
  Description of Artificial Sequence: Synthetic oligonucleotide
gttttacaagaaaagatg

SEQ ID NO: 2123 - DNA, 18 bp, Artificial Sequence
  Description of Artificial Sequence: Synthetic oligonucleotide
atgaagttttacaagaaa

SEQ ID NO: 2124 - DNA, 18 bp, Artificial Sequence
  Description of Artificial Sequence: Synthetic oligonucleotide
ataatatgaagttttaca

SEQ ID NO: 2125 - DNA, 18 bp, Artificial Sequence
  Description of Artificial Sequence: Synthetic oligonucleotide
ttatgataatatgaagtt

SEQ ID NO: 2126 - DNA, 18 bp, Artificial Sequence
  Description of Artificial Sequence: Synthetic oligonucleotide
ttacctctattacttttt

SEQ ID NO: 2127 - DNA, 18 bp, Artificial Sequence
  Description of Artificial Sequence: Synthetic oligonucleotide
cgattttacctctattac

SEQ ID NO: 2128 - DNA, 18 bp, Artificial Sequence
  Description of Artificial Sequence: Synthetic oligonucleotide
caaaacgattttacctct

SEQ ID NO: 2129 - DNA, 18 bp, Artificial Sequence
  Description of Artificial Sequence: Synthetic oligonucleotide
tcatccaaaacgatttta

SEQ ID NO: 2130 - DNA, 18 bp, Artificial Sequence
  Description of Artificial Sequence: Synthetic oligonucleotide
atgactcatccaaaacga

SEQ ID NO: 2131 - DNA, 18 bp, Artificial Sequence
  Description of Artificial Sequence: Synthetic oligonucleotide
taaacatgactcatccaa

SEQ ID NO: 2132 - DNA, 18 bp, Artificial Sequence
  Description of Artificial Sequence: Synthetic oligonucleotide
aagattaaacatgactca

SEQ ID NO: 2133 - DNA, 18 bp, Artificial Sequence
  Description of Artificial Sequence: Synthetic oligonucleotide
ttccaaagattaaacatg

SEQ ID NO: 2134 - DNA, 18 bp, Artificial Sequence
  Description of Artificial Sequence: Synthetic oligonucleotide
aaaacttccaaagattaa

SEQ ID NO: 2135 - DNA, 18 bp, Artificial Sequence
  Description of Artificial Sequence: Synthetic oligonucleotide
cttctaaaacttccaaag

SEQ ID NO: 2136 - DNA, 18 bp, Artificial Sequence
  Description of Artificial Sequence: Synthetic oligonucleotide
catttcttctaaaacttc

SEQ ID NO: 2137 - DNA, 18 bp, Artificial Sequence
  Description of Artificial Sequence: Synthetic oligonucleotide
aattccatttcttctaaa

SEQ ID NO: 2138 - DNA, 18 bp, Artificial Sequence
  Description of Artificial Sequence: Synthetic oligonucleotide
tacagaattccatttctt

SEQ ID NO: 2139 - DNA, 18 bp, Artificial Sequence
  Description of Artificial Sequence: Synthetic oligonucleotide
aacattacagaattccat

SEQ ID NO: 2140 - DNA, 18 bp, Artificial Sequence
  Description of Artificial Sequence: Synthetic oligonucleotide
gttttaacattacagaat

SEQ ID NO: 2141 - DNA, 18 bp, Artificial Sequence
  Description of Artificial Sequence: Synthetic oligonucleotide
aaagagttttaacattac

SEQ ID NO: 2142 - DNA, 18 bp, Artificial Sequence
  Description of Artificial Sequence: Synthetic oligonucleotide
aaggaaaagagttttaac

SEQ ID NO: 2143 - DNA, 18 bp, Artificial Sequence
  Description of Artificial Sequence: Synthetic oligonucleotide
ctaaaaaggaaaagagtt

SEQ ID NO: 2144 - DNA, 18 bp, Artificial Sequence
  Description of Artificial Sequence: Synthetic oligonucleotide
gaactctaaaaaggaaaa

SEQ ID NO: 2145 - DNA, 18 bp, Artificial Sequence
  Description of Artificial Sequence: Synthetic oligonucleotide
aagttgaactctaaaaag

SEQ ID NO: 2146 - DNA, 18 bp, Artificial Sequence
  Description of Artificial Sequence: Synthetic oligonucleotide
acagcaagttgaactcta

SEQ ID NO: 2147 - DNA, 18 bp, Artificial Sequence
  Description of Artificial Sequence: Synthetic oligonucleotide
ttcacagcaagttgaact

SEQ ID NO: 2148 - DNA, 18 bp, Artificial Sequence
  Description of Artificial Sequence: Synthetic oligonucleotide
ctctattcacagcaagtt

SEQ ID NO: 2149 - DNA, 18 bp, Artificial Sequence
  Description of Artificial Sequence: Synthetic oligonucleotide
agttactctattcacagc

SEQ ID NO: 2150 - DNA, 18 bp, Artificial Sequence
  Description of Artificial Sequence: Synthetic oligonucleotide
tcttcagttactctattc

SEQ ID NO: 2151 - DNA, 18 bp, Artificial Sequence
  Description of Artificial Sequence: Synthetic oligonucleotide
ctgcttcttcagttactc

SEQ ID NO: 2152 - DNA, 18 bp, Artificial Sequence
  Description of Artificial Sequence: Synthetic oligonucleotide
tgcgactgcttcttcagt

SEQ ID NO: 2153 - DNA, 18 bp, Artificial Sequence
  Description of Artificial Sequence: Synthetic oligonucleotide
ttcactgcgactgcttct

SEQ ID NO: 2154 - DNA, 18 bp, Artificial Sequence
  Description of Artificial Sequence: Synthetic oligonucleotide
caatcttcactgcgactg

SEQ ID NO: 2155 - DNA, 18 bp, Artificial Sequence
  Description of Artificial Sequence: Synthetic oligonucleotide
atctacaatcttcactgc

SEQ ID NO: 2156 - DNA, 18 bp, Artificial Sequence
  Description of Artificial Sequence: Synthetic oligonucleotide
ttcatatctacaatcttc

SEQ ID NO: 2157 - DNA, 18 bp, Artificial Sequence
  Description of Artificial Sequence: Synthetic oligonucleotide
cacgcttcatatctacaa

SEQ ID NO: 2158 - DNA, 18 bp, Artificial Sequence
  Description of Artificial Sequence: Synthetic oligonucleotide
tacggcacgcttcatatc

SEQ ID NO: 2159 - DNA, 18 bp, Artificial Sequence
  Description of Artificial Sequence: Synthetic oligonucleotide
cagtctacggcacgcttc

SEQ ID NO: 2160 - DNA, 18 bp, Artificial Sequence
  Description of Artificial Sequence: Synthetic oligonucleotide
ctggacagtctacggcac

SEQ ID NO: 2161 - DNA, 18 bp, Artificial Sequence
  Description of Artificial Sequence: Synthetic oligonucleotide
attttctggacagtctac

SEQ ID NO: 2162 - DNA, 18 bp, Artificial Sequence
  Description of Artificial Sequence: Synthetic oligonucleotide
ttaatattttctggacag

SEQ ID NO: 2163 - DNA, 18 bp, Artificial Sequence
  Description of Artificial Sequence: Synthetic oligonucleotide
ctttcttaatattttctg

SEQ ID NO: 2164 - DNA, 18 bp, Artificial Sequence
  Description of Artificial Sequence: Synthetic oligonucleotide
gatctctttcttaatatt

SEQ ID NO: 2165 - DNA, 18 bp, Artificial Sequence
  Description of Artificial Sequence: Synthetic oligonucleotide
atacagatctctttctta

SEQ ID NO: 2166 - DNA, 18 bp, Artificial Sequence
  Description of Artificial Sequence: Synthetic oligonucleotide
tattgatacagatctctt

SEQ ID NO: 2167 - DNA, 18 bp, Artificial Sequence
  Description of Artificial Sequence: Synthetic oligonucleotide
cattttattgatacagat

SEQ ID NO: 2168 - DNA, 18 bp, Artificial Sequence
  Description of Artificial Sequence: Synthetic oligonucleotide
tttagcattttattgata

SEQ ID NO: 2169 - DNA, 18 bp, Artificial Sequence
  Description of Artificial Sequence: Synthetic oligonucleotide
catgatttagcattttat

SEQ ID NO: 2170 - DNA, 18 bp, Artificial Sequence
  Description of Artificial Sequence: Synthetic oligonucleotide
cattttcatgatttagca

SEQ ID NO: 2171 - DNA, 18 bp, Artificial Sequence
  Description of Artificial Sequence: Synthetic oligonucleotide
tactacattttcatgatt

SEQ ID NO: 2172 - DNA, 18 bp, Artificial Sequence
  Description of Artificial Sequence: Synthetic oligonucleotide
aattttactacattttca

SEQ ID NO: 2173 - DNA, 18 bp, Artificial Sequence
  Description of Artificial Sequence: Synthetic oligonucleotide
catagaattttactacat

SEQ ID NO: 2174 - DNA, 18 bp, Artificial Sequence
  Description of Artificial Sequence: Synthetic oligonucleotide
gtgaccatagaattttac

SEQ ID NO: 2175 - DNA, 18 bp, Artificial Sequence
  Description of Artificial Sequence: Synthetic oligonucleotide
ctcctgtgaccatagaat

SEQ ID NO: 2176 - DNA, 18 bp, Artificial Sequence
  Description of Artificial Sequence: Synthetic oligonucleotide
cttctctcctgtgaccat

SEQ ID NO: 2177 - DNA, 18 bp, Artificial Sequence
  Description of Artificial Sequence: Synthetic oligonucleotide
attgccttctctcctgtg

SEQ ID NO: 2178 - DNA, 18 bp, Artificial Sequence
  Description of Artificial Sequence: Synthetic oligonucleotide
tggatattgccttctctc

SEQ ID NO: 2179 - DNA, 18 bp, Artificial Sequence
  Description of Artificial Sequence: Synthetic oligonucleotide
aatattggatattgcctt

SEQ ID NO: 2180 - DNA, 18 bp, Artificial Sequence
  Description of Artificial Sequence: Synthetic oligonucleotide
aaataaatattggatatt

SEQ ID NO: 2181 - DNA, 18 bp, Artificial Sequence
  Description of Artificial Sequence: Synthetic oligonucleotide
tccagaaataaatattgg

SEQ ID NO: 2182 - DNA, 18 bp, Artificial Sequence
  Description of Artificial Sequence: Synthetic oligonucleotide
agtactccagaaataaat

SEQ ID NO: 2183 - DNA, 18 bp, Artificial Sequence
  Description of Artificial Sequence: Synthetic oligonucleotide
actacagtactccagaaa

SEQ ID NO: 2184 - DNA, 18 bp, Artificial Sequence
  Description of Artificial Sequence: Synthetic oligonucleotide
cctccactacagtactcc

SEQ ID NO: 2185 - DNA, 18 bp, Artificial Sequence
  Description of Artificial Sequence: Synthetic oligonucleotide
gctctcctccactacagt

SEQ ID NO: 2186 - DNA, 18 bp, Artificial Sequence
  Description of Artificial Sequence: Synthetic oligonucleotide
aaaaagctctcctccact

SEQ ID NO: 2187 - DNA, 18 bp, Artificial Sequence
  Description of Artificial Sequence: Synthetic oligonucleotide
ctgtcaaaaagctctcct

SEQ ID NO: 2188 - DNA, 18 bp, Artificial Sequence
  Description of Artificial Sequence: Synthetic oligonucleotide
ctattctgtcaaaaagct

SEQ ID NO: 2189 - DNA, 18 bp, Artificial Sequence
  Description of Artificial Sequence: Synthetic oligonucleotide
tacctattctgtcaaaaa

SEQ ID NO: 2190 - DNA, 18 bp, Artificial Sequence
  Description of Artificial Sequence: Synthetic oligonucleotide
ttccatacctattctgtc

SEQ ID NO: 2191 - DNA, 18 bp, Artificial Sequence
  Description of Artificial Sequence: Synthetic oligonucleotide
atttcttccatacctatt

SEQ ID NO: 2192 - DNA, 18 bp, Artificial Sequence
  Description of Artificial Sequence: Synthetic oligonucleotide
cttaaatttcttccatac

SEQ ID NO: 2193 - DNA, 18 bp, Artificial Sequence
  Description of Artificial Sequence: Synthetic oligonucleotide
attatcttaaatttcttc

SEQ ID NO: 2194 - DNA, 18 bp, Artificial Sequence
  Description of Artificial Sequence: Synthetic oligonucleotide
aaataattatcttaaatt

SEQ ID NO: 2195 - DNA, 18 bp, Artificial Sequence
  Description of Artificial Sequence: Synthetic oligonucleotide
gtttaaaataattatctt

SEQ ID NO: 2196 - DNA, 18 bp, Artificial Sequence
  Description of Artificial Sequence: Synthetic oligonucleotide
aacttgtttaaaataatt

SEQ ID NO: 2197 - DNA, 18 bp, Artificial Sequence
  Description of Artificial Sequence: Synthetic oligonucleotide
ttaaaaacttgtttaaaa

SEQ ID NO: 2198 - DNA, 18 bp, Artificial Sequence
  Description of Artificial Sequence: Synthetic oligonucleotide
caaatttaaaaacttgtt

SEQ ID NO: 2199 - DNA, 18 bp, Artificial Sequence
  Description of Artificial Sequence: Synthetic oligonucleotide
aaaaacaaatttaaaaac

SEQ ID NO: 2200 - DNA, 18 bp, Artificial Sequence
  Description of Artificial Sequence: Synthetic oligonucleotide
atttaaaaaacaaattta

SEQ ID NO: 2201 - DNA, 18 bp, Artificial Sequence
  Description of Artificial Sequence: Synthetic oligonucleotide
ccaagatttaaaaaacaa

SEQ ID NO: 2202 - DNA, 18 bp, Artificial Sequence
  Description of Artificial Sequence: Synthetic oligonucleotide
catgcccaagatttaaaa

SEQ ID NO: 2203 - DNA, 18 bp, Artificial Sequence
  Description of Artificial Sequence: Synthetic oligonucleotide
aatagcatgcccaagatt

SEQ ID NO: 2204 - DNA, 18 bp, Artificial Sequence
  Description of Artificial Sequence: Synthetic oligonucleotide
gaccaaatagcatgccca

SEQ ID NO: 2205 - DNA, 18 bp, Artificial Sequence
  Description of Artificial Sequence: Synthetic oligonucleotide
acaacgaccaaatagcat

SEQ ID NO: 2206 - DNA, 18 bp, Artificial Sequence
  Description of Artificial Sequence: Synthetic oligonucleotide
aaaggacaacgaccaaat

SEQ ID NO: 2207 - DNA, 18 bp, Artificial Sequence
  Description of Artificial Sequence: Synthetic oligonucleotide
ttttgaaaggacaacgac

SEQ ID NO: 2208 - DNA, 18 bp, Artificial Sequence
  Description of Artificial Sequence: Synthetic oligonucleotide
agcaattttgaaaggaca

SEQ ID NO: 2209 - DNA, 18 bp, Artificial Sequence
  Description of Artificial Sequence: Synthetic oligonucleotide
gcatgagcaattttgaaa

SEQ ID NO: 2210 - DNA, 18 bp, Artificial Sequence
  Description of Artificial Sequence: Synthetic oligonucleotide
ctctgcagaacatcctca

SEQ ID NO: 2211 - DNA, 18 bp, Artificial Sequence
  Description of Artificial Sequence: Synthetic oligonucleotide
tctgcctctgcagaacat

SEQ ID NO: 2212 - DNA, 18 bp, Artificial Sequence
  Description of Artificial Sequence: Synthetic oligonucleotide
aggcctctgcctctgcag

SEQ ID NO: 2213 - DNA, 18 bp, Artificial Sequence
  Description of Artificial Sequence: Synthetic oligonucleotide
tgcctaggcctctgcctc

SEQ ID NO: 2214 - DNA, 18 bp, Artificial Sequence
  Description of Artificial Sequence: Synthetic oligonucleotide
tgtcctgcctaggcctct

SEQ ID NO: 2215 - DNA, 18 bp, Artificial Sequence
  Description of Artificial Sequence: Synthetic oligonucleotide
ggtgctgtcctgcctagg

SEQ ID NO: 2216 - DNA, 18 bp, Artificial Sequence
  Description of Artificial Sequence: Synthetic oligonucleotide
agcccggtgctgtcctgc

SEQ ID NO: 2217 - DNA, 18 bp, Artificial Sequence
  Description of Artificial Sequence: Synthetic oligonucleotide
ccagcagcccggtgctgt

SEQ ID NO: 2218 - DNA, 18 bp, Artificial Sequence
  Description of Artificial Sequence: Synthetic oligonucleotide
aagccccagcagcccggt

SEQ ID NO: 2219 - DNA, 18 bp, Artificial Sequence
  Description of Artificial Sequence: Synthetic oligonucleotide
tccctaagccccagcagc

SEQ ID NO: 2220 - DNA, 18 bp, Artificial Sequence
  Description of Artificial Sequence: Synthetic oligonucleotide
tgccatccctaagcccca

SEQ ID NO: 2221 - DNA, 18 bp, Artificial Sequence
  Description of Artificial Sequence: Synthetic oligonucleotide
gggggtgccatccctaag

SEQ ID NO: 2222 - DNA, 18 bp, Artificial Sequence
  Description of Artificial Sequence: Synthetic oligonucleotide
ctggagggggtgccatcc

SEQ ID NO: 2223 - DNA, 18 bp, Artificial Sequence
  Description of Artificial Sequence: Synthetic oligonucleotide
aagcgctggagggggtgc

SEQ ID NO: 2224 - DNA, 18 bp, Artificial Sequence
  Description of Artificial Sequence: Synthetic oligonucleotide
agaaaaagcgctggaggg

SEQ ID NO: 2225 - DNA, 18 bp, Artificial Sequence
  Description of Artificial Sequence: Synthetic oligonucleotide
agcagagaaaaagcgctg

SEQ ID NO: 2226 - DNA, 18 bp, Artificial Sequence
  Description of Artificial Sequence: Synthetic oligonucleotide
aggaaagcagagaaaaag

SEQ ID NO: 2227 - DNA, 18 bp, Artificial Sequence
  Description of Artificial Sequence: Synthetic oligonucleotide
cttggaggaaagcagaga

SEQ ID NO: 2228 - DNA, 18 bp, Artificial Sequence
  Description of Artificial Sequence: Synthetic oligonucleotide
gcagccttggaggaaagc

SEQ ID NO: 2229 - DNA, 18 bp, Artificial Sequence
  Description of Artificial Sequence: Synthetic oligonucleotide
cgaatgcagccttggagg

SEQ ID NO: 2230 - DNA, 18 bp, Artificial Sequence
  Description of Artificial Sequence: Synthetic oligonucleotide
aatcgcgaatgcagcctt

SEQ ID NO: 2231 - DNA, 18 bp, Artificial Sequence
  Description of Artificial Sequence: Synthetic oligonucleotide
tagaatcgcgaatgcagc

SEQ ID NO: 2232 - DNA, 18 bp, Artificial Sequence
  Description of Artificial Sequence: Synthetic oligonucleotide
gctcatagaatcgcgaat

SEQ ID NO: 2233 - DNA, 18 bp, Artificial Sequence
  Description of Artificial Sequence: Synthetic oligonucleotide
ggccagctcatagaatcg

SEQ ID NO: 2234 - DNA, 18 bp, Artificial Sequence
  Description of Artificial Sequence: Synthetic oligonucleotide
ttgggggccagctcatag

SEQ ID NO: 2235 - DNA, 18 bp, Artificial Sequence
  Description of Artificial Sequence: Synthetic oligonucleotide
cgaggttgggggccagct

SEQ ID NO: 2236 - DNA, 18 bp, Artificial Sequence
  Description of Artificial Sequence: Synthetic oligonucleotide
tgggacgaggttgggggc

SEQ ID NO: 2237 - DNA, 18 bp, Artificial Sequence
  Description of Artificial Sequence: Synthetic oligonucleotide
tccattgggacgaggttg

SEQ ID NO: 2238 - DNA, 18 bp, Artificial Sequence
  Description of Artificial Sequence: Synthetic oligonucleotide
tgtagtccattgggacga

SEQ ID NO: 2239 - DNA, 18 bp, Artificial Sequence
  Description of Artificial Sequence: Synthetic oligonucleotide
cttcctgtagtccattgg

SEQ ID NO: 2240 - DNA, 18 bp, Artificial Sequence
  Description of Artificial Sequence: Synthetic oligonucleotide
gggctcttcctgtagtcc

SEQ ID NO: 2241 - DNA, 18 bp, Artificial Sequence
  Description of Artificial Sequence: Synthetic oligonucleotide
cgatggggctcttcctgt

SEQ ID NO: 2242 - DNA, 18 bp, Artificial Sequence
  Description of Artificial Sequence: Synthetic oligonucleotide
gcacgtggacgatggggc

SEQ ID NO: 2243 - DNA, 18 bp, Artificial Sequence
  Description of Artificial Sequence: Synthetic oligonucleotide
catgggcacgtggacgat

SEQ ID NO: 2244 - DNA, 18 bp, Artificial Sequence
  Description of Artificial Sequence: Synthetic oligonucleotide
aggctcatgggcacgtgg

SEQ ID NO: 2245 - DNA, 18 bp, Artificial Sequence
  Description of Artificial Sequence: Synthetic oligonucleotide
tgatgaggctcatgggca

SEQ ID NO: 2246 - DNA, 18 bp, Artificial Sequence
  Description of Artificial Sequence: Synthetic oligonucleotide
ctggatgatgaggctcat

SEQ ID NO: 2247 - DNA, 18 bp, Artificial Sequence
  Description of Artificial Sequence: Synthetic oligonucleotide
ggcatctggatgatgagg

SEQ ID NO: 2248 - DNA, 18 bp, Artificial Sequence
  Description of Artificial Sequence: Synthetic oligonucleotide
gctctggcatctggatga

SEQ ID NO: 2249 - DNA, 18 bp, Artificial Sequence
  Description of Artificial Sequence: Synthetic oligonucleotide
ccggagctctggcatctg

SEQ ID NO: 2250 - DNA, 18 bp, Artificial Sequence
  Description of Artificial Sequence: Synthetic oligonucleotide
tacccggagctctggcat

SEQ ID NO: 2251 - DNA, 18 bp, Artificial Sequence
  Description of Artificial Sequence: Synthetic oligonucleotide
gcacatacccggagctct

SEQ ID NO: 2252 - DNA, 18 bp, Artificial Sequence
  Description of Artificial Sequence: Synthetic oligonucleotide
gtcctgcacatacccgga

SEQ ID NO: 2253 - DNA, 18 bp, Artificial Sequence
  Description of Artificial Sequence: Synthetic oligonucleotide
aagaggtcctgcacatac

SEQ ID NO: 2254 - DNA, 18 bp, Artificial Sequence
  Description of Artificial Sequence: Synthetic oligonucleotide
ccagcaagaggtcctgca

SEQ ID NO: 2255 - DNA, 18 bp, Artificial Sequence
  Description of Artificial Sequence: Synthetic oligonucleotide
gctcgccagcaagaggtc

SEQ ID NO: 2256 - DNA, 18 bp, Artificial Sequence
  Description of Artificial Sequence: Synthetic oligonucleotide
cccctgctcgccagcaag

SEQ ID NO: 2257 - DNA, 18 bp, Artificial Sequence
  Description of Artificial Sequence: Synthetic oligonucleotide
cagatcccctgctcgcca

SEQ ID NO: 2258 - DNA, 18 bp, Artificial Sequence
  Description of Artificial Sequence: Synthetic oligonucleotide
aggcacagatcccctgct

SEQ ID NO: 2259 - DNA, 18 bp, Artificial Sequence
  Description of Artificial Sequence: Synthetic oligonucleotide
tccagaggcacagatccc

SEQ ID NO: 2260 - DNA, 18 bp, Artificial Sequence
  Description of Artificial Sequence: Synthetic oligonucleotide
gctggtccagaggcacag

SEQ ID NO: 2261 - DNA, 18 bp, Artificial Sequence
  Description of Artificial Sequence: Synthetic oligonucleotide
ctgctgctggtccagagg

SEQ ID NO: 2262 - DNA, 18 bp, Artificial Sequence
  Description of Artificial Sequence: Synthetic oligonucleotide
ggcctctgctgctggtcc

SEQ ID NO: 2263 - DNA, 18 bp, Artificial Sequence
  Description of Artificial Sequence: Synthetic oligonucleotide
ctgggggcctctgctgct

SEQ ID NO: 2264 - DNA, 18 bp, Artificial Sequence
  Description of Artificial Sequence: Synthetic oligonucleotide
tagacctgggggcctctg

SEQ ID NO: 2265 - DNA, 18 bp, Artificial Sequence
  Description of Artificial Sequence: Synthetic oligonucleotide
cagcctagacctgggggc

SEQ ID NO: 2266 - DNA, 18 bp, Artificial Sequence
  Description of Artificial Sequence: Synthetic oligonucleotide
gggttcagcctagacctg

SEQ ID NO: 2267 - DNA, 18 bp, Artificial Sequence
  Description of Artificial Sequence: Synthetic oligonucleotide
gagctgggttcagcctag

SEQ ID NO: 2268 - DNA, 18 bp, Artificial Sequence
  Description of Artificial Sequence: Synthetic oligonucleotide
gggtggagctgggttcag

SEQ ID NO: 2269 - DNA, 18 bp, Artificial Sequence
  Description of Artificial Sequence: Synthetic oligonucleotide
acaaagggtggagctggg

SEQ ID NO: 2270 - DNA, 18 bp, Artificial Sequence
  Description of Artificial Sequence: Synthetic oligonucleotide
cagacacaaagggtggag

SEQ ID NO: 2271 - DNA, 18 bp, Artificial Sequence
  Description of Artificial Sequence: Synthetic oligonucleotide
acagacatgtgcacgcct

SEQ ID NO: 2272 - DNA, 18 bp, Artificial Sequence
  Description of Artificial Sequence: Synthetic oligonucleotide
gaaacacagacatgtgca

SEQ ID NO: 2273 - DNA, 18 bp, Artificial Sequence
  Description of Artificial Sequence: Synthetic oligonucleotide
aaaccgaaacacagacat

SEQ ID NO: 2274 - DNA, 18 bp, Artificial Sequence
  Description of Artificial Sequence: Synthetic oligonucleotide
tctgaaaaccgaaacaca

SEQ ID NO: 2275 - DNA, 18 bp, Artificial Sequence
  Description of Artificial Sequence: Synthetic oligonucleotide
atacttctgaaaaccgaa

SEQ ID NO: 2276 - DNA, 18 bp, Artificial Sequence
  Description of Artificial Sequence: Synthetic oligonucleotide
aggtgatacttctgaaaa

SEQ ID NO: 2277 - DNA, 18 bp, Artificial Sequence
  Description of Artificial Sequence: Synthetic oligonucleotide
ccccaaggtgatacttct

SEQ ID NO: 2278 - DNA, 18 bp, Artificial Sequence
  Description of Artificial Sequence: Synthetic oligonucleotide
agtcaccccaaggtgata

SEQ ID NO: 2279 - DNA, 18 bp, Artificial Sequence
  Description of Artificial Sequence: Synthetic oligonucleotide
ttgagagtcaccccaagg

SEQ ID NO: 2280 - DNA, 18 bp, Artificial Sequence
  Description of Artificial Sequence: Synthetic oligonucleotide
gtaagttgagagtcaccc

SEQ ID NO: 2281 - DNA, 18 bp, Artificial Sequence
  Description of Artificial Sequence: Synthetic oligonucleotide
tccatgtaagttgagagt

SEQ ID NO: 2282 - DNA, 18 bp, Artificial Sequence
  Description of Artificial Sequence: Synthetic oligonucleotide
gaaaatccatgtaagttg

SEQ ID NO: 2283 - DNA, 18 bp, Artificial Sequence
  Description of Artificial Sequence: Synthetic oligonucleotide
tctttgaaaatccatgta

SEQ ID NO: 2284 - DNA, 18 bp, Artificial Sequence
  Description of Artificial Sequence: Synthetic oligonucleotide
ataaatctttgaaaatcc

SEQ ID NO: 2285 - DNA, 18 bp, Artificial Sequence
  Description of Artificial Sequence: Synthetic oligonucleotide
attgaataaatctttgaa

SEQ ID NO: 2286 - DNA, 18 bp, Artificial Sequence
  Description of Artificial Sequence: Synthetic oligonucleotide
aacatattgaataaatct

SEQ ID NO: 2287 - DNA, 18 bp, Artificial Sequence
  Description of Artificial Sequence: Synthetic oligonucleotide
tgaaaaacatattgaata

SEQ ID NO: 2288 - DNA, 18 bp, Artificial Sequence
  Description of Artificial Sequence: Synthetic oligonucleotide
ctttctgaaaaacatatt

SEQ ID NO: 2289 - DNA, 18 bp, Artificial Sequence
  Description of Artificial Sequence: Synthetic oligonucleotide
caacactttctgaaaaac

SEQ ID NO: 2290 - DNA, 18 bp, Artificial Sequence
  Description of Artificial Sequence: Synthetic oligonucleotide
cttcacaacactttctga

SEQ ID NO: 2291 - DNA, 18 bp, Artificial Sequence
  Description of Artificial Sequence: Synthetic oligonucleotide
tcgctcttcacaacactt

SEQ ID NO: 2292 - DNA, 18 bp, Artificial Sequence
  Description of Artificial Sequence: Synthetic oligonucleotide
tcttcgctcttcacaaca

SEQ ID NO: 2293 - DNA, 18 bp, Artificial Sequence
  Description of Artificial Sequence: Synthetic oligonucleotide
aaaagtcttcgctcttca

SEQ ID NO: 2294 - DNA, 18 bp, Artificial Sequence
  Description of Artificial Sequence: Synthetic oligonucleotide
gagcgaaaagtcttcgct

SEQ ID NO: 2295 - DNA, 18 bp, Artificial Sequence
  Description of Artificial Sequence: Synthetic oligonucleotide
gctgggagcgaaaagtct

SEQ ID NO: 2296 - DNA, 18 bp, Artificial Sequence
  Description of Artificial Sequence: Synthetic oligonucleotide
tataagctgggagcgaaa

SEQ ID NO: 2297 - DNA, 18 bp, Artificial Sequence
  Description of Artificial Sequence: Synthetic oligonucleotide
atccatataagctgggag

SEQ ID NO: 2298 - DNA, 18 bp, Artificial Sequence
  Description of Artificial Sequence: Synthetic oligonucleotide
cgccgatccatataagct

SEQ ID NO: 2299 - DNA, 18 bp, Artificial Sequence
  Description of Artificial Sequence: Synthetic oligonucleotide
ggtcacgccgatccatat

SEQ ID NO: 2300 - DNA, 18 bp, Artificial Sequence
  Description of Artificial Sequence: Synthetic oligonucleotide
ggggtggtcacgccgatc

SEQ ID NO: 2301 - DNA, 18 bp, Artificial Sequence
  Description of Artificial Sequence: Synthetic oligonucleotide
ggcaaggggtggtcacgc

SEQ ID NO: 2302 - DNA, 18 bp, Artificial Sequence
  Description of Artificial Sequence: Synthetic oligonucleotide
cctccggcaaggggtggt

SEQ ID NO: 2303 - DNA, 18 bp, Artificial Sequence
  Description of Artificial Sequence: Synthetic oligonucleotide
ggccacctccggcaaggg

SEQ ID NO: 2304 - DNA, 18 bp, Artificial Sequence
  Description of Artificial Sequence: Synthetic oligonucleotide
acatgggccacctccggc

SEQ ID NO: 2305 - DNA, 18 bp, Artificial Sequence
  Description of Artificial Sequence: Synthetic oligonucleotide
gcttgacatgggccacct

SEQ ID NO: 2306 - DNA, 18 bp, Artificial Sequence
  Description of Artificial Sequence: Synthetic oligonucleotide
caggtgcttgacatgggc

SEQ ID NO: 2307 - DNA, 18 bp, Artificial Sequence
  Description of Artificial Sequence: Synthetic oligonucleotide
gcagacaggtgcttgaca

SEQ ID NO: 2308 - DNA, 18 bp, Artificial Sequence
  Description of Artificial Sequence: Synthetic oligonucleotide
ggctggcagacaggtgct

SEQ ID NO: 2309 - DNA, 18 bp, Artificial Sequence
  Description of Artificial Sequence: Synthetic oligonucleotide
ccttctggctggcagaca

SEQ ID NO: 2310 - DNA, 18 bp, Artificial Sequence
  Description of Artificial Sequence: Synthetic oligonucleotide
caatgccttctggctggc

SEQ ID NO: 2311 - DNA, 18 bp, Artificial Sequence
  Description of Artificial Sequence: Synthetic oligonucleotide
tccttcaatgccttctgg

SEQ ID NO: 2312 - DNA, 18 bp, Artificial Sequence
  Description of Artificial Sequence: Synthetic oligonucleotide
ccttctccttcaatgcct

SEQ ID NO: 2313 - DNA, 18 bp, Artificial Sequence
  Description of Artificial Sequence: Synthetic oligonucleotide
cttctccttctccttcaa

SEQ ID NO: 2314 - DNA, 18 bp, Artificial Sequence
  Description of Artificial Sequence: Synthetic oligonucleotide
gaggccttctccttctcc

SEQ ID NO: 2315 - DNA, 18 bp, Artificial Sequence
  Description of Artificial Sequence: Synthetic oligonucleotide
tccaggaggccttctcct

SEQ ID NO: 2316 - DNA, 18 bp, Artificial Sequence
  Description of Artificial Sequence: Synthetic oligonucleotide
gctgctccaggaggcctt

SEQ ID NO: 2317 - DNA, 18 bp, Artificial Sequence
  Description of Artificial Sequence: Synthetic oligonucleotide
gagaggctgctccaggag

SEQ ID NO: 2318 - DNA, 18 bp, Artificial Sequence
  Description of Artificial Sequence: Synthetic oligonucleotide
ccatggagaggctgctcc

SEQ ID NO: 2319 - DNA, 18 bp, Artificial Sequence
  Description of Artificial Sequence: Synthetic oligonucleotide
ctcatccatggagaggct

SEQ ID NO: 2320 - DNA, 18 bp, Artificial Sequence
  Description of Artificial Sequence: Synthetic oligonucleotide
actttctcatccatggag

SEQ ID NO: 2321 - DNA, 18 bp, Artificial Sequence
  Description of Artificial Sequence: Synthetic oligonucleotide
actcgactttctcatcca

SEQ ID NO: 2322 - DNA, 18 bp, Artificial Sequence
  Description of Artificial Sequence: Synthetic oligonucleotide
cacactcgactttctcat

SEQ ID NO: 2323 - DNA, 18 bp, Artificial Sequence
  Description of Artificial Sequence: Synthetic oligonucleotide
atacccacactcgacttt

SEQ ID NO: 2324 - DNA, 18 bp, Artificial Sequence
  Description of Artificial Sequence: Synthetic oligonucleotide
cttcaatacccacactcg

SEQ ID NO: 2325 - DNA, 18 bp, Artificial Sequence
  Description of Artificial Sequence: Synthetic oligonucleotide
ggtcccttcaatacccac

SEQ ID NO: 2326 - DNA, 18 bp, Artificial Sequence
  Description of Artificial Sequence: Synthetic oligonucleotide
ctgtgggtcccttcaata

SEQ ID NO: 2327 - DNA, 18 bp, Artificial Sequence
  Description of Artificial Sequence: Synthetic oligonucleotide
cgcgcctgtgggtccctt

SEQ ID NO: 2328 - DNA, 18 bp, Artificial Sequence
  Description of Artificial Sequence: Synthetic oligonucleotide
ctgggcgcgcctgtgggt

SEQ ID NO: 2329 - DNA, 18 bp, Artificial Sequence
  Description of Artificial Sequence: Synthetic oligonucleotide
agctgctgggcgcgcctg

SEQ ID NO: 2330 - DNA, 18 bp, Artificial Sequence
  Description of Artificial Sequence: Synthetic oligonucleotide
ccgagagctgctgggcgc

SEQ ID NO: 2331 - DNA, 18 bp, Artificial Sequence
  Description of Artificial Sequence: Synthetic oligonucleotide
cgcttccgagagctgctg

SEQ ID NO: 2332 - DNA, 18 bp, Artificial Sequence
  Description of Artificial Sequence: Synthetic oligonucleotide
acacacgcttccgagagc

SEQ ID NO: 2333 - DNA, 18 bp, Artificial Sequence
  Description of Artificial Sequence: Synthetic oligonucleotide
gtcacacacacgcttccg

SEQ ID NO: 2334 - DNA, 18 bp, Artificial Sequence
  Description of Artificial Sequence: Synthetic oligonucleotide
gctctgtcacacacacgc

SEQ ID NO: 2335 - DNA, 18 bp, Artificial Sequence
  Description of Artificial Sequence: Synthetic oligonucleotide
cagaggctctgtcacaca

SEQ ID NO: 2336 - DNA, 18 bp, Artificial Sequence
  Description of Artificial Sequence: Synthetic oligonucleotide
gtgagcagaggctctgtc

SEQ ID NO: 2337 - DNA, 18 bp, Artificial Sequence
  Description of Artificial Sequence: Synthetic oligonucleotide
cagaagtgagcagaggct

SEQ ID NO: 2338 - DNA, 18 bp, Artificial Sequence
  Description of Artificial Sequence: Synthetic oligonucleotide
aggcccagaagtgagcag

SEQ ID NO: 2339 - DNA, 18 bp, Artificial Sequence
  Description of Artificial Sequence: Synthetic oligonucleotide
acagtaggcccagaagtg

SEQ ID NO: 2340 - DNA, 18 bp, Artificial Sequence
  Description of Artificial Sequence: Synthetic oligonucleotide
tctagacagtaggcccag

SEQ ID NO: 2341 - DNA, 18 bp, Artificial Sequence
  Description of Artificial Sequence: Synthetic oligonucleotide
ctgcctctagacagtagg

SEQ ID NO: 2342 - DNA, 18 bp, Artificial Sequence
  Description of Artificial Sequence: Synthetic oligonucleotide
caagactgcctctagaca

SEQ ID NO: 2343 - DNA, 18 bp, Artificial Sequence
  Description of Artificial Sequence: Synthetic oligonucleotide
aaagagaagtttcagact

SEQ ID NO: 2344 - DNA, 18 bp, Artificial Sequence
  Description of Artificial Sequence: Synthetic oligonucleotide
ggggcaaagagaagtttc

SEQ ID NO: 2345 - DNA, 18 bp, Artificial Sequence
  Description of Artificial Sequence: Synthetic oligonucleotide
gaaatggggcaaagagaa

SEQ ID NO: 2346 - DNA, 18 bp, Artificial Sequence
  Description of Artificial Sequence: Synthetic oligonucleotide
acacagaaatggggcaaa

SEQ ID NO: 2347 - DNA, 18 bp, Artificial Sequence
  Description of Artificial Sequence: Synthetic oligonucleotide
ctgaaacacagaaatggg

SEQ ID NO: 2348 - DNA, 18 bp, Artificial Sequence
  Description of Artificial Sequence: Synthetic oligonucleotide
gctgtctgaaacacagaa

SEQ ID NO: 2349 - DNA, 18 bp, Artificial Sequence
  Description of Artificial Sequence: Synthetic oligonucleotide
cctttgctgtctgaaaca

SEQ ID NO: 2350 - DNA, 18 bp, Artificial Sequence
  Description of Artificial Sequence: Synthetic oligonucleotide
atatgcctttgctgtctg

SEQ ID NO: 2351 - DNA, 18 bp, Artificial Sequence
  Description of Artificial Sequence: Synthetic oligonucleotide
gctttatatgcctttgct

SEQ ID NO: 2352 - DNA, 18 bp, Artificial Sequence
  Description of Artificial Sequence: Synthetic oligonucleotide
tcatggctttatatgcct

SEQ ID NO: 2353 - DNA, 18 bp, Artificial Sequence
  Description of Artificial Sequence: Synthetic oligonucleotide
gtttttcatggctttata

SEQ ID NO: 2354 - DNA, 18 bp, Artificial Sequence
  Description of Artificial Sequence: Synthetic oligonucleotide
tagcagtttttcatggct

SEQ ID NO: 2355 - DNA, 18 bp, Artificial Sequence
  Description of Artificial Sequence: Synthetic oligonucleotide
gtatatagcagtttttca

SEQ ID NO: 2356 - DNA, 18 bp, Artificial Sequence
  Description of Artificial Sequence: Synthetic oligonucleotide
accatgtatatagcagtt

SEQ ID NO: 2357 - DNA, 18 bp, Artificial Sequence
  Description of Artificial Sequence: Synthetic oligonucleotide
aagagaccatgtatatag

SEQ ID NO: 2358 - DNA, 18 bp, Artificial Sequence
  Description of Artificial Sequence: Synthetic oligonucleotide
aaaataagagaccatgta

SEQ ID NO: 2359 - DNA, 18 bp, Artificial Sequence
  Description of Artificial Sequence: Synthetic oligonucleotide
aaaataaaataagagacc

SEQ ID NO: 2360 - DNA, 18 bp, Artificial Sequence
  Description of Artificial Sequence: Synthetic oligonucleotide
ctataaaaataaaataag

SEQ ID NO: 2361 - DNA, 18 bp, Artificial Sequence
  Description of Artificial Sequence: Synthetic oligonucleotide
gatatctataaaaataaa

SEQ ID NO: 2362 - DNA, 18 bp, Artificial Sequence
  Description of Artificial Sequence: Synthetic oligonucleotide
caatagatatctataaaa

SEQ ID NO: 2363 - DNA, 18 bp, Artificial Sequence
  Description of Artificial Sequence: Synthetic oligonucleotide
gatttcaatagatatcta

SEQ ID NO: 2364 - DNA, 18 bp, Artificial Sequence
  Description of Artificial Sequence: Synthetic oligonucleotide
ctcgatttcaatagatat

SEQ ID NO: 2365 - DNA, 18 bp, Artificial Sequence
  Description of Artificial Sequence: Synthetic oligonucleotide
ggagtctcgatttcaata

SEQ ID NO: 2366 - DNA, 18 bp, Artificial Sequence
  Description of Artificial Sequence: Synthetic oligonucleotide
gggtaggagtctcgattt

SEQ ID NO: 2367 - DNA, 18 bp, Artificial Sequence
  Description of Artificial Sequence: Synthetic oligonucleotide
tatctgggtaggagtctc

SEQ ID NO: 2368 - DNA, 18 bp, Artificial Sequence
  Description of Artificial Sequence: Synthetic oligonucleotide
aaagatatctgggtagga

SEQ ID NO: 2369 - DNA, 18 bp, Artificial Sequence
  Description of Artificial Sequence: Synthetic oligonucleotide
ccactaaagatatctggg

SEQ ID NO: 2370 - DNA, 18 bp, Artificial Sequence
  Description of Artificial Sequence: Synthetic oligonucleotide
gcttcatccactaaagat

SEQ ID NO: 2371 - DNA, 18 bp, Artificial Sequence
  Description of Artificial Sequence: Synthetic oligonucleotide
ctgatgcttcatccacta

SEQ ID NO: 2372 - DNA, 18 bp, Artificial Sequence
  Description of Artificial Sequence: Synthetic oligonucleotide
ctctcctgatgcttcatc

SEQ ID NO: 2373 - DNA, 18 bp, Artificial Sequence
  Description of Artificial Sequence: Synthetic oligonucleotide
tacctctcctgatgcttc

SEQ ID NO: 2374 - DNA, 18 bp, Artificial Sequence
  Description of Artificial Sequence: Synthetic oligonucleotide
ttagttacctctcctgat

SEQ ID NO: 2375 - DNA, 18 bp, Artificial Sequence
  Description of Artificial Sequence: Synthetic oligonucleotide
aatatttagttacctctc

SEQ ID NO: 2376 - DNA, 18 bp, Artificial Sequence
  Description of Artificial Sequence: Synthetic oligonucleotide
tatttaatatttagttac

SEQ ID NO: 2377 - DNA, 18 bp, Artificial Sequence
  Description of Artificial Sequence: Synthetic oligonucleotide
atcaatatttaatattta

SEQ ID NO: 2378 - DNA, 18 bp, Artificial Sequence
  Description of Artificial Sequence: Synthetic oligonucleotide
aaaaaatcaatatttaat

SEQ ID NO: 2379 - DNA, 18 bp, Artificial Sequence
  Description of Artificial Sequence: Synthetic oligonucleotide
ttttaaaaaaatcaatat

SEQ ID NO: 2380 - DNA, 18 bp, Artificial Sequence
  Description of Artificial Sequence: Synthetic oligonucleotide
catttttttaaaaaaatc

SEQ ID NO: 2381 - DNA, 18 bp, Artificial Sequence
  Description of Artificial Sequence: Synthetic oligonucleotide
caccacatttttttaaaa

SEQ ID NO: 2382 - DNA, 18 bp, Artificial Sequence
  Description of Artificial Sequence: Synthetic oligonucleotide
tttagcaccacatttttt

SEQ ID NO: 2383 - DNA, 18 bp, Artificial Sequence
  Description of Artificial Sequence: Synthetic oligonucleotide
atcattttagcaccacat

SEQ ID NO: 2384 - DNA, 18 bp, Artificial Sequence
  Description of Artificial Sequence: Synthetic oligonucleotide
aaacaatcattttagcac

SEQ ID NO: 2385 - DNA, 18 bp, Artificial Sequence
  Description of Artificial Sequence: Synthetic oligonucleotide
aatataaacaatcatttt

SEQ ID NO: 2386 - DNA, 18 bp, Artificial Sequence
  Description of Artificial Sequence: Synthetic oligonucleotide
agagaaatataaacaatc

SEQ ID NO: 2387 - DNA, 18 bp, Artificial Sequence
  Description of Artificial Sequence: Synthetic oligonucleotide
atcaaagagaaatataaa

SEQ ID NO: 2388 - DNA, 18 bp, Artificial Sequence
  Description of Artificial Sequence: Synthetic oligonucleotide
gcaaaatcaaagagaaat

SEQ ID NO: 2389 - DNA, 18 bp, Artificial Sequence
  Description of Artificial Sequence: Synthetic oligonucleotide
tgactgcaaaatcaaaga

SEQ ID NO: 2390 - DNA, 18 bp, Artificial Sequence
  Description of Artificial Sequence: Synthetic oligonucleotide
gcatctgactgcaaaatc

SEQ ID NO: 2391 - DNA, 18 bp, Artificial Sequence
  Description of Artificial Sequence: Synthetic oligonucleotide
gtggagcatctgactgca

SEQ ID NO: 2392 - DNA, 18 bp, Artificial Sequence
  Description of Artificial Sequence: Synthetic oligonucleotide
gaggggtggagcatctga

SEQ ID NO: 2393 - DNA, 18 bp, Artificial Sequence
  Description of Artificial Sequence: Synthetic oligonucleotide
tagctgaggggtggagca

SEQ ID NO: 2394 - DNA, 18 bp, Artificial Sequence
  Description of Artificial Sequence: Synthetic oligonucleotide
aaaaatatatgcttagaa

SEQ ID NO: 2395 - DNA, 18 bp, Artificial Sequence
  Description of Artificial Sequence: Synthetic oligonucleotide
caaataaaaatatatgct

SEQ ID NO: 2396 - DNA, 18 bp, Artificial Sequence
  Description of Artificial Sequence: Synthetic oligonucleotide
aactacaaataaaaatat

SEQ ID NO: 2397 - DNA, 18 bp, Artificial Sequence
  Description of Artificial Sequence: Synthetic oligonucleotide
tttttaactacaaataaa

SEQ ID NO: 2398 - DNA, 18 bp, Artificial Sequence
  Description of Artificial Sequence: Synthetic oligonucleotide
gtatgtttttaactacaa

SEQ ID NO: 2399 - DNA, 18 bp, Artificial Sequence
  Description of Artificial Sequence: Synthetic oligonucleotide
atacagtatgtttttaac

SEQ ID NO: 2400 - DNA, 18 bp, Artificial Sequence
  Description of Artificial Sequence: Synthetic oligonucleotide
caaatatacagtatgttt

SEQ ID NO: 2401 - DNA, 18 bp, Artificial Sequence
  Description of Artificial Sequence: Synthetic oligonucleotide
agaaacaaatatacagta

SEQ ID NO: 2402 - DNA, 18 bp, Artificial Sequence
  Description of Artificial Sequence: Synthetic oligonucleotide
aaaaaagaaacaaatata

SEQ ID NO: 2403 - DNA, 18 bp, Artificial Sequence
  Description of Artificial Sequence: Synthetic oligonucleotide
atgaaaaaaaagaaacaa

SEQ ID NO: 2404 - DNA, 18 bp, Artificial Sequence
  Description of Artificial Sequence: Synthetic oligonucleotide
gttaaatgaaaaaaaaga

SEQ ID NO: 2405 - DNA, 18 bp, Artificial Sequence
  Description of Artificial Sequence: Synthetic oligonucleotide
gtgatgttaaatgaaaaa

SEQ ID NO: 2406 - DNA, 18 bp, Artificial Sequence
  Description of Artificial Sequence: Synthetic oligonucleotide
ataatgtgatgttaaatg

SEQ ID NO: 2407 - DNA, 18 bp, Artificial Sequence
  Description of Artificial Sequence: Synthetic oligonucleotide
tgtttataatgtgatgtt

SEQ ID NO: 2408 - DNA, 18 bp, Artificial Sequence
  Description of Artificial Sequence: Synthetic oligonucleotide
gaaaatgtttataatgtg

SEQ ID NO: 2409 - DNA, 18 bp, Artificial Sequence
  Description of Artificial Sequence: Synthetic oligonucleotide
cacaagaaaatgtttata

SEQ ID NO: 2410 - DNA, 18 bp, Artificial Sequence
  Description of Artificial Sequence: Synthetic oligonucleotide
aattgcacaagaaaatgt

SEQ ID NO: 2411 - DNA, 18 bp, Artificial Sequence
  Description of Artificial Sequence: Synthetic oligonucleotide
ctggaaattgcacaagaa

SEQ ID NO: 2412 - DNA, 18 bp, Artificial Sequence
  Description of Artificial Sequence: Synthetic oligonucleotide
atcacctggaaattgcac

SEQ ID NO: 2413 - DNA, 18 bp, Artificial Sequence
  Description of Artificial Sequence: Synthetic oligonucleotide
tgttcatcacctggaaat

SEQ ID NO: 2414 - DNA, 18 bp, Artificial Sequence
  Description of Artificial Sequence: Synthetic oligonucleotide
gaggctgttcatcacctg

SEQ ID NO: 2415 - DNA, 18 bp, Artificial Sequence
  Description of Artificial Sequence: Synthetic oligonucleotide
aaggaggctgttcatcac

SEQ ID NO: 2416 - DNA, 18 bp, Artificial Sequence
  Description of Artificial Sequence: Synthetic oligonucleotide
tttagaaggaggctgttc

SEQ ID NO: 2417 - DNA, 18 bp, Artificial Sequence
  Description of Artificial Sequence: Synthetic oligonucleotide
aatgatttagaaggaggc

SEQ ID NO: 2418 - DNA, 18 bp, Artificial Sequence
  Description of Artificial Sequence: Synthetic oligonucleotide
tggtcaatgatttagaag

SEQ ID NO: 2419 - DNA, 18 bp, Artificial Sequence
  Description of Artificial Sequence: Synthetic oligonucleotide
aaatgtggtcaatgattt

SEQ ID NO: 2420 - DNA, 18 bp, Artificial Sequence
  Description of Artificial Sequence: Synthetic oligonucleotide
ataagaaatgtggtcaat

SEQ ID NO: 2421 - DNA, 18 bp, Artificial Sequence
  Description of Artificial Sequence: Synthetic oligonucleotide
aaagaataagaaatgtgg

SEQ ID NO: 2422 - DNA, 18 bp, Artificial Sequence
  Description of Artificial Sequence: Synthetic oligonucleotide
tcaggaaagaataagaaa

SEQ ID NO: 2423 - DNA, 18 bp, Artificial Sequence
  Description of Artificial Sequence: Synthetic oligonucleotide
tatcctcaggaaagaata

SEQ ID NO: 2424 - DNA, 18 bp, Artificial Sequence
  Description of Artificial Sequence: Synthetic oligonucleotide
aaatttatcctcaggaaa

SEQ ID NO: 2425 - DNA, 18 bp, Artificial Sequence
  Description of Artificial Sequence: Synthetic oligonucleotide
tcttgaaatttatcctca

SEQ ID NO: 2426 - DNA, 18 bp, Artificial Sequence
  Description of Artificial Sequence: Synthetic oligonucleotide
ggatatcttgaaatttat

SEQ ID NO: 2427 - DNA, 18 bp, Artificial Sequence
  Description of Artificial Sequence: Synthetic oligonucleotide
ttggttcaggatatcttg

SEQ ID NO: 2428 - DNA, 18 bp, Artificial Sequence
  Description of Artificial Sequence: Synthetic oligonucleotide
atcagttggttcaggata

SEQ ID NO: 2429 - DNA, 18 bp, Artificial Sequence
  Description of Artificial Sequence: Synthetic oligonucleotide
ctgtcatcagttggttca

SEQ ID NO: 2430 - DNA, 18 bp, Artificial Sequence
  Description of Artificial Sequence: Synthetic oligonucleotide
ataggctgtcatcagttg

SEQ ID NO: 2431 - DNA, 18 bp, Artificial Sequence
  Description of Artificial Sequence: Synthetic oligonucleotide
gctaaataggctgtcatc

SEQ ID NO: 2432 - DNA, 18 bp, Artificial Sequence
  Description of Artificial Sequence: Synthetic oligonucleotide
ctgtagctaaataggctg

SEQ ID NO: 2433 - DNA, 18 bp, Artificial Sequence
  Description of Artificial Sequence: Synthetic oligonucleotide
tattcctgtagctaaata

SEQ ID NO: 2434 - DNA, 18 bp, Artificial Sequence
  Description of Artificial Sequence: Synthetic oligonucleotide
cagagtattcctgtagct

SEQ ID NO: 2435 - DNA, 18 bp, Artificial Sequence
  Description of Artificial Sequence: Synthetic oligonucleotide
ccttccagagtattcctg

SEQ ID NO: 2436 - DNA, 18 bp, Artificial Sequence
  Description of Artificial Sequence: Synthetic oligonucleotide
catttccttccagagtat

SEQ ID NO: 2437 - DNA, 18 bp, Artificial Sequence
  Description of Artificial Sequence: Synthetic oligonucleotide
taccatttccttccagag

SEQ ID NO: 2438 - DNA, 18 bp, Artificial Sequence
  Description of Artificial Sequence: Synthetic oligonucleotide
gaagctaccatttccttc

SEQ ID NO: 2439 - DNA, 18 bp, Artificial Sequence
  Description of Artificial Sequence: Synthetic oligonucleotide
ctccagaagctaccattt

SEQ ID NO: 2440 - DNA, 18 bp, Artificial Sequence
  Description of Artificial Sequence: Synthetic oligonucleotide
taaaactccagaagctac

SEQ ID NO: 2441 - DNA, 18 bp, Artificial Sequence
  Description of Artificial Sequence: Synthetic oligonucleotide
ccagttaaaactccagaa

SEQ ID NO: 2442 - DNA, 18 bp, Artificial Sequence
  Description of Artificial Sequence: Synthetic oligonucleotide
acactccagttaaaactc

SEQ ID NO: 2443 - DNA, 18 bp, Artificial Sequence
  Description of Artificial Sequence: Synthetic oligonucleotide
gattaacactccagttaa

SEQ ID NO: 2444 - DNA, 18 bp, Artificial Sequence
  Description of Artificial Sequence: Synthetic oligonucleotide
ggcaagattaacactcca

SEQ ID NO: 2445 - DNA, 18 bp, Artificial Sequence
  Description of Artificial Sequence: Synthetic oligonucleotide
atggtggcaagattaaca

SEQ ID NO: 2446 - DNA, 18 bp, Artificial Sequence
  Description of Artificial Sequence: Synthetic oligonucleotide
aggtcatggtggcaagat

SEQ ID NO: 2447 - DNA, 18 bp, Artificial Sequence
  Description of Artificial Sequence: Synthetic oligonucleotide
ccattaggtcatggtggc

SEQ ID NO: 2448 - DNA, 18 bp, Artificial Sequence
  Description of Artificial Sequence: Synthetic oligonucleotide
atattccattaggtcatg

SEQ ID NO: 2449 - DNA, 18 bp, Artificial Sequence
  Description of Artificial Sequence: Synthetic oligonucleotide
atgtgatattccattagg

SEQ ID NO: 2450 - DNA, 18 bp, Artificial Sequence
  Description of Artificial Sequence: Synthetic oligonucleotide
aggttatgtgatattcca

SEQ ID NO: 2451 - DNA, 18 bp, Artificial Sequence
  Description of Artificial Sequence: Synthetic oligonucleotide
cagggaggttatgtgata

SEQ ID NO: 2452 - DNA, 18 bp, Artificial Sequence
  Description of Artificial Sequence: Synthetic oligonucleotide
cacaccagggaggttatg

SEQ ID NO: 2453 - DNA, 18 bp, Artificial Sequence
  Description of Artificial Sequence: Synthetic oligonucleotide
atggtcacaccagggagg

SEQ ID NO: 2454 - DNA, 18 bp, Artificial Sequence
  Description of Artificial Sequence: Synthetic oligonucleotide
gcttaatggtcacaccag

SEQ ID NO: 2455 - DNA, 18 bp, Artificial Sequence
  Description of Artificial Sequence: Synthetic oligonucleotide
gctaagcttaatggtcac

SEQ ID NO: 2456 - DNA, 18 bp, Artificial Sequence
  Description of Artificial Sequence: Synthetic oligonucleotide
atcctgctaagcttaatg

SEQ ID NO: 2457 - DNA, 18 bp, Artificial Sequence
  Description of Artificial Sequence: Synthetic oligonucleotide
ctgagatcctgctaagct

SEQ ID NO: 2458 - DNA, 18 bp, Artificial Sequence
  Description of Artificial Sequence: Synthetic oligonucleotide
catcgttttcttctaacg

SEQ ID NO: 2459 - DNA, 18 bp, Artificial Sequence
  Description of Artificial Sequence: Synthetic oligonucleotide
aataacatcgttttcttc

SEQ ID NO: 2460 - DNA, 18 bp, Artificial Sequence
  Description of Artificial Sequence: Synthetic oligonucleotide
ccttgaataacatcgttt

SEQ ID NO: 2461 - DNA, 18 bp, Artificial Sequence
  Description of Artificial Sequence: Synthetic oligonucleotide
catgtccttgaataacat

SEQ ID NO: 2462 - DNA, 18 bp, Artificial Sequence
  Description of Artificial Sequence: Synthetic oligonucleotide
tacaacatgtccttgaat

SEQ ID NO: 2463 - DNA, 18 bp, Artificial Sequence
  Description of Artificial Sequence: Synthetic oligonucleotide
ttatatacaacatgtcct

SEQ ID NO: 2464 - DNA, 18 bp, Artificial Sequence
  Description of Artificial Sequence: Synthetic oligonucleotide
tgtatttatatacaacat

SEQ ID NO: 2465 - DNA, 18 bp, Artificial Sequence
  Description of Artificial Sequence: Synthetic oligonucleotide
tttcatgtatttatatac

SEQ ID NO: 2466 - DNA, 18 bp, Artificial Sequence
  Description of Artificial Sequence: Synthetic oligonucleotide
tatattttcatgtattta

SEQ ID NO: 2467 - DNA, 18 bp, Artificial Sequence
  Description of Artificial Sequence: Synthetic oligonucleotide
atacatatattttcatgt

SEQ ID NO: 2468 - DNA, 18 bp, Artificial Sequence
  Description of Artificial Sequence: Synthetic oligonucleotide
ggaatatacatatatttt

SEQ ID NO: 2469 - DNA, 18 bp, Artificial Sequence
  Description of Artificial Sequence: Synthetic oligonucleotide
ttttgggaatatacatat

SEQ ID NO: 2470 - DNA, 18 bp, Artificial Sequence
  Description of Artificial Sequence: Synthetic oligonucleotide
gtatattttgggaatata

SEQ ID NO: 2471 - DNA, 18 bp, Artificial Sequence
  Description of Artificial Sequence: Synthetic oligonucleotide
cctaagtatattttggga

SEQ ID NO: 2472 - DNA, 18 bp, Artificial Sequence
  Description of Artificial Sequence: Synthetic oligonucleotide
gaaagcctaagtatattt

SEQ ID NO: 2473 - DNA, 18 bp, Artificial Sequence
  Description of Artificial Sequence: Synthetic oligonucleotide
acaaagaaagcctaagta

SEQ ID NO: 2474 - DNA, 18 bp, Artificial Sequence
  Description of Artificial Sequence: Synthetic oligonucleotide
aaatcacaaagaaagcct

SEQ ID NO: 2475 - DNA, 18 bp, Artificial Sequence
  Description of Artificial Sequence: Synthetic oligonucleotide
ctataaaatcacaaagaa

SEQ ID NO: 2476 - DNA, 18 bp, Artificial Sequence
  Description of Artificial Sequence: Synthetic oligonucleotide
tttacctataaaatcaca

SEQ ID NO: 2477 - DNA, 18 bp, Artificial Sequence
  Description of Artificial Sequence: Synthetic oligonucleotide
ttctgtttacctataaaa

SEQ ID NO: 2478 - DNA, 18 bp, Artificial Sequence
  Description of Artificial Sequence: Synthetic oligonucleotide
ccagattctgtttaccta

SEQ ID NO: 2479 - DNA, 18 bp, Artificial Sequence
  Description of Artificial Sequence: Synthetic oligonucleotide
tcaccagattctgtttac

SEQ ID NO: 2480 - DNA, 18 bp, Artificial Sequence
  Description of Artificial Sequence: Synthetic oligonucleotide
cataatcaccagattctg

SEQ ID NO: 2481 - DNA, 18 bp, Artificial Sequence
  Description of Artificial Sequence: Synthetic oligonucleotide
ttacccataatcaccaga

SEQ ID NO: 2482 - DNA, 18 bp, Artificial Sequence
  Description of Artificial Sequence: Synthetic oligonucleotide
tcttcttacccataatca

SEQ ID NO: 2483 - DNA, 18 bp, Artificial Sequence
  Description of Artificial Sequence: Synthetic oligonucleotide
ccaggtcttcttacccat

SEQ ID NO: 2484 - DNA, 18 bp, Artificial Sequence
  Description of Artificial Sequence: Synthetic oligonucleotide
gagaaccaggtcttctta

SEQ ID NO: 2485 - DNA, 18 bp, Artificial Sequence
  Description of Artificial Sequence: Synthetic oligonucleotide
gaatggagaaccaggtct

SEQ ID NO: 2486 - DNA, 18 bp, Artificial Sequence
  Description of Artificial Sequence: Synthetic oligonucleotide
ctcaggaatggagaacca

SEQ ID NO: 2487 - DNA, 18 bp, Artificial Sequence
  Description of Artificial Sequence: Synthetic oligonucleotide
ttcttctcaggaatggag

SEQ ID NO: 2488 - DNA, 18 bp, Artificial Sequence
  Description of Artificial Sequence: Synthetic oligonucleotide
gtcgattcttctcaggaa

SEQ ID NO: 2489 - DNA, 18 bp, Artificial Sequence
  Description of Artificial Sequence: Synthetic oligonucleotide
ctttaaaggtcgattctt

SEQ ID NO: 2490 - DNA, 18 bp, Artificial Sequence
  Description of Artificial Sequence: Synthetic oligonucleotide
ctaccctttaaaggtcga

SEQ ID NO: 2491 - DNA, 18 bp, Artificial Sequence
  Description of Artificial Sequence: Synthetic oligonucleotide
taattctaccctttaaag

SEQ ID NO: 2492 - DNA, 18 bp, Artificial Sequence
  Description of Artificial Sequence: Synthetic oligonucleotide
taaattaattctaccctt

SEQ ID NO: 2493 - DNA, 18 bp, Artificial Sequence
  Description of Artificial Sequence: Synthetic oligonucleotide
agaactaaattaattcta

SEQ ID NO: 2494 - DNA, 18 bp, Artificial Sequence
  Description of Artificial Sequence: Synthetic oligonucleotide
tgctgagaactaaattaa

SEQ ID NO: 2495 - DNA, 18 bp, Artificial Sequence
  Description of Artificial Sequence: Synthetic oligonucleotide
ttctctgctgagaactaa

SEQ ID NO: 2496 - DNA, 18 bp, Artificial Sequence
  Description of Artificial Sequence: Synthetic oligonucleotide
ttgagttctctgctgaga

SEQ ID NO: 2497 - DNA, 18 bp, Artificial Sequence
  Description of Artificial Sequence: Synthetic oligonucleotide
tacttgagttctctgctg

SEQ ID NO: 2498 - DNA, 18 bp, Artificial Sequence
  Description of Artificial Sequence: Synthetic oligonucleotide
gtacttacttgagttctc

SEQ ID NO: 2499 - DNA, 18 bp, Artificial Sequence
  Description of Artificial Sequence: Synthetic oligonucleotide
ttaaggtacttacttgag

SEQ ID NO: 2500 - DNA, 18 bp, Artificial Sequence
  Description of Artificial Sequence: Synthetic oligonucleotide
ttatgttaaggtacttac

SEQ ID NO: 2501 - DNA, 18 bp, Artificial Sequence
  Description of Artificial Sequence: Synthetic oligonucleotide
tgaatttatgttaaggta

SEQ ID NO: 2502 - DNA, 18 bp, Artificial Sequence
  Description of Artificial Sequence: Synthetic oligonucleotide
tgtggtgaatttatgtta

SEQ ID NO: 2503 - DNA, 18 bp, Artificial Sequence
  Description of Artificial Sequence: Synthetic oligonucleotide
tttcttgtggtgaattta

SEQ ID NO: 2504 - DNA, 18 bp, Artificial Sequence
  Description of Artificial Sequence: Synthetic oligonucleotide
atgattttcttgtggtga

SEQ ID NO: 2505 - DNA, 18 bp, Artificial Sequence
  Description of Artificial Sequence: Synthetic oligonucleotide
gagacatgattttcttgt

SEQ ID NO: 2506 - DNA, 18 bp, Artificial Sequence
  Description of Artificial Sequence: Synthetic oligonucleotide
actatgagacatgatttt

SEQ ID NO: 2507 - DNA, 18 bp, Artificial Sequence
  Description of Artificial Sequence: Synthetic oligonucleotide
tctccactatgagacatg

SEQ ID NO: 2508 - DNA, 18 bp, Artificial Sequence
  Description of Artificial Sequence: Synthetic oligonucleotide
actgatctccactatgag

SEQ ID NO: 2509 - DNA, 18 bp, Artificial Sequence
  Description of Artificial Sequence: Synthetic oligonucleotide
catatactgatctccact

SEQ ID NO: 2510 - DNA, 18 bp, Artificial Sequence
  Description of Artificial Sequence: Synthetic oligonucleotide
tttatcatatactgatct

SEQ ID NO: 2511 - DNA, 18 bp, Artificial Sequence
  Description of Artificial Sequence: Synthetic oligonucleotide
ttcattttatcatatact

SEQ ID NO: 2512 - DNA, 18 bp, Artificial Sequence
  Description of Artificial Sequence: Synthetic oligonucleotide
acaatttcattttatcat

SEQ ID NO: 2513 - DNA, 18 bp, Artificial Sequence
  Description of Artificial Sequence: Synthetic oligonucleotide
tttatacaatttcatttt

SEQ ID NO: 2514 - DNA, 18 bp, Artificial Sequence
  Description of Artificial Sequence: Synthetic oligonucleotide
ctccttttatacaatttc

SEQ ID NO: 2515 - DNA, 18 bp, Artificial Sequence
  Description of Artificial Sequence: Synthetic oligonucleotide
aatagctccttttataca

SEQ ID NO: 2516 - DNA, 18 bp, Artificial Sequence
  Description of Artificial Sequence: Synthetic oligonucleotide
tcatcaatagctcctttt

SEQ ID NO: 2517 - DNA, 18 bp, Artificial Sequence
  Description of Artificial Sequence: Synthetic oligonucleotide
cagcttcatcaatagctc

SEQ ID NO: 2518 - DNA, 18 bp, Artificial Sequence
  Description of Artificial Sequence: Synthetic oligonucleotide
aatgaatcacaatatatc

SEQ ID NO: 2519 - DNA, 18 bp, Artificial Sequence
  Description of Artificial Sequence: Synthetic oligonucleotide
tagaaaatgaatcacaat

SEQ ID NO: 2520 - DNA, 18 bp, Artificial Sequence
  Description of Artificial Sequence: Synthetic oligonucleotide
catgatagaaaatgaatc

SEQ ID NO: 2521 - DNA, 18 bp, Artificial Sequence
  Description of Artificial Sequence: Synthetic oligonucleotide
caaatcatgatagaaaat

SEQ ID NO: 2522 - DNA, 18 bp, Artificial Sequence
  Description of Artificial Sequence: Synthetic oligonucleotide
tatagcaaatcatgatag

SEQ ID NO: 2523 - DNA, 18 bp, Artificial Sequence
  Description of Artificial Sequence: Synthetic oligonucleotide
attactatagcaaatcat

SEQ ID NO: 2524 - DNA, 18 bp, Artificial Sequence
  Description of Artificial Sequence: Synthetic oligonucleotide
gaaacattactatagcaa

SEQ ID NO: 2525 - DNA, 18 bp, Artificial Sequence
  Description of Artificial Sequence: Synthetic oligonucleotide
cttatgaaacattactat

SEQ ID NO: 2526 - DNA, 18 bp, Artificial Sequence
  Description of Artificial Sequence: Synthetic oligonucleotide
tttcacttatgaaacatt

SEQ ID NO: 2527 - DNA, 18 bp, Artificial Sequence
  Description of Artificial Sequence: Synthetic oligonucleotide
tcgtgtttcacttatgaa

SEQ ID NO: 2528 - DNA, 18 bp, Artificial Sequence
  Description of Artificial Sequence: Synthetic oligonucleotide
ttagatcgtgtttcactt

SEQ ID NO: 2529 - DNA, 18 bp, Artificial Sequence
  Description of Artificial Sequence: Synthetic oligonucleotide
aaggattagatcgtgttt

SEQ ID NO: 2530 - DNA, 18 bp, Artificial Sequence
  Description of Artificial Sequence: Synthetic oligonucleotide
aagtaaaggattagatcg

SEQ ID NO: 2531 - DNA, 18 bp, Artificial Sequence
  Description of Artificial Sequence: Synthetic oligonucleotide
accagaagtaaaggatta

SEQ ID NO: 2532 - DNA, 18 bp, Artificial Sequence
  Description of Artificial Sequence: Synthetic oligonucleotide
acaacaccagaagtaaag

SEQ ID NO: 2533 - DNA, 18 bp, Artificial Sequence
  Description of Artificial Sequence: Synthetic oligonucleotide
gtggaacaacaccagaag

SEQ ID NO: 2534 - DNA, 18 bp, Artificial Sequence
  Description of Artificial Sequence: Synthetic oligonucleotide
atcaagtggaacaacacc

SEQ ID NO: 2535 - DNA, 18 bp, Artificial Sequence
  Description of Artificial Sequence: Synthetic oligonucleotide
ctgtcatcaagtggaaca

SEQ ID NO: 2536 - DNA, 18 bp, Artificial Sequence
  Description of Artificial Sequence: Synthetic oligonucleotide
taggcctgtcatcaagtg

SEQ ID NO: 2537 - DNA, 18 bp, Artificial Sequence
  Description of Artificial Sequence: Synthetic oligonucleotide
aagggtaggcctgtcatc

SEQ ID NO: 2538 - DNA, 18 bp, Artificial Sequence
  Description of Artificial Sequence: Synthetic oligonucleotide
gctacaagggtaggcctg

SEQ ID NO: 2539 - DNA, 18 bp, Artificial Sequence
  Description of Artificial Sequence: Synthetic oligonucleotide
actgctacaagggtaggc

SEQ ID NO: 2540 - DNA, 18 bp, Artificial Sequence
  Description of Artificial Sequence: Synthetic oligonucleotide
ttatcactgctacaaggg

SEQ ID NO: 2541 - DNA, 18 bp, Artificial Sequence
  Description of Artificial Sequence: Synthetic oligonucleotide
actccttatcactgctac

SEQ ID NO: 2542 - DNA, 18 bp, Artificial Sequence
  Description of Artificial Sequence: Synthetic oligonucleotide
ttcacactccttatcact

SEQ ID NO: 2543 - DNA, 18 bp, Artificial Sequence
  Description of Artificial Sequence: Synthetic oligonucleotide
ccaacttcacactcctta

SEQ ID NO: 2544 - DNA, 18 bp, Artificial Sequence
  Description of Artificial Sequence: Synthetic oligonucleotide
acctcccaacttcacact

SEQ ID NO: 2545 - DNA, 18 bp, Artificial Sequence
  Description of Artificial Sequence: Synthetic oligonucleotide
gcaatacctcccaacttc

SEQ ID NO: 2546 - DNA, 18 bp, Artificial Sequence
  Description of Artificial Sequence: Synthetic oligonucleotide
ctgtggcaatacctccca

SEQ ID NO: 2547 - DNA, 18 bp, Artificial Sequence
  Description of Artificial Sequence: Synthetic oligonucleotide
ggggactgtggcaatacc

SEQ ID NO: 2548 - DNA, 18 bp, Artificial Sequence
  Description of Artificial Sequence: Synthetic oligonucleotide
ttggtggggactgtggca

SEQ ID NO: 2549 - DNA, 18 bp, Artificial Sequence
  Description of Artificial Sequence: Synthetic oligonucleotide
gatccttggtggggactg

SEQ ID NO: 2550 - DNA, 18 bp, Artificial Sequence
  Description of Artificial Sequence: Synthetic oligonucleotide
ccgatgatccttggtggg

SEQ ID NO: 2551 - DNA, 18 bp, Artificial Sequence
  Description of Artificial Sequence: Synthetic oligonucleotide
gcaggccgatgatccttg

SEQ ID NO: 2552 - DNA, 18 bp, Artificial Sequence
  Description of Artificial Sequence: Synthetic oligonucleotide
accatgcaggccgatgat

SEQ ID NO: 2553 - DNA, 18 bp, Artificial Sequence
  Description of Artificial Sequence: Synthetic oligonucleotide
gacacaccatgcaggccg

SEQ ID NO: 2554 - DNA, 18 bp, Artificial Sequence
  Description of Artificial Sequence: Synthetic oligonucleotide
ttttctccgacacaccat

SEQ ID NO: 2555 - DNA, 18 bp, Artificial Sequence
  Description of Artificial Sequence: Synthetic oligonucleotide
ttcttttttctccgacac

SEQ ID NO: 2556 - DNA, 18 bp, Artificial Sequence
  Description of Artificial Sequence: Synthetic oligonucleotide
agcgcttcttttttctcc

SEQ ID NO: 2557 - DNA, 18 bp, Artificial Sequence
  Description of Artificial Sequence: Synthetic oligonucleotide
gtggcagcgcttcttttt

SEQ ID NO: 2558 - DNA, 18 bp, Artificial Sequence
  Description of Artificial Sequence: Synthetic oligonucleotide
tctcggtggcagcgcttc

SEQ ID NO: 2559 - DNA, 18 bp, Artificial Sequence
  Description of Artificial Sequence: Synthetic oligonucleotide
tgccatctcggtggcagc

SEQ ID NO: 2560 - DNA, 18 bp, Artificial Sequence
  Description of Artificial Sequence: Synthetic oligonucleotide
gcacatgccatctcggtg

SEQ ID NO: 2561 - DNA, 18 bp, Artificial Sequence
  Description of Artificial Sequence: Synthetic oligonucleotide
gggcagcacatgccatct

SEQ ID NO: 2562 - DNA, 18 bp, Artificial Sequence
  Description of Artificial Sequence: Synthetic oligonucleotide
tactggggcagcacatgc

SEQ ID NO: 2563 - DNA, 18 bp, Artificial Sequence
  Description of Artificial Sequence: Synthetic oligonucleotide
gcgggtactggggcagca

SEQ ID NO: 2564 - DNA, 18 bp, Artificial Sequence
  Description of Artificial Sequence: Synthetic oligonucleotide
ttgcagcgggtactgggg

SEQ ID NO: 2565 - DNA, 18 bp, Artificial Sequence
  Description of Artificial Sequence: Synthetic oligonucleotide
cattattgcagcgggtac

SEQ ID NO: 2566 - DNA, 18 bp, Artificial Sequence
  Description of Artificial Sequence: Synthetic oligonucleotide
taccattattgcagcggg

SEQ ID NO: 2567 - DNA, 18 bp, Artificial Sequence
  Description of Artificial Sequence: Synthetic oligonucleotide
tcttttaccattattgca

SEQ ID NO: 2568 - DNA, 18 bp, Artificial Sequence
  Description of Artificial Sequence: Synthetic oligonucleotide
tgagatcttttaccatta

SEQ ID NO: 2569 - DNA, 18 bp, Artificial Sequence
  Description of Artificial Sequence: Synthetic oligonucleotide
cttagtgagatcttttac

SEQ ID NO: 2570 - DNA, 18 bp, Artificial Sequence
  Description of Artificial Sequence: Synthetic oligonucleotide
taacacttagtgagatct

SEQ ID NO: 2571 - DNA, 18 bp, Artificial Sequence
  Description of Artificial Sequence: Synthetic oligonucleotide
cccattaacacttagtga

SEQ ID NO: 2572 - DNA, 18 bp, Artificial Sequence
  Description of Artificial Sequence: Synthetic oligonucleotide
agaggcccattaacactt

SEQ ID NO: 2573 - DNA, 18 bp, Artificial Sequence
  Description of Artificial Sequence: Synthetic oligonucleotide
aagaaagaggcccattaa

SEQ ID NO: 2574 - DNA, 18 bp, Artificial Sequence
  Description of Artificial Sequence: Synthetic oligonucleotide
atgaaaagaaagaggccc

SEQ ID NO: 2575 - DNA, 18 bp, Artificial Sequence
  Description of Artificial Sequence: Synthetic oligonucleotide
tgatgatgaaaagaaaga

SEQ ID NO: 2576 - DNA, 18 bp, Artificial Sequence
  Description of Artificial Sequence: Synthetic oligonucleotide
gcttatgatgatgaaaag

SEQ ID NO: 2577 - DNA, 18 bp, Artificial Sequence
  Description of Artificial Sequence: Synthetic oligonucleotide
gacaggcttatgatgatg

SEQ ID NO: 2578 - DNA, 18 bp, Artificial Sequence
  Description of Artificial Sequence: Synthetic oligonucleotide
tgagagacaggcttatga

SEQ ID NO: 2579 - DNA, 18 bp, Artificial Sequence
  Description of Artificial Sequence: Synthetic oligonucleotide
tgacttgagagacaggct

SEQ ID NO: 2580 - DNA, 18 bp, Artificial Sequence
  Description of Artificial Sequence: Synthetic oligonucleotide
tagcctgacttgagagac

SEQ ID NO: 2581 - DNA, 18 bp, Artificial Sequence
  Description of Artificial Sequence: Synthetic oligonucleotide
gacgatagcctgacttga

SEQ ID NO: 2582 - DNA, 18 bp, Artificial Sequence
  Description of Artificial Sequence: Synthetic oligonucleotide
aaggagacgatagcctga

SEQ ID NO: 2583 - DNA, 18 bp, Artificial Sequence
  Description of Artificial Sequence: Synthetic oligonucleotide
tgagtaaggagacgatag

SEQ ID NO: 2584 - DNA, 18 bp, Artificial Sequence
  Description of Artificial Sequence: Synthetic oligonucleotide
gagtctgagtaaggagac

SEQ ID NO: 2585 - DNA, 18 bp, Artificial Sequence
  Description of Artificial Sequence: Synthetic oligonucleotide
ttcaggagtctgagtaag

SEQ ID NO: 2586 - DNA, 18 bp, Artificial Sequence
  Description of Artificial Sequence: Synthetic oligonucleotide
tatatttcaggagtctga

SEQ ID NO: 2587 - DNA, 18 bp, Artificial Sequence
  Description of Artificial Sequence: Synthetic oligonucleotide
gagaattgaattcacagc

SEQ ID NO: 2588 - DNA, 18 bp, Artificial Sequence
  Description of Artificial Sequence: Synthetic oligonucleotide
tgttagagaattgaattc

SEQ ID NO: 2589 - DNA, 18 bp, Artificial Sequence
  Description of Artificial Sequence: Synthetic oligonucleotide
ggccctgttagagaattg

SEQ ID NO: 2590 - DNA, 18 bp, Artificial Sequence
  Description of Artificial Sequence: Synthetic oligonucleotide
aatttggccctgttagag

SEQ ID NO: 2591 - DNA, 18 bp, Artificial Sequence
  Description of Artificial Sequence: Synthetic oligonucleotide
aatcaaatttggccctgt

SEQ ID NO: 2592 - DNA, 18 bp, Artificial Sequence
  Description of Artificial Sequence: Synthetic oligonucleotide
ggtctaatcaaatttggc

SEQ ID NO: 2593 - DNA, 18 bp, Artificial Sequence
  Description of Artificial Sequence: Synthetic oligonucleotide
gtgttggtctaatcaaat

SEQ ID NO: 2594 - DNA, 18 bp, Artificial Sequence
  Description of Artificial Sequence: Synthetic oligonucleotide
agcctgtgttggtctaat

SEQ ID NO: 2595 - DNA, 18 bp, Artificial Sequence
  Description of Artificial Sequence: Synthetic oligonucleotide
aattcagcctgtgttggt

SEQ ID NO: 2596 - DNA, 18 bp, Artificial Sequence
  Description of Artificial Sequence: Synthetic oligonucleotide
acttaaattcagcctgtg

SEQ ID NO: 2597 - DNA, 18 bp, Artificial Sequence
  Description of Artificial Sequence: Synthetic oligonucleotide
tacacacttaaattcagc

SEQ ID NO: 2598 - DNA, 18 bp, Artificial Sequence
  Description of Artificial Sequence: Synthetic oligonucleotide
aaatctacacacttaaat

SEQ ID NO: 2599 - DNA, 18 bp, Artificial Sequence
  Description of Artificial Sequence: Synthetic oligonucleotide
acctgaaatctacacact

SEQ ID NO: 2600 - DNA, 18 bp, Artificial Sequence
  Description of Artificial Sequence: Synthetic oligonucleotide
aaatcacctgaaatctac

SEQ ID NO: 2601 - DNA, 18 bp, Artificial Sequence
  Description of Artificial Sequence: Synthetic oligonucleotide
gaaacaaatcacctgaaa

SEQ ID NO: 2602 - DNA, 18 bp, Artificial Sequence
  Description of Artificial Sequence: Synthetic oligonucleotide
agtaagaaacaaatcacc

SEQ ID NO: 2603 - DNA, 18 bp, Artificial Sequence
  Description of Artificial Sequence: Synthetic oligonucleotide
cagaaagtaagaaacaaa

SEQ ID NO: 2604 - DNA, 18 bp, Artificial Sequence
  Description of Artificial Sequence: Synthetic oligonucleotide
ctttgcagaaagtaagaa

SEQ ID NO: 2605 - DNA, 18 bp, Artificial Sequence
  Description of Artificial Sequence: Synthetic oligonucleotide
ggcacctttgcagaaagt

SEQ ID NO: 2606 - DNA, 18 bp, Artificial Sequence
  Description of Artificial Sequence: Synthetic oligonucleotide
atatcggcacctttgcag

SEQ ID NO: 2607 - DNA, 18 bp, Artificial Sequence
  Description of Artificial Sequence: Synthetic oligonucleotide
atgtgatatcggcacctt

SEQ ID NO: 2608 - DNA, 18 bp, Artificial Sequence
  Description of Artificial Sequence: Synthetic oligonucleotide
cttatgtgatatcggcac

SEQ ID NO: 2609 - DNA, 18 bp, Artificial Sequence
  Description of Artificial Sequence: Synthetic oligonucleotide
gaaatcttatgtgatatc

SEQ ID NO: 2610 - DNA, 18 bp, Artificial Sequence
  Description of Artificial Sequence: Synthetic oligonucleotide
ctggtgaaatcttatgtg

SEQ ID NO: 2611 - DNA, 18 bp, Artificial Sequence
  Description of Artificial Sequence: Synthetic oligonucleotide
aagccctggtgaaatctt

SEQ ID NO: 2612 - DNA, 18 bp, Artificial Sequence
  Description of Artificial Sequence: Synthetic oligonucleotide
agaagaagccctggtgaa

SEQ ID NO: 2613 - DNA, 18 bp, Artificial Sequence
  Description of Artificial Sequence: Synthetic oligonucleotide
tggctagaagaagccctg

SEQ ID NO: 2614 - DNA, 18 bp, Artificial Sequence
  Description of Artificial Sequence: Synthetic oligonucleotide
tcttctggctagaagaag

SEQ ID NO: 2615 - DNA, 18 bp, Artificial Sequence
  Description of Artificial Sequence: Synthetic oligonucleotide
acatgtcttctggctaga

SEQ ID NO: 2616 - DNA, 18 bp, Artificial Sequence
  Description of Artificial Sequence: Synthetic oligonucleotide
aaaggacatgtcttctgg

SEQ ID NO: 2617 - DNA, 18 bp, Artificial Sequence
  Description of Artificial Sequence: Synthetic oligonucleotide
ttggctgtcaaaggacat

SEQ ID NO: 2618 - DNA, 18 bp, Artificial Sequence
  Description of Artificial Sequence: Synthetic oligonucleotide
tcacattggctgtcaaag

SEQ ID NO: 2619 - DNA, 18 bp, Artificial Sequence
  Description of Artificial Sequence: Synthetic oligonucleotide
gaaggtcacattggctgt

SEQ ID NO: 2620 - DNA, 18 bp, Artificial Sequence
  Description of Artificial Sequence: Synthetic oligonucleotide
gctacgaaggtcacattg

SEQ ID NO: 2621 - DNA, 18 bp, Artificial Sequence
  Description of Artificial Sequence: Synthetic oligonucleotide
tcagagctacgaaggtca

SEQ ID NO: 2622 - DNA, 18 bp, Artificial Sequence
  Description of Artificial Sequence: Synthetic oligonucleotide
ctggctcagagctacgaa

SEQ ID NO: 2623 - DNA, 18 bp, Artificial Sequence
  Description of Artificial Sequence: Synthetic oligonucleotide
tacctggctcagagctac

SEQ ID NO: 2624 - DNA, 18 bp, Artificial Sequence
  Description of Artificial Sequence: Synthetic oligonucleotide
ctccctacctggctcaga

SEQ ID NO: 2625 - DNA, 18 bp, Artificial Sequence
  Description of Artificial Sequence: Synthetic oligonucleotide
atttgctccctacctggc

SEQ ID NO: 2626 - DNA, 18 bp, Artificial Sequence
  Description of Artificial Sequence: Synthetic oligonucleotide
gaaagatttgctccctac

SEQ ID NO: 2627 - DNA, 18 bp, Artificial Sequence
  Description of Artificial Sequence: Synthetic oligonucleotide
catgtgaaagatttgctc

SEQ ID NO: 2628 - DNA, 18 bp, Artificial Sequence
  Description of Artificial Sequence: Synthetic oligonucleotide
tacagcatgtgaaagatt

SEQ ID NO: 2629 - DNA, 18 bp, Artificial Sequence
  Description of Artificial Sequence: Synthetic oligonucleotide
aggattacagcatgtgaa

SEQ ID NO: 2630 - DNA, 18 bp, Artificial Sequence
  Description of Artificial Sequence: Synthetic oligonucleotide
cttagaggattacagcat

SEQ ID NO: 2631 - DNA, 18 bp, Artificial Sequence
  Description of Artificial Sequence: Synthetic oligonucleotide
acacacttagaggattac

SEQ ID NO: 2632 - DNA, 18 bp, Artificial Sequence
  Description of Artificial Sequence: Synthetic oligonucleotide
ccaaaacacacttagagg

SEQ ID NO: 2633 - DNA, 18 bp, Artificial Sequence
  Description of Artificial Sequence: Synthetic oligonucleotide
tgtttccaaaacacactt

SEQ ID NO: 2634 - DNA, 18 bp, Artificial Sequence
  Description of Artificial Sequence: Synthetic oligonucleotide
aatcctgtttccaaaaca

SEQ ID NO: 2635 - DNA, 18 bp, Artificial Sequence
  Description of Artificial Sequence: Synthetic oligonucleotide
atgtaaatcctgtttcca

SEQ ID NO: 2636 - DNA, 18 bp, Artificial Sequence
  Description of Artificial Sequence: Synthetic oligonucleotide
gagacatgtaaatcctgt

SEQ ID NO: 2637 - DNA, 18 bp, Artificial Sequence
  Description of Artificial Sequence: Synthetic oligonucleotide
atagggagacatgtaaat

SEQ ID NO: 2638 - DNA, 18 bp, Artificial Sequence
  Description of Artificial Sequence: Synthetic oligonucleotide
atctaatagggagacatg

SEQ ID NO: 2639 - DNA, 18 bp, Artificial Sequence
  Description of Artificial Sequence: Synthetic oligonucleotide
agagcatctaatagggag

SEQ ID NO: 2640 - DNA, 18 bp, Artificial Sequence
  Description of Artificial Sequence: Synthetic oligonucleotide
agtaaagagcatctaata

SEQ ID NO: 2641 - DNA, 18 bp, Artificial Sequence
  Description of Artificial Sequence: Synthetic oligonucleotide
ttctaagtaaagagcatc

SEQ ID NO: 2642 - DNA, 18 bp, Artificial Sequence
  Description of Artificial Sequence: Synthetic oligonucleotide
tttggttctaagtaaaga

SEQ ID NO: 2643 - DNA, 18 bp, Artificial Sequence
  Description of Artificial Sequence: Synthetic oligonucleotide
tgctgtttggttctaagt

SEQ ID NO: 2644 - DNA, 18 bp, Artificial Sequence
  Description of Artificial Sequence: Synthetic oligonucleotide
accagaacttttctagaa

SEQ ID NO: 2645 - DNA, 18 bp, Artificial Sequence
  Description of Artificial Sequence: Synthetic oligonucleotide
agcgtaccagaacttttc

SEQ ID NO: 2646 - DNA, 18 bp, Artificial Sequence
  Description of Artificial Sequence: Synthetic oligonucleotide
aaatgagcgtaccagaac

SEQ ID NO: 2647 - DNA, 18 bp, Artificial Sequence
  Description of Artificial Sequence: Synthetic oligonucleotide
gttctaaatgagcgtacc

SEQ ID NO: 2648 - DNA, 18 bp, Artificial Sequence
  Description of Artificial Sequence: Synthetic oligonucleotide
gcccagttctaaatgagc

SEQ ID NO: 2649 - DNA, 18 bp, Artificial Sequence
  Description of Artificial Sequence: Synthetic oligonucleotide
ccactgcccagttctaaa

SEQ ID NO: 2650 - DNA, 18 bp, Artificial Sequence
  Description of Artificial Sequence: Synthetic oligonucleotide
cctcaccactgcccagtt

SEQ ID NO: 2651 - DNA, 18 bp, Artificial Sequence
  Description of Artificial Sequence: Synthetic oligonucleotide
gcctgcctcaccactgcc

SEQ ID NO: 2652 - DNA, 18 bp, Artificial Sequence
  Description of Artificial Sequence: Synthetic oligonucleotide
agctggcctgcctcacca

SEQ ID NO: 2653 - DNA, 18 bp, Artificial Sequence
  Description of Artificial Sequence: Synthetic oligonucleotide
gaaacagctggcctgcct

SEQ ID NO: 2654 - DNA, 18 bp, Artificial Sequence
  Description of Artificial Sequence: Synthetic oligonucleotide
aatgggaaacagctggcc

SEQ ID NO: 2655 - DNA, 18 bp, Artificial Sequence
  Description of Artificial Sequence: Synthetic oligonucleotide
cagttaatgggaaacagc

SEQ ID NO: 2656 - DNA, 18 bp, Artificial Sequence
  Description of Artificial Sequence: Synthetic oligonucleotide
gaaggcagttaatgggaa

SEQ ID NO: 2657 - DNA, 18 bp, Artificial Sequence
  Description of Artificial Sequence: Synthetic oligonucleotide
aaggcgaaggcagttaat

SEQ ID NO: 2658 - DNA, 18 bp, Artificial Sequence
  Description of Artificial Sequence: Synthetic oligonucleotide
gagagaaggcgaaggcag

SEQ ID NO: 2659 - DNA, 18 bp, Artificial Sequence
  Description of Artificial Sequence: Synthetic oligonucleotide
gaagagagagaaggcgaa

SEQ ID NO: 2660 - DNA, 18 bp, Artificial Sequence
  Description of Artificial Sequence: Synthetic oligonucleotide
gagaagaagagagagaag

SEQ ID NO: 2661 - DNA, 18 bp, Artificial Sequence
  Description of Artificial Sequence: Synthetic oligonucleotide
ctggggagaagaagagag

SEQ ID NO: 2662 - DNA, 18 bp, Artificial Sequence
  Description of Artificial Sequence: Synthetic oligonucleotide
gccgactggggagaagaa

SEQ ID NO: 2663 - DNA, 18 bp, Artificial Sequence
  Description of Artificial Sequence: Synthetic oligonucleotide
tgggggccgactggggag

SEQ ID NO: 2664 - DNA, 18 bp, Artificial Sequence
  Description of Artificial Sequence: Synthetic oligonucleotide
ccttgtgggggccgactg

SEQ ID NO: 2665 - DNA, 18 bp, Artificial Sequence
  Description of Artificial Sequence: Synthetic oligonucleotide
attccttgtgggggccga

SEQ ID NO: 2666 - DNA, 18 bp, Artificial Sequence
  Description of Artificial Sequence: Synthetic oligonucleotide
agcaaattccttgtgggg

SEQ ID NO: 2667 - DNA, 18 bp, Artificial Sequence
  Description of Artificial Sequence: Synthetic oligonucleotide
gtcacagcaaattccttg

SEQ ID NO: 2668 - DNA, 18 bp, Artificial Sequence
  Description of Artificial Sequence: Synthetic oligonucleotide
tcatggtcacagcaaatt

SEQ ID NO: 2669 - DNA, 18 bp, Artificial Sequence
  Description of Artificial Sequence: Synthetic oligonucleotide
aggtctcatggtcacagc

SEQ ID NO: 2670 - DNA, 18 bp, Artificial Sequence
  Description of Artificial Sequence: Synthetic oligonucleotide
tctgtaggtctcatggtc

SEQ ID NO: 2671 - DNA, 18 bp, Artificial Sequence
  Description of Artificial Sequence: Synthetic oligonucleotide
tggcttctgtaggtctca

SEQ ID NO: 2672 - DNA, 18 bp, Artificial Sequence
  Description of Artificial Sequence: Synthetic oligonucleotide
ctcactggcttctgtagg

SEQ ID NO: 2673 - DNA, 18 bp, Artificial Sequence
  Description of Artificial Sequence: Synthetic oligonucleotide
cacctctcactggcttct

SEQ ID NO: 2674 - DNA, 18 bp, Artificial Sequence
  Description of Artificial Sequence: Synthetic oligonucleotide
ggtggcacctctcactgg

SEQ ID NO: 2675 - DNA, 18 bp, Artificial Sequence
  Description of Artificial Sequence: Synthetic oligonucleotide
ccgcaggtggcacctctc

SEQ ID NO: 2676 - DNA, 18 bp, Artificial Sequence
  Description of Artificial Sequence: Synthetic oligonucleotide
gacccccgcaggtggcac

SEQ ID NO: 2677 - DNA, 18 bp, Artificial Sequence
  Description of Artificial Sequence: Synthetic oligonucleotide
tataggacccccgcaggt

SEQ ID NO: 2678 - DNA, 18 bp, Artificial Sequence
  Description of Artificial Sequence: Synthetic oligonucleotide
gagggtataggacccccg

SEQ ID NO: 2679 - DNA, 18 bp, Artificial Sequence
  Description of Artificial Sequence: Synthetic oligonucleotide
gcccggagggtataggac

SEQ ID NO: 2680 - DNA, 18 bp, Artificial Sequence
  Description of Artificial Sequence: Synthetic oligonucleotide
ccccagcccggagggtat

SEQ ID NO: 2681 - DNA, 18 bp, Artificial Sequence
  Description of Artificial Sequence: Synthetic oligonucleotide
actctccccagcccggag

SEQ ID NO: 2682 - DNA, 18 bp, Artificial Sequence
  Description of Artificial Sequence: Synthetic oligonucleotide
agggcactctccccagcc

SEQ ID NO: 2683 - DNA, 18 bp, Artificial Sequence
  Description of Artificial Sequence: Synthetic oligonucleotide
cagctccagggcactctc

SEQ ID NO: 2684 - DNA, 18 bp, Artificial Sequence
  Description of Artificial Sequence: Synthetic oligonucleotide
ccccacagctccagggca

SEQ ID NO: 2685 - DNA, 18 bp, Artificial Sequence
  Description of Artificial Sequence: Synthetic oligonucleotide
gcccaccccacagctcca

SEQ ID NO: 2686 - DNA, 18 bp, Artificial Sequence
  Description of Artificial Sequence: Synthetic oligonucleotide
ctcgggcccaccccacag

SEQ ID NO: 2687 - DNA, 18 bp, Artificial Sequence
  Description of Artificial Sequence: Synthetic oligonucleotide
cctggctcgggcccaccc

SEQ ID NO: 2688 - DNA, 18 bp, Artificial Sequence
  Description of Artificial Sequence: Synthetic oligonucleotide
gggtccctggctcgggcc

SEQ ID NO: 2689 - DNA, 18 bp, Artificial Sequence
  Description of Artificial Sequence: Synthetic oligonucleotide
cagctgggtccctggctc

SEQ ID NO: 2690 - DNA, 18 bp, Artificial Sequence
  Description of Artificial Sequence: Synthetic oligonucleotide
tcgtacagctgggtccct

SEQ ID NO: 2691 - DNA, 18 bp, Artificial Sequence
  Description of Artificial Sequence: Synthetic oligonucleotide
gccagtcgtacagctggg

SEQ ID NO: 2692 - DNA, 18 bp, Artificial Sequence
  Description of Artificial Sequence: Synthetic oligonucleotide
gtagggccagtcgtacag

SEQ ID NO: 2693 - DNA, 18 bp, Artificial Sequence
  Description of Artificial Sequence: Synthetic oligonucleotide
aacctgtagggccagtcg

SEQ ID NO: 2694 - DNA, 18 bp, Artificial Sequence
  Description of Artificial Sequence: Synthetic oligonucleotide
gcagaaacctgtagggcc

SEQ ID NO: 2695 - DNA, 18 bp, Artificial Sequence
  Description of Artificial Sequence: Synthetic oligonucleotide
gcgccgcagaaacctgta

SEQ ID NO: 2696 - DNA, 18 bp, Artificial Sequence
  Description of Artificial Sequence: Synthetic oligonucleotide
ccaaagcgccgcagaaac

SEQ ID NO: 2697 - DNA, 18 bp, Artificial Sequence
  Description of Artificial Sequence: Synthetic oligonucleotide
cccgcccaaagcgccgca

SEQ ID NO: 2698 - DNA, 18 bp, Artificial Sequence
  Description of Artificial Sequence: Synthetic oligonucleotide
cttgtcccgcccaaagcg

SEQ ID NO: 2699 - DNA, 18 bp, Artificial Sequence
  Description of Artificial Sequence: Synthetic oligonucleotide
caccttgtcccgcccaaa

SEQ ID NO: 2700 - DNA, 18 bp, Artificial Sequence
  Description of Artificial Sequence: Synthetic oligonucleotide
ccactcaccttgtcccgc

SEQ ID NO: 2701 - DNA, 18 bp, Artificial Sequence
  Description of Artificial Sequence: Synthetic oligonucleotide
gcttcccactcaccttgt

SEQ ID NO: 2702 - DNA, 18 bp, Artificial Sequence
  Description of Artificial Sequence: Synthetic oligonucleotide
atgcagcttcccactcac

SEQ ID NO: 2703 - DNA, 18 bp, Artificial Sequence
  Description of Artificial Sequence: Synthetic oligonucleotide
ccctgatgcagcttccca

SEQ ID NO: 2704 - DNA, 18 bp, Artificial Sequence
  Description of Artificial Sequence: Synthetic oligonucleotide
acctgccctgatgcagct

SEQ ID NO: 2705 - DNA, 18 bp, Artificial Sequence
  Description of Artificial Sequence: Synthetic oligonucleotide
tctcaacctgccctgatg

SEQ ID NO: 2706 - DNA, 18 bp, Artificial Sequence
  Description of Artificial Sequence: Synthetic oligonucleotide
ctttctctcaacctgccc

SEQ ID NO: 2707 - DNA, 18 bp, Artificial Sequence
  Description of Artificial Sequence: Synthetic oligonucleotide
ttatcctttctctcaacc

SEQ ID NO: 2708 - DNA, 18 bp, Artificial Sequence
  Description of Artificial Sequence: Synthetic oligonucleotide
gtagcttatcctttctct

SEQ ID NO: 2709 - DNA, 18 bp, Artificial Sequence
  Description of Artificial Sequence: Synthetic oligonucleotide
tgttcgtagcttatcctt

SEQ ID NO: 2710 - DNA, 18 bp, Artificial Sequence
  Description of Artificial Sequence: Synthetic oligonucleotide
ctctttgttcgtagctta

SEQ ID NO: 2711 - DNA, 18 bp, Artificial Sequence
  Description of Artificial Sequence: Synthetic oligonucleotide
cacccctctttgttcgta

SEQ ID NO: 2712 - DNA, 18 bp, Artificial Sequence
  Description of Artificial Sequence: Synthetic oligonucleotide
cttctcacccctctttgt

SEQ ID NO: 2713 - DNA, 18 bp, Artificial Sequence
  Description of Artificial Sequence: Synthetic oligonucleotide
cgctgcttctcacccctc

SEQ ID NO: 2714 - DNA, 18 bp, Artificial Sequence
  Description of Artificial Sequence: Synthetic oligonucleotide
cccctcgctgcttctcac

SEQ ID NO: 2715 - DNA, 18 bp, Artificial Sequence
  Description of Artificial Sequence: Synthetic oligonucleotide
cccatcccctcgctgctt

SEQ ID NO: 2716 - DNA, 18 bp, Artificial Sequence
  Description of Artificial Sequence: Synthetic oligonucleotide
tctctcccatcccctcgc

SEQ ID NO: 2717 - DNA, 18 bp, Artificial Sequence
  Description of Artificial Sequence: Synthetic oligonucleotide
cctggtctctcccatccc

SEQ ID NO: 2718 - DNA, 18 bp, Artificial Sequence
  Description of Artificial Sequence: Synthetic oligonucleotide
cctctcctggtctctccc

SEQ ID NO: 2719 - DNA, 18 bp, Artificial Sequence
  Description of Artificial Sequence: Synthetic oligonucleotide
atctccctctcctggtct

SEQ ID NO: 2720 - DNA, 18 bp, Artificial Sequence
  Description of Artificial Sequence: Synthetic oligonucleotide
ctccctgtctgtctcctg

SEQ ID NO: 2721 - DNA, 18 bp, Artificial Sequence
  Description of Artificial Sequence: Synthetic oligonucleotide
agtttctccctgtctgtc

SEQ ID NO: 2722 - DNA, 18 bp, Artificial Sequence
  Description of Artificial Sequence: Synthetic oligonucleotide
aatccagtttctccctgt

SEQ ID NO: 2723 - DNA, 18 bp, Artificial Sequence
  Description of Artificial Sequence: Synthetic oligonucleotide
tatagaatccagtttctc

SEQ ID NO: 2724 - DNA, 18 bp, Artificial Sequence
  Description of Artificial Sequence: Synthetic oligonucleotide
tgtggtatagaatccagt

SEQ ID NO: 2725 - DNA, 18 bp, Artificial Sequence
  Description of Artificial Sequence: Synthetic oligonucleotide
tagactgtggtatagaat

SEQ ID NO: 2726 - DNA, 18 bp, Artificial Sequence
  Description of Artificial Sequence: Synthetic oligonucleotide
cacactagactgtggtat

SEQ ID NO: 2727 - DNA, 18 bp, Artificial Sequence
  Description of Artificial Sequence: Synthetic oligonucleotide
gcctgcacactagactgt

SEQ ID NO: 2728 - DNA, 18 bp, Artificial Sequence
  Description of Artificial Sequence: Synthetic oligonucleotide
gagtagcctgcacactag

SEQ ID NO: 2729 - DNA, 18 bp, Artificial Sequence
  Description of Artificial Sequence: Synthetic oligonucleotide
agactgagtagcctgcac

SEQ ID NO: 2730 - DNA, 18 bp, Artificial Sequence
  Description of Artificial Sequence: Synthetic oligonucleotide
catcaagactgagtagcc

SEQ ID NO: 2731 - DNA, 18 bp, Artificial Sequence
  Description of Artificial Sequence: Synthetic oligonucleotide
acacccatcaagactgag

SEQ ID NO: 2732 - DNA, 18 bp, Artificial Sequence
  Description of Artificial Sequence: Synthetic oligonucleotide
aagaaacacccatcaaga

SEQ ID NO: 2733 - DNA, 18 bp, Artificial Sequence
  Description of Artificial Sequence: Synthetic oligonucleotide
tgaaaaagaaacacccat

SEQ ID NO: 2734 - DNA, 18 bp, Artificial Sequence
  Description of Artificial Sequence: Synthetic oligonucleotide
aaaggtgaaaaagaaaca

SEQ ID NO: 2735 - DNA, 18 bp, Artificial Sequence
  Description of Artificial Sequence: Synthetic oligonucleotide
caaagaaaggtgaaaaag

SEQ ID NO: 2736 - DNA, 18 bp, Artificial Sequence
  Description of Artificial Sequence: Synthetic oligonucleotide
attgccaaagaaaggtga

SEQ ID NO: 2737 - DNA, 18 bp, Artificial Sequence
  Description of Artificial Sequence: Synthetic oligonucleotide
ctgtgattgccaaagaaa

SEQ ID NO: 2738 - DNA, 18 bp, Artificial Sequence
  Description of Artificial Sequence: Synthetic oligonucleotide
agggcctgtgattgccaa

SEQ ID NO: 2739 - DNA, 18 bp, Artificial Sequence
  Description of Artificial Sequence: Synthetic oligonucleotide
ttgaaagggcctgtgatt

SEQ ID NO: 2740 - DNA, 18 bp, Artificial Sequence
  Description of Artificial Sequence: Synthetic oligonucleotide
gattcttgaaagggcctg

SEQ ID NO: 2741 - DNA, 18 bp, Artificial Sequence
  Description of Artificial Sequence: Synthetic oligonucleotide
taggattcttgaaagggc

SEQ ID NO: 2742 - DNA, 18 bp, Artificial Sequence
  Description of Artificial Sequence: Synthetic oligonucleotide
tttcataggattcttgaa

SEQ ID NO: 2743 - DNA, 18 bp, Artificial Sequence
  Description of Artificial Sequence: Synthetic oligonucleotide
acaactttcataggattc

SEQ ID NO: 2744 - DNA, 18 bp, Artificial Sequence
  Description of Artificial Sequence: Synthetic oligonucleotide
gatccacaactttcatag

SEQ ID NO: 2745 - DNA, 18 bp, Artificial Sequence
  Description of Artificial Sequence: Synthetic oligonucleotide
gagatgatccacaacttt

SEQ ID NO: 2746 - DNA, 18 bp, Artificial Sequence
  Description of Artificial Sequence: Synthetic oligonucleotide
ccggggagatgatccaca

SEQ ID NO: 2747 - DNA, 18 bp, Artificial Sequence
  Description of Artificial Sequence: Synthetic oligonucleotide
gttttccggggagatgat

SEQ ID NO: 2748 - DNA, 18 bp, Artificial Sequence
  Description of Artificial Sequence: Synthetic oligonucleotide
tgcgtgttttccggggag

SEQ ID NO: 2749 - DNA, 18 bp, Artificial Sequence
  Description of Artificial Sequence: Synthetic oligonucleotide
ctatatgcgtgttttccg

SEQ ID NO: 2750 - DNA, 18 bp, Artificial Sequence
  Description of Artificial Sequence: Synthetic oligonucleotide
cacatctatatgcgtgtt

SEQ ID NO: 2751 - DNA, 18 bp, Artificial Sequence
  Description of Artificial Sequence: Synthetic oligonucleotide
atgttcacatctatatgc

SEQ ID NO: 2752 - DNA, 18 bp, Artificial Sequence
  Description of Artificial Sequence: Synthetic oligonucleotide
ggcagatgttcacatcta

SEQ ID NO: 2753 - DNA, 18 bp, Artificial Sequence
  Description of Artificial Sequence: Synthetic oligonucleotide
ccataggcagatgttcac

SEQ ID NO: 2754 - DNA, 18 bp, Artificial Sequence
  Description of Artificial Sequence: Synthetic oligonucleotide
taaaaccataggcagatg

SEQ ID NO: 2755 - DNA, 18 bp, Artificial Sequence
  Description of Artificial Sequence: Synthetic oligonucleotide
ccccataaaaccataggc

SEQ ID NO: 2756 - DNA, 18 bp, Artificial Sequence
  Description of Artificial Sequence: Synthetic oligonucleotide
tgtgaaccccataaaacc

SEQ ID NO: 2757 - DNA, 18 bp, Artificial Sequence
  Description of Artificial Sequence: Synthetic oligonucleotide
aggtctgtgaaccccata

SEQ ID NO: 2758 - DNA, 18 bp, Artificial Sequence
  Description of Artificial Sequence: Synthetic oligonucleotide
cttccaggtctgtgaacc

SEQ ID NO: 2759 - DNA, 18 bp, Artificial Sequence
  Description of Artificial Sequence: Synthetic oligonucleotide
gggctcttccaggtctgt

SEQ ID NO: 2760 - DNA, 18 bp, Artificial Sequence
  Description of Artificial Sequence: Synthetic oligonucleotide
gagatgggctcttccagg

SEQ ID NO: 2761 - DNA, 18 bp, Artificial Sequence
  Description of Artificial Sequence: Synthetic oligonucleotide
atccagagatgggctctt

SEQ ID NO: 2762 - DNA, 18 bp, Artificial Sequence
  Description of Artificial Sequence: Synthetic oligonucleotide
agggcatccagagatggg

SEQ ID NO: 2763 - DNA, 18 bp, Artificial Sequence
  Description of Artificial Sequence: Synthetic oligonucleotide
cctccagggcatccagag

SEQ ID NO: 2764 - DNA, 18 bp, Artificial Sequence
  Description of Artificial Sequence: Synthetic oligonucleotide
atgggcctccagggcatc

SEQ ID NO: 2765 - DNA, 18 bp, Artificial Sequence
  Description of Artificial Sequence: Synthetic oligonucleotide
agcccatgggcctccagg

SEQ ID NO: 2766 - DNA, 18 bp, Artificial Sequence
  Description of Artificial Sequence: Synthetic oligonucleotide
cctagagcccatgggcct

SEQ ID NO: 2767 - DNA, 18 bp, Artificial Sequence
  Description of Artificial Sequence: Synthetic oligonucleotide
taccctagagcccatggg

SEQ ID NO: 2768 - DNA, 18 bp, Artificial Sequence
  Description of Artificial Sequence: Synthetic oligonucleotide
gttcttaccctagagccc

SEQ ID NO: 2769 - DNA, 18 bp, Artificial Sequence
  Description of Artificial Sequence: Synthetic oligonucleotide
ctgaggttcttaccctag

SEQ ID NO: 2770 - DNA, 18 bp, Artificial Sequence
  Description of Artificial Sequence: Synthetic oligonucleotide
tcacactgaggttcttac

SEQ ID NO: 2771 - DNA, 18 bp, Artificial Sequence
  Description of Artificial Sequence: Synthetic oligonucleotide
gtctctcacactgaggtt

SEQ ID NO: 2772 - DNA, 18 bp, Artificial Sequence
  Description of Artificial Sequence: Synthetic oligonucleotide
cacacgtctctcacactg

SEQ ID NO: 2773 - DNA, 18 bp, Artificial Sequence
  Description of Artificial Sequence: Synthetic oligonucleotide
gttcacacacgtctctca

SEQ ID NO: 2774 - DNA, 18 bp, Artificial Sequence
  Description of Artificial Sequence: Synthetic oligonucleotide
aacaagttcacacacgtc

SEQ ID NO: 2775 - DNA, 18 bp, Artificial Sequence
  Description of Artificial Sequence: Synthetic oligonucleotide
agactaacaagttcacac

SEQ ID NO: 2776 - DNA, 18 bp, Artificial Sequence
  Description of Artificial Sequence: Synthetic oligonucleotide
ccctcagactaacaagtt

SEQ ID NO: 2777 - DNA, 18 bp, Artificial Sequence
  Description of Artificial Sequence: Synthetic oligonucleotide
gcatcccctcagactaac

SEQ ID NO: 2778 - DNA, 18 bp, Artificial Sequence
  Description of Artificial Sequence: Synthetic oligonucleotide
acagagcatcccctcaga

SEQ ID NO: 2779 - DNA, 18 bp, Artificial Sequence
  Description of Artificial Sequence: Synthetic oligonucleotide
gggacacagagcatcccc

SEQ ID NO: 2780 - DNA, 18 bp, Artificial Sequence
  Description of Artificial Sequence: Synthetic oligonucleotide
gggcagggacacagagca

SEQ ID NO: 2781 - DNA, 18 bp, Artificial Sequence
  Description of Artificial Sequence: Synthetic oligonucleotide
tctctgggcagggacaca

SEQ ID NO: 2782 - DNA, 18 bp, Artificial Sequence
  Description of Artificial Sequence: Synthetic oligonucleotide
tcgtctctctgggcaggg

SEQ ID NO: 2783 - DNA, 18 bp, Artificial Sequence
  Description of Artificial Sequence: Synthetic oligonucleotide
aagagtcgtctctctggg

SEQ ID NO: 2784 - DNA, 18 bp, Artificial Sequence
  Description of Artificial Sequence: Synthetic oligonucleotide
gtgacaagagtcgtctct

SEQ ID NO: 2785 - DNA, 18 bp, Artificial Sequence
  Description of Artificial Sequence: Synthetic oligonucleotide
aatgtgtgacaagagtcg

SEQ ID NO: 2786 - DNA, 18 bp, Artificial Sequence
  Description of Artificial Sequence: Synthetic oligonucleotide
aggggaatgtgtgacaag

SEQ ID NO: 2787 - DNA, 18 bp, Artificial Sequence
  Description of Artificial Sequence: Synthetic oligonucleotide
acaccaggggaatgtgtg

SEQ ID NO: 2788 - DNA, 18 bp, Artificial Sequence
  Description of Artificial Sequence: Synthetic oligonucleotide
cttggtaccaccagatta

SEQ ID NO: 2789 - DNA, 18 bp, Artificial Sequence
  Description of Artificial Sequence: Synthetic oligonucleotide
gctatcttggtaccacca

SEQ ID NO: 2790 - DNA, 18 bp, Artificial Sequence
  Description of Artificial Sequence: Synthetic oligonucleotide
ctaatgctatcttggtac

SEQ ID NO: 2791 - DNA, 18 bp, Artificial Sequence
  Description of Artificial Sequence: Synthetic oligonucleotide
tagttctaatgctatctt

SEQ ID NO: 2792 - DNA, 18 bp, Artificial Sequence
  Description of Artificial Sequence: Synthetic oligonucleotide
cttgttagttctaatgct

SEQ ID NO: 2793 - DNA, 18 bp, Artificial Sequence
  Description of Artificial Sequence: Synthetic oligonucleotide
tcctccttgttagttcta

SEQ ID NO: 2794 - DNA, 18 bp, Artificial Sequence
  Description of Artificial Sequence: Synthetic oligonucleotide
ttctttcctccttgttag

SEQ ID NO: 2795 - DNA, 18 bp, Artificial Sequence
  Description of Artificial Sequence: Synthetic oligonucleotide
taattttctttcctcctt

SEQ ID NO: 2796 - DNA, 18 bp, Artificial Sequence
  Description of Artificial Sequence: Synthetic oligonucleotide
aattttaattttctttcc

SEQ ID NO: 2797 - DNA, 18 bp, Artificial Sequence
  Description of Artificial Sequence: Synthetic oligonucleotide
acatcaattttaattttc

SEQ ID NO: 2798 - DNA, 18 bp, Artificial Sequence
  Description of Artificial Sequence: Synthetic oligonucleotide
tccccacatcaattttaa

SEQ ID NO: 2799 - DNA, 18 bp, Artificial Sequence
  Description of Artificial Sequence: Synthetic oligonucleotide
gagattccccacatcaat

SEQ ID NO: 2800 - DNA, 18 bp, Artificial Sequence
  Description of Artificial Sequence: Synthetic oligonucleotide
cgactgagattccccaca

SEQ ID NO: 2801 - DNA, 18 bp, Artificial Sequence
  Description of Artificial Sequence: Synthetic oligonucleotide
gaacacgactgagattcc

SEQ ID NO: 2802 - DNA, 18 bp, Artificial Sequence
  Description of Artificial Sequence: Synthetic oligonucleotide
gcaaggaacacgactgag

SEQ ID NO: 2803 - DNA, 18 bp, Artificial Sequence
  Description of Artificial Sequence: Synthetic oligonucleotide
aaaaagcaaggaacacga

SEQ ID NO: 2804 - DNA, 18 bp, Artificial Sequence
  Description of Artificial Sequence: Synthetic oligonucleotide
agtggaaaaagcaaggaa

SEQ ID NO: 2805 - DNA, 18 bp, Artificial Sequence
  Description of Artificial Sequence: Synthetic oligonucleotide
ctaaaagtggaaaaagca

SEQ ID NO: 2806 - DNA, 18 bp, Artificial Sequence
  Description of Artificial Sequence: Synthetic oligonucleotide
catctctaaaagtggaaa

SEQ ID NO: 2807 - DNA, 18 bp, Artificial Sequence
  Description of Artificial Sequence: Synthetic oligonucleotide
aagcacatctctaaaagt

SEQ ID NO: 2808 - DNA, 18 bp, Artificial Sequence
  Description of Artificial Sequence: Synthetic oligonucleotide
actctaagcacatctcta

SEQ ID NO: 2809 - DNA, 18 bp, Artificial Sequence
  Description of Artificial Sequence: Synthetic oligonucleotide
aacactctaagcacatct

SEQ ID NO: 2810 - DNA, 18 bp, Artificial Sequence
  Description of Artificial Sequence: Synthetic oligonucleotide
tcccaaacactctaagca

SEQ ID NO: 2811 - DNA, 18 bp, Artificial Sequence
  Description of Artificial Sequence: Synthetic oligonucleotide
aactctcccaaacactct

SEQ ID NO: 2812 - DNA, 18 bp, Artificial Sequence
  Description of Artificial Sequence: Synthetic oligonucleotide
gctgaaactctcccaaac

SEQ ID NO: 2813 - DNA, 18 bp, Artificial Sequence
  Description of Artificial Sequence: Synthetic oligonucleotide
gcctggctgaaactctcc

SEQ ID NO: 2814 - DNA, 18 bp, Artificial Sequence
  Description of Artificial Sequence: Synthetic oligonucleotide
ggaaggcctggctgaaac

SEQ ID NO: 2815 - DNA, 18 bp, Artificial Sequence
  Description of Artificial Sequence: Synthetic oligonucleotide
aaattggaaggcctggct

SEQ ID NO: 2816 - DNA, 18 bp, Artificial Sequence
  Description of Artificial Sequence: Synthetic oligonucleotide
ctaggaaattggaaggcc

SEQ ID NO: 2817 - DNA, 18 bp, Artificial Sequence
  Description of Artificial Sequence: Synthetic oligonucleotide
ggggtctaggaaattgga

SEQ ID NO: 2818 - DNA, 18 bp, Artificial Sequence
  Description of Artificial Sequence: Synthetic oligonucleotide
cacatggggtctaggaaa

SEQ ID NO: 2819 - DNA, 18 bp, Artificial Sequence
  Description of Artificial Sequence: Synthetic oligonucleotide
taccacacatggggtcta

SEQ ID NO: 2820 - DNA, 18 bp, Artificial Sequence
  Description of Artificial Sequence: Synthetic oligonucleotide
cacagtaccacacatggg

SEQ ID NO: 2821 - DNA, 18 bp, Artificial Sequence
  Description of Artificial Sequence: Synthetic oligonucleotide
gaagacacagtaccacac

SEQ ID NO: 2822 - DNA, 18 bp, Artificial Sequence
  Description of Artificial Sequence: Synthetic oligonucleotide
ttccaggtgaagacacag

SEQ ID NO: 2823 - DNA, 18 bp, Artificial Sequence
  Description of Artificial Sequence: Synthetic oligonucleotide
cacaattccaggtgaaga

SEQ ID NO: 2824 - DNA, 18 bp, Artificial Sequence
  Description of Artificial Sequence: Synthetic oligonucleotide
aaggtcacaattccaggt

SEQ ID NO: 2825 - DNA, 18 bp, Artificial Sequence
  Description of Artificial Sequence: Synthetic oligonucleotide
gcacaaaggtcacaattc

SEQ ID NO: 2826 - DNA, 18 bp, Artificial Sequence
  Description of Artificial Sequence: Synthetic oligonucleotide
taactgcacaaaggtcac

SEQ ID NO: 2827 - DNA, 18 bp, Artificial Sequence
  Description of Artificial Sequence: Synthetic oligonucleotide
atttgtaactgcacaaag

SEQ ID NO: 2828 - DNA, 18 bp, Artificial Sequence
  Description of Artificial Sequence: Synthetic oligonucleotide
gttggatttgtaactgca

SEQ ID NO: 2829 - DNA, 18 bp, Artificial Sequence
  Description of Artificial Sequence: Synthetic oligonucleotide
gctctgttggatttgtaa

SEQ ID NO: 2830 - DNA, 18 bp, Artificial Sequence
  Description of Artificial Sequence: Synthetic oligonucleotide
tccttgctctgttggatt

SEQ ID NO: 2831 - DNA, 18 bp, Artificial Sequence
  Description of Artificial Sequence: Synthetic oligonucleotide
taggctccttgctctgtt

SEQ ID NO: 2832 - DNA, 18 bp, Artificial Sequence
  Description of Artificial Sequence: Synthetic oligonucleotide
cactaggctccttgctct

SEQ ID NO: 2833 - DNA, 18 bp, Artificial Sequence
  Description of Artificial Sequence: Synthetic oligonucleotide
gtactcactaggctcctt

SEQ ID NO: 2834 - DNA, 18 bp, Artificial Sequence
  Description of Artificial Sequence: Synthetic oligonucleotide
gacaagtactcactaggc

SEQ ID NO: 2835 - DNA, 18 bp, Artificial Sequence
  Description of Artificial Sequence: Synthetic oligonucleotide
agatggacaagtactcac

SEQ ID NO: 2836 - DNA, 18 bp, Artificial Sequence
  Description of Artificial Sequence: Synthetic oligonucleotide
tgtttagatggacaagta

SEQ ID NO: 2837 - DNA, 18 bp, Artificial Sequence
  Description of Artificial Sequence: Synthetic oligonucleotide
gattttgtttagatggac

SEQ ID NO: 2838 - DNA, 18 bp, Artificial Sequence
  Description of Artificial Sequence: Synthetic oligonucleotide
ctttggattttgtttaga

SEQ ID NO: 2839 - DNA, 18 bp, Artificial Sequence
  Description of Artificial Sequence: Synthetic oligonucleotide
tgctgctttggattttgt

SEQ ID NO: 2840 - DNA, 18 bp, Artificial Sequence
  Description of Artificial Sequence: Synthetic oligonucleotide
acctgtgctgctttggat

SEQ ID NO: 2841 - DNA, 18 bp, Artificial Sequence
  Description of Artificial Sequence: Synthetic oligonucleotide
aggatacctgtgctgctt

SEQ ID NO: 2842 - DNA, 18 bp, Artificial Sequence
  Description of Artificial Sequence: Synthetic oligonucleotide
gttggaggatacctgtgc

SEQ ID NO: 2843 - DNA, 18 bp, Artificial Sequence
  Description of Artificial Sequence: Synthetic oligonucleotide
gtgctgttggaggatacc

SEQ ID NO: 2844 - DNA, 18 bp, Artificial Sequence
  Description of Artificial Sequence: Synthetic oligonucleotide
agaatgtgctgttggagg

SEQ ID NO: 2845 - DNA, 18 bp, Artificial Sequence
  Description of Artificial Sequence: Synthetic oligonucleotide
atataagaatgtgctgtt

SEQ ID NO: 2846 - DNA, 18 bp, Artificial Sequence
  Description of Artificial Sequence: Synthetic oligonucleotide
ttttaatataagaatgtg

SEQ ID NO: 2847 - DNA, 18 bp, Artificial Sequence
  Description of Artificial Sequence: Synthetic oligonucleotide
tgcctttttaatataaga

SEQ ID NO: 2848 - DNA, 18 bp, Artificial Sequence
  Description of Artificial Sequence: Synthetic oligonucleotide
ttttatgcctttttaata

SEQ ID NO: 2849 - DNA, 18 bp, Artificial Sequence
  Description of Artificial Sequence: Synthetic oligonucleotide
cataattttatgcctttt

SEQ ID NO: 2850 - DNA, 18 bp, Artificial Sequence
  Description of Artificial Sequence: Synthetic oligonucleotide
taagacataattttatgc

SEQ ID NO: 2851 - DNA, 18 bp, Artificial Sequence
  Description of Artificial Sequence: Synthetic oligonucleotide
taatataagacataattt

SEQ ID NO: 2852 - DNA, 18 bp, Artificial Sequence
  Description of Artificial Sequence: Synthetic oligonucleotide
tcttataatataagacat

SEQ ID NO: 2853 - DNA, 18 bp, Artificial Sequence
  Description of Artificial Sequence: Synthetic oligonucleotide
tttctaaaacagcctaag

SEQ ID NO: 2854 - DNA, 18 bp, Artificial Sequence
  Description of Artificial Sequence: Synthetic oligonucleotide
gggattttctaaaacagc

SEQ ID NO: 2855 - DNA, 18 bp, Artificial Sequence
  Description of Artificial Sequence: Synthetic oligonucleotide
aacatgggattttctaaa

SEQ ID NO: 2856 - DNA, 18 bp, Artificial Sequence
  Description of Artificial Sequence: Synthetic oligonucleotide
gctaaaacatgggatttt

SEQ ID NO: 2857 - DNA, 18 bp, Artificial Sequence
  Description of Artificial Sequence: Synthetic oligonucleotide
ggcaagctaaaacatggg

SEQ ID NO: 2858 - DNA, 18 bp, Artificial Sequence
  Description of Artificial Sequence: Synthetic oligonucleotide
agaatggcaagctaaaac

SEQ ID NO: 2859 - DNA, 18 bp, Artificial Sequence
  Description of Artificial Sequence: Synthetic oligonucleotide
tcaacagaatggcaagct

SEQ ID NO: 2860 - DNA, 18 bp, Artificial Sequence
  Description of Artificial Sequence: Synthetic oligonucleotide
ctgggtcaacagaatggc

SEQ ID NO: 2861 - DNA, 18 bp, Artificial Sequence
  Description of Artificial Sequence: Synthetic oligonucleotide
gcaggctgggtcaacaga

SEQ ID NO: 2862 - DNA, 18 bp, Artificial Sequence
  Description of Artificial Sequence: Synthetic oligonucleotide
gaaaggcaggctgggtca

SEQ ID NO: 2863 - DNA, 18 bp, Artificial Sequence
  Description of Artificial Sequence: Synthetic oligonucleotide
ggctagaaaggcaggctg

SEQ ID NO: 2864 - DNA, 18 bp, Artificial Sequence
  Description of Artificial Sequence: Synthetic oligonucleotide
gttaaggctagaaaggca

SEQ ID NO: 2865 - DNA, 18 bp, Artificial Sequence
  Description of Artificial Sequence: Synthetic oligonucleotide
ggtaagttaaggctagaa

SEQ ID NO: 2866 - DNA, 18 bp, Artificial Sequence
  Description of Artificial Sequence: Synthetic oligonucleotide
agaggggtaagttaaggc

SEQ ID NO: 2867 - DNA, 18 bp, Artificial Sequence
  Description of Artificial Sequence: Synthetic oligonucleotide
tagacagaggggtaagtt

SEQ ID NO: 2868 - DNA, 18 bp, Artificial Sequence
  Description of Artificial Sequence: Synthetic oligonucleotide
gaatatagacagaggggt

SEQ ID NO: 2869 - DNA, 18 bp, Artificial Sequence
  Description of Artificial Sequence: Synthetic oligonucleotide
aaatagaatatagacaga

SEQ ID NO: 2870 - DNA, 18 bp, Artificial Sequence
  Description of Artificial Sequence: Synthetic oligonucleotide
ctggaaaatagaatatag

SEQ ID NO: 2871 - DNA, 18 bp, Artificial Sequence
  Description of Artificial Sequence: Synthetic oligonucleotide
tttggctggaaaatagaa

SEQ ID NO: 2872 - DNA, 18 bp, Artificial Sequence
  Description of Artificial Sequence: Synthetic oligonucleotide
tcatatttggctggaaaa

SEQ ID NO: 2873 - DNA, 18 bp, Artificial Sequence
  Description of Artificial Sequence: Synthetic oligonucleotide
tcacctcatatttggctg

SEQ ID NO: 2874 - DNA, 18 bp, Artificial Sequence
  Description of Artificial Sequence: Synthetic oligonucleotide
acgtcacctcatatttgg

SEQ ID NO: 2875 - DNA, 18 bp, Artificial Sequence
  Description of Artificial Sequence: Synthetic oligonucleotide
cttaaacgtcacctcata

SEQ ID NO: 2876 - DNA, 18 bp, Artificial Sequence
  Description of Artificial Sequence: Synthetic oligonucleotide
agcagcttaaacgtcacc

SEQ ID NO: 2877 - DNA, 18 bp, Artificial Sequence
  Description of Artificial Sequence: Synthetic oligonucleotide
caagtagcagcttaaacg

SEQ ID NO: 2878 - DNA, 18 bp, Artificial Sequence
  Description of Artificial Sequence: Synthetic oligonucleotide
tctttcaagtagcagctt

SEQ ID NO: 2879 - DNA, 18 bp, Artificial Sequence
  Description of Artificial Sequence: Synthetic oligonucleotide
acttctctttcaagtagc

SEQ ID NO: 2880 - DNA, 18 bp, Artificial Sequence
  Description of Artificial Sequence: Synthetic oligonucleotide
ctcccacttctctttcaa

SEQ ID NO: 2881 - DNA, 18 bp, Artificial Sequence
  Description of Artificial Sequence: Synthetic oligonucleotide
cctaactcccacttctct

SEQ ID NO: 2882 - DNA, 18 bp, Artificial Sequence
  Description of Artificial Sequence: Synthetic oligonucleotide
ctctgcctaactcccact

SEQ ID NO: 2883 - DNA, 18 bp, Artificial Sequence
  Description of Artificial Sequence: Synthetic oligonucleotide
tactgctctgcctaactc

SEQ ID NO: 2884 - DNA, 18 bp, Artificial Sequence
  Description of Artificial Sequence: Synthetic oligonucleotide
tcccctactgctctgcct

SEQ ID NO: 2885 - DNA, 18 bp, Artificial Sequence
  Description of Artificial Sequence: Synthetic oligonucleotide
atgattcccctactgctc

SEQ ID NO: 2886 - DNA, 18 bp, Artificial Sequence
  Description of Artificial Sequence: Synthetic oligonucleotide
caaacatgattcccctac

SEQ ID NO: 2887 - DNA, 18 bp, Artificial Sequence
  Description of Artificial Sequence: Synthetic oligonucleotide
ttccccaaacatgattcc

SEQ ID NO: 2888 - DNA, 18 bp, Artificial Sequence
  Description of Artificial Sequence: Synthetic oligonucleotide
cactcttccccaaacatg

SEQ ID NO: 2889 - DNA, 18 bp, Artificial Sequence
  Description of Artificial Sequence: Synthetic oligonucleotide
ctcttcactcttccccaa

SEQ ID NO: 2890 - DNA, 18 bp, Artificial Sequence
  Description of Artificial Sequence: Synthetic oligonucleotide
gtacactcttcactcttc

SEQ ID NO: 2891 - DNA, 18 bp, Artificial Sequence
  Description of Artificial Sequence: Synthetic oligonucleotide
ctcaagtacactcttcac

SEQ ID NO: 2892 - DNA, 18 bp, Artificial Sequence
  Description of Artificial Sequence: Synthetic oligonucleotide
cactctctcaagtacact

SEQ ID NO: 2893 - DNA, 18 bp, Artificial Sequence
  Description of Artificial Sequence: Synthetic oligonucleotide
ctccacactctctcaagt

SEQ ID NO: 2894 - DNA, 18 bp, Artificial Sequence
  Description of Artificial Sequence: Synthetic oligonucleotide
ggcacctccacactctct

SEQ ID NO: 2895 - DNA, 18 bp, Artificial Sequence
  Description of Artificial Sequence: Synthetic oligonucleotide
tccaaggcacctccacac

SEQ ID NO: 2896 - DNA, 18 bp, Artificial Sequence
  Description of Artificial Sequence: Synthetic oligonucleotide
gctcctccaaggcacctc

SEQ ID NO: 2897 - DNA, 18 bp, Artificial Sequence
  Description of Artificial Sequence: Synthetic oligonucleotide
ctccagctcctccaaggc

SEQ ID NO: 2898 - DNA, 18 bp, Artificial Sequence
  Description of Artificial Sequence: Synthetic oligonucleotide
ctgggctccagctcctcc

SEQ ID NO: 2899 - DNA, 18 bp, Artificial Sequence
  Description of Artificial Sequence: Synthetic oligonucleotide
cacctctgggctccagct

SEQ ID NO: 2900 - DNA, 18 bp, Artificial Sequence
  Description of Artificial Sequence: Synthetic oligonucleotide
tggggcacctctgggctc

SEQ ID NO: 2901 - DNA, 18 bp, Artificial Sequence
  Description of Artificial Sequence: Synthetic oligonucleotide
tctcatggggcacctctg

SEQ ID NO: 2902 - DNA, 18 bp, Artificial Sequence
  Description of Artificial Sequence: Synthetic oligonucleotide
gttgttctcatggggcac

SEQ ID NO: 2903 - DNA, 18 bp, Artificial Sequence
  Description of Artificial Sequence: Synthetic oligonucleotide
cctgtgttgttctcatgg

SEQ ID NO: 2904 - DNA, 18 bp, Artificial Sequence
  Description of Artificial Sequence: Synthetic oligonucleotide
agcctcctgtgttgttct

SEQ ID NO: 2905 - DNA, 18 bp, Artificial Sequence
  Description of Artificial Sequence: Synthetic oligonucleotide
cctgcagcctcctgtgtt

SEQ ID NO: 2906 - DNA, 18 bp, Artificial Sequence
  Description of Artificial Sequence: Synthetic oligonucleotide
ctccacctgcagcctcct

SEQ ID NO: 2907 - DNA, 18 bp, Artificial Sequence
  Description of Artificial Sequence: Synthetic oligonucleotide
cacctccacctgcagcct

SEQ ID NO: 2908 - DNA, 18 bp, Artificial Sequence
  Description of Artificial Sequence: Synthetic oligonucleotide
gcacccacctccacctgc

SEQ ID NO: 2909 - DNA, 18 bp, Artificial Sequence
  Description of Artificial Sequence: Synthetic oligonucleotide
atcaggcacccacctcca

SEQ ID NO: 2910 - DNA, 18 bp, Artificial Sequence
  Description of Artificial Sequence: Synthetic oligonucleotide
ctacaatcaggcacccac

SEQ ID NO: 2911 - DNA, 18 bp, Artificial Sequence
  Description of Artificial Sequence: Synthetic oligonucleotide
gcattctacaatcaggca

SEQ ID NO: 2912 - DNA, 18 bp, Artificial Sequence
  Description of Artificial Sequence: Synthetic oligonucleotide
agaaagcattctacaatc

SEQ ID NO: 2913 - DNA, 18 bp, Artificial Sequence
  Description of Artificial Sequence: Synthetic oligonucleotide
caactagaaagcattcta

SEQ ID NO: 2914 - DNA, 18 bp, Artificial Sequence
  Description of Artificial Sequence: Synthetic oligonucleotide
gaagacaactagaaagca

SEQ ID NO: 2915 - DNA, 18 bp, Artificial Sequence
  Description of Artificial Sequence: Synthetic oligonucleotide
ctgtggaagacaactaga

SEQ ID NO: 2916 - DNA, 18 bp, Artificial Sequence
  Description of Artificial Sequence: Synthetic oligonucleotide
atgtcctgtggaagacaa

SEQ ID NO: 2917 - DNA, 18 bp, Artificial Sequence
  Description of Artificial Sequence: Synthetic oligonucleotide
caaaaatgtcctgtggaa

SEQ ID NO: 2918 - DNA, 18 bp, Artificial Sequence
  Description of Artificial Sequence: Synthetic oligonucleotide
gctcccaaaaatgtcctg

SEQ ID NO: 2919 - DNA, 18 bp, Artificial Sequence
  Description of Artificial Sequence: Synthetic oligonucleotide
gaatagctcccaaaaatg

SEQ ID NO: 2920 - DNA, 18 bp, Artificial Sequence
  Description of Artificial Sequence: Synthetic oligonucleotide
cttgtgaatagctcccaa

SEQ ID NO: 2921 - DNA, 18 bp, Artificial Sequence
  Description of Artificial Sequence: Synthetic oligonucleotide
tgaatcttgtgaatagct

SEQ ID NO: 2922 - DNA, 18 bp, Artificial Sequence
  Description of Artificial Sequence: Synthetic oligonucleotide
agccatgaatcttgtgaa

SEQ ID NO: 2923 - DNA, 18 bp, Artificial Sequence
  Description of Artificial Sequence: Synthetic oligonucleotide
acggtagccatgaatctt

SEQ ID NO: 2924 - DNA, 18 bp, Artificial Sequence
  Description of Artificial Sequence: Synthetic oligonucleotide
agagcacggtagccatga

SEQ ID NO: 2925 - DNA, 18 bp, Artificial Sequence
  Description of Artificial Sequence: Synthetic oligonucleotide
attttagagcacggtagc

SEQ ID NO: 2926 - DNA, 18 bp, Artificial Sequence
  Description of Artificial Sequence: Synthetic oligonucleotide
atcaaattttagagcacg

SEQ ID NO: 2927 - DNA, 18 bp, Artificial Sequence
  Description of Artificial Sequence: Synthetic oligonucleotide
ttcacatcaaattttaga

SEQ ID NO: 2928 - DNA, 18 bp, Artificial Sequence
  Description of Artificial Sequence: Synthetic oligonucleotide
ccagctttcatggagctt

SEQ ID NO: 2929 - DNA, 18 bp, Artificial Sequence
  Description of Artificial Sequence: Synthetic oligonucleotide
cccaaccagctttcatgg

SEQ ID NO: 2930 - DNA, 18 bp, Artificial Sequence
  Description of Artificial Sequence: Synthetic oligonucleotide
tagtccccaaccagcttt

SEQ ID NO: 2931 - DNA, 18 bp, Artificial Sequence
  Description of Artificial Sequence: Synthetic oligonucleotide
aaaattagtccccaacca

SEQ ID NO: 2932 - DNA, 18 bp, Artificial Sequence
  Description of Artificial Sequence: Synthetic oligonucleotide
gttacaaaattagtcccc

SEQ ID NO: 2933 - DNA, 18 bp, Artificial Sequence
  Description of Artificial Sequence: Synthetic oligonucleotide
aagtagttacaaaattag

SEQ ID NO: 2934 - DNA, 18 bp, Artificial Sequence
  Description of Artificial Sequence: Synthetic oligonucleotide
gaataaagtagttacaaa

SEQ ID NO: 2935 - DNA, 18 bp, Artificial Sequence
  Description of Artificial Sequence: Synthetic oligonucleotide
tctgggaataaagtagtt

SEQ ID NO: 2936 - DNA, 18 bp, Artificial Sequence
  Description of Artificial Sequence: Synthetic oligonucleotide
caggatctgggaataaag

SEQ ID NO: 2937 - DNA, 18 bp, Artificial Sequence
  Description of Artificial Sequence: Synthetic oligonucleotide
aattacaggatctgggaa

SEQ ID NO: 2938 - DNA, 18 bp, Artificial Sequence
  Description of Artificial Sequence: Synthetic oligonucleotide
agagaaattacaggatct

SEQ ID NO: 2939 - DNA, 18 bp, Artificial Sequence
  Description of Artificial Sequence: Synthetic oligonucleotide
tatttagagaaattacag

SEQ ID NO: 2940 - DNA, 18 bp, Artificial Sequence
  Description of Artificial Sequence: Synthetic oligonucleotide
gggtttatttagagaaat

SEQ ID NO: 2941 - DNA, 18 bp, Artificial Sequence
  Description of Artificial Sequence: Synthetic oligonucleotide
ttccagggtttatttaga

SEQ ID NO: 2942 - DNA, 18 bp, Artificial Sequence
  Description of Artificial Sequence: Synthetic oligonucleotide
caagattccagggtttat

SEQ ID NO: 2943 - DNA, 18 bp, Artificial Sequence
  Description of Artificial Sequence: Synthetic oligonucleotide
taaggcaagattccaggg

SEQ ID NO: 2944 - DNA, 18 bp, Artificial Sequence
  Description of Artificial Sequence: Synthetic oligonucleotide
ggagataaggcaagattc

SEQ ID NO: 2945 - DNA, 18 bp, Artificial Sequence
  Description of Artificial Sequence: Synthetic oligonucleotide
ctgaaggagataaggcaa

SEQ ID NO: 2946 - DNA, 18 bp, Artificial Sequence
  Description of Artificial Sequence: Synthetic oligonucleotide
ttaacctgaaggagataa

SEQ ID NO: 2947 - DNA, 18 bp, Artificial Sequence
  Description of Artificial Sequence: Synthetic oligonucleotide
ggcttttaacctgaagga

SEQ ID NO: 2948 - DNA, 18 bp, Artificial Sequence
  Description of Artificial Sequence: Synthetic oligonucleotide
cagttggcttttaacctg

SEQ ID NO: 2949 - DNA, 18 bp, Artificial Sequence
  Description of Artificial Sequence: Synthetic oligonucleotide
ttgcagttggcttttaac

SEQ ID NO: 2950 - DNA, 18 bp, Artificial Sequence
  Description of Artificial Sequence: Synthetic oligonucleotide
agaccttgcagttggctt

SEQ ID NO: 2951 - DNA, 18 bp, Artificial Sequence
  Description of Artificial Sequence: Synthetic oligonucleotide
tcattagaccttgcagtt

SEQ ID NO: 2952 - DNA, 18 bp, Artificial Sequence
  Description of Artificial Sequence: Synthetic oligonucleotide
tgcagtcattagaccttg

SEQ ID NO: 2953 - DNA, 18 bp, Artificial Sequence
  Description of Artificial Sequence: Synthetic oligonucleotide
gatcctgcagtcattaga

SEQ ID NO: 2954 - DNA, 18 bp, Artificial Sequence
  Description of Artificial Sequence: Synthetic oligonucleotide
agctagatcctgcagtca

SEQ ID NO: 2955 - DNA, 18 bp, Artificial Sequence
  Description of Artificial Sequence: Synthetic oligonucleotide
tggatagctagatcctgc

SEQ ID NO: 2956 - DNA, 18 bp, Artificial Sequence
  Description of Artificial Sequence: Synthetic oligonucleotide
aacaatggatagctagat

SEQ ID NO: 2957 - DNA, 18 bp, Artificial Sequence
  Description of Artificial Sequence: Synthetic oligonucleotide
ccagaaacaatggatagc

SEQ ID NO: 2958 - DNA, 18 bp, Artificial Sequence
  Description of Artificial Sequence: Synthetic oligonucleotide
cataggcggccagaaaca

SEQ ID NO: 2959 - DNA, 18 bp, Artificial Sequence
  Description of Artificial Sequence: Synthetic oligonucleotide
gcacgcataggcggccag

SEQ ID NO: 2960 - DNA, 18 bp, Artificial Sequence
  Description of Artificial Sequence: Synthetic oligonucleotide
ccagtgcacgcataggcg

SEQ ID NO: 2961 - DNA, 18 bp, Artificial Sequence
  Description of Artificial Sequence: Synthetic oligonucleotide
gacacccagtgcacgcat

SEQ ID NO: 2962 - DNA, 18 bp, Artificial Sequence
  Description of Artificial Sequence: Synthetic oligonucleotide
tgccagacacccagtgca

SEQ ID NO: 2963 - DNA, 18 bp, Artificial Sequence
  Description of Artificial Sequence: Synthetic oligonucleotide
ctctctgccagacaccca

SEQ ID NO: 2964 - DNA, 18 bp, Artificial Sequence
  Description of Artificial Sequence: Synthetic oligonucleotide
ccagcctctctgccagac

SEQ ID NO: 2965 - DNA, 18 bp, Artificial Sequence
  Description of Artificial Sequence: Synthetic oligonucleotide
tacccagcctctctgcca

SEQ ID NO: 2966 - DNA, 18 bp, Artificial Sequence
  Description of Artificial Sequence: Synthetic oligonucleotide
caatttacccagcctctc

SEQ ID NO: 2967 - DNA, 18 bp, Artificial Sequence
  Description of Artificial Sequence: Synthetic oligonucleotide
aactacaatttacccagc

SEQ ID NO: 2968 - DNA, 18 bp, Artificial Sequence
  Description of Artificial Sequence: Synthetic oligonucleotide
aatgaaactacaatttac

SEQ ID NO: 2969 - DNA, 18 bp, Artificial Sequence
  Description of Artificial Sequence: Synthetic oligonucleotide
gctacaatgaaactacaa

SEQ ID NO: 2970 - DNA, 18 bp, Artificial Sequence
  Description of Artificial Sequence: Synthetic oligonucleotide
agacagctacaatgaaac

SEQ ID NO: 2971 - DNA, 18 bp, Artificial Sequence
  Description of Artificial Sequence: Synthetic oligonucleotide
agttcagacagctacaat

SEQ ID NO: 2972 - DNA, 18 bp, Artificial Sequence
  Description of Artificial Sequence: Synthetic oligonucleotide
atccaagttcagacagct

SEQ ID NO: 2973 - DNA, 18 bp, Artificial Sequence
  Description of Artificial Sequence: Synthetic oligonucleotide
gagaaatccaagttcaga

SEQ ID NO: 2974 - DNA, 18 bp, Artificial Sequence
  Description of Artificial Sequence: Synthetic oligonucleotide
ggcgtgagaaatccaagt

SEQ ID NO: 2975 - DNA, 18 bp, Artificial Sequence
  Description of Artificial Sequence: Synthetic oligonucleotide
aagtaggcgtgagaaatc

SEQ ID NO: 2976 - DNA, 18 bp, Artificial Sequence
  Description of Artificial Sequence: Synthetic oligonucleotide
cagtgaagtaggcgtgag

SEQ ID NO: 2977 - DNA, 18 bp, Artificial Sequence
  Description of Artificial Sequence: Synthetic oligonucleotide
gtttccagtgaagtaggc

SEQ ID NO: 2978 - DNA, 18 bp, Artificial Sequence
  Description of Artificial Sequence: Synthetic oligonucleotide
tttgcgtttccagtgaag

SEQ ID NO: 2979 - DNA, 18 bp, Artificial Sequence
  Description of Artificial Sequence: Synthetic oligonucleotide
gagagtttgcgtttccag

SEQ ID NO: 2980 - DNA, 18 bp, Artificial Sequence
  Description of Artificial Sequence: Synthetic oligonucleotide
gctgtgagagtttgcgtt

SEQ ID NO: 2981 - DNA, 18 bp, Artificial Sequence
  Description of Artificial Sequence: Synthetic oligonucleotide
aaaatgctgtgagagttt

SEQ ID NO: 2982 - DNA, 18 bp, Artificial Sequence
  Description of Artificial Sequence: Synthetic oligonucleotide
aaaacaaaatgctgtgag

SEQ ID NO: 2983 - DNA, 18 bp, Artificial Sequence
  Description of Artificial Sequence: Synthetic oligonucleotide
aaactaaaacaaaatgct

SEQ ID NO: 2984 - DNA, 18 bp, Artificial Sequence
  Description of Artificial Sequence: Synthetic oligonucleotide
ttctgaaactaaaacaaa

SEQ ID NO: 2985 - DNA, 18 bp, Artificial Sequence
  Description of Artificial Sequence: Synthetic oligonucleotide
tctgattctgaaactaaa

SEQ ID NO: 2986 - DNA, 18 bp, Artificial Sequence
  Description of Artificial Sequence: Synthetic oligonucleotide
ccagatacatcctctctc

SEQ ID NO: 2987 - DNA, 18 bp, Artificial Sequence
  Description of Artificial Sequence: Synthetic oligonucleotide
gaacaccagatacatcct

SEQ ID NO: 2988 - DNA, 18 bp, Artificial Sequence
  Description of Artificial Sequence: Synthetic oligonucleotide
tcctagaacaccagatac

SEQ ID NO: 2989 - DNA, 18 bp, Artificial Sequence
  Description of Artificial Sequence: Synthetic oligonucleotide
attgatcctagaacacca

SEQ ID NO: 2990 - DNA, 18 bp, Artificial Sequence
  Description of Artificial Sequence: Synthetic oligonucleotide
cgcccattgatcctagaa

SEQ ID NO: 2991 - DNA, 18 bp, Artificial Sequence
  Description of Artificial Sequence: Synthetic oligonucleotide
gagtccgcccattgatcc

SEQ ID NO: 2992 - DNA, 18 bp, Artificial Sequence
  Description of Artificial Sequence: Synthetic oligonucleotide
tgttggagtccgcccatt

SEQ ID NO: 2993 - DNA, 18 bp, Artificial Sequence
  Description of Artificial Sequence: Synthetic oligonucleotide
gggtatgttggagtccgc

SEQ ID NO: 2994 - DNA, 18 bp, Artificial Sequence
  Description of Artificial Sequence: Synthetic oligonucleotide
ggaaggggtatgttggag

SEQ ID NO: 2995 - DNA, 18 bp, Artificial Sequence
  Description of Artificial Sequence: Synthetic oligonucleotide
aatcaggaaggggtatgt

SEQ ID NO: 2996 - DNA, 18 bp, Artificial Sequence
  Description of Artificial Sequence: Synthetic oligonucleotide
tggggaatcaggaagggg

SEQ ID NO: 2997 - DNA, 18 bp, Artificial Sequence
  Description of Artificial Sequence: Synthetic oligonucleotide
aggcctggggaatcagga

SEQ ID NO: 2998 - DNA, 18 bp, Artificial Sequence
  Description of Artificial Sequence: Synthetic oligonucleotide
agtcaaggcctggggaat

SEQ ID NO: 2999 - DNA, 18 bp, Artificial Sequence
  Description of Artificial Sequence: Synthetic oligonucleotide
gaatgagtcaaggcctgg

SEQ ID NO: 3000 - DNA, 18 bp, Artificial Sequence
  Description of Artificial Sequence: Synthetic oligonucleotide
gagaagaatgagtcaagg

SEQ ID NO: 3001 - DNA, 18 bp, Artificial Sequence
  Description of Artificial Sequence: Synthetic oligonucleotide
gaagtgagaagaatgagt

SEQ ID NO: 3002 - DNA, 18 bp, Artificial Sequence
  Description of Artificial Sequence: Synthetic oligonucleotide
gaatggaagtgagaagaa

SEQ ID NO: 3003 - DNA, 18 bp, Artificial Sequence
  Description of Artificial Sequence: Synthetic oligonucleotide
ctgtggaatggaagtgag

SEQ ID NO: 3004 - DNA, 18 bp, Artificial Sequence
  Description of Artificial Sequence: Synthetic oligonucleotide
tgatgctgtggaatggaa

SEQ ID NO: 3005 - DNA, 18 bp, Artificial Sequence
  Description of Artificial Sequence: Synthetic oligonucleotide
gagggtgatgctgtggaa

SEQ ID NO: 3006 - DNA, 18 bp, Artificial Sequence
  Description of Artificial Sequence: Synthetic oligonucleotide
acaatgagggtgatgctg

SEQ ID NO: 3007 - DNA, 18 bp, Artificial Sequence
  Description of Artificial Sequence: Synthetic oligonucleotide
agaacaatgagggtgatg

SEQ ID NO: 3008 - DNA, 18 bp, Artificial Sequence
  Description of Artificial Sequence: Synthetic oligonucleotide
atgacagaacaatgaggg

SEQ ID NO: 3009 - DNA, 18 bp, Artificial Sequence
  Description of Artificial Sequence: Synthetic oligonucleotide
ctcagatgacagaacaat

SEQ ID NO: 3010 - DNA, 18 bp, Artificial Sequence
  Description of Artificial Sequence: Synthetic oligonucleotide
cccacctcagatgacaga

SEQ ID NO: 3011 - DNA, 18 bp, Artificial Sequence
  Description of Artificial Sequence: Synthetic oligonucleotide
agatgcccacctcagatg

SEQ ID NO: 3012 - DNA, 18 bp, Artificial Sequence
  Description of Artificial Sequence: Synthetic oligonucleotide
ctcagagatgcccacctc

SEQ ID NO: 3013 - DNA, 18 bp, Artificial Sequence
  Description of Artificial Sequence: Synthetic oligonucleotide
ctcagctcagagatgccc

SEQ ID NO: 3014 - DNA, 18 bp, Artificial Sequence
  Description of Artificial Sequence: Synthetic oligonucleotide
ccagcctcagctcagaga

SEQ ID NO: 3015 - DNA, 18 bp, Artificial Sequence
  Description of Artificial Sequence: Synthetic oligonucleotide
agtctctccagcctcagc

SEQ ID NO: 3016 - DNA, 18 bp, Artificial Sequence
  Description of Artificial Sequence: Synthetic oligonucleotide
ggagtagtctctccagcc

SEQ ID NO: 3017 - DNA, 18 bp, Artificial Sequence
  Description of Artificial Sequence: Synthetic oligonucleotide
catttggagtagtctctc

SEQ ID NO: 3018 - DNA, 18 bp, Artificial Sequence
  Description of Artificial Sequence: Synthetic oligonucleotide
aacaccatttggagtagt

SEQ ID NO: 3019 - DNA, 18 bp, Artificial Sequence
  Description of Artificial Sequence: Synthetic oligonucleotide
ctccaaacaccatttgga

SEQ ID NO: 3020 - DNA, 18 bp, Artificial Sequence
  Description of Artificial Sequence: Synthetic oligonucleotide
catggctccaaacaccat

SEQ ID NO: 3021 - DNA, 18 bp, Artificial Sequence
  Description of Artificial Sequence: Synthetic oligonucleotide
caccatggctccaaacac

SEQ ID NO: 3022 - DNA, 18 bp, Artificial Sequence
  Description of Artificial Sequence: Synthetic oligonucleotide
agtctcaccatggctcca

SEQ ID NO: 3023 - DNA, 18 bp, Artificial Sequence
  Description of Artificial Sequence: Synthetic oligonucleotide
tggtgagtctcaccatgg

SEQ ID NO: 3024 - DNA, 18 bp, Artificial Sequence
  Description of Artificial Sequence: Synthetic oligonucleotide
aggactggtgagtctcac

SEQ ID NO: 3025 - DNA, 18 bp, Artificial Sequence
  Description of Artificial Sequence: Synthetic oligonucleotide
aaaagaggactggtgagt

SEQ ID NO: 3026 - DNA, 18 bp, Artificial Sequence
  Description of Artificial Sequence: Synthetic oligonucleotide
gggagaaaagaggactgg

SEQ ID NO: 3027 - DNA, 18 bp, Artificial Sequence
  Description of Artificial Sequence: Synthetic oligonucleotide
gtctggggagaaaagagg

SEQ ID NO: 3028 - DNA, 18 bp, Artificial Sequence
  Description of Artificial Sequence: Synthetic oligonucleotide
tcctggtctggggagaaa

SEQ ID NO: 3029 - DNA, 18 bp, Artificial Sequence
  Description of Artificial Sequence: Synthetic oligonucleotide
cagattcctggtctgggg

SEQ ID NO: 3030 - DNA, 18 bp, Artificial Sequence
  Description of Artificial Sequence: Synthetic oligonucleotide
gatctcagattcctggtc

SEQ ID NO: 3031 - DNA, 18 bp, Artificial Sequence
  Description of Artificial Sequence: Synthetic oligonucleotide
gctgagatctcagattcc

SEQ ID NO: 3032 - DNA, 18 bp, Artificial Sequence
  Description of Artificial Sequence: Synthetic oligonucleotide
aggatgctgagatctcag

SEQ ID NO: 3033 - DNA, 18 bp, Artificial Sequence
  Description of Artificial Sequence: Synthetic oligonucleotide
ggaaaaggatgctgagat

SEQ ID NO: 3034 - DNA, 18 bp, Artificial Sequence
  Description of Artificial Sequence: Synthetic oligonucleotide
ctgagggaaaaggatgct

SEQ ID NO: 3035 - DNA, 18 bp, Artificial Sequence
  Description of Artificial Sequence: Synthetic oligonucleotide
taggtctgagggaaaagg

SEQ ID NO: 3036 - DNA, 18 bp, Artificial Sequence
  Description of Artificial Sequence: Synthetic oligonucleotide
actcctaggtctgaggga

SEQ ID NO: 3037 - DNA, 18 bp, Artificial Sequence
  Description of Artificial Sequence: Synthetic oligonucleotide
tctgcactcctaggtctg

SEQ ID NO: 3038 - DNA, 18 bp, Artificial Sequence
  Description of Artificial Sequence: Synthetic oligonucleotide
ggtggtctgcactcctag

SEQ ID NO: 3039 - DNA, 18 bp, Artificial Sequence
  Description of Artificial Sequence: Synthetic oligonucleotide
gtgttggtggtctgcact

SEQ ID NO: 3040 - DNA, 18 bp, Artificial Sequence
  Description of Artificial Sequence: Synthetic oligonucleotide
aggaagtgttggtggtct

SEQ ID NO: 3041 - DNA, 18 bp, Artificial Sequence
  Description of Artificial Sequence: Synthetic oligonucleotide
gaggaaggaagtgttggt

SEQ ID NO: 3042 - DNA, 18 bp, Artificial Sequence
  Description of Artificial Sequence: Synthetic oligonucleotide
tcttcctttgagcccttt

SEQ ID NO: 3043 - DNA, 18 bp, Artificial Sequence
  Description of Artificial Sequence: Synthetic oligonucleotide
gggtttcttcctttgagc

SEQ ID NO: 3044 - DNA, 18 bp, Artificial Sequence
  Description of Artificial Sequence: Synthetic oligonucleotide
ctaaggggtttcttcctt

SEQ ID NO: 3045 - DNA, 18 bp, Artificial Sequence
  Description of Artificial Sequence: Synthetic oligonucleotide
ctctcctaaggggtttct

SEQ ID NO: 3046 - DNA, 18 bp, Artificial Sequence
  Description of Artificial Sequence: Synthetic oligonucleotide
ccattctctcctaagggg

SEQ ID NO: 3047 - DNA, 18 bp, Artificial Sequence
  Description of Artificial Sequence: Synthetic oligonucleotide
tgaacccattctctccta

SEQ ID NO: 3048 - DNA, 18 bp, Artificial Sequence
  Description of Artificial Sequence: Synthetic oligonucleotide
ctctttgaacccattctc

SEQ ID NO: 3049 - DNA, 18 bp, Artificial Sequence
  Description of Artificial Sequence: Synthetic oligonucleotide
gaatgctctttgaaccca

SEQ ID NO: 3050 - DNA, 18 bp, Artificial Sequence
  Description of Artificial Sequence: Synthetic oligonucleotide
ccatggaatgctctttga

SEQ ID NO: 3051 - DNA, 18 bp, Artificial Sequence
  Description of Artificial Sequence: Synthetic oligonucleotide
atacaccatggaatgctc

SEQ ID NO: 3052 - DNA, 18 bp, Artificial Sequence
  Description of Artificial Sequence: Synthetic oligonucleotide
atgggatacaccatggaa

SEQ ID NO: 3053 - DNA, 18 bp, Artificial Sequence
  Description of Artificial Sequence: Synthetic oligonucleotide
aggaaatgggatacacca

SEQ ID NO: 3054 - DNA, 18 bp, Artificial Sequence
  Description of Artificial Sequence: Synthetic oligonucleotide
gagaaaggaaatgggata

SEQ ID NO: 3055 - DNA, 18 bp, Artificial Sequence
  Description of Artificial Sequence: Synthetic oligonucleotide
atctggagaaaggaaatg

SEQ ID NO: 3056 - DNA, 18 bp, Artificial Sequence
  Description of Artificial Sequence: Synthetic oligonucleotide
tttggatctggagaaagg

SEQ ID NO: 3057 - DNA, 18 bp, Artificial Sequence
  Description of Artificial Sequence: Synthetic oligonucleotide
agaggtttggatctggag

SEQ ID NO: 3058 - DNA, 18 bp, Artificial Sequence
  Description of Artificial Sequence: Synthetic oligonucleotide
gggacagaggtttggatc

SEQ ID NO: 3059 - DNA, 18 bp, Artificial Sequence
  Description of Artificial Sequence: Synthetic oligonucleotide
ctgcggggacagaggttt

SEQ ID NO: 3060 - DNA, 18 bp, Artificial Sequence
  Description of Artificial Sequence: Synthetic oligonucleotide
aacacctgcggggacaga

SEQ ID NO: 3061 - DNA, 18 bp, Artificial Sequence
  Description of Artificial Sequence: Synthetic oligonucleotide
ccagcaacacctgcgggg

SEQ ID NO: 3062 - DNA, 18 bp, Artificial Sequence
  Description of Artificial Sequence: Synthetic oligonucleotide
tagcaccagcaacacctg

SEQ ID NO: 3063 - DNA, 18 bp, Artificial Sequence
  Description of Artificial Sequence: Synthetic oligonucleotide
ctctagcaccagcaacac

SEQ ID NO: 3064 - DNA, 18 bp, Artificial Sequence
  Description of Artificial Sequence: Synthetic oligonucleotide
tgaagctctagcaccagc

SEQ ID NO: 3065 - DNA, 18 bp, Artificial Sequence
  Description of Artificial Sequence: Synthetic oligonucleotide
gcccctgaagctctagca

SEQ ID NO: 3066 - DNA, 18 bp, Artificial Sequence
  Description of Artificial Sequence: Synthetic oligonucleotide
ttgaagcccctgaagctc

SEQ ID NO: 3067 - DNA, 18 bp, Artificial Sequence
  Description of Artificial Sequence: Synthetic oligonucleotide
ttcttttgaagcccctga

SEQ ID NO: 3068 - DNA, 18 bp, Artificial Sequence
  Description of Artificial Sequence: Synthetic oligonucleotide
tcatgttcttttgaagcc

SEQ ID NO: 3069 - DNA, 18 bp, Artificial Sequence
  Description of Artificial Sequence: Synthetic oligonucleotide
ccgagtcatgttcttttg

SEQ ID NO: 3070 - DNA, 18 bp, Artificial Sequence
  Description of Artificial Sequence: Synthetic oligonucleotide
ctgaaccgagtcatgttc

SEQ ID NO: 3071 - DNA, 18 bp, Artificial Sequence
  Description of Artificial Sequence: Synthetic oligonucleotide
caatcctgaaccgagtca

SEQ ID NO: 3072 - DNA, 18 bp, Artificial Sequence
  Description of Artificial Sequence: Synthetic oligonucleotide
ctcatcaatcctgaaccg

SEQ ID NO: 3073 - DNA, 18 bp, Artificial Sequence
  Description of Artificial Sequence: Synthetic oligonucleotide
tccagctcatcaatcctg

SEQ ID NO: 3074 - DNA, 18 bp, Artificial Sequence
  Description of Artificial Sequence: Synthetic oligonucleotide
gaggctccagctcatcaa

SEQ ID NO: 3075 - DNA, 18 bp, Artificial Sequence
  Description of Artificial Sequence: Synthetic oligonucleotide
tcgccgaggctccagctc

SEQ ID NO: 3076 - DNA, 18 bp, Artificial Sequence
  Description of Artificial Sequence: Synthetic oligonucleotide
cggggtcgccgaggctcc

SEQ ID NO: 3077 - DNA, 18 bp, Artificial Sequence
  Description of Artificial Sequence: Synthetic oligonucleotide
ggtatcggggtcgccgag

SEQ ID NO: 3078 - DNA, 18 bp, Artificial Sequence
  Description of Artificial Sequence: Synthetic oligonucleotide
tacacggtatcggggtcg

SEQ ID NO: 3079 - DNA, 18 bp, Artificial Sequence
  Description of Artificial Sequence: Synthetic oligonucleotide
tctggtacacggtatcgg

SEQ ID NO: 3080 - DNA, 18 bp, Artificial Sequence
  Description of Artificial Sequence: Synthetic oligonucleotide
aaacatctggtacacggt

SEQ ID NO: 3081 - DNA, 18 bp, Artificial Sequence
  Description of Artificial Sequence: Synthetic oligonucleotide
caccaaaacatctggtac

SEQ ID NO: 3082 - DNA, 18 bp, Artificial Sequence
  Description of Artificial Sequence: Synthetic oligonucleotide
tcagccaccaaaacatct

SEQ ID NO: 3083 - DNA, 18 bp, Artificial Sequence
  Description of Artificial Sequence: Synthetic oligonucleotide
gtggatcagccaccaaaa

SEQ ID NO: 3084 - DNA, 18 bp, Artificial Sequence
  Description of Artificial Sequence: Synthetic oligonucleotide
tattggtggatcagccac

SEQ ID NO: 3085 - DNA, 18 bp, Artificial Sequence
  Description of Artificial Sequence: Synthetic oligonucleotide
cgggctattggtggatca

SEQ ID NO: 3086 - DNA, 18 bp, Artificial Sequence
  Description of Artificial Sequence: Synthetic oligonucleotide
taccgggctattggtgga

SEQ ID NO: 3087 - DNA, 18 bp, Artificial Sequence
  Description of Artificial Sequence: Synthetic oligonucleotide
aaatttaccgggctattg

SEQ ID NO: 3088 - DNA, 18 bp, Artificial Sequence
  Description of Artificial Sequence: Synthetic oligonucleotide
aggaaaaatttaccgggc

SEQ ID NO: 3089 - DNA, 18 bp, Artificial Sequence
  Description of Artificial Sequence: Synthetic oligonucleotide
ttctcaggaaaaatttac

SEQ ID NO: 3090 - DNA, 18 bp, Artificial Sequence
  Description of Artificial Sequence: Synthetic oligonucleotide
gatgtttctcaggaaaaa

SEQ ID NO: 3091 - DNA, 18 bp, Artificial Sequence
  Description of Artificial Sequence: Synthetic oligonucleotide
aaatggatgtttctcagg

SEQ ID NO: 3092 - DNA, 18 bp, Artificial Sequence
  Description of Artificial Sequence: Synthetic oligonucleotide
cacagaaatggatgtttc

SEQ ID NO: 3093 - DNA, 18 bp, Artificial Sequence
  Description of Artificial Sequence: Synthetic oligonucleotide
ggggccacagaaatggat

SEQ ID NO: 3094 - DNA, 18 bp, Artificial Sequence
  Description of Artificial Sequence: Synthetic oligonucleotide
agaaaggggccacagaaa

SEQ ID NO: 3095 - DNA, 18 bp, Artificial Sequence
  Description of Artificial Sequence: Synthetic oligonucleotide
gaaggagaaaggggccac

SEQ ID NO: 3096 - DNA, 18 bp, Artificial Sequence
  Description of Artificial Sequence: Synthetic oligonucleotide
atcaggaaggagaaaggg

SEQ ID NO: 3097 - DNA, 18 bp, Artificial Sequence
  Description of Artificial Sequence: Synthetic oligonucleotide
ggttcatcaggaaggaga

SEQ ID NO: 3098 - DNA, 18 bp, Artificial Sequence
  Description of Artificial Sequence: Synthetic oligonucleotide
aaaaaggttcatcaggaa

SEQ ID NO: 3099 - DNA, 18 bp, Artificial Sequence
  Description of Artificial Sequence: Synthetic oligonucleotide
accaaaaaaaggttcatc

SEQ ID NO: 3100 - DNA, 18 bp, Artificial Sequence
  Description of Artificial Sequence: Synthetic oligonucleotide
cagcaaccaaaaaaaggt

SEQ ID NO: 3101 - DNA, 18 bp, Artificial Sequence
  Description of Artificial Sequence: Synthetic oligonucleotide
aatatcagcaaccaaaaa

SEQ ID NO: 3102 - DNA, 18 bp, Artificial Sequence
  Description of Artificial Sequence: Synthetic oligonucleotide
gaaagaatatcagcaacc

SEQ ID NO: 3103 - DNA, 18 bp, Artificial Sequence
  Description of Artificial Sequence: Synthetic oligonucleotide
tttgggaaagaatatcag

SEQ ID NO: 3104 - DNA, 18 bp, Artificial Sequence
  Description of Artificial Sequence: Synthetic oligonucleotide
cttattttgggaaagaat

SEQ ID NO: 3105 - DNA, 18 bp, Artificial Sequence
  Description of Artificial Sequence: Synthetic oligonucleotide
actaccttattttgggaa

SEQ ID NO: 3106 - DNA, 18 bp, Artificial Sequence
  Description of Artificial Sequence: Synthetic oligonucleotide
taactactaccttatttt

SEQ ID NO: 3107 - DNA, 18 bp, Artificial Sequence
  Description of Artificial Sequence: Synthetic oligonucleotide
accatggaaaacatcttg

SEQ ID NO: 3108 - DNA, 18 bp, Artificial Sequence
  Description of Artificial Sequence: Synthetic oligonucleotide
gacttaccatggaaaaca

SEQ ID NO: 3109 - DNA, 18 bp, Artificial Sequence
  Description of Artificial Sequence: Synthetic oligonucleotide
acacagacttaccatgga

SEQ ID NO: 3110 - DNA, 18 bp, Artificial Sequence
  Description of Artificial Sequence: Synthetic oligonucleotide
gattgacacagacttacc

SEQ ID NO: 3111 - DNA, 18 bp, Artificial Sequence
  Description of Artificial Sequence: Synthetic oligonucleotide
ctaacgattgacacagac

SEQ ID NO: 3112 - DNA, 18 bp, Artificial Sequence
  Description of Artificial Sequence: Synthetic oligonucleotide
gggaactaacgattgaca

SEQ ID NO: 3113 - DNA, 18 bp, Artificial Sequence
  Description of Artificial Sequence: Synthetic oligonucleotide
cttcagggaactaacgat

SEQ ID NO: 3114 - DNA, 18 bp, Artificial Sequence
  Description of Artificial Sequence: Synthetic oligonucleotide
ccttccttcagggaacta

SEQ ID NO: 3115 - DNA, 18 bp, Artificial Sequence
  Description of Artificial Sequence: Synthetic oligonucleotide
ttaagccttccttcaggg

SEQ ID NO: 3116 - DNA, 18 bp, Artificial Sequence
  Description of Artificial Sequence: Synthetic oligonucleotide
ctagattaagccttcctt

SEQ ID NO: 3117 - DNA, 18 bp, Artificial Sequence
  Description of Artificial Sequence: Synthetic oligonucleotide
ctgtgctagattaagcct

SEQ ID NO: 3118 - DNA, 18 bp, Artificial Sequence
  Description of Artificial Sequence: Synthetic oligonucleotide
aaatactgtgctagatta

SEQ ID NO: 3119 - DNA, 18 bp, Artificial Sequence
  Description of Artificial Sequence: Synthetic oligonucleotide
acagaaaatactgtgcta

SEQ ID NO: 3120 - DNA, 18 bp, Artificial Sequence
  Description of Artificial Sequence: Synthetic oligonucleotide
tagatacagaaaatactg

SEQ ID NO: 3121 - DNA, 18 bp, Artificial Sequence
  Description of Artificial Sequence: Synthetic oligonucleotide
gggagtagatacagaaaa

SEQ ID NO: 3122 - DNA, 18 bp, Artificial Sequence
  Description of Artificial Sequence: Synthetic oligonucleotide
aaccagggagtagataca

SEQ ID NO: 3123 - DNA, 18 bp, Artificial Sequence
  Description of Artificial Sequence: Synthetic oligonucleotide
ggagaaaccagggagtag

SEQ ID NO: 3124 - DNA, 18 bp, Artificial Sequence
  Description of Artificial Sequence: Synthetic oligonucleotide
ctgtgggagaaaccaggg

SEQ ID NO: 3125 - DNA, 18 bp, Artificial Sequence
  Description of Artificial Sequence: Synthetic oligonucleotide
tagctctgtgggagaaac

SEQ ID NO: 3126 - DNA, 18 bp, Artificial Sequence
  Description of Artificial Sequence: Synthetic oligonucleotide
ggccctagctctgtggga

SEQ ID NO: 3127 - DNA, 18 bp, Artificial Sequence
  Description of Artificial Sequence: Synthetic oligonucleotide
ctcatggccctagctctg

SEQ ID NO: 3128 - DNA, 18 bp, Artificial Sequence
  Description of Artificial Sequence: Synthetic oligonucleotide
gtactcatggccctagct

SEQ ID NO: 3129 - DNA, 18 bp, Artificial Sequence
  Description of Artificial Sequence: Synthetic oligonucleotide
acaaggtactcatggccc

SEQ ID NO: 3130 - DNA, 18 bp, Artificial Sequence
  Description of Artificial Sequence: Synthetic oligonucleotide
caaaaacaaggtactcat

SEQ ID NO: 3131 - DNA, 18 bp, Artificial Sequence
  Description of Artificial Sequence: Synthetic oligonucleotide
ccagtcaaaaacaaggta

SEQ ID NO: 3132 - DNA, 18 bp, Artificial Sequence
  Description of Artificial Sequence: Synthetic oligonucleotide
tccttccagtcaaaaaca

SEQ ID NO: 3133 - DNA, 18 bp, Artificial Sequence
  Description of Artificial Sequence: Synthetic oligonucleotide
acagctccttccagtcaa

SEQ ID NO: 3134 - DNA, 18 bp, Artificial Sequence
  Description of Artificial Sequence: Synthetic oligonucleotide
accccacagctccttcca

SEQ ID NO: 3135 - DNA, 18 bp, Artificial Sequence
  Description of Artificial Sequence: Synthetic oligonucleotide
ggtccaccccacagctcc

SEQ ID NO: 3136 - DNA, 18 bp, Artificial Sequence
  Description of Artificial Sequence: Synthetic oligonucleotide
gaaacggtccaccccaca

SEQ ID NO: 3137 - DNA, 18 bp, Artificial Sequence
  Description of Artificial Sequence: Synthetic oligonucleotide
ctttcagggaaacggtcc

SEQ ID NO: 3138 - DNA, 18 bp, Artificial Sequence
  Description of Artificial Sequence: Synthetic oligonucleotide
tctagctttcagggaaac

SEQ ID NO: 3139 - DNA, 18 bp, Artificial Sequence
  Description of Artificial Sequence: Synthetic oligonucleotide
attcttctagctttcagg

SEQ ID NO: 3140 - DNA, 18 bp, Artificial Sequence
  Description of Artificial Sequence: Synthetic oligonucleotide
caaacattcttctagctt

SEQ ID NO: 3141 - DNA, 18 bp, Artificial Sequence
  Description of Artificial Sequence: Synthetic oligonucleotide
ggcttcaaacattcttct

SEQ ID NO: 3142 - DNA, 18 bp, Artificial Sequence
  Description of Artificial Sequence: Synthetic oligonucleotide
gaacaggcttcaaacatt

SEQ ID NO: 3143 - DNA, 18 bp, Artificial Sequence
  Description of Artificial Sequence: Synthetic oligonucleotide
cttgggaacaggcttcaa

SEQ ID NO: 3144 - DNA, 18 bp, Artificial Sequence
  Description of Artificial Sequence: Synthetic oligonucleotide
tgccttgggaacaggctt

SEQ ID NO: 3145 - DNA, 18 bp, Artificial Sequence
  Description of Artificial Sequence: Synthetic oligonucleotide
aaacttgccttgggaaca

SEQ ID NO: 3146 - DNA, 18 bp, Artificial Sequence
  Description of Artificial Sequence: Synthetic oligonucleotide
tttataaacttgccttgg

SEQ ID NO: 3147 - DNA, 18 bp, Artificial Sequence
  Description of Artificial Sequence: Synthetic oligonucleotide
cactctttataaacttgc

SEQ ID NO: 3148 - DNA, 18 bp, Artificial Sequence
  Description of Artificial Sequence: Synthetic oligonucleotide
gccttcactctttataaa

SEQ ID NO: 3149 - DNA, 18 bp, Artificial Sequence
  Description of Artificial Sequence: Synthetic oligonucleotide
gccctgccttcactcttt

SEQ ID NO: 3150 - DNA, 18 bp, Artificial Sequence
  Description of Artificial Sequence: Synthetic oligonucleotide
gacaagccctgccttcac

SEQ ID NO: 3151 - DNA, 18 bp, Artificial Sequence
  Description of Artificial Sequence: Synthetic oligonucleotide
aatcagacaagccctgcc

SEQ ID NO: 3152 - DNA, 18 bp, Artificial Sequence
  Description of Artificial Sequence: Synthetic oligonucleotide
gaaggaatcagacaagcc

SEQ ID NO: 3153 - DNA, 18 bp, Artificial Sequence
  Description of Artificial Sequence: Synthetic oligonucleotide
gcacagaaggaatcagac

SEQ ID NO: 3154 - DNA, 18 bp, Artificial Sequence
  Description of Artificial Sequence: Synthetic oligonucleotide
aatgggcacagaaggaat

SEQ ID NO: 3155 - DNA, 18 bp, Artificial Sequence
  Description of Artificial Sequence: Synthetic oligonucleotide
agagcaatgggcacagaa

SEQ ID NO: 3156 - DNA, 18 bp, Artificial Sequence
  Description of Artificial Sequence: Synthetic oligonucleotide
gccacagagcaatgggca

SEQ ID NO: 3157 - DNA, 18 bp, Artificial Sequence
  Description of Artificial Sequence: Synthetic oligonucleotide
acatagccacagagcaat

SEQ ID NO: 3158 - DNA, 18 bp, Artificial Sequence
  Description of Artificial Sequence: Synthetic oligonucleotide
caatcacatagccacaga

SEQ ID NO: 3159 - DNA, 18 bp, Artificial Sequence
  Description of Artificial Sequence: Synthetic oligonucleotide
cagagcaatcacatagcc

SEQ ID NO: 3160 - DNA, 18 bp, Artificial Sequence
  Description of Artificial Sequence: Synthetic oligonucleotide
gggcacagagcaatcaca

SEQ ID NO: 3161 - DNA, 18 bp, Artificial Sequence
  Description of Artificial Sequence: Synthetic oligonucleotide
gtaatgggcacagagcaa

SEQ ID NO: 3162 - DNA, 18 bp, Artificial Sequence
  Description of Artificial Sequence: Synthetic oligonucleotide
acagggtaatgggcacag

SEQ ID NO: 3163 - DNA, 18 bp, Artificial Sequence
  Description of Artificial Sequence: Synthetic oligonucleotide
cagccacagggtaatggg

SEQ ID NO: 3164 - DNA, 18 bp, Artificial Sequence
  Description of Artificial Sequence: Synthetic oligonucleotide
tcacacagccacagggta

SEQ ID NO: 3165 - DNA, 18 bp, Artificial Sequence
  Description of Artificial Sequence: Synthetic oligonucleotide
ctgctcagcagctatggt

SEQ ID NO: 3166 - DNA, 18 bp, Artificial Sequence
  Description of Artificial Sequence: Synthetic oligonucleotide
cgtggctgctcagcagct

SEQ ID NO: 3167 - DNA, 18 bp, Artificial Sequence
  Description of Artificial Sequence: Synthetic oligonucleotide
aatggcgtggctgctcag

SEQ ID NO: 3168 - DNA, 18 bp, Artificial Sequence
  Description of Artificial Sequence: Synthetic oligonucleotide
acagcaatggcgtggctg

SEQ ID NO: 3169 - DNA, 18 bp, Artificial Sequence
  Description of Artificial Sequence: Synthetic oligonucleotide
cctccacagcaatggcgt

SEQ ID NO: 3170 - DNA, 18 bp, Artificial Sequence
  Description of Artificial Sequence: Synthetic oligonucleotide
ggctccctccacagcaat

SEQ ID NO: 3171 - DNA, 18 bp, Artificial Sequence
  Description of Artificial Sequence: Synthetic oligonucleotide
tgtaaggctccctccaca

SEQ ID NO: 3172 - DNA, 18 bp, Artificial Sequence
  Description of Artificial Sequence: Synthetic oligonucleotide
gaaagtgtaaggctccct

SEQ ID NO: 3173 - DNA, 18 bp, Artificial Sequence
  Description of Artificial Sequence: Synthetic oligonucleotide
gcagagaaagtgtaaggc

SEQ ID NO: 3174 - DNA, 18 bp, Artificial Sequence
  Description of Artificial Sequence: Synthetic oligonucleotide
cggaggcagagaaagtgt

SEQ ID NO: 3175 - DNA, 18 bp, Artificial Sequence
  Description of Artificial Sequence: Synthetic oligonucleotide
cagttcggaggcagagaa

SEQ ID NO: 3176 - DNA, 18 bp, Artificial Sequence
  Description of Artificial Sequence: Synthetic oligonucleotide
aagtgcagttcggaggca

SEQ ID NO: 3177 - DNA, 18 bp, Artificial Sequence
  Description of Artificial Sequence: Synthetic oligonucleotide
ctagtaagtgcagttcgg

SEQ ID NO: 3178 - DNA, 18 bp, Artificial Sequence
  Description of Artificial Sequence: Synthetic oligonucleotide
aggacctagtaagtgcag

SEQ ID NO: 3179 - DNA, 18 bp, Artificial Sequence
  Description of Artificial Sequence: Synthetic oligonucleotide
aaatgaggacctagtaag

SEQ ID NO: 3180 - DNA, 18 bp, Artificial Sequence
  Description of Artificial Sequence: Synthetic oligonucleotide
aaagaaaatgaggaccta

SEQ ID NO: 3181 - DNA, 18 bp, Artificial Sequence
  Description of Artificial Sequence: Synthetic oligonucleotide
tggcaaaagaaaatgagg

SEQ ID NO: 3182 - DNA, 18 bp, Artificial Sequence
  Description of Artificial Sequence: Synthetic oligonucleotide
ctacatggcaaaagaaaa

SEQ ID NO: 3183 - DNA, 18 bp, Artificial Sequence
  Description of Artificial Sequence: Synthetic oligonucleotide
aggtactacatggcaaaa

SEQ ID NO: 3184 - DNA, 18 bp, Artificial Sequence
  Description of Artificial Sequence: Synthetic oligonucleotide
cccccaggtactacatgg

SEQ ID NO: 3185 - DNA, 18 bp, Artificial Sequence
  Description of Artificial Sequence: Synthetic oligonucleotide
cctgtcccccaggtacta

SEQ ID NO: 3186 - DNA, 18 bp, Artificial Sequence
  Description of Artificial Sequence: Synthetic oligonucleotide
caccctgtcccccaggta

SEQ ID NO: 3187 - DNA, 18 bp, Artificial Sequence
  Description of Artificial Sequence: Synthetic oligonucleotide
tcagacaccctgtccccc

SEQ ID NO: 3188 - DNA, 18 bp, Artificial Sequence
  Description of Artificial Sequence: Synthetic oligonucleotide
ctttctcagacaccctgt

SEQ ID NO: 3189 - DNA, 18 bp, Artificial Sequence
  Description of Artificial Sequence: Synthetic oligonucleotide
cttcactttctcagacac

SEQ ID NO: 3190 - DNA, 18 bp, Artificial Sequence
  Description of Artificial Sequence: Synthetic oligonucleotide
ttggtcttcactttctca

SEQ ID NO: 3191 - DNA, 18 bp, Artificial Sequence
  Description of Artificial Sequence: Synthetic oligonucleotide
taaccttggtcttcactt

SEQ ID NO: 3192 - DNA, 18 bp, Artificial Sequence
  Description of Artificial Sequence: Synthetic oligonucleotide
ctcaataaccttggtctt

SEQ ID NO: 3193 - DNA, 18 bp, Artificial Sequence
  Description of Artificial Sequence: Synthetic oligonucleotide
agcagctcaataaccttg

SEQ ID NO: 3194 - DNA, 18 bp, Artificial Sequence
  Description of Artificial Sequence: Synthetic oligonucleotide
tgtacagcagctcaataa

SEQ ID NO: 3195 - DNA, 18 bp, Artificial Sequence
  Description of Artificial Sequence: Synthetic oligonucleotide
ccagctgtacagcagctc

SEQ ID NO: 3196 - DNA, 18 bp, Artificial Sequence
  Description of Artificial Sequence: Synthetic oligonucleotide
atggtccagctgtacagc

SEQ ID NO: 3197 - DNA, 18 bp, Artificial Sequence
  Description of Artificial Sequence: Synthetic oligonucleotide
gggccatggtccagctgt

SEQ ID NO: 3198 - DNA, 18 bp, Artificial Sequence
  Description of Artificial Sequence: Synthetic oligonucleotide
tggcagggccatggtcca

SEQ ID NO: 3199 - DNA, 18 bp, Artificial Sequence
  Description of Artificial Sequence: Synthetic oligonucleotide
ttcttctggcagggccat

SEQ ID NO: 3200 - DNA, 18 bp, Artificial Sequence
  Description of Artificial Sequence: Synthetic oligonucleotide
tttgcttcttctggcagg

SEQ ID NO: 3201 - DNA, 18 bp, Artificial Sequence
  Description of Artificial Sequence: Synthetic oligonucleotide
tgatctttgcttcttctg

SEQ ID NO: 3202 - DNA, 18 bp, Artificial Sequence
  Description of Artificial Sequence: Synthetic oligonucleotide
gtctttgatctttgcttc

SEQ ID NO: 3203 - DNA, 18 bp, Artificial Sequence
  Description of Artificial Sequence: Synthetic oligonucleotide
taggcgtctttgatcttt

SEQ ID NO: 3204 - DNA, 18 bp, Artificial Sequence
  Description of Artificial Sequence: Synthetic oligonucleotide
tgtggtaggcgtctttga

SEQ ID NO: 3205 - DNA, 18 bp, Artificial Sequence
  Description of Artificial Sequence: Synthetic oligonucleotide
cagcatgtggtaggcgtc

SEQ ID NO: 3206 - DNA, 18 bp, Artificial Sequence
  Description of Artificial Sequence: Synthetic oligonucleotide
ctcttcagcatgtggtag

SEQ ID NO: 3207 - DNA, 18 bp, Artificial Sequence
  Description of Artificial Sequence: Synthetic oligonucleotide
cctgtctcttcagcatgt

SEQ ID NO: 3208 - DNA, 18 bp, Artificial Sequence
  Description of Artificial Sequence: Synthetic oligonucleotide
taccctgtctcttcagca

SEQ ID NO: 3209 - DNA, 18 bp, Artificial Sequence
  Description of Artificial Sequence: Synthetic oligonucleotide
acacgtaccctgtctctt

SEQ ID NO: 3210 - DNA, 18 bp, Artificial Sequence
  Description of Artificial Sequence: Synthetic oligonucleotide
ggcagacacgtaccctgt

SEQ ID NO: 3211 - DNA, 18 bp, Artificial Sequence
  Description of Artificial Sequence: Synthetic oligonucleotide
gggcaggcagacacgtac

SEQ ID NO: 3212 - DNA, 18 bp, Artificial Sequence
  Description of Artificial Sequence: Synthetic oligonucleotide
gctgcgggcaggcagaca

SEQ ID NO: 3213 - DNA, 18 bp, Artificial Sequence
  Description of Artificial Sequence: Synthetic oligonucleotide
tggaggctgcgggcaggc

SEQ ID NO: 3214 - DNA, 18 bp, Artificial Sequence
  Description of Artificial Sequence: Synthetic oligonucleotide
ctgcctggaggctgcggg

SEQ ID NO: 3215 - DNA, 18 bp, Artificial Sequence
  Description of Artificial Sequence: Synthetic oligonucleotide
gagggctgcctggaggct

SEQ ID NO: 3216 - DNA, 18 bp, Artificial Sequence
  Description of Artificial Sequence: Synthetic oligonucleotide
ccttcgagggctgcctgg

SEQ ID NO: 3217 - DNA, 18 bp, Artificial Sequence
  Description of Artificial Sequence: Synthetic oligonucleotide
gccagccttcgagggctg

SEQ ID NO: 3218 - DNA, 18 bp, Artificial Sequence
  Description of Artificial Sequence: Synthetic oligonucleotide
cctgggccagccttcgag

SEQ ID NO: 3219 - DNA, 18 bp, Artificial Sequence
  Description of Artificial Sequence: Synthetic oligonucleotide
ccttgcctgggccagcct

SEQ ID NO: 3220 - DNA, 18 bp, Artificial Sequence
  Description of Artificial Sequence: Synthetic oligonucleotide
tctctccttgcctgggcc

SEQ ID NO: 3221 - DNA, 18 bp, Artificial Sequence
  Description of Artificial Sequence: Synthetic oligonucleotide
tcccttctctccttgcct

SEQ ID NO: 3222 - DNA, 18 bp, Artificial Sequence
  Description of Artificial Sequence: Synthetic oligonucleotide
aaccttcccttctctcct

SEQ ID NO: 3223 - DNA, 18 bp, Artificial Sequence
  Description of Artificial Sequence: Synthetic oligonucleotide
tcccaaaccttcccttct

SEQ ID NO: 3224 - DNA, 18 bp, Artificial Sequence
  Description of Artificial Sequence: Synthetic oligonucleotide
ggggatcccaaaccttcc

SEQ ID NO: 3225 - DNA, 18 bp, Artificial Sequence
  Description of Artificial Sequence: Synthetic oligonucleotide
actctggggatcccaaac

SEQ ID NO: 3226 - DNA, 18 bp, Artificial Sequence
  Description of Artificial Sequence: Synthetic oligonucleotide
gagggactctggggatcc

SEQ ID NO: 3227 - DNA, 18 bp, Artificial Sequence
  Description of Artificial Sequence: Synthetic oligonucleotide
ttcaggagggactctggg

SEQ ID NO: 3228 - DNA, 18 bp, Artificial Sequence
  Description of Artificial Sequence: Synthetic oligonucleotide
ttctcttcaggagggact

SEQ ID NO: 3229 - DNA, 18 bp, Artificial Sequence
  Description of Artificial Sequence: Synthetic oligonucleotide
ctcatagagagaagtaaa

SEQ ID NO: 3230 - DNA, 18 bp, Artificial Sequence
  Description of Artificial Sequence: Synthetic oligonucleotide
gtaaactcatagagagaa

SEQ ID NO: 3231 - DNA, 18 bp, Artificial Sequence
  Description of Artificial Sequence: Synthetic oligonucleotide
aataggtaaactcataga

SEQ ID NO: 3232 - DNA, 18 bp, Artificial Sequence
  Description of Artificial Sequence: Synthetic oligonucleotide
tctagaataggtaaactc

SEQ ID NO: 3233 - DNA, 18 bp, Artificial Sequence
  Description of Artificial Sequence: Synthetic oligonucleotide
aagtatctagaataggta

SEQ ID NO: 3234 - DNA, 18 bp, Artificial Sequence
  Description of Artificial Sequence: Synthetic oligonucleotide
atattaagtatctagaat

SEQ ID NO: 3235 - DNA, 18 bp, Artificial Sequence
  Description of Artificial Sequence: Synthetic oligonucleotide
cacttatattaagtatct

SEQ ID NO: 3236 - DNA, 18 bp, Artificial Sequence
  Description of Artificial Sequence: Synthetic oligonucleotide
gactccacttatattaag

SEQ ID NO: 3237 - DNA, 18 bp, Artificial Sequence
  Description of Artificial Sequence: Synthetic oligonucleotide
tgtatgactccacttata

SEQ ID NO: 3238 - DNA, 18 bp, Artificial Sequence
  Description of Artificial Sequence: Synthetic oligonucleotide
aattctgtatgactccac

SEQ ID NO: 3239 - DNA, 18 bp, Artificial Sequence
  Description of Artificial Sequence: Synthetic oligonucleotide
ggacaaattctgtatgac

SEQ ID NO: 3240 - DNA, 18 bp, Artificial Sequence
  Description of Artificial Sequence: Synthetic oligonucleotide
caaaaggacaaattctgt

SEQ ID NO: 3241 - DNA, 18 bp, Artificial Sequence
  Description of Artificial Sequence: Synthetic oligonucleotide
agatacaaaaggacaaat

SEQ ID NO: 3242 - DNA, 18 bp, Artificial Sequence
  Description of Artificial Sequence: Synthetic oligonucleotide
aagccagatacaaaagga

SEQ ID NO: 3243 - DNA, 18 bp, Artificial Sequence
  Description of Artificial Sequence: Synthetic oligonucleotide
gaaataagccagatacaa

SEQ ID NO: 3244 - DNA, 18 bp, Artificial Sequence
  Description of Artificial Sequence: Synthetic oligonucleotide
taagtgaaataagccaga

SEQ ID NO: 3245 - DNA, 18 bp, Artificial Sequence
  Description of Artificial Sequence: Synthetic oligonucleotide
aacattaagtgaaataag

SEQ ID NO: 3246 - DNA, 18 bp, Artificial Sequence
  Description of Artificial Sequence: Synthetic oligonucleotide
ctgaaaacattaagtgaa

SEQ ID NO: 3247 - DNA, 18 bp, Artificial Sequence
  Description of Artificial Sequence: Synthetic oligonucleotide
gaaccctgaaaacattaa

SEQ ID NO: 3248 - DNA, 18 bp, Artificial Sequence
  Description of Artificial Sequence: Synthetic oligonucleotide
tagatgaaccctgaaaac

SEQ ID NO: 3249 - DNA, 18 bp, Artificial Sequence
  Description of Artificial Sequence: Synthetic oligonucleotide
caatatagatgaaccctg

SEQ ID NO: 3250 - DNA, 18 bp, Artificial Sequence
  Description of Artificial Sequence: Synthetic oligonucleotide
ctacaatatagatgaacc

SEQ ID NO: 3251 - DNA, 18 bp, Artificial Sequence
  Description of Artificial Sequence: Synthetic oligonucleotide
acaggctacaatatagat

SEQ ID NO: 3252 - DNA, 18 bp, Artificial Sequence
  Description of Artificial Sequence: Synthetic oligonucleotide
tggtaacaggctacaata

SEQ ID NO: 3253 - DNA, 18 bp, Artificial Sequence
  Description of Artificial Sequence: Synthetic oligonucleotide
aattctggtaacaggcta

SEQ ID NO: 3254 - DNA, 18 bp, Artificial Sequence
  Description of Artificial Sequence: Synthetic oligonucleotide
aatgaaattctggtaaca

SEQ ID NO: 3255 - DNA, 18 bp, Artificial Sequence
  Description of Artificial Sequence: Synthetic oligonucleotide
aacagaatgaaattctgg

SEQ ID NO: 3256 - DNA, 18 bp, Artificial Sequence
  Description of Artificial Sequence: Synthetic oligonucleotide
cataaaacagaatgaaat

SEQ ID NO: 3257 - DNA, 18 bp, Artificial Sequence
  Description of Artificial Sequence: Synthetic oligonucleotide
tccgtcataaaacagaat

SEQ ID NO: 3258 - DNA, 18 bp, Artificial Sequence
  Description of Artificial Sequence: Synthetic oligonucleotide
attattccgtcataaaac

SEQ ID NO: 3259 - DNA, 18 bp, Artificial Sequence
  Description of Artificial Sequence: Synthetic oligonucleotide
ggaatattattccgtcat

SEQ ID NO: 3260 - DNA, 18 bp, Artificial Sequence
  Description of Artificial Sequence: Synthetic oligonucleotide
aaaacggaatattattcc

SEQ ID NO: 3261 - DNA, 18 bp, Artificial Sequence
  Description of Artificial Sequence: Synthetic oligonucleotide
cacataaaacggaatatt

SEQ ID NO: 3262 - DNA, 18 bp, Artificial Sequence
  Description of Artificial Sequence: Synthetic oligonucleotide
gtagacacataaaacgga

SEQ ID NO: 3263 - DNA, 18 bp, Artificial Sequence
  Description of Artificial Sequence: Synthetic oligonucleotide
atgtggtagacacataaa

SEQ ID NO: 3264 - DNA, 18 bp, Artificial Sequence
  Description of Artificial Sequence: Synthetic oligonucleotide
acaaaatgtggtagacac

SEQ ID NO: 3265 - DNA, 18 bp, Artificial Sequence
  Description of Artificial Sequence: Synthetic oligonucleotide
ggataacaaaatgtggta

SEQ ID NO: 3266 - DNA, 18 bp, Artificial Sequence
  Description of Artificial Sequence: Synthetic oligonucleotide
tgaatggataacaaaatg

SEQ ID NO: 3267 - DNA, 18 bp, Artificial Sequence
  Description of Artificial Sequence: Synthetic oligonucleotide
acagatgaatggataaca

SEQ ID NO: 3268 - DNA, 18 bp, Artificial Sequence
  Description of Artificial Sequence: Synthetic oligonucleotide
catcaacagatgaatgga

SEQ ID NO: 3269 - DNA, 18 bp, Artificial Sequence
  Description of Artificial Sequence: Synthetic oligonucleotide
gtgtccatcaacagatga

SEQ ID NO: 3270 - DNA, 18 bp, Artificial Sequence
  Description of Artificial Sequence: Synthetic oligonucleotide
ctcaagtgtccatcaaca

SEQ ID NO: 3271 - DNA, 18 bp, Artificial Sequence
  Description of Artificial Sequence: Synthetic oligonucleotide
aacaactcaagtgtccat

SEQ ID NO: 3272 - DNA, 18 bp, Artificial Sequence
  Description of Artificial Sequence: Synthetic oligonucleotide
gtggaaacaactcaagtg

SEQ ID NO: 3273 - DNA, 18 bp, Artificial Sequence
  Description of Artificial Sequence: Synthetic oligonucleotide
caatggtggaaacaactc

SEQ ID NO: 3274 - DNA, 18 bp, Artificial Sequence
  Description of Artificial Sequence: Synthetic oligonucleotide
cagcccaatggtggaaac

SEQ ID NO: 3275 - DNA, 18 bp, Artificial Sequence
  Description of Artificial Sequence: Synthetic oligonucleotide
ctcaacagcccaatggtg

SEQ ID NO: 3276 - DNA, 18 bp, Artificial Sequence
  Description of Artificial Sequence: Synthetic oligonucleotide
ttattctcaacagcccaa

SEQ ID NO: 3277 - DNA, 18 bp, Artificial Sequence
  Description of Artificial Sequence: Synthetic oligonucleotide
cagtattattctcaacag

SEQ ID NO: 3278 - DNA, 18 bp, Artificial Sequence
  Description of Artificial Sequence: Synthetic oligonucleotide
catagcagtattattctc

SEQ ID NO: 3279 - DNA, 18 bp, Artificial Sequence
  Description of Artificial Sequence: Synthetic oligonucleotide
gagttcatagcagtatta

SEQ ID NO: 3280 - DNA, 18 bp, Artificial Sequence
  Description of Artificial Sequence: Synthetic oligonucleotide
caccagagttcatagcag

SEQ ID NO: 3281 - DNA, 18 bp, Artificial Sequence
  Description of Artificial Sequence: Synthetic oligonucleotide
ttctacaccagagttcat

SEQ ID NO: 3282 - DNA, 18 bp, Artificial Sequence
  Description of Artificial Sequence: Synthetic oligonucleotide
gatacttctacaccagag

SEQ ID NO: 3283 - DNA, 18 bp, Artificial Sequence
  Description of Artificial Sequence: Synthetic oligonucleotide
aaacagatacttctacac

SEQ ID NO: 3284 - DNA, 18 bp, Artificial Sequence
  Description of Artificial Sequence: Synthetic oligonucleotide
aactaaaacagatacttc

SEQ ID NO: 3285 - DNA, 18 bp, Artificial Sequence
  Description of Artificial Sequence: Synthetic oligonucleotide
agagaaactaaaacagat

SEQ ID NO: 3286 - DNA, 18 bp, Artificial Sequence
  Description of Artificial Sequence: Synthetic oligonucleotide
tgagaagagaaactaaaa

SEQ ID NO: 3287 - DNA, 18 bp, Artificial Sequence
  Description of Artificial Sequence: Synthetic oligonucleotide
aaaattgagaagagaaac

SEQ ID NO: 3288 - DNA, 18 bp, Artificial Sequence
  Description of Artificial Sequence: Synthetic oligonucleotide
ctcaaaaaattgagaaga

SEQ ID NO: 3289 - DNA, 18 bp, Artificial Sequence
  Description of Artificial Sequence: Synthetic oligonucleotide
tacctcaaaaaattgaga

SEQ ID NO: 3290 - DNA, 18 bp, Artificial Sequence
  Description of Artificial Sequence: Synthetic oligonucleotide
gtatatacctcaaaaaat

SEQ ID NO: 3291 - DNA, 18 bp, Artificial Sequence
  Description of Artificial Sequence: Synthetic oligonucleotide
gataggtatatacctcaa

SEQ ID NO: 3292 - DNA, 18 bp, Artificial Sequence
  Description of Artificial Sequence: Synthetic oligonucleotide
aataggataggtatatac

SEQ ID NO: 3293 - DNA, 18 bp, Artificial Sequence
  Description of Artificial Sequence: Synthetic oligonucleotide
ttctcaataggataggta

SEQ ID NO: 3294 - DNA, 18 bp, Artificial Sequence
  Description of Artificial Sequence: Synthetic oligonucleotide
gaaagttctcaataggat

SEQ ID NO: 3295 - DNA, 18 bp, Artificial Sequence
  Description of Artificial Sequence: Synthetic oligonucleotide
agtttgaaagttctcaat

SEQ ID NO: 3296 - DNA, 18 bp, Artificial Sequence
  Description of Artificial Sequence: Synthetic oligonucleotide
gcataagtttgaaagttc

SEQ ID NO: 3297 - DNA, 18 bp, Artificial Sequence
  Description of Artificial Sequence: Synthetic oligonucleotide
ctacagcataagtttgaa

SEQ ID NO: 3298 - DNA, 18 bp, Artificial Sequence
  Description of Artificial Sequence: Synthetic oligonucleotide
caaaactacagcataagt

SEQ ID NO: 3299 - DNA, 18 bp, Artificial Sequence
  Description of Artificial Sequence: Synthetic oligonucleotide
atcaacaaaactacagca

SEQ ID NO: 3300 - DNA, 18 bp, Artificial Sequence
  Description of Artificial Sequence: Synthetic oligonucleotide
ttttaatcaacaaaacta

SEQ ID NO: 3301 - DNA, 18 bp, Artificial Sequence
  Description of Artificial Sequence: Synthetic oligonucleotide
aagtgttttaatcaacaa

SEQ ID NO: 3302 - DNA, 18 bp, Artificial Sequence
  Description of Artificial Sequence: Synthetic oligonucleotide
attttaagtgttttaatc

SEQ ID NO: 3303 - DNA, 18 bp, Artificial Sequence
  Description of Artificial Sequence: Synthetic oligonucleotide
gtgtgattttaagtgttt

SEQ ID NO: 3304 - DNA, 18 bp, Artificial Sequence
  Description of Artificial Sequence: Synthetic oligonucleotide
tgggagtgtgattttaag

SEQ ID NO: 3305 - DNA, 18 bp, Artificial Sequence
  Description of Artificial Sequence: Synthetic oligonucleotide
ggccttgggagtgtgatt

SEQ ID NO: 3306 - DNA, 18 bp, Artificial Sequence
  Description of Artificial Sequence: Synthetic oligonucleotide
ttccaggccttgggagtg

SEQ ID NO: 3307 - DNA, 18 bp, Artificial Sequence
  Description of Artificial Sequence: Synthetic oligonucleotide
ttcatttccaggccttgg

SEQ ID NO: 3308 - DNA, 18 bp, Artificial Sequence
  Description of Artificial Sequence: Synthetic oligonucleotide
ggcatttcatttccaggc

SEQ ID NO: 3309 - DNA, 18 bp, Artificial Sequence
  Description of Artificial Sequence: Synthetic oligonucleotide
ttcagggcatttcatttc

SEQ ID NO: 3310 - DNA, 18 bp, Artificial Sequence
  Description of Artificial Sequence: Synthetic oligonucleotide
ttttttcctgggaagctc

SEQ ID NO: 3311 - DNA, 18 bp, Artificial Sequence
  Description of Artificial Sequence: Synthetic oligonucleotide
tttttttttttcctggga

SEQ ID NO: 3312 - DNA, 18 bp, Artificial Sequence
  Description of Artificial Sequence: Synthetic oligonucleotide
ttttttttttttttttcc

SEQ ID NO: 3313 - DNA, 18 bp, Artificial Sequence
  Description of Artificial Sequence: Synthetic oligonucleotide
tttttttttttttttttt

SEQ ID NO: 3314 - DNA, 18 bp, Artificial Sequence
  Description of Artificial Sequence: Synthetic oligonucleotide
tttttttttttttttttt

SEQ ID NO: 3315 - DNA, 18 bp, Artificial Sequence
  Description of Artificial Sequence: Synthetic oligonucleotide
tttttttttttttttttt

SEQ ID NO: 3316 - DNA, 18 bp, Artificial Sequence
  Description of Artificial Sequence: Synthetic oligonucleotide
tttttttttttttttttt

SEQ ID NO: 3317 - DNA, 18 bp, Artificial Sequence
  Description of Artificial Sequence: Synthetic oligonucleotide
ggtttttttttttttttt

SEQ ID NO: 3318 - DNA, 18 bp, Artificial Sequence
  Description of Artificial Sequence: Synthetic oligonucleotide
ctgggggttttttttttt

SEQ ID NO: 3319 - DNA, 18 bp, Artificial Sequence
  Description of Artificial Sequence: Synthetic oligonucleotide
aaaaactgggggtttttt

SEQ ID NO: 3320 - DNA, 18 bp, Artificial Sequence
  Description of Artificial Sequence: Synthetic oligonucleotide
gttggaaaaactgggggt

SEQ ID NO: 3321 - DNA, 18 bp, Artificial Sequence
  Description of Artificial Sequence: Synthetic oligonucleotide
tagatgttggaaaaactg

SEQ ID NO: 3322 - DNA, 18 bp, Artificial Sequence
  Description of Artificial Sequence: Synthetic oligonucleotide
tcaattagatgttggaaa

SEQ ID NO: 3323 - DNA, 18 bp, Artificial Sequence
  Description of Artificial Sequence: Synthetic oligonucleotide
aaagctcaattagatgtt

SEQ ID NO: 3324 - DNA, 18 bp, Artificial Sequence
  Description of Artificial Sequence: Synthetic oligonucleotide
aatcaaaagctcaattag

SEQ ID NO: 3325 - DNA, 18 bp, Artificial Sequence
  Description of Artificial Sequence: Synthetic oligonucleotide
gaattaatcaaaagctca

SEQ ID NO: 3326 - DNA, 18 bp, Artificial Sequence
  Description of Artificial Sequence: Synthetic oligonucleotide
acacggaattaatcaaaa

SEQ ID NO: 3327 - DNA, 18 bp, Artificial Sequence
  Description of Artificial Sequence: Synthetic oligonucleotide
ctggtacacggaattaat

SEQ ID NO: 3328 - DNA, 18 bp, Artificial Sequence
  Description of Artificial Sequence: Synthetic oligonucleotide
agaatctggtacacggaa

SEQ ID NO: 3329 - DNA, 18 bp, Artificial Sequence
  Description of Artificial Sequence: Synthetic oligonucleotide
tcagtagaatctggtaca

SEQ ID NO: 3330 - DNA, 18 bp, Artificial Sequence
  Description of Artificial Sequence: Synthetic oligonucleotide
tttcttcagtagaatctg

SEQ ID NO: 3331 - DNA, 18 bp, Artificial Sequence
  Description of Artificial Sequence: Synthetic oligonucleotide
acctttcttcagtagaat

SEQ ID NO: 3332 - DNA, 18 bp, Artificial Sequence
  Description of Artificial Sequence: Synthetic oligonucleotide
tggctacctttcttcagt

SEQ ID NO: 3333 - DNA, 18 bp, Artificial Sequence
  Description of Artificial Sequence: Synthetic oligonucleotide
ttccatggctacctttct

SEQ ID NO: 3334 - DNA, 18 bp, Artificial Sequence
  Description of Artificial Sequence: Synthetic oligonucleotide
ttctcttccatggctacc

SEQ ID NO: 3335 - DNA, 18 bp, Artificial Sequence
  Description of Artificial Sequence: Synthetic oligonucleotide
ccatattctcttccatgg

SEQ ID NO: 3336 - DNA, 18 bp, Artificial Sequence
  Description of Artificial Sequence: Synthetic oligonucleotide
ctcttccatattctcttc

SEQ ID NO: 3337 - DNA, 18 bp, Artificial Sequence
  Description of Artificial Sequence: Synthetic oligonucleotide
ctgtccctcttccatatt

SEQ ID NO: 3338 - DNA, 18 bp, Artificial Sequence
  Description of Artificial Sequence: Synthetic oligonucleotide
tgtgtctgtccctcttcc

SEQ ID NO: 3339 - DNA, 18 bp, Artificial Sequence
  Description of Artificial Sequence: Synthetic oligonucleotide
ctttttgtgtctgtccct

SEQ ID NO: 3340 - DNA, 18 bp, Artificial Sequence
  Description of Artificial Sequence: Synthetic oligonucleotide
tacctttttgtgtctgtc

SEQ ID NO: 3341 - DNA, 18 bp, Artificial Sequence
  Description of Artificial Sequence: Synthetic oligonucleotide
cacagtacctttttgtgt

SEQ ID NO: 3342 - DNA, 18 bp, Artificial Sequence
  Description of Artificial Sequence: Synthetic oligonucleotide
tttagcacagtacctttt

SEQ ID NO: 3343 - DNA, 18 bp, Artificial Sequence
  Description of Artificial Sequence: Synthetic oligonucleotide
acgcttttagcacagtac

SEQ ID NO: 3344 - DNA, 18 bp, Artificial Sequence
  Description of Artificial Sequence: Synthetic oligonucleotide
aataaacgcttttagcac

SEQ ID NO: 3345 - DNA, 18 bp, Artificial Sequence
  Description of Artificial Sequence: Synthetic oligonucleotide
ttacaaataaacgctttt

SEQ ID NO: 3346 - DNA, 18 bp, Artificial Sequence
  Description of Artificial Sequence: Synthetic oligonucleotide
cttagttacaaataaacg

SEQ ID NO: 3347 - DNA, 18 bp, Artificial Sequence
  Description of Artificial Sequence: Synthetic oligonucleotide
aattacttagttacaaat

SEQ ID NO: 3348 - DNA, 18 bp, Artificial Sequence
  Description of Artificial Sequence: Synthetic oligonucleotide
aaaataattacttagtta

SEQ ID NO: 3349 - DNA, 18 bp, Artificial Sequence
  Description of Artificial Sequence: Synthetic oligonucleotide
actgcaaaataattactt

SEQ ID NO: 3350 - DNA, 18 bp, Artificial Sequence
  Description of Artificial Sequence: Synthetic oligonucleotide
aggaaactgcaaaataat

SEQ ID NO: 3351 - DNA, 18 bp, Artificial Sequence
  Description of Artificial Sequence: Synthetic oligonucleotide
aaacaaggaaactgcaaa

SEQ ID NO: 3352 - DNA, 18 bp, Artificial Sequence
  Description of Artificial Sequence: Synthetic oligonucleotide
aaagcaaacaaggaaact

SEQ ID NO: 3353 - DNA, 18 bp, Artificial Sequence
  Description of Artificial Sequence: Synthetic oligonucleotide
tgtctaaagcaaacaagg

SEQ ID NO: 3354 - DNA, 18 bp, Artificial Sequence
  Description of Artificial Sequence: Synthetic oligonucleotide
gcaagtgtctaaagcaaa

SEQ ID NO: 3355 - DNA, 18 bp, Artificial Sequence
  Description of Artificial Sequence: Synthetic oligonucleotide
tactggcaagtgtctaaa

SEQ ID NO: 3356 - DNA, 18 bp, Artificial Sequence
  Description of Artificial Sequence: Synthetic oligonucleotide
agccttactggcaagtgt

SEQ ID NO: 3357 - DNA, 18 bp, Artificial Sequence
  Description of Artificial Sequence: Synthetic oligonucleotide
tcattagccttactggca

SEQ ID NO: 3358 - DNA, 18 bp, Artificial Sequence
  Description of Artificial Sequence: Synthetic oligonucleotide
aacattcattagccttac

SEQ ID NO: 3359 - DNA, 18 bp, Artificial Sequence
  Description of Artificial Sequence: Synthetic oligonucleotide
agagaaacattcattagc

SEQ ID NO: 3360 - DNA, 18 bp, Artificial Sequence
  Description of Artificial Sequence: Synthetic oligonucleotide
ccaagagagaaacattca

SEQ ID NO: 3361 - DNA, 18 bp, Artificial Sequence
  Description of Artificial Sequence: Synthetic oligonucleotide
cgaaatgtcttccacctg

SEQ ID NO: 3362 - DNA, 18 bp, Artificial Sequence
  Description of Artificial Sequence: Synthetic oligonucleotide
ggattcgaaatgtcttcc

SEQ ID NO: 3363 - DNA, 18 bp, Artificial Sequence
  Description of Artificial Sequence: Synthetic oligonucleotide
gacagggattcgaaatgt

SEQ ID NO: 3364 - DNA, 18 bp, Artificial Sequence
  Description of Artificial Sequence: Synthetic oligonucleotide
agaatgacagggattcga

SEQ ID NO: 3365 - DNA, 18 bp, Artificial Sequence
  Description of Artificial Sequence: Synthetic oligonucleotide
agagcagaatgacaggga

SEQ ID NO: 3366 - DNA, 18 bp, Artificial Sequence
  Description of Artificial Sequence: Synthetic oligonucleotide
cacagagagcagaatgac

SEQ ID NO: 3367 - DNA, 18 bp, Artificial Sequence
  Description of Artificial Sequence: Synthetic oligonucleotide
aatgccacagagagcaga

SEQ ID NO: 3368 - DNA, 18 bp, Artificial Sequence
  Description of Artificial Sequence: Synthetic oligonucleotide
agaccaatgccacagaga

SEQ ID NO: 3369 - DNA, 18 bp, Artificial Sequence
  Description of Artificial Sequence: Synthetic oligonucleotide
aacaaagaccaatgccac

SEQ ID NO: 3370 - DNA, 18 bp, Artificial Sequence
  Description of Artificial Sequence: Synthetic oligonucleotide
aggtaaacaaagaccaat

SEQ ID NO: 3371 - DNA, 18 bp, Artificial Sequence
  Description of Artificial Sequence: Synthetic oligonucleotide
cactaaggtaaacaaaga

SEQ ID NO: 3372 - DNA, 18 bp, Artificial Sequence
  Description of Artificial Sequence: Synthetic oligonucleotide
aactccactaaggtaaac

SEQ ID NO: 3373 - DNA, 18 bp, Artificial Sequence
  Description of Artificial Sequence: Synthetic oligonucleotide
ttaataactccactaagg

SEQ ID NO: 3374 - DNA, 18 bp, Artificial Sequence
  Description of Artificial Sequence: Synthetic oligonucleotide
cacacttaataactccac

SEQ ID NO: 3375 - DNA, 18 bp, Artificial Sequence
  Description of Artificial Sequence: Synthetic oligonucleotide
gaaggcacacttaataac

SEQ ID NO: 3376 - DNA, 18 bp, Artificial Sequence
  Description of Artificial Sequence: Synthetic oligonucleotide
gcacagaaggcacactta

SEQ ID NO: 3377 - DNA, 18 bp, Artificial Sequence
  Description of Artificial Sequence: Synthetic oligonucleotide
gaacggcacagaaggcac

SEQ ID NO: 3378 - DNA, 18 bp, Artificial Sequence
  Description of Artificial Sequence: Synthetic oligonucleotide
ctggagaacggcacagaa

SEQ ID NO: 3379 - DNA, 18 bp, Artificial Sequence
  Description of Artificial Sequence: Synthetic oligonucleotide
agaacctggagaacggca

SEQ ID NO: 3380 - DNA, 18 bp, Artificial Sequence
  Description of Artificial Sequence: Synthetic oligonucleotide
ttttcagaacctggagaa

SEQ ID NO: 3381 - DNA, 18 bp, Artificial Sequence
  Description of Artificial Sequence: Synthetic oligonucleotide
caatattttcagaacctg

SEQ ID NO: 3382 - DNA, 18 bp, Artificial Sequence
  Description of Artificial Sequence: Synthetic oligonucleotide
gcacaatattttcagaac

SEQ ID NO: 3383 - DNA, 18 bp, Artificial Sequence
  Description of Artificial Sequence: Synthetic oligonucleotide
cctgtgcacaatattttc

SEQ ID NO: 3384 - DNA, 18 bp, Artificial Sequence
  Description of Artificial Sequence: Synthetic oligonucleotide
cctgccctgtgcacaata

SEQ ID NO: 3385 - DNA, 18 bp, Artificial Sequence
  Description of Artificial Sequence: Synthetic oligonucleotide
ctcagcctgccctgtgca

SEQ ID NO: 3386 - DNA, 18 bp, Artificial Sequence
  Description of Artificial Sequence: Synthetic oligonucleotide
gtgtcctcagcctgccct

SEQ ID NO: 3387 - DNA, 18 bp, Artificial Sequence
  Description of Artificial Sequence: Synthetic oligonucleotide
tggctgtgtcctcagcct

SEQ ID NO: 3388 - DNA, 18 bp, Artificial Sequence
  Description of Artificial Sequence: Synthetic oligonucleotide
tcacgtggctgtgtcctc

SEQ ID NO: 3389 - DNA, 18 bp, Artificial Sequence
  Description of Artificial Sequence: Synthetic oligonucleotide
gggtatcacgtggctgtg

SEQ ID NO: 3390 - DNA, 18 bp, Artificial Sequence
  Description of Artificial Sequence: Synthetic oligonucleotide
acagtgggtatcacgtgg

SEQ ID NO: 3391 - DNA, 18 bp, Artificial Sequence
  Description of Artificial Sequence: Synthetic oligonucleotide
tctctacagtgggtatca

SEQ ID NO: 3392 - DNA, 18 bp, Artificial Sequence
  Description of Artificial Sequence: Synthetic oligonucleotide
ccctctctctacagtggg

SEQ ID NO: 3393 - DNA, 18 bp, Artificial Sequence
  Description of Artificial Sequence: Synthetic oligonucleotide
ctctctctccctctctct

SEQ ID NO: 3394 - DNA, 18 bp, Artificial Sequence
  Description of Artificial Sequence: Synthetic oligonucleotide
gaggtctctctctccctc

SEQ ID NO: 3395 - DNA, 18 bp, Artificial Sequence
  Description of Artificial Sequence: Synthetic oligonucleotide
cataggaggtctctctct

SEQ ID NO: 3396 - DNA, 18 bp, Artificial Sequence
  Description of Artificial Sequence: Synthetic oligonucleotide
gcttgcataggaggtctc

SEQ ID NO: 3397 - DNA, 18 bp, Artificial Sequence
  Description of Artificial Sequence: Synthetic oligonucleotide
cggcagcttgcataggag

SEQ ID NO: 3398 - DNA, 18 bp, Artificial Sequence
  Description of Artificial Sequence: Synthetic oligonucleotide
agggccggcagcttgcat

SEQ ID NO: 3399 - DNA, 18 bp, Artificial Sequence
  Description of Artificial Sequence: Synthetic oligonucleotide
aacagagggccggcagct

SEQ ID NO: 3400 - DNA, 18 bp, Artificial Sequence
  Description of Artificial Sequence: Synthetic oligonucleotide
tacggaacagagggccgg

SEQ ID NO: 3401 - DNA, 18 bp, Artificial Sequence
  Description of Artificial Sequence: Synthetic oligonucleotide
cttactacggaacagagg

SEQ ID NO: 3402 - DNA, 18 bp, Artificial Sequence
  Description of Artificial Sequence: Synthetic oligonucleotide
gaccttactacggaacag

SEQ ID NO: 3403 - DNA, 18 bp, Artificial Sequence
  Description of Artificial Sequence: Synthetic oligonucleotide
gcactgaccttactacgg

SEQ ID NO: 3404 - DNA, 18 bp, Artificial Sequence
  Description of Artificial Sequence: Synthetic oligonucleotide
agcgggcactgaccttac

SEQ ID NO: 3405 - DNA, 18 bp, Artificial Sequence
  Description of Artificial Sequence: Synthetic oligonucleotide
tagacagcgggcactgac

SEQ ID NO: 3406 - DNA, 18 bp, Artificial Sequence
  Description of Artificial Sequence: Synthetic oligonucleotide
ttcggtagacagcgggca

SEQ ID NO: 3407 - DNA, 18 bp, Artificial Sequence
  Description of Artificial Sequence: Synthetic oligonucleotide
gagtgttcggtagacagc

SEQ ID NO: 3408 - DNA, 18 bp, Artificial Sequence
  Description of Artificial Sequence: Synthetic oligonucleotide
gtactgagtgttcggtag

SEQ ID NO: 3409 - DNA, 18 bp, Artificial Sequence
  Description of Artificial Sequence: Synthetic oligonucleotide
taaaggtactgagtgttc

SEQ ID NO: 3410 - DNA, 18 bp, Artificial Sequence
  Description of Artificial Sequence: Synthetic oligonucleotide
gcaactaaaggtactgag

SEQ ID NO: 3411 - DNA, 18 bp, Artificial Sequence
  Description of Artificial Sequence: Synthetic oligonucleotide
gcccagcaactaaaggta

SEQ ID NO: 3412 - DNA, 18 bp, Artificial Sequence
  Description of Artificial Sequence: Synthetic oligonucleotide
ggcttgcccagcaactaa

SEQ ID NO: 3413 - DNA, 18 bp, Artificial Sequence
  Description of Artificial Sequence: Synthetic oligonucleotide
taaagggcttgcccagca

SEQ ID NO: 3414 - DNA, 18 bp, Artificial Sequence
  Description of Artificial Sequence: Synthetic oligonucleotide
ataaataaagggcttgcc

SEQ ID NO: 3415 - DNA, 18 bp, Artificial Sequence
  Description of Artificial Sequence: Synthetic oligonucleotide
ataacataaataaagggc

SEQ ID NO: 3416 - DNA, 18 bp, Artificial Sequence
  Description of Artificial Sequence: Synthetic oligonucleotide
ttaaaataacataaataa

SEQ ID NO: 3417 - DNA, 18 bp, Artificial Sequence
  Description of Artificial Sequence: Synthetic oligonucleotide
tcaaattaaaataacata

SEQ ID NO: 3418 - DNA, 18 bp, Artificial Sequence
  Description of Artificial Sequence: Synthetic oligonucleotide
gaggttcaaattaaaata

SEQ ID NO: 3419 - DNA, 18 bp, Artificial Sequence
  Description of Artificial Sequence: Synthetic oligonucleotide
cttctgaggttcaaatta

SEQ ID NO: 3420 - DNA, 18 bp, Artificial Sequence
  Description of Artificial Sequence: Synthetic oligonucleotide
ggtcacttctgaggttca

SEQ ID NO: 3421 - DNA, 18 bp, Artificial Sequence
  Description of Artificial Sequence: Synthetic oligonucleotide
tcataggtcacttctgag

SEQ ID NO: 3422 - DNA, 18 bp, Artificial Sequence
  Description of Artificial Sequence: Synthetic oligonucleotide
ccacttcataggtcactt

SEQ ID NO: 3423 - DNA, 18 bp, Artificial Sequence
  Description of Artificial Sequence: Synthetic oligonucleotide
cctgggacgccccccgcg

SEQ ID NO: 3424 - DNA, 18 bp, Artificial Sequence
  Description of Artificial Sequence: Synthetic oligonucleotide
ccccgcctgggacgcccc

SEQ ID NO: 3425 - DNA, 18 bp, Artificial Sequence
  Description of Artificial Sequence: Synthetic oligonucleotide
ggcgcccccgcctgggac

SEQ ID NO: 3426 - DNA, 18 bp, Artificial Sequence
  Description of Artificial Sequence: Synthetic oligonucleotide
cctggggcgcccccgcct

SEQ ID NO: 3427 - DNA, 18 bp, Artificial Sequence
  Description of Artificial Sequence: Synthetic oligonucleotide
ccgcccctggggcgcccc

SEQ ID NO: 3428 - DNA, 18 bp, Artificial Sequence
  Description of Artificial Sequence: Synthetic oligonucleotide
ggcacccgcccctggggc

SEQ ID NO: 3429 - DNA, 18 bp, Artificial Sequence
  Description of Artificial Sequence: Synthetic oligonucleotide
cctcgggcacccgcccct

SEQ ID NO: 3430 - DNA, 18 bp, Artificial Sequence
  Description of Artificial Sequence: Synthetic oligonucleotide
ccgcgcctcgggcacccg

SEQ ID NO: 3431 - DNA, 18 bp, Artificial Sequence
  Description of Artificial Sequence: Synthetic oligonucleotide
ctcacccgcgcctcgggc

SEQ ID NO: 3432 - DNA, 18 bp, Artificial Sequence
  Description of Artificial Sequence: Synthetic oligonucleotide
gggcactcacccgcgcct

SEQ ID NO: 3433 - DNA, 18 bp, Artificial Sequence
  Description of Artificial Sequence: Synthetic oligonucleotide
cccccgggcactcacccg

SEQ ID NO: 3434 - DNA, 18 bp, Artificial Sequence
  Description of Artificial Sequence: Synthetic oligonucleotide
ggggccccccgggcactc

SEQ ID NO: 3435 - DNA, 18 bp, Artificial Sequence
  Description of Artificial Sequence: Synthetic oligonucleotide
gccccggggccccccggg

SEQ ID NO: 3436 - DNA, 18 bp, Artificial Sequence
  Description of Artificial Sequence: Synthetic oligonucleotide
cgggagccccggggcccc

SEQ ID NO: 3437 - DNA, 18 bp, Artificial Sequence
  Description of Artificial Sequence: Synthetic oligonucleotide
tactccgggagccccggg

SEQ ID NO: 3438 - DNA, 18 bp, Artificial Sequence
  Description of Artificial Sequence: Synthetic oligonucleotide
agagttactccgggagcc

SEQ ID NO: 3439 - DNA, 18 bp, Artificial Sequence
  Description of Artificial Sequence: Synthetic oligonucleotide
aatagagagttactccgg

SEQ ID NO: 3440 - DNA, 18 bp, Artificial Sequence
  Description of Artificial Sequence: Synthetic oligonucleotide
cttacaatagagagttac

SEQ ID NO: 3441 - DNA, 18 bp, Artificial Sequence
  Description of Artificial Sequence: Synthetic oligonucleotide
aagaacttacaatagaga

SEQ ID NO: 3442 - DNA, 18 bp, Artificial Sequence
  Description of Artificial Sequence: Synthetic oligonucleotide
tctgcaagaacttacaat

SEQ ID NO: 3443 - DNA, 18 bp, Artificial Sequence
  Description of Artificial Sequence: Synthetic oligonucleotide
ctgtatctgcaagaactt

SEQ ID NO: 3444 - DNA, 18 bp, Artificial Sequence
  Description of Artificial Sequence: Synthetic oligonucleotide
gcgctgtatctgcaagaa

SEQ ID NO: 3445 - DNA, 18 bp, Artificial Sequence
  Description of Artificial Sequence: Synthetic oligonucleotide
tcctagcgctgtatctgc

SEQ ID NO: 3446 - DNA, 18 bp, Artificial Sequence
  Description of Artificial Sequence: Synthetic oligonucleotide
ccttttcctagcgctgta

SEQ ID NO: 3447 - DNA, 18 bp, Artificial Sequence
  Description of Artificial Sequence: Synthetic oligonucleotide
actccccttttcctagcg

SEQ ID NO: 3448 - DNA, 18 bp, Artificial Sequence
  Description of Artificial Sequence: Synthetic oligonucleotide
gaattactccccttttcc

SEQ ID NO: 3449 - DNA, 18 bp, Artificial Sequence
  Description of Artificial Sequence: Synthetic oligonucleotide
gacctgaattactcccct

SEQ ID NO: 3450 - DNA, 18 bp, Artificial Sequence
  Description of Artificial Sequence: Synthetic oligonucleotide
ttctagacctgaattact

SEQ ID NO: 3451 - DNA, 18 bp, Artificial Sequence
  Description of Artificial Sequence: Synthetic oligonucleotide
tttttccattctagacct

SEQ ID NO: 3452 - DNA, 18 bp, Artificial Sequence
  Description of Artificial Sequence: Synthetic oligonucleotide
aacagtttttccattcta

SEQ ID NO: 3453 - DNA, 18 bp, Artificial Sequence
  Description of Artificial Sequence: Synthetic oligonucleotide
aacaaaacagtttttcca

SEQ ID NO: 3454 - DNA, 18 bp, Artificial Sequence
  Description of Artificial Sequence: Synthetic oligonucleotide
aaagcaacaaaacagttt

SEQ ID NO: 3455 - DNA, 18 bp, Artificial Sequence
  Description of Artificial Sequence: Synthetic oligonucleotide
tacaaagcaacaaaacag

SEQ ID NO: 3456 - DNA, 18 bp, Artificial Sequence
  Description of Artificial Sequence: Synthetic oligonucleotide
atacttacaaagcaacaa

SEQ ID NO: 3457 - DNA, 18 bp, Artificial Sequence
  Description of Artificial Sequence: Synthetic oligonucleotide
aagagatacttacaaagc

SEQ ID NO: 3458 - DNA, 18 bp, Artificial Sequence
  Description of Artificial Sequence: Synthetic oligonucleotide
gcagcaagagatacttac

SEQ ID NO: 3459 - DNA, 18 bp, Artificial Sequence
  Description of Artificial Sequence: Synthetic oligonucleotide
cggaagcagcaagagata

SEQ ID NO: 3460 - DNA, 18 bp, Artificial Sequence
  Description of Artificial Sequence: Synthetic oligonucleotide
agccccggaagcagcaag

SEQ ID NO: 3461 - DNA, 18 bp, Artificial Sequence
  Description of Artificial Sequence: Synthetic oligonucleotide
gccagagccccggaagca

SEQ ID NO: 3462 - DNA, 18 bp, Artificial Sequence
  Description of Artificial Sequence: Synthetic oligonucleotide
tgcgagccagagccccgg

SEQ ID NO: 3463 - DNA, 18 bp, Artificial Sequence
  Description of Artificial Sequence: Synthetic oligonucleotide
tcgtctgcgagccagagc

SEQ ID NO: 3464 - DNA, 18 bp, Artificial Sequence
  Description of Artificial Sequence: Synthetic oligonucleotide
caccctcgtctgcgagcc

SEQ ID NO: 3465 - DNA, 18 bp, Artificial Sequence
  Description of Artificial Sequence: Synthetic oligonucleotide
gctcccaccctcgtctgc

SEQ ID NO: 3466 - DNA, 18 bp, Artificial Sequence
  Description of Artificial Sequence: Synthetic oligonucleotide
ccgaggctcccaccctcg

SEQ ID NO: 3467 - DNA, 18 bp, Artificial Sequence
  Description of Artificial Sequence: Synthetic oligonucleotide
gggccccgaggctcccac

SEQ ID NO: 3468 - DNA, 18 bp, Artificial Sequence
  Description of Artificial Sequence: Synthetic oligonucleotide
agccagggccccgaggct

SEQ ID NO: 3469 - DNA, 18 bp, Artificial Sequence
  Description of Artificial Sequence: Synthetic oligonucleotide
ggaacagccagggccccg

SEQ ID NO: 3470 - DNA, 18 bp, Artificial Sequence
  Description of Artificial Sequence: Synthetic oligonucleotide
gggaaggaacagccaggg

SEQ ID NO: 3471 - DNA, 18 bp, Artificial Sequence
  Description of Artificial Sequence: Synthetic oligonucleotide
ttcctgggaaggaacagc

SEQ ID NO: 3472 - DNA, 18 bp, Artificial Sequence
  Description of Artificial Sequence: Synthetic oligonucleotide
ttagcttcctgggaagga

SEQ ID NO: 3473 - DNA, 18 bp, Artificial Sequence
  Description of Artificial Sequence: Synthetic oligonucleotide
tgaggttagcttcctggg

SEQ ID NO: 3474 - DNA, 18 bp, Artificial Sequence
  Description of Artificial Sequence: Synthetic oligonucleotide
caaggtgaggttagcttc

SEQ ID NO: 3475 - DNA, 18 bp, Artificial Sequence
  Description of Artificial Sequence: Synthetic oligonucleotide
ccggccaaggtgaggtta

SEQ ID NO: 3476 - DNA, 18 bp, Artificial Sequence
  Description of Artificial Sequence: Synthetic oligonucleotide
ccatcctgaacaaaggaa

SEQ ID NO: 3477 - DNA, 18 bp, Artificial Sequence
  Description of Artificial Sequence: Synthetic oligonucleotide
tctcaccatcctgaacaa

SEQ ID NO: 3478 - DNA, 18 bp, Artificial Sequence
  Description of Artificial Sequence: Synthetic oligonucleotide
gtcaatctcaccatcctg

SEQ ID NO: 3479 - DNA, 18 bp, Artificial Sequence
  Description of Artificial Sequence: Synthetic oligonucleotide
tccccgtcaatctcacca

SEQ ID NO: 3480 - DNA, 18 bp, Artificial Sequence
  Description of Artificial Sequence: Synthetic oligonucleotide
caaaatccccgtcaatct

SEQ ID NO: 3481 - DNA, 18 bp, Artificial Sequence
  Description of Artificial Sequence: Synthetic oligonucleotide
ttcagcaaaatccccgtc

SEQ ID NO: 3482 - DNA, 18 bp, Artificial Sequence
  Description of Artificial Sequence: Synthetic oligonucleotide
tttaattcagcaaaatcc

SEQ ID NO: 3483 - DNA, 18 bp, Artificial Sequence
  Description of Artificial Sequence: Synthetic oligonucleotide
taaagtttaattcagcaa

SEQ ID NO: 3484 - DNA, 18 bp, Artificial Sequence
  Description of Artificial Sequence: Synthetic oligonucleotide
ctctttaaagtttaattc

SEQ ID NO: 3485 - DNA, 18 bp, Artificial Sequence
  Description of Artificial Sequence: Synthetic oligonucleotide
atagtctctttaaagttt

SEQ ID NO: 3486 - DNA, 18 bp, Artificial Sequence
  Description of Artificial Sequence: Synthetic oligonucleotide
cagaaatagtctctttaa

SEQ ID NO: 3487 - DNA, 18 bp, Artificial Sequence
  Description of Artificial Sequence: Synthetic oligonucleotide
aaaagcagaaatagtctc

SEQ ID NO: 3488 - DNA, 18 bp, Artificial Sequence
  Description of Artificial Sequence: Synthetic oligonucleotide
aaaagaaaagcagaaata

SEQ ID NO: 3489 - DNA, 18 bp, Artificial Sequence
  Description of Artificial Sequence: Synthetic oligonucleotide
aaaaaaaaagaaaagcag

SEQ ID NO: 3490 - DNA, 18 bp, Artificial Sequence
  Description of Artificial Sequence: Synthetic oligonucleotide
taaaaaaaaaaaaagaaa

SEQ ID NO: 3491 - DNA, 18 bp, Artificial Sequence
  Description of Artificial Sequence: Synthetic oligonucleotide
cagcgtaaaaaaaaaaaa

SEQ ID NO: 3492 - DNA, 18 bp, Artificial Sequence
  Description of Artificial Sequence: Synthetic oligonucleotide
aacatcagcgtaaaaaaa

SEQ ID NO: 3493 - DNA, 18 bp, Artificial Sequence
  Description of Artificial Sequence: Synthetic oligonucleotide
ctaaaaacatcagcgtaa

SEQ ID NO: 3494 - DNA, 18 bp, Artificial Sequence
  Description of Artificial Sequence: Synthetic oligonucleotide
ctggcctaaaaacatcag

SEQ ID NO: 3495 - DNA, 18 bp, Artificial Sequence
  Description of Artificial Sequence: Synthetic oligonucleotide
ccatactggcctaaaaac

SEQ ID NO: 3496 - DNA, 18 bp, Artificial Sequence
  Description of Artificial Sequence: Synthetic oligonucleotide
atgcaccatactggccta

SEQ ID NO: 3497 - DNA, 18 bp, Artificial Sequence
  Description of Artificial Sequence: Synthetic oligonucleotide
agaatgcaccatactggc

SEQ ID NO: 3498 - DNA, 18 bp, Artificial Sequence
  Description of Artificial Sequence: Synthetic oligonucleotide
atcaaagaatgcaccata

SEQ ID NO: 3499 - DNA, 18 bp, Artificial Sequence
  Description of Artificial Sequence: Synthetic oligonucleotide
cttcaatcaaagaatgca

SEQ ID NO: 3500 - DNA, 18 bp, Artificial Sequence
  Description of Artificial Sequence: Synthetic oligonucleotide
atatgcttcaatcaaaga

SEQ ID NO: 3501 - DNA, 18 bp, Artificial Sequence
  Description of Artificial Sequence: Synthetic oligonucleotide
agtgcatatgcttcaatc

SEQ ID NO: 3502 - DNA, 18 bp, Artificial Sequence
  Description of Artificial Sequence: Synthetic oligonucleotide
tatgcagtgcatatgctt

SEQ ID NO: 3503 - DNA, 18 bp, Artificial Sequence
  Description of Artificial Sequence: Synthetic oligonucleotide
ctgcttatgcagtgcata

SEQ ID NO: 3504 - DNA, 18 bp, Artificial Sequence
  Description of Artificial Sequence: Synthetic oligonucleotide
ctcatctgcttatgcagt

SEQ ID NO: 3505 - DNA, 18 bp, Artificial Sequence
  Description of Artificial Sequence: Synthetic oligonucleotide
tacctcatctgcttatgc

SEQ ID NO: 3506 - DNA, 18 bp, Artificial Sequence
  Description of Artificial Sequence: Synthetic oligonucleotide
caacttacctcatctgct

SEQ ID NO: 3507 - DNA, 18 bp, Artificial Sequence
  Description of Artificial Sequence: Synthetic oligonucleotide
aaagacaacttacctcat

SEQ ID NO: 3508 - DNA, 18 bp, Artificial Sequence
  Description of Artificial Sequence: Synthetic oligonucleotide
tcaagaaagacaacttac

SEQ ID NO: 3509 - DNA, 18 bp, Artificial Sequence
  Description of Artificial Sequence: Synthetic oligonucleotide
tatgttcaagaaagacaa

SEQ ID NO: 3510 - DNA, 18 bp, Artificial Sequence
  Description of Artificial Sequence: Synthetic oligonucleotide
agggctatgttcaagaaa

SEQ ID NO: 3511 - DNA, 18 bp, Artificial Sequence
  Description of Artificial Sequence: Synthetic oligonucleotide
gcttcagggctatgttca

SEQ ID NO: 3512 - DNA, 18 bp, Artificial Sequence
  Description of Artificial Sequence: Synthetic oligonucleotide
acctagcttcagggctat

SEQ ID NO: 3513 - DNA, 18 bp, Artificial Sequence
  Description of Artificial Sequence: Synthetic oligonucleotide
cgaacacctagcttcagg

SEQ ID NO: 3514 - DNA, 18 bp, Artificial Sequence
  Description of Artificial Sequence: Synthetic oligonucleotide
ggctacgaacacctagct

SEQ ID NO: 3515 - DNA, 18 bp, Artificial Sequence
  Description of Artificial Sequence: Synthetic oligonucleotide
attaaggctacgaacacc

SEQ ID NO: 3516 - DNA, 18 bp, Artificial Sequence
  Description of Artificial Sequence: Synthetic oligonucleotide
aggatattaaggctacga

SEQ ID NO: 3517 - DNA, 18 bp, Artificial Sequence
  Description of Artificial Sequence: Synthetic oligonucleotide
gaagcaggatattaaggc

SEQ ID NO: 3518 - DNA, 18 bp, Artificial Sequence
  Description of Artificial Sequence: Synthetic oligonucleotide
actgtgaagcaggatatt

SEQ ID NO: 3519 - DNA, 18 bp, Artificial Sequence
  Description of Artificial Sequence: Synthetic oligonucleotide
gccccactgtgaagcagg

SEQ ID NO: 3520 - DNA, 18 bp, Artificial Sequence
  Description of Artificial Sequence: Synthetic oligonucleotide
tccttgccccactgtgaa

SEQ ID NO: 3521 - DNA, 18 bp, Artificial Sequence
  Description of Artificial Sequence: Synthetic oligonucleotide
tcttttccttgccccact

SEQ ID NO: 3522 - DNA, 18 bp, Artificial Sequence
  Description of Artificial Sequence: Synthetic oligonucleotide
accattcttttccttgcc

SEQ ID NO: 3523 - DNA, 18 bp, Artificial Sequence
  Description of Artificial Sequence: Synthetic oligonucleotide
aaaagaccattcttttcc

SEQ ID NO: 3524 - DNA, 18 bp, Artificial Sequence
  Description of Artificial Sequence: Synthetic oligonucleotide
ttttcaaaagaccattct

SEQ ID NO: 3525 - DNA, 18 bp, Artificial Sequence
  Description of Artificial Sequence: Synthetic oligonucleotide
taattttttcaaaagacc

SEQ ID NO: 3526 - DNA, 18 bp, Artificial Sequence
  Description of Artificial Sequence: Synthetic oligonucleotide
acagtcctacacagtata

SEQ ID NO: 3527 - DNA, 18 bp, Artificial Sequence
  Description of Artificial Sequence: Synthetic oligonucleotide
aaaccacagtcctacaca

SEQ ID NO: 3528 - DNA, 18 bp, Artificial Sequence
  Description of Artificial Sequence: Synthetic oligonucleotide
caacaaaaccacagtcct

SEQ ID NO: 3529 - DNA, 18 bp, Artificial Sequence
  Description of Artificial Sequence: Synthetic oligonucleotide
gaattcaacaaaaccaca

SEQ ID NO: 3530 - DNA, 18 bp, Artificial Sequence
  Description of Artificial Sequence: Synthetic oligonucleotide
agactgaattcaacaaaa

SEQ ID NO: 3531 - DNA, 18 bp, Artificial Sequence
  Description of Artificial Sequence: Synthetic oligonucleotide
tgaagagactgaattcaa

SEQ ID NO: 3532 - DNA, 18 bp, Artificial Sequence
  Description of Artificial Sequence: Synthetic oligonucleotide
aagggtgaagagactgaa

SEQ ID NO: 3533 - DNA, 18 bp, Artificial Sequence
  Description of Artificial Sequence: Synthetic oligonucleotide
gggccaagggtgaagaga

SEQ ID NO: 3534 - DNA, 18 bp, Artificial Sequence
  Description of Artificial Sequence: Synthetic oligonucleotide
acgctgggccaagggtga

SEQ ID NO: 3535 - DNA, 18 bp, Artificial Sequence
  Description of Artificial Sequence: Synthetic oligonucleotide
gtttaacgctgggccaag

SEQ ID NO: 3536 - DNA, 18 bp, Artificial Sequence
  Description of Artificial Sequence: Synthetic oligonucleotide
atctggtttaacgctggg

SEQ ID NO: 3537 - DNA, 18 bp, Artificial Sequence
  Description of Artificial Sequence: Synthetic oligonucleotide
attctatctggtttaacg

SEQ ID NO: 3538 - DNA, 18 bp, Artificial Sequence
  Description of Artificial Sequence: Synthetic oligonucleotide
aactgattctatctggtt

SEQ ID NO: 3539 - DNA, 18 bp, Artificial Sequence
  Description of Artificial Sequence: Synthetic oligonucleotide
tggagaactgattctatc

SEQ ID NO: 3540 - DNA, 18 bp, Artificial Sequence
  Description of Artificial Sequence: Synthetic oligonucleotide
aggcatggagaactgatt

SEQ ID NO: 3541 - DNA, 18 bp, Artificial Sequence
  Description of Artificial Sequence: Synthetic oligonucleotide
gaaacaggcatggagaac

SEQ ID NO: 3542 - DNA, 18 bp, Artificial Sequence
  Description of Artificial Sequence: Synthetic oligonucleotide
gatgggaaacaggcatgg

SEQ ID NO: 3543 - DNA, 18 bp, Artificial Sequence
  Description of Artificial Sequence: Synthetic oligonucleotide
ctgcagatgggaaacagg

SEQ ID NO: 3544 - DNA, 18 bp, Artificial Sequence
  Description of Artificial Sequence: Synthetic oligonucleotide
gtttcctgcagatgggaa

SEQ ID NO: 3545 - DNA, 18 bp, Artificial Sequence
  Description of Artificial Sequence: Synthetic oligonucleotide
accacgtttcctgcagat

SEQ ID NO: 3546 - DNA, 18 bp, Artificial Sequence
  Description of Artificial Sequence: Synthetic oligonucleotide
cacccaccacgtttcctg

SEQ ID NO: 3547 - DNA, 18 bp, Artificial Sequence
  Description of Artificial Sequence: Synthetic oligonucleotide
cggcacccaccacgtttc

SEQ ID NO: 3548 - DNA, 18 bp, Artificial Sequence
  Description of Artificial Sequence: Synthetic oligonucleotide
caaaacggcacccaccac

SEQ ID NO: 3549 - DNA, 18 bp, Artificial Sequence
  Description of Artificial Sequence: Synthetic oligonucleotide
ggtgtcaaaacggcaccc

SEQ ID NO: 3550 - DNA, 18 bp, Artificial Sequence
  Description of Artificial Sequence: Synthetic oligonucleotide
aggtcggtgtcaaaacgg

SEQ ID NO: 3551 - DNA, 18 bp, Artificial Sequence
  Description of Artificial Sequence: Synthetic oligonucleotide
aggataggtcggtgtcaa

SEQ ID NO: 3552 - DNA, 18 bp, Artificial Sequence
  Description of Artificial Sequence: Synthetic oligonucleotide
cacaaaggataggtcggt

SEQ ID NO: 3553 - DNA, 18 bp, Artificial Sequence
  Description of Artificial Sequence: Synthetic oligonucleotide
aacctcacaaaggatagg

SEQ ID NO: 3554 - DNA, 18 bp, Artificial Sequence
  Description of Artificial Sequence: Synthetic oligonucleotide
tcttcaacctcacaaagg

SEQ ID NO: 3555 - DNA, 18 bp, Artificial Sequence
  Description of Artificial Sequence: Synthetic oligonucleotide
aaaattcttcaacctcac

SEQ ID NO: 3556 - DNA, 18 bp, Artificial Sequence
  Description of Artificial Sequence: Synthetic oligonucleotide
cttccaaaattcttcaac

SEQ ID NO: 3557 - DNA, 18 bp, Artificial Sequence
  Description of Artificial Sequence: Synthetic oligonucleotide
atgctcttccaaaattct

SEQ ID NO: 3558 - DNA, 18 bp, Artificial Sequence
  Description of Artificial Sequence: Synthetic oligonucleotide
ctctcatgctcttccaaa

SEQ ID NO: 3559 - DNA, 18 bp, Artificial Sequence
  Description of Artificial Sequence: Synthetic oligonucleotide
tgctgctctcatgctctt

SEQ ID NO: 3560 - DNA, 18 bp, Artificial Sequence
  Description of Artificial Sequence: Synthetic oligonucleotide
ccaagtgctgctctcatg

SEQ ID NO: 3561 - DNA, 18 bp, Artificial Sequence
  Description of Artificial Sequence: Synthetic oligonucleotide
gaacaccaagtgctgctc

SEQ ID NO: 3562 - DNA, 18 bp, Artificial Sequence
  Description of Artificial Sequence: Synthetic oligonucleotide
cttctgaacaccaagtgc

SEQ ID NO: 3563 - DNA, 18 bp, Artificial Sequence
  Description of Artificial Sequence: Synthetic oligonucleotide
cctttcttctgaacacca

SEQ ID NO: 3564 - DNA, 18 bp, Artificial Sequence
  Description of Artificial Sequence: Synthetic oligonucleotide
atgctaagcctttcttct

SEQ ID NO: 3565 - DNA, 18 bp, Artificial Sequence
  Description of Artificial Sequence: Synthetic oligonucleotide
acaacatgctaagccttt

SEQ ID NO: 3566 - DNA, 18 bp, Artificial Sequence
  Description of Artificial Sequence: Synthetic oligonucleotide
ccaggacaacatgctaag

SEQ ID NO: 3567 - DNA, 18 bp, Artificial Sequence
  Description of Artificial Sequence: Synthetic oligonucleotide
ggaacccaggacaacatg

SEQ ID NO: 3568 - DNA, 18 bp, Artificial Sequence
  Description of Artificial Sequence: Synthetic oligonucleotide
tccacggaacccaggaca

SEQ ID NO: 3569 - DNA, 18 bp, Artificial Sequence
  Description of Artificial Sequence: Synthetic oligonucleotide
ccttctccacggaaccca

SEQ ID NO: 3570 - DNA, 18 bp, Artificial Sequence
  Description of Artificial Sequence: Synthetic oligonucleotide
gtgacccttctccacgga

SEQ ID NO: 3571 - DNA, 18 bp, Artificial Sequence
  Description of Artificial Sequence: Synthetic oligonucleotide
gtccagtgacccttctcc

SEQ ID NO: 3572 - DNA, 18 bp, Artificial Sequence
  Description of Artificial Sequence: Synthetic oligonucleotide
gtgcagtccagtgaccct

SEQ ID NO: 3573 - DNA, 18 bp, Artificial Sequence
  Description of Artificial Sequence: Synthetic oligonucleotide
accccgtgcagtccagtg

SEQ ID NO: 3574 - DNA, 18 bp, Artificial Sequence
  Description of Artificial Sequence: Synthetic oligonucleotide
gagccaccccgtgcagtc

SEQ ID NO: 3575 - DNA, 18 bp, Artificial Sequence
  Description of Artificial Sequence: Synthetic oligonucleotide
cggaagagccaccccgtg

SEQ ID NO: 3576 - DNA, 18 bp, Artificial Sequence
  Description of Artificial Sequence: Synthetic oligonucleotide
ccatgcggaagagccacc

SEQ ID NO: 3577 - DNA, 18 bp, Artificial Sequence
  Description of Artificial Sequence: Synthetic oligonucleotide
caagaccatgcggaagag

SEQ ID NO: 3578 - DNA, 18 bp, Artificial Sequence
  Description of Artificial Sequence: Synthetic oligonucleotide
caccaagaccatgcggaa

SEQ ID NO: 3579 - DNA, 18 bp, Artificial Sequence
  Description of Artificial Sequence: Synthetic oligonucleotide
caactcaccaagaccatg

SEQ ID NO: 3580 - DNA, 18 bp, Artificial Sequence
  Description of Artificial Sequence: Synthetic oligonucleotide
gctgtcaactcaccaaga

SEQ ID NO: 3581 - DNA, 18 bp, Artificial Sequence
  Description of Artificial Sequence: Synthetic oligonucleotide
gccctgctgtcaactcac

SEQ ID NO: 3582 - DNA, 18 bp, Artificial Sequence
  Description of Artificial Sequence: Synthetic oligonucleotide
gcgctgccctgctgtcaa

SEQ ID NO: 3583 - DNA, 18 bp, Artificial Sequence
  Description of Artificial Sequence: Synthetic oligonucleotide
acacagcgctgccctgct

SEQ ID NO: 3584 - DNA, 18 bp, Artificial Sequence
  Description of Artificial Sequence: Synthetic oligonucleotide
gggagacacagcgctgcc

SEQ ID NO: 3585 - DNA, 18 bp, Artificial Sequence
  Description of Artificial Sequence: Synthetic oligonucleotide
tggctgggagacacagcg

SEQ ID NO: 3586 - DNA, 18 bp, Artificial Sequence
  Description of Artificial Sequence: Synthetic oligonucleotide
aatgatggctgggagaca

SEQ ID NO: 3587 - DNA, 18 bp, Artificial Sequence
  Description of Artificial Sequence: Synthetic oligonucleotide
taaggaatgatggctggg

SEQ ID NO: 3588 - DNA, 18 bp, Artificial Sequence
  Description of Artificial Sequence: Synthetic oligonucleotide
atgagtaaggaatgatgg

SEQ ID NO: 3589 - DNA, 18 bp, Artificial Sequence
  Description of Artificial Sequence: Synthetic oligonucleotide
cagcgatgagtaaggaat

SEQ ID NO: 3590 - DNA, 18 bp, Artificial Sequence
  Description of Artificial Sequence: Synthetic oligonucleotide
cagagcagcgatgagtaa

SEQ ID NO: 3591 - DNA, 18 bp, Artificial Sequence
  Description of Artificial Sequence: Synthetic oligonucleotide
ctccacagagcagcgatg

SEQ ID NO: 3592 - DNA, 18 bp, Artificial Sequence
  Description of Artificial Sequence: Synthetic oligonucleotide
aacccctccacagagcag

SEQ ID NO: 3593 - DNA, 18 bp, Artificial Sequence
  Description of Artificial Sequence: Synthetic oligonucleotide
gagataacccctccacag

SEQ ID NO: 3594 - DNA, 18 bp, Artificial Sequence
  Description of Artificial Sequence: Synthetic oligonucleotide
tggtggagataacccctc

SEQ ID NO: 3595 - DNA, 18 bp, Artificial Sequence
  Description of Artificial Sequence: Synthetic oligonucleotide
gaaggtggtggagataac

SEQ ID NO: 3596 - DNA, 18 bp, Artificial Sequence
  Description of Artificial Sequence: Synthetic oligonucleotide
cctgagaaggtggtggag

SEQ ID NO: 3597 - DNA, 18 bp, Artificial Sequence
  Description of Artificial Sequence: Synthetic oligonucleotide
gaaggcctgagaaggtgg

SEQ ID NO: 3598 - DNA, 18 bp, Artificial Sequence
  Description of Artificial Sequence: Synthetic oligonucleotide
caagcgaaggcctgagaa

SEQ ID NO: 3599 - DNA, 18 bp, Artificial Sequence
  Description of Artificial Sequence: Synthetic oligonucleotide
tattggcgaatttgaaat

SEQ ID NO: 3600 - DNA, 18 bp, Artificial Sequence
  Description of Artificial Sequence: Synthetic oligonucleotide
ggttatattggcgaattt

SEQ ID NO: 3601 - DNA, 18 bp, Artificial Sequence
  Description of Artificial Sequence: Synthetic oligonucleotide
agcatggttatattggcg

SEQ ID NO: 3602 - DNA, 18 bp, Artificial Sequence
  Description of Artificial Sequence: Synthetic oligonucleotide
gatgaagcatggttatat

SEQ ID NO: 3603 - DNA, 18 bp, Artificial Sequence
  Description of Artificial Sequence: Synthetic oligonucleotide
gtgatgatgaagcatggt

SEQ ID NO: 3604 - DNA, 18 bp, Artificial Sequence
  Description of Artificial Sequence: Synthetic oligonucleotide
tcactgtgatgatgaagc

SEQ ID NO: 3605 - DNA, 18 bp, Artificial Sequence
  Description of Artificial Sequence: Synthetic oligonucleotide
gtttctcactgtgatgat

SEQ ID NO: 3606 - DNA, 18 bp, Artificial Sequence
  Description of Artificial Sequence: Synthetic oligonucleotide
gtctggtttctcactgtg

SEQ ID NO: 3607 - DNA, 18 bp, Artificial Sequence
  Description of Artificial Sequence: Synthetic oligonucleotide
tcatcgtctggtttctca

SEQ ID NO: 3608 - DNA, 18 bp, Artificial Sequence
  Description of Artificial Sequence: Synthetic oligonucleotide
caaagtcatcgtctggtt

SEQ ID NO: 3609 - DNA, 18 bp, Artificial Sequence
  Description of Artificial Sequence: Synthetic oligonucleotide
tgctccaaagtcatcgtc

SEQ ID NO: 3610 - DNA, 18 bp, Artificial Sequence
  Description of Artificial Sequence: Synthetic oligonucleotide
ggccatgctccaaagtca

SEQ ID NO: 3611 - DNA, 18 bp, Artificial Sequence
  Description of Artificial Sequence: Synthetic oligonucleotide
tcttaggccatgctccaa

SEQ ID NO: 3612 - DNA, 18 bp, Artificial Sequence
  Description of Artificial Sequence: Synthetic oligonucleotide
caggttcttaggccatgc

SEQ ID NO: 3613 - DNA, 18 bp, Artificial Sequence
  Description of Artificial Sequence: Synthetic oligonucleotide
aacaccaggttcttaggc

SEQ ID NO: 3614 - DNA, 18 bp, Artificial Sequence
  Description of Artificial Sequence: Synthetic oligonucleotide
agacaaacaccaggttct

SEQ ID NO: 3615 - DNA, 18 bp, Artificial Sequence
  Description of Artificial Sequence: Synthetic oligonucleotide
aagagagacaaacaccag

SEQ ID NO: 3616 - DNA, 18 bp, Artificial Sequence
  Description of Artificial Sequence: Synthetic oligonucleotide
ctgaaaagagagacaaac

SEQ ID NO: 3617 - DNA, 18 bp, Artificial Sequence
  Description of Artificial Sequence: Synthetic oligonucleotide
caatgctgaaaagagaga

SEQ ID NO: 3618 - DNA, 18 bp, Artificial Sequence
  Description of Artificial Sequence: Synthetic oligonucleotide
atcaacaatgctgaaaag

SEQ ID NO: 3619 - DNA, 18 bp, Artificial Sequence
  Description of Artificial Sequence: Synthetic oligonucleotide
agagcatcaacaatgctg

SEQ ID NO: 3620 - DNA, 18 bp, Artificial Sequence
  Description of Artificial Sequence: Synthetic oligonucleotide
tcaagagcatcaacaatg

SEQ ID NO: 3621 - DNA, 18 bp, Artificial Sequence
  Description of Artificial Sequence: Synthetic oligonucleotide
tgctctcaagagcatcaa

SEQ ID NO: 3622 - DNA, 18 bp, Artificial Sequence
  Description of Artificial Sequence: Synthetic oligonucleotide
gctgatgctctcaagagc

SEQ ID NO: 3623 - DNA, 18 bp, Artificial Sequence
  Description of Artificial Sequence: Synthetic oligonucleotide
tcctggctgatgctctca

SEQ ID NO: 3624 - DNA, 18 bp, Artificial Sequence
  Description of Artificial Sequence: Synthetic oligonucleotide
taatgtcctggctgatgc

SEQ ID NO: 3625 - DNA, 18 bp, Artificial Sequence
  Description of Artificial Sequence: Synthetic oligonucleotide
cacattaatgtcctggct

SEQ ID NO: 3626 - DNA, 18 bp, Artificial Sequence
  Description of Artificial Sequence: Synthetic oligonucleotide
tggtgcacattaatgtcc

SEQ ID NO: 3627 - DNA, 18 bp, Artificial Sequence
  Description of Artificial Sequence: Synthetic oligonucleotide
cacagtggtgcacattaa

SEQ ID NO: 3628 - DNA, 18 bp, Artificial Sequence
  Description of Artificial Sequence: Synthetic oligonucleotide
gccaccacagtggtgcac

SEQ ID NO: 3629 - DNA, 18 bp, Artificial Sequence
  Description of Artificial Sequence: Synthetic oligonucleotide
tccacgccaccacagtgg

SEQ ID NO: 3630 - DNA, 18 bp, Artificial Sequence
  Description of Artificial Sequence: Synthetic oligonucleotide
atctttccacgccaccac

SEQ ID NO: 3631 - DNA, 18 bp, Artificial Sequence
  Description of Artificial Sequence: Synthetic oligonucleotide
ttgccatctttccacgcc

SEQ ID NO: 3632 - DNA, 18 bp, Artificial Sequence
  Description of Artificial Sequence: Synthetic oligonucleotide
tctttttgccatctttcc

SEQ ID NO: 3633 - DNA, 18 bp, Artificial Sequence
  Description of Artificial Sequence: Synthetic oligonucleotide
agggctctttttgccatc

SEQ ID NO: 3634 - DNA, 18 bp, Artificial Sequence
  Description of Artificial Sequence: Synthetic oligonucleotide
catgcagggctctttttg

SEQ ID NO: 3635 - DNA, 18 bp, Artificial Sequence
  Description of Artificial Sequence: Synthetic oligonucleotide
aaaatcatgcagggctct

SEQ ID NO: 3636 - DNA, 18 bp, Artificial Sequence
  Description of Artificial Sequence: Synthetic oligonucleotide
tacaaaatcatgcagggc

SEQ ID NO: 3637 - DNA, 18 bp, Artificial Sequence
  Description of Artificial Sequence: Synthetic oligonucleotide
ctacgtacaaaatcatgc

SEQ ID NO: 3638 - DNA, 18 bp, Artificial Sequence
  Description of Artificial Sequence: Synthetic oligonucleotide
attttctacgtacaaaat

SEQ ID NO: 3639 - DNA, 18 bp, Artificial Sequence
  Description of Artificial Sequence: Synthetic oligonucleotide
ccaggattttctacgtac

SEQ ID NO: 3640 - DNA, 18 bp, Artificial Sequence
  Description of Artificial Sequence: Synthetic oligonucleotide
gtattccaggattttcta

SEQ ID NO: 3641 - DNA, 18 bp, Artificial Sequence
  Description of Artificial Sequence: Synthetic oligonucleotide
tgtgggtattccaggatt

SEQ ID NO: 3642 - DNA, 18 bp, Artificial Sequence
  Description of Artificial Sequence: Synthetic oligonucleotide
gtttttgtgggtattcca

SEQ ID NO: 3643 - DNA, 18 bp, Artificial Sequence
  Description of Artificial Sequence: Synthetic oligonucleotide
aataggtttttgtgggta

SEQ ID NO: 3644 - DNA, 18 bp, Artificial Sequence
  Description of Artificial Sequence: Synthetic oligonucleotide
gttctaataggtttttgt

SEQ ID NO: 3645 - DNA, 18 bp, Artificial Sequence
  Description of Artificial Sequence: Synthetic oligonucleotide
tattagttctaataggtt

SEQ ID NO: 3646 - DNA, 18 bp, Artificial Sequence
  Description of Artificial Sequence: Synthetic oligonucleotide
ttgtttattagttctaat

SEQ ID NO: 3647 - DNA, 18 bp, Artificial Sequence
  Description of Artificial Sequence: Synthetic oligonucleotide
tgaaattgtttattagtt

SEQ ID NO: 3648 - DNA, 18 bp, Artificial Sequence
  Description of Artificial Sequence: Synthetic oligonucleotide
cttgctgaaattgtttat

SEQ ID NO: 3649 - DNA, 18 bp, Artificial Sequence
  Description of Artificial Sequence: Synthetic oligonucleotide
ataaccttgctgaaattg

SEQ ID NO: 3650 - DNA, 18 bp, Artificial Sequence
  Description of Artificial Sequence: Synthetic oligonucleotide
atcctataaccttgctga

SEQ ID NO: 3651 - DNA, 18 bp, Artificial Sequence
  Description of Artificial Sequence: Synthetic oligonucleotide
cttgtatcctataacctt

SEQ ID NO: 3652 - DNA, 18 bp, Artificial Sequence
  Description of Artificial Sequence: Synthetic oligonucleotide
ttaaccttgtatcctata

SEQ ID NO: 3653 - DNA, 18 bp, Artificial Sequence
  Description of Artificial Sequence: Synthetic oligonucleotide
gtatattaaccttgtatc

SEQ ID NO: 3654 - DNA, 18 bp, Artificial Sequence
  Description of Artificial Sequence: Synthetic oligonucleotide
tttatgtatattaacctt

SEQ ID NO: 3655 - DNA, 18 bp, Artificial Sequence
  Description of Artificial Sequence: Synthetic oligonucleotide
attgatttatgtatatta

SEQ ID NO: 3656 - DNA, 18 bp, Artificial Sequence
  Description of Artificial Sequence: Synthetic oligonucleotide
ctacaattgatttatgta

SEQ ID NO: 3657 - DNA, 18 bp, Artificial Sequence
  Description of Artificial Sequence: Synthetic oligonucleotide
tgcattaggataatctaa

SEQ ID NO: 3658 - DNA, 18 bp, Artificial Sequence
  Description of Artificial Sequence: Synthetic oligonucleotide
tactatgcattaggataa

SEQ ID NO: 3659 - DNA, 18 bp, Artificial Sequence
  Description of Artificial Sequence: Synthetic oligonucleotide
ctgattactatgcattag

SEQ ID NO: 3660 - DNA, 18 bp, Artificial Sequence
  Description of Artificial Sequence: Synthetic oligonucleotide
gtattctgattactatgc

SEQ ID NO: 3661 - DNA, 18 bp, Artificial Sequence
  Description of Artificial Sequence: Synthetic oligonucleotide
acctagtattctgattac

SEQ ID NO: 3662 - DNA, 18 bp, Artificial Sequence
  Description of Artificial Sequence: Synthetic oligonucleotide
cagatacctagtattctg

SEQ ID NO: 3663 - DNA, 18 bp, Artificial Sequence
  Description of Artificial Sequence: Synthetic oligonucleotide
ctaaacagatacctagta

SEQ ID NO: 3664 - DNA, 18 bp, Artificial Sequence
  Description of Artificial Sequence: Synthetic oligonucleotide
aagacctaaacagatacc

SEQ ID NO: 3665 - DNA, 18 bp, Artificial Sequence
  Description of Artificial Sequence: Synthetic oligonucleotide
tacacaagacctaaacag

SEQ ID NO: 3666 - DNA, 18 bp, Artificial Sequence
  Description of Artificial Sequence: Synthetic oligonucleotide
aaaaatacacaagaccta

SEQ ID NO: 3667 - DNA, 18 bp, Artificial Sequence
  Description of Artificial Sequence: Synthetic oligonucleotide
ttcttaaaaatacacaag

SEQ ID NO: 3668 - DNA, 18 bp, Artificial Sequence
  Description of Artificial Sequence: Synthetic oligonucleotide
ataatttcttaaaaatac

SEQ ID NO: 3669 - DNA, 18 bp, Artificial Sequence
  Description of Artificial Sequence: Synthetic oligonucleotide
aatgaataatttcttaaa

SEQ ID NO: 3670 - DNA, 18 bp, Artificial Sequence
  Description of Artificial Sequence: Synthetic oligonucleotide
attaaaatgaataatttc

SEQ ID NO: 3671 - DNA, 18 bp, Artificial Sequence
  Description of Artificial Sequence: Synthetic oligonucleotide
aatgcattaaaatgaata

SEQ ID NO: 3672 - DNA, 18 bp, Artificial Sequence
  Description of Artificial Sequence: Synthetic oligonucleotide
tgaacaatgcattaaaat

SEQ ID NO: 3673 - DNA, 18 bp, Artificial Sequence
  Description of Artificial Sequence: Synthetic oligonucleotide
aaagttgaacaatgcatt

SEQ ID NO: 3674 - DNA, 18 bp, Artificial Sequence
  Description of Artificial Sequence: Synthetic oligonucleotide
ctgcaaaagttgaacaat

SEQ ID NO: 3675 - DNA, 18 bp, Artificial Sequence
  Description of Artificial Sequence: Synthetic oligonucleotide
ggccactgcaaaagttga

SEQ ID NO: 3676 - DNA, 18 bp, Artificial Sequence
  Description of Artificial Sequence: Synthetic oligonucleotide
attatggccactgcaaaa

SEQ ID NO: 3677 - DNA, 18 bp, Artificial Sequence
  Description of Artificial Sequence: Synthetic oligonucleotide
attatattatggccactg

SEQ ID NO: 3678 - DNA, 18 bp, Artificial Sequence
  Description of Artificial Sequence: Synthetic oligonucleotide
acaattatattatggcca

SEQ ID NO: 3679 - DNA, 18 bp, Artificial Sequence
  Description of Artificial Sequence: Synthetic oligonucleotide
ttatcacaattatattat

SEQ ID NO: 3680 - DNA, 18 bp, Artificial Sequence
  Description of Artificial Sequence: Synthetic oligonucleotide
ttacattatcacaattat

SEQ ID NO: 3681 - DNA, 18 bp, Artificial Sequence
  Description of Artificial Sequence: Synthetic oligonucleotide
ttttattacattatcaca

SEQ ID NO: 3682 - DNA, 18 bp, Artificial Sequence
  Description of Artificial Sequence: Synthetic oligonucleotide
cctgattttattacatta

SEQ ID NO: 3683 - DNA, 18 bp, Artificial Sequence
  Description of Artificial Sequence: Synthetic oligonucleotide
tgtttcctgattttatta

SEQ ID NO: 3684 - DNA, 18 bp, Artificial Sequence
  Description of Artificial Sequence: Synthetic oligonucleotide
ggtaatgtttcctgattt

SEQ ID NO: 3685 - DNA, 18 bp, Artificial Sequence
  Description of Artificial Sequence: Synthetic oligonucleotide
cttcaggtaatgtttcct

SEQ ID NO: 3686 - DNA, 18 bp, Artificial Sequence
  Description of Artificial Sequence: Synthetic oligonucleotide
atctgcttcaggtaatgt

SEQ ID NO: 3687 - DNA, 18 bp, Artificial Sequence
  Description of Artificial Sequence: Synthetic oligonucleotide
aaagcatctgcttcaggt

SEQ ID NO: 3688 - DNA, 18 bp, Artificial Sequence
  Description of Artificial Sequence: Synthetic oligonucleotide
cttcaaaagcatctgctt

SEQ ID NO: 3689 - DNA, 18 bp, Artificial Sequence
  Description of Artificial Sequence: Synthetic oligonucleotide
tctggtgacttcaaaagc

SEQ ID NO: 3690 - DNA, 18 bp, Artificial Sequence
  Description of Artificial Sequence: Synthetic oligonucleotide
tattttctggtgacttca

SEQ ID NO: 3691 - DNA, 18 bp, Artificial Sequence
  Description of Artificial Sequence: Synthetic oligonucleotide
aagactattttctggtga

SEQ ID NO: 3692 - DNA, 18 bp, Artificial Sequence
  Description of Artificial Sequence: Synthetic oligonucleotide
tggagaagactattttct

SEQ ID NO: 3693 - DNA, 18 bp, Artificial Sequence
  Description of Artificial Sequence: Synthetic oligonucleotide
ggaattggagaagactat

SEQ ID NO: 3694 - DNA, 18 bp, Artificial Sequence
  Description of Artificial Sequence: Synthetic oligonucleotide
aaattggaattggagaag

SEQ ID NO: 3695 - DNA, 18 bp, Artificial Sequence
  Description of Artificial Sequence: Synthetic oligonucleotide
tatttaaattggaattgg

SEQ ID NO: 3696 - DNA, 18 bp, Artificial Sequence
  Description of Artificial Sequence: Synthetic oligonucleotide
ctccatatttaaattgga

SEQ ID NO: 3697 - DNA, 18 bp, Artificial Sequence
  Description of Artificial Sequence: Synthetic oligonucleotide
tacctccatatttaaatt

SEQ ID NO: 3698 - DNA, 18 bp, Artificial Sequence
  Description of Artificial Sequence: Synthetic oligonucleotide
taaattacctccatattt

SEQ ID NO: 3699 - DNA, 18 bp, Artificial Sequence
  Description of Artificial Sequence: Synthetic oligonucleotide
aggggtaaattacctcca

SEQ ID NO: 3700 - DNA, 18 bp, Artificial Sequence
  Description of Artificial Sequence: Synthetic oligonucleotide
aaataaggggtaaattac

SEQ ID NO: 3701 - DNA, 18 bp, Artificial Sequence
  Description of Artificial Sequence: Synthetic oligonucleotide
taataaaataaggggtaa

SEQ ID NO: 3702 - DNA, 18 bp, Artificial Sequence
  Description of Artificial Sequence: Synthetic oligonucleotide
tcgtttaataaaataagg

SEQ ID NO: 3703 - DNA, 18 bp, Artificial Sequence
  Description of Artificial Sequence: Synthetic oligonucleotide
tgtgatcgtttaataaaa

SEQ ID NO: 3704 - DNA, 18 bp, Artificial Sequence
  Description of Artificial Sequence: Synthetic oligonucleotide
atctttgtgatcgtttaa

SEQ ID NO: 3705 - DNA, 18 bp, Artificial Sequence
  Description of Artificial Sequence: Synthetic oligonucleotide
ccaacatctttgtgatcg

SEQ ID NO: 3706 - DNA, 18 bp, Artificial Sequence
  Description of Artificial Sequence: Synthetic oligonucleotide
tgcttccaacatctttgt

SEQ ID NO: 3707 - DNA, 18 bp, Artificial Sequence
  Description of Artificial Sequence: Synthetic oligonucleotide
aaaaatgcttccaacatc

SEQ ID NO: 3708 - DNA, 18 bp, Artificial Sequence
  Description of Artificial Sequence: Synthetic oligonucleotide
ttaagaaaaatgcttcca

SEQ ID NO: 3709 - DNA, 18 bp, Artificial Sequence
  Description of Artificial Sequence: Synthetic oligonucleotide
tttcattaagaaaaatgc

SEQ ID NO: 3710 - DNA, 18 bp, Artificial Sequence
  Description of Artificial Sequence: Synthetic oligonucleotide
ttggttttcattaagaaa

SEQ ID NO: 3711 - DNA, 18 bp, Artificial Sequence
  Description of Artificial Sequence: Synthetic oligonucleotide
ttttgttggttttcatta

SEQ ID NO: 3712 - DNA, 18 bp, Artificial Sequence
  Description of Artificial Sequence: Synthetic oligonucleotide
caaagttttgttggtttt

SEQ ID NO: 3713 - DNA, 18 bp, Artificial Sequence
  Description of Artificial Sequence: Synthetic oligonucleotide
atatgcaaagttttgttg

SEQ ID NO: 3714 - DNA, 18 bp, Artificial Sequence
  Description of Artificial Sequence: Synthetic oligonucleotide
tgacaatatgcaaagttt

SEQ ID NO: 3715 - DNA, 18 bp, Artificial Sequence
  Description of Artificial Sequence: Synthetic oligonucleotide
taacttgacaatatgcaa

SEQ ID NO: 3716 - DNA, 18 bp, Artificial Sequence
  Description of Artificial Sequence: Synthetic oligonucleotide
ttacgtaacttgacaata

SEQ ID NO: 3717 - DNA, 18 bp, Artificial Sequence
  Description of Artificial Sequence: Synthetic oligonucleotide
agaagttacgtaacttga

SEQ ID NO: 3718 - DNA, 18 bp, Artificial Sequence
  Description of Artificial Sequence: Synthetic oligonucleotide
tgctcttgaatgggagag

SEQ ID NO: 3719 - DNA, 18 bp, Artificial Sequence
  Description of Artificial Sequence: Synthetic oligonucleotide
accactgctcttgaatgg

SEQ ID NO: 3720 - DNA, 18 bp, Artificial Sequence
  Description of Artificial Sequence: Synthetic oligonucleotide
gagataccactgctcttg

SEQ ID NO: 3721 - DNA, 18 bp, Artificial Sequence
  Description of Artificial Sequence: Synthetic oligonucleotide
ggcaagagataccactgc

SEQ ID NO: 3722 - DNA, 18 bp, Artificial Sequence
  Description of Artificial Sequence: Synthetic oligonucleotide
gagaaggcaagagatacc

SEQ ID NO: 3723 - DNA, 18 bp, Artificial Sequence
  Description of Artificial Sequence: Synthetic oligonucleotide
ggatggagaaggcaagag

SEQ ID NO: 3724 - DNA, 18 bp, Artificial Sequence
  Description of Artificial Sequence: Synthetic oligonucleotide
caaagggatggagaaggc

SEQ ID NO: 3725 - DNA, 18 bp, Artificial Sequence
  Description of Artificial Sequence: Synthetic oligonucleotide
gagctcaaagggatggag

SEQ ID NO: 3726 - DNA, 18 bp, Artificial Sequence
  Description of Artificial Sequence: Synthetic oligonucleotide
aaatggagctcaaaggga

SEQ ID NO: 3727 - DNA, 18 bp, Artificial Sequence
  Description of Artificial Sequence: Synthetic oligonucleotide
gaaaaaaatggagctcaa

SEQ ID NO: 3728 - DNA, 18 bp, Artificial Sequence
  Description of Artificial Sequence: Synthetic oligonucleotide
attaagaaaaaaatggag

SEQ ID NO: 3729 - DNA, 18 bp, Artificial Sequence
  Description of Artificial Sequence: Synthetic oligonucleotide
ttaggattaagaaaaaaa

SEQ ID NO: 3730 - DNA, 18 bp, Artificial Sequence
  Description of Artificial Sequence: Synthetic oligonucleotide
aaaggttaggattaagaa

SEQ ID NO: 3731 - DNA, 18 bp, Artificial Sequence
  Description of Artificial Sequence: Synthetic oligonucleotide
ggaaaaaaggttaggatt

SEQ ID NO: 3732 - DNA, 18 bp, Artificial Sequence
  Description of Artificial Sequence: Synthetic oligonucleotide
gatggggaaaaaaggtta

SEQ ID NO: 3733 - DNA, 18 bp, Artificial Sequence
  Description of Artificial Sequence: Synthetic oligonucleotide
tttgggatggggaaaaaa

SEQ ID NO: 3734 - DNA, 18 bp, Artificial Sequence
  Description of Artificial Sequence: Synthetic oligonucleotide
agcaatttgggatgggga

SEQ ID NO: 3735 - DNA, 18 bp, Artificial Sequence
  Description of Artificial Sequence: Synthetic oligonucleotide
ctataagcaatttgggat

SEQ ID NO: 3736 - DNA, 18 bp, Artificial Sequence
  Description of Artificial Sequence: Synthetic oligonucleotide
taactctataagcaattt

SEQ ID NO: 3737 - DNA, 18 bp, Artificial Sequence
  Description of Artificial Sequence: Synthetic oligonucleotide
cgtgctaactctataagc

SEQ ID NO: 3738 - DNA, 18 bp, Artificial Sequence
  Description of Artificial Sequence: Synthetic oligonucleotide
gatgtcgtgctaactcta

SEQ ID NO: 3739 - DNA, 18 bp, Artificial Sequence
  Description of Artificial Sequence: Synthetic oligonucleotide
actgatgtcgtgctaact

SEQ ID NO: 3740 - DNA, 18 bp, Artificial Sequence
  Description of Artificial Sequence: Synthetic oligonucleotide
ctcatactgatgtcgtgc

SEQ ID NO: 3741 - DNA, 18 bp, Artificial Sequence
  Description of Artificial Sequence: Synthetic oligonucleotide
accagctcatactgatgt

SEQ ID NO: 3742 - DNA, 18 bp, Artificial Sequence
  Description of Artificial Sequence: Synthetic oligonucleotide
aggtgaccagctcatact

SEQ ID NO: 3743 - DNA, 18 bp, Artificial Sequence
  Description of Artificial Sequence: Synthetic oligonucleotide
agggaaggtgaccagctc

SEQ ID NO: 3744 - DNA, 18 bp, Artificial Sequence
  Description of Artificial Sequence: Synthetic oligonucleotide
ttgtcagggaaggtgacc

SEQ ID NO: 3745 - DNA, 18 bp, Artificial Sequence
  Description of Artificial Sequence: Synthetic oligonucleotide
ctgcgttgtcagggaagg

SEQ ID NO: 3746 - DNA, 18 bp, Artificial Sequence
  Description of Artificial Sequence: Synthetic oligonucleotide
catgtctgcgttgtcagg

SEQ ID NO: 3747 - DNA, 18 bp, Artificial Sequence
  Description of Artificial Sequence: Synthetic oligonucleotide
ccccacatgtctgcgttg

SEQ ID NO: 3748 - DNA, 18 bp, Artificial Sequence
  Description of Artificial Sequence: Synthetic oligonucleotide
ccaggccccacatgtctg

SEQ ID NO: 3749 - DNA, 18 bp, Artificial Sequence
  Description of Artificial Sequence: Synthetic oligonucleotide
atttcccaggccccacat

SEQ ID NO: 3750 - DNA, 18 bp, Artificial Sequence
  Description of Artificial Sequence: Synthetic oligonucleotide
ctttcatttcccaggccc

SEQ ID NO: 3751 - DNA, 18 bp, Artificial Sequence
  Description of Artificial Sequence: Synthetic oligonucleotide
gcgctctttcatttccca

SEQ ID NO: 3752 - DNA, 18 bp, Artificial Sequence
  Description of Artificial Sequence: Synthetic oligonucleotide
ccaaggcgctctttcatt

SEQ ID NO: 3753 - DNA, 18 bp, Artificial Sequence
  Description of Artificial Sequence: Synthetic oligonucleotide
ctgtcccaaggcgctctt

SEQ ID NO: 3754 - DNA, 18 bp, Artificial Sequence
  Description of Artificial Sequence: Synthetic oligonucleotide
tccccctgtcccaaggcg

SEQ ID NO: 3755 - DNA, 18 bp, Artificial Sequence
  Description of Artificial Sequence: Synthetic oligonucleotide
ccaaatccccctgtccca

SEQ ID NO: 3756 - DNA, 18 bp, Artificial Sequence
  Description of Artificial Sequence: Synthetic oligonucleotide
catttccaaatccccctg

SEQ ID NO: 3757 - DNA, 18 bp, Artificial Sequence
  Description of Artificial Sequence: Synthetic oligonucleotide
gatgacatttccaaatcc

SEQ ID NO: 3758 - DNA, 18 bp, Artificial Sequence
  Description of Artificial Sequence: Synthetic oligonucleotide
catcggatgacatttcca

SEQ ID NO: 3759 - DNA, 18 bp, Artificial Sequence
  Description of Artificial Sequence: Synthetic oligonucleotide
tgtgccatcggatgacat

SEQ ID NO: 3760 - DNA, 18 bp, Artificial Sequence
  Description of Artificial Sequence: Synthetic oligonucleotide
ctgattgtgccatcggat

SEQ ID NO: 3761 - DNA, 18 bp, Artificial Sequence
  Description of Artificial Sequence: Synthetic oligonucleotide
tacctgattgtgccatcg

SEQ ID NO: 3762 - DNA, 18 bp, Artificial Sequence
  Description of Artificial Sequence: Synthetic oligonucleotide
gggcctacctgattgtgc

SEQ ID NO: 3763 - DNA, 18 bp, Artificial Sequence
  Description of Artificial Sequence: Synthetic oligonucleotide
acagagggcctacctgat

SEQ ID NO: 3764 - DNA, 18 bp, Artificial Sequence
  Description of Artificial Sequence: Synthetic oligonucleotide
gctgcacagagggcctac

SEQ ID NO: 3765 - DNA, 18 bp, Artificial Sequence
  Description of Artificial Sequence: Synthetic oligonucleotide
cccaagctgcacagaggg

SEQ ID NO: 3766 - DNA, 18 bp, Artificial Sequence
  Description of Artificial Sequence: Synthetic oligonucleotide
ccctccccaagctgcaca

SEQ ID NO: 3767 - DNA, 18 bp, Artificial Sequence
  Description of Artificial Sequence: Synthetic oligonucleotide
cccgcccctccccaagct

SEQ ID NO: 3768 - DNA, 18 bp, Artificial Sequence
  Description of Artificial Sequence: Synthetic oligonucleotide
ggctccccgcccctcccc

SEQ ID NO: 3769 - DNA, 18 bp, Artificial Sequence
  Description of Artificial Sequence: Synthetic oligonucleotide
ggcctggctccccgcccc

SEQ ID NO: 3770 - DNA, 18 bp, Artificial Sequence
  Description of Artificial Sequence: Synthetic oligonucleotide
gagggggcctggctcccc

SEQ ID NO: 3771 - DNA, 18 bp, Artificial Sequence
  Description of Artificial Sequence: Synthetic oligonucleotide
gtgaggagggggcctggc

SEQ ID NO: 3772 - DNA, 18 bp, Artificial Sequence
  Description of Artificial Sequence: Synthetic oligonucleotide
aggcagtgaggagggggc

SEQ ID NO: 3773 - DNA, 18 bp, Artificial Sequence
  Description of Artificial Sequence: Synthetic oligonucleotide
agtggaggcagtgaggag

SEQ ID NO: 3774 - DNA, 18 bp, Artificial Sequence
  Description of Artificial Sequence: Synthetic oligonucleotide
gagaaagtggaggcagtg

SEQ ID NO: 3775 - DNA, 18 bp, Artificial Sequence
  Description of Artificial Sequence: Synthetic oligonucleotide
gatcagagaaagtggagg

SEQ ID NO: 3776 - DNA, 18 bp, Artificial Sequence
  Description of Artificial Sequence: Synthetic oligonucleotide
agcaggatcagagaaagt

SEQ ID NO: 3777 - DNA, 18 bp, Artificial Sequence
  Description of Artificial Sequence: Synthetic oligonucleotide
ggcccagcaggatcagag

SEQ ID NO: 3778 - DNA, 18 bp, Artificial Sequence
  Description of Artificial Sequence: Synthetic oligonucleotide
cccttggcccagcaggat

SEQ ID NO: 3779 - DNA, 18 bp, Artificial Sequence
  Description of Artificial Sequence: Synthetic oligonucleotide
gtgagcccttggcccagc

SEQ ID NO: 3780 - DNA, 18 bp, Artificial Sequence
  Description of Artificial Sequence: Synthetic oligonucleotide
caaaggtgagcccttggc

SEQ ID NO: 3781 - DNA, 18 bp, Artificial Sequence
  Description of Artificial Sequence: Synthetic oligonucleotide
aaagccaaaggtgagccc

SEQ ID NO: 3782 - DNA, 18 bp, Artificial Sequence
  Description of Artificial Sequence: Synthetic oligonucleotide
cagacttgggctcaaaca

SEQ ID NO: 3783 - DNA, 18 bp, Artificial Sequence
  Description of Artificial Sequence: Synthetic oligonucleotide
atcaccagacttgggctc

SEQ ID NO: 3784 - DNA, 18 bp, Artificial Sequence
  Description of Artificial Sequence: Synthetic oligonucleotide
cctacatcaccagacttg

SEQ ID NO: 3785 - DNA, 18 bp, Artificial Sequence
  Description of Artificial Sequence: Synthetic oligonucleotide
acccacctacatcaccag

SEQ ID NO: 3786 - DNA, 18 bp, Artificial Sequence
  Description of Artificial Sequence: Synthetic oligonucleotide
ctttcacccacctacatc

SEQ ID NO: 3787 - DNA, 18 bp, Artificial Sequence
  Description of Artificial Sequence: Synthetic oligonucleotide
cttgactttcacccacct

SEQ ID NO: 3788 - DNA, 18 bp, Artificial Sequence
  Description of Artificial Sequence: Synthetic oligonucleotide
aaatacttgactttcacc

SEQ ID NO: 3789 - DNA, 18 bp, Artificial Sequence
  Description of Artificial Sequence: Synthetic oligonucleotide
tacaaaaatacttgactt

SEQ ID NO: 3790 - DNA, 18 bp, Artificial Sequence
  Description of Artificial Sequence: Synthetic oligonucleotide
atttttacaaaaatactt

SEQ ID NO: 3791 - DNA, 18 bp, Artificial Sequence
  Description of Artificial Sequence: Synthetic oligonucleotide
ataggatttttacaaaaa

SEQ ID NO: 3792 - DNA, 18 bp, Artificial Sequence
  Description of Artificial Sequence: Synthetic oligonucleotide
gttccataggatttttac

SEQ ID NO: 3793 - DNA, 18 bp, Artificial Sequence
  Description of Artificial Sequence: Synthetic oligonucleotide
tcttagttccataggatt

SEQ ID NO: 3794 - DNA, 18 bp, Artificial Sequence
  Description of Artificial Sequence: Synthetic oligonucleotide
tcatgtcttagttccata

SEQ ID NO: 3795 - DNA, 18 bp, Artificial Sequence
  Description of Artificial Sequence: Synthetic oligonucleotide
tgaaatcatgtcttagtt

SEQ ID NO: 3796 - DNA, 18 bp, Artificial Sequence
  Description of Artificial Sequence: Synthetic oligonucleotide
atcagtgaaatcatgtct

SEQ ID NO: 3797 - DNA, 18 bp, Artificial Sequence
  Description of Artificial Sequence: Synthetic oligonucleotide
aaaaaatcagtgaaatca

SEQ ID NO: 3798 - DNA, 18 bp, Artificial Sequence
  Description of Artificial Sequence: Synthetic oligonucleotide
agaaaaaaaaatcagtga

SEQ ID NO: 3799 - DNA, 18 bp, Artificial Sequence
  Description of Artificial Sequence: Synthetic oligonucleotide
ctagaagaaaaaaaaatc

SEQ ID NO: 3800 - DNA, 18 bp, Artificial Sequence
  Description of Artificial Sequence: Synthetic oligonucleotide
gatacctagaagaaaaaa

SEQ ID NO: 3801 - DNA, 18 bp, Artificial Sequence
  Description of Artificial Sequence: Synthetic oligonucleotide
tttgagatacctagaaga

SEQ ID NO: 3802 - DNA, 18 bp, Artificial Sequence
  Description of Artificial Sequence: Synthetic oligonucleotide
acagatttgagataccta

SEQ ID NO: 3803 - DNA, 18 bp, Artificial Sequence
  Description of Artificial Sequence: Synthetic oligonucleotide
ttcacagatttgagatac

SEQ ID NO: 3804 - DNA, 18 bp, Artificial Sequence
  Description of Artificial Sequence: Synthetic oligonucleotide
aatacttcacagatttga

SEQ ID NO: 3805 - DNA, 18 bp, Artificial Sequence
  Description of Artificial Sequence: Synthetic oligonucleotide
tctacaatacttcacaga

SEQ ID NO: 3806 - DNA, 18 bp, Artificial Sequence
  Description of Artificial Sequence: Synthetic oligonucleotide
tctcctctacaatacttc

SEQ ID NO: 3807 - DNA, 18 bp, Artificial Sequence
  Description of Artificial Sequence: Synthetic oligonucleotide
ttgtgtctcctctacaat

SEQ ID NO: 3808 - DNA, 18 bp, Artificial Sequence
  Description of Artificial Sequence: Synthetic oligonucleotide
tccttttgtgtctcctct

SEQ ID NO: 3809 - DNA, 18 bp, Artificial Sequence
  Description of Artificial Sequence: Synthetic oligonucleotide
ccaattccttttgtgtct

SEQ ID NO: 3810 - DNA, 18 bp, Artificial Sequence
  Description of Artificial Sequence: Synthetic oligonucleotide
gacccccaattccttttg

SEQ ID NO: 3811 - DNA, 18 bp, Artificial Sequence
  Description of Artificial Sequence: Synthetic oligonucleotide
tttgtgacccccaattcc

SEQ ID NO: 3812 - DNA, 18 bp, Artificial Sequence
  Description of Artificial Sequence: Synthetic oligonucleotide
gagaaccatttgtgaccc

SEQ ID NO: 3813 - DNA, 18 bp, Artificial Sequence
  Description of Artificial Sequence: Synthetic oligonucleotide
tcaatgagaaccatttgt

SEQ ID NO: 3814 - DNA, 18 bp, Artificial Sequence
  Description of Artificial Sequence: Synthetic oligonucleotide
tcatgtcaatgagaacca

SEQ ID NO: 3815 - DNA, 18 bp, Artificial Sequence
  Description of Artificial Sequence: Synthetic oligonucleotide
tacactcatgtcaatgag

SEQ ID NO: 3816 - DNA, 18 bp, Artificial Sequence
  Description of Artificial Sequence: Synthetic oligonucleotide
aggtctacactcatgtca

SEQ ID NO: 3817 - DNA, 18 bp, Artificial Sequence
  Description of Artificial Sequence: Synthetic oligonucleotide
tagaaaggtctacactca

SEQ ID NO: 3818 - DNA, 18 bp, Artificial Sequence
  Description of Artificial Sequence: Synthetic oligonucleotide
ctgagtagaaaggtctac

SEQ ID NO: 3819 - DNA, 18 bp, Artificial Sequence
  Description of Artificial Sequence: Synthetic oligonucleotide
cacctgagtagaaaggtc

SEQ ID NO: 3820 - DNA, 18 bp, Artificial Sequence
  Description of Artificial Sequence: Synthetic oligonucleotide
aatttcacctgagtagaa

SEQ ID NO: 3821 - DNA, 18 bp, Artificial Sequence
  Description of Artificial Sequence: Synthetic oligonucleotide
taccaaatttcacctgag

SEQ ID NO: 3822 - DNA, 18 bp, Artificial Sequence
  Description of Artificial Sequence: Synthetic oligonucleotide
ctaaataccaaatttcac

SEQ ID NO: 3823 - DNA, 18 bp, Artificial Sequence
  Description of Artificial Sequence: Synthetic oligonucleotide
aatcactaaataccaaat

SEQ ID NO: 3824 - DNA, 18 bp, Artificial Sequence
  Description of Artificial Sequence: Synthetic oligonucleotide
caggcaatcactaaatac

SEQ ID NO: 3825 - DNA, 18 bp, Artificial Sequence
  Description of Artificial Sequence: Synthetic oligonucleotide
cctggcaggcaatcacta

SEQ ID NO: 3826 - DNA, 18 bp, Artificial Sequence
  Description of Artificial Sequence: Synthetic oligonucleotide
ttgaacctggcaggcaat

SEQ ID NO: 3827 - DNA, 18 bp, Artificial Sequence
  Description of Artificial Sequence: Synthetic oligonucleotide
gcatcttgaacctggcag

SEQ ID NO: 3828 - DNA, 18 bp, Artificial Sequence
  Description of Artificial Sequence: Synthetic oligonucleotide
ggtcagcatcttgaacct

SEQ ID NO: 3829 - DNA, 18 bp, Artificial Sequence
  Description of Artificial Sequence: Synthetic oligonucleotide
tcctcggtcagcatcttg

SEQ ID NO: 3830 - DNA, 18 bp, Artificial Sequence
  Description of Artificial Sequence: Synthetic oligonucleotide
taagctcctcggtcagca

SEQ ID NO: 3831 - DNA, 18 bp, Artificial Sequence
  Description of Artificial Sequence: Synthetic oligonucleotide
gatggtaagctcctcggt

SEQ ID NO: 3832 - DNA, 18 bp, Artificial Sequence
  Description of Artificial Sequence: Synthetic oligonucleotide
ggtttgatggtaagctcc

SEQ ID NO: 3833 - DNA, 18 bp, Artificial Sequence
  Description of Artificial Sequence: Synthetic oligonucleotide
tctctggtttgatggtaa

SEQ ID NO: 3834 - DNA, 18 bp, Artificial Sequence
  Description of Artificial Sequence: Synthetic oligonucleotide
actggtctctggtttgat

SEQ ID NO: 3835 - DNA, 18 bp, Artificial Sequence
  Description of Artificial Sequence: Synthetic oligonucleotide
ttggtactggtctctggt

SEQ ID NO: 3836 - DNA, 18 bp, Artificial Sequence
  Description of Artificial Sequence: Synthetic oligonucleotide
ctctattggtactggtct

SEQ ID NO: 3837 - DNA, 18 bp, Artificial Sequence
  Description of Artificial Sequence: Synthetic oligonucleotide
tcactctctattggtact

SEQ ID NO: 3838 - DNA, 18 bp, Artificial Sequence
  Description of Artificial Sequence: Synthetic oligonucleotide
catgttcactctctattg

SEQ ID NO: 3839 - DNA, 18 bp, Artificial Sequence
  Description of Artificial Sequence: Synthetic oligonucleotide
taaatcatgttcactctc

SEQ ID NO: 3840 - DNA, 18 bp, Artificial Sequence
  Description of Artificial Sequence: Synthetic oligonucleotide
gaccatgcttctactacc

SEQ ID NO: 3841 - DNA, 18 bp, Artificial Sequence
  Description of Artificial Sequence: Synthetic oligonucleotide
agggggaccatgcttcta

SEQ ID NO: 3842 - DNA, 18 bp, Artificial Sequence
  Description of Artificial Sequence: Synthetic oligonucleotide
tggggagggggaccatgc

SEQ ID NO: 3843 - DNA, 18 bp, Artificial Sequence
  Description of Artificial Sequence: Synthetic oligonucleotide
tgggttggggagggggac

SEQ ID NO: 3844 - DNA, 18 bp, Artificial Sequence
  Description of Artificial Sequence: Synthetic oligonucleotide
tcttatgggttggggagg

SEQ ID NO: 3845 - DNA, 18 bp, Artificial Sequence
  Description of Artificial Sequence: Synthetic oligonucleotide
aactctcttatgggttgg

SEQ ID NO: 3846 - DNA, 18 bp, Artificial Sequence
  Description of Artificial Sequence: Synthetic oligonucleotide
caaccaactctcttatgg

SEQ ID NO: 3847 - DNA, 18 bp, Artificial Sequence
  Description of Artificial Sequence: Synthetic oligonucleotide
atacccaaccaactctct

SEQ ID NO: 3848 - DNA, 18 bp, Artificial Sequence
  Description of Artificial Sequence: Synthetic oligonucleotide
tacatatacccaaccaac

SEQ ID NO: 3849 - DNA, 18 bp, Artificial Sequence
  Description of Artificial Sequence: Synthetic oligonucleotide
cagtatacatatacccaa

SEQ ID NO: 3850 - DNA, 18 bp, Artificial Sequence
  Description of Artificial Sequence: Synthetic oligonucleotide
acagacagtatacatata

SEQ ID NO: 3851 - DNA, 18 bp, Artificial Sequence
  Description of Artificial Sequence: Synthetic oligonucleotide
atgggacagacagtatac

SEQ ID NO: 3852 - DNA, 18 bp, Artificial Sequence
  Description of Artificial Sequence: Synthetic oligonucleotide
gtcagatgggacagacag

SEQ ID NO: 3853 - DNA, 18 bp, Artificial Sequence
  Description of Artificial Sequence: Synthetic oligonucleotide
gtggtgtcagatgggaca

SEQ ID NO: 3854 - DNA, 18 bp, Artificial Sequence
  Description of Artificial Sequence: Synthetic oligonucleotide
gagatgtggtgtcagatg

SEQ ID NO: 3855 - DNA, 18 bp, Artificial Sequence
  Description of Artificial Sequence: Synthetic oligonucleotide
acacagagatgtggtgtc

SEQ ID NO: 3856 - DNA, 18 bp, Artificial Sequence
  Description of Artificial Sequence: Synthetic oligonucleotide
gggaaacacagagatgtg

SEQ ID NO: 3857 - DNA, 18 bp, Artificial Sequence
  Description of Artificial Sequence: Synthetic oligonucleotide
ctagcgggaaacacagag

SEQ ID NO: 3858 - DNA, 18 bp, Artificial Sequence
  Description of Artificial Sequence: Synthetic oligonucleotide
accacctagcgggaaaca

SEQ ID NO: 3859 - DNA, 18 bp, Artificial Sequence
  Description of Artificial Sequence: Synthetic oligonucleotide
ttaccaccacctagcggg

SEQ ID NO: 3860 - DNA, 18 bp, Artificial Sequence
  Description of Artificial Sequence: Synthetic oligonucleotide
aatgattaccaccaccta

SEQ ID NO: 3861 - DNA, 18 bp, Artificial Sequence
  Description of Artificial Sequence: Synthetic oligonucleotide
actaatgattaccaccac

SEQ ID NO: 3862 - DNA, 18 bp, Artificial Sequence
  Description of Artificial Sequence: Synthetic oligonucleotide
ctggaactaatgattacc

SEQ ID NO: 3863 - DNA, 18 bp, Artificial Sequence
  Description of Artificial Sequence: Synthetic oligonucleotide
gcaccctggaactaatga

SEQ ID NO: 3864 - DNA, 18 bp, Artificial Sequence
  Description of Artificial Sequence: Synthetic oligonucleotide
gcagagcaccctggaact

SEQ ID NO: 3865 - DNA, 18 bp, Artificial Sequence
  Description of Artificial Sequence: Synthetic oligonucleotide
acatggcagagcaccctg

SEQ ID NO: 3866 - DNA, 18 bp, Artificial Sequence
  Description of Artificial Sequence: Synthetic oligonucleotide
cgtcaacatggcagagca

SEQ ID NO: 3867 - DNA, 18 bp, Artificial Sequence
  Description of Artificial Sequence: Synthetic oligonucleotide
gcttgcgtcaacatggca

SEQ ID NO: 3868 - DNA, 18 bp, Artificial Sequence
  Description of Artificial Sequence: Synthetic oligonucleotide
cagcagcttgcgtcaaca

SEQ ID NO: 3869 - DNA, 18 bp, Artificial Sequence
  Description of Artificial Sequence: Synthetic oligonucleotide
ccttacagcagcttgcgt

SEQ ID NO: 3870 - DNA, 18 bp, Artificial Sequence
  Description of Artificial Sequence: Synthetic oligonucleotide
acaagccttacagcagct

SEQ ID NO: 3871 - DNA, 18 bp, Artificial Sequence
  Description of Artificial Sequence: Synthetic oligonucleotide
ccctaacaagccttacag

SEQ ID NO: 3872 - DNA, 18 bp, Artificial Sequence
  Description of Artificial Sequence: Synthetic oligonucleotide
ggaccccctaacaagcct

SEQ ID NO: 3873 - DNA, 18 bp, Artificial Sequence
  Description of Artificial Sequence: Synthetic oligonucleotide
cgcagggaccccctaaca

SEQ ID NO: 3874 - DNA, 18 bp, Artificial Sequence
  Description of Artificial Sequence: Synthetic oligonucleotide
ttttgcgcagggaccccc

SEQ ID NO: 3875 - DNA, 18 bp, Artificial Sequence
  Description of Artificial Sequence: Synthetic oligonucleotide
ggaggttttgcgcaggga

SEQ ID NO: 3876 - DNA, 18 bp, Artificial Sequence
  Description of Artificial Sequence: Synthetic oligonucleotide
gcccaggaggttttgcgc

SEQ ID NO: 3877 - DNA, 18 bp, Artificial Sequence
  Description of Artificial Sequence: Synthetic oligonucleotide
actctgcccaggaggttt

SEQ ID NO: 3878 - DNA, 18 bp, Artificial Sequence
  Description of Artificial Sequence: Synthetic oligonucleotide
accccactctgcccagga

SEQ ID NO: 3879 - DNA, 18 bp, Artificial Sequence
  Description of Artificial Sequence: Synthetic oligonucleotide
ccctgtgaccccactctg

SEQ ID NO: 3880 - DNA, 18 bp, Artificial Sequence
  Description of Artificial Sequence: Synthetic oligonucleotide
cagttccctgtgacccca

SEQ ID NO: 3881 - DNA, 18 bp, Artificial Sequence
  Description of Artificial Sequence: Synthetic oligonucleotide
agtcgcagttccctgtga

SEQ ID NO: 3882 - DNA, 18 bp, Artificial Sequence
  Description of Artificial Sequence: Synthetic oligonucleotide
gacccagtcgcagttccc

SEQ ID NO: 3883 - DNA, 18 bp, Artificial Sequence
  Description of Artificial Sequence: Synthetic oligonucleotide
aagttgacccagtcgcag

SEQ ID NO: 3884 - DNA, 18 bp, Artificial Sequence
  Description of Artificial Sequence: Synthetic oligonucleotide
ggagcaagttgacccagt

SEQ ID NO: 3885 - DNA, 18 bp, Artificial Sequence
  Description of Artificial Sequence: Synthetic oligonucleotide
tgaaaggagcaagttgac

SEQ ID NO: 3886 - DNA, 18 bp, Artificial Sequence
  Description of Artificial Sequence: Synthetic oligonucleotide
cgctgtgaaaggagcaag

SEQ ID NO: 3887 - DNA, 18 bp, Artificial Sequence
  Description of Artificial Sequence: Synthetic oligonucleotide
tgaggcgctgtgaaagga

SEQ ID NO: 3888 - DNA, 18 bp, Artificial Sequence
  Description of Artificial Sequence: Synthetic oligonucleotide
ccttgtgaggcgctgtga

SEQ ID NO: 3889 - DNA, 18 bp, Artificial Sequence
  Description of Artificial Sequence: Synthetic oligonucleotide
cttgtccttgtgaggcgc

SEQ ID NO: 3890 - DNA, 18 bp, Artificial Sequence
  Description of Artificial Sequence: Synthetic oligonucleotide
aatgacttgtccttgtga

SEQ ID NO: 3891 - DNA, 18 bp, Artificial Sequence
  Description of Artificial Sequence: Synthetic oligonucleotide
cagaaaatgacttgtcct

SEQ ID NO: 3892 - DNA, 18 bp, Artificial Sequence
  Description of Artificial Sequence: Synthetic oligonucleotide
ttgatcagaaaatgactt

SEQ ID NO: 3893 - DNA, 18 bp, Artificial Sequence
  Description of Artificial Sequence: Synthetic oligonucleotide
cttctttgatcagaaaat

SEQ ID NO: 3894 - DNA, 18 bp, Artificial Sequence
  Description of Artificial Sequence: Synthetic oligonucleotide
aaccttctttgatcagaa

SEQ ID NO: 3895 - DNA, 18 bp, Artificial Sequence
  Description of Artificial Sequence: Synthetic oligonucleotide
gcaccaaccttctttgat

SEQ ID NO: 3896 - DNA, 18 bp, Artificial Sequence
  Description of Artificial Sequence: Synthetic oligonucleotide
aatgggcaccaaccttct

SEQ ID NO: 3897 - DNA, 18 bp, Artificial Sequence
  Description of Artificial Sequence: Synthetic oligonucleotide
aaggtaatgggcaccaac

SEQ ID NO: 3898 - DNA, 18 bp, Artificial Sequence
  Description of Artificial Sequence: Synthetic oligonucleotide
taaagaaggtaatgggca

SEQ ID NO: 3899 - DNA, 18 bp, Artificial Sequence
  Description of Artificial Sequence: Synthetic oligonucleotide
agcaataaagaaggtaat

SEQ ID NO: 3900 - DNA, 18 bp, Artificial Sequence
  Description of Artificial Sequence: Synthetic oligonucleotide
tccagagcaataaagaag

SEQ ID NO: 3901 - DNA, 18 bp, Artificial Sequence
  Description of Artificial Sequence: Synthetic oligonucleotide
ttgcttccagagcaataa

SEQ ID NO: 3902 - DNA, 18 bp, Artificial Sequence
  Description of Artificial Sequence: Synthetic oligonucleotide
aatttttgcttccagagc

SEQ ID NO: 3903 - DNA, 18 bp, Artificial Sequence
  Description of Artificial Sequence: Synthetic oligonucleotide
gaaataatttttgcttcc

SEQ ID NO: 3904 - DNA, 18 bp, Artificial Sequence
  Description of Artificial Sequence: Synthetic oligonucleotide
gtaaggaaataatttttg

SEQ ID NO: 3905 - DNA, 18 bp, Artificial Sequence
  Description of Artificial Sequence: Synthetic oligonucleotide
accaagtaaggaaataat

SEQ ID NO: 3906 - DNA, 18 bp, Artificial Sequence
  Description of Artificial Sequence: Synthetic oligonucleotide
aatgaaccaagtaaggaa

SEQ ID NO: 3907 - DNA, 18 bp, Artificial Sequence
  Description of Artificial Sequence: Synthetic oligonucleotide
cggaaaatgaaccaagta

SEQ ID NO: 3908 - DNA, 18 bp, Artificial Sequence
  Description of Artificial Sequence: Synthetic oligonucleotide
cttaacggaaaatgaacc

SEQ ID NO: 3909 - DNA, 18 bp, Artificial Sequence
  Description of Artificial Sequence: Synthetic oligonucleotide
agaggcttaacggaaaat

SEQ ID NO: 3910 - DNA, 18 bp, Artificial Sequence
  Description of Artificial Sequence: Synthetic oligonucleotide
tagccagaggcttaacgg

SEQ ID NO: 3911 - DNA, 18 bp, Artificial Sequence
  Description of Artificial Sequence: Synthetic oligonucleotide
agacttagccagaggctt

SEQ ID NO: 3912 - DNA, 18 bp, Artificial Sequence
  Description of Artificial Sequence: Synthetic oligonucleotide
tccaaagacttagccaga

SEQ ID NO: 3913 - DNA, 18 bp, Artificial Sequence
  Description of Artificial Sequence: Synthetic oligonucleotide
acaagtccaaagacttag

SEQ ID NO: 3914 - DNA, 18 bp, Artificial Sequence
  Description of Artificial Sequence: Synthetic oligonucleotide
tagcaacaagtccaaaga

SEQ ID NO: 3915 - DNA, 18 bp, Artificial Sequence
  Description of Artificial Sequence: Synthetic oligonucleotide
aaacataaagttttccta

SEQ ID NO: 3916 - DNA, 18 bp, Artificial Sequence
  Description of Artificial Sequence: Synthetic oligonucleotide
tatataaacataaagttt

SEQ ID NO: 3917 - DNA, 18 bp, Artificial Sequence
  Description of Artificial Sequence: Synthetic oligonucleotide
ttcaatatataaacataa

SEQ ID NO: 3918 - DNA, 18 bp, Artificial Sequence
  Description of Artificial Sequence: Synthetic oligonucleotide
ttcttttcaatatataaa

SEQ ID NO: 3919 - DNA, 18 bp, Artificial Sequence
  Description of Artificial Sequence: Synthetic oligonucleotide
tgcaattcttttcaatat

SEQ ID NO: 3920 - DNA, 18 bp, Artificial Sequence
  Description of Artificial Sequence: Synthetic oligonucleotide
tagtatgcaattcttttc

SEQ ID NO: 3921 - DNA, 18 bp, Artificial Sequence
  Description of Artificial Sequence: Synthetic oligonucleotide
agatctagtatgcaattc

SEQ ID NO: 3922 - DNA, 18 bp, Artificial Sequence
  Description of Artificial Sequence: Synthetic oligonucleotide
cagccagatctagtatgc

SEQ ID NO: 3923 - DNA, 18 bp, Artificial Sequence
  Description of Artificial Sequence: Synthetic oligonucleotide
ctttccagccagatctag

SEQ ID NO: 3924 - DNA, 18 bp, Artificial Sequence
  Description of Artificial Sequence: Synthetic oligonucleotide
ctggcctttccagccaga

SEQ ID NO: 3925 - DNA, 18 bp, Artificial Sequence
  Description of Artificial Sequence: Synthetic oligonucleotide
gaagtctggcctttccag

SEQ ID NO: 3926 - DNA, 18 bp, Artificial Sequence
  Description of Artificial Sequence: Synthetic oligonucleotide
aaaaggaagtctggcctt

SEQ ID NO: 3927 - DNA, 18 bp, Artificial Sequence
  Description of Artificial Sequence: Synthetic oligonucleotide
ctgataaaaggaagtctg

SEQ ID NO: 3928 - DNA, 18 bp, Artificial Sequence
  Description of Artificial Sequence: Synthetic oligonucleotide
gatttctgataaaaggaa

SEQ ID NO: 3929 - DNA, 18 bp, Artificial Sequence
  Description of Artificial Sequence: Synthetic oligonucleotide
ataaagatttctgataaa

SEQ ID NO: 3930 - DNA, 18 bp, Artificial Sequence
  Description of Artificial Sequence: Synthetic oligonucleotide
tgaaaataaagatttctg

SEQ ID NO: 3931 - DNA, 18 bp, Artificial Sequence
  Description of Artificial Sequence: Synthetic oligonucleotide
tataatgaaaataaagat

SEQ ID NO: 3932 - DNA, 18 bp, Artificial Sequence
  Description of Artificial Sequence: Synthetic oligonucleotide
ctgagtataatgaaaata

SEQ ID NO: 3933 - DNA, 18 bp, Artificial Sequence
  Description of Artificial Sequence: Synthetic oligonucleotide
gcaaactgagtataatga

SEQ ID NO: 3934 - DNA, 18 bp, Artificial Sequence
  Description of Artificial Sequence: Synthetic oligonucleotide
cataagcaaactgagtat

SEQ ID NO: 3935 - DNA, 18 bp, Artificial Sequence
  Description of Artificial Sequence: Synthetic oligonucleotide
tccaccataagcaaactg

SEQ ID NO: 3936 - DNA, 18 bp, Artificial Sequence
  Description of Artificial Sequence: Synthetic oligonucleotide
gcatccaccataagcaaa

SEQ ID NO: 3937 - DNA, 18 bp, Artificial Sequence
  Description of Artificial Sequence: Synthetic oligonucleotide
tgagtgcatccaccataa

SEQ ID NO: 3938 - DNA, 18 bp, Artificial Sequence
  Description of Artificial Sequence: Synthetic oligonucleotide
tgccatgagtgcatccac

SEQ ID NO: 3939 - DNA, 18 bp, Artificial Sequence
  Description of Artificial Sequence: Synthetic oligonucleotide
ttttttgccatgagtgca

SEQ ID NO: 3940 - DNA, 18 bp, Artificial Sequence
  Description of Artificial Sequence: Synthetic oligonucleotide
gtgatttttttgccatga

SEQ ID NO: 3941 - DNA, 18 bp, Artificial Sequence
  Description of Artificial Sequence: Synthetic oligonucleotide
caccagtgatttttttgc

SEQ ID NO: 3942 - DNA, 18 bp, Artificial Sequence
  Description of Artificial Sequence: Synthetic oligonucleotide
atgctcaccagtgatttt

SEQ ID NO: 3943 - DNA, 18 bp, Artificial Sequence
  Description of Artificial Sequence: Synthetic oligonucleotide
aaatgatgctcaccagtg

SEQ ID NO: 3944 - DNA, 18 bp, Artificial Sequence
  Description of Artificial Sequence: Synthetic oligonucleotide
ttcttaaatgatgctcac

SEQ ID NO: 3945 - DNA, 18 bp, Artificial Sequence
  Description of Artificial Sequence: Synthetic oligonucleotide
catgggtcttcttaaatg

SEQ ID NO: 3946 - DNA, 18 bp, Artificial Sequence
  Description of Artificial Sequence: Synthetic oligonucleotide
ctagtcatgggtcttctt

SEQ ID NO: 3947 - DNA, 18 bp, Artificial Sequence
  Description of Artificial Sequence: Synthetic oligonucleotide
ccagtctagtcatgggtc

SEQ ID NO: 3948 - DNA, 18 bp, Artificial Sequence
  Description of Artificial Sequence: Synthetic oligonucleotide
ccagcccagtctagtcat

SEQ ID NO: 3949 - DNA, 18 bp, Artificial Sequence
  Description of Artificial Sequence: Synthetic oligonucleotide
ctcggccagcccagtcta

SEQ ID NO: 3950 - DNA, 18 bp, Artificial Sequence
  Description of Artificial Sequence: Synthetic oligonucleotide
atgggctcggccagccca

SEQ ID NO: 3951 - DNA, 18 bp, Artificial Sequence
  Description of Artificial Sequence: Synthetic oligonucleotide
cacatgggctcggccagc

SEQ ID NO: 3952 - DNA, 18 bp, Artificial Sequence
  Description of Artificial Sequence: Synthetic oligonucleotide
atactcacatgggctcgg

SEQ ID NO: 3953 - DNA, 18 bp, Artificial Sequence
  Description of Artificial Sequence: Synthetic oligonucleotide
ttggtatactcacatggg

SEQ ID NO: 3954 - DNA, 18 bp, Artificial Sequence
  Description of Artificial Sequence: Synthetic oligonucleotide
aatccttggtatactcac

SEQ ID NO: 3955 - DNA, 18 bp, Artificial Sequence
  Description of Artificial Sequence: Synthetic oligonucleotide
ccctcaatccttggtata

SEQ ID NO: 3956 - DNA, 18 bp, Artificial Sequence
  Description of Artificial Sequence: Synthetic oligonucleotide
caccaccctcaatccttg

SEQ ID NO: 3957 - DNA, 18 bp, Artificial Sequence
  Description of Artificial Sequence: Synthetic oligonucleotide
catatcaccaccctcaat

SEQ ID NO: 3958 - DNA, 18 bp, Artificial Sequence
  Description of Artificial Sequence: Synthetic oligonucleotide
ctagtcatatcaccaccc

SEQ ID NO: 3959 - DNA, 18 bp, Artificial Sequence
  Description of Artificial Sequence: Synthetic oligonucleotide
tttttctagtcatatcac

SEQ ID NO: 3960 - DNA, 18 bp, Artificial Sequence
  Description of Artificial Sequence: Synthetic oligonucleotide
aacagtttttctagtcat

SEQ ID NO: 3961 - DNA, 18 bp, Artificial Sequence
  Description of Artificial Sequence: Synthetic oligonucleotide
tacataacagtttttcta

SEQ ID NO: 3962 - DNA, 18 bp, Artificial Sequence
  Description of Artificial Sequence: Synthetic oligonucleotide
aactgtacataacagttt

SEQ ID NO: 3963 - DNA, 18 bp, Artificial Sequence
  Description of Artificial Sequence: Synthetic oligonucleotide
ggacaaactgtacataac

SEQ ID NO: 3964 - DNA, 18 bp, Artificial Sequence
  Description of Artificial Sequence: Synthetic oligonucleotide
catttggacaaactgtac

SEQ ID NO: 3965 - DNA, 18 bp, Artificial Sequence
  Description of Artificial Sequence: Synthetic oligonucleotide
tgttacatttggacaaac

SEQ ID NO: 3966 - DNA, 18 bp, Artificial Sequence
  Description of Artificial Sequence: Synthetic oligonucleotide
ggctgtgttacatttgga

SEQ ID NO: 3967 - DNA, 18 bp, Artificial Sequence
  Description of Artificial Sequence: Synthetic oligonucleotide
attatggctgtgttacat

SEQ ID NO: 3968 - DNA, 18 bp, Artificial Sequence
  Description of Artificial Sequence: Synthetic oligonucleotide
tcttcattatggctgtgt

SEQ ID NO: 3969 - DNA, 18 bp, Artificial Sequence
  Description of Artificial Sequence: Synthetic oligonucleotide
ggttatcttcattatggc

SEQ ID NO: 3970 - DNA, 18 bp, Artificial Sequence
  Description of Artificial Sequence: Synthetic oligonucleotide
gctaaggttatcttcatt

SEQ ID NO: 3971 - DNA, 18 bp, Artificial Sequence
  Description of Artificial Sequence: Synthetic oligonucleotide
gtctcgctaaggttatct

SEQ ID NO: 3972 - DNA, 18 bp, Artificial Sequence
  Description of Artificial Sequence: Synthetic oligonucleotide
aaactccatataacgcag

SEQ ID NO: 3973 - DNA, 18 bp, Artificial Sequence
  Description of Artificial Sequence: Synthetic oligonucleotide
tctataaactccatataa

SEQ ID NO: 3974 - DNA, 18 bp, Artificial Sequence
  Description of Artificial Sequence: Synthetic oligonucleotide
caagatctataaactcca

SEQ ID NO: 3975 - DNA, 18 bp, Artificial Sequence
  Description of Artificial Sequence: Synthetic oligonucleotide
tgattcaagatctataaa

SEQ ID NO: 3976 - DNA, 18 bp, Artificial Sequence
  Description of Artificial Sequence: Synthetic oligonucleotide
atgcatgattcaagatct

SEQ ID NO: 3977 - DNA, 18 bp, Artificial Sequence
  Description of Artificial Sequence: Synthetic oligonucleotide
tgtatatgcatgattcaa

SEQ ID NO: 3978 - DNA, 18 bp, Artificial Sequence
  Description of Artificial Sequence: Synthetic oligonucleotide
gaaactgtatatgcatga

SEQ ID NO: 3979 - DNA, 18 bp, Artificial Sequence
  Description of Artificial Sequence: Synthetic oligonucleotide
ctttagaaactgtatatg

SEQ ID NO: 3980 - DNA, 18 bp, Artificial Sequence
  Description of Artificial Sequence: Synthetic oligonucleotide
cttagctttagaaactgt

SEQ ID NO: 3981 - DNA, 18 bp, Artificial Sequence
  Description of Artificial Sequence: Synthetic oligonucleotide
agatccttagctttagaa

SEQ ID NO: 3982 - DNA, 18 bp, Artificial Sequence
  Description of Artificial Sequence: Synthetic oligonucleotide
aaatcagatccttagctt

SEQ ID NO: 3983 - DNA, 18 bp, Artificial Sequence
  Description of Artificial Sequence: Synthetic oligonucleotide
ttttaaaatcagatcctt

SEQ ID NO: 3984 - DNA, 18 bp, Artificial Sequence
  Description of Artificial Sequence: Synthetic oligonucleotide
agtgattttaaaatcaga

SEQ ID NO: 3985 - DNA, 18 bp, Artificial Sequence
  Description of Artificial Sequence: Synthetic oligonucleotide
attttagtgattttaaaa

SEQ ID NO: 3986 - DNA, 18 bp, Artificial Sequence
  Description of Artificial Sequence: Synthetic oligonucleotide
aatagattttagtgattt

SEQ ID NO: 3987 - DNA, 18 bp, Artificial Sequence
  Description of Artificial Sequence: Synthetic oligonucleotide
aaaggaatagattttagt

SEQ ID NO: 3988 - DNA, 18 bp, Artificial Sequence
  Description of Artificial Sequence: Synthetic oligonucleotide
aaaacaaaggaatagatt

SEQ ID NO: 3989 - DNA, 18 bp, Artificial Sequence
  Description of Artificial Sequence: Synthetic oligonucleotide
ctaacaaaacaaaggaat

SEQ ID NO: 3990 - DNA, 18 bp, Artificial Sequence
  Description of Artificial Sequence: Synthetic oligonucleotide
tgaacctaacaaaacaaa

SEQ ID NO: 3991 - DNA, 18 bp, Artificial Sequence
  Description of Artificial Sequence: Synthetic oligonucleotide
tctgatgaacctaacaaa

SEQ ID NO: 3992 - DNA, 18 bp, Artificial Sequence
  Description of Artificial Sequence: Synthetic oligonucleotide
ttaagtctgatgaaccta

SEQ ID NO: 3993 - DNA, 18 bp, Artificial Sequence
  Description of Artificial Sequence: Synthetic oligonucleotide
aagttaagtctgatgaac

SEQ ID NO: 3994 - DNA, 18 bp, Artificial Sequence
  Description of Artificial Sequence: Synthetic oligonucleotide
agcagaagttaagtctga

SEQ ID NO: 3995 - DNA, 18 bp, Artificial Sequence
  Description of Artificial Sequence: Synthetic oligonucleotide
tttctagcagaagttaag

SEQ ID NO: 3996 - DNA, 18 bp, Artificial Sequence
  Description of Artificial Sequence: Synthetic oligonucleotide
aacaatttctagcagaag

SEQ ID NO: 3997 - DNA, 18 bp, Artificial Sequence
  Description of Artificial Sequence: Synthetic oligonucleotide
ctggtaacaatttctagc

SEQ ID NO: 3998 - DNA, 18 bp, Artificial Sequence
  Description of Artificial Sequence: Synthetic oligonucleotide
agaggctggtaacaattt

SEQ ID NO: 3999 - DNA, 18 bp, Artificial Sequence
  Description of Artificial Sequence: Synthetic oligonucleotide
ctaatagaggctggtaac

SEQ ID NO: 4000 - DNA, 18 bp, Artificial Sequence
  Description of Artificial Sequence: Synthetic oligonucleotide
gggattttctaatagagg

SEQ ID NO: 4001 - DNA, 18 bp, Artificial Sequence
  Description of Artificial Sequence: Synthetic oligonucleotide
accatgggattttctaat

SEQ ID NO: 4002 - DNA, 18 bp, Artificial Sequence
  Description of Artificial Sequence: Synthetic oligonucleotide
ctgacaccatgggatttt

SEQ ID NO: 4003 - DNA, 18 bp, Artificial Sequence
  Description of Artificial Sequence: Synthetic oligonucleotide
actttctgacaccatggg

SEQ ID NO: 4004 - DNA, 18 bp, Artificial Sequence
  Description of Artificial Sequence: Synthetic oligonucleotide
tacactttctgacaccat

SEQ ID NO: 4005 - DNA, 18 bp, Artificial Sequence
  Description of Artificial Sequence: Synthetic oligonucleotide
ttgcttacactttctgac

SEQ ID NO: 4006 - DNA, 18 bp, Artificial Sequence
  Description of Artificial Sequence: Synthetic oligonucleotide
tccttttgcttacacttt

SEQ ID NO: 4007 - DNA, 18 bp, Artificial Sequence
  Description of Artificial Sequence: Synthetic oligonucleotide
aagaatccttttgcttac

SEQ ID NO: 4008 - DNA, 18 bp, Artificial Sequence
  Description of Artificial Sequence: Synthetic oligonucleotide
taattaagaatccttttg

SEQ ID NO: 4009 - DNA, 18 bp, Artificial Sequence
  Description of Artificial Sequence: Synthetic oligonucleotide
gagcataattaagaatcc

SEQ ID NO: 4010 - DNA, 18 bp, Artificial Sequence
  Description of Artificial Sequence: Synthetic oligonucleotide
aacgtgagcataattaag

SEQ ID NO: 4011 - DNA, 18 bp, Artificial Sequence
  Description of Artificial Sequence: Synthetic oligonucleotide
attttaacgtgagcataa

SEQ ID NO: 4012 - DNA, 18 bp, Artificial Sequence
  Description of Artificial Sequence: Synthetic oligonucleotide
tgaaaattttaacgtgag

SEQ ID NO: 4013 - DNA, 18 bp, Artificial Sequence
  Description of Artificial Sequence: Synthetic oligonucleotide
aatactgaaaattttaac

SEQ ID NO: 4014 - DNA, 18 bp, Artificial Sequence
  Description of Artificial Sequence: Synthetic oligonucleotide
ttgacaatactgaaaatt

SEQ ID NO: 4015 - DNA, 18 bp, Artificial Sequence
  Description of Artificial Sequence: Synthetic oligonucleotide
attatttgacaatactga

SEQ ID NO: 4016 - DNA, 18 bp, Artificial Sequence
  Description of Artificial Sequence: Synthetic oligonucleotide
aatgcattatttgacaat

SEQ ID NO: 4017 - DNA, 18 bp, Artificial Sequence
  Description of Artificial Sequence: Synthetic oligonucleotide
ttaagaatgcattatttg

SEQ ID NO: 4018 - DNA, 18 bp, Artificial Sequence
  Description of Artificial Sequence: Synthetic oligonucleotide
ataatttaagaatgcatt

SEQ ID NO: 4019 - DNA, 18 bp, Artificial Sequence
  Description of Artificial Sequence: Synthetic oligonucleotide
caaacataatttaagaat

SEQ ID NO: 4020 - DNA, 18 bp, Artificial Sequence
  Description of Artificial Sequence: Synthetic oligonucleotide
ctaatcaaacataattta

SEQ ID NO: 4021 - DNA, 18 bp, Artificial Sequence
  Description of Artificial Sequence: Synthetic oligonucleotide
tgctgctaatcaaacata

SEQ ID NO: 4022 - DNA, 18 bp, Artificial Sequence
  Description of Artificial Sequence: Synthetic oligonucleotide
aggcatgctgctaatcaa

SEQ ID NO: 4023 - DNA, 18 bp, Artificial Sequence
  Description of Artificial Sequence: Synthetic oligonucleotide
aaacaaggcatgctgcta

SEQ ID NO: 4024 - DNA, 18 bp, Artificial Sequence
  Description of Artificial Sequence: Synthetic oligonucleotide
aataaaaacaaggcatgc

SEQ ID NO: 4025 - DNA, 18 bp, Artificial Sequence
  Description of Artificial Sequence: Synthetic oligonucleotide
tttgttgcaaggtgttga

SEQ ID NO: 4026 - DNA, 18 bp, Artificial Sequence
  Description of Artificial Sequence: Synthetic oligonucleotide
atggctttgttgcaaggt

SEQ ID NO: 4027 - DNA, 18 bp, Artificial Sequence
  Description of Artificial Sequence: Synthetic oligonucleotide
aaataatggctttgttgc

SEQ ID NO: 4028 - DNA, 18 bp, Artificial Sequence
  Description of Artificial Sequence: Synthetic oligonucleotide
ctttgaaataatggcttt

SEQ ID NO: 4029 - DNA, 18 bp, Artificial Sequence
  Description of Artificial Sequence: Synthetic oligonucleotide
ctcttctttgaaataatg

SEQ ID NO: 4030 - DNA, 18 bp, Artificial Sequence
  Description of Artificial Sequence: Synthetic oligonucleotide
ccatgctcttctttgaaa

SEQ ID NO: 4031 - DNA, 18 bp, Artificial Sequence
  Description of Artificial Sequence: Synthetic oligonucleotide
ttagaccatgctcttctt

SEQ ID NO: 4032 - DNA, 18 bp, Artificial Sequence
  Description of Artificial Sequence: Synthetic oligonucleotide
tggatttagaccatgctc

SEQ ID NO: 4033 - DNA, 18 bp, Artificial Sequence
  Description of Artificial Sequence: Synthetic oligonucleotide
ggagttggatttagacca

SEQ ID NO: 4034 - DNA, 18 bp, Artificial Sequence
  Description of Artificial Sequence: Synthetic oligonucleotide
aacagggagttggattta

SEQ ID NO: 4035 - DNA, 18 bp, Artificial Sequence
  Description of Artificial Sequence: Synthetic oligonucleotide
taagtaacagggagttgg

SEQ ID NO: 4036 - DNA, 18 bp, Artificial Sequence
  Description of Artificial Sequence: Synthetic oligonucleotide
catgataagtaacaggga

SEQ ID NO: 4037 - DNA, 18 bp, Artificial Sequence
  Description of Artificial Sequence: Synthetic oligonucleotide
aattacatgataagtaac

SEQ ID NO: 4038 - DNA, 18 bp, Artificial Sequence
  Description of Artificial Sequence: Synthetic oligonucleotide
taagtaattacatgataa

SEQ ID NO: 4039 - DNA, 18 bp, Artificial Sequence
  Description of Artificial Sequence: Synthetic oligonucleotide
ttttataagtaattacat

SEQ ID NO: 4040 - DNA, 18 bp, Artificial Sequence
  Description of Artificial Sequence: Synthetic oligonucleotide
aaacattttataagtaat

SEQ ID NO: 4041 - DNA, 18 bp, Artificial Sequence
  Description of Artificial Sequence: Synthetic oligonucleotide
ataaaaaacattttataa

SEQ ID NO: 4042 - DNA, 18 bp, Artificial Sequence
  Description of Artificial Sequence: Synthetic oligonucleotide
ctataataaaaaacattt

SEQ ID NO: 4043 - DNA, 18 bp, Artificial Sequence
  Description of Artificial Sequence: Synthetic oligonucleotide
tttcactataataaaaaa

SEQ ID NO: 4044 - DNA, 18 bp, Artificial Sequence
  Description of Artificial Sequence: Synthetic oligonucleotide
cttcttttcactataata

SEQ ID NO: 4045 - DNA, 18 bp, Artificial Sequence
  Description of Artificial Sequence: Synthetic oligonucleotide
aatctcttcttttcacta

SEQ ID NO: 4046 - DNA, 18 bp, Artificial Sequence
  Description of Artificial Sequence: Synthetic oligonucleotide
tccaatctcttcttttca

SEQ ID NO: 4047 - DNA, 18 bp, Artificial Sequence
  Description of Artificial Sequence: Synthetic oligonucleotide
ccaggtccaatctcttct

SEQ ID NO: 4048 - DNA, 18 bp, Artificial Sequence
  Description of Artificial Sequence: Synthetic oligonucleotide
cttttccaggtccaatct

SEQ ID NO: 4049 - DNA, 18 bp, Artificial Sequence
  Description of Artificial Sequence: Synthetic oligonucleotide
agtttcttttccaggtcc

SEQ ID NO: 4050 - DNA, 18 bp, Artificial Sequence
  Description of Artificial Sequence: Synthetic oligonucleotide
cataaagtttcttttcca

SEQ ID NO: 4051 - DNA, 18 bp, Artificial Sequence
  Description of Artificial Sequence: Synthetic oligonucleotide
atattcataaagtttctt

SEQ ID NO: 4052 - DNA, 18 bp, Artificial Sequence
  Description of Artificial Sequence: Synthetic oligonucleotide
tgattatattcataaagt

SEQ ID NO: 4053 - DNA, 18 bp, Artificial Sequence
  Description of Artificial Sequence: Synthetic oligonucleotide
cagactgattatattcat

SEQ ID NO: 4054 - DNA, 18 bp, Artificial Sequence
  Description of Artificial Sequence: Synthetic oligonucleotide
tgtatcagactgattata

SEQ ID NO: 4055 - DNA, 18 bp, Artificial Sequence
  Description of Artificial Sequence: Synthetic oligonucleotide
ctgcatgtatcagactga

SEQ ID NO: 4056 - DNA, 18 bp, Artificial Sequence
  Description of Artificial Sequence: Synthetic oligonucleotide
tacctgcatgtatcagac

SEQ ID NO: 4057 - DNA, 18 bp, Artificial Sequence
  Description of Artificial Sequence: Synthetic oligonucleotide
tctcttacctgcatgtat

SEQ ID NO: 4058 - DNA, 18 bp, Artificial Sequence
  Description of Artificial Sequence: Synthetic oligonucleotide
tgtcgtctcttacctgca

SEQ ID NO: 4059 - DNA, 18 bp, Artificial Sequence
  Description of Artificial Sequence: Synthetic oligonucleotide
cccactgtcgtctcttac

SEQ ID NO: 4060 - DNA, 18 bp, Artificial Sequence
  Description of Artificial Sequence: Synthetic oligonucleotide
ctgttcccactgtcgtct

SEQ ID NO: 4061 - DNA, 18 bp, Artificial Sequence
  Description of Artificial Sequence: Synthetic oligonucleotide
gaaaactgttcccactgt

SEQ ID NO: 4062 - DNA, 18 bp, Artificial Sequence
  Description of Artificial Sequence: Synthetic oligonucleotide
ggcttgaaaactgttccc

SEQ ID NO: 4063 - DNA, 18 bp, Artificial Sequence
  Description of Artificial Sequence: Synthetic oligonucleotide
aacctggcttgaaaactg

SEQ ID NO: 4064 - DNA, 18 bp, Artificial Sequence
  Description of Artificial Sequence: Synthetic oligonucleotide
tatggaacctggcttgaa

SEQ ID NO: 4065 - DNA, 18 bp, Artificial Sequence
  Description of Artificial Sequence: Synthetic oligonucleotide
taatatatggaacctggc

SEQ ID NO: 4066 - DNA, 18 bp, Artificial Sequence
  Description of Artificial Sequence: Synthetic oligonucleotide
ttgattaatatatggaac

SEQ ID NO: 4067 - DNA, 18 bp, Artificial Sequence
  Description of Artificial Sequence: Synthetic oligonucleotide
catttttgattaatatat

SEQ ID NO: 4068 - DNA, 18 bp, Artificial Sequence
  Description of Artificial Sequence: Synthetic oligonucleotide
ggttacatttttgattaa

SEQ ID NO: 4069 - DNA, 18 bp, Artificial Sequence
  Description of Artificial Sequence: Synthetic oligonucleotide
attagggttacatttttg

SEQ ID NO: 4070 - DNA, 18 bp, Artificial Sequence
  Description of Artificial Sequence: Synthetic oligonucleotide
ataacattagggttacat

SEQ ID NO: 4071 - DNA, 18 bp, Artificial Sequence
  Description of Artificial Sequence: Synthetic oligonucleotide
atgacataacattagggt

SEQ ID NO: 4072 - DNA, 18 bp, Artificial Sequence
  Description of Artificial Sequence: Synthetic oligonucleotide
tatttatgacataacatt

SEQ ID NO: 4073 - DNA, 18 bp, Artificial Sequence
  Description of Artificial Sequence: Synthetic oligonucleotide
tacaatatttatgacata

SEQ ID NO: 4074 - DNA, 18 bp, Artificial Sequence
  Description of Artificial Sequence: Synthetic oligonucleotide
ctaactacaatatttatg

SEQ ID NO: 4075 - DNA, 18 bp, Artificial Sequence
  Description of Artificial Sequence: Synthetic oligonucleotide
gtactctaactacaatat

SEQ ID NO: 4076 - DNA, 18 bp, Artificial Sequence
  Description of Artificial Sequence: Synthetic oligonucleotide
acccagtactctaactac

SEQ ID NO: 4077 - DNA, 18 bp, Artificial Sequence
  Description of Artificial Sequence: Synthetic oligonucleotide
ggcctgctcctcccacag

SEQ ID NO: 4078 - DNA, 18 bp, Artificial Sequence
  Description of Artificial Sequence: Synthetic oligonucleotide
tcgctggcctgctcctcc

SEQ ID NO: 4079 - DNA, 18 bp, Artificial Sequence
  Description of Artificial Sequence: Synthetic oligonucleotide
atgaatcgctggcctgct

SEQ ID NO: 4080 - DNA, 18 bp, Artificial Sequence
  Description of Artificial Sequence: Synthetic oligonucleotide
aagtcatgaatcgctggc

SEQ ID NO: 4081 - DNA, 18 bp, Artificial Sequence
  Description of Artificial Sequence: Synthetic oligonucleotide
ctgggaagtcatgaatcg

SEQ ID NO: 4082 - DNA, 18 bp, Artificial Sequence
  Description of Artificial Sequence: Synthetic oligonucleotide
gagggctgggaagtcatg

SEQ ID NO: 4083 - DNA, 18 bp, Artificial Sequence
  Description of Artificial Sequence: Synthetic oligonucleotide
tcagagagggctgggaag

SEQ ID NO: 4084 - DNA, 18 bp, Artificial Sequence
  Description of Artificial Sequence: Synthetic oligonucleotide
aggcttcagagagggctg

SEQ ID NO: 4085 - DNA, 18 bp, Artificial Sequence
  Description of Artificial Sequence: Synthetic oligonucleotide
agttgaggcttcagagag

SEQ ID NO: 4086 - DNA, 18 bp, Artificial Sequence
  Description of Artificial Sequence: Synthetic oligonucleotide
gctgcagttgaggcttca

SEQ ID NO: 4087 - DNA, 18 bp, Artificial Sequence
  Description of Artificial Sequence: Synthetic oligonucleotide
cttgggctgcagttgagg

SEQ ID NO: 4088 - DNA, 18 bp, Artificial Sequence
  Description of Artificial Sequence: Synthetic oligonucleotide
gagcccttgggctgcagt

SEQ ID NO: 4089 - DNA, 18 bp, Artificial Sequence
  Description of Artificial Sequence: Synthetic oligonucleotide
acctggagcccttgggct

SEQ ID NO: 4090 - DNA, 18 bp, Artificial Sequence
  Description of Artificial Sequence: Synthetic oligonucleotide
gtctcacctggagccctt

SEQ ID NO: 4091 - DNA, 18 bp, Artificial Sequence
  Description of Artificial Sequence: Synthetic oligonucleotide
gctgggtctcacctggag

SEQ ID NO: 4092 - DNA, 18 bp, Artificial Sequence
  Description of Artificial Sequence: Synthetic oligonucleotide
agagggctgggtctcacc

SEQ ID NO: 4093 - DNA, 18 bp, Artificial Sequence
  Description of Artificial Sequence: Synthetic oligonucleotide
aaggaagagggctgggtc

SEQ ID NO: 4094 - DNA, 18 bp, Artificial Sequence
  Description of Artificial Sequence: Synthetic oligonucleotide
ctgggaaggaagagggct

SEQ ID NO: 4095 - DNA, 18 bp, Artificial Sequence
  Description of Artificial Sequence: Synthetic oligonucleotide
gattcctgggaaggaaga

SEQ ID NO: 4096 - DNA, 18 bp, Artificial Sequence
  Description of Artificial Sequence: Synthetic oligonucleotide
ctgaagattcctgggaag

SEQ ID NO: 4097 - DNA, 18 bp, Artificial Sequence
  Description of Artificial Sequence: Synthetic oligonucleotide
aagacctgaagattcctg

SEQ ID NO: 4098 - DNA, 18 bp, Artificial Sequence
  Description of Artificial Sequence: Synthetic oligonucleotide
aggaagacctgaagattc

SEQ ID NO: 4099 - DNA, 18 bp, Artificial Sequence
  Description of Artificial Sequence: Synthetic oligonucleotide
tccccaggaagacctgaa

SEQ ID NO: 4100 - DNA, 18 bp, Artificial Sequence
  Description of Artificial Sequence: Synthetic oligonucleotide
atgcttccccaggaagac

SEQ ID NO: 4101 - DNA, 18 bp, Artificial Sequence
  Description of Artificial Sequence: Synthetic oligonucleotide
aggttatgcttccccagg

SEQ ID NO: 4102 - DNA, 18 bp, Artificial Sequence
  Description of Artificial Sequence: Synthetic oligonucleotide
gccgaaggttatgcttcc

SEQ ID NO: 4103 - DNA, 18 bp, Artificial Sequence
  Description of Artificial Sequence: Synthetic oligonucleotide
cctttgccgaaggttatg

SEQ ID NO: 4104 - DNA, 18 bp, Artificial Sequence
  Description of Artificial Sequence: Synthetic oligonucleotide
ctctccctttgccgaagg

SEQ ID NO: 4105 - DNA, 18 bp, Artificial Sequence
  Description of Artificial Sequence: Synthetic oligonucleotide
gggaactctccctttgcc

SEQ ID NO: 4106 - DNA, 18 bp, Artificial Sequence
  Description of Artificial Sequence: Synthetic oligonucleotide
ctcctgggaactctccct

SEQ ID NO: 4107 - DNA, 18 bp, Artificial Sequence
  Description of Artificial Sequence: Synthetic oligonucleotide
ctctgctcctgggaactc

SEQ ID NO: 4108 - DNA, 18 bp, Artificial Sequence
  Description of Artificial Sequence: Synthetic oligonucleotide
cagaactctgctcctggg

SEQ ID NO: 4109 - DNA, 18 bp, Artificial Sequence
  Description of Artificial Sequence: Synthetic oligonucleotide
gacaacagaactctgctc

SEQ ID NO: 4110 - DNA, 18 bp, Artificial Sequence
  Description of Artificial Sequence: Synthetic oligonucleotide
gcccggacaacagaactc

SEQ ID NO: 4111 - DNA, 18 bp, Artificial Sequence
  Description of Artificial Sequence: Synthetic oligonucleotide
tcacagcccggacaacag

SEQ ID NO: 4112 - DNA, 18 bp, Artificial Sequence
  Description of Artificial Sequence: Synthetic oligonucleotide
gtggatcacagcccggac

SEQ ID NO: 4113 - DNA, 18 bp, Artificial Sequence
  Description of Artificial Sequence: Synthetic oligonucleotide
tcagggtggatcacagcc

SEQ ID NO: 4114 - DNA, 18 bp, Artificial Sequence
  Description of Artificial Sequence: Synthetic oligonucleotide
catagtcagggtggatca

SEQ ID NO: 4115 - DNA, 18 bp, Artificial Sequence
  Description of Artificial Sequence: Synthetic oligonucleotide
ggcatcatagtcagggtg

SEQ ID NO: 4116 - DNA, 18 bp, Artificial Sequence
  Description of Artificial Sequence: Synthetic oligonucleotide
ctggcggcatcatagtca

SEQ ID NO: 4117 - DNA, 18 bp, Artificial Sequence
  Description of Artificial Sequence: Synthetic oligonucleotide
catggctggcggcatcat

SEQ ID NO: 4118 - DNA, 18 bp, Artificial Sequence
  Description of Artificial Sequence: Synthetic oligonucleotide
ctggtcatggctggcggc

SEQ ID NO: 4119 - DNA, 18 bp, Artificial Sequence
  Description of Artificial Sequence: Synthetic oligonucleotide
atgtcctggtcatggctg

SEQ ID NO: 4120 - DNA, 18 bp, Artificial Sequence
  Description of Artificial Sequence: Synthetic oligonucleotide
gcatgatgtcctggtcat

SEQ ID NO: 4121 - DNA, 18 bp, Artificial Sequence
  Description of Artificial Sequence: Synthetic oligonucleotide
caacagcatgatgtcctg

SEQ ID NO: 4122 - DNA, 18 bp, Artificial Sequence
  Description of Artificial Sequence: Synthetic oligonucleotide
aggcgcaacagcatgatg

SEQ ID NO: 4123 - DNA, 18 bp, Artificial Sequence
  Description of Artificial Sequence: Synthetic oligonucleotide
gtgccaggcgcaacagca

SEQ ID NO: 4124 - DNA, 18 bp, Artificial Sequence
  Description of Artificial Sequence: Synthetic oligonucleotide
tgggcgtgccaggcgcaa

SEQ ID NO: 4125 - DNA, 18 bp, Artificial Sequence
  Description of Artificial Sequence: Synthetic oligonucleotide
ttggctgggcgtgccagg

SEQ ID NO: 4126 - DNA, 18 bp, Artificial Sequence
  Description of Artificial Sequence: Synthetic oligonucleotide
agagtttggctgggcgtg

SEQ ID NO: 4127 - DNA, 18 bp, Artificial Sequence
  Description of Artificial Sequence: Synthetic oligonucleotide
ttcagagagtttggctgg

SEQ ID NO: 4128 - DNA, 18 bp, Artificial Sequence
  Description of Artificial Sequence: Synthetic oligonucleotide
atgagttcagagagtttg

SEQ ID NO: 4129 - DNA, 18 bp, Artificial Sequence
  Description of Artificial Sequence: Synthetic oligonucleotide
gctggatgagttcagaga

SEQ ID NO: 4130 - DNA, 18 bp, Artificial Sequence
  Description of Artificial Sequence: Synthetic oligonucleotide
aaggggctggatgagttc

SEQ ID NO: 4131 - DNA, 18 bp, Artificial Sequence
  Description of Artificial Sequence: Synthetic oligonucleotide
aggggaaggggctggatg

SEQ ID NO: 4132 - DNA, 18 bp, Artificial Sequence
  Description of Artificial Sequence: Synthetic oligonucleotide
tctccaggggaaggggct

SEQ ID NO: 4133 - DNA, 18 bp, Artificial Sequence
  Description of Artificial Sequence: Synthetic oligonucleotide
gtccctctccaggggaag

SEQ ID NO: 4134 - DNA, 18 bp, Artificial Sequence
  Description of Artificial Sequence: Synthetic oligonucleotide
gagcagtccctctccagg

SEQ ID NO: 4135 - DNA, 18 bp, Artificial Sequence
  Description of Artificial Sequence: Synthetic oligonucleotide
tggctgagcagtccctct

SEQ ID NO: 4136 - DNA, 18 bp, Artificial Sequence
  Description of Artificial Sequence: Synthetic oligonucleotide
ggtgttggctgagcagtc

SEQ ID NO: 4137 - DNA, 18 bp, Artificial Sequence
  Description of Artificial Sequence: Synthetic oligonucleotide
ctggtggtgttggctgag

SEQ ID NO: 4138 - DNA, 18 bp, Artificial Sequence
  Description of Artificial Sequence: Synthetic oligonucleotide
ggcagctggtggtgttgg

SEQ ID NO: 4139 - DNA, 18 bp, Artificial Sequence
  Description of Artificial Sequence: Synthetic oligonucleotide
gatgtggcagctggtggt

SEQ ID NO: 4140 - DNA, 18 bp, Artificial Sequence
  Description of Artificial Sequence: Synthetic oligonucleotide
cccaggatgtggcagctg

SEQ ID NO: 4141 - DNA, 18 bp, Artificial Sequence
  Description of Artificial Sequence: Synthetic oligonucleotide
cccagcccaggatgtggc

SEQ ID NO: 4142 - DNA, 18 bp, Artificial Sequence
  Description of Artificial Sequence: Synthetic oligonucleotide
cttgccccagcccaggat

SEQ ID NO: 4143 - DNA, 18 bp, Artificial Sequence
  Description of Artificial Sequence: Synthetic oligonucleotide
gctgtcttgccccagccc

SEQ ID NO: 4144 - DNA, 18 bp, Artificial Sequence
  Description of Artificial Sequence: Synthetic oligonucleotide
catctgctgtcttgcccc

SEQ ID NO: 4145 - DNA, 18 bp, Artificial Sequence
  Description of Artificial Sequence: Synthetic oligonucleotide
gaccatctgctgtcttgc

SEQ ID NO: 4146 - DNA, 18 bp, Artificial Sequence
  Description of Artificial Sequence: Synthetic oligonucleotide
ctactgaccatctgctgt

SEQ ID NO: 4147 - DNA, 18 bp, Artificial Sequence
  Description of Artificial Sequence: Synthetic oligonucleotide
tcccactactgaccatct

SEQ ID NO: 4148 - DNA, 18 bp, Artificial Sequence
  Description of Artificial Sequence: Synthetic oligonucleotide
cagcctcccactactgac

SEQ ID NO: 4149 - DNA, 18 bp, Artificial Sequence
  Description of Artificial Sequence: Synthetic oligonucleotide
cccaccagcctcccacta

SEQ ID NO: 4150 - DNA, 18 bp, Artificial Sequence
  Description of Artificial Sequence: Synthetic oligonucleotide
tgctccccaccagcctcc

SEQ ID NO: 4151 - DNA, 18 bp, Artificial Sequence
  Description of Artificial Sequence: Synthetic oligonucleotide
tagcctgctccccaccag

SEQ ID NO: 4152 - DNA, 18 bp, Artificial Sequence
  Description of Artificial Sequence: Synthetic oligonucleotide
gccagtagcctgctcccc

SEQ ID NO: 4153 - DNA, 18 bp, Artificial Sequence
  Description of Artificial Sequence: Synthetic oligonucleotide
aagtagccagtagcctgc

SEQ ID NO: 4154 - DNA, 18 bp, Artificial Sequence
  Description of Artificial Sequence: Synthetic oligonucleotide
tccccaagtagccagtag

SEQ ID NO: 4155 - DNA, 18 bp, Artificial Sequence
  Description of Artificial Sequence: Synthetic oligonucleotide
acacttccccaagtagcc

SEQ ID NO: 4156 - DNA, 18 bp, Artificial Sequence
  Description of Artificial Sequence: Synthetic oligonucleotide
ttggcacacttccccaag

SEQ ID NO: 4157 - DNA, 18 bp, Artificial Sequence
  Description of Artificial Sequence: Synthetic oligonucleotide
atcctttggcacacttcc

SEQ ID NO: 4158 - DNA, 18 bp, Artificial Sequence
  Description of Artificial Sequence: Synthetic oligonucleotide
tccccatcctttggcaca

SEQ ID NO: 4159 - DNA, 18 bp, Artificial Sequence
  Description of Artificial Sequence: Synthetic oligonucleotide
cccactccccatcctttg

SEQ ID NO: 4160 - DNA, 18 bp, Artificial Sequence
  Description of Artificial Sequence: Synthetic oligonucleotide
attttcccactccccatc

SEQ ID NO: 4161 - DNA, 18 bp, Artificial Sequence
  Description of Artificial Sequence: Synthetic oligonucleotide
caccaattttcccactcc

SEQ ID NO: 4162 - DNA, 18 bp, Artificial Sequence
  Description of Artificial Sequence: Synthetic oligonucleotide
cccctcaccaattttccc

SEQ ID NO: 4163 - DNA, 18 bp, Artificial Sequence
  Description of Artificial Sequence: Synthetic oligonucleotide
catggcccctcaccaatt

SEQ ID NO: 4164 - DNA, 18 bp, Artificial Sequence
  Description of Artificial Sequence: Synthetic oligonucleotide
cttcccatggcccctcac

SEQ ID NO: 4165 - DNA, 18 bp, Artificial Sequence
  Description of Artificial Sequence: Synthetic oligonucleotide
cccatcttcccatggccc

SEQ ID NO: 4166 - DNA, 18 bp, Artificial Sequence
  Description of Artificial Sequence: Synthetic oligonucleotide
aatgtgacccaaggcagg

SEQ ID NO: 4167 - DNA, 18 bp, Artificial Sequence
  Description of Artificial Sequence: Synthetic oligonucleotide
ttgcaaatgtgacccaag

SEQ ID NO: 4168 - DNA, 18 bp, Artificial Sequence
  Description of Artificial Sequence: Synthetic oligonucleotide
ggcacttgcaaatgtgac

SEQ ID NO: 4169 - DNA, 18 bp, Artificial Sequence
  Description of Artificial Sequence: Synthetic oligonucleotide
gagttggcacttgcaaat

SEQ ID NO: 4170 - DNA, 18 bp, Artificial Sequence
  Description of Artificial Sequence: Synthetic oligonucleotide
aatgagagttggcacttg

SEQ ID NO: 4171 - DNA, 18 bp, Artificial Sequence
  Description of Artificial Sequence: Synthetic oligonucleotide
gtagaaatgagagttggc

SEQ ID NO: 4172 - DNA, 18 bp, Artificial Sequence
  Description of Artificial Sequence: Synthetic oligonucleotide
ataaggtagaaatgagag

SEQ ID NO: 4173 - DNA, 18 bp, Artificial Sequence
  Description of Artificial Sequence: Synthetic oligonucleotide
aaagaataaggtagaaat

SEQ ID NO: 4174 - DNA, 18 bp, Artificial Sequence
  Description of Artificial Sequence: Synthetic oligonucleotide
gaggaaaagaataaggta

SEQ ID NO: 4175 - DNA, 18 bp, Artificial Sequence
  Description of Artificial Sequence: Synthetic oligonucleotide
acagagaggaaaagaata

SEQ ID NO: 4176 - DNA, 18 bp, Artificial Sequence
  Description of Artificial Sequence: Synthetic oligonucleotide
ggggaacagagaggaaaa

SEQ ID NO: 4177 - DNA, 18 bp, Artificial Sequence
  Description of Artificial Sequence: Synthetic oligonucleotide
ggggaggggaacagagag

SEQ ID NO: 4178 - DNA, 18 bp, Artificial Sequence
  Description of Artificial Sequence: Synthetic oligonucleotide
ggggtggggaggggaaca

SEQ ID NO: 4179 - DNA, 18 bp, Artificial Sequence
  Description of Artificial Sequence: Synthetic oligonucleotide
gagagggggtggggaggg

SEQ ID NO: 4180 - DNA, 18 bp, Artificial Sequence
  Description of Artificial Sequence: Synthetic oligonucleotide
gggaagagagggggtggg

SEQ ID NO: 4181 - DNA, 18 bp, Artificial Sequence
  Description of Artificial Sequence: Synthetic oligonucleotide
aaagagggaagagagggg

SEQ ID NO: 4182 - DNA, 18 bp, Artificial Sequence
  Description of Artificial Sequence: Synthetic oligonucleotide
ctcagaaagagggaagag

SEQ ID NO: 4183 - DNA, 18 bp, Artificial Sequence
  Description of Artificial Sequence: Synthetic oligonucleotide
ctgatctcagaaagaggg

SEQ ID NO: 4184 - DNA, 18 bp, Artificial Sequence
  Description of Artificial Sequence: Synthetic oligonucleotide
caaatctgatctcagaaa

SEQ ID NO: 4185 - DNA, 18 bp, Artificial Sequence
  Description of Artificial Sequence: Synthetic oligonucleotide
actggcaaatctgatctc

SEQ ID NO: 4186 - DNA, 18 bp, Artificial Sequence
  Description of Artificial Sequence: Synthetic oligonucleotide
ccatcactggcaaatctg

SEQ ID NO: 4187 - DNA, 18 bp, Artificial Sequence
  Description of Artificial Sequence: Synthetic oligonucleotide
ttcccatcactggcaaat

SEQ ID NO: 4188 - DNA, 18 bp, Artificial Sequence
  Description of Artificial Sequence: Synthetic oligonucleotide
aactcttcccatcactgg

SEQ ID NO: 4189 - DNA, 18 bp, Artificial Sequence
  Description of Artificial Sequence: Synthetic oligonucleotide
tttctaactcttcccatc

SEQ ID NO: 4190 - DNA, 18 bp, Artificial Sequence
  Description of Artificial Sequence: Synthetic oligonucleotide
tcctgtttctaactcttc

SEQ ID NO: 4191 - DNA, 18 bp, Artificial Sequence
  Description of Artificial Sequence: Synthetic oligonucleotide
gggcatcctgtttctaac

SEQ ID NO: 4192 - DNA, 18 bp, Artificial Sequence
  Description of Artificial Sequence: Synthetic oligonucleotide
gggctgggcatcctgttt

SEQ ID NO: 4193 - DNA, 18 bp, Artificial Sequence
  Description of Artificial Sequence: Synthetic oligonucleotide
gagaagggctgggcatcc

SEQ ID NO: 4194 - DNA, 18 bp, Artificial Sequence
  Description of Artificial Sequence: Synthetic oligonucleotide
gaggcgagaagggctggg

SEQ ID NO: 4195 - DNA, 18 bp, Artificial Sequence
  Description of Artificial Sequence: Synthetic oligonucleotide
ctcttgaggcgagaaggg

SEQ ID NO: 4196 - DNA, 18 bp, Artificial Sequence
  Description of Artificial Sequence: Synthetic oligonucleotide
gtggcctcttgaggcgag

SEQ ID NO: 4197 - DNA, 18 bp, Artificial Sequence
  Description of Artificial Sequence: Synthetic oligonucleotide
tcccagtggcctcttgag

SEQ ID NO: 4198 - DNA, 18 bp, Artificial Sequence
  Description of Artificial Sequence: Synthetic oligonucleotide
ctgcatcccagtggcctc

SEQ ID NO: 4199 - DNA, 18 bp, Artificial Sequence
  Description of Artificial Sequence: Synthetic oligonucleotide
agtggctgcatcccagtg

SEQ ID NO: 4200 - DNA, 18 bp, Artificial Sequence
  Description of Artificial Sequence: Synthetic oligonucleotide
acaggagtggctgcatcc

SEQ ID NO: 4201 - DNA, 18 bp, Artificial Sequence
  Description of Artificial Sequence: Synthetic oligonucleotide
caagcacaggagtggctg

SEQ ID NO: 4202 - DNA, 18 bp, Artificial Sequence
  Description of Artificial Sequence: Synthetic oligonucleotide
ttccccaagcacaggagt

SEQ ID NO: 4203 - DNA, 18 bp, Artificial Sequence
  Description of Artificial Sequence: Synthetic oligonucleotide
ccaggttccccaagcaca

SEQ ID NO: 4204 - DNA, 18 bp, Artificial Sequence
  Description of Artificial Sequence: Synthetic oligonucleotide
atcctccaggttccccaa

SEQ ID NO: 4205 - DNA, 18 bp, Artificial Sequence
  Description of Artificial Sequence: Synthetic oligonucleotide
cccttgcatcctccaggt

SEQ ID NO: 4206 - DNA, 18 bp, Artificial Sequence
  Description of Artificial Sequence: Synthetic oligonucleotide
cctttcccttgcatcctc

SEQ ID NO: 4207 - DNA, 18 bp, Artificial Sequence
  Description of Artificial Sequence: Synthetic oligonucleotide
ccagtcctttcccttgca

SEQ ID NO: 4208 - DNA, 18 bp, Artificial Sequence
  Description of Artificial Sequence: Synthetic oligonucleotide
gagtgccagtcctttccc

SEQ ID NO: 4209 - DNA, 18 bp, Artificial Sequence
  Description of Artificial Sequence: Synthetic oligonucleotide
cagcagagtgccagtcct

SEQ ID NO: 4210 - DNA, 18 bp, Artificial Sequence
  Description of Artificial Sequence: Synthetic oligonucleotide
tgtgccagcagagtgcca

SEQ ID NO: 4211 - DNA, 18 bp, Artificial Sequence
  Description of Artificial Sequence: Synthetic oligonucleotide
ggtgctgtgccagcagag

SEQ ID NO: 4212 - DNA, 18 bp, Artificial Sequence
  Description of Artificial Sequence: Synthetic oligonucleotide
ggccgggtgctgtgccag

SEQ ID NO: 4213 - DNA, 18 bp, Artificial Sequence
  Description of Artificial Sequence: Synthetic oligonucleotide
ccccaggccgggtgctgt

SEQ ID NO: 4214 - DNA, 18 bp, Artificial Sequence
  Description of Artificial Sequence: Synthetic oligonucleotide
tcctgccccaggccgggt

SEQ ID NO: 4215 - DNA, 18 bp, Artificial Sequence
  Description of Artificial Sequence: Synthetic oligonucleotide
ccgtgtcctgccccaggc

SEQ ID NO: 4216 - DNA, 18 bp, Artificial Sequence
  Description of Artificial Sequence: Synthetic oligonucleotide
ttcgcccgtgtcctgccc

SEQ ID NO: 4217 - DNA, 18 bp, Artificial Sequence
  Description of Artificial Sequence: Synthetic oligonucleotide
ctggcttcgcccgtgtcc

SEQ ID NO: 4218 - DNA, 18 bp, Artificial Sequence
  Description of Artificial Sequence: Synthetic oligonucleotide
agaccctggcttcgcccg

SEQ ID NO: 4219 - DNA, 18 bp, Artificial Sequence
  Description of Artificial Sequence: Synthetic oligonucleotide
aggggagaccctggcttc

SEQ ID NO: 4220 - DNA, 18 bp, Artificial Sequence
  Description of Artificial Sequence: Synthetic oligonucleotide
cacaggggagaccctggc

SEQ ID NO: 4221 - DNA, 18 bp, Artificial Sequence
  Description of Artificial Sequence: Synthetic oligonucleotide
gtgctcacaggggagacc

SEQ ID NO: 4222 - DNA, 18 bp, Artificial Sequence
  Description of Artificial Sequence: Synthetic oligonucleotide
ctctagtgctcacagggg

SEQ ID NO: 4223 - DNA, 18 bp, Artificial Sequence
  Description of Artificial Sequence: Synthetic oligonucleotide
aaatcctctagtgctcac

SEQ ID NO: 4224 - DNA, 18 bp, Artificial Sequence
  Description of Artificial Sequence: Synthetic oligonucleotide
tcgggaaatcctctagtg

SEQ ID NO: 4225 - DNA, 18 bp, Artificial Sequence
  Description of Artificial Sequence: Synthetic oligonucleotide
aggggtcgggaaatcctc

SEQ ID NO: 4226 - DNA, 18 bp, Artificial Sequence
  Description of Artificial Sequence: Synthetic oligonucleotide
cgggcaggggtcgggaaa

SEQ ID NO: 4227 - DNA, 18 bp, Artificial Sequence
  Description of Artificial Sequence: Synthetic oligonucleotide
atacccgggcaggggtcg

SEQ ID NO: 4228 - DNA, 18 bp, Artificial Sequence
  Description of Artificial Sequence: Synthetic oligonucleotide
acacaatacccgggcagg

SEQ ID NO: 4229 - DNA, 18 bp, Artificial Sequence
  Description of Artificial Sequence: Synthetic oligonucleotide
caggcacacaatacccgg

SEQ ID NO: 4230 - DNA, 18 bp, Artificial Sequence
  Description of Artificial Sequence: Synthetic oligonucleotide
atgctcaggcacacaata

SEQ ID NO: 4231 - DNA, 18 bp, Artificial Sequence
  Description of Artificial Sequence: Synthetic oligonucleotide
gactcatgctcaggcaca

SEQ ID NO: 4232 - DNA, 18 bp, Artificial Sequence
  Description of Artificial Sequence: Synthetic oligonucleotide
caggtgactcatgctcag

SEQ ID NO: 4233 - DNA, 18 bp, Artificial Sequence
  Description of Artificial Sequence: Synthetic oligonucleotide
cccctcaggtgactcatg

SEQ ID NO: 4234 - DNA, 18 bp, Artificial Sequence
  Description of Artificial Sequence: Synthetic oligonucleotide
ctgggcccctcaggtgac

SEQ ID NO: 4235 - DNA, 18 bp, Artificial Sequence
  Description of Artificial Sequence: Synthetic oligonucleotide
ggaacctgggcccctcag

SEQ ID NO: 4236 - DNA, 18 bp, Artificial Sequence
  Description of Artificial Sequence: Synthetic oligonucleotide
gggtgggaacctgggccc

SEQ ID NO: 4237 - DNA, 18 bp, Artificial Sequence
  Description of Artificial Sequence: Synthetic oligonucleotide
gggaagggtgggaacctg

SEQ ID NO: 4238 - DNA, 18 bp, Artificial Sequence
  Description of Artificial Sequence: Synthetic oligonucleotide
gagctgggaagggtggga

SEQ ID NO: 4239 - DNA, 18 bp, Artificial Sequence
  Description of Artificial Sequence: Synthetic oligonucleotide
cagaggagctgggaaggg

SEQ ID NO: 4240 - DNA, 18 bp, Artificial Sequence
  Description of Artificial Sequence: Synthetic oligonucleotide
caggccagaggagctggg

SEQ ID NO: 4241 - DNA, 18 bp, Artificial Sequence
  Description of Artificial Sequence: Synthetic oligonucleotide
atccaactaccttcaagc

SEQ ID NO: 4242 - DNA, 18 bp, Artificial Sequence
  Description of Artificial Sequence: Synthetic oligonucleotide
tgttaatccaactacctt

SEQ ID NO: 4243 - DNA, 18 bp, Artificial Sequence
  Description of Artificial Sequence: Synthetic oligonucleotide
tcacctgttaatccaact

SEQ ID NO: 4244 - DNA, 18 bp, Artificial Sequence
  Description of Artificial Sequence: Synthetic oligonucleotide
tgacctcacctgttaatc

SEQ ID NO: 4245 - DNA, 18 bp, Artificial Sequence
  Description of Artificial Sequence: Synthetic oligonucleotide
caaagtgacctcacctgt

SEQ ID NO: 4246 - DNA, 18 bp, Artificial Sequence
  Description of Artificial Sequence: Synthetic oligonucleotide
cttttcaaagtgacctca

SEQ ID NO: 4247 - DNA, 18 bp, Artificial Sequence
  Description of Artificial Sequence: Synthetic oligonucleotide
tttttcttttcaaagtga

SEQ ID NO: 4248 - DNA, 18 bp, Artificial Sequence
  Description of Artificial Sequence: Synthetic oligonucleotide
gcagatttttcttttcaa

SEQ ID NO: 4249 - DNA, 18 bp, Artificial Sequence
  Description of Artificial Sequence: Synthetic oligonucleotide
tcaaggcagatttttctt

SEQ ID NO: 4250 - DNA, 18 bp, Artificial Sequence
  Description of Artificial Sequence: Synthetic oligonucleotide
gaggttcaaggcagattt

SEQ ID NO: 4251 - DNA, 18 bp, Artificial Sequence
  Description of Artificial Sequence: Synthetic oligonucleotide
tggctgaggttcaaggca

SEQ ID NO: 4252 - DNA, 18 bp, Artificial Sequence
  Description of Artificial Sequence: Synthetic oligonucleotide
gaatatggctgaggttca

SEQ ID NO: 4253 - DNA, 18 bp, Artificial Sequence
  Description of Artificial Sequence: Synthetic oligonucleotide
atgacgaatatggctgag

SEQ ID NO: 4254 - DNA, 18 bp, Artificial Sequence
  Description of Artificial Sequence: Synthetic oligonucleotide
atcagatgacgaatatgg

SEQ ID NO: 4255 - DNA, 18 bp, Artificial Sequence
  Description of Artificial Sequence: Synthetic oligonucleotide
atgacatcagatgacgaa

SEQ ID NO: 4256 - DNA, 18 bp, Artificial Sequence
  Description of Artificial Sequence: Synthetic oligonucleotide
agatcatgacatcagatg

SEQ ID NO: 4257 - DNA, 18 bp, Artificial Sequence
  Description of Artificial Sequence: Synthetic oligonucleotide
aaagcagatcatgacatc

SEQ ID NO: 4258 - DNA, 18 bp, Artificial Sequence
  Description of Artificial Sequence: Synthetic oligonucleotide
ctaggaaagcagatcatg

SEQ ID NO: 4259 - DNA, 18 bp, Artificial Sequence
  Description of Artificial Sequence: Synthetic oligonucleotide
ctttcctaggaaagcaga

SEQ ID NO: 4260 - DNA, 18 bp, Artificial Sequence
  Description of Artificial Sequence: Synthetic oligonucleotide
cttttctttcctaggaaa

SEQ ID NO: 4261 - DNA, 18 bp, Artificial Sequence
  Description of Artificial Sequence: Synthetic oligonucleotide
agtctcttttctttccta

SEQ ID NO: 4262 - DNA, 18 bp, Artificial Sequence
  Description of Artificial Sequence: Synthetic oligonucleotide
agaagtctcttttctttc

SEQ ID NO: 4263 - DNA, 18 bp, Artificial Sequence
  Description of Artificial Sequence: Synthetic oligonucleotide
agaaaagaagtctctttt

SEQ ID NO: 4264 - DNA, 18 bp, Artificial Sequence
  Description of Artificial Sequence: Synthetic oligonucleotide
tggctagaaaagaagtct

SEQ ID NO: 4265 - DNA, 18 bp, Artificial Sequence
  Description of Artificial Sequence: Synthetic oligonucleotide
catcttggctagaaaaga

SEQ ID NO: 4266 - DNA, 18 bp, Artificial Sequence
  Description of Artificial Sequence: Synthetic oligonucleotide
tctttcatcttggctaga

SEQ ID NO: 4267 - DNA, 18 bp, Artificial Sequence
  Description of Artificial Sequence: Synthetic oligonucleotide
gtgtatctttcatcttgg

SEQ ID NO: 4268 - DNA, 18 bp, Artificial Sequence
  Description of Artificial Sequence: Synthetic oligonucleotide
gtcttgtgtatctttcat

SEQ ID NO: 4269 - DNA, 18 bp, Artificial Sequence
  Description of Artificial Sequence: Synthetic oligonucleotide
tgaatgtcttgtgtatct

SEQ ID NO: 4270 - DNA, 18 bp, Artificial Sequence
  Description of Artificial Sequence: Synthetic oligonucleotide
cttcctgaatgtcttgtg

SEQ ID NO: 4271 - DNA, 18 bp, Artificial Sequence
  Description of Artificial Sequence: Synthetic oligonucleotide
cgaagcttcctgaatgtc

SEQ ID NO: 4272 - DNA, 18 bp, Artificial Sequence
  Description of Artificial Sequence: Synthetic oligonucleotide
gccttcgaagcttcctga

SEQ ID NO: 4273 - DNA, 18 bp, Artificial Sequence
  Description of Artificial Sequence: Synthetic oligonucleotide
gcattgccttcgaagctt

SEQ ID NO: 4274 - DNA, 18 bp, Artificial Sequence
  Description of Artificial Sequence: Synthetic oligonucleotide
tattctgcattgccttcg

SEQ ID NO: 4275 - DNA, 18 bp, Artificial Sequence
  Description of Artificial Sequence: Synthetic oligonucleotide
gactttattctgcattgc

SEQ ID NO: 4276 - DNA, 18 bp, Artificial Sequence
  Description of Artificial Sequence: Synthetic oligonucleotide
tcatggactttattctgc

SEQ ID NO: 4277 - DNA, 18 bp, Artificial Sequence
  Description of Artificial Sequence: Synthetic oligonucleotide
cctgctcatggactttat

SEQ ID NO: 4278 - DNA, 18 bp, Artificial Sequence
  Description of Artificial Sequence: Synthetic oligonucleotide
atcttcctgctcatggac

SEQ ID NO: 4279 - DNA, 18 bp, Artificial Sequence
  Description of Artificial Sequence: Synthetic oligonucleotide
ttcttatcttcctgctca

SEQ ID NO: 4280 - DNA, 18 bp, Artificial Sequence
  Description of Artificial Sequence: Synthetic oligonucleotide
tctcattcttatcttcct

SEQ ID NO: 4281 - DNA, 18 bp, Artificial Sequence
  Description of Artificial Sequence: Synthetic oligonucleotide
ttgtttctcattcttatc

SEQ ID NO: 4282 - DNA, 18 bp, Artificial Sequence
  Description of Artificial Sequence: Synthetic oligonucleotide
tgtttttgtttctcattc

SEQ ID NO: 4283 - DNA, 18 bp, Artificial Sequence
  Description of Artificial Sequence: Synthetic oligonucleotide
cactgtttttgtttctca

SEQ ID NO: 4284 - DNA, 18 bp, Artificial Sequence
  Description of Artificial Sequence: Synthetic oligonucleotide
atgctcactgtttttgtt

SEQ ID NO: 4285 - DNA, 18 bp, Artificial Sequence
  Description of Artificial Sequence: Synthetic oligonucleotide
tatgcatgctcactgttt

SEQ ID NO: 4286 - DNA, 18 bp, Artificial Sequence
  Description of Artificial Sequence: Synthetic oligonucleotide
gcatctatgcatgctcac

SEQ ID NO: 4287 - DNA, 18 bp, Artificial Sequence
  Description of Artificial Sequence: Synthetic oligonucleotide
ccatcgcatctatgcatg

SEQ ID NO: 4288 - DNA, 18 bp, Artificial Sequence
  Description of Artificial Sequence: Synthetic oligonucleotide
tgcttccatcgcatctat

SEQ ID NO: 4289 - DNA, 18 bp, Artificial Sequence
  Description of Artificial Sequence: Synthetic oligonucleotide
aactctgcttccatcgca

SEQ ID NO: 4290 - DNA, 18 bp, Artificial Sequence
  Description of Artificial Sequence: Synthetic oligonucleotide
gctctaactctgcttcca

SEQ ID NO: 4291 - DNA, 18 bp, Artificial Sequence
  Description of Artificial Sequence: Synthetic oligonucleotide
actcagctctaactctgc

SEQ ID NO: 4292 - DNA, 18 bp, Artificial Sequence
  Description of Artificial Sequence: Synthetic oligonucleotide
ctataactcagctctaac

SEQ ID NO: 4293 - DNA, 18 bp, Artificial Sequence
  Description of Artificial Sequence: Synthetic oligonucleotide
ctcctctataactcagct

SEQ ID NO: 4294 - DNA, 18 bp, Artificial Sequence
  Description of Artificial Sequence: Synthetic oligonucleotide
cattcctcctctataact

SEQ ID NO: 4295 - DNA, 18 bp, Artificial Sequence
  Description of Artificial Sequence: Synthetic oligonucleotide
gccatcattcctcctcta

SEQ ID NO: 4296 - DNA, 18 bp, Artificial Sequence
  Description of Artificial Sequence: Synthetic oligonucleotide
agcatgccatcattcctc

SEQ ID NO: 4297 - DNA, 18 bp, Artificial Sequence
  Description of Artificial Sequence: Synthetic oligonucleotide
ggtcaagcatgccatcat

SEQ ID NO: 4298 - DNA, 18 bp, Artificial Sequence
  Description of Artificial Sequence: Synthetic oligonucleotide
aaagaggtcaagcatgcc

SEQ ID NO: 4299 - DNA, 18 bp, Artificial Sequence
  Description of Artificial Sequence: Synthetic oligonucleotide
aaacaaaagaggtcaagc

SEQ ID NO: 4300 - DNA, 18 bp, Artificial Sequence
  Description of Artificial Sequence: Synthetic oligonucleotide
tattgaaacaaaagaggt

SEQ ID NO: 4301 - DNA, 18 bp, Artificial Sequence
  Description of Artificial Sequence: Synthetic oligonucleotide
aagagtattgaaacaaaa

SEQ ID NO: 4302 - DNA, 18 bp, Artificial Sequence
  Description of Artificial Sequence: Synthetic oligonucleotide
ttcataagagtattgaaa

SEQ ID NO: 4303 - DNA, 18 bp, Artificial Sequence
  Description of Artificial Sequence: Synthetic oligonucleotide
actggttcataagagtat

SEQ ID NO: 4304 - DNA, 18 bp, Artificial Sequence
  Description of Artificial Sequence: Synthetic oligonucleotide
aatggaatgtgaagagct

SEQ ID NO: 4305 - DNA, 18 bp, Artificial Sequence
  Description of Artificial Sequence: Synthetic oligonucleotide
gcaagaatggaatgtgaa

SEQ ID NO: 4306 - DNA, 18 bp, Artificial Sequence
  Description of Artificial Sequence: Synthetic oligonucleotide
aataagcaagaatggaat

SEQ ID NO: 4307 - DNA, 18 bp, Artificial Sequence
  Description of Artificial Sequence: Synthetic oligonucleotide
aacataataagcaagaat

SEQ ID NO: 4308 - DNA, 18 bp, Artificial Sequence
  Description of Artificial Sequence: Synthetic oligonucleotide
aaatgaacataataagca

SEQ ID NO: 4309 - DNA, 18 bp, Artificial Sequence
  Description of Artificial Sequence: Synthetic oligonucleotide
catctaaatgaacataat

SEQ ID NO: 4310 - DNA, 18 bp, Artificial Sequence
  Description of Artificial Sequence: Synthetic oligonucleotide
aaatgcatctaaatgaac

SEQ ID NO: 4311 - DNA, 18 bp, Artificial Sequence
  Description of Artificial Sequence: Synthetic oligonucleotide
ttgacaaatgcatctaaa

SEQ ID NO: 4312 - DNA, 18 bp, Artificial Sequence
  Description of Artificial Sequence: Synthetic oligonucleotide
ataaattgacaaatgcat

SEQ ID NO: 4313 - DNA, 18 bp, Artificial Sequence
  Description of Artificial Sequence: Synthetic oligonucleotide
caattataaattgacaaa

SEQ ID NO: 4314 - DNA, 18 bp, Artificial Sequence
  Description of Artificial Sequence: Synthetic oligonucleotide
aactgcaattataaattg

SEQ ID NO: 4315 - DNA, 18 bp, Artificial Sequence
  Description of Artificial Sequence: Synthetic oligonucleotide
caattaactgcaattata

SEQ ID NO: 4316 - DNA, 18 bp, Artificial Sequence
  Description of Artificial Sequence: Synthetic oligonucleotide
aatttcaattaactgcaa

SEQ ID NO: 4317 - DNA, 18 bp, Artificial Sequence
  Description of Artificial Sequence: Synthetic oligonucleotide
taaaaaatttcaattaac

SEQ ID NO: 4318 - DNA, 18 bp, Artificial Sequence
  Description of Artificial Sequence: Synthetic oligonucleotide
aaatttaaaaaatttcaa

SEQ ID NO: 4319 - DNA, 18 bp, Artificial Sequence
  Description of Artificial Sequence: Synthetic oligonucleotide
aaagaaaatttaaaaaat

SEQ ID NO: 4320 - DNA, 18 bp, Artificial Sequence
  Description of Artificial Sequence: Synthetic oligonucleotide
aaaaaaaagaaaatttaa

SEQ ID NO: 4321 - DNA, 18 bp, Artificial Sequence
  Description of Artificial Sequence: Synthetic oligonucleotide
ctttaaaaaaaaagaaaa

SEQ ID NO: 4322 - DNA, 18 bp, Artificial Sequence
  Description of Artificial Sequence: Synthetic oligonucleotide
ggctcctttaaaaaaaaa

SEQ ID NO: 4323 - DNA, 18 bp, Artificial Sequence
  Description of Artificial Sequence: Synthetic oligonucleotide
tagcgggctcctttaaaa

SEQ ID NO: 4324 - DNA, 18 bp, Artificial Sequence
  Description of Artificial Sequence: Synthetic oligonucleotide
tcatgtagcgggctcctt

SEQ ID NO: 4325 - DNA, 18 bp, Artificial Sequence
  Description of Artificial Sequence: Synthetic oligonucleotide
ttttcatgtagcgggctc

SEQ ID NO: 4326 - DNA, 18 bp, Artificial Sequence
  Description of Artificial Sequence: Synthetic oligonucleotide
attttttttcatgtagcg

SEQ ID NO: 4327 - DNA, 18 bp, Artificial Sequence
  Description of Artificial Sequence: Synthetic oligonucleotide
cttgcattttttttcatg

SEQ ID NO: 4328 - DNA, 18 bp, Artificial Sequence
  Description of Artificial Sequence: Synthetic oligonucleotide
tttgacttgcattttttt

SEQ ID NO: 4329 - DNA, 18 bp, Artificial Sequence
  Description of Artificial Sequence: Synthetic oligonucleotide
accactttgacttgcatt

SEQ ID NO: 4330 - DNA, 18 bp, Artificial Sequence
  Description of Artificial Sequence: Synthetic oligonucleotide
ttgtgaccactttgactt

SEQ ID NO: 4331 - DNA, 18 bp, Artificial Sequence
  Description of Artificial Sequence: Synthetic oligonucleotide
ctaggttgtgaccacttt

SEQ ID NO: 4332 - DNA, 18 bp, Artificial Sequence
  Description of Artificial Sequence: Synthetic oligonucleotide
tgcagacttctaggttgt

SEQ ID NO: 4333 - DNA, 18 bp, Artificial Sequence
  Description of Artificial Sequence: Synthetic oligonucleotide
gtctctgcagacttctag

SEQ ID NO: 4334 - DNA, 18 bp, Artificial Sequence
  Description of Artificial Sequence: Synthetic oligonucleotide
ttcctgtctctgcagact

SEQ ID NO: 4335 - DNA, 18 bp, Artificial Sequence
  Description of Artificial Sequence: Synthetic oligonucleotide
agttattcctgtctctgc

SEQ ID NO: 4336 - DNA, 18 bp, Artificial Sequence
  Description of Artificial Sequence: Synthetic oligonucleotide
ttgctagttattcctgtc

SEQ ID NO: 4337 - DNA, 18 bp, Artificial Sequence
  Description of Artificial Sequence: Synthetic oligonucleotide
tacttgctagttattcct

SEQ ID NO: 4338 - DNA, 18 bp, Artificial Sequence
  Description of Artificial Sequence: Synthetic oligonucleotide
gtatctacttgctagtta

SEQ ID NO: 4339 - DNA, 18 bp, Artificial Sequence
  Description of Artificial Sequence: Synthetic oligonucleotide
atatagtatctacttgct

SEQ ID NO: 4340 - DNA, 18 bp, Artificial Sequence
  Description of Artificial Sequence: Synthetic oligonucleotide
aaataatatagtatctac

SEQ ID NO: 4341 - DNA, 18 bp, Artificial Sequence
  Description of Artificial Sequence: Synthetic oligonucleotide
tagtaaaataatatagta

SEQ ID NO: 4342 - DNA, 18 bp, Artificial Sequence
  Description of Artificial Sequence: Synthetic oligonucleotide
aagcatagtaaaataata

SEQ ID NO: 4343 - DNA, 18 bp, Artificial Sequence
  Description of Artificial Sequence: Synthetic oligonucleotide
tacttaagcatagtaaaa

SEQ ID NO: 4344 - DNA, 18 bp, Artificial Sequence
  Description of Artificial Sequence: Synthetic oligonucleotide
ctatatacttaagcatag

SEQ ID NO: 4345 - DNA, 18 bp, Artificial Sequence
  Description of Artificial Sequence: Synthetic oligonucleotide
gaattctatatacttaag

SEQ ID NO: 4346 - DNA, 18 bp, Artificial Sequence
  Description of Artificial Sequence: Synthetic oligonucleotide
ctactgaattctatatac

SEQ ID NO: 4347 - DNA, 18 bp, Artificial Sequence
  Description of Artificial Sequence: Synthetic oligonucleotide
taacactactgaattcta

SEQ ID NO: 4348 - DNA, 18 bp, Artificial Sequence
  Description of Artificial Sequence: Synthetic oligonucleotide
tcccataacactactgaa

SEQ ID NO: 4349 - DNA, 18 bp, Artificial Sequence
  Description of Artificial Sequence: Synthetic oligonucleotide
aaaattcccataacacta

SEQ ID NO: 4350 - DNA, 18 bp, Artificial Sequence
  Description of Artificial Sequence: Synthetic oligonucleotide
agtgtaaaattcccataa

SEQ ID NO: 4351 - DNA, 18 bp, Artificial Sequence
  Description of Artificial Sequence: Synthetic oligonucleotide
attatagtgtaaaattcc

SEQ ID NO: 4352 - DNA, 18 bp, Artificial Sequence
  Description of Artificial Sequence: Synthetic oligonucleotide
tggtaattatagtgtaaa

SEQ ID NO: 4353 - DNA, 18 bp, Artificial Sequence
  Description of Artificial Sequence: Synthetic oligonucleotide
ctatttggtaattatagt

SEQ ID NO: 4354 - DNA, 18 bp, Artificial Sequence
  Description of Artificial Sequence: Synthetic oligonucleotide
caagactatttggtaatt

SEQ ID NO: 4355 - DNA, 18 bp, Artificial Sequence
  Description of Artificial Sequence: Synthetic oligonucleotide
aattacaagactatttgg

SEQ ID NO: 4356 - DNA, 18 bp, Artificial Sequence
  Description of Artificial Sequence: Synthetic oligonucleotide
tttaaaattacaagacta

SEQ ID NO: 4357 - DNA, 18 bp, Artificial Sequence
  Description of Artificial Sequence: Synthetic oligonucleotide
ataaatttaaaattacaa

SEQ ID NO: 4358 - DNA, 18 bp, Artificial Sequence
  Description of Artificial Sequence: Synthetic oligonucleotide
actactctaggcctgcct

SEQ ID NO: 4359 - DNA, 18 bp, Artificial Sequence
  Description of Artificial Sequence: Synthetic oligonucleotide
cctctactactctaggcc

SEQ ID NO: 4360 - DNA, 18 bp, Artificial Sequence
  Description of Artificial Sequence: Synthetic oligonucleotide
tctgtcctctactactct

SEQ ID NO: 4361 - DNA, 18 bp, Artificial Sequence
  Description of Artificial Sequence: Synthetic oligonucleotide
tgctttctgtcctctact

SEQ ID NO: 4362 - DNA, 18 bp, Artificial Sequence
  Description of Artificial Sequence: Synthetic oligonucleotide
atccctgctttctgtcct

SEQ ID NO: 4363 - DNA, 18 bp, Artificial Sequence
  Description of Artificial Sequence: Synthetic oligonucleotide
cctccatccctgctttct

SEQ ID NO: 4364 - DNA, 18 bp, Artificial Sequence
  Description of Artificial Sequence: Synthetic oligonucleotide
atagtcctccatccctgc

SEQ ID NO: 4365 - DNA, 18 bp, Artificial Sequence
  Description of Artificial Sequence: Synthetic oligonucleotide
tccccatagtcctccatc

SEQ ID NO: 4366 - DNA, 18 bp, Artificial Sequence
  Description of Artificial Sequence: Synthetic oligonucleotide
aggtttccccatagtcct

SEQ ID NO: 4367 - DNA, 18 bp, Artificial Sequence
  Description of Artificial Sequence: Synthetic oligonucleotide
ctttcaggtttccccata

SEQ ID NO: 4368 - DNA, 18 bp, Artificial Sequence
  Description of Artificial Sequence: Synthetic oligonucleotide
accggctttcaggtttcc

SEQ ID NO: 4369 - DNA, 18 bp, Artificial Sequence
  Description of Artificial Sequence: Synthetic oligonucleotide
agtacaccggctttcagg

SEQ ID NO: 4370 - DNA, 18 bp, Artificial Sequence
  Description of Artificial Sequence: Synthetic oligonucleotide
tttcaagtacaccggctt

SEQ ID NO: 4371 - DNA, 18 bp, Artificial Sequence
  Description of Artificial Sequence: Synthetic oligonucleotide
cagtgtttcaagtacacc

SEQ ID NO: 4372 - DNA, 18 bp, Artificial Sequence
  Description of Artificial Sequence: Synthetic oligonucleotide
aagaccagtgtttcaagt

SEQ ID NO: 4373 - DNA, 18 bp, Artificial Sequence
  Description of Artificial Sequence: Synthetic oligonucleotide
agagaaagaccagtgttt

SEQ ID NO: 4374 - DNA, 18 bp, Artificial Sequence
  Description of Artificial Sequence: Synthetic oligonucleotide
aggacagagaaagaccag

SEQ ID NO: 4375 - DNA, 18 bp, Artificial Sequence
  Description of Artificial Sequence: Synthetic oligonucleotide
ctgggaggacagagaaag

SEQ ID NO: 4376 - DNA, 18 bp, Artificial Sequence
  Description of Artificial Sequence: Synthetic oligonucleotide
tcagcctgggaggacaga

SEQ ID NO: 4377 - DNA, 18 bp, Artificial Sequence
  Description of Artificial Sequence: Synthetic oligonucleotide
tgggttcagcctgggagg

SEQ ID NO: 4378 - DNA, 18 bp, Artificial Sequence
  Description of Artificial Sequence: Synthetic oligonucleotide
gagtctgggttcagcctg

SEQ ID NO: 4379 - DNA, 18 bp, Artificial Sequence
  Description of Artificial Sequence: Synthetic oligonucleotide
tgggagtctgggttcagc

SEQ ID NO: 4380 - DNA, 18 bp, Artificial Sequence
  Description of Artificial Sequence: Synthetic oligonucleotide
tgccctgggagtctgggt

SEQ ID NO: 4381 - DNA, 18 bp, Artificial Sequence
  Description of Artificial Sequence: Synthetic oligonucleotide
gcaggtgccctgggagtc

SEQ ID NO: 4382 - DNA, 18 bp, Artificial Sequence
  Description of Artificial Sequence: Synthetic oligonucleotide
tgcaagcaggtgccctgg

SEQ ID NO: 4383 - DNA, 18 bp, Artificial Sequence
  Description of Artificial Sequence: Synthetic oligonucleotide
aaaggtgcaagcaggtgc

SEQ ID NO: 4384 - DNA, 18 bp, Artificial Sequence
  Description of Artificial Sequence: Synthetic oligonucleotide
cattcaaaggtgcaagca

SEQ ID NO: 4385 - DNA, 18 bp, Artificial Sequence
  Description of Artificial Sequence: Synthetic oligonucleotide
gccatcattcaaaggtgc

SEQ ID NO: 4386 - DNA, 18 bp, Artificial Sequence
  Description of Artificial Sequence: Synthetic oligonucleotide
ttcaggccatcattcaaa

SEQ ID NO: 4387 - DNA, 18 bp, Artificial Sequence
  Description of Artificial Sequence: Synthetic oligonucleotide
catagttcaggccatcat

SEQ ID NO: 4388 - DNA, 18 bp, Artificial Sequence
  Description of Artificial Sequence: Synthetic oligonucleotide
ttgttcatagttcaggcc

SEQ ID NO: 4389 - DNA, 18 bp, Artificial Sequence
  Description of Artificial Sequence: Synthetic oligonucleotide
cccgtttgttcatagttc

SEQ ID NO: 4390 - DNA, 18 bp, Artificial Sequence
  Description of Artificial Sequence: Synthetic oligonucleotide
atagtcccgtttgttcat

SEQ ID NO: 4391 - DNA, 18 bp, Artificial Sequence
  Description of Artificial Sequence: Synthetic oligonucleotide
ttcatatagtcccgtttg

SEQ ID NO: 4392 - DNA, 18 bp, Artificial Sequence
  Description of Artificial Sequence: Synthetic oligonucleotide
accgaagtgttcatatag

SEQ ID NO: 4393 - DNA, 18 bp, Artificial Sequence
  Description of Artificial Sequence: Synthetic oligonucleotide
cctgtaccgaagtgttca

SEQ ID NO: 4394 - DNA, 18 bp, Artificial Sequence
  Description of Artificial Sequence: Synthetic oligonucleotide
gggctcctgtaccgaagt

SEQ ID NO: 4395 - DNA, 18 bp, Artificial Sequence
  Description of Artificial Sequence: Synthetic oligonucleotide
agagggggctcctgtacc

SEQ ID NO: 4396 - DNA, 18 bp, Artificial Sequence
  Description of Artificial Sequence: Synthetic oligonucleotide
agtcaagagggggctcct

SEQ ID NO: 4397 - DNA, 18 bp, Artificial Sequence
  Description of Artificial Sequence: Synthetic oligonucleotide
ggagtagtcaagaggggg

SEQ ID NO: 4398 - DNA, 18 bp, Artificial Sequence
  Description of Artificial Sequence: Synthetic oligonucleotide
ctgaaggagtagtcaaga

SEQ ID NO: 4399 - DNA, 18 bp, Artificial Sequence
  Description of Artificial Sequence: Synthetic oligonucleotide
tgcttctgaaggagtagt

SEQ ID NO: 4400 - DNA, 18 bp, Artificial Sequence
  Description of Artificial Sequence: Synthetic oligonucleotide
gtggatgcttctgaagga

SEQ ID NO: 4401 - DNA, 18 bp, Artificial Sequence
  Description of Artificial Sequence: Synthetic oligonucleotide
atgacgtggatgcttctg

SEQ ID NO: 4402 - DNA, 18 bp, Artificial Sequence
  Description of Artificial Sequence: Synthetic oligonucleotide
cttgaatgacgtggatgc

SEQ ID NO: 4403 - DNA, 18 bp, Artificial Sequence
  Description of Artificial Sequence: Synthetic oligonucleotide
gaccttgaatgacgtgga

SEQ ID NO: 4404 - DNA, 18 bp, Artificial Sequence
  Description of Artificial Sequence: Synthetic oligonucleotide
gggctgaccttgaatgac

SEQ ID NO: 4405 - DNA, 18 bp, Artificial Sequence
  Description of Artificial Sequence: Synthetic oligonucleotide
tctgggggctgaccttga

SEQ ID NO: 4406 - DNA, 18 bp, Artificial Sequence
  Description of Artificial Sequence: Synthetic oligonucleotide
tgtgctctgggggctgac

SEQ ID NO: 4407 - DNA, 18 bp, Artificial Sequence
  Description of Artificial Sequence: Synthetic oligonucleotide
agtactgtgctctggggg

SEQ ID NO: 4408 - DNA, 18 bp, Artificial Sequence
  Description of Artificial Sequence: Synthetic oligonucleotide
agtggagtactgtgctct

SEQ ID NO: 4409 - DNA, 18 bp, Artificial Sequence
  Description of Artificial Sequence: Synthetic oligonucleotide
tagtgagtggagtactgt

SEQ ID NO: 4410 - DNA, 18 bp, Artificial Sequence
  Description of Artificial Sequence: Synthetic oligonucleotide
tgccttagtgagtggagt

SEQ ID NO: 4411 - DNA, 18 bp, Artificial Sequence
  Description of Artificial Sequence: Synthetic oligonucleotide
cctgctgccttagtgagt

SEQ ID NO: 4412 - DNA, 18 bp, Artificial Sequence
  Description of Artificial Sequence: Synthetic oligonucleotide
ctgggcctgctgccttag

SEQ ID NO: 4413 - DNA, 18 bp, Artificial Sequence
  Description of Artificial Sequence: Synthetic oligonucleotide
ccacactgggcctgctgc

SEQ ID NO: 4414 - DNA, 18 bp, Artificial Sequence
  Description of Artificial Sequence: Synthetic oligonucleotide
agggaccacactgggcct

SEQ ID NO: 4415 - DNA, 18 bp, Artificial Sequence
  Description of Artificial Sequence: Synthetic oligonucleotide
ttcctagggaccacactg

SEQ ID NO: 4416 - DNA, 18 bp, Artificial Sequence
  Description of Artificial Sequence: Synthetic oligonucleotide
gtttcttcctagggacca

SEQ ID NO: 4417 - DNA, 18 bp, Artificial Sequence
  Description of Artificial Sequence: Synthetic oligonucleotide
ttatggtttcttcctagg

SEQ ID NO: 4418 - DNA, 18 bp, Artificial Sequence
  Description of Artificial Sequence: Synthetic oligonucleotide
gtagattatggtttcttc

SEQ ID NO: 4419 - DNA, 18 bp, Artificial Sequence
  Description of Artificial Sequence: Synthetic oligonucleotide
tttaagtagattatggtt

SEQ ID NO: 4420 - DNA, 18 bp, Artificial Sequence
  Description of Artificial Sequence: Synthetic oligonucleotide
aggcttttaagtagatta

SEQ ID NO: 4421 - DNA, 18 bp, Artificial Sequence
  Description of Artificial Sequence: Synthetic oligonucleotide
tctttaggcttttaagta

SEQ ID NO: 4422 - DNA, 18 bp, Artificial Sequence
  Description of Artificial Sequence: Synthetic oligonucleotide
gaatctctttaggctttt

SEQ ID NO: 4423 - DNA, 18 bp, Artificial Sequence
  Description of Artificial Sequence: Synthetic oligonucleotide
gggaagaatctctttagg

SEQ ID NO: 4424 - DNA, 18 bp, Artificial Sequence
  Description of Artificial Sequence: Synthetic oligonucleotide
tcgagactgctagatctc

SEQ ID NO: 4425 - DNA, 18 bp, Artificial Sequence
  Description of Artificial Sequence: Synthetic oligonucleotide
tgtggtcgagactgctag

SEQ ID NO: 4426 - DNA, 18 bp, Artificial Sequence
  Description of Artificial Sequence: Synthetic oligonucleotide
tatcctgtggtcgagact

SEQ ID NO: 4427 - DNA, 18 bp, Artificial Sequence
  Description of Artificial Sequence: Synthetic oligonucleotide
taagatatcctgtggtcg

SEQ ID NO: 4428 - DNA, 18 bp, Artificial Sequence
  Description of Artificial Sequence: Synthetic oligonucleotide
atgcataagatatcctgt

SEQ ID NO: 4429 - DNA, 18 bp, Artificial Sequence
  Description of Artificial Sequence: Synthetic oligonucleotide
tgaaaatgcataagatat

SEQ ID NO: 4430 - DNA, 18 bp, Artificial Sequence
  Description of Artificial Sequence: Synthetic oligonucleotide
aacaatgaaaatgcataa

SEQ ID NO: 4431 - DNA, 18 bp, Artificial Sequence
  Description of Artificial Sequence: Synthetic oligonucleotide
gagccaacaatgaaaatg

SEQ ID NO: 4432 - DNA, 18 bp, Artificial Sequence
  Description of Artificial Sequence: Synthetic oligonucleotide
tcaaagagccaacaatga

SEQ ID NO: 4433 - DNA, 18 bp, Artificial Sequence
  Description of Artificial Sequence: Synthetic oligonucleotide
tctgatcaaagagccaac

SEQ ID NO: 4434 - DNA, 18 bp, Artificial Sequence
  Description of Artificial Sequence: Synthetic oligonucleotide
gaagatctgatcaaagag

SEQ ID NO: 4435 - DNA, 18 bp, Artificial Sequence
  Description of Artificial Sequence: Synthetic oligonucleotide
gttttgaagatctgatca

SEQ ID NO: 4436 - DNA, 18 bp, Artificial Sequence
  Description of Artificial Sequence: Synthetic oligonucleotide
tgttagttttgaagatct

SEQ ID NO: 4437 - DNA, 18 bp, Artificial Sequence
  Description of Artificial Sequence: Synthetic oligonucleotide
ttaattgttagttttgaa

SEQ ID NO: 4438 - DNA, 18 bp, Artificial Sequence
  Description of Artificial Sequence: Synthetic oligonucleotide
gtaatttaattgttagtt

SEQ ID NO: 4439 - DNA, 18 bp, Artificial Sequence
  Description of Artificial Sequence: Synthetic oligonucleotide
aagaggtaatttaattgt

SEQ ID NO: 4440 - DNA, 18 bp, Artificial Sequence
  Description of Artificial Sequence: Synthetic oligonucleotide
aaagaaagaggtaattta

SEQ ID NO: 4441 - DNA, 18 bp, Artificial Sequence
  Description of Artificial Sequence: Synthetic oligonucleotide
ctgaaaaagaaagaggta

SEQ ID NO: 4442 - DNA, 18 bp, Artificial Sequence
  Description of Artificial Sequence: Synthetic oligonucleotide
tctgcctgaaaaagaaag

SEQ ID NO: 4443 - DNA, 18 bp, Artificial Sequence
  Description of Artificial Sequence: Synthetic oligonucleotide
ccaactctgcctgaaaaa

SEQ ID NO: 4444 - DNA, 18 bp, Artificial Sequence
  Description of Artificial Sequence: Synthetic oligonucleotide
taggcccaactctgcctg

SEQ ID NO: 4445 - DNA, 18 bp, Artificial Sequence
  Description of Artificial Sequence: Synthetic oligonucleotide
atttaggcccaactctgc

SEQ ID NO: 4446 - DNA, 18 bp, Artificial Sequence
  Description of Artificial Sequence: Synthetic oligonucleotide
tgctcatttaggcccaac

SEQ ID NO: 4447 - DNA, 18 bp, Artificial Sequence
  Description of Artificial Sequence: Synthetic oligonucleotide
gatggtgctcatttaggc

SEQ ID NO: 4448 - DNA, 18 bp, Artificial Sequence
  Description of Artificial Sequence: Synthetic oligonucleotide
attttgatggtgctcatt

SEQ ID NO: 4449 - DNA, 18 bp, Artificial Sequence
  Description of Artificial Sequence: Synthetic oligonucleotide
acttcattttgatggtgc

SEQ ID NO: 4450 - DNA, 18 bp, Artificial Sequence
  Description of Artificial Sequence: Synthetic oligonucleotide
taataacttcattttgat

SEQ ID NO: 4451 - DNA, 18 bp, Artificial Sequence
  Description of Artificial Sequence: Synthetic oligonucleotide
ataattaataacttcatt

SEQ ID NO: 4452 - DNA, 18 bp, Artificial Sequence
  Description of Artificial Sequence: Synthetic oligonucleotide
cgcatataattaataact

SEQ ID NO: 4453 - DNA, 18 bp, Artificial Sequence
  Description of Artificial Sequence: Synthetic oligonucleotide
caaaacgcatataattaa

SEQ ID NO: 4454 - DNA, 18 bp, Artificial Sequence
  Description of Artificial Sequence: Synthetic oligonucleotide
acgagcaaaacgcatata

SEQ ID NO: 4455 - DNA, 18 bp, Artificial Sequence
  Description of Artificial Sequence: Synthetic oligonucleotide
tttgaacgagcaaaacgc

SEQ ID NO: 4456 - DNA, 18 bp, Artificial Sequence
  Description of Artificial Sequence: Synthetic oligonucleotide
ctctctttgaacgagcaa

SEQ ID NO: 4457 - DNA, 18 bp, Artificial Sequence
  Description of Artificial Sequence: Synthetic oligonucleotide
ctcaagcctctctttgaa

SEQ ID NO: 4458 - DNA, 18 bp, Artificial Sequence
  Description of Artificial Sequence: Synthetic oligonucleotide
tgagtctcaagcctctct

SEQ ID NO: 4459 - DNA, 18 bp, Artificial Sequence
  Description of Artificial Sequence: Synthetic oligonucleotide
agttttgagtctcaagcc

SEQ ID NO: 4460 - DNA, 18 bp, Artificial Sequence
  Description of Artificial Sequence: Synthetic oligonucleotide
tctacagttttgagtctc

SEQ ID NO: 4461 - DNA, 18 bp, Artificial Sequence
  Description of Artificial Sequence: Synthetic oligonucleotide
aggaatctacagttttga

SEQ ID NO: 4462 - DNA, 18 bp, Artificial Sequence
  Description of Artificial Sequence: Synthetic oligonucleotide
gaagcaggaatctacagt

SEQ ID NO: 4463 - DNA, 18 bp, Artificial Sequence
  Description of Artificial Sequence: Synthetic oligonucleotide
tcttggaagcaggaatct

SEQ ID NO: 4464 - DNA, 18 bp, Artificial Sequence
  Description of Artificial Sequence: Synthetic oligonucleotide
tgaggtcttggaagcagg

SEQ ID NO: 4465 - DNA, 18 bp, Artificial Sequence
  Description of Artificial Sequence: Synthetic oligonucleotide
ctccttgaggtcttggaa

SEQ ID NO: 4466 - DNA, 18 bp, Artificial Sequence
  Description of Artificial Sequence: Synthetic oligonucleotide
ctgctctccttgaggtct

SEQ ID NO: 4467 - DNA, 18 bp, Artificial Sequence
  Description of Artificial Sequence: Synthetic oligonucleotide
tacctgctctccttgagg

SEQ ID NO: 4468 - DNA, 18 bp, Artificial Sequence
  Description of Artificial Sequence: Synthetic oligonucleotide
tctgatacctgctctcct

SEQ ID NO: 4469 - DNA, 18 bp, Artificial Sequence
  Description of Artificial Sequence: Synthetic oligonucleotide
cctcctctgatacctgct

SEQ ID NO: 4470 - DNA, 18 bp, Artificial Sequence
  Description of Artificial Sequence: Synthetic oligonucleotide
agagtcctcctctgatac

SEQ ID NO: 4471 - DNA, 18 bp, Artificial Sequence
  Description of Artificial Sequence: Synthetic oligonucleotide
tgcttagagtcctcctct

SEQ ID NO: 4472 - DNA, 18 bp, Artificial Sequence
  Description of Artificial Sequence: Synthetic oligonucleotide
tggtttgcttagagtcct

SEQ ID NO: 4473 - DNA, 18 bp, Artificial Sequence
  Description of Artificial Sequence: Synthetic oligonucleotide
ctatttggtttgcttaga

SEQ ID NO: 4474 - DNA, 18 bp, Artificial Sequence
  Description of Artificial Sequence: Synthetic oligonucleotide
tgttcctatttggtttgc

SEQ ID NO: 4475 - DNA, 18 bp, Artificial Sequence
  Description of Artificial Sequence: Synthetic oligonucleotide
atccatgttcctatttgg

SEQ ID NO: 4476 - DNA, 18 bp, Artificial Sequence
  Description of Artificial Sequence: Synthetic oligonucleotide
aaagaatccatgttccta

SEQ ID NO: 4477 - DNA, 18 bp, Artificial Sequence
  Description of Artificial Sequence: Synthetic oligonucleotide
accagaaagaatccatgt

SEQ ID NO: 4478 - DNA, 18 bp, Artificial Sequence
  Description of Artificial Sequence: Synthetic oligonucleotide
tggctaccagaaagaatc

SEQ ID NO: 4479 - DNA, 18 bp, Artificial Sequence
  Description of Artificial Sequence: Synthetic oligonucleotide
catactggctaccagaaa

SEQ ID NO: 4480 - DNA, 18 bp, Artificial Sequence
  Description of Artificial Sequence: Synthetic oligonucleotide
acccccatactggctacc

SEQ ID NO: 4481 - DNA, 18 bp, Artificial Sequence
  Description of Artificial Sequence: Synthetic oligonucleotide
atggcacccccatactgg

SEQ ID NO: 4482 - DNA, 18 bp, Artificial Sequence
  Description of Artificial Sequence: Synthetic oligonucleotide
ctgctatggcacccccat

SEQ ID NO: 4483 - DNA, 18 bp, Artificial Sequence
  Description of Artificial Sequence: Synthetic oligonucleotide
ggcctctgctatggcacc

SEQ ID NO: 4484 - DNA, 18 bp, Artificial Sequence
  Description of Artificial Sequence: Synthetic oligonucleotide
tgtctggcctctgctatg

SEQ ID NO: 4485 - DNA, 18 bp, Artificial Sequence
  Description of Artificial Sequence: Synthetic oligonucleotide
gaaattgtctggcctctg

SEQ ID NO: 4486 - DNA, 18 bp, Artificial Sequence
  Description of Artificial Sequence: Synthetic oligonucleotide
tcccagaaattgtctggc

SEQ ID NO: 4487 - DNA, 18 bp, Artificial Sequence
  Description of Artificial Sequence: Synthetic oligonucleotide
atgaatcccagaaattgt

SEQ ID NO: 4488 - DNA, 18 bp, Artificial Sequence
  Description of Artificial Sequence: Synthetic oligonucleotide
tgccaagttattatcatt

SEQ ID NO: 4489 - DNA, 18 bp, Artificial Sequence
  Description of Artificial Sequence: Synthetic oligonucleotide
agttctgccaagttatta

SEQ ID NO: 4490 - DNA, 18 bp, Artificial Sequence
  Description of Artificial Sequence: Synthetic oligonucleotide
tgctaagttctgccaagt

SEQ ID NO: 4491 - DNA, 18 bp, Artificial Sequence
  Description of Artificial Sequence: Synthetic oligonucleotide
ggctttgctaagttctgc

SEQ ID NO: 4492 - DNA, 18 bp, Artificial Sequence
  Description of Artificial Sequence: Synthetic oligonucleotide
agacaggctttgctaagt

SEQ ID NO: 4493 - DNA, 18 bp, Artificial Sequence
  Description of Artificial Sequence: Synthetic oligonucleotide
tgaacagacaggctttgc

SEQ ID NO: 4494 - DNA, 18 bp, Artificial Sequence
  Description of Artificial Sequence: Synthetic oligonucleotide
gaacttgaacagacaggc

SEQ ID NO: 4495 - DNA, 18 bp, Artificial Sequence
  Description of Artificial Sequence: Synthetic oligonucleotide
gagaggaacttgaacaga

SEQ ID NO: 4496 - DNA, 18 bp, Artificial Sequence
  Description of Artificial Sequence: Synthetic oligonucleotide
tcacagagaggaacttga

SEQ ID NO: 4497 - DNA, 18 bp, Artificial Sequence
  Description of Artificial Sequence: Synthetic oligonucleotide
cagggtcacagagaggaa

SEQ ID NO: 4498 - DNA, 18 bp, Artificial Sequence
  Description of Artificial Sequence: Synthetic oligonucleotide
agacacagggtcacagag

SEQ ID NO: 4499 - DNA, 18 bp, Artificial Sequence
  Description of Artificial Sequence: Synthetic oligonucleotide
tctgaagacacagggtca

SEQ ID NO: 4500 - DNA, 18 bp, Artificial Sequence
  Description of Artificial Sequence: Synthetic oligonucleotide
ttatctctgaagacacag

SEQ ID NO: 4501 - DNA, 18 bp, Artificial Sequence
  Description of Artificial Sequence: Synthetic oligonucleotide
catccttatctctgaaga

SEQ ID NO: 4502 - DNA, 18 bp, Artificial Sequence
  Description of Artificial Sequence: Synthetic oligonucleotide
aagaacatccttatctct

SEQ ID NO: 4503 - DNA, 18 bp, Artificial Sequence
  Description of Artificial Sequence: Synthetic oligonucleotide
aggaaaagaacatcctta

SEQ ID NO: 4504 - DNA, 18 bp, Artificial Sequence
  Description of Artificial Sequence: Synthetic oligonucleotide
tccagaggaaaagaacat

SEQ ID NO: 4505 - DNA, 18 bp, Artificial Sequence
  Description of Artificial Sequence: Synthetic oligonucleotide
ctacatccagaggaaaag

SEQ ID NO: 4506 - DNA, 18 bp, Artificial Sequence
  Description of Artificial Sequence: Synthetic oligonucleotide
cctccctacatccagagg

SEQ ID NO: 4507 - DNA, 18 bp, Artificial Sequence
  Description of Artificial Sequence: Synthetic oligonucleotide
ggtaccctccctacatcc

SEQ ID NO: 4508 - DNA, 18 bp, Artificial Sequence
  Description of Artificial Sequence: Synthetic oligonucleotide
caagaggtaccctcccta

SEQ ID NO: 4509 - DNA, 18 bp, Artificial Sequence
  Description of Artificial Sequence: Synthetic oligonucleotide
attcaagaggtaccctcc

SEQ ID NO: 4510 - DNA, 18 bp, Artificial Sequence
  Description of Artificial Sequence: Synthetic oligonucleotide
ccctcattcaagaggtac

SEQ ID NO: 4511 - DNA, 18 bp, Artificial Sequence
  Description of Artificial Sequence: Synthetic oligonucleotide
taggaccctcattcaaga

SEQ ID NO: 4512 - DNA, 18 bp, Artificial Sequence
  Description of Artificial Sequence: Synthetic oligonucleotide
ggtcataggaccctcatt

SEQ ID NO: 4513 - DNA, 18 bp, Artificial Sequence
  Description of Artificial Sequence: Synthetic oligonucleotide
aagcaggtcataggaccc

SEQ ID NO: 4514 - DNA, 18 bp, Artificial Sequence
  Description of Artificial Sequence: Synthetic oligonucleotide
ccctgaagcaggtcatag

SEQ ID NO: 4515 - DNA, 18 bp, Artificial Sequence
  Description of Artificial Sequence: Synthetic oligonucleotide
ccttcccctgaagcaggt

SEQ ID NO: 4516 - DNA, 18 bp, Artificial Sequence
  Description of Artificial Sequence: Synthetic oligonucleotide
tctaaccttcccctgaag

SEQ ID NO: 4517 - DNA, 18 bp, Artificial Sequence
  Description of Artificial Sequence: Synthetic oligonucleotide
aattttctaaccttcccc

SEQ ID NO: 4518 - DNA, 18 bp, Artificial Sequence
  Description of Artificial Sequence: Synthetic oligonucleotide
ggaagaattttctaacct

SEQ ID NO: 4519 - DNA, 18 bp, Artificial Sequence
  Description of Artificial Sequence: Synthetic oligonucleotide
aatcccaggaagaatttt

SEQ ID NO: 4520 - DNA, 18 bp, Artificial Sequence
  Description of Artificial Sequence: Synthetic oligonucleotide
ccataaatcccaggaaga

SEQ ID NO: 4521 - DNA, 18 bp, Artificial Sequence
  Description of Artificial Sequence: Synthetic oligonucleotide
ggcggccataaatcccag

SEQ ID NO: 4522 - DNA, 18 bp, Artificial Sequence
  Description of Artificial Sequence: Synthetic oligonucleotide
cggaaggcggccataaat

SEQ ID NO: 4523 - DNA, 18 bp, Artificial Sequence
  Description of Artificial Sequence: Synthetic oligonucleotide
ctccccggaaggcggcca

SEQ ID NO: 4524 - DNA, 18 bp, Artificial Sequence
  Description of Artificial Sequence: Synthetic oligonucleotide
cccatctccccggaaggc

SEQ ID NO: 4525 - DNA, 18 bp, Artificial Sequence
  Description of Artificial Sequence: Synthetic oligonucleotide
tctcgcccatctccccgg

SEQ ID NO: 4526 - DNA, 18 bp, Artificial Sequence
  Description of Artificial Sequence: Synthetic oligonucleotide
cttcttctcgcccatctc

SEQ ID NO: 4527 - DNA, 18 bp, Artificial Sequence
  Description of Artificial Sequence: Synthetic oligonucleotide
taccttcttctcgcccat

SEQ ID NO: 4528 - DNA, 18 bp, Artificial Sequence
  Description of Artificial Sequence: Synthetic oligonucleotide
actcttaccttcttctcg

SEQ ID NO: 4529 - DNA, 18 bp, Artificial Sequence
  Description of Artificial Sequence: Synthetic oligonucleotide
aggtcactcttaccttct

SEQ ID NO: 4530 - DNA, 18 bp, Artificial Sequence
  Description of Artificial Sequence: Synthetic oligonucleotide
caggaaggtcactcttac

SEQ ID NO: 4531 - DNA, 18 bp, Artificial Sequence
  Description of Artificial Sequence: Synthetic oligonucleotide
agagacaggaaggtcact

SEQ ID NO: 4532 - DNA, 18 bp, Artificial Sequence
  Description of Artificial Sequence: Synthetic oligonucleotide
acagcagagacaggaagg

SEQ ID NO: 4533 - DNA, 18 bp, Artificial Sequence
  Description of Artificial Sequence: Synthetic oligonucleotide
tgacaacagcagagacag

SEQ ID NO: 4534 - DNA, 18 bp, Artificial Sequence
  Description of Artificial Sequence: Synthetic oligonucleotide
gcatttgacaacagcaga

SEQ ID NO: 4535 - DNA, 18 bp, Artificial Sequence
  Description of Artificial Sequence: Synthetic oligonucleotide
ccgtggcatttgacaaca

SEQ ID NO: 4536 - DNA, 18 bp, Artificial Sequence
  Description of Artificial Sequence: Synthetic oligonucleotide
tagcaccgtggcatttga

SEQ ID NO: 4537 - DNA, 18 bp, Artificial Sequence
  Description of Artificial Sequence: Synthetic oligonucleotide
aaatatagcaccgtggca

SEQ ID NO: 4538 - DNA, 18 bp, Artificial Sequence
  Description of Artificial Sequence: Synthetic oligonucleotide
ccccaaaatatagcaccg

SEQ ID NO: 4539 - DNA, 18 bp, Artificial Sequence
  Description of Artificial Sequence: Synthetic oligonucleotide
cattaccccaaaatatag

SEQ ID NO: 4540 - DNA, 18 bp, Artificial Sequence
  Description of Artificial Sequence: Synthetic oligonucleotide
ggacacattaccccaaaa

SEQ ID NO: 4541 - DNA, 18 bp, Artificial Sequence
  Description of Artificial Sequence: Synthetic oligonucleotide
attcaggacacattaccc

SEQ ID NO: 4542 - DNA, 18 bp, Artificial Sequence
  Description of Artificial Sequence: Synthetic oligonucleotide
atgggattcaggacacat

SEQ ID NO: 4543 - DNA, 18 bp, Artificial Sequence
  Description of Artificial Sequence: Synthetic oligonucleotide
tgctgatgggattcagga

SEQ ID NO: 4544 - DNA, 18 bp, Artificial Sequence
  Description of Artificial Sequence: Synthetic oligonucleotide
aatagtgctgatgggatt

SEQ ID NO: 4545 - DNA, 18 bp, Artificial Sequence
  Description of Artificial Sequence: Synthetic oligonucleotide
tatgcaatagtgctgatg

SEQ ID NO: 4546 - DNA, 18 bp, Artificial Sequence
  Description of Artificial Sequence: Synthetic oligonucleotide
agctctatgcaatagtgc

SEQ ID NO: 4547 - DNA, 18 bp, Artificial Sequence
  Description of Artificial Sequence: Synthetic oligonucleotide
cacaaagctctatgcaat

SEQ ID NO: 4548 - DNA, 18 bp, Artificial Sequence
  Description of Artificial Sequence: Synthetic oligonucleotide
aacacatagacaaagtac

SEQ ID NO: 4549 - DNA, 18 bp, Artificial Sequence
  Description of Artificial Sequence: Synthetic oligonucleotide
agataaacacatagacaa

SEQ ID NO: 4550 - DNA, 18 bp, Artificial Sequence
  Description of Artificial Sequence: Synthetic oligonucleotide
tttgaagataaacacata

SEQ ID NO: 4551 - DNA, 18 bp, Artificial Sequence
  Description of Artificial Sequence: Synthetic oligonucleotide
gacattttgaagataaac

SEQ ID NO: 4552 - DNA, 18 bp, Artificial Sequence
  Description of Artificial Sequence: Synthetic oligonucleotide
tttgggacattttgaaga

SEQ ID NO: 4553 - DNA, 18 bp, Artificial Sequence
  Description of Artificial Sequence: Synthetic oligonucleotide
ggctatttgggacatttt

SEQ ID NO: 4554 - DNA, 18 bp, Artificial Sequence
  Description of Artificial Sequence: Synthetic oligonucleotide
cccagggctatttgggac

SEQ ID NO: 4555 - DNA, 18 bp, Artificial Sequence
  Description of Artificial Sequence: Synthetic oligonucleotide
tttttcccagggctattt

SEQ ID NO: 4556 - DNA, 18 bp, Artificial Sequence
  Description of Artificial Sequence: Synthetic oligonucleotide
cgacctttttcccagggc

SEQ ID NO: 4557 - DNA, 18 bp, Artificial Sequence
  Description of Artificial Sequence: Synthetic oligonucleotide
ctgcacgacctttttccc

SEQ ID NO: 4558 - DNA, 18 bp, Artificial Sequence
  Description of Artificial Sequence: Synthetic oligonucleotide
ttgagctgcacgaccttt

SEQ ID NO: 4559 - DNA, 18 bp, Artificial Sequence
  Description of Artificial Sequence: Synthetic oligonucleotide
ccccattgagctgcacga

SEQ ID NO: 4560 - DNA, 18 bp, Artificial Sequence
  Description of Artificial Sequence: Synthetic oligonucleotide
aaagcccccattgagctg

SEQ ID NO: 4561 - DNA, 18 bp, Artificial Sequence
  Description of Artificial Sequence: Synthetic oligonucleotide
agttgaaagcccccattg

SEQ ID NO: 4562 - DNA, 18 bp, Artificial Sequence
  Description of Artificial Sequence: Synthetic oligonucleotide
ttgtaagttgaaagcccc

SEQ ID NO: 4563 - DNA, 18 bp, Artificial Sequence
  Description of Artificial Sequence: Synthetic oligonucleotide
gaaaattgtaagttgaaa

SEQ ID NO: 4564 - DNA, 18 bp, Artificial Sequence
  Description of Artificial Sequence: Synthetic oligonucleotide
acaaagaaaattgtaagt

SEQ ID NO: 4565 - DNA, 18 bp, Artificial Sequence
  Description of Artificial Sequence: Synthetic oligonucleotide
ctaaaacaaagaaaattg

SEQ ID NO: 4566 - DNA, 18 bp, Artificial Sequence
  Description of Artificial Sequence: Synthetic oligonucleotide
ggagcctaaaacaaagaa

SEQ ID NO: 4567 - DNA, 18 bp, Artificial Sequence
  Description of Artificial Sequence: Synthetic oligonucleotide
tttatggagcctaaaaca

SEQ ID NO: 4568 - DNA, 18 bp, Artificial Sequence
  Description of Artificial Sequence: Synthetic oligonucleotide
gtatttttatggagccta

SEQ ID NO: 4569 - DNA, 18 bp, Artificial Sequence
  Description of Artificial Sequence: Synthetic oligonucleotide
tctgtatttttatggagc

SEQ ID NO: 4570 - DNA, 18 bp, Artificial Sequence
  Description of Artificial Sequence: Synthetic oligonucleotide
gtgagtctgtatttttat

SEQ ID NO: 4571 - DNA, 18 bp, Artificial Sequence
  Description of Artificial Sequence: Synthetic oligonucleotide
aactggtgagtctgtatt

SEQ ID NO: 4572 - DNA, 18 bp, Artificial Sequence
  Description of Artificial Sequence: Synthetic oligonucleotide
gcaggaactggtgagtct

SEQ ID NO: 4573 - DNA, 18 bp, Artificial Sequence
  Description of Artificial Sequence: Synthetic oligonucleotide
tcaaagcaggaactggtg

SEQ ID NO: 4574 - DNA, 18 bp, Artificial Sequence
  Description of Artificial Sequence: Synthetic oligonucleotide
tcacatcaaagcaggaac

SEQ ID NO: 4575 - DNA, 18 bp, Artificial Sequence
  Description of Artificial Sequence: Synthetic oligonucleotide
acatgtcacatcaaagca

SEQ ID NO: 4576 - DNA, 18 bp, Artificial Sequence
  Description of Artificial Sequence: Synthetic oligonucleotide
gagtcacatgtcacatca

SEQ ID NO: 4577 - DNA, 18 bp, Artificial Sequence
  Description of Artificial Sequence: Synthetic oligonucleotide
ctggggagtcacatgtca

SEQ ID NO: 4578 - DNA, 18 bp, Artificial Sequence
  Description of Artificial Sequence: Synthetic oligonucleotide
gtattctggggagtcaca

SEQ ID NO: 4579 - DNA, 18 bp, Artificial Sequence
  Description of Artificial Sequence: Synthetic oligonucleotide
aaggtgtattctggggag

SEQ ID NO: 4580 - DNA, 18 bp, Artificial Sequence
  Description of Artificial Sequence: Synthetic oligonucleotide
gaagcaaggtgtattctg

SEQ ID NO: 4581 - DNA, 18 bp, Artificial Sequence
  Description of Artificial Sequence: Synthetic oligonucleotide
ctacagaagcaaggtgta

SEQ ID NO: 4582 - DNA, 18 bp, Artificial Sequence
  Description of Artificial Sequence: Synthetic oligonucleotide
gctggtctacagaagcaa

SEQ ID NO: 4583 - DNA, 18 bp, Artificial Sequence
  Description of Artificial Sequence: Synthetic oligonucleotide
ttggagctggtctacaga

SEQ ID NO: 4584 - DNA, 18 bp, Artificial Sequence
  Description of Artificial Sequence: Synthetic oligonucleotide
tcctgttggagctggtct

SEQ ID NO: 4585 - DNA, 18 bp, Artificial Sequence
  Description of Artificial Sequence: Synthetic oligonucleotide
tggaatcctgttggagct

SEQ ID NO: 4586 - DNA, 18 bp, Artificial Sequence
  Description of Artificial Sequence: Synthetic oligonucleotide
taccatggaatcctgttg

SEQ ID NO: 4587 - DNA, 18 bp, Artificial Sequence
  Description of Artificial Sequence: Synthetic oligonucleotide
ccagctaccatggaatcc

SEQ ID NO: 4588 - DNA, 18 bp, Artificial Sequence
  Description of Artificial Sequence: Synthetic oligonucleotide
acatcccagctaccatgg

SEQ ID NO: 4589 - DNA, 18 bp, Artificial Sequence
  Description of Artificial Sequence: Synthetic oligonucleotide
ccctaacatcccagctac

SEQ ID NO: 4590 - DNA, 18 bp, Artificial Sequence
  Description of Artificial Sequence: Synthetic oligonucleotide
ctgagccctaacatccca

SEQ ID NO: 4591 - DNA, 18 bp, Artificial Sequence
  Description of Artificial Sequence: Synthetic oligonucleotide
tacctgagccctaacatc

SEQ ID NO: 4592 - DNA, 18 bp, Artificial Sequence
  Description of Artificial Sequence: Synthetic oligonucleotide
ttacttacctgagcccta

SEQ ID NO: 4593 - DNA, 18 bp, Artificial Sequence
  Description of Artificial Sequence: Synthetic oligonucleotide
gaaggttacttacctgag

SEQ ID NO: 4594 - DNA, 18 bp, Artificial Sequence
  Description of Artificial Sequence: Synthetic oligonucleotide
aaaaggaaggttacttac

SEQ ID NO: 4595 - DNA, 18 bp, Artificial Sequence
  Description of Artificial Sequence: Synthetic oligonucleotide
aaaaaaaaaggaaggtta

SEQ ID NO: 4596 - DNA, 18 bp, Artificial Sequence
  Description of Artificial Sequence: Synthetic oligonucleotide
taaaaaaaaaaaaaggaa

SEQ ID NO: 4597 - DNA, 18 bp, Artificial Sequence
  Description of Artificial Sequence: Synthetic oligonucleotide
tatactaaaaaaaaaaaa

SEQ ID NO: 4598 - DNA, 18 bp, Artificial Sequence
  Description of Artificial Sequence: Synthetic oligonucleotide
ggacatatactaaaaaaa

SEQ ID NO: 4599 - DNA, 18 bp, Artificial Sequence
  Description of Artificial Sequence: Synthetic oligonucleotide
aaccaggacatatactaa

SEQ ID NO: 4600 - DNA, 18 bp, Artificial Sequence
  Description of Artificial Sequence: Synthetic oligonucleotide
ggccaaaccaggacatat

SEQ ID NO: 4601 - DNA, 18 bp, Artificial Sequence
  Description of Artificial Sequence: Synthetic oligonucleotide
cagatggccaaaccagga

SEQ ID NO: 4602 - DNA, 18 bp, Artificial Sequence
  Description of Artificial Sequence: Synthetic oligonucleotide
aaaaacagatggccaaac

SEQ ID NO: 4603 - DNA, 18 bp, Artificial Sequence
  Description of Artificial Sequence: Synthetic oligonucleotide
aaaaaaaaaacagatggc

SEQ ID NO: 4604 - DNA, 18 bp, Artificial Sequence
  Description of Artificial Sequence: Synthetic oligonucleotide
taaaaaaaaaaaaaacag

SEQ ID NO: 4605 - DNA, 18 bp, Artificial Sequence
  Description of Artificial Sequence: Synthetic oligonucleotide
ttttttaaaaaaaaaaaa

SEQ ID NO: 4606 - DNA, 18 bp, Artificial Sequence
  Description of Artificial Sequence: Synthetic oligonucleotide
tttttttttttaaaaaaa

SEQ ID NO: 4607 - DNA, 18 bp, Artificial Sequence
  Description of Artificial Sequence: Synthetic oligonucleotide
ttttttttttttttttaa

SEQ ID NO: 4608 - DNA, 18 bp, Artificial Sequence
  Description of Artificial Sequence: Synthetic oligonucleotide
tttccttttttttttttt

SEQ ID NO: 4609 - DNA, 18 bp, Artificial Sequence
  Description of Artificial Sequence: Synthetic oligonucleotide
cctcttttcctttttttt

SEQ ID NO: 4610 - DNA, 18 bp, Artificial Sequence
  Description of Artificial Sequence: Synthetic oligonucleotide
tttttcctcttttccttt

SEQ ID NO: 4611 - DNA, 18 bp, Artificial Sequence
  Description of Artificial Sequence: Synthetic oligonucleotide
atatttttttcctctttt

SEQ ID NO: 4612 - DNA, 18 bp, Artificial Sequence
  Description of Artificial Sequence: Synthetic oligonucleotide
catatgctgtgatagtta

SEQ ID NO: 4613 - DNA, 18 bp, Artificial Sequence
  Description of Artificial Sequence: Synthetic oligonucleotide
tttgtcatatgctgtgat

SEQ ID NO: 4614 - DNA, 18 bp, Artificial Sequence
  Description of Artificial Sequence: Synthetic oligonucleotide
acttctttgtcatatgct

SEQ ID NO: 4615 - DNA, 18 bp, Artificial Sequence
  Description of Artificial Sequence: Synthetic oligonucleotide
cttcaacttctttgtcat

SEQ ID NO: 4616 - DNA, 18 bp, Artificial Sequence
  Description of Artificial Sequence: Synthetic oligonucleotide
aacttcttcaacttcttt

SEQ ID NO: 4617 - DNA, 18 bp, Artificial Sequence
  Description of Artificial Sequence: Synthetic oligonucleotide
atggaaacttcttcaact

SEQ ID NO: 4618 - DNA, 18 bp, Artificial Sequence
  Description of Artificial Sequence: Synthetic oligonucleotide
ataggatggaaacttctt

SEQ ID NO: 4619 - DNA, 18 bp, Artificial Sequence
  Description of Artificial Sequence: Synthetic oligonucleotide
ctattataggatggaaac

SEQ ID NO: 4620 - DNA, 18 bp, Artificial Sequence
  Description of Artificial Sequence: Synthetic oligonucleotide
agttcctattataggatg

SEQ ID NO: 4621 - DNA, 18 bp, Artificial Sequence
  Description of Artificial Sequence: Synthetic oligonucleotide
ctttgagttcctattata

SEQ ID NO: 4622 - DNA, 18 bp, Artificial Sequence
  Description of Artificial Sequence: Synthetic oligonucleotide
ctaccctttgagttccta

SEQ ID NO: 4623 - DNA, 18 bp, Artificial Sequence
  Description of Artificial Sequence: Synthetic oligonucleotide
agtgactaccctttgagt

SEQ ID NO: 4624 - DNA, 18 bp, Artificial Sequence
  Description of Artificial Sequence: Synthetic oligonucleotide
tttacagtgactaccctt

SEQ ID NO: 4625 - DNA, 18 bp, Artificial Sequence
  Description of Artificial Sequence: Synthetic oligonucleotide
agatatttacagtgacta

SEQ ID NO: 4626 - DNA, 18 bp, Artificial Sequence
  Description of Artificial Sequence: Synthetic oligonucleotide
catgaagatatttacagt

SEQ ID NO: 4627 - DNA, 18 bp, Artificial Sequence
  Description of Artificial Sequence: Synthetic oligonucleotide
aaacacatgaagatattt

SEQ ID NO: 4628 - DNA, 18 bp, Artificial Sequence
  Description of Artificial Sequence: Synthetic oligonucleotide
aagaaaaacacatgaaga

SEQ ID NO: 4629 - DNA, 18 bp, Artificial Sequence
  Description of Artificial Sequence: Synthetic oligonucleotide
ctgcaaagaaaaacacat

SEQ ID NO: 4630 - DNA, 18 bp, Artificial Sequence
  Description of Artificial Sequence: Synthetic oligonucleotide
ttatgctgcaaagaaaaa

SEQ ID NO: 4631 - DNA, 18 bp, Artificial Sequence
  Description of Artificial Sequence: Synthetic oligonucleotide
actggttatgctgcaaag

SEQ ID NO: 4632 - DNA, 18 bp, Artificial Sequence
  Description of Artificial Sequence: Synthetic oligonucleotide
tgcacactggttatgctg

SEQ ID NO: 4633 - DNA, 18 bp, Artificial Sequence
  Description of Artificial Sequence: Synthetic oligonucleotide
cgctgcacactggttatg

SEQ ID NO: 4634 - DNA, 18 bp, Artificial Sequence
  Description of Artificial Sequence: Synthetic oligonucleotide
ctgaacgctgcacactgg

SEQ ID NO: 4635 - DNA, 18 bp, Artificial Sequence
  Description of Artificial Sequence: Synthetic oligonucleotide
attgtctgaacgctgcac

SEQ ID NO: 4636 - DNA, 18 bp, Artificial Sequence
  Description of Artificial Sequence: Synthetic oligonucleotide
gacccattgtctgaacgc

SEQ ID NO: 4637 - DNA, 18 bp, Artificial Sequence
  Description of Artificial Sequence: Synthetic oligonucleotide
tatacgacccattgtctg

SEQ ID NO: 4638 - DNA, 18 bp, Artificial Sequence
  Description of Artificial Sequence: Synthetic oligonucleotide
acagatatacgacccatt

SEQ ID NO: 4639 - DNA, 18 bp, Artificial Sequence
  Description of Artificial Sequence: Synthetic oligonucleotide
atcttacagatatacgac

SEQ ID NO: 4640 - DNA, 18 bp, Artificial Sequence
  Description of Artificial Sequence: Synthetic oligonucleotide
ttttcatcttacagatat

SEQ ID NO: 4641 - DNA, 18 bp, Artificial Sequence
  Description of Artificial Sequence: Synthetic oligonucleotide
gtttattttcatcttaca

SEQ ID NO: 4642 - DNA, 18 bp, Artificial Sequence
  Description of Artificial Sequence: Synthetic oligonucleotide
tcattgtttattttcatc

SEQ ID NO: 4643 - DNA, 18 bp, Artificial Sequence
  Description of Artificial Sequence: Synthetic oligonucleotide
cgatctcttcattgttta

SEQ ID NO: 4644 - DNA, 18 bp, Artificial Sequence
  Description of Artificial Sequence: Synthetic oligonucleotide
agacacgatctcttcatt

SEQ ID NO: 4645 - DNA, 18 bp, Artificial Sequence
  Description of Artificial Sequence: Synthetic oligonucleotide
ggatcagacacgatctct

SEQ ID NO: 4646 - DNA, 18 bp, Artificial Sequence
  Description of Artificial Sequence: Synthetic oligonucleotide
agatgggatcagacacga

SEQ ID NO: 4647 - DNA, 18 bp, Artificial Sequence
  Description of Artificial Sequence: Synthetic oligonucleotide
gatgtagatgggatcaga

SEQ ID NO: 4648 - DNA, 18 bp, Artificial Sequence
  Description of Artificial Sequence: Synthetic oligonucleotide
acttcgatgtagatggga

SEQ ID NO: 4649 - DNA, 18 bp, Artificial Sequence
  Description of Artificial Sequence: Synthetic oligonucleotide
cttgtacttcgatgtaga

SEQ ID NO: 4650 - DNA, 18 bp, Artificial Sequence
  Description of Artificial Sequence: Synthetic oligonucleotide
taccttgtacttcgatgt

SEQ ID NO: 4651 - DNA, 18 bp, Artificial Sequence
  Description of Artificial Sequence: Synthetic oligonucleotide
ggacttaccttgtacttc

SEQ ID NO: 4652 - DNA, 18 bp, Artificial Sequence
  Description of Artificial Sequence: Synthetic oligonucleotide
tctgtggacttaccttgt

SEQ ID NO: 4653 - DNA, 18 bp, Artificial Sequence
  Description of Artificial Sequence: Synthetic oligonucleotide
tctggtctgtggacttac

SEQ ID NO: 4654 - DNA, 18 bp, Artificial Sequence
  Description of Artificial Sequence: Synthetic oligonucleotide
gggactctggtctgtgga

SEQ ID NO: 4655 - DNA, 18 bp, Artificial Sequence
  Description of Artificial Sequence: Synthetic oligonucleotide
gcaatgggactctggtct

SEQ ID NO: 4656 - DNA, 18 bp, Artificial Sequence
  Description of Artificial Sequence: Synthetic oligonucleotide
ctctggcaatgggactct

SEQ ID NO: 4657 - DNA, 18 bp, Artificial Sequence
  Description of Artificial Sequence: Synthetic oligonucleotide
cagttctctggcaatggg

SEQ ID NO: 4658 - DNA, 18 bp, Artificial Sequence
  Description of Artificial Sequence: Synthetic oligonucleotide
acaaacagttctctggca

SEQ ID NO: 4659 - DNA, 18 bp, Artificial Sequence
  Description of Artificial Sequence: Synthetic oligonucleotide
ctaaaacaaacagttctc

SEQ ID NO: 4660 - DNA, 18 bp, Artificial Sequence
  Description of Artificial Sequence: Synthetic oligonucleotide
aggccctaaaacaaacag

SEQ ID NO: 4661 - DNA, 18 bp, Artificial Sequence
  Description of Artificial Sequence: Synthetic oligonucleotide
aacacaggccctaaaaca

SEQ ID NO: 4662 - DNA, 18 bp, Artificial Sequence
  Description of Artificial Sequence: Synthetic oligonucleotide
catttaacacaggcccta

SEQ ID NO: 4663 - DNA, 18 bp, Artificial Sequence
  Description of Artificial Sequence: Synthetic oligonucleotide
caaaacatttaacacagg

SEQ ID NO: 4664 - DNA, 18 bp, Artificial Sequence
  Description of Artificial Sequence: Synthetic oligonucleotide
atacacaaaacatttaac

SEQ ID NO: 4665 - DNA, 18 bp, Artificial Sequence
  Description of Artificial Sequence: Synthetic oligonucleotide
gtattatacacaaaacat

SEQ ID NO: 4666 - DNA, 18 bp, Artificial Sequence
  Description of Artificial Sequence: Synthetic oligonucleotide
ctagagtattatacacaa

SEQ ID NO: 4667 - DNA, 18 bp, Artificial Sequence
  Description of Artificial Sequence: Synthetic oligonucleotide
aaactctagagtattata

SEQ ID NO: 4668 - DNA, 18 bp, Artificial Sequence
  Description of Artificial Sequence: Synthetic oligonucleotide
aggcaaaactctagagta

SEQ ID NO: 4669 - DNA, 18 bp, Artificial Sequence
  Description of Artificial Sequence: Synthetic oligonucleotide
taggcaggcaaaactcta

SEQ ID NO: 4670 - DNA, 18 bp, Artificial Sequence
  Description of Artificial Sequence: Synthetic oligonucleotide
ataaataggcaggcaaaa

SEQ ID NO: 4671 - DNA, 18 bp, Artificial Sequence
  Description of Artificial Sequence: Synthetic oligonucleotide
ccacagggaaggaagcta

SEQ ID NO: 4672 - DNA, 18 bp, Artificial Sequence
  Description of Artificial Sequence: Synthetic oligonucleotide
ggtccccacagggaagga

SEQ ID NO: 4673 - DNA, 18 bp, Artificial Sequence
  Description of Artificial Sequence: Synthetic oligonucleotide
cacagggtccccacaggg

SEQ ID NO: 4674 - DNA, 18 bp, Artificial Sequence
  Description of Artificial Sequence: Synthetic oligonucleotide
tgcctcacagggtcccca

SEQ ID NO: 4675 - DNA, 18 bp, Artificial Sequence
  Description of Artificial Sequence: Synthetic oligonucleotide
tgctgtgcctcacagggt

SEQ ID NO: 4676 - DNA, 18 bp, Artificial Sequence
  Description of Artificial Sequence: Synthetic oligonucleotide
cagtctgctgtgcctcac

SEQ ID NO: 4677 - DNA, 18 bp, Artificial Sequence
  Description of Artificial Sequence: Synthetic oligonucleotide
cagcccagtctgctgtgc

SEQ ID NO: 4678 - DNA, 18 bp, Artificial Sequence
  Description of Artificial Sequence: Synthetic oligonucleotide
aggcccagcccagtctgc

SEQ ID NO: 4679 - DNA, 18 bp, Artificial Sequence
  Description of Artificial Sequence: Synthetic oligonucleotide
ggaccaggcccagcccag

SEQ ID NO: 4680 - DNA, 18 bp, Artificial Sequence
  Description of Artificial Sequence: Synthetic oligonucleotide
gcccaggaccaggcccag

SEQ ID NO: 4681 - DNA, 18 bp, Artificial Sequence
  Description of Artificial Sequence: Synthetic oligonucleotide
ctggagcccaggaccagg

SEQ ID NO: 4682 - DNA, 18 bp, Artificial Sequence
  Description of Artificial Sequence: Synthetic oligonucleotide
ggaggctggagcccagga

SEQ ID NO: 4683 - DNA, 18 bp, Artificial Sequence
  Description of Artificial Sequence: Synthetic oligonucleotide
aggctggaggctggagcc

SEQ ID NO: 4684 - DNA, 18 bp, Artificial Sequence
  Description of Artificial Sequence: Synthetic oligonucleotide
agtggaggctggaggctg

SEQ ID NO: 4685 - DNA, 18 bp, Artificial Sequence
  Description of Artificial Sequence: Synthetic oligonucleotide
gtgtgagtggaggctgga

SEQ ID NO: 4686 - DNA, 18 bp, Artificial Sequence
  Description of Artificial Sequence: Synthetic oligonucleotide
ggagggtgtgagtggagg

SEQ ID NO: 4687 - DNA, 18 bp, Artificial Sequence
  Description of Artificial Sequence: Synthetic oligonucleotide
gaagaggagggtgtgagt

SEQ ID NO: 4688 - DNA, 18 bp, Artificial Sequence
  Description of Artificial Sequence: Synthetic oligonucleotide
ctgaggaagaggagggtg

SEQ ID NO: 4689 - DNA, 18 bp, Artificial Sequence
  Description of Artificial Sequence: Synthetic oligonucleotide
tgatcctgaggaagagga

SEQ ID NO: 4690 - DNA, 18 bp, Artificial Sequence
  Description of Artificial Sequence: Synthetic oligonucleotide
gaagatgatcctgaggaa

SEQ ID NO: 4691 - DNA, 18 bp, Artificial Sequence
  Description of Artificial Sequence: Synthetic oligonucleotide
gtggagaagatgatcctg

SEQ ID NO: 4692 - DNA, 18 bp, Artificial Sequence
  Description of Artificial Sequence: Synthetic oligonucleotide
ggcgtggagaagatgatc

SEQ ID NO: 4693 - DNA, 18 bp, Artificial Sequence
  Description of Artificial Sequence: Synthetic oligonucleotide
ccaggggcgtggagaaga

SEQ ID NO: 4694 - DNA, 18 bp, Artificial Sequence
  Description of Artificial Sequence: Synthetic oligonucleotide
gacggccaggggcgtgga

SEQ ID NO: 4695 - DNA, 18 bp, Artificial Sequence
  Description of Artificial Sequence: Synthetic oligonucleotide
gcaatgacggccaggggc

SEQ ID NO: 4696 - DNA, 18 bp, Artificial Sequence
  Description of Artificial Sequence: Synthetic oligonucleotide
agtaggcaatgacggcca

SEQ ID NO: 4697 - DNA, 18 bp, Artificial Sequence
  Description of Artificial Sequence: Synthetic oligonucleotide
gaggaagtaggcaatgac

SEQ ID NO: 4698 - DNA, 18 bp, Artificial Sequence
  Description of Artificial Sequence: Synthetic oligonucleotide
cagatgaggaagtaggca

SEQ ID NO: 4699 - DNA, 18 bp, Artificial Sequence
  Description of Artificial Sequence: Synthetic oligonucleotide
cgaaccagatgaggaagt

SEQ ID NO: 4700 - DNA, 18 bp, Artificial Sequence
  Description of Artificial Sequence: Synthetic oligonucleotide
gggcacgaaccagatgag

SEQ ID NO: 4701 - DNA, 18 bp, Artificial Sequence
  Description of Artificial Sequence: Synthetic oligonucleotide
aagtcgggcacgaaccag

SEQ ID NO: 4702 - DNA, 18 bp, Artificial Sequence
  Description of Artificial Sequence: Synthetic oligonucleotide
gtgggaagtcgggcacga

SEQ ID NO: 4703 - DNA, 18 bp, Artificial Sequence
  Description of Artificial Sequence: Synthetic oligonucleotide
gccgtgtgggaagtcggg

SEQ ID NO: 4704 - DNA, 18 bp, Artificial Sequence
  Description of Artificial Sequence: Synthetic oligonucleotide
gtctggccgtgtgggaag

SEQ ID NO: 4705 - DNA, 18 bp, Artificial Sequence
  Description of Artificial Sequence: Synthetic oligonucleotide
caataggtctggccgtgt

SEQ ID NO: 4706 - DNA, 18 bp, Artificial Sequence
  Description of Artificial Sequence: Synthetic oligonucleotide
ggtaccaataggtctggc

SEQ ID NO: 4707 - DNA, 18 bp, Artificial Sequence
  Description of Artificial Sequence: Synthetic oligonucleotide
aagcaggtaccaataggt

SEQ ID NO: 4708 - DNA, 18 bp, Artificial Sequence
  Description of Artificial Sequence: Synthetic oligonucleotide
tagaaaagcaggtaccaa

SEQ ID NO: 4709 - DNA, 18 bp, Artificial Sequence
  Description of Artificial Sequence: Synthetic oligonucleotide
ggcaatagaaaagcaggt

SEQ ID NO: 4710 - DNA, 18 bp, Artificial Sequence
  Description of Artificial Sequence: Synthetic oligonucleotide
aaagaggcaatagaaaag

SEQ ID NO: 4711 - DNA, 18 bp, Artificial Sequence
  Description of Artificial Sequence: Synthetic oligonucleotide
gtttcaaagaggcaatag

SEQ ID NO: 4712 - DNA, 18 bp, Artificial Sequence
  Description of Artificial Sequence: Synthetic oligonucleotide
ccattgtttcaaagaggc

SEQ ID NO: 4713 - DNA, 18 bp, Artificial Sequence
  Description of Artificial Sequence: Synthetic oligonucleotide
cgtgaccattgtttcaaa

SEQ ID NO: 4714 - DNA, 18 bp, Artificial Sequence
  Description of Artificial Sequence: Synthetic oligonucleotide
caccgtgaccattgtttc

SEQ ID NO: 4715 - DNA, 18 bp, Artificial Sequence
  Description of Artificial Sequence: Synthetic oligonucleotide
acactcaccgtgaccatt

SEQ ID NO: 4716 - DNA, 18 bp, Artificial Sequence
  Description of Artificial Sequence: Synthetic oligonucleotide
tacccacactcaccgtga

SEQ ID NO: 4717 - DNA, 18 bp, Artificial Sequence
  Description of Artificial Sequence: Synthetic oligonucleotide
ggaggtacccacactcac

SEQ ID NO: 4718 - DNA, 18 bp, Artificial Sequence
  Description of Artificial Sequence: Synthetic oligonucleotide
ccaagggaggtacccaca

SEQ ID NO: 4719 - DNA, 18 bp, Artificial Sequence
  Description of Artificial Sequence: Synthetic oligonucleotide
gacacccaagggaggtac

SEQ ID NO: 4720 - DNA, 18 bp, Artificial Sequence
  Description of Artificial Sequence: Synthetic oligonucleotide
ctagagacacccaaggga

SEQ ID NO: 4721 - DNA, 18 bp, Artificial Sequence
  Description of Artificial Sequence: Synthetic oligonucleotide
ggcccctagagacaccca

SEQ ID NO: 4722 - DNA, 18 bp, Artificial Sequence
  Description of Artificial Sequence: Synthetic oligonucleotide
ctcccggcccctagagac

SEQ ID NO: 4723 - DNA, 18 bp, Artificial Sequence
  Description of Artificial Sequence: Synthetic oligonucleotide
ccctcctcccggccccta

SEQ ID NO: 4724 - DNA, 18 bp, Artificial Sequence
  Description of Artificial Sequence: Synthetic oligonucleotide
gaccgccctcctcccggc

SEQ ID NO: 4725 - DNA, 18 bp, Artificial Sequence
  Description of Artificial Sequence: Synthetic oligonucleotide
ccaaggaccgccctcctc

SEQ ID NO: 4726 - DNA, 18 bp, Artificial Sequence
  Description of Artificial Sequence: Synthetic oligonucleotide
gggccccaaggaccgccc

SEQ ID NO: 4727 - DNA, 18 bp, Artificial Sequence
  Description of Artificial Sequence: Synthetic oligonucleotide
cctgggggccccaaggac

SEQ ID NO: 4728 - DNA, 18 bp, Artificial Sequence
  Description of Artificial Sequence: Synthetic oligonucleotide
ccaaccctgggggcccca

SEQ ID NO: 4729 - DNA, 18 bp, Artificial Sequence
  Description of Artificial Sequence: Synthetic oligonucleotide
cagtaccaaccctggggg

SEQ ID NO: 4730 - DNA, 18 bp, Artificial Sequence
  Description of Artificial Sequence: Synthetic oligonucleotide
gcttccagtaccaaccct

SEQ ID NO: 4731 - DNA, 18 bp, Artificial Sequence
  Description of Artificial Sequence: Synthetic oligonucleotide
atgtagcttccagtacca

SEQ ID NO: 4732 - DNA, 18 bp, Artificial Sequence
  Description of Artificial Sequence: Synthetic oligonucleotide
cactgatgtagcttccag

SEQ ID NO: 4733 - DNA, 18 bp, Artificial Sequence
  Description of Artificial Sequence: Synthetic oligonucleotide
ggacacactgatgtagct

SEQ ID NO: 4734 - DNA, 18 bp, Artificial Sequence
  Description of Artificial Sequence: Synthetic oligonucleotide
cgggtggacacactgatg

SEQ ID NO: 4735 - DNA, 18 bp, Artificial Sequence
  Description of Artificial Sequence: Synthetic oligonucleotide
tgggctaatatgtttgtt

SEQ ID NO: 4736 - DNA, 18 bp, Artificial Sequence
  Description of Artificial Sequence: Synthetic oligonucleotide
tattttgggctaatatgt

SEQ ID NO: 4737 - DNA, 18 bp, Artificial Sequence
  Description of Artificial Sequence: Synthetic oligonucleotide
ataattattttgggctaa

SEQ ID NO: 4738 - DNA, 18 bp, Artificial Sequence
  Description of Artificial Sequence: Synthetic oligonucleotide
tacaaataattattttgg

SEQ ID NO: 4739 - DNA, 18 bp, Artificial Sequence
  Description of Artificial Sequence: Synthetic oligonucleotide
aatattacaaataattat

SEQ ID NO: 4740 - DNA, 18 bp, Artificial Sequence
  Description of Artificial Sequence: Synthetic oligonucleotide
aggtaaatattacaaata

SEQ ID NO: 4741 - DNA, 18 bp, Artificial Sequence
  Description of Artificial Sequence: Synthetic oligonucleotide
taggcaggtaaatattac

SEQ ID NO: 4742 - DNA, 18 bp, Artificial Sequence
  Description of Artificial Sequence: Synthetic oligonucleotide
gtaagtaggcaggtaaat

SEQ ID NO: 4743 - DNA, 18 bp, Artificial Sequence
  Description of Artificial Sequence: Synthetic oligonucleotide
aaatagtaagtaggcagg

SEQ ID NO: 4744 - DNA, 18 bp, Artificial Sequence
  Description of Artificial Sequence: Synthetic oligonucleotide
agtttaaatagtaagtag

SEQ ID NO: 4745 - DNA, 18 bp, Artificial Sequence
  Description of Artificial Sequence: Synthetic oligonucleotide
gttggagtttaaatagta

SEQ ID NO: 4746 - DNA, 18 bp, Artificial Sequence
  Description of Artificial Sequence: Synthetic oligonucleotide
tcagtgttggagtttaaa

SEQ ID NO: 4747 - DNA, 18 bp, Artificial Sequence
  Description of Artificial Sequence: Synthetic oligonucleotide
aagattcagtgttggagt

SEQ ID NO: 4748 - DNA, 18 bp, Artificial Sequence
  Description of Artificial Sequence: Synthetic oligonucleotide
catgaaagattcagtgtt

SEQ ID NO: 4749 - DNA, 18 bp, Artificial Sequence
  Description of Artificial Sequence: Synthetic oligonucleotide
ataatcatgaaagattca

SEQ ID NO: 4750 - DNA, 18 bp, Artificial Sequence
  Description of Artificial Sequence: Synthetic oligonucleotide
tatacataatcatgaaag

SEQ ID NO: 4751 - DNA, 18 bp, Artificial Sequence
  Description of Artificial Sequence: Synthetic oligonucleotide
gaaaatatacataatcat

SEQ ID NO: 4752 - DNA, 18 bp, Artificial Sequence
  Description of Artificial Sequence: Synthetic oligonucleotide
ctgttgaaaatatacata

SEQ ID NO: 4753 - DNA, 18 bp, Artificial Sequence
  Description of Artificial Sequence: Synthetic oligonucleotide
actcactgttgaaaatat

SEQ ID NO: 4754 - DNA, 18 bp, Artificial Sequence
  Description of Artificial Sequence: Synthetic oligonucleotide
aatggactcactgttgaa

SEQ ID NO: 4755 - DNA, 18 bp, Artificial Sequence
  Description of Artificial Sequence: Synthetic oligonucleotide
gcaagaatggactcactg

SEQ ID NO: 4756 - DNA, 18 bp, Artificial Sequence
  Description of Artificial Sequence: Synthetic oligonucleotide
tgtgcaagaatggactca

SEQ ID NO: 4757 - DNA, 18 bp, Artificial Sequence
  Description of Artificial Sequence: Synthetic oligonucleotide
ctcggtgtgcaagaatgg

SEQ ID NO: 4758 - DNA, 18 bp, Artificial Sequence
  Description of Artificial Sequence: Synthetic oligonucleotide
attttctcggtgtgcaag

SEQ ID NO: 4759 - DNA, 18 bp, Artificial Sequence
  Description of Artificial Sequence: Synthetic oligonucleotide
cgcatattttctcggtgt

SEQ ID NO: 4760 - DNA, 18 bp, Artificial Sequence
  Description of Artificial Sequence: Synthetic oligonucleotide
tctgtcgcatattttctc

SEQ ID NO: 4761 - DNA, 18 bp, Artificial Sequence
  Description of Artificial Sequence: Synthetic oligonucleotide
tatcatctgtcgcatatt

SEQ ID NO: 4762 - DNA, 18 bp, Artificial Sequence
  Description of Artificial Sequence: Synthetic oligonucleotide
cttcttatcatctgtcgc

SEQ ID NO: 4763 - DNA, 18 bp, Artificial Sequence
  Description of Artificial Sequence: Synthetic oligonucleotide
aaaaacttcttatcatct

SEQ ID NO: 4764 - DNA, 18 bp, Artificial Sequence
  Description of Artificial Sequence: Synthetic oligonucleotide
ttcagaaaaacttcttat

SEQ ID NO: 4765 - DNA, 18 bp, Artificial Sequence
  Description of Artificial Sequence: Synthetic oligonucleotide
aagggttcagaaaaactt

SEQ ID NO: 4766 - DNA, 18 bp, Artificial Sequence
  Description of Artificial Sequence: Synthetic oligonucleotide
ttccaaagggttcagaaa

SEQ ID NO: 4767 - DNA, 18 bp, Artificial Sequence
  Description of Artificial Sequence: Synthetic oligonucleotide
gtctcttccaaagggttc

SEQ ID NO: 4768 - DNA, 18 bp, Artificial Sequence
  Description of Artificial Sequence: Synthetic oligonucleotide
agcaagtctcttccaaag

SEQ ID NO: 4769 - DNA, 18 bp, Artificial Sequence
  Description of Artificial Sequence: Synthetic oligonucleotide
tactgagcaagtctcttc

SEQ ID NO: 4770 - DNA, 18 bp, Artificial Sequence
  Description of Artificial Sequence: Synthetic oligonucleotide
agagatactgagcaagtc

SEQ ID NO: 4771 - DNA, 18 bp, Artificial Sequence
  Description of Artificial Sequence: Synthetic oligonucleotide
ccatcagagatactgagc

SEQ ID NO: 4772 - DNA, 18 bp, Artificial Sequence
  Description of Artificial Sequence: Synthetic oligonucleotide
ctctaccatcagagatac

SEQ ID NO: 4773 - DNA, 18 bp, Artificial Sequence
  Description of Artificial Sequence: Synthetic oligonucleotide
tctccctctaccatcaga

SEQ ID NO: 4774 - DNA, 18 bp, Artificial Sequence
  Description of Artificial Sequence: Synthetic oligonucleotide
tgagctctccctctacca

SEQ ID NO: 4775 - DNA, 18 bp, Artificial Sequence
  Description of Artificial Sequence: Synthetic oligonucleotide
gattatgagctctccctc

SEQ ID NO: 4776 - DNA, 18 bp, Artificial Sequence
  Description of Artificial Sequence: Synthetic oligonucleotide
tctacgattatgagctct

SEQ ID NO: 4777 - DNA, 18 bp, Artificial Sequence
  Description of Artificial Sequence: Synthetic oligonucleotide
tgtcctctacgattatga

SEQ ID NO: 4778 - DNA, 18 bp, Artificial Sequence
  Description of Artificial Sequence: Synthetic oligonucleotide
cattatgtcctctacgat

SEQ ID NO: 4779 - DNA, 18 bp, Artificial Sequence
  Description of Artificial Sequence: Synthetic oligonucleotide
accatcattatgtcctct

SEQ ID NO: 4780 - DNA, 18 bp, Artificial Sequence
  Description of Artificial Sequence: Synthetic oligonucleotide
tcttcaccatcattatgt

SEQ ID NO: 4781 - DNA, 18 bp, Artificial Sequence
  Description of Artificial Sequence: Synthetic oligonucleotide
aagaatcttcaccatcat

SEQ ID NO: 4782 - DNA, 18 bp, Artificial Sequence
  Description of Artificial Sequence: Synthetic oligonucleotide
agtcaaagaatcttcacc

SEQ ID NO: 4783 - DNA, 18 bp, Artificial Sequence
  Description of Artificial Sequence: Synthetic oligonucleotide
tacagtcaaagaatcttc

SEQ ID NO: 4784 - DNA, 18 bp, Artificial Sequence
  Description of Artificial Sequence: Synthetic oligonucleotide
gaacttacagtcaaagaa

SEQ ID NO: 4785 - DNA, 18 bp, Artificial Sequence
  Description of Artificial Sequence: Synthetic oligonucleotide
aaaaagaacttacagtca

SEQ ID NO: 4786 - DNA, 18 bp, Artificial Sequence
  Description of Artificial Sequence: Synthetic oligonucleotide
ttaaaaaaaagaacttac

SEQ ID NO: 4787 - DNA, 18 bp, Artificial Sequence
  Description of Artificial Sequence: Synthetic oligonucleotide
ctgtcttaaaaaaaagaa

SEQ ID NO: 4788 - DNA, 18 bp, Artificial Sequence
  Description of Artificial Sequence: Synthetic oligonucleotide
actaactgtcttaaaaaa

SEQ ID NO: 4789 - DNA, 18 bp, Artificial Sequence
  Description of Artificial Sequence: Synthetic oligonucleotide
ttctcactaactgtctta

SEQ ID NO: 4790 - DNA, 18 bp, Artificial Sequence
  Description of Artificial Sequence: Synthetic oligonucleotide
gggccttctcactaactg

SEQ ID NO: 4791 - DNA, 18 bp, Artificial Sequence
  Description of Artificial Sequence: Synthetic oligonucleotide
ctacagggccttctcact

SEQ ID NO: 4792 - DNA, 18 bp, Artificial Sequence
  Description of Artificial Sequence: Synthetic oligonucleotide
aattcctacagggccttc

SEQ ID NO: 4793 - DNA, 18 bp, Artificial Sequence
  Description of Artificial Sequence: Synthetic oligonucleotide
cttcaaattcctacaggg

SEQ ID NO: 4794 - DNA, 18 bp, Artificial Sequence
  Description of Artificial Sequence: Synthetic oligonucleotide
cttttcttcaaattccta

SEQ ID NO: 4795 - DNA, 18 bp, Artificial Sequence
  Description of Artificial Sequence: Synthetic oligonucleotide
taatacttttcttcaaat

SEQ ID NO: 4796 - DNA, 18 bp, Artificial Sequence
  Description of Artificial Sequence: Synthetic oligonucleotide
ttctgtaatacttttctt

SEQ ID NO: 4797 - DNA, 18 bp, Artificial Sequence
  Description of Artificial Sequence: Synthetic oligonucleotide
tatacttctgtaatactt

SEQ ID NO: 4798 - DNA, 18 bp, Artificial Sequence
  Description of Artificial Sequence: Synthetic oligonucleotide
agatatatacttctgtaa

SEQ ID NO: 4799 - DNA, 18 bp, Artificial Sequence
  Description of Artificial Sequence: Synthetic oligonucleotide
attatagatatatacttc

SEQ ID NO: 4800 - DNA, 18 bp, Artificial Sequence
  Description of Artificial Sequence: Synthetic oligonucleotide
ctatcattatagatatat

SEQ ID NO: 4801 - DNA, 18 bp, Artificial Sequence
  Description of Artificial Sequence: Synthetic oligonucleotide
atatcctatcattataga

SEQ ID NO: 4802 - DNA, 18 bp, Artificial Sequence
  Description of Artificial Sequence: Synthetic oligonucleotide
tagtcatatcctatcatt

SEQ ID NO: 4803 - DNA, 18 bp, Artificial Sequence
  Description of Artificial Sequence: Synthetic oligonucleotide
aatattagtcatatccta

SEQ ID NO: 4804 - DNA, 18 bp, Artificial Sequence
  Description of Artificial Sequence: Synthetic oligonucleotide
tcatttaatcctagtaac

SEQ ID NO: 4805 - DNA, 18 bp, Artificial Sequence
  Description of Artificial Sequence: Synthetic oligonucleotide
atatctcatttaatccta

SEQ ID NO: 4806 - DNA, 18 bp, Artificial Sequence
  Description of Artificial Sequence: Synthetic oligonucleotide
gcaatatatctcatttaa

SEQ ID NO: 4807 - DNA, 18 bp, Artificial Sequence
  Description of Artificial Sequence: Synthetic oligonucleotide
tacatgcaatatatctca

SEQ ID NO: 4808 - DNA, 18 bp, Artificial Sequence
  Description of Artificial Sequence: Synthetic oligonucleotide
tattttacatgcaatata

SEQ ID NO: 4809 - DNA, 18 bp, Artificial Sequence
  Description of Artificial Sequence: Synthetic oligonucleotide
gcaactattttacatgca

SEQ ID NO: 4810 - DNA, 18 bp, Artificial Sequence
  Description of Artificial Sequence: Synthetic oligonucleotide
tactcgcaactattttac

SEQ ID NO: 4811 - DNA, 18 bp, Artificial Sequence
  Description of Artificial Sequence: Synthetic oligonucleotide
ctttgtactcgcaactat

SEQ ID NO: 4812 - DNA, 18 bp, Artificial Sequence
  Description of Artificial Sequence: Synthetic oligonucleotide
gcaagctttgtactcgca

SEQ ID NO: 4813 - DNA, 18 bp, Artificial Sequence
  Description of Artificial Sequence: Synthetic oligonucleotide
ttaccgcaagctttgtac

SEQ ID NO: 4814 - DNA, 18 bp, Artificial Sequence
  Description of Artificial Sequence: Synthetic oligonucleotide
aacatttaccgcaagctt

SEQ ID NO: 4815 - DNA, 18 bp, Artificial Sequence
  Description of Artificial Sequence: Synthetic oligonucleotide
taactaacatttaccgca

SEQ ID NO: 4816 - DNA, 18 bp, Artificial Sequence
  Description of Artificial Sequence: Synthetic oligonucleotide
aatattaactaacattta

SEQ ID NO: 4817 - DNA, 18 bp, Artificial Sequence
  Description of Artificial Sequence: Synthetic oligonucleotide
tgattaatattaactaac

SEQ ID NO: 4818 - DNA, 18 bp, Artificial Sequence
  Description of Artificial Sequence: Synthetic oligonucleotide
aatgatgattaatattaa

SEQ ID NO: 4819 - DNA, 18 bp, Artificial Sequence
  Description of Artificial Sequence: Synthetic oligonucleotide
ataataatgatgattaat

SEQ ID NO: 4820 - DNA, 18 bp, Artificial Sequence
  Description of Artificial Sequence: Synthetic oligonucleotide
tcaggataataatgatga

SEQ ID NO: 4821 - DNA, 18 bp, Artificial Sequence
  Description of Artificial Sequence: Synthetic oligonucleotide
ctacatcaggataataat

SEQ ID NO: 4822 - DNA, 18 bp, Artificial Sequence
  Description of Artificial Sequence: Synthetic oligonucleotide
aactcctacatcaggata

SEQ ID NO: 4823 - DNA, 18 bp, Artificial Sequence
  Description of Artificial Sequence: Synthetic oligonucleotide
ctgagaactcctacatca

SEQ ID NO: 4824 - DNA, 18 bp, Artificial Sequence
  Description of Artificial Sequence: Synthetic oligonucleotide
tcaggctgagaactccta

SEQ ID NO: 4825 - DNA, 18 bp, Artificial Sequence
  Description of Artificial Sequence: Synthetic oligonucleotide
acttcaggctgagaactc

SEQ ID NO: 4826 - DNA, 18 bp, Artificial Sequence
  Description of Artificial Sequence: Synthetic oligonucleotide
agtcaacttcaggctgag

SEQ ID NO: 4827 - DNA, 18 bp, Artificial Sequence
  Description of Artificial Sequence: Synthetic oligonucleotide
gttccagtcaacttcagg

SEQ ID NO: 4828 - DNA, 18 bp, Artificial Sequence
  Description of Artificial Sequence: Synthetic oligonucleotide
tgaaagttccagtcaact

SEQ ID NO: 4829 - DNA, 18 bp, Artificial Sequence
  Description of Artificial Sequence: Synthetic oligonucleotide
ttaactgaaagttccagt

SEQ ID NO: 4830 - DNA, 18 bp, Artificial Sequence
  Description of Artificial Sequence: Synthetic oligonucleotide
acttgttaactgaaagtt

SEQ ID NO: 4831 - DNA, 18 bp, Artificial Sequence
  Description of Artificial Sequence: Synthetic oligonucleotide
taaatacttgttaactga

SEQ ID NO: 4832 - DNA, 18 bp, Artificial Sequence
  Description of Artificial Sequence: Synthetic oligonucleotide
ttcgataaatacttgtta

SEQ ID NO: 4833 - DNA, 18 bp, Artificial Sequence
  Description of Artificial Sequence: Synthetic oligonucleotide
aggtattcgataaatact

SEQ ID NO: 4834 - DNA, 18 bp, Artificial Sequence
  Description of Artificial Sequence: Synthetic oligonucleotide
agatcaggtattcgataa

SEQ ID NO: 4835 - DNA, 18 bp, Artificial Sequence
  Description of Artificial Sequence: Synthetic oligonucleotide
actacagatcaggtattc

SEQ ID NO: 4836 - DNA, 18 bp, Artificial Sequence
  Description of Artificial Sequence: Synthetic oligonucleotide
aagtccaacactacagat

SEQ ID NO: 4837 - DNA, 18 bp, Artificial Sequence
  Description of Artificial Sequence: Synthetic oligonucleotide
ggtctaagtccaacacta

SEQ ID NO: 4838 - DNA, 18 bp, Artificial Sequence
  Description of Artificial Sequence: Synthetic oligonucleotide
ccataggtctaagtccaa

SEQ ID NO: 4839 - DNA, 18 bp, Artificial Sequence
  Description of Artificial Sequence: Synthetic oligonucleotide
tccttccataggtctaag

SEQ ID NO: 4840 - DNA, 18 bp, Artificial Sequence
  Description of Artificial Sequence: Synthetic oligonucleotide
gtagctccttccataggt

SEQ ID NO: 4841 - DNA, 18 bp, Artificial Sequence
  Description of Artificial Sequence: Synthetic oligonucleotide
catcagtagctccttcca

SEQ ID NO: 4842 - DNA, 18 bp, Artificial Sequence
  Description of Artificial Sequence: Synthetic oligonucleotide
attcacatcagtagctcc

SEQ ID NO: 4843 - DNA, 18 bp, Artificial Sequence
  Description of Artificial Sequence: Synthetic oligonucleotide
ctttcattcacatcagta

SEQ ID NO: 4844 - DNA, 18 bp, Artificial Sequence
  Description of Artificial Sequence: Synthetic oligonucleotide
aacctttcattcacatca

SEQ ID NO: 4845 - DNA, 18 bp, Artificial Sequence
  Description of Artificial Sequence: Synthetic oligonucleotide
gtactaacctttcattca

SEQ ID NO: 4846 - DNA, 18 bp, Artificial Sequence
  Description of Artificial Sequence: Synthetic oligonucleotide
tctaggtactaacctttc

SEQ ID NO: 4847 - DNA, 18 bp, Artificial Sequence
  Description of Artificial Sequence: Synthetic oligonucleotide
ccgcctctaggtactaac

SEQ ID NO: 4848 - DNA, 18 bp, Artificial Sequence
  Description of Artificial Sequence: Synthetic oligonucleotide
ctgctccgcctctaggta

SEQ ID NO: 4849 - DNA, 18 bp, Artificial Sequence
  Description of Artificial Sequence: Synthetic oligonucleotide
tctctctgctccgcctct

SEQ ID NO: 4850 - DNA, 18 bp, Artificial Sequence
  Description of Artificial Sequence: Synthetic oligonucleotide
ttagttctctctgctccg

SEQ ID NO: 4851 - DNA, 18 bp, Artificial Sequence
  Description of Artificial Sequence: Synthetic oligonucleotide
tactattagttctctctg

SEQ ID NO: 4852 - DNA, 18 bp, Artificial Sequence
  Description of Artificial Sequence: Synthetic oligonucleotide
ttcactactattagttct

SEQ ID NO: 4853 - DNA, 18 bp, Artificial Sequence
  Description of Artificial Sequence: Synthetic oligonucleotide
agaacttcactactatta

SEQ ID NO: 4854 - DNA, 18 bp, Artificial Sequence
  Description of Artificial Sequence: Synthetic oligonucleotide
tgttaagaacttcactac

SEQ ID NO: 4855 - DNA, 18 bp, Artificial Sequence
  Description of Artificial Sequence: Synthetic oligonucleotide
acttatgttaagaacttc

SEQ ID NO: 4856 - DNA, 18 bp, Artificial Sequence
  Description of Artificial Sequence: Synthetic oligonucleotide
ctgaaacttatgttaaga

SEQ ID NO: 4857 - DNA, 18 bp, Artificial Sequence
  Description of Artificial Sequence: Synthetic oligonucleotide
tactactgaaacttatgt

SEQ ID NO: 4858 - DNA, 18 bp, Artificial Sequence
  Description of Artificial Sequence: Synthetic oligonucleotide
taccttactactgaaact

SEQ ID NO: 4859 - DNA, 18 bp, Artificial Sequence
  Description of Artificial Sequence: Synthetic oligonucleotide
atacctaccttactactg

SEQ ID NO: 4860 - DNA, 18 bp, Artificial Sequence
  Description of Artificial Sequence: Synthetic oligonucleotide
taataatacctaccttac

SEQ ID NO: 4861 - DNA, 18 bp, Artificial Sequence
  Description of Artificial Sequence: Synthetic oligonucleotide
ggagataataatacctac

SEQ ID NO: 4862 - DNA, 18 bp, Artificial Sequence
  Description of Artificial Sequence: Synthetic oligonucleotide
aaaatggagataataata

SEQ ID NO: 4863 - DNA, 18 bp, Artificial Sequence
  Description of Artificial Sequence: Synthetic oligonucleotide
tctacaaaatggagataa

SEQ ID NO: 4864 - DNA, 18 bp, Artificial Sequence
  Description of Artificial Sequence: Synthetic oligonucleotide
cctcgtctacaaaatgga

SEQ ID NO: 4865 - DNA, 18 bp, Artificial Sequence
  Description of Artificial Sequence: Synthetic oligonucleotide
ttttatctggaactgaac

SEQ ID NO: 4866 - DNA, 18 bp, Artificial Sequence
  Description of Artificial Sequence: Synthetic oligonucleotide
tacagttttatctggaac

SEQ ID NO: 4867 - DNA, 18 bp, Artificial Sequence
  Description of Artificial Sequence: Synthetic oligonucleotide
atggttacagttttatct

SEQ ID NO: 4868 - DNA, 18 bp, Artificial Sequence
  Description of Artificial Sequence: Synthetic oligonucleotide
aactgatggttacagttt

SEQ ID NO: 4869 - DNA, 18 bp, Artificial Sequence
  Description of Artificial Sequence: Synthetic oligonucleotide
tgcacaactgatggttac

SEQ ID NO: 4870 - DNA, 18 bp, Artificial Sequence
  Description of Artificial Sequence: Synthetic oligonucleotide
ttcattgcacaactgatg

SEQ ID NO: 4871 - DNA, 18 bp, Artificial Sequence
  Description of Artificial Sequence: Synthetic oligonucleotide
acacattcattgcacaac

SEQ ID NO: 4872 - DNA, 18 bp, Artificial Sequence
  Description of Artificial Sequence: Synthetic oligonucleotide
attaaacacattcattgc

SEQ ID NO: 4873 - DNA, 18 bp, Artificial Sequence
  Description of Artificial Sequence: Synthetic oligonucleotide
caaatattaaacacattc

SEQ ID NO: 4874 - DNA, 18 bp, Artificial Sequence
  Description of Artificial Sequence: Synthetic oligonucleotide
catcacaaatattaaaca

SEQ ID NO: 4875 - DNA, 18 bp, Artificial Sequence
  Description of Artificial Sequence: Synthetic oligonucleotide
taaaacatcacaaatatt

SEQ ID NO: 4876 - DNA, 18 bp, Artificial Sequence
  Description of Artificial Sequence: Synthetic oligonucleotide
caaattaaaacatcacaa

SEQ ID NO: 4877 - DNA, 18 bp, Artificial Sequence
  Description of Artificial Sequence: Synthetic oligonucleotide
aaaatcaaattaaaacat

SEQ ID NO: 4878 - DNA, 18 bp, Artificial Sequence
  Description of Artificial Sequence: Synthetic oligonucleotide
aaacaaaaatcaaattaa

SEQ ID NO: 4879 - DNA, 18 bp, Artificial Sequence
  Description of Artificial Sequence: Synthetic oligonucleotide
aacaaaaacaaaaatcaa

SEQ ID NO: 4880 - DNA, 18 bp, Artificial Sequence
  Description of Artificial Sequence: Synthetic oligonucleotide
gaaaaaacaaaaacaaaa

SEQ ID NO: 4881 - DNA, 18 bp, Artificial Sequence
  Description of Artificial Sequence: Synthetic oligonucleotide
taggagaaaaaacaaaaa

SEQ ID NO: 4882 - DNA, 18 bp, Artificial Sequence
  Description of Artificial Sequence: Synthetic oligonucleotide
ctgagtaggagaaaaaac

SEQ ID NO: 4883 - DNA, 18 bp, Artificial Sequence
  Description of Artificial Sequence: Synthetic oligonucleotide
aagagctgagtaggagaa

SEQ ID NO: 4884 - DNA, 18 bp, Artificial Sequence
  Description of Artificial Sequence: Synthetic oligonucleotide
ggggcaagagctgagtag

SEQ ID NO: 4885 - DNA, 18 bp, Artificial Sequence
  Description of Artificial Sequence: Synthetic oligonucleotide
gaacaggggcaagagctg

SEQ ID NO: 4886 - DNA, 18 bp, Artificial Sequence
  Description of Artificial Sequence: Synthetic oligonucleotide
aaagaacaggggcaagag

SEQ ID NO: 4887 - DNA, 18 bp, Artificial Sequence
  Description of Artificial Sequence: Synthetic oligonucleotide
gaagcaaagaacaggggc

SEQ ID NO: 4888 - DNA, 18 bp, Artificial Sequence
  Description of Artificial Sequence: Synthetic oligonucleotide
aacgagaagcaaagaaca

SEQ ID NO: 4889 - DNA, 18 bp, Artificial Sequence
  Description of Artificial Sequence: Synthetic oligonucleotide
aacaaaacgagaagcaaa

SEQ ID NO: 4890 - DNA, 18 bp, Artificial Sequence
  Description of Artificial Sequence: Synthetic oligonucleotide
tcaccaacaaaacgagaa

SEQ ID NO: 4891 - DNA, 18 bp, Artificial Sequence
  Description of Artificial Sequence: Synthetic oligonucleotide
tatcttcaccaacaaaac

SEQ ID NO: 4892 - DNA, 18 bp, Artificial Sequence
  Description of Artificial Sequence: Synthetic oligonucleotide
tgtgatatcttcaccaac

SEQ ID NO: 4893 - DNA, 18 bp, Artificial Sequence
  Description of Artificial Sequence: Synthetic oligonucleotide
atcactgtgatatcttca

SEQ ID NO: 4894 - DNA, 18 bp, Artificial Sequence
  Description of Artificial Sequence: Synthetic oligonucleotide
cagacatcactgtgatat

SEQ ID NO: 4895 - DNA, 18 bp, Artificial Sequence
  Description of Artificial Sequence: Synthetic oligonucleotide
gaatgcagacatcactgt

SEQ ID NO: 4896 - DNA, 18 bp, Artificial Sequence
  Description of Artificial Sequence: Synthetic oligonucleotide
aggttgaatgcagacatc

SEQ ID NO: 4897 - DNA, 18 bp, Artificial Sequence
  Description of Artificial Sequence: Synthetic oligonucleotide
gcagcaggttgaatgcag

SEQ ID NO: 4898 - DNA, 18 bp, Artificial Sequence
  Description of Artificial Sequence: Synthetic oligonucleotide
tcaccaaatgcagcaggt

SEQ ID NO: 4899 - DNA, 18 bp, Artificial Sequence
  Description of Artificial Sequence: Synthetic oligonucleotide
ctttgtcaccaaatgcag

SEQ ID NO: 4900 - DNA, 18 bp, Artificial Sequence
  Description of Artificial Sequence: Synthetic oligonucleotide
tggctctttgtcaccaaa

SEQ ID NO: 4901 - DNA, 18 bp, Artificial Sequence
  Description of Artificial Sequence: Synthetic oligonucleotide
ctggctggctctttgtca

SEQ ID NO: 4902 - DNA, 18 bp, Artificial Sequence
  Description of Artificial Sequence: Synthetic oligonucleotide
ggctactggctggctctt

SEQ ID NO: 4903 - DNA, 18 bp, Artificial Sequence
  Description of Artificial Sequence: Synthetic oligonucleotide
cgaagggctactggctgg

SEQ ID NO: 4904 - DNA, 18 bp, Artificial Sequence
  Description of Artificial Sequence: Synthetic oligonucleotide
aggctcgaagggctactg

SEQ ID NO: 4905 - DNA, 18 bp, Artificial Sequence
  Description of Artificial Sequence: Synthetic oligonucleotide
cccacaggctcgaagggc

SEQ ID NO: 4906 - DNA, 18 bp, Artificial Sequence
  Description of Artificial Sequence: Synthetic oligonucleotide
ggaagcccacaggctcga

SEQ ID NO: 4907 - DNA, 18 bp, Artificial Sequence
  Description of Artificial Sequence: Synthetic oligonucleotide
ctgagggaagcccacagg

SEQ ID NO: 4908 - DNA, 18 bp, Artificial Sequence
  Description of Artificial Sequence: Synthetic oligonucleotide
aacctgagggaagcccac

SEQ ID NO: 4909 - DNA, 18 bp, Artificial Sequence
  Description of Artificial Sequence: Synthetic oligonucleotide
gcagcaacctgagggaag

SEQ ID NO: 4910 - DNA, 18 bp, Artificial Sequence
  Description of Artificial Sequence: Synthetic oligonucleotide
aacaagcagcaacctgag

SEQ ID NO: 4911 - DNA, 18 bp, Artificial Sequence
  Description of Artificial Sequence: Synthetic oligonucleotide
agtacaacaagcagcaac

SEQ ID NO: 4912 - DNA, 18 bp, Artificial Sequence
  Description of Artificial Sequence: Synthetic oligonucleotide
tgtacagtacaacaagca

SEQ ID NO: 4913 - DNA, 18 bp, Artificial Sequence
  Description of Artificial Sequence: Synthetic oligonucleotide
cactatgtacagtacaac

SEQ ID NO: 4914 - DNA, 18 bp, Artificial Sequence
  Description of Artificial Sequence: Synthetic oligonucleotide
gccttcactatgtacagt

SEQ ID NO: 4915 - DNA, 18 bp, Artificial Sequence
  Description of Artificial Sequence: Synthetic oligonucleotide
cctgtgccttcactatgt

SEQ ID NO: 4916 - DNA, 18 bp, Artificial Sequence
  Description of Artificial Sequence: Synthetic oligonucleotide
ttggccctgtgccttcac

SEQ ID NO: 4917 - DNA, 18 bp, Artificial Sequence
  Description of Artificial Sequence: Synthetic oligonucleotide
cccagttggccctgtgcc

SEQ ID NO: 4918 - DNA, 18 bp, Artificial Sequence
  Description of Artificial Sequence: Synthetic oligonucleotide
aaacacccagttggccct

SEQ ID NO: 4919 - DNA, 18 bp, Artificial Sequence
  Description of Artificial Sequence: Synthetic oligonucleotide
agcagaaacacccagttg

SEQ ID NO: 4920 - DNA, 18 bp, Artificial Sequence
  Description of Artificial Sequence: Synthetic oligonucleotide
cctgcagcagaaacaccc

SEQ ID NO: 4921 - DNA, 18 bp, Artificial Sequence
  Description of Artificial Sequence: Synthetic oligonucleotide
catttcctgcagcagaaa

SEQ ID NO: 4922 - DNA, 18 bp, Artificial Sequence
  Description of Artificial Sequence: Synthetic oligonucleotide
tgtatcatttcctgcagc

SEQ ID NO: 4923 - DNA, 18 bp, Artificial Sequence
  Description of Artificial Sequence: Synthetic oligonucleotide
gatggtgtatcatttcct

SEQ ID NO: 4924 - DNA, 18 bp, Artificial Sequence
  Description of Artificial Sequence: Synthetic oligonucleotide
agcatgatggtgtatcat

SEQ ID NO: 4925 - DNA, 18 bp, Artificial Sequence
  Description of Artificial Sequence: Synthetic oligonucleotide
agcaaagcatgatggtgt

SEQ ID NO: 4926 - DNA, 18 bp, Artificial Sequence
  Description of Artificial Sequence: Synthetic oligonucleotide
aatttagcaaagcatgat

SEQ ID NO: 4927 - DNA, 18 bp, Artificial Sequence
  Description of Artificial Sequence: Synthetic oligonucleotide
aatgaaatttagcaaagc

SEQ ID NO: 4928 - DNA, 18 bp, Artificial Sequence
  Description of Artificial Sequence: Synthetic oligonucleotide
aagaaaatgaaatttagc

SEQ ID NO: 4929 - DNA, 18 bp, Artificial Sequence
  Description of Artificial Sequence: Synthetic oligonucleotide
ccaaacatgcccttgact

SEQ ID NO: 4930 - DNA, 18 bp, Artificial Sequence
  Description of Artificial Sequence: Synthetic oligonucleotide
ccaaaccaaacatgccct

SEQ ID NO: 4931 - DNA, 18 bp, Artificial Sequence
  Description of Artificial Sequence: Synthetic oligonucleotide
ccaaaccaaaccaaacat

SEQ ID NO: 4932 - DNA, 18 bp, Artificial Sequence
  Description of Artificial Sequence: Synthetic oligonucleotide
tctttccaaaccaaacca

SEQ ID NO: 4933 - DNA, 18 bp, Artificial Sequence
  Description of Artificial Sequence: Synthetic oligonucleotide
gagtctctttccaaacca

SEQ ID NO: 4934 - DNA, 18 bp, Artificial Sequence
  Description of Artificial Sequence: Synthetic oligonucleotide
ctagagagtctctttcca

SEQ ID NO: 4935 - DNA, 18 bp, Artificial Sequence
  Description of Artificial Sequence: Synthetic oligonucleotide
cccttctagagagtctct

SEQ ID NO: 4936 - DNA, 18 bp, Artificial Sequence
  Description of Artificial Sequence: Synthetic oligonucleotide
tctgtcccttctagagag

SEQ ID NO: 4937 - DNA, 18 bp, Artificial Sequence
  Description of Artificial Sequence: Synthetic oligonucleotide
ccttttctgtcccttcta

SEQ ID NO: 4938 - DNA, 18 bp, Artificial Sequence
  Description of Artificial Sequence: Synthetic oligonucleotide
ttgacccttttctgtccc

SEQ ID NO: 4939 - DNA, 18 bp, Artificial Sequence
  Description of Artificial Sequence: Synthetic oligonucleotide
cacccttgacccttttct

SEQ ID NO: 4940 - DNA, 18 bp, Artificial Sequence
  Description of Artificial Sequence: Synthetic oligonucleotide
tgggccacccttgaccct

SEQ ID NO: 4941 - DNA, 18 bp, Artificial Sequence
  Description of Artificial Sequence: Synthetic oligonucleotide
agttttgggccacccttg

SEQ ID NO: 4942 - DNA, 18 bp, Artificial Sequence
  Description of Artificial Sequence: Synthetic oligonucleotide
cagtcagttttgggccac

SEQ ID NO: 4943 - DNA, 18 bp, Artificial Sequence
  Description of Artificial Sequence: Synthetic oligonucleotide
gtcagcagtcagttttgg

SEQ ID NO: 4944 - DNA, 18 bp, Artificial Sequence
  Description of Artificial Sequence: Synthetic oligonucleotide
gaggggtcagcagtcagt

SEQ ID NO: 4945 - DNA, 18 bp, Artificial Sequence
  Description of Artificial Sequence: Synthetic oligonucleotide
tgtaggaggggtcagcag

SEQ ID NO: 4946 - DNA, 18 bp, Artificial Sequence
  Description of Artificial Sequence: Synthetic oligonucleotide
ctgaatgtaggaggggtc

SEQ ID NO: 4947 - DNA, 18 bp, Artificial Sequence
  Description of Artificial Sequence: Synthetic oligonucleotide
gactcctgaatgtaggag

SEQ ID NO: 4948 - DNA, 18 bp, Artificial Sequence
  Description of Artificial Sequence: Synthetic oligonucleotide
tcacagactcctgaatgt

SEQ ID NO: 4949 - DNA, 18 bp, Artificial Sequence
  Description of Artificial Sequence: Synthetic oligonucleotide
ggctgtcacagactcctg

SEQ ID NO: 4950 - DNA, 18 bp, Artificial Sequence
  Description of Artificial Sequence: Synthetic oligonucleotide
ggtggctgtcacagactc

SEQ ID NO: 4951 - DNA, 18 bp, Artificial Sequence
  Description of Artificial Sequence: Synthetic oligonucleotide
gttggggtggctgtcaca

SEQ ID NO: 4952 - DNA, 18 bp, Artificial Sequence
  Description of Artificial Sequence: Synthetic oligonucleotide
cacgtgttggggtggctg

SEQ ID NO: 4953 - DNA, 18 bp, Artificial Sequence
  Description of Artificial Sequence: Synthetic oligonucleotide
gacgtcacgtgttggggt

SEQ ID NO: 4954 - DNA, 18 bp, Artificial Sequence
  Description of Artificial Sequence: Synthetic oligonucleotide
gccatgacgtcacgtgtt

SEQ ID NO: 4955 - DNA, 18 bp, Artificial Sequence
  Description of Artificial Sequence: Synthetic oligonucleotide
tactggccatgacgtcac

SEQ ID NO: 4956 - DNA, 18 bp, Artificial Sequence
  Description of Artificial Sequence: Synthetic oligonucleotide
ttccctactggccatgac

SEQ ID NO: 4957 - DNA, 18 bp, Artificial Sequence
  Description of Artificial Sequence: Synthetic oligonucleotide
tcatcttccctactggcc

SEQ ID NO: 4958 - DNA, 18 bp, Artificial Sequence
  Description of Artificial Sequence: Synthetic oligonucleotide
tcagctcatcttccctac

SEQ ID NO: 4959 - DNA, 18 bp, Artificial Sequence
  Description of Artificial Sequence: Synthetic oligonucleotide
gttcctcagctcatcttc

SEQ ID NO: 4960 - DNA, 18 bp, Artificial Sequence
  Description of Artificial Sequence: Synthetic oligonucleotide
acacagttcctcagctca

SEQ ID NO: 4961 - DNA, 18 bp, Artificial Sequence
  Description of Artificial Sequence: Synthetic oligonucleotide
ataccacacagttcctca

SEQ ID NO: 4962 - DNA, 18 bp, Artificial Sequence
  Description of Artificial Sequence: Synthetic oligonucleotide
cccacataccacacagtt

SEQ ID NO: 4963 - DNA, 18 bp, Artificial Sequence
  Description of Artificial Sequence: Synthetic oligonucleotide
tggtccccacataccaca

SEQ ID NO: 4964 - DNA, 18 bp, Artificial Sequence
  Description of Artificial Sequence: Synthetic oligonucleotide
tgtggcttggtccccaca

SEQ ID NO: 4965 - DNA, 18 bp, Artificial Sequence
  Description of Artificial Sequence: Synthetic oligonucleotide
tagcctgtggcttggtcc

SEQ ID NO: 4966 - DNA, 18 bp, Artificial Sequence
  Description of Artificial Sequence: Synthetic oligonucleotide
agtggtagcctgtggctt

SEQ ID NO: 4967 - DNA, 18 bp, Artificial Sequence
  Description of Artificial Sequence: Synthetic oligonucleotide
attaaagtggtagcctgt

SEQ ID NO: 4968 - DNA, 18 bp, Artificial Sequence
  Description of Artificial Sequence: Synthetic oligonucleotide
agcgcattaaagtggtag

SEQ ID NO: 4969 - DNA, 18 bp, Artificial Sequence
  Description of Artificial Sequence: Synthetic oligonucleotide
aagtcagcgcattaaagt

SEQ ID NO: 4970 - DNA, 18 bp, Artificial Sequence
  Description of Artificial Sequence: Synthetic oligonucleotide
ctcacaagtcagcgcatt

SEQ ID NO: 4971 - DNA, 18 bp, Artificial Sequence
  Description of Artificial Sequence: Synthetic oligonucleotide
cagccctcacaagtcagc

SEQ ID NO: 4972 - DNA, 18 bp, Artificial Sequence
  Description of Artificial Sequence: Synthetic oligonucleotide
ccttgcagccctcacaag

SEQ ID NO: 4973 - DNA, 18 bp, Artificial Sequence
  Description of Artificial Sequence: Synthetic oligonucleotide
gaaacccttgcagccctc

SEQ ID NO: 4974 - DNA, 18 bp, Artificial Sequence
  Description of Artificial Sequence: Synthetic oligonucleotide
ctgaagaaacccttgcag

SEQ ID NO: 4975 - DNA, 18 bp, Artificial Sequence
  Description of Artificial Sequence: Synthetic oligonucleotide
cacctgaagaaacccttg

SEQ ID NO: 4976 - DNA, 18 bp, Artificial Sequence
  Description of Artificial Sequence: Synthetic oligonucleotide
actctcacctgaagaaac

SEQ ID NO: 4977 - DNA, 18 bp, Artificial Sequence
  Description of Artificial Sequence: Synthetic oligonucleotide
aggagactctcacctgaa

SEQ ID NO: 4978 - DNA, 18 bp, Artificial Sequence
  Description of Artificial Sequence: Synthetic oligonucleotide
tggggaggagactctcac

SEQ ID NO: 4979 - DNA, 18 bp, Artificial Sequence
  Description of Artificial Sequence: Synthetic oligonucleotide
tccattggggaggagact

SEQ ID NO: 4980 - DNA, 18 bp, Artificial Sequence
  Description of Artificial Sequence: Synthetic oligonucleotide
ctatttccattggggagg

SEQ ID NO: 4981 - DNA, 18 bp, Artificial Sequence
  Description of Artificial Sequence: Synthetic oligonucleotide
gagggctatttccattgg

SEQ ID NO: 4982 - DNA, 18 bp, Artificial Sequence
  Description of Artificial Sequence: Synthetic oligonucleotide
gtttggagggctatttcc

SEQ ID NO: 4983 - DNA, 18 bp, Artificial Sequence
  Description of Artificial Sequence: Synthetic oligonucleotide
gtttggtttggagggcta

SEQ ID NO: 4984 - DNA, 18 bp, Artificial Sequence
  Description of Artificial Sequence: Synthetic oligonucleotide
agggagtttggtttggag

SEQ ID NO: 4985 - DNA, 18 bp, Artificial Sequence
  Description of Artificial Sequence: Synthetic oligonucleotide
ctaatagggagtttggtt

SEQ ID NO: 4986 - DNA, 18 bp, Artificial Sequence
  Description of Artificial Sequence: Synthetic oligonucleotide
gctgactaatagggagtt

SEQ ID NO: 4987 - DNA, 18 bp, Artificial Sequence
  Description of Artificial Sequence: Synthetic oligonucleotide
taaaggctgactaatagg

SEQ ID NO: 4988 - DNA, 18 bp, Artificial Sequence
  Description of Artificial Sequence: Synthetic oligonucleotide
gggtgtaaaggctgacta

SEQ ID NO: 4989 - DNA, 18 bp, Artificial Sequence
  Description of Artificial Sequence: Synthetic oligonucleotide
agcgagggtgtaaaggct

SEQ ID NO: 4990 - DNA, 18 bp, Artificial Sequence
  Description of Artificial Sequence: Synthetic oligonucleotide
gcaccagcgagggtgtaa

SEQ ID NO: 4991 - DNA, 18 bp, Artificial Sequence
  Description of Artificial Sequence: Synthetic oligonucleotide
cttgggcaccagcgaggg

SEQ ID NO: 4992 - DNA, 18 bp, Artificial Sequence
  Description of Artificial Sequence: Synthetic oligonucleotide
acaggcttgggcaccagc

SEQ ID NO: 4993 - DNA, 18 bp, Artificial Sequence
  Description of Artificial Sequence: Synthetic oligonucleotide
gctggacaggcttgggca

SEQ ID NO: 4994 - DNA, 18 bp, Artificial Sequence
  Description of Artificial Sequence: Synthetic oligonucleotide
atgtagctggacaggctt

SEQ ID NO: 4995 - DNA, 18 bp, Artificial Sequence
  Description of Artificial Sequence: Synthetic oligonucleotide
gagtaatgtagctggaca

SEQ ID NO: 4996 - DNA, 18 bp, Artificial Sequence
  Description of Artificial Sequence: Synthetic oligonucleotide
ccaataatatattaaggt

SEQ ID NO: 4997 - DNA, 18 bp, Artificial Sequence
  Description of Artificial Sequence: Synthetic oligonucleotide
ttatgccaataatatatt

SEQ ID NO: 4998 - DNA, 18 bp, Artificial Sequence
  Description of Artificial Sequence: Synthetic oligonucleotide
tcctgttatgccaataat

SEQ ID NO: 4999 - DNA, 18 bp, Artificial Sequence
  Description of Artificial Sequence: Synthetic oligonucleotide
gttcttcctgttatgcca

SEQ ID NO: 5000 - DNA, 18 bp, Artificial Sequence
  Description of Artificial Sequence: Synthetic oligonucleotide
ttcaggttcttcctgtta

SEQ ID NO: 5001 - DNA, 18 bp, Artificial Sequence
  Description of Artificial Sequence: Synthetic oligonucleotide
taaatttcaggttcttcc

SEQ ID NO: 5002 - DNA, 18 bp, Artificial Sequence
  Description of Artificial Sequence: Synthetic oligonucleotide
atacataaatttcaggtt

SEQ ID NO: 5003 - DNA, 18 bp, Artificial Sequence
  Description of Artificial Sequence: Synthetic oligonucleotide
gtgacatacataaatttc

SEQ ID NO: 5004 - DNA, 18 bp, Artificial Sequence
  Description of Artificial Sequence: Synthetic oligonucleotide
tacacgtgacatacataa

SEQ ID NO: 5005 - DNA, 18 bp, Artificial Sequence
  Description of Artificial Sequence: Synthetic oligonucleotide
aaaagtacacgtgacata

SEQ ID NO: 5006 - DNA, 18 bp, Artificial Sequence
  Description of Artificial Sequence: Synthetic oligonucleotide
aaaaaaaaagtacacgtg

SEQ ID NO: 5007 - DNA, 18 bp, Artificial Sequence
  Description of Artificial Sequence: Synthetic oligonucleotide
agagaaaaaaaaaagtac

SEQ ID NO: 5008 - DNA, 18 bp, Artificial Sequence
  Description of Artificial Sequence: Synthetic oligonucleotide
gcaaaagagaaaaaaaaa

SEQ ID NO: 5009 - DNA, 18 bp, Artificial Sequence
  Description of Artificial Sequence: Synthetic oligonucleotide
tcacagcaaaagagaaaa

SEQ ID NO: 5010 - DNA, 18 bp, Artificial Sequence
  Description of Artificial Sequence: Synthetic oligonucleotide
tgatgtcacagcaaaaga

SEQ ID NO: 5011 - DNA, 18 bp, Artificial Sequence
  Description of Artificial Sequence: Synthetic oligonucleotide
ccaggtgatgtcacagca

SEQ ID NO: 5012 - DNA, 18 bp, Artificial Sequence
  Description of Artificial Sequence: Synthetic oligonucleotide
ttttcccaggtgatgtca

SEQ ID NO: 5013 - DNA, 18 bp, Artificial Sequence
  Description of Artificial Sequence: Synthetic oligonucleotide
ctggattttcccaggtga

SEQ ID NO: 5014 - DNA, 18 bp, Artificial Sequence
  Description of Artificial Sequence: Synthetic oligonucleotide
atcttctggattttccca

SEQ ID NO: 5015 - DNA, 18 bp, Artificial Sequence
  Description of Artificial Sequence: Synthetic oligonucleotide
atccaatcttctggattt

SEQ ID NO: 5016 - DNA, 18 bp, Artificial Sequence
  Description of Artificial Sequence: Synthetic oligonucleotide
tggttatccaatcttctg

SEQ ID NO: 5017 - DNA, 18 bp, Artificial Sequence
  Description of Artificial Sequence: Synthetic oligonucleotide
tcttggttatccaatctt

SEQ ID NO: 5018 - DNA, 18 bp, Artificial Sequence
  Description of Artificial Sequence: Synthetic oligonucleotide
tcatttcttggttatcca

SEQ ID NO: 5019 - DNA, 18 bp, Artificial Sequence
  Description of Artificial Sequence: Synthetic oligonucleotide
attagtcatttcttggtt

SEQ ID NO: 5020 - DNA, 18 bp, Artificial Sequence
  Description of Artificial Sequence: Synthetic oligonucleotide
tcttgattagtcatttct

SEQ ID NO: 5021 - DNA, 18 bp, Artificial Sequence
  Description of Artificial Sequence: Synthetic oligonucleotide
cagactcttgattagtca

SEQ ID NO: 5022 - DNA, 18 bp, Artificial Sequence
  Description of Artificial Sequence: Synthetic oligonucleotide
tgtacggcagactcttga

SEQ ID NO: 5023 - DNA, 18 bp, Artificial Sequence
  Description of Artificial Sequence: Synthetic oligonucleotide
tcacatgtacggcagact

SEQ ID NO: 5024 - DNA, 18 bp, Artificial Sequence
  Description of Artificial Sequence: Synthetic oligonucleotide
cattttcacatgtacggc

SEQ ID NO: 5025 - DNA, 18 bp, Artificial Sequence
  Description of Artificial Sequence: Synthetic oligonucleotide
caccattttcacatgtac

SEQ ID NO: 5026 - DNA, 18 bp, Artificial Sequence
  Description of Artificial Sequence: Synthetic oligonucleotide
atacccaccattttcaca

SEQ ID NO: 5027 - DNA, 18 bp, Artificial Sequence
  Description of Artificial Sequence: Synthetic oligonucleotide
ggcaaatacccaccattt

SEQ ID NO: 5028 - DNA, 18 bp, Artificial Sequence
  Description of Artificial Sequence: Synthetic oligonucleotide
aaataggcaaatacccac

SEQ ID NO: 5029 - DNA, 18 bp, Artificial Sequence
  Description of Artificial Sequence: Synthetic oligonucleotide
actggaaataggcaaata

SEQ ID NO: 5030 - DNA, 18 bp, Artificial Sequence
  Description of Artificial Sequence: Synthetic oligonucleotide
atggaactggaaataggc

SEQ ID NO: 5031 - DNA, 18 bp, Artificial Sequence
  Description of Artificial Sequence: Synthetic oligonucleotide
aataaatggaactggaaa

SEQ ID NO: 5032 - DNA, 18 bp, Artificial Sequence
  Description of Artificial Sequence: Synthetic oligonucleotide
ccattaataaatggaact

SEQ ID NO: 5033 - DNA, 18 bp, Artificial Sequence
  Description of Artificial Sequence: Synthetic oligonucleotide
atttaccattaataaatg

SEQ ID NO: 5034 - DNA, 18 bp, Artificial Sequence
  Description of Artificial Sequence: Synthetic oligonucleotide
tgaagatttaccattaat

SEQ ID NO: 5035 - DNA, 18 bp, Artificial Sequence
  Description of Artificial Sequence: Synthetic oligonucleotide
agtggtgaagatttacca

SEQ ID NO: 5036 - DNA, 18 bp, Artificial Sequence
  Description of Artificial Sequence: Synthetic oligonucleotide
gtaaaagtggtgaagatt

SEQ ID NO: 5037 - DNA, 18 bp, Artificial Sequence
  Description of Artificial Sequence: Synthetic oligonucleotide
cagaggtaaaagtggtga

SEQ ID NO: 5038 - DNA, 18 bp, Artificial Sequence
  Description of Artificial Sequence: Synthetic oligonucleotide
agagacagaggtaaaagt

SEQ ID NO: 5039 - DNA, 18 bp, Artificial Sequence
  Description of Artificial Sequence: Synthetic oligonucleotide
tggttagagacagaggta

SEQ ID NO: 5040 - DNA, 18 bp, Artificial Sequence
  Description of Artificial Sequence: Synthetic oligonucleotide
ttatctggttagagacag

SEQ ID NO: 5041 - DNA, 18 bp, Artificial Sequence
  Description of Artificial Sequence: Synthetic oligonucleotide
cataattatctggttaga

SEQ ID NO: 5042 - DNA, 18 bp, Artificial Sequence
  Description of Artificial Sequence: Synthetic oligonucleotide
agtcccataattatctgg

SEQ ID NO: 5043 - DNA, 18 bp, Artificial Sequence
  Description of Artificial Sequence: Synthetic oligonucleotide
atttcagtcccataatta

SEQ ID NO: 5044 - DNA, 18 bp, Artificial Sequence
  Description of Artificial Sequence: Synthetic oligonucleotide
ataaaatttcagtcccat

SEQ ID NO: 5045 - DNA, 18 bp, Artificial Sequence
  Description of Artificial Sequence: Synthetic oligonucleotide
gttgtataaaatttcagt

SEQ ID NO: 5046 - DNA, 18 bp, Artificial Sequence
  Description of Artificial Sequence: Synthetic oligonucleotide
aggaattcccttcaaact

SEQ ID NO: 5047 - DNA, 18 bp, Artificial Sequence
  Description of Artificial Sequence: Synthetic oligonucleotide
aaaccaggaattcccttc

SEQ ID NO: 5048 - DNA, 18 bp, Artificial Sequence
  Description of Artificial Sequence: Synthetic oligonucleotide
tgaaaaaaccaggaattc

SEQ ID NO: 5049 - DNA, 18 bp, Artificial Sequence
  Description of Artificial Sequence: Synthetic oligonucleotide
aagtatgaaaaaaccagg

SEQ ID NO: 5050 - DNA, 18 bp, Artificial Sequence
  Description of Artificial Sequence: Synthetic oligonucleotide
ctagtaagtatgaaaaaa

SEQ ID NO: 5051 - DNA, 18 bp, Artificial Sequence
  Description of Artificial Sequence: Synthetic oligonucleotide
gggttctagtaagtatga

SEQ ID NO: 5052 - DNA, 18 bp, Artificial Sequence
  Description of Artificial Sequence: Synthetic oligonucleotide
atgaagggttctagtaag

SEQ ID NO: 5053 - DNA, 18 bp, Artificial Sequence
  Description of Artificial Sequence: Synthetic oligonucleotide
attccatgaagggttcta

SEQ ID NO: 5054 - DNA, 18 bp, Artificial Sequence
  Description of Artificial Sequence: Synthetic oligonucleotide
cagatattccatgaaggg

SEQ ID NO: 5055 - DNA, 18 bp, Artificial Sequence
  Description of Artificial Sequence: Synthetic oligonucleotide
ggggacagatattccatg

SEQ ID NO: 5056 - DNA, 18 bp, Artificial Sequence
  Description of Artificial Sequence: Synthetic oligonucleotide
agggtggggacagatatt

SEQ ID NO: 5057 - DNA, 18 bp, Artificial Sequence
  Description of Artificial Sequence: Synthetic oligonucleotide
gggtgagggtggggacag

SEQ ID NO: 5058 - DNA, 18 bp, Artificial Sequence
  Description of Artificial Sequence: Synthetic oligonucleotide
aagtggggtgagggtggg

SEQ ID NO: 5059 - DNA, 18 bp, Artificial Sequence
  Description of Artificial Sequence: Synthetic oligonucleotide
gggaaaagtggggtgagg

SEQ ID NO: 5060 - DNA, 18 bp, Artificial Sequence
  Description of Artificial Sequence: Synthetic oligonucleotide
ggagagggaaaagtgggg

SEQ ID NO: 5061 - DNA, 18 bp, Artificial Sequence
  Description of Artificial Sequence: Synthetic oligonucleotide
ggaggggagagggaaaag

SEQ ID NO: 5062 - DNA, 18 bp, Artificial Sequence
  Description of Artificial Sequence: Synthetic oligonucleotide
gtgggggaggggagaggg

SEQ ID NO: 5063 - DNA, 18 bp, Artificial Sequence
  Description of Artificial Sequence: Synthetic oligonucleotide
ctgctgtgggggagggga

SEQ ID NO: 5064 - DNA, 18 bp, Artificial Sequence
  Description of Artificial Sequence: Synthetic oligonucleotide
gcattctgctgtggggga

SEQ ID NO: 5065 - DNA, 18 bp, Artificial Sequence
  Description of Artificial Sequence: Synthetic oligonucleotide
tcaaggcattctgctgtg

SEQ ID NO: 5066 - DNA, 18 bp, Artificial Sequence
  Description of Artificial Sequence: Synthetic oligonucleotide
ggaactcaaggcattctg

SEQ ID NO: 5067 - DNA, 18 bp, Artificial Sequence
  Description of Artificial Sequence: Synthetic oligonucleotide
tacggaactcaaggcatt

SEQ ID NO: 5068 - DNA, 18 bp, Artificial Sequence
  Description of Artificial Sequence: Synthetic oligonucleotide
tagaatacggaactcaag

SEQ ID NO: 5069 - DNA, 18 bp, Artificial Sequence
  Description of Artificial Sequence: Synthetic oligonucleotide
agaactagaatacggaac

SEQ ID NO: 5070 - DNA, 18 bp, Artificial Sequence
  Description of Artificial Sequence: Synthetic oligonucleotide
cacacagaactagaatac

SEQ ID NO: 5071 - DNA, 18 bp, Artificial Sequence
  Description of Artificial Sequence: Synthetic oligonucleotide
cagatcacacagaactag

SEQ ID NO: 5072 - DNA, 18 bp, Artificial Sequence
  Description of Artificial Sequence: Synthetic oligonucleotide
aagatcagatcacacaga

SEQ ID NO: 5073 - DNA, 18 bp, Artificial Sequence
  Description of Artificial Sequence: Synthetic oligonucleotide
aggtaaagatcagatcac

SEQ ID NO: 5074 - DNA, 18 bp, Artificial Sequence
  Description of Artificial Sequence: Synthetic oligonucleotide
agggaaggtaaagatcag

SEQ ID NO: 5075 - DNA, 18 bp, Artificial Sequence
  Description of Artificial Sequence: Synthetic oligonucleotide
aaggaagggaaggtaaag

SEQ ID NO: 5076 - DNA, 18 bp, Artificial Sequence
  Description of Artificial Sequence: Synthetic oligonucleotide
gatccaaggaagggaagg

SEQ ID NO: 5077 - DNA, 18 bp, Artificial Sequence
  Description of Artificial Sequence: Synthetic oligonucleotide
acagggatccaaggaagg

SEQ ID NO: 5078 - DNA, 18 bp, Artificial Sequence
  Description of Artificial Sequence: Synthetic oligonucleotide
ggtgcacagggatccaag

SEQ ID NO: 5079 - DNA, 18 bp, Artificial Sequence
  Description of Artificial Sequence: Synthetic oligonucleotide
cagtaggtgcacagggat

SEQ ID NO: 5080 - DNA, 18 bp, Artificial Sequence
  Description of Artificial Sequence: Synthetic oligonucleotide
ggctccagtaggtgcaca

SEQ ID NO: 5081 - DNA, 18 bp, Artificial Sequence
  Description of Artificial Sequence: Synthetic oligonucleotide
aacctggctccagtaggt

SEQ ID NO: 5082 - DNA, 18 bp, Artificial Sequence
  Description of Artificial Sequence: Synthetic oligonucleotide
agagtaacctggctccag

SEQ ID NO: 5083 - DNA, 18 bp, Artificial Sequence
  Description of Artificial Sequence: Synthetic oligonucleotide
gacccagagtaacctggc

SEQ ID NO: 5084 - DNA, 18 bp, Artificial Sequence
  Description of Artificial Sequence: Synthetic oligonucleotide
tccaggacccagagtaac

SEQ ID NO: 5085 - DNA, 18 bp, Artificial Sequence
  Description of Artificial Sequence: Synthetic oligonucleotide
gtcaggtccaggacccag

SEQ ID NO: 5086 - DNA, 18 bp, Artificial Sequence
  Description of Artificial Sequence: Synthetic oligonucleotide
aggcagtcaggtccagga

SEQ ID NO: 5087 - DNA, 18 bp, Artificial Sequence
  Description of Artificial Sequence: Synthetic oligonucleotide
gaatgaggcagtcaggtc

SEQ ID NO: 5088 - DNA, 18 bp, Artificial Sequence
  Description of Artificial Sequence: Synthetic oligonucleotide
ctccagaatgaggcagtc

SEQ ID NO: 5089 - DNA, 18 bp, Artificial Sequence
  Description of Artificial Sequence: Synthetic oligonucleotide
gaagcctccagaatgagg

SEQ ID NO: 5090 - DNA, 18 bp, Artificial Sequence
  Description of Artificial Sequence: Synthetic oligonucleotide
gtctggaagcctccagaa

SEQ ID NO: 5091 - DNA, 18 bp, Artificial Sequence
  Description of Artificial Sequence: Synthetic oligonucleotide
tggctgtctggaagcctc

SEQ ID NO: 5092 - DNA, 18 bp, Artificial Sequence
  Description of Artificial Sequence: Synthetic oligonucleotide
aactgtggctgtctggaa

SEQ ID NO: 5093 - DNA, 18 bp, Artificial Sequence
  Description of Artificial Sequence: Synthetic oligonucleotide
gcactaactgtggctgtc

SEQ ID NO: 5094 - DNA, 18 bp, Artificial Sequence
  Description of Artificial Sequence: Synthetic oligonucleotide
tttgggcactaactgtgg

SEQ ID NO: 5095 - DNA, 18 bp, Artificial Sequence
  Description of Artificial Sequence: Synthetic oligonucleotide
tcaggtttgggcactaac

SEQ ID NO: 5096 - DNA, 18 bp, Artificial Sequence
  Description of Artificial Sequence: Synthetic oligonucleotide
tcctctcaggtttgggca

SEQ ID NO: 5097 - DNA, 18 bp, Artificial Sequence
  Description of Artificial Sequence: Synthetic oligonucleotide
agccatcctctcaggttt

SEQ ID NO: 5098 - DNA, 18 bp, Artificial Sequence
  Description of Artificial Sequence: Synthetic oligonucleotide
tctgaagccatcctctca

SEQ ID NO: 5099 - DNA, 18 bp, Artificial Sequence
  Description of Artificial Sequence: Synthetic oligonucleotide
ctccatctgaagccatcc

SEQ ID NO: 5100 - DNA, 18 bp, Artificial Sequence
  Description of Artificial Sequence: Synthetic oligonucleotide
tacctccatctgaagcca

SEQ ID NO: 5101 - DNA, 18 bp, Artificial Sequence
  Description of Artificial Sequence: Synthetic oligonucleotide
agacttacctccatctga

SEQ ID NO: 5102 - DNA, 18 bp, Artificial Sequence
  Description of Artificial Sequence: Synthetic oligonucleotide
cctgcagacttacctcca

SEQ ID NO: 5103 - DNA, 18 bp, Artificial Sequence
  Description of Artificial Sequence: Synthetic oligonucleotide
caccacctgcagacttac

SEQ ID NO: 5104 - DNA, 18 bp, Artificial Sequence
  Description of Artificial Sequence: Synthetic oligonucleotide
ctcctcaccacctgcaga

SEQ ID NO: 5105 - DNA, 18 bp, Artificial Sequence
  Description of Artificial Sequence: Synthetic oligonucleotide
aaatcctcctcaccacct

SEQ ID NO: 5106 - DNA, 18 bp, Artificial Sequence
  Description of Artificial Sequence: Synthetic oligonucleotide
accagaaatcctcctcac

SEQ ID NO: 5107 - DNA, 18 bp, Artificial Sequence
  Description of Artificial Sequence: Synthetic oligonucleotide
caggtaccagaaatcctc

SEQ ID NO: 5108 - DNA, 18 bp, Artificial Sequence
  Description of Artificial Sequence: Synthetic oligonucleotide
atgagcaggtaccagaaa

SEQ ID NO: 5109 - DNA, 18 bp, Artificial Sequence
  Description of Artificial Sequence: Synthetic oligonucleotide
aggatatgagcaggtacc

SEQ ID NO: 5110 - DNA, 18 bp, Artificial Sequence
  Description of Artificial Sequence: Synthetic oligonucleotide
ctcaaaggatatgagcag

SEQ ID NO: 5111 - DNA, 18 bp, Artificial Sequence
  Description of Artificial Sequence: Synthetic oligonucleotide
cttgtctcaaaggatatg

SEQ ID NO: 5112 - DNA, 18 bp, Artificial Sequence
  Description of Artificial Sequence: Synthetic oligonucleotide
gagagcttgtctcaaagg

SEQ ID NO: 5113 - DNA, 18 bp, Artificial Sequence
  Description of Artificial Sequence: Synthetic oligonucleotide
gcccagagagcttgtctc

SEQ ID NO: 5114 - DNA, 18 bp, Artificial Sequence
  Description of Artificial Sequence: Synthetic oligonucleotide
ggtcagcccagagagctt

SEQ ID NO: 5115 - DNA, 18 bp, Artificial Sequence
  Description of Artificial Sequence: Synthetic oligonucleotide
ctttaggtcagcccagag

SEQ ID NO: 5116 - DNA, 18 bp, Artificial Sequence
  Description of Artificial Sequence: Synthetic oligonucleotide
cattcctttaggtcagcc

SEQ ID NO: 5117 - DNA, 18 bp, Artificial Sequence
  Description of Artificial Sequence: Synthetic oligonucleotide
cctcacattcctttaggt

SEQ ID NO: 5118 - DNA, 18 bp, Artificial Sequence
  Description of Artificial Sequence: Synthetic oligonucleotide
tagcacctcacattcctt

SEQ ID NO: 5119 - DNA, 18 bp, Artificial Sequence
  Description of Artificial Sequence: Synthetic oligonucleotide
gggtgtagcacctcacat

SEQ ID NO: 5120 - DNA, 18 bp, Artificial Sequence
  Description of Artificial Sequence: Synthetic oligonucleotide
tgacggggtgtagcacct

SEQ ID NO: 5121 - DNA, 18 bp, Artificial Sequence
  Description of Artificial Sequence: Synthetic oligonucleotide
gtgagggacctcatgatc

SEQ ID NO: 5122 - DNA, 18 bp, Artificial Sequence
  Description of Artificial Sequence: Synthetic oligonucleotide
ggggagtgagggacctca

SEQ ID NO: 5123 - DNA, 18 bp, Artificial Sequence
  Description of Artificial Sequence: Synthetic oligonucleotide
gatcaggggagtgaggga

SEQ ID NO: 5124 - DNA, 18 bp, Artificial Sequence
  Description of Artificial Sequence: Synthetic oligonucleotide
ctgttgatcaggggagtg

SEQ ID NO: 5125 - DNA, 18 bp, Artificial Sequence
  Description of Artificial Sequence: Synthetic oligonucleotide
cctccctgttgatcaggg

SEQ ID NO: 5126 - DNA, 18 bp, Artificial Sequence
  Description of Artificial Sequence: Synthetic oligonucleotide
tgcctcctccctgttgat

SEQ ID NO: 5127 - DNA, 18 bp, Artificial Sequence
  Description of Artificial Sequence: Synthetic oligonucleotide
ccaaatgcctcctccctg

SEQ ID NO: 5128 - DNA, 18 bp, Artificial Sequence
  Description of Artificial Sequence: Synthetic oligonucleotide
cctccccaaatgcctcct

SEQ ID NO: 5129 - DNA, 18 bp, Artificial Sequence
  Description of Artificial Sequence: Synthetic oligonucleotide
cccagcctccccaaatgc

SEQ ID NO: 5130 - DNA, 18 bp, Artificial Sequence
  Description of Artificial Sequence: Synthetic oligonucleotide
gcctccccagcctcccca

SEQ ID NO: 5131 - DNA, 18 bp, Artificial Sequence
  Description of Artificial Sequence: Synthetic oligonucleotide
gccccgcctccccagcct

SEQ ID NO: 5132 - DNA, 18 bp, Artificial Sequence
  Description of Artificial Sequence: Synthetic oligonucleotide
ccacagccccgcctcccc

SEQ ID NO: 5133 - DNA, 18 bp, Artificial Sequence
  Description of Artificial Sequence: Synthetic oligonucleotide
ctgggccacagccccgcc

SEQ ID NO: 5134 - DNA, 18 bp, Artificial Sequence
  Description of Artificial Sequence: Synthetic oligonucleotide
tgatgctgggccacagcc

SEQ ID NO: 5135 - DNA, 18 bp, Artificial Sequence
  Description of Artificial Sequence: Synthetic oligonucleotide
gtgggtgatgctgggcca

SEQ ID NO: 5136 - DNA, 18 bp, Artificial Sequence
  Description of Artificial Sequence: Synthetic oligonucleotide
ggagtgtgggtgatgctg

SEQ ID NO: 5137 - DNA, 18 bp, Artificial Sequence
  Description of Artificial Sequence: Synthetic oligonucleotide
aatcaggagtgtgggtga

SEQ ID NO: 5138 - DNA, 18 bp, Artificial Sequence
  Description of Artificial Sequence: Synthetic oligonucleotide
ctgtgaatcaggagtgtg

SEQ ID NO: 5139 - DNA, 18 bp, Artificial Sequence
  Description of Artificial Sequence: Synthetic oligonucleotide
tcttcctgtgaatcagga

SEQ ID NO: 5140 - DNA, 18 bp, Artificial Sequence
  Description of Artificial Sequence: Synthetic oligonucleotide
ggccttcttcctgtgaat

SEQ ID NO: 5141 - DNA, 18 bp, Artificial Sequence
  Description of Artificial Sequence: Synthetic oligonucleotide
gttcaggccttcttcctg

SEQ ID NO: 5142 - DNA, 18 bp, Artificial Sequence
  Description of Artificial Sequence: Synthetic oligonucleotide
gtcgttcaggccttcttc

SEQ ID NO: 5143 - DNA, 18 bp, Artificial Sequence
  Description of Artificial Sequence: Synthetic oligonucleotide
tgtatgtcgttcaggcct

SEQ ID NO: 5144 - DNA, 18 bp, Artificial Sequence
  Description of Artificial Sequence: Synthetic oligonucleotide
tctcctgtatgtcgttca

SEQ ID NO: 5145 - DNA, 18 bp, Artificial Sequence
  Description of Artificial Sequence: Synthetic oligonucleotide
gatcatctcctgtatgtc

SEQ ID NO: 5146 - DNA, 18 bp, Artificial Sequence
  Description of Artificial Sequence: Synthetic oligonucleotide
gttttgatcatctcctgt

SEQ ID NO: 5147 - DNA, 18 bp, Artificial Sequence
  Description of Artificial Sequence: Synthetic oligonucleotide
tctccgttttgatcatct

SEQ ID NO: 5148 - DNA, 18 bp, Artificial Sequence
  Description of Artificial Sequence: Synthetic oligonucleotide
ggacttctccgttttgat

SEQ ID NO: 5149 - DNA, 18 bp, Artificial Sequence
  Description of Artificial Sequence: Synthetic oligonucleotide
gggtaggacttctccgtt

SEQ ID NO: 5150 - DNA, 18 bp, Artificial Sequence
  Description of Artificial Sequence: Synthetic oligonucleotide
gctcagggtaggacttct

SEQ ID NO: 5151 - DNA, 18 bp, Artificial Sequence
  Description of Artificial Sequence: Synthetic oligonucleotide
gcgacgctcagggtagga

SEQ ID NO: 5152 - DNA, 18 bp, Artificial Sequence
  Description of Artificial Sequence: Synthetic oligonucleotide
ccccgcaggcgacgctca

SEQ ID NO: 5153 - DNA, 18 bp, Artificial Sequence
  Description of Artificial Sequence: Synthetic oligonucleotide
ggacgccccgcaggcgac

SEQ ID NO: 5154 - DNA, 18 bp, Artificial Sequence
  Description of Artificial Sequence: Synthetic oligonucleotide
ctccaggacgccccgcag

SEQ ID NO: 5155 - DNA, 18 bp, Artificial Sequence
  Description of Artificial Sequence: Synthetic oligonucleotide
agctcctccaggacgccc

SEQ ID NO: 5156 - DNA, 18 bp, Artificial Sequence
  Description of Artificial Sequence: Synthetic oligonucleotide
agctcagctcctccagga

SEQ ID NO: 5157 - DNA, 18 bp, Artificial Sequence
  Description of Artificial Sequence: Synthetic oligonucleotide
gccacagctcagctcctc

SEQ ID NO: 5158 - DNA, 18 bp, Artificial Sequence
  Description of Artificial Sequence: Synthetic oligonucleotide
cagcagccacagctcagc

SEQ ID NO: 5159 - DNA, 18 bp, Artificial Sequence
  Description of Artificial Sequence: Synthetic oligonucleotide
caccagcagccacagctc

SEQ ID NO: 5160 - DNA, 18 bp, Artificial Sequence
  Description of Artificial Sequence: Synthetic oligonucleotide
cttctcaccagcagccac

SEQ ID NO: 5161 - DNA, 18 bp, Artificial Sequence
  Description of Artificial Sequence: Synthetic oligonucleotide
cctcccttctcaccagca

SEQ ID NO: 5162 - DNA, 18 bp, Artificial Sequence
  Description of Artificial Sequence: Synthetic oligonucleotide
ccgcccctcccttctcac

SEQ ID NO: 5163 - DNA, 18 bp, Artificial Sequence
  Description of Artificial Sequence: Synthetic oligonucleotide
acctgccgcccctccctt

SEQ ID NO: 5164 - DNA, 18 bp, Artificial Sequence
  Description of Artificial Sequence: Synthetic oligonucleotide
cccccacctgccgcccct

SEQ ID NO: 5165 - DNA, 18 bp, Artificial Sequence
  Description of Artificial Sequence: Synthetic oligonucleotide
tcctccccccacctgccg

SEQ ID NO: 5166 - DNA, 18 bp, Artificial Sequence
  Description of Artificial Sequence: Synthetic oligonucleotide
cctcatcctccccccacc

SEQ ID NO: 5167 - DNA, 18 bp, Artificial Sequence
  Description of Artificial Sequence: Synthetic oligonucleotide
ttccgcctcatcctcccc

SEQ ID NO: 5168 - DNA, 18 bp, Artificial Sequence
  Description of Artificial Sequence: Synthetic oligonucleotide
tccagttccgcctcatcc

SEQ ID NO: 5169 - DNA, 18 bp, Artificial Sequence
  Description of Artificial Sequence: Synthetic oligonucleotide
ctttgtccagttccgcct

SEQ ID NO: 5170 - DNA, 18 bp, Artificial Sequence
  Description of Artificial Sequence: Synthetic oligonucleotide
gtcccctttgtccagttc

SEQ ID NO: 5171 - DNA, 18 bp, Artificial Sequence
  Description of Artificial Sequence: Synthetic oligonucleotide
gcagggtcccctttgtcc

SEQ ID NO: 5172 - DNA, 18 bp, Artificial Sequence
  Description of Artificial Sequence: Synthetic oligonucleotide
ccctggcagggtcccctt

SEQ ID NO: 5173 - DNA, 18 bp, Artificial Sequence
  Description of Artificial Sequence: Synthetic oligonucleotide
cccagccctggcagggtc

SEQ ID NO: 5174 - DNA, 18 bp, Artificial Sequence
  Description of Artificial Sequence: Synthetic oligonucleotide
atctgcccagccctggca

SEQ ID NO: 5175 - DNA, 18 bp, Artificial Sequence
  Description of Artificial Sequence: Synthetic oligonucleotide
tcctcatctgcccagccc

SEQ ID NO: 5176 - DNA, 18 bp, Artificial Sequence
  Description of Artificial Sequence: Synthetic oligonucleotide
attcttcctcatctgccc

SEQ ID NO: 5177 - DNA, 18 bp, Artificial Sequence
  Description of Artificial Sequence: Synthetic oligonucleotide
tgtagattcttcctcatc

SEQ ID NO: 5178 - DNA, 18 bp, Artificial Sequence
  Description of Artificial Sequence: Synthetic oligonucleotide
ggctctgtagattcttcc

SEQ ID NO: 5179 - DNA, 18 bp, Artificial Sequence
  Description of Artificial Sequence: Synthetic oligonucleotide
gcaggggctctgtagatt

SEQ ID NO: 5180 - DNA, 18 bp, Artificial Sequence
  Description of Artificial Sequence: Synthetic oligonucleotide
cccatgtgaaaataagca

SEQ ID NO: 5181 - DNA, 18 bp, Artificial Sequence
  Description of Artificial Sequence: Synthetic oligonucleotide
actagcccatgtgaaaat

SEQ ID NO: 5182 - DNA, 18 bp, Artificial Sequence
  Description of Artificial Sequence: Synthetic oligonucleotide
cactaactagcccatgtg

SEQ ID NO: 5183 - DNA, 18 bp, Artificial Sequence
  Description of Artificial Sequence: Synthetic oligonucleotide
gaaatcactaactagccc

SEQ ID NO: 5184 - DNA, 18 bp, Artificial Sequence
  Description of Artificial Sequence: Synthetic oligonucleotide
ttacagaaatcactaact

SEQ ID NO: 5185 - DNA, 18 bp, Artificial Sequence
  Description of Artificial Sequence: Synthetic oligonucleotide
ttatattacagaaatcac

SEQ ID NO: 5186 - DNA, 18 bp, Artificial Sequence
  Description of Artificial Sequence: Synthetic oligonucleotide
taagtttatattacagaa

SEQ ID NO: 5187 - DNA, 18 bp, Artificial Sequence
  Description of Artificial Sequence: Synthetic oligonucleotide
accagtaagtttatatta

SEQ ID NO: 5188 - DNA, 18 bp, Artificial Sequence
  Description of Artificial Sequence: Synthetic oligonucleotide
aagataccagtaagttta

SEQ ID NO: 5189 - DNA, 18 bp, Artificial Sequence
  Description of Artificial Sequence: Synthetic oligonucleotide
taccaaagataccagtaa

SEQ ID NO: 5190 - DNA, 18 bp, Artificial Sequence
  Description of Artificial Sequence: Synthetic oligonucleotide
aaagataccaaagatacc

SEQ ID NO: 5191 - DNA, 18 bp, Artificial Sequence
  Description of Artificial Sequence: Synthetic oligonucleotide
ttaggaaagataccaaag

SEQ ID NO: 5192 - DNA, 18 bp, Artificial Sequence
  Description of Artificial Sequence: Synthetic oligonucleotide
atttgttaggaaagatac

SEQ ID NO: 5193 - DNA, 18 bp, Artificial Sequence
  Description of Artificial Sequence: Synthetic oligonucleotide
aaattatttgttaggaaa

SEQ ID NO: 5194 - DNA, 18 bp, Artificial Sequence
  Description of Artificial Sequence: Synthetic oligonucleotide
tataaaaattatttgtta

SEQ ID NO: 5195 - DNA, 18 bp, Artificial Sequence
  Description of Artificial Sequence: Synthetic oligonucleotide
tagaatataaaaattatt

SEQ ID NO: 5196 - DNA, 18 bp, Artificial Sequence
  Description of Artificial Sequence: Synthetic oligonucleotide
taatttagaatataaaaa

SEQ ID NO: 5197 - DNA, 18 bp, Artificial Sequence
  Description of Artificial Sequence: Synthetic oligonucleotide
ctaggtaatttagaatat

SEQ ID NO: 5198 - DNA, 18 bp, Artificial Sequence
  Description of Artificial Sequence: Synthetic oligonucleotide
ataccctaggtaatttag

SEQ ID NO: 5199 - DNA, 18 bp, Artificial Sequence
  Description of Artificial Sequence: Synthetic oligonucleotide
ggaaaataccctaggtaa

SEQ ID NO: 5200 - DNA, 18 bp, Artificial Sequence
  Description of Artificial Sequence: Synthetic oligonucleotide
attagggaaaatacccta

SEQ ID NO: 5201 - DNA, 18 bp, Artificial Sequence
  Description of Artificial Sequence: Synthetic oligonucleotide
agaattagggaaaatacc

SEQ ID NO: 5202 - DNA, 18 bp, Artificial Sequence
  Description of Artificial Sequence: Synthetic oligonucleotide
catggagaattagggaaa

SEQ ID NO: 5203 - DNA, 18 bp, Artificial Sequence
  Description of Artificial Sequence: Synthetic oligonucleotide
agcaccatggagaattag

SEQ ID NO: 5204 - DNA, 18 bp, Artificial Sequence
  Description of Artificial Sequence: Synthetic oligonucleotide
attgaagcaccatggaga

SEQ ID NO: 5205 - DNA, 18 bp, Artificial Sequence
  Description of Artificial Sequence: Synthetic oligonucleotide
atgctattgaagcaccat

SEQ ID NO: 5206 - DNA, 18 bp, Artificial Sequence
  Description of Artificial Sequence: Synthetic oligonucleotide
ataacatgctattgaagc

SEQ ID NO: 5207 - DNA, 18 bp, Artificial Sequence
  Description of Artificial Sequence: Synthetic oligonucleotide
tgataataacatgctatt

SEQ ID NO: 5208 - DNA, 18 bp, Artificial Sequence
  Description of Artificial Sequence: Synthetic oligonucleotide
ttttatgataataacatg

SEQ ID NO: 5209 - DNA, 18 bp, Artificial Sequence
  Description of Artificial Sequence: Synthetic oligonucleotide
ttcatttttatgataata

SEQ ID NO: 5210 - DNA, 18 bp, Artificial Sequence
  Description of Artificial Sequence: Synthetic oligonucleotide
aaactgttcatttttatg

SEQ ID NO: 5211 - DNA, 18 bp, Artificial Sequence
  Description of Artificial Sequence: Synthetic oligonucleotide
ccacaaaactgttcattt

SEQ ID NO: 5212 - DNA, 18 bp, Artificial Sequence
  Description of Artificial Sequence: Synthetic oligonucleotide
ctattccacaaaactgtt

SEQ ID NO: 5213 - DNA, 18 bp, Artificial Sequence
  Description of Artificial Sequence: Synthetic oligonucleotide
gtcatctattccacaaaa

SEQ ID NO: 5214 - DNA, 18 bp, Artificial Sequence
  Description of Artificial Sequence: Synthetic oligonucleotide
atttggtcatctattcca

SEQ ID NO: 5215 - DNA, 18 bp, Artificial Sequence
  Description of Artificial Sequence: Synthetic oligonucleotide
cacatttggtcatctatt

SEQ ID NO: 5216 - DNA, 18 bp, Artificial Sequence
  Description of Artificial Sequence: Synthetic oligonucleotide
ttactcacatttggtcat

SEQ ID NO: 5217 - DNA, 18 bp, Artificial Sequence
  Description of Artificial Sequence: Synthetic oligonucleotide
ttgagttactcacatttg

SEQ ID NO: 5218 - DNA, 18 bp, Artificial Sequence
  Description of Artificial Sequence: Synthetic oligonucleotide
ttatcttgagttactcac

SEQ ID NO: 5219 - DNA, 18 bp, Artificial Sequence
  Description of Artificial Sequence: Synthetic oligonucleotide
ttaaattatcttgagtta

SEQ ID NO: 5220 - DNA, 18 bp, Artificial Sequence
  Description of Artificial Sequence: Synthetic oligonucleotide
acattttaaattatcttg

SEQ ID NO: 5221 - DNA, 18 bp, Artificial Sequence
  Description of Artificial Sequence: Synthetic oligonucleotide
taaatacattttaaatta

SEQ ID NO: 5222 - DNA, 18 bp, Artificial Sequence
  Description of Artificial Sequence: Synthetic oligonucleotide
aactataaatacatttta

SEQ ID NO: 5223 - DNA, 18 bp, Artificial Sequence
  Description of Artificial Sequence: Synthetic oligonucleotide
tttaaaactataaataca

SEQ ID NO: 5224 - DNA, 18 bp, Artificial Sequence
  Description of Artificial Sequence: Synthetic oligonucleotide
ttatttttaaaactataa

SEQ ID NO: 5225 - DNA, 18 bp, Artificial Sequence
  Description of Artificial Sequence: Synthetic oligonucleotide
ggagattatttttaaaac

SEQ ID NO: 5226 - DNA, 18 bp, Artificial Sequence
  Description of Artificial Sequence: Synthetic oligonucleotide
ttttgggagattattttt

SEQ ID NO: 5227 - DNA, 18 bp, Artificial Sequence
  Description of Artificial Sequence: Synthetic oligonucleotide
taactttttgggagatta

SEQ ID NO: 5228 - DNA, 18 bp, Artificial Sequence
  Description of Artificial Sequence: Synthetic oligonucleotide
ctaattaactttttggga

SEQ ID NO: 5229 - DNA, 18 bp, Artificial Sequence
  Description of Artificial Sequence: Synthetic oligonucleotide
caattctaattaactttt

SEQ ID NO: 5230 - DNA, 18 bp, Artificial Sequence
  Description of Artificial Sequence: Synthetic oligonucleotide
ttacacaattctaattaa

SEQ ID NO: 5231 - DNA, 18 bp, Artificial Sequence
  Description of Artificial Sequence: Synthetic oligonucleotide
agatattacacaattcta

SEQ ID NO: 5232 - DNA, 18 bp, Artificial Sequence
  Description of Artificial Sequence: Synthetic oligonucleotide
tattcagatattacacaa

SEQ ID NO: 5233 - DNA, 18 bp, Artificial Sequence
  Description of Artificial Sequence: Synthetic oligonucleotide
ctcactattcagatatta

SEQ ID NO: 5234 - DNA, 18 bp, Artificial Sequence
  Description of Artificial Sequence: Synthetic oligonucleotide
ctgttctcactattcaga

SEQ ID NO: 5235 - DNA, 18 bp, Artificial Sequence
  Description of Artificial Sequence: Synthetic oligonucleotide
atgaactgttctcactat

SEQ ID NO: 5236 - DNA, 18 bp, Artificial Sequence
  Description of Artificial Sequence: Synthetic oligonucleotide
gaacgaatgaatgtatat

SEQ ID NO: 5237 - DNA, 18 bp, Artificial Sequence
  Description of Artificial Sequence: Synthetic oligonucleotide
aaaatgaacgaatgaatg

SEQ ID NO: 5238 - DNA, 18 bp, Artificial Sequence
  Description of Artificial Sequence: Synthetic oligonucleotide
aaaacaaaatgaacgaat

SEQ ID NO: 5239 - DNA, 18 bp, Artificial Sequence
  Description of Artificial Sequence: Synthetic oligonucleotide
tgctgaaaacaaaatgaa

SEQ ID NO: 5240 - DNA, 18 bp, Artificial Sequence
  Description of Artificial Sequence: Synthetic oligonucleotide
aattttgctgaaaacaaa

SEQ ID NO: 5241 - DNA, 18 bp, Artificial Sequence
  Description of Artificial Sequence: Synthetic oligonucleotide
ctctaaattttgctgaaa

SEQ ID NO: 5242 - DNA, 18 bp, Artificial Sequence
  Description of Artificial Sequence: Synthetic oligonucleotide
acgtactctaaattttgc

SEQ ID NO: 5243 - DNA, 18 bp, Artificial Sequence
  Description of Artificial Sequence: Synthetic oligonucleotide
ttattacgtactctaaat

SEQ ID NO: 5244 - DNA, 18 bp, Artificial Sequence
  Description of Artificial Sequence: Synthetic oligonucleotide
caacattattacgtactc

SEQ ID NO: 5245 - DNA, 18 bp, Artificial Sequence
  Description of Artificial Sequence: Synthetic oligonucleotide
aacagcaacattattacg

SEQ ID NO: 5246 - DNA, 18 bp, Artificial Sequence
  Description of Artificial Sequence: Synthetic oligonucleotide
cttaaaacagcaacatta

SEQ ID NO: 5247 - DNA, 18 bp, Artificial Sequence
  Description of Artificial Sequence: Synthetic oligonucleotide
aaatacttaaaacagcaa

SEQ ID NO: 5248 - DNA, 18 bp, Artificial Sequence
  Description of Artificial Sequence: Synthetic oligonucleotide
agaagaaatacttaaaac

SEQ ID NO: 5249 - DNA, 18 bp, Artificial Sequence
  Description of Artificial Sequence: Synthetic oligonucleotide
atttgagaagaaatactt

SEQ ID NO: 5250 - DNA, 18 bp, Artificial Sequence
  Description of Artificial Sequence: Synthetic oligonucleotide
ttcacatttgagaagaaa

SEQ ID NO: 5251 - DNA, 18 bp, Artificial Sequence
  Description of Artificial Sequence: Synthetic oligonucleotide
agattttcacatttgaga

SEQ ID NO: 5252 - DNA, 18 bp, Artificial Sequence
  Description of Artificial Sequence: Synthetic oligonucleotide
aaagcagattttcacatt

SEQ ID NO: 5253 - DNA, 18 bp, Artificial Sequence
  Description of Artificial Sequence: Synthetic oligonucleotide
ctgtaaaagcagattttc

SEQ ID NO: 5254 - DNA, 18 bp, Artificial Sequence
  Description of Artificial Sequence: Synthetic oligonucleotide
ggtccctgtaaaagcaga

SEQ ID NO: 5255 - DNA, 18 bp, Artificial Sequence
  Description of Artificial Sequence: Synthetic oligonucleotide
tttaaggtccctgtaaaa

SEQ ID NO: 5256 - DNA, 18 bp, Artificial Sequence
  Description of Artificial Sequence: Synthetic oligonucleotide
tccggtttaaggtccctg

SEQ ID NO: 5257 - DNA, 18 bp, Artificial Sequence
  Description of Artificial Sequence: Synthetic oligonucleotide
ttttccggtttaaggtcc

SEQ ID NO: 5258 - DNA, 18 bp, Artificial Sequence
  Description of Artificial Sequence: Synthetic oligonucleotide
aaatgttttccggtttaa

SEQ ID NO: 5259 - DNA, 18 bp, Artificial Sequence
  Description of Artificial Sequence: Synthetic oligonucleotide
taacaaaatgttttccgg

SEQ ID NO: 5260 - DNA, 18 bp, Artificial Sequence
  Description of Artificial Sequence: Synthetic oligonucleotide
tcatttaacaaaatgttt

SEQ ID NO: 5261 - DNA, 18 bp, Artificial Sequence
  Description of Artificial Sequence: Synthetic oligonucleotide
tatcttcatttaacaaaa

SEQ ID NO: 5262 - DNA, 18 bp, Artificial Sequence
  Description of Artificial Sequence: Synthetic oligonucleotide
gtgcatatcttcatttaa

SEQ ID NO: 5263 - DNA, 18 bp, Artificial Sequence
  Description of Artificial Sequence: Synthetic oligonucleotide
tggatgtgcatatcttca

SEQ ID NO: 5264 - DNA, 18 bp, Artificial Sequence
  Description of Artificial Sequence: Synthetic oligonucleotide
tgatctggatgtgcatat

SEQ ID NO: 5265 - DNA, 18 bp, Artificial Sequence
  Description of Artificial Sequence: Synthetic oligonucleotide
atctgtgatctggatgtg

SEQ ID NO: 5266 - DNA, 18 bp, Artificial Sequence
  Description of Artificial Sequence: Synthetic oligonucleotide
ccaaaatctgtgatctgg

SEQ ID NO: 5267 - DNA, 18 bp, Artificial Sequence
  Description of Artificial Sequence: Synthetic oligonucleotide
ctgttccaaaatctgtga

SEQ ID NO: 5268 - DNA, 18 bp, Artificial Sequence
  Description of Artificial Sequence: Synthetic oligonucleotide
ttttgctgttccaaaatc

SEQ ID NO: 5269 - DNA, 18 bp, Artificial Sequence
  Description of Artificial Sequence: Synthetic oligonucleotide
aagacttttgctgttcca

SEQ ID NO: 5270 - DNA, 18 bp, Artificial Sequence
  Description of Artificial Sequence: Synthetic oligonucleotide
gggataagacttttgctg

SEQ ID NO: 5271 - DNA, 18 bp, Artificial Sequence
  Description of Artificial Sequence: Synthetic oligonucleotide
ctctggggataagacttt

SEQ ID NO: 5272 - DNA, 18 bp, Artificial Sequence
  Description of Artificial Sequence: Synthetic oligonucleotide
ttgctctctggggataag

SEQ ID NO: 5273 - DNA, 18 bp, Artificial Sequence
  Description of Artificial Sequence: Synthetic oligonucleotide
cttgtttgctctctgggg

SEQ ID NO: 5274 - DNA, 18 bp, Artificial Sequence
  Description of Artificial Sequence: Synthetic oligonucleotide
caccttgtttgctctctg

SEQ ID NO: 5275 - DNA, 18 bp, Artificial Sequence
  Description of Artificial Sequence: Synthetic oligonucleotide
tcacacaccttgtttgct

SEQ ID NO: 5276 - DNA, 18 bp, Artificial Sequence
  Description of Artificial Sequence: Synthetic oligonucleotide
aaaactcacacaccttgt

SEQ ID NO: 5277 - DNA, 18 bp, Artificial Sequence
  Description of Artificial Sequence: Synthetic oligonucleotide
gaaataaaactcacacac

SEQ ID NO: 5278 - DNA, 18 bp, Artificial Sequence
  Description of Artificial Sequence: Synthetic oligonucleotide
tgctagaaataaaactca

SEQ ID NO: 5279 - DNA, 18 bp, Artificial Sequence
  Description of Artificial Sequence: Synthetic oligonucleotide
ggctctgctagaaataaa

SEQ ID NO: 5280 - DNA, 18 bp, Artificial Sequence
  Description of Artificial Sequence: Synthetic oligonucleotide
agccaggctctgctagaa

SEQ ID NO: 5281 - DNA, 18 bp, Artificial Sequence
  Description of Artificial Sequence: Synthetic oligonucleotide
cacagagccaggctctgc

SEQ ID NO: 5282 - DNA, 18 bp, Artificial Sequence
  Description of Artificial Sequence: Synthetic oligonucleotide
tgaagcacagagccaggc

SEQ ID NO: 5283 - DNA, 18 bp, Artificial Sequence
  Description of Artificial Sequence: Synthetic oligonucleotide
ccatctgaagcacagagc

SEQ ID NO: 5284 - DNA, 18 bp, Artificial Sequence
  Description of Artificial Sequence: Synthetic oligonucleotide
gctttccatctgaagcac

SEQ ID NO: 5285 - DNA, 18 bp, Artificial Sequence
  Description of Artificial Sequence: Synthetic oligonucleotide
aagtcgctttccatctga

SEQ ID NO: 5286 - DNA, 18 bp, Artificial Sequence
  Description of Artificial Sequence: Synthetic oligonucleotide
ctcagaagtcgctttcca

SEQ ID NO: 5287 - DNA, 18 bp, Artificial Sequence
  Description of Artificial Sequence: Synthetic oligonucleotide
cactcctcagaagtcgct

SEQ ID NO: 5288 - DNA, 18 bp, Artificial Sequence
  Description of Artificial Sequence: Synthetic oligonucleotide
gcaaacactcctcagaag

SEQ ID NO: 5289 - DNA, 18 bp, Artificial Sequence
  Description of Artificial Sequence: Synthetic oligonucleotide
acaatgcaaacactcctc

SEQ ID NO: 5290 - DNA, 18 bp, Artificial Sequence
  Description of Artificial Sequence: Synthetic oligonucleotide
atgacacaatgcaaacac

SEQ ID NO: 5291 - DNA, 18 bp, Artificial Sequence
  Description of Artificial Sequence: Synthetic oligonucleotide
tgaagatgacacaatgca

SEQ ID NO: 5292 - DNA, 18 bp, Artificial Sequence
  Description of Artificial Sequence: Synthetic oligonucleotide
gttgatgaagatgacaca

SEQ ID NO: 5293 - DNA, 18 bp, Artificial Sequence
  Description of Artificial Sequence: Synthetic oligonucleotide
cagtcgttgatgaagatg

SEQ ID NO: 5294 - DNA, 18 bp, Artificial Sequence
  Description of Artificial Sequence: Synthetic oligonucleotide
cacctcagtcgttgatga

SEQ ID NO: 5295 - DNA, 18 bp, Artificial Sequence
  Description of Artificial Sequence: Synthetic oligonucleotide
gatgcagtatgcaacaaa

SEQ ID NO: 5296 - DNA, 18 bp, Artificial Sequence
  Description of Artificial Sequence: Synthetic oligonucleotide
aacatgatgcagtatgca

SEQ ID NO: 5297 - DNA, 18 bp, Artificial Sequence
  Description of Artificial Sequence: Synthetic oligonucleotide
ttattaacatgatgcagt

SEQ ID NO: 5298 - DNA, 18 bp, Artificial Sequence
  Description of Artificial Sequence: Synthetic oligonucleotide
agcagttattaacatgat

SEQ ID NO: 5299 - DNA, 18 bp, Artificial Sequence
  Description of Artificial Sequence: Synthetic oligonucleotide
gtgtgagcagttattaac

SEQ ID NO: 5300 - DNA, 18 bp, Artificial Sequence
  Description of Artificial Sequence: Synthetic oligonucleotide
aagcagtgtgagcagtta

SEQ ID NO: 5301 - DNA, 18 bp, Artificial Sequence
  Description of Artificial Sequence: Synthetic oligonucleotide
attgaaagcagtgtgagc

SEQ ID NO: 5302 - DNA, 18 bp, Artificial Sequence
  Description of Artificial Sequence: Synthetic oligonucleotide
aattaattgaaagcagtg

SEQ ID NO: 5303 - DNA, 18 bp, Artificial Sequence
  Description of Artificial Sequence: Synthetic oligonucleotide
tgttaaattaattgaaag

SEQ ID NO: 5304 - DNA, 18 bp, Artificial Sequence
  Description of Artificial Sequence: Synthetic oligonucleotide
atcagtgttaaattaatt

SEQ ID NO: 5305 - DNA, 18 bp, Artificial Sequence
  Description of Artificial Sequence: Synthetic oligonucleotide
aagcaatcagtgttaaat

SEQ ID NO: 5306 - DNA, 18 bp, Artificial Sequence
  Description of Artificial Sequence: Synthetic oligonucleotide
gttagaagcaatcagtgt

SEQ ID NO: 5307 - DNA, 18 bp, Artificial Sequence
  Description of Artificial Sequence: Synthetic oligonucleotide
taaaggttagaagcaatc

SEQ ID NO: 5308 - DNA, 18 bp, Artificial Sequence
  Description of Artificial Sequence: Synthetic oligonucleotide
tttagtaaaggttagaag

SEQ ID NO: 5309 - DNA, 18 bp, Artificial Sequence
  Description of Artificial Sequence: Synthetic oligonucleotide
aactgtttagtaaaggtt

SEQ ID NO: 5310 - DNA, 18 bp, Artificial Sequence
  Description of Artificial Sequence: Synthetic oligonucleotide
tttaaaactgtttagtaa

SEQ ID NO: 5311 - DNA, 18 bp, Artificial Sequence
  Description of Artificial Sequence: Synthetic oligonucleotide
gcaattttaaaactgttt

SEQ ID NO: 5312 - DNA, 18 bp, Artificial Sequence
  Description of Artificial Sequence: Synthetic oligonucleotide
ctatagcaattttaaaac

SEQ ID NO: 5313 - DNA, 18 bp, Artificial Sequence
  Description of Artificial Sequence: Synthetic oligonucleotide
ctaagctatagcaatttt

SEQ ID NO: 5314 - DNA, 18 bp, Artificial Sequence
  Description of Artificial Sequence: Synthetic oligonucleotide
gcaggctaagctatagca

SEQ ID NO: 5315 - DNA, 18 bp, Artificial Sequence
  Description of Artificial Sequence: Synthetic oligonucleotide
gcgtcgcaggctaagcta

SEQ ID NO: 5316 - DNA, 18 bp, Artificial Sequence
  Description of Artificial Sequence: Synthetic oligonucleotide
taagcgtcgcaggctaag

SEQ ID NO: 5317 - DNA, 18 bp, Artificial Sequence
  Description of Artificial Sequence: Synthetic oligonucleotide
aatcataagcgtcgcagg

SEQ ID NO: 5318 - DNA, 18 bp, Artificial Sequence
  Description of Artificial Sequence: Synthetic oligonucleotide
gctctaatcataagcgtc

SEQ ID NO: 5319 - DNA, 18 bp, Artificial Sequence
  Description of Artificial Sequence: Synthetic oligonucleotide
tgttggctctaatcataa

SEQ ID NO: 5320 - DNA, 18 bp, Artificial Sequence
  Description of Artificial Sequence: Synthetic oligonucleotide
caaattgttggctctaat

SEQ ID NO: 5321 - DNA, 18 bp, Artificial Sequence
  Description of Artificial Sequence: Synthetic oligonucleotide
catttcaaattgttggct

SEQ ID NO: 5322 - DNA, 18 bp, Artificial Sequence
  Description of Artificial Sequence: Synthetic oligonucleotide
caggccatttcaaattgt

SEQ ID NO: 5323 - DNA, 18 bp, Artificial Sequence
  Description of Artificial Sequence: Synthetic oligonucleotide
gtgagcaggccatttcaa

SEQ ID NO: 5324 - DNA, 18 bp, Artificial Sequence
  Description of Artificial Sequence: Synthetic oligonucleotide
atcaggtgagcaggccat

SEQ ID NO: 5325 - DNA, 18 bp, Artificial Sequence
  Description of Artificial Sequence: Synthetic oligonucleotide
cgactgcatcaggtgagc

SEQ ID NO: 5326 - DNA, 18 bp, Artificial Sequence
  Description of Artificial Sequence: Synthetic oligonucleotide
agagacgactgcatcagg

SEQ ID NO: 5327 - DNA, 18 bp, Artificial Sequence
  Description of Artificial Sequence: Synthetic oligonucleotide
gacggagagacgactgca

SEQ ID NO: 5328 - DNA, 18 bp, Artificial Sequence
  Description of Artificial Sequence: Synthetic oligonucleotide
cggaagacggagagacga

SEQ ID NO: 5329 - DNA, 18 bp, Artificial Sequence
  Description of Artificial Sequence: Synthetic oligonucleotide
gaaagcggaagacggaga

SEQ ID NO: 5330 - DNA, 18 bp, Artificial Sequence
  Description of Artificial Sequence: Synthetic oligonucleotide
cttaagaaagcggaagac

SEQ ID NO: 5331 - DNA, 18 bp, Artificial Sequence
  Description of Artificial Sequence: Synthetic oligonucleotide
cagaccttaagaaagcgg

SEQ ID NO: 5332 - DNA, 18 bp, Artificial Sequence
  Description of Artificial Sequence: Synthetic oligonucleotide
taccagaccttaagaaag

SEQ ID NO: 5333 - DNA, 18 bp, Artificial Sequence
  Description of Artificial Sequence: Synthetic oligonucleotide
acacttaccagaccttaa

SEQ ID NO: 5334 - DNA, 18 bp, Artificial Sequence
  Description of Artificial Sequence: Synthetic oligonucleotide
ctacaacacttaccagac

SEQ ID NO: 5335 - DNA, 18 bp, Artificial Sequence
  Description of Artificial Sequence: Synthetic oligonucleotide
ggggtctacaacacttac

SEQ ID NO: 5336 - DNA, 18 bp, Artificial Sequence
  Description of Artificial Sequence: Synthetic oligonucleotide
cttttggggtctacaaca

SEQ ID NO: 5337 - DNA, 18 bp, Artificial Sequence
  Description of Artificial Sequence: Synthetic oligonucleotide
tgacccttttggggtcta

SEQ ID NO: 5338 - DNA, 18 bp, Artificial Sequence
  Description of Artificial Sequence: Synthetic oligonucleotide
ccaagtgacccttttggg

SEQ ID NO: 5339 - DNA, 18 bp, Artificial Sequence
  Description of Artificial Sequence: Synthetic oligonucleotide
aattaccaagtgaccctt

SEQ ID NO: 5340 - DNA, 18 bp, Artificial Sequence
  Description of Artificial Sequence: Synthetic oligonucleotide
tttaaaattaccaagtga

SEQ ID NO: 5341 - DNA, 18 bp, Artificial Sequence
  Description of Artificial Sequence: Synthetic oligonucleotide
aggtatttaaaattacca

SEQ ID NO: 5342 - DNA, 18 bp, Artificial Sequence
  Description of Artificial Sequence: Synthetic oligonucleotide
aacaaaggtatttaaaat

SEQ ID NO: 5343 - DNA, 18 bp, Artificial Sequence
  Description of Artificial Sequence: Synthetic oligonucleotide
tcagaaacaaaggtattt

SEQ ID NO: 5344 - DNA, 18 bp, Artificial Sequence
  Description of Artificial Sequence: Synthetic oligonucleotide
aaccttcagaaacaaagg

SEQ ID NO: 5345 - DNA, 18 bp, Artificial Sequence
  Description of Artificial Sequence: Synthetic oligonucleotide
aaatcaaccttcagaaac

SEQ ID NO: 5346 - DNA, 18 bp, Artificial Sequence
  Description of Artificial Sequence: Synthetic oligonucleotide
tagtgaaatcaaccttca

SEQ ID NO: 5347 - DNA, 18 bp, Artificial Sequence
  Description of Artificial Sequence: Synthetic oligonucleotide
tcttatagtgaaatcaac

SEQ ID NO: 5348 - DNA, 18 bp, Artificial Sequence
  Description of Artificial Sequence: Synthetic oligonucleotide
tgatatcttatagtgaaa

SEQ ID NO: 5349 - DNA, 18 bp, Artificial Sequence
  Description of Artificial Sequence: Synthetic oligonucleotide
cataatgatatcttatag

SEQ ID NO: 5350 - DNA, 18 bp, Artificial Sequence
  Description of Artificial Sequence: Synthetic oligonucleotide
aaagacataatgatatct

SEQ ID NO: 5351 - DNA, 18 bp, Artificial Sequence
  Description of Artificial Sequence: Synthetic oligonucleotide
gaaataaagacataatga

SEQ ID NO: 5352 - DNA, 18 bp, Artificial Sequence
  Description of Artificial Sequence: Synthetic oligonucleotide
aagaagaaataaagacat

SEQ ID NO: 5353 - DNA, 18 bp, Artificial Sequence
  Description of Artificial Sequence: Synthetic oligonucleotide
aatgtaaatttgttagct

SEQ ID NO: 5354 - DNA, 18 bp, Artificial Sequence
  Description of Artificial Sequence: Synthetic oligonucleotide
atgttaatgtaaatttgt

SEQ ID NO: 5355 - DNA, 18 bp, Artificial Sequence
  Description of Artificial Sequence: Synthetic oligonucleotide
ttttaatgttaatgtaaa

SEQ ID NO: 5356 - DNA, 18 bp, Artificial Sequence
  Description of Artificial Sequence: Synthetic oligonucleotide
tattgttttaatgttaat

SEQ ID NO: 5357 - DNA, 18 bp, Artificial Sequence
  Description of Artificial Sequence: Synthetic oligonucleotide
atagatattgttttaatg

SEQ ID NO: 5358 - DNA, 18 bp, Artificial Sequence
  Description of Artificial Sequence: Synthetic oligonucleotide
cagatatagatattgttt

SEQ ID NO: 5359 - DNA, 18 bp, Artificial Sequence
  Description of Artificial Sequence: Synthetic oligonucleotide
aaatccagatatagatat

SEQ ID NO: 5360 - DNA, 18 bp, Artificial Sequence
  Description of Artificial Sequence: Synthetic oligonucleotide
attacaaatccagatata

SEQ ID NO: 5361 - DNA, 18 bp, Artificial Sequence
  Description of Artificial Sequence: Synthetic oligonucleotide
tccatattacaaatccag

SEQ ID NO: 5362 - DNA, 18 bp, Artificial Sequence
  Description of Artificial Sequence: Synthetic oligonucleotide
cacattccatattacaaa

SEQ ID NO: 5363 - DNA, 18 bp, Artificial Sequence
  Description of Artificial Sequence: Synthetic oligonucleotide
caaaacacattccatatt

SEQ ID NO: 5364 - DNA, 18 bp, Artificial Sequence
  Description of Artificial Sequence: Synthetic oligonucleotide
agaaacaaaacacattcc

SEQ ID NO: 5365 - DNA, 18 bp, Artificial Sequence
  Description of Artificial Sequence: Synthetic oligonucleotide
agctcagaaacaaaacac

SEQ ID NO: 5366 - DNA, 18 bp, Artificial Sequence
  Description of Artificial Sequence: Synthetic oligonucleotide
atctcagctcagaaacaa

SEQ ID NO: 5367 - DNA, 18 bp, Artificial Sequence
  Description of Artificial Sequence: Synthetic oligonucleotide
acaggatctcagctcaga

SEQ ID NO: 5368 - DNA, 18 bp, Artificial Sequence
  Description of Artificial Sequence: Synthetic oligonucleotide
gtaaaacaggatctcagc

SEQ ID NO: 5369 - DNA, 18 bp, Artificial Sequence
  Description of Artificial Sequence: Synthetic oligonucleotide
aaagagtaaaacaggatc

SEQ ID NO: 5370 - DNA, 18 bp, Artificial Sequence
  Description of Artificial Sequence: Synthetic oligonucleotide
ctgaaaaagagtaaaaca

SEQ ID NO: 5371 - DNA, 18 bp, Artificial Sequence
  Description of Artificial Sequence: Synthetic oligonucleotide
attacctgaaaaagagta

SEQ ID NO: 5372 - DNA, 18 bp, Artificial Sequence
  Description of Artificial Sequence: Synthetic oligonucleotide
cctctattacctgaaaaa

SEQ ID NO: 5373 - DNA, 18 bp, Artificial Sequence
  Description of Artificial Sequence: Synthetic oligonucleotide
tgtgtcctctattacctg

SEQ ID NO: 5374 - DNA, 18 bp, Artificial Sequence
  Description of Artificial Sequence: Synthetic oligonucleotide
agatgtgtcctctattac

SEQ ID NO: 5375 - DNA, 18 bp, Artificial Sequence
  Description of Artificial Sequence: Synthetic oligonucleotide
ttaagagatgtgtcctct

SEQ ID NO: 5376 - DNA, 18 bp, Artificial Sequence
  Description of Artificial Sequence: Synthetic oligonucleotide
cccagttaagagatgtgt

SEQ ID NO: 5377 - DNA, 18 bp, Artificial Sequence
  Description of Artificial Sequence: Synthetic oligonucleotide
agcaacccagttaagaga

SEQ ID NO: 5378 - DNA, 18 bp, Artificial Sequence
  Description of Artificial Sequence: Synthetic oligonucleotide
cttagagcaacccagtta

SEQ ID NO: 5379 - DNA, 18 bp, Artificial Sequence
  Description of Artificial Sequence: Synthetic oligonucleotide
cagttcttagagcaaccc

SEQ ID NO: 5380 - DNA, 18 bp, Artificial Sequence
  Description of Artificial Sequence: Synthetic oligonucleotide
gacatcagttcttagagc

SEQ ID NO: 5381 - DNA, 18 bp, Artificial Sequence
  Description of Artificial Sequence: Synthetic oligonucleotide
gtttagacatcagttctt

SEQ ID NO: 5382 - DNA, 18 bp, Artificial Sequence
  Description of Artificial Sequence: Synthetic oligonucleotide
agacggtttagacatcag

SEQ ID NO: 5383 - DNA, 18 bp, Artificial Sequence
  Description of Artificial Sequence: Synthetic oligonucleotide
tgctgagacggtttagac

SEQ ID NO: 5384 - DNA, 18 bp, Artificial Sequence
  Description of Artificial Sequence: Synthetic oligonucleotide
ggccatgctgagacggtt

SEQ ID NO: 5385 - DNA, 18 bp, Artificial Sequence
  Description of Artificial Sequence: Synthetic oligonucleotide
ctacaggccatgctgaga

SEQ ID NO: 5386 - DNA, 18 bp, Artificial Sequence
  Description of Artificial Sequence: Synthetic oligonucleotide
ctcctctacaggccatgc

SEQ ID NO: 5387 - DNA, 18 bp, Artificial Sequence
  Description of Artificial Sequence: Synthetic oligonucleotide
agctcctcctctacaggc

SEQ ID NO: 5388 - DNA, 18 bp, Artificial Sequence
  Description of Artificial Sequence: Synthetic oligonucleotide
ttcccagctcctcctcta

SEQ ID NO: 5389 - DNA, 18 bp, Artificial Sequence
  Description of Artificial Sequence: Synthetic oligonucleotide
ggccattcccagctcctc

SEQ ID NO: 5390 - DNA, 18 bp, Artificial Sequence
  Description of Artificial Sequence: Synthetic oligonucleotide
acggtggccattcccagc

SEQ ID NO: 5391 - DNA, 18 bp, Artificial Sequence
  Description of Artificial Sequence: Synthetic oligonucleotide
gaggcacggtggccattc

SEQ ID NO: 5392 - DNA, 18 bp, Artificial Sequence
  Description of Artificial Sequence: Synthetic oligonucleotide
tagctgaggcacggtggc

SEQ ID NO: 5393 - DNA, 18 bp, Artificial Sequence
  Description of Artificial Sequence: Synthetic oligonucleotide
gagtgtagctgaggcacg

SEQ ID NO: 5394 - DNA, 18 bp, Artificial Sequence
  Description of Artificial Sequence: Synthetic oligonucleotide
cgagagagtgtagctgag

SEQ ID NO: 5395 - DNA, 18 bp, Artificial Sequence
  Description of Artificial Sequence: Synthetic oligonucleotide
taacccgagagagtgtag

SEQ ID NO: 5396 - DNA, 18 bp, Artificial Sequence
  Description of Artificial Sequence: Synthetic oligonucleotide
agggctaacccgagagag

SEQ ID NO: 5397 - DNA, 18 bp, Artificial Sequence
  Description of Artificial Sequence: Synthetic oligonucleotide
cttccagggctaacccga

SEQ ID NO: 5398 - DNA, 18 bp, Artificial Sequence
  Description of Artificial Sequence: Synthetic oligonucleotide
aaagacttccagggctaa

SEQ ID NO: 5399 - DNA, 18 bp, Artificial Sequence
  Description of Artificial Sequence: Synthetic oligonucleotide
tgtgtaaagacttccagg

SEQ ID NO: 5400 - DNA, 18 bp, Artificial Sequence
  Description of Artificial Sequence: Synthetic oligonucleotide
ctacatgtgtaaagactt

SEQ ID NO: 5401 - DNA, 18 bp, Artificial Sequence
  Description of Artificial Sequence: Synthetic oligonucleotide
gggttctacatgtgtaaa

SEQ ID NO: 5402 - DNA, 18 bp, Artificial Sequence
  Description of Artificial Sequence: Synthetic oligonucleotide
ggtacgggttctacatgt

SEQ ID NO: 5403 - DNA, 18 bp, Artificial Sequence
  Description of Artificial Sequence: Synthetic oligonucleotide
ttatgggtacgggttcta

SEQ ID NO: 5404 - DNA, 18 bp, Artificial Sequence
  Description of Artificial Sequence: Synthetic oligonucleotide
atatattatgggtacggg

SEQ ID NO: 5405 - DNA, 18 bp, Artificial Sequence
  Description of Artificial Sequence: Synthetic oligonucleotide
catgcatatattatgggt

SEQ ID NO: 5406 - DNA, 18 bp, Artificial Sequence
  Description of Artificial Sequence: Synthetic oligonucleotide
gataccatgcatatatta

SEQ ID NO: 5407 - DNA, 18 bp, Artificial Sequence
  Description of Artificial Sequence: Synthetic oligonucleotide
agtcagataccatgcata

SEQ ID NO: 5408 - DNA, 18 bp, Artificial Sequence
  Description of Artificial Sequence: Synthetic oligonucleotide
gaaaaagtcagataccat

SEQ ID NO: 5409 - DNA, 18 bp, Artificial Sequence
  Description of Artificial Sequence: Synthetic oligonucleotide
gggtagaaaaagtcagat

SEQ ID NO: 5410 - DNA, 18 bp, Artificial Sequence
  Description of Artificial Sequence: Synthetic oligonucleotide
tatttgggtagaaaaagt

SEQ ID NO: 5411 - DNA, 18 bp, Artificial Sequence
  Description of Artificial Sequence: Synthetic oligonucleotide
tcccatatttgggtagaa

SEQ ID NO: 5412 - DNA, 18 bp, Artificial Sequence
  Description of Artificial Sequence: Synthetic oligonucleotide
acgcctcccatatttggg

SEQ ID NO: 5413 - DNA, 18 bp, Artificial Sequence
  Description of Artificial Sequence: Synthetic oligonucleotide
tttccacgcctcccatat

SEQ ID NO: 5414 - DNA, 18 bp, Artificial Sequence
  Description of Artificial Sequence: Synthetic oligonucleotide
gtggctttccacgcctcc

SEQ ID NO: 5415 - DNA, 18 bp, Artificial Sequence
  Description of Artificial Sequence: Synthetic oligonucleotide
taaatgtggctttccacg

SEQ ID NO: 5416 - DNA, 18 bp, Artificial Sequence
  Description of Artificial Sequence: Synthetic oligonucleotide
gctggtaaatgtggcttt

SEQ ID NO: 5417 - DNA, 18 bp, Artificial Sequence
  Description of Artificial Sequence: Synthetic oligonucleotide
agagagctggtaaatgtg

SEQ ID NO: 5418 - DNA, 18 bp, Artificial Sequence
  Description of Artificial Sequence: Synthetic oligonucleotide
cactgagagagctggtaa

SEQ ID NO: 5419 - DNA, 18 bp, Artificial Sequence
  Description of Artificial Sequence: Synthetic oligonucleotide
tcaggcactgagagagct

SEQ ID NO: 5420 - DNA, 18 bp, Artificial Sequence
  Description of Artificial Sequence: Synthetic oligonucleotide
ttcaatcaggcactgaga

SEQ ID NO: 5421 - DNA, 18 bp, Artificial Sequence
  Description of Artificial Sequence: Synthetic oligonucleotide
cctctttcaatcaggcac

SEQ ID NO: 5422 - DNA, 18 bp, Artificial Sequence
  Description of Artificial Sequence: Synthetic oligonucleotide
tatgccctctttcaatca

SEQ ID NO: 5423 - DNA, 18 bp, Artificial Sequence
  Description of Artificial Sequence: Synthetic oligonucleotide
aaccttatgccctctttc

SEQ ID NO: 5424 - DNA, 18 bp, Artificial Sequence
  Description of Artificial Sequence: Synthetic oligonucleotide
attataaccttatgccct

SEQ ID NO: 5425 - DNA, 18 bp, Artificial Sequence
  Description of Artificial Sequence: Synthetic oligonucleotide
tgacaattataaccttat

SEQ ID NO: 5426 - DNA, 18 bp, Artificial Sequence
  Description of Artificial Sequence: Synthetic oligonucleotide
atgggtgacaattataac

SEQ ID NO: 5427 - DNA, 18 bp, Artificial Sequence
  Description of Artificial Sequence: Synthetic oligonucleotide
taagcatgggtgacaatt

SEQ ID NO: 5428 - DNA, 18 bp, Artificial Sequence
  Description of Artificial Sequence: Synthetic oligonucleotide
ttccataagcatgggtga

SEQ ID NO: 5429 - DNA, 18 bp, Artificial Sequence
  Description of Artificial Sequence: Synthetic oligonucleotide
tcgatttccataagcatg

SEQ ID NO: 5430 - DNA, 18 bp, Artificial Sequence
  Description of Artificial Sequence: Synthetic oligonucleotide
ccttttcgatttccataa

SEQ ID NO: 5431 - DNA, 18 bp, Artificial Sequence
  Description of Artificial Sequence: Synthetic oligonucleotide
ggatgccttttcgatttc

SEQ ID NO: 5432 - DNA, 18 bp, Artificial Sequence
  Description of Artificial Sequence: Synthetic oligonucleotide
gtaacggatgccttttcg

SEQ ID NO: 5433 - DNA, 18 bp, Artificial Sequence
  Description of Artificial Sequence: Synthetic oligonucleotide
gtgaggtaacggatgcct

SEQ ID NO: 5434 - DNA, 18 bp, Artificial Sequence
  Description of Artificial Sequence: Synthetic oligonucleotide
cactggtgaggtaacgga

SEQ ID NO: 5435 - DNA, 18 bp, Artificial Sequence
  Description of Artificial Sequence: Synthetic oligonucleotide
gaggccactggtgaggta

SEQ ID NO: 5436 - DNA, 18 bp, Artificial Sequence
  Description of Artificial Sequence: Synthetic oligonucleotide
actttgaggccactggtg

SEQ ID NO: 5437 - DNA, 18 bp, Artificial Sequence
  Description of Artificial Sequence: Synthetic oligonucleotide
aatagactttgaggccac

SEQ ID NO: 5438 - DNA, 18 bp, Artificial Sequence
  Description of Artificial Sequence: Synthetic oligonucleotide
caagtaatagactttgag

SEQ ID NO: 5439 - DNA, 18 bp, Artificial Sequence
  Description of Artificial Sequence: Synthetic oligonucleotide
agaggcaagtaatagact

SEQ ID NO: 5440 - DNA, 18 bp, Artificial Sequence
  Description of Artificial Sequence: Synthetic oligonucleotide
ctttcagaggcaagtaat

SEQ ID NO: 5441 - DNA, 18 bp, Artificial Sequence
  Description of Artificial Sequence: Synthetic oligonucleotide
catgactttcagaggcaa

SEQ ID NO: 5442 - DNA, 18 bp, Artificial Sequence
  Description of Artificial Sequence: Synthetic oligonucleotide
ttgtacatgactttcaga

SEQ ID NO: 5443 - DNA, 18 bp, Artificial Sequence
  Description of Artificial Sequence: Synthetic oligonucleotide
actggttgtacatgactt

SEQ ID NO: 5444 - DNA, 18 bp, Artificial Sequence
  Description of Artificial Sequence: Synthetic oligonucleotide
tgtagactggttgtacat

SEQ ID NO: 5445 - DNA, 18 bp, Artificial Sequence
  Description of Artificial Sequence: Synthetic oligonucleotide
gtggctgtagactggttg

SEQ ID NO: 5446 - DNA, 18 bp, Artificial Sequence
  Description of Artificial Sequence: Synthetic oligonucleotide
gggtcgtggctgtagact

SEQ ID NO: 5447 - DNA, 18 bp, Artificial Sequence
  Description of Artificial Sequence: Synthetic oligonucleotide
aaagagggtcgtggctgt

SEQ ID NO: 5448 - DNA, 18 bp, Artificial Sequence
  Description of Artificial Sequence: Synthetic oligonucleotide
ctgtgaaagagggtcgtg

SEQ ID NO: 5449 - DNA, 18 bp, Artificial Sequence
  Description of Artificial Sequence: Synthetic oligonucleotide
gcagactgtgaaagaggg

SEQ ID NO: 5450 - DNA, 18 bp, Artificial Sequence
  Description of Artificial Sequence: Synthetic oligonucleotide
caatggcagactgtgaaa

SEQ ID NO: 5451 - DNA, 18 bp, Artificial Sequence
  Description of Artificial Sequence: Synthetic oligonucleotide
gtacctgagcaatggcag

SEQ ID NO: 5452 - DNA, 18 bp, Artificial Sequence
  Description of Artificial Sequence: Synthetic oligonucleotide
aatatgtacctgagcaat

SEQ ID NO: 5453 - DNA, 18 bp, Artificial Sequence
  Description of Artificial Sequence: Synthetic oligonucleotide
gaacaaatatgtacctga

SEQ ID NO: 5454 - DNA, 18 bp, Artificial Sequence
  Description of Artificial Sequence: Synthetic oligonucleotide
ctcccgaacaaatatgta

SEQ ID NO: 5455 - DNA, 18 bp, Artificial Sequence
  Description of Artificial Sequence: Synthetic oligonucleotide
actctctcccgaacaaat

SEQ ID NO: 5456 - DNA, 18 bp, Artificial Sequence
  Description of Artificial Sequence: Synthetic oligonucleotide
tcgtgactctctcccgaa

SEQ ID NO: 5457 - DNA, 18 bp, Artificial Sequence
  Description of Artificial Sequence: Synthetic oligonucleotide
gattatcgtgactctctc

SEQ ID NO: 5458 - DNA, 18 bp, Artificial Sequence
  Description of Artificial Sequence: Synthetic oligonucleotide
gaatggattatcgtgact

SEQ ID NO: 5459 - DNA, 18 bp, Artificial Sequence
  Description of Artificial Sequence: Synthetic oligonucleotide
tatgtgaatggattatcg

SEQ ID NO: 5460 - DNA, 18 bp, Artificial Sequence
  Description of Artificial Sequence: Synthetic oligonucleotide
agaactatgtgaatggat

SEQ ID NO: 5461 - DNA, 18 bp, Artificial Sequence
  Description of Artificial Sequence: Synthetic oligonucleotide
gaaaaagaactatgtgaa

SEQ ID NO: 5462 - DNA, 18 bp, Artificial Sequence
  Description of Artificial Sequence: Synthetic oligonucleotide
tagcagaaaaagaactat

SEQ ID NO: 5463 - DNA, 18 bp, Artificial Sequence
  Description of Artificial Sequence: Synthetic oligonucleotide
ggccatagcagaaaaaga

SEQ ID NO: 5464 - DNA, 18 bp, Artificial Sequence
  Description of Artificial Sequence: Synthetic oligonucleotide
tcatgggccatagcagaa

SEQ ID NO: 5465 - DNA, 18 bp, Artificial Sequence
  Description of Artificial Sequence: Synthetic oligonucleotide
gagcatcatgggccatag

SEQ ID NO: 5466 - DNA, 18 bp, Artificial Sequence
  Description of Artificial Sequence: Synthetic oligonucleotide
gaagagagcatcatgggc

SEQ ID NO: 5467 - DNA, 18 bp, Artificial Sequence
  Description of Artificial Sequence: Synthetic oligonucleotide
gcgtggaagagagcatca

SEQ ID NO: 5468 - DNA, 18 bp, Artificial Sequence
  Description of Artificial Sequence: Synthetic oligonucleotide
tcttggcgtggaagagag

SEQ ID NO: 5469 - DNA, 18 bp, Artificial Sequence
  Description of Artificial Sequence: Synthetic oligonucleotide
cattgtcttggcgtggaa

SEQ ID NO: 5470 - DNA, 18 bp, Artificial Sequence
  Description of Artificial Sequence: Synthetic oligonucleotide
agccccattgtcttggcg

SEQ ID NO: 5471 - DNA, 18 bp, Artificial Sequence
  Description of Artificial Sequence: Synthetic oligonucleotide
tctgaagccccattgtct

SEQ ID NO: 5472 - DNA, 18 bp, Artificial Sequence
  Description of Artificial Sequence: Synthetic oligonucleotide
gactgtctgaagccccat

SEQ ID NO: 5473 - DNA, 18 bp, Artificial Sequence
  Description of Artificial Sequence: Synthetic oligonucleotide
gtgaagactgtctgaagc

SEQ ID NO: 5474 - DNA, 18 bp, Artificial Sequence
  Description of Artificial Sequence: Synthetic oligonucleotide
ggtccgtgaagactgtct

SEQ ID NO: 5475 - DNA, 18 bp, Artificial Sequence
  Description of Artificial Sequence: Synthetic oligonucleotide
ggaatggtccgtgaagac

SEQ ID NO: 5476 - DNA, 18 bp, Artificial Sequence
  Description of Artificial Sequence: Synthetic oligonucleotide
aaaagggaatggtccgtg

SEQ ID NO: 5477 - DNA, 18 bp, Artificial Sequence
  Description of Artificial Sequence: Synthetic oligonucleotide
atccaaaaagggaatggt

SEQ ID NO: 5478 - DNA, 18 bp, Artificial Sequence
  Description of Artificial Sequence: Synthetic oligonucleotide
agcaaatccaaaaaggga

SEQ ID NO: 5479 - DNA, 18 bp, Artificial Sequence
  Description of Artificial Sequence: Synthetic oligonucleotide
acatcagcaaatccaaaa

SEQ ID NO: 5480 - DNA, 18 bp, Artificial Sequence
  Description of Artificial Sequence: Synthetic oligonucleotide
agctgacatcagcaaatc

SEQ ID NO: 5481 - DNA, 18 bp, Artificial Sequence
  Description of Artificial Sequence: Synthetic oligonucleotide
caccgagctgacatcagc

SEQ ID NO: 5482 - DNA, 18 bp, Artificial Sequence
  Description of Artificial Sequence: Synthetic oligonucleotide
gtaagcaccgagctgaca

SEQ ID NO: 5483 - DNA, 18 bp, Artificial Sequence
  Description of Artificial Sequence: Synthetic oligonucleotide
tgtttgtaagcaccgagc

SEQ ID NO: 5484 - DNA, 18 bp, Artificial Sequence
  Description of Artificial Sequence: Synthetic oligonucleotide
aagcttgtttgtaagcac

SEQ ID NO: 5485 - DNA, 18 bp, Artificial Sequence
  Description of Artificial Sequence: Synthetic oligonucleotide
gttagaagcttgtttgta

SEQ ID NO: 5486 - DNA, 18 bp, Artificial Sequence
  Description of Artificial Sequence: Synthetic oligonucleotide
acacggttagaagcttgt

SEQ ID NO: 5487 - DNA, 18 bp, Artificial Sequence
  Description of Artificial Sequence: Synthetic oligonucleotide
aagagacacggttagaag

SEQ ID NO: 5488 - DNA, 18 bp, Artificial Sequence
  Description of Artificial Sequence: Synthetic oligonucleotide
tcacaaagagacacggtt

SEQ ID NO: 5489 - DNA, 18 bp, Artificial Sequence
  Description of Artificial Sequence: Synthetic oligonucleotide
ttgtatcacaaagagaca

SEQ ID NO: 5490 - DNA, 18 bp, Artificial Sequence
  Description of Artificial Sequence: Synthetic oligonucleotide
gtggtttgtatcacaaag

SEQ ID NO: 5491 - DNA, 18 bp, Artificial Sequence
  Description of Artificial Sequence: Synthetic oligonucleotide
atgatgtggtttgtatca

SEQ ID NO: 5492 - DNA, 18 bp, Artificial Sequence
  Description of Artificial Sequence: Synthetic oligonucleotide
cacaaatgatgtggtttg

SEQ ID NO: 5493 - DNA, 18 bp, Artificial Sequence
  Description of Artificial Sequence: Synthetic oligonucleotide
agacacacaaatgatgtg

SEQ ID NO: 5494 - DNA, 18 bp, Artificial Sequence
  Description of Artificial Sequence: Synthetic oligonucleotide
gtataagacacacaaatg

SEQ ID NO: 5495 - DNA, 18 bp, Artificial Sequence
  Description of Artificial Sequence: Synthetic oligonucleotide
tactagtataagacacac

SEQ ID NO: 5496 - DNA, 18 bp, Artificial Sequence
  Description of Artificial Sequence: Synthetic oligonucleotide
ttccttactagtataaga

SEQ ID NO: 5497 - DNA, 18 bp, Artificial Sequence
  Description of Artificial Sequence: Synthetic oligonucleotide
gtattttccttactagta

SEQ ID NO: 5498 - DNA, 18 bp, Artificial Sequence
  Description of Artificial Sequence: Synthetic oligonucleotide
gtacagtattttccttac

SEQ ID NO: 5499 - DNA, 18 bp, Artificial Sequence
  Description of Artificial Sequence: Synthetic oligonucleotide
tcttagtacagtattttc

SEQ ID NO: 5500 - DNA, 18 bp, Artificial Sequence
  Description of Artificial Sequence: Synthetic oligonucleotide
gctgctcttagtacagta

SEQ ID NO: 5501 - DNA, 18 bp, Artificial Sequence
  Description of Artificial Sequence: Synthetic oligonucleotide
tcagtgctgctcttagta

SEQ ID NO: 5502 - DNA, 18 bp, Artificial Sequence
  Description of Artificial Sequence: Synthetic oligonucleotide
aggattcagtgctgctct

SEQ ID NO: 5503 - DNA, 18 bp, Artificial Sequence
  Description of Artificial Sequence: Synthetic oligonucleotide
atttcaggattcagtgct

SEQ ID NO: 5504 - DNA, 18 bp, Artificial Sequence
  Description of Artificial Sequence: Synthetic oligonucleotide
acactatttcaggattca

SEQ ID NO: 5505 - DNA, 18 bp, Artificial Sequence
  Description of Artificial Sequence: Synthetic oligonucleotide
gacggacactatttcagg

SEQ ID NO: 5506 - DNA, 18 bp, Artificial Sequence
  Description of Artificial Sequence: Synthetic oligonucleotide
ggaatgacggacactatt

SEQ ID NO: 5507 - DNA, 18 bp, Artificial Sequence
  Description of Artificial Sequence: Synthetic oligonucleotide
cattaggaatgacggaca

SEQ ID NO: 5508 - DNA, 18 bp, Artificial Sequence
  Description of Artificial Sequence: Synthetic oligonucleotide
tacagcattaggaatgac

SEQ ID NO: 5509 - DNA, 18 bp, Artificial Sequence
  Description of Artificial Sequence: Synthetic oligonucleotide
ggatctacagcattagga

SEQ ID NO: 5510 - DNA, 18 bp, Artificial Sequence
  Description of Artificial Sequence: Synthetic oligonucleotide
cagtaggatctacagcat

SEQ ID NO: 5511 - DNA, 18 bp, Artificial Sequence
  Description of Artificial Sequence: Synthetic oligonucleotide
gaagtcagtaggatctac

SEQ ID NO: 5512 - DNA, 18 bp, Artificial Sequence
  Description of Artificial Sequence: Synthetic oligonucleotide
ggagtgaagtcagtagga

SEQ ID NO: 5513 - DNA, 18 bp, Artificial Sequence
  Description of Artificial Sequence: Synthetic oligonucleotide
ggtctggagtgaagtcag

SEQ ID NO: 5514 - DNA, 18 bp, Artificial Sequence
  Description of Artificial Sequence: Synthetic oligonucleotide
aaatgggtctggagtgaa

SEQ ID NO: 5515 - DNA, 18 bp, Artificial Sequence
  Description of Artificial Sequence: Synthetic oligonucleotide
cttctaaatgggtctgga

SEQ ID NO: 5516 - DNA, 18 bp, Artificial Sequence
  Description of Artificial Sequence: Synthetic oligonucleotide
catgccttctaaatgggt

SEQ ID NO: 5517 - DNA, 18 bp, Artificial Sequence
  Description of Artificial Sequence: Synthetic oligonucleotide
actatcatgccttctaaa

SEQ ID NO: 5518 - DNA, 18 bp, Artificial Sequence
  Description of Artificial Sequence: Synthetic oligonucleotide
gttatactatcatgcctt

SEQ ID NO: 5519 - DNA, 18 bp, Artificial Sequence
  Description of Artificial Sequence: Synthetic oligonucleotide
caatagttatactatcat

SEQ ID NO: 5520 - DNA, 18 bp, Artificial Sequence
  Description of Artificial Sequence: Synthetic oligonucleotide
aacaacaatagttatact

SEQ ID NO: 5521 - DNA, 18 bp, Artificial Sequence
  Description of Artificial Sequence: Synthetic oligonucleotide
ctgacaacaacaatagtt

SEQ ID NO: 5522 - DNA, 18 bp, Artificial Sequence
  Description of Artificial Sequence: Synthetic oligonucleotide
gtctgctgacaacaacaa

SEQ ID NO: 5523 - DNA, 18 bp, Artificial Sequence
  Description of Artificial Sequence: Synthetic oligonucleotide
aacaagtctgctgacaac

SEQ ID NO: 5524 - DNA, 18 bp, Artificial Sequence
  Description of Artificial Sequence: Synthetic oligonucleotide
ctgtaaacaagtctgctg

SEQ ID NO: 5525 - DNA, 18 bp, Artificial Sequence
  Description of Artificial Sequence: Synthetic oligonucleotide
cttttctgtaaacaagtc

SEQ ID NO: 5526 - DNA, 18 bp, Artificial Sequence
  Description of Artificial Sequence: Synthetic oligonucleotide
taccttttctgtaaacaa

SEQ ID NO: 5527 - DNA, 18 bp, Artificial Sequence
  Description of Artificial Sequence: Synthetic oligonucleotide
ttcattaccttttctgta

SEQ ID NO: 5528 - DNA, 18 bp, Artificial Sequence
  Description of Artificial Sequence: Synthetic oligonucleotide
atcatttcattacctttt

SEQ ID NO: 5529 - DNA, 18 bp, Artificial Sequence
  Description of Artificial Sequence: Synthetic oligonucleotide
tagctatcatttcattac

SEQ ID NO: 5530 - DNA, 18 bp, Artificial Sequence
  Description of Artificial Sequence: Synthetic oligonucleotide
aattatagctatcatttc

SEQ ID NO: 5531 - DNA, 18 bp, Artificial Sequence
  Description of Artificial Sequence: Synthetic oligonucleotide
aatgcaattatagctatc

SEQ ID NO: 5532 - DNA, 18 bp, Artificial Sequence
  Description of Artificial Sequence: Synthetic oligonucleotide
tctacaatgcaattatag

SEQ ID NO: 5533 - DNA, 18 bp, Artificial Sequence
  Description of Artificial Sequence: Synthetic oligonucleotide
aaaagtctacaatgcaat

SEQ ID NO: 5534 - DNA, 18 bp, Artificial Sequence
  Description of Artificial Sequence: Synthetic oligonucleotide
gggaaaaaagtctacaat

SEQ ID NO: 5535 - DNA, 18 bp, Artificial Sequence
  Description of Artificial Sequence: Synthetic oligonucleotide
ctatagggaaaaaagtct

SEQ ID NO: 5536 - DNA, 18 bp, Artificial Sequence
  Description of Artificial Sequence: Synthetic oligonucleotide
gctttctatagggaaaaa

SEQ ID NO: 5537 - DNA, 18 bp, Artificial Sequence
  Description of Artificial Sequence: Synthetic oligonucleotide
caacagctttctataggg

SEQ ID NO: 5538 - DNA, 18 bp, Artificial Sequence
  Description of Artificial Sequence: Synthetic oligonucleotide
gtattcaacagctttcta

SEQ ID NO: 5539 - DNA, 18 bp, Artificial Sequence
  Description of Artificial Sequence: Synthetic oligonucleotide
tacaagtattcaacagct

SEQ ID NO: 5540 - DNA, 18 bp, Artificial Sequence
  Description of Artificial Sequence: Synthetic oligonucleotide
ttatatacaagtattcaa

SEQ ID NO: 5541 - DNA, 18 bp, Artificial Sequence
  Description of Artificial Sequence: Synthetic oligonucleotide
aatcattatatacaagta

SEQ ID NO: 5542 - DNA, 18 bp, Artificial Sequence
  Description of Artificial Sequence: Synthetic oligonucleotide
caaacaatcattatatac

SEQ ID NO: 5543 - DNA, 18 bp, Artificial Sequence
  Description of Artificial Sequence: Synthetic oligonucleotide
aaagccaaacaatcatta

SEQ ID NO: 5544 - DNA, 18 bp, Artificial Sequence
  Description of Artificial Sequence: Synthetic oligonucleotide
aatgaaaagccaaacaat

SEQ ID NO: 5545 - DNA, 18 bp, Artificial Sequence
  Description of Artificial Sequence: Synthetic oligonucleotide
aacaaaatgaaaagccaa

SEQ ID NO: 5546 - DNA, 18 bp, Artificial Sequence
  Description of Artificial Sequence: Synthetic oligonucleotide
cataaaacaaaatgaaaa

SEQ ID NO: 5547 - DNA, 18 bp, Artificial Sequence
  Description of Artificial Sequence: Synthetic oligonucleotide
actaaacccgtgggaata

SEQ ID NO: 5548 - DNA, 18 bp, Artificial Sequence
  Description of Artificial Sequence: Synthetic oligonucleotide
acctcactaaacccgtgg

SEQ ID NO: 5549 - DNA, 18 bp, Artificial Sequence
  Description of Artificial Sequence: Synthetic oligonucleotide
ttgagacctcactaaacc

SEQ ID NO: 5550 - DNA, 18 bp, Artificial Sequence
  Description of Artificial Sequence: Synthetic oligonucleotide
agtaattgagacctcact

SEQ ID NO: 5551 - DNA, 18 bp, Artificial Sequence
  Description of Artificial Sequence: Synthetic oligonucleotide
actacagtaattgagacc

SEQ ID NO: 5552 - DNA, 18 bp, Artificial Sequence
  Description of Artificial Sequence: Synthetic oligonucleotide
aactcactacagtaattg

SEQ ID NO: 5553 - DNA, 18 bp, Artificial Sequence
  Description of Artificial Sequence: Synthetic oligonucleotide
tttacaactcactacagt

SEQ ID NO: 5554 - DNA, 18 bp, Artificial Sequence
  Description of Artificial Sequence: Synthetic oligonucleotide
cacattttacaactcact

SEQ ID NO: 5555 - DNA, 18 bp, Artificial Sequence
  Description of Artificial Sequence: Synthetic oligonucleotide
atgctcacattttacaac

SEQ ID NO: 5556 - DNA, 18 bp, Artificial Sequence
  Description of Artificial Sequence: Synthetic oligonucleotide
atcaaatgctcacatttt

SEQ ID NO: 5557 - DNA, 18 bp, Artificial Sequence
  Description of Artificial Sequence: Synthetic oligonucleotide
aagatatcaaatgctcac

SEQ ID NO: 5558 - DNA, 18 bp, Artificial Sequence
  Description of Artificial Sequence: Synthetic oligonucleotide
ttaccaagatatcaaatg

SEQ ID NO: 5559 - DNA, 18 bp, Artificial Sequence
  Description of Artificial Sequence: Synthetic oligonucleotide
aaggtttaccaagatatc

SEQ ID NO: 5560 - DNA, 18 bp, Artificial Sequence
  Description of Artificial Sequence: Synthetic oligonucleotide
aaaagaaggtttaccaag

SEQ ID NO: 5561 - DNA, 18 bp, Artificial Sequence
  Description of Artificial Sequence: Synthetic oligonucleotide
gaaacaaaagaaggttta

SEQ ID NO: 5562 - DNA, 18 bp, Artificial Sequence
  Description of Artificial Sequence: Synthetic oligonucleotide
aaaaggaaacaaaagaag

SEQ ID NO: 5563 - DNA, 18 bp, Artificial Sequence
  Description of Artificial Sequence: Synthetic oligonucleotide
aagacaaaaggaaacaaa

SEQ ID NO: 5564 - DNA, 18 bp, Artificial Sequence
  Description of Artificial Sequence: Synthetic oligonucleotide
ctgcaaagacaaaaggaa

SEQ ID NO: 5565 - DNA, 18 bp, Artificial Sequence
  Description of Artificial Sequence: Synthetic oligonucleotide
tttatctgcaaagacaaa

SEQ ID NO: 5566 - DNA, 18 bp, Artificial Sequence
  Description of Artificial Sequence: Synthetic oligonucleotide
aataatttatctgcaaag

SEQ ID NO: 5567 - DNA, 18 bp, Artificial Sequence
  Description of Artificial Sequence: Synthetic oligonucleotide
tgactaataatttatctg

SEQ ID NO: 5568 - DNA, 18 bp, Artificial Sequence
  Description of Artificial Sequence: Synthetic oligonucleotide
ttatgactaataatttat

SEQ ID NO: 5569 - DNA, 18 bp, Artificial Sequence
  Description of Artificial Sequence: Synthetic oligonucleotide
tacagttatgactaataa

SEQ ID NO: 5570 - DNA, 18 bp, Artificial Sequence
  Description of Artificial Sequence: Synthetic oligonucleotide
gttgctacagttatgact

SEQ ID NO: 5571 - DNA, 18 bp, Artificial Sequence
  Description of Artificial Sequence: Synthetic oligonucleotide
cttttgttgctacagtta

SEQ ID NO: 5572 - DNA, 18 bp, Artificial Sequence
  Description of Artificial Sequence: Synthetic oligonucleotide
actttcttttgttgctac

SEQ ID NO: 5573 - DNA, 18 bp, Artificial Sequence
  Description of Artificial Sequence: Synthetic oligonucleotide
ccatcactttcttttgtt

SEQ ID NO: 5574 - DNA, 18 bp, Artificial Sequence
  Description of Artificial Sequence: Synthetic oligonucleotide
ggaatccatcactttctt

SEQ ID NO: 5575 - DNA, 18 bp, Artificial Sequence
  Description of Artificial Sequence: Synthetic oligonucleotide
tcgatggaatccatcact

SEQ ID NO: 5576 - DNA, 18 bp, Artificial Sequence
  Description of Artificial Sequence: Synthetic oligonucleotide
ataaatcgatggaatcca

SEQ ID NO: 5577 - DNA, 18 bp, Artificial Sequence
  Description of Artificial Sequence: Synthetic oligonucleotide
gctgactgcataaatcga

SEQ ID NO: 5578 - DNA, 18 bp, Artificial Sequence
  Description of Artificial Sequence: Synthetic oligonucleotide
atttggctgactgcataa

SEQ ID NO: 5579 - DNA, 18 bp, Artificial Sequence
  Description of Artificial Sequence: Synthetic oligonucleotide
gaaatatttggctgactg

SEQ ID NO: 5580 - DNA, 18 bp, Artificial Sequence
  Description of Artificial Sequence: Synthetic oligonucleotide
taattgaaatatttggct

SEQ ID NO: 5581 - DNA, 18 bp, Artificial Sequence
  Description of Artificial Sequence: Synthetic oligonucleotide
cagtataattgaaatatt

SEQ ID NO: 5582 - DNA, 18 bp, Artificial Sequence
  Description of Artificial Sequence: Synthetic oligonucleotide
cttcacagtataattgaa

SEQ ID NO: 5583 - DNA, 18 bp, Artificial Sequence
  Description of Artificial Sequence: Synthetic oligonucleotide
taccttcacagtataatt

SEQ ID NO: 5584 - DNA, 18 bp, Artificial Sequence
  Description of Artificial Sequence: Synthetic oligonucleotide
taccataccttcacagta

SEQ ID NO: 5585 - DNA, 18 bp, Artificial Sequence
  Description of Artificial Sequence: Synthetic oligonucleotide
ggatataccataccttca

SEQ ID NO: 5586 - DNA, 18 bp, Artificial Sequence
  Description of Artificial Sequence: Synthetic oligonucleotide
ttaaaggatataccatac

SEQ ID NO: 5587 - DNA, 18 bp, Artificial Sequence
  Description of Artificial Sequence: Synthetic oligonucleotide
ataggttaaaggatatac

SEQ ID NO: 5588 - DNA, 18 bp, Artificial Sequence
  Description of Artificial Sequence: Synthetic oligonucleotide
tcttcataggttaaagga

SEQ ID NO: 5589 - DNA, 18 bp, Artificial Sequence
  Description of Artificial Sequence: Synthetic oligonucleotide
taggatcttcataggtta

SEQ ID NO: 5590 - DNA, 18 bp, Artificial Sequence
  Description of Artificial Sequence: Synthetic oligonucleotide
cattataggatcttcata

SEQ ID NO: 5591 - DNA, 18 bp, Artificial Sequence
  Description of Artificial Sequence: Synthetic oligonucleotide
gcacacattataggatct

SEQ ID NO: 5592 - DNA, 18 bp, Artificial Sequence
  Description of Artificial Sequence: Synthetic oligonucleotide
tttaggcacacattatag

SEQ ID NO: 5593 - DNA, 18 bp, Artificial Sequence
  Description of Artificial Sequence: Synthetic oligonucleotide
catactttaggcacacat

SEQ ID NO: 5594 - DNA, 18 bp, Artificial Sequence
  Description of Artificial Sequence: Synthetic oligonucleotide
aaaaacatactttaggca

SEQ ID NO: 5595 - DNA, 18 bp, Artificial Sequence
  Description of Artificial Sequence: Synthetic oligonucleotide
ttatgaaaaacatacttt

SEQ ID NO: 5596 - DNA, 18 bp, Artificial Sequence
  Description of Artificial Sequence: Synthetic oligonucleotide
tgctgttatgaaaaacat

SEQ ID NO: 5597 - DNA, 18 bp, Artificial Sequence
  Description of Artificial Sequence: Synthetic oligonucleotide
tgtactgctgttatgaaa

SEQ ID NO: 5598 - DNA, 18 bp, Artificial Sequence
  Description of Artificial Sequence: Synthetic oligonucleotide
cagattgtactgctgtta

SEQ ID NO: 5599 - DNA, 18 bp, Artificial Sequence
  Description of Artificial Sequence: Synthetic oligonucleotide
gattacagattgtactgc

SEQ ID NO: 5600 - DNA, 18 bp, Artificial Sequence
  Description of Artificial Sequence: Synthetic oligonucleotide
gtgaggattacagattgt

SEQ ID NO: 5601 - DNA, 18 bp, Artificial Sequence
  Description of Artificial Sequence: Synthetic oligonucleotide
tccttgtgaggattacag

SEQ ID NO: 5602 - DNA, 18 bp, Artificial Sequence
  Description of Artificial Sequence: Synthetic oligonucleotide
tatcttccttgtgaggat

SEQ ID NO: 5603 - DNA, 18 bp, Artificial Sequence
  Description of Artificial Sequence: Synthetic oligonucleotide
aatgctatcttccttgtg

SEQ ID NO: 5604 - DNA, 18 bp, Artificial Sequence
  Description of Artificial Sequence: Synthetic oligonucleotide
tgaacccgggaagcagag

SEQ ID NO: 5605 - DNA, 18 bp, Artificial Sequence
  Description of Artificial Sequence: Synthetic oligonucleotide
tggcatgaacccgggaag

SEQ ID NO: 5606 - DNA, 18 bp, Artificial Sequence
  Description of Artificial Sequence: Synthetic oligonucleotide
gagaatggcatgaacccg

SEQ ID NO: 5607 - DNA, 18 bp, Artificial Sequence
  Description of Artificial Sequence: Synthetic oligonucleotide
ggcaggagaatggcatga

SEQ ID NO: 5608 - DNA, 18 bp, Artificial Sequence
  Description of Artificial Sequence: Synthetic oligonucleotide
gctgaggcaggagaatgg

SEQ ID NO: 5609 - DNA, 18 bp, Artificial Sequence
  Description of Artificial Sequence: Synthetic oligonucleotide
agaaggctgaggcaggag

SEQ ID NO: 5610 - DNA, 18 bp, Artificial Sequence
  Description of Artificial Sequence: Synthetic oligonucleotide
tactcagaaggctgaggc

SEQ ID NO: 5611 - DNA, 18 bp, Artificial Sequence
  Description of Artificial Sequence: Synthetic oligonucleotide
acagctactcagaaggct

SEQ ID NO: 5612 - DNA, 18 bp, Artificial Sequence
  Description of Artificial Sequence: Synthetic oligonucleotide
tagtcacagctactcaga

SEQ ID NO: 5613 - DNA, 18 bp, Artificial Sequence
  Description of Artificial Sequence: Synthetic oligonucleotide
gcctgtagtcacagctac

SEQ ID NO: 5614 - DNA, 18 bp, Artificial Sequence
  Description of Artificial Sequence: Synthetic oligonucleotide
tgggcgcctgtagtcaca

SEQ ID NO: 5615 - DNA, 18 bp, Artificial Sequence
  Description of Artificial Sequence: Synthetic oligonucleotide
ggtggtgggcgcctgtag

SEQ ID NO: 5616 - DNA, 18 bp, Artificial Sequence
  Description of Artificial Sequence: Synthetic oligonucleotide
ggcgtggtggtgggcgcc

SEQ ID NO: 5617 - DNA, 18 bp, Artificial Sequence
  Description of Artificial Sequence: Synthetic oligonucleotide
agccgggcgtggtggtgg

SEQ ID NO: 5618 - DNA, 18 bp, Artificial Sequence
  Description of Artificial Sequence: Synthetic oligonucleotide
aaattagccgggcgtggt

SEQ ID NO: 5619 - DNA, 18 bp, Artificial Sequence
  Description of Artificial Sequence: Synthetic oligonucleotide
aaaaaaaattagccgggc

SEQ ID NO: 5620 - DNA, 18 bp, Artificial Sequence
  Description of Artificial Sequence: Synthetic oligonucleotide
aaaaaaaaaaaaattagc

SEQ ID NO: 5621 - DNA, 18 bp, Artificial Sequence
  Description of Artificial Sequence: Synthetic oligonucleotide
ctacaaaaaaaaaaaaaa

SEQ ID NO: 5622 - DNA, 18 bp, Artificial Sequence
  Description of Artificial Sequence: Synthetic oligonucleotide
taaaactacaaaaaaaaa

SEQ ID NO: 5623 - DNA, 18 bp, Artificial Sequence
  Description of Artificial Sequence: Synthetic oligonucleotide
actactaaaactacaaaa

SEQ ID NO: 5624 - DNA, 18 bp, Artificial Sequence
  Description of Artificial Sequence: Synthetic oligonucleotide
ccgtcactactaaaacta

SEQ ID NO: 5625 - DNA, 18 bp, Artificial Sequence
  Description of Artificial Sequence: Synthetic oligonucleotide
accccgtcactactaaaa

SEQ ID NO: 5626 - DNA, 18 bp, Artificial Sequence
  Description of Artificial Sequence: Synthetic oligonucleotide
ggtgaaccccgtcactac

SEQ ID NO: 5627 - DNA, 18 bp, Artificial Sequence
  Description of Artificial Sequence: Synthetic oligonucleotide
aacacggtgaaccccgtc

SEQ ID NO: 5628 - DNA, 18 bp, Artificial Sequence
  Description of Artificial Sequence: Synthetic oligonucleotide
tggctaacacggtgaacc

SEQ ID NO: 5629 - DNA, 18 bp, Artificial Sequence
  Description of Artificial Sequence: Synthetic oligonucleotide
catcctggctaacacggt

SEQ ID NO: 5630 - DNA, 18 bp, Artificial Sequence
  Description of Artificial Sequence: Synthetic oligonucleotide
gagaccatcctggctaac

SEQ ID NO: 5631 - DNA, 18 bp, Artificial Sequence
  Description of Artificial Sequence: Synthetic oligonucleotide
agatcgagaccatcctgg

SEQ ID NO: 5632 - DNA, 18 bp, Artificial Sequence
  Description of Artificial Sequence: Synthetic oligonucleotide
gcaggagatcgagaccat

SEQ ID NO: 5633 - DNA, 18 bp, Artificial Sequence
  Description of Artificial Sequence: Synthetic oligonucleotide
acaaggcaggagatcgag

SEQ ID NO: 5634 - DNA, 18 bp, Artificial Sequence
  Description of Artificial Sequence: Synthetic oligonucleotide
ggatcacaaggcaggaga

SEQ ID NO: 5635 - DNA, 18 bp, Artificial Sequence
  Description of Artificial Sequence: Synthetic oligonucleotide
cgggcggatcacaaggca

SEQ ID NO: 5636 - DNA, 18 bp, Artificial Sequence
  Description of Artificial Sequence: Synthetic oligonucleotide
cgaggcgggcggatcaca

SEQ ID NO: 5637 - DNA, 18 bp, Artificial Sequence
  Description of Artificial Sequence: Synthetic oligonucleotide
gaggccgaggcgggcgga

SEQ ID NO: 5638 - DNA, 18 bp, Artificial Sequence
  Description of Artificial Sequence: Synthetic oligonucleotide
tttgggaggccgaggcgg

SEQ ID NO: 5639 - DNA, 18 bp, Artificial Sequence
  Description of Artificial Sequence: Synthetic oligonucleotide
agcactttgggaggccga

SEQ ID NO: 5640 - DNA, 18 bp, Artificial Sequence
  Description of Artificial Sequence: Synthetic oligonucleotide
atcccagcactttgggag

SEQ ID NO: 5641 - DNA, 18 bp, Artificial Sequence
  Description of Artificial Sequence: Synthetic oligonucleotide
ctgtaatcccagcacttt

SEQ ID NO: 5642 - DNA, 18 bp, Artificial Sequence
  Description of Artificial Sequence: Synthetic oligonucleotide
cacctgtaatcccagcac

SEQ ID NO: 5643 - DNA, 18 bp, Artificial Sequence
  Description of Artificial Sequence: Synthetic oligonucleotide
gctcacacctgtaatccc

SEQ ID NO: 5644 - DNA, 18 bp, Artificial Sequence
  Description of Artificial Sequence: Synthetic oligonucleotide
cagtggctcacacctgta

SEQ ID NO: 5645 - DNA, 18 bp, Artificial Sequence
  Description of Artificial Sequence: Synthetic oligonucleotide
aggcgcagtggctcacac

SEQ ID NO: 5646 - DNA, 18 bp, Artificial Sequence
  Description of Artificial Sequence: Synthetic oligonucleotide
aggccaggcgcagtggct

SEQ ID NO: 5647 - DNA, 18 bp, Artificial Sequence
  Description of Artificial Sequence: Synthetic oligonucleotide
taaacaggccaggcgcag

SEQ ID NO: 5648 - DNA, 18 bp, Artificial Sequence
  Description of Artificial Sequence: Synthetic oligonucleotide
ttaagtaaacaggccagg

SEQ ID NO: 5649 - DNA, 18 bp, Artificial Sequence
  Description of Artificial Sequence: Synthetic oligonucleotide
aagaattaagtaaacagg

SEQ ID NO: 5650 - DNA, 18 bp, Artificial Sequence
  Description of Artificial Sequence: Synthetic oligonucleotide
atataaagaattaagtaa

SEQ ID NO: 5651 - DNA, 18 bp, Artificial Sequence
  Description of Artificial Sequence: Synthetic oligonucleotide
gtggtatataaagaatta

SEQ ID NO: 5652 - DNA, 18 bp, Artificial Sequence
  Description of Artificial Sequence: Synthetic oligonucleotide
attctgtggtatataaag

SEQ ID NO: 5653 - DNA, 18 bp, Artificial Sequence
  Description of Artificial Sequence: Synthetic oligonucleotide
aataaattctgtggtata

SEQ ID NO: 5654 - DNA, 18 bp, Artificial Sequence
  Description of Artificial Sequence: Synthetic oligonucleotide
aagagaataaattctgtg

SEQ ID NO: 5655 - DNA, 18 bp, Artificial Sequence
  Description of Artificial Sequence: Synthetic oligonucleotide
taggcaagagaataaatt

SEQ ID NO: 5656 - DNA, 18 bp, Artificial Sequence
  Description of Artificial Sequence: Synthetic oligonucleotide
gattgtaggcaagagaat

SEQ ID NO: 5657 - DNA, 18 bp, Artificial Sequence
  Description of Artificial Sequence: Synthetic oligonucleotide
tagaggattgtaggcaag

SEQ ID NO: 5658 - DNA, 18 bp, Artificial Sequence
  Description of Artificial Sequence: Synthetic oligonucleotide
gtgcgtagaggattgtag

SEQ ID NO: 5659 - DNA, 18 bp, Artificial Sequence
  Description of Artificial Sequence: Synthetic oligonucleotide
aaaaggtgcgtagaggat

SEQ ID NO: 5660 - DNA, 18 bp, Artificial Sequence
  Description of Artificial Sequence: Synthetic oligonucleotide
agaacaaaaggtgcgtag

SEQ ID NO: 5661 - DNA, 18 bp, Artificial Sequence
  Description of Artificial Sequence: Synthetic oligonucleotide
taattagaacaaaaggtg

SEQ ID NO: 5662 - DNA, 18 bp, Artificial Sequence
  Description of Artificial Sequence: Synthetic oligonucleotide
gacaataattagaacaaa

SEQ ID NO: 5663 - DNA, 18 bp, Artificial Sequence
  Description of Artificial Sequence: Synthetic oligonucleotide
aaaagaaacgaatactgc

SEQ ID NO: 5664 - DNA, 18 bp, Artificial Sequence
  Description of Artificial Sequence: Synthetic oligonucleotide
caataaaaagaaacgaat

SEQ ID NO: 5665 - DNA, 18 bp, Artificial Sequence
  Description of Artificial Sequence: Synthetic oligonucleotide
ctcagcaataaaaagaaa

SEQ ID NO: 5666 - DNA, 18 bp, Artificial Sequence
  Description of Artificial Sequence: Synthetic oligonucleotide
tactactcagcaataaaa

SEQ ID NO: 5667 - DNA, 18 bp, Artificial Sequence
  Description of Artificial Sequence: Synthetic oligonucleotide
tgtaatactactcagcaa

SEQ ID NO: 5668 - DNA, 18 bp, Artificial Sequence
  Description of Artificial Sequence: Synthetic oligonucleotide
caccatgtaatactactc

SEQ ID NO: 5669 - DNA, 18 bp, Artificial Sequence
  Description of Artificial Sequence: Synthetic oligonucleotide
atccacaccatgtaatac

SEQ ID NO: 5670 - DNA, 18 bp, Artificial Sequence
  Description of Artificial Sequence: Synthetic oligonucleotide
ggtacatccacaccatgt

SEQ ID NO: 5671 - DNA, 18 bp, Artificial Sequence
  Description of Artificial Sequence: Synthetic oligonucleotide
attttggtacatccacac

SEQ ID NO: 5672 - DNA, 18 bp, Artificial Sequence
  Description of Artificial Sequence: Synthetic oligonucleotide
aacacattttggtacatc

SEQ ID NO: 5673 - DNA, 18 bp, Artificial Sequence
  Description of Artificial Sequence: Synthetic oligonucleotide
ggttaaacacattttggt

SEQ ID NO: 5674 - DNA, 18 bp, Artificial Sequence
  Description of Artificial Sequence: Synthetic oligonucleotide
tgaatggttaaacacatt

SEQ ID NO: 5675 - DNA, 18 bp, Artificial Sequence
  Description of Artificial Sequence: Synthetic oligonucleotide
atgagtgaatggttaaac

SEQ ID NO: 5676 - DNA, 18 bp, Artificial Sequence
  Description of Artificial Sequence: Synthetic oligonucleotide
cttcaatgagtgaatggt

SEQ ID NO: 5677 - DNA, 18 bp, Artificial Sequence
  Description of Artificial Sequence: Synthetic oligonucleotide
atatccttcaatgagtga

SEQ ID NO: 5678 - DNA, 18 bp, Artificial Sequence
  Description of Artificial Sequence: Synthetic oligonucleotide
atcagatatccttcaatg

SEQ ID NO: 5679 - DNA, 18 bp, Artificial Sequence
  Description of Artificial Sequence: Synthetic oligonucleotide
aacaaatcagatatcctt

SEQ ID NO: 5680 - DNA, 18 bp, Artificial Sequence
  Description of Artificial Sequence: Synthetic oligonucleotide
ctaaaaacaaatcagata

SEQ ID NO: 5681 - DNA, 18 bp, Artificial Sequence
  Description of Artificial Sequence: Synthetic oligonucleotide
caaaactaaaaacaaatc

SEQ ID NO: 5682 - DNA, 18 bp, Artificial Sequence
  Description of Artificial Sequence: Synthetic oligonucleotide
tagcccaaaactaaaaac

SEQ ID NO: 5683 - DNA, 18 bp, Artificial Sequence
  Description of Artificial Sequence: Synthetic oligonucleotide
catcatagcccaaaacta

SEQ ID NO: 5684 - DNA, 18 bp, Artificial Sequence
  Description of Artificial Sequence: Synthetic oligonucleotide
atgcatcatagcccaaaa

SEQ ID NO: 5685 - DNA, 18 bp, Artificial Sequence
  Description of Artificial Sequence: Synthetic oligonucleotide
gcctaatgcatcatagcc

SEQ ID NO: 5686 - DNA, 18 bp, Artificial Sequence
  Description of Artificial Sequence: Synthetic oligonucleotide
cagaagcctaatgcatca

SEQ ID NO: 5687 - DNA, 18 bp, Artificial Sequence
  Description of Artificial Sequence: Synthetic oligonucleotide
actcgcagaagcctaatg

SEQ ID NO: 5688 - DNA, 18 bp, Artificial Sequence
  Description of Artificial Sequence: Synthetic oligonucleotide
taaatactcgcagaagcc

SEQ ID NO: 5689 - DNA, 18 bp, Artificial Sequence
  Description of Artificial Sequence: Synthetic oligonucleotide
gtatataaatactcgcag

SEQ ID NO: 5690 - DNA, 18 bp, Artificial Sequence
  Description of Artificial Sequence: Synthetic oligonucleotide
aatctgtatataaatact

SEQ ID NO: 5691 - DNA, 18 bp, Artificial Sequence
  Description of Artificial Sequence: Synthetic oligonucleotide
ttcaaaatctgtatataa

SEQ ID NO: 5692 - DNA, 18 bp, Artificial Sequence
  Description of Artificial Sequence: Synthetic oligonucleotide
acatgttcaaaatctgta

SEQ ID NO: 5693 - DNA, 18 bp, Artificial Sequence
  Description of Artificial Sequence: Synthetic oligonucleotide
taaaaacatgttcaaaat

SEQ ID NO: 5694 - DNA, 18 bp, Artificial Sequence
  Description of Artificial Sequence: Synthetic oligonucleotide
ggcaataaaaacatgttc

SEQ ID NO: 5695 - DNA, 18 bp, Artificial Sequence
  Description of Artificial Sequence: Synthetic oligonucleotide
gtcttggcaataaaaaca

SEQ ID NO: 5696 - DNA, 18 bp, Artificial Sequence
  Description of Artificial Sequence: Synthetic oligonucleotide
ctgtagtcttggcaataa

SEQ ID NO: 5697 - DNA, 18 bp, Artificial Sequence
  Description of Artificial Sequence: Synthetic oligonucleotide
agcaactgtagtcttggc

SEQ ID NO: 5698 - DNA, 18 bp, Artificial Sequence
  Description of Artificial Sequence: Synthetic oligonucleotide
gacccagcaactgtagtc

SEQ ID NO: 5699 - DNA, 18 bp, Artificial Sequence
  Description of Artificial Sequence: Synthetic oligonucleotide
catttgacccagcaactg

SEQ ID NO: 5700 - DNA, 18 bp, Artificial Sequence
  Description of Artificial Sequence: Synthetic oligonucleotide
taccatttgacccagcaa

SEQ ID NO: 5701 - DNA, 18 bp, Artificial Sequence
  Description of Artificial Sequence: Synthetic oligonucleotide
acacttaccatttgaccc

SEQ ID NO: 5702 - DNA, 18 bp, Artificial Sequence
  Description of Artificial Sequence: Synthetic oligonucleotide
accacacacttaccattt

SEQ ID NO: 5703 - DNA, 18 bp, Artificial Sequence
  Description of Artificial Sequence: Synthetic oligonucleotide
tgcaaaccacacacttac

SEQ ID NO: 5704 - DNA, 18 bp, Artificial Sequence
  Description of Artificial Sequence: Synthetic oligonucleotide
taaattgcaaaccacaca

SEQ ID NO: 5705 - DNA, 18 bp, Artificial Sequence
  Description of Artificial Sequence: Synthetic oligonucleotide
aaaaataaattgcaaacc

SEQ ID NO: 5706 - DNA, 18 bp, Artificial Sequence
  Description of Artificial Sequence: Synthetic oligonucleotide
atttaaaaaataaattgc

SEQ ID NO: 5707 - DNA, 18 bp, Artificial Sequence
  Description of Artificial Sequence: Synthetic oligonucleotide
tggtaatttaaaaaataa

SEQ ID NO: 5708 - DNA, 18 bp, Artificial Sequence
  Description of Artificial Sequence: Synthetic oligonucleotide
ttatctggtaatttaaaa

SEQ ID NO: 5709 - DNA, 18 bp, Artificial Sequence
  Description of Artificial Sequence: Synthetic oligonucleotide
gatttttatctggtaatt

SEQ ID NO: 5710 - DNA, 18 bp, Artificial Sequence
  Description of Artificial Sequence: Synthetic oligonucleotide
taaaagatttttatctgg

SEQ ID NO: 5711 - DNA, 18 bp, Artificial Sequence
  Description of Artificial Sequence: Synthetic oligonucleotide
gccagtaaaagattttta

SEQ ID NO: 5712 - DNA, 18 bp, Artificial Sequence
  Description of Artificial Sequence: Synthetic oligonucleotide
gcccagccagtaaaagat

SEQ ID NO: 5713 - DNA, 18 bp, Artificial Sequence
  Description of Artificial Sequence: Synthetic oligonucleotide
accgtgcccagccagtaa

SEQ ID NO: 5714 - DNA, 18 bp, Artificial Sequence
  Description of Artificial Sequence: Synthetic oligonucleotide
cagccaccgtgcccagcc

SEQ ID NO: 5715 - DNA, 18 bp, Artificial Sequence
  Description of Artificial Sequence: Synthetic oligonucleotide
ggcgtcagccaccgtgcc

SEQ ID NO: 5716 - DNA, 18 bp, Artificial Sequence
  Description of Artificial Sequence: Synthetic oligonucleotide
ttacaggcgtcagccacc

SEQ ID NO: 5717 - DNA, 18 bp, Artificial Sequence
  Description of Artificial Sequence: Synthetic oligonucleotide
tgggattacaggcgtcag

SEQ ID NO: 5718 - DNA, 18 bp, Artificial Sequence
  Description of Artificial Sequence: Synthetic oligonucleotide
agtgctgggattacaggc

SEQ ID NO: 5719 - DNA, 18 bp, Artificial Sequence
  Description of Artificial Sequence: Synthetic oligonucleotide
cccaaagtgctgggatta

SEQ ID NO: 5720 - DNA, 18 bp, Artificial Sequence
  Description of Artificial Sequence: Synthetic oligonucleotide
agcctcccaaagtgctgg

SEQ ID NO: 5721 - DNA, 18 bp, Artificial Sequence
  Description of Artificial Sequence: Synthetic oligonucleotide
tggtagaagggaagcaaa

SEQ ID NO: 5722 - DNA, 18 bp, Artificial Sequence
  Description of Artificial Sequence: Synthetic oligonucleotide
ctccgtggtagaagggaa

SEQ ID NO: 5723 - DNA, 18 bp, Artificial Sequence
  Description of Artificial Sequence: Synthetic oligonucleotide
ttgccctccgtggtagaa

SEQ ID NO: 5724 - DNA, 18 bp, Artificial Sequence
  Description of Artificial Sequence: Synthetic oligonucleotide
ttaacttgccctccgtgg

SEQ ID NO: 5725 - DNA, 18 bp, Artificial Sequence
  Description of Artificial Sequence: Synthetic oligonucleotide
agagtttaacttgccctc

SEQ ID NO: 5726 - DNA, 18 bp, Artificial Sequence
  Description of Artificial Sequence: Synthetic oligonucleotide
gagatagagtttaacttg

SEQ ID NO: 5727 - DNA, 18 bp, Artificial Sequence
  Description of Artificial Sequence: Synthetic oligonucleotide
aatgcgagatagagttta

SEQ ID NO: 5728 - DNA, 18 bp, Artificial Sequence
  Description of Artificial Sequence: Synthetic oligonucleotide
catgaaatgcgagataga

SEQ ID NO: 5729 - DNA, 18 bp, Artificial Sequence
  Description of Artificial Sequence: Synthetic oligonucleotide
tcaaacatgaaatgcgag

SEQ ID NO: 5730 - DNA, 18 bp, Artificial Sequence
  Description of Artificial Sequence: Synthetic oligonucleotide
aaatgtcaaacatgaaat

SEQ ID NO: 5731 - DNA, 18 bp, Artificial Sequence
  Description of Artificial Sequence: Synthetic oligonucleotide
aaaggaaatgtcaaacat

SEQ ID NO: 5732 - DNA, 18 bp, Artificial Sequence
  Description of Artificial Sequence: Synthetic oligonucleotide
aaaaaaaaggaaatgtca

SEQ ID NO: 5733 - DNA, 18 bp, Artificial Sequence
  Description of Artificial Sequence: Synthetic oligonucleotide
aaaaaaaaaaaaaggaaa

SEQ ID NO: 5734 - DNA, 18 bp, Artificial Sequence
  Description of Artificial Sequence: Synthetic oligonucleotide
aaaaaaaaaaaaaaaaaa

SEQ ID NO: 5735 - DNA, 18 bp, Artificial Sequence
  Description of Artificial Sequence: Synthetic oligonucleotide
gtaaaaaaaaaaaaaaaa

SEQ ID NO: 5736 - DNA, 18 bp, Artificial Sequence
  Description of Artificial Sequence: Synthetic oligonucleotide
gcaaggtaaaaaaaaaaa

SEQ ID NO: 5737 - DNA, 18 bp, Artificial Sequence
  Description of Artificial Sequence: Synthetic oligonucleotide
tgggagcaaggtaaaaaa

SEQ ID NO: 5738 - DNA, 18 bp, Artificial Sequence
  Description of Artificial Sequence: Synthetic oligonucleotide
ctgtttgggagcaaggta

SEQ ID NO: 5739 - DNA, 18 bp, Artificial Sequence
  Description of Artificial Sequence: Synthetic oligonucleotide
caattctgtttgggagca

SEQ ID NO: 5740 - DNA, 18 bp, Artificial Sequence
  Description of Artificial Sequence: Synthetic oligonucleotide
ggtcacaattctgtttgg

SEQ ID NO: 5741 - DNA, 18 bp, Artificial Sequence
  Description of Artificial Sequence: Synthetic oligonucleotide
atccaggtcacaattctg

SEQ ID NO: 5742 - DNA, 18 bp, Artificial Sequence
  Description of Artificial Sequence: Synthetic oligonucleotide
ctgatccaggtcacaatt

SEQ ID NO: 5743 - DNA, 18 bp, Artificial Sequence
  Description of Artificial Sequence: Synthetic oligonucleotide
ctctgctgatccaggtca

SEQ ID NO: 5744 - DNA, 18 bp, Artificial Sequence
  Description of Artificial Sequence: Synthetic oligonucleotide
caatgctctgctgatcca

SEQ ID NO: 5745 - DNA, 18 bp, Artificial Sequence
  Description of Artificial Sequence: Synthetic oligonucleotide
gtgaacaatgctctgctg

SEQ ID NO: 5746 - DNA, 18 bp, Artificial Sequence
  Description of Artificial Sequence: Synthetic oligonucleotide
acaatgtgaacaatgctc

SEQ ID NO: 5747 - DNA, 18 bp, Artificial Sequence
  Description of Artificial Sequence: Synthetic oligonucleotide
tctgcacaatgtgaacaa

SEQ ID NO: 5748 - DNA, 18 bp, Artificial Sequence
  Description of Artificial Sequence: Synthetic oligonucleotide
cggtctctgcacaatgtg

SEQ ID NO: 5749 - DNA, 18 bp, Artificial Sequence
  Description of Artificial Sequence: Synthetic oligonucleotide
ctccacggtctctgcaca

SEQ ID NO: 5750 - DNA, 18 bp, Artificial Sequence
  Description of Artificial Sequence: Synthetic oligonucleotide
cttttctccacggtctct

SEQ ID NO: 5751 - DNA, 18 bp, Artificial Sequence
  Description of Artificial Sequence: Synthetic oligonucleotide
ttgaccttttctccacgg

SEQ ID NO: 5752 - DNA, 18 bp, Artificial Sequence
  Description of Artificial Sequence: Synthetic oligonucleotide
atttcttgaccttttctc

SEQ ID NO: 5753 - DNA, 18 bp, Artificial Sequence
  Description of Artificial Sequence: Synthetic oligonucleotide
cattcatttcttgacctt

SEQ ID NO: 5754 - DNA, 18 bp, Artificial Sequence
  Description of Artificial Sequence: Synthetic oligonucleotide
agttgcattcatttcttg

SEQ ID NO: 5755 - DNA, 18 bp, Artificial Sequence
  Description of Artificial Sequence: Synthetic oligonucleotide
cctccagttgcattcatt

SEQ ID NO: 5756 - DNA, 18 bp, Artificial Sequence
  Description of Artificial Sequence: Synthetic oligonucleotide
cgtcgcctccagttgcat

SEQ ID NO: 5757 - DNA, 18 bp, Artificial Sequence
  Description of Artificial Sequence: Synthetic oligonucleotide
ggggtcgtcgcctccagt

SEQ ID NO: 5758 - DNA, 18 bp, Artificial Sequence
  Description of Artificial Sequence: Synthetic oligonucleotide
tttctggggtcgtcgcct

SEQ ID NO: 5759 - DNA, 18 bp, Artificial Sequence
  Description of Artificial Sequence: Synthetic oligonucleotide
ccgcgtttctggggtcgt

SEQ ID NO: 5760 - DNA, 18 bp, Artificial Sequence
  Description of Artificial Sequence: Synthetic oligonucleotide
tcccgccgcgtttctggg

SEQ ID NO: 5761 - DNA, 18 bp, Artificial Sequence
  Description of Artificial Sequence: Synthetic oligonucleotide
cagcctcccgccgcgttt

SEQ ID NO: 5762 - DNA, 18 bp, Artificial Sequence
  Description of Artificial Sequence: Synthetic oligonucleotide
gctcacagcctcccgccg

SEQ ID NO: 5763 - DNA, 18 bp, Artificial Sequence
  Description of Artificial Sequence: Synthetic oligonucleotide
ctcccgctcacagcctcc

SEQ ID NO: 5764 - DNA, 18 bp, Artificial Sequence
  Description of Artificial Sequence: Synthetic oligonucleotide
tggggctcccgctcacag

SEQ ID NO: 5765 - DNA, 18 bp, Artificial Sequence
  Description of Artificial Sequence: Synthetic oligonucleotide
agctctggggctcccgct

SEQ ID NO: 5766 - DNA, 18 bp, Artificial Sequence
  Description of Artificial Sequence: Synthetic oligonucleotide
ccgagtcaagctctgggg

SEQ ID NO: 5767 - DNA, 18 bp, Artificial Sequence
  Description of Artificial Sequence: Synthetic oligonucleotide
tccacccgagtcaagctc

SEQ ID NO: 5768 - DNA, 18 bp, Artificial Sequence
  Description of Artificial Sequence: Synthetic oligonucleotide
tgaggtccacccgagtca

SEQ ID NO: 5769 - DNA, 18 bp, Artificial Sequence
  Description of Artificial Sequence: Synthetic oligonucleotide
gctgctgaggtccacccg

SEQ ID NO: 5770 - DNA, 18 bp, Artificial Sequence
  Description of Artificial Sequence: Synthetic oligonucleotide
actgagctgctgaggtcc

SEQ ID NO: 5771 - DNA, 18 bp, Artificial Sequence
  Description of Artificial Sequence: Synthetic oligonucleotide
ggaggactgagctgctga

SEQ ID NO: 5772 - DNA, 18 bp, Artificial Sequence
  Description of Artificial Sequence: Synthetic oligonucleotide
tcctgggaggactgagct

SEQ ID NO: 5773 - DNA, 18 bp, Artificial Sequence
  Description of Artificial Sequence: Synthetic oligonucleotide
gagtctcctgggaggact

SEQ ID NO: 5774 - DNA, 18 bp, Artificial Sequence
  Description of Artificial Sequence: Synthetic oligonucleotide
ccacagagtctcctggga

SEQ ID NO: 5775 - DNA, 18 bp, Artificial Sequence
  Description of Artificial Sequence: Synthetic oligonucleotide
cagccccacagagtctcc

SEQ ID NO: 5776 - DNA, 18 bp, Artificial Sequence
  Description of Artificial Sequence: Synthetic oligonucleotide
acagccagccccacagag

SEQ ID NO: 5777 - DNA, 18 bp, Artificial Sequence
  Description of Artificial Sequence: Synthetic oligonucleotide
gaatgacagccagcccca

SEQ ID NO: 5778 - DNA, 18 bp, Artificial Sequence
  Description of Artificial Sequence: Synthetic oligonucleotide
gtgcagaatgacagccag

SEQ ID NO: 5779 - DNA, 18 bp, Artificial Sequence
  Description of Artificial Sequence: Synthetic oligonucleotide
tcagtgtgcagaatgaca

SEQ ID NO: 5780 - DNA, 18 bp, Artificial Sequence
  Description of Artificial Sequence: Synthetic oligonucleotide
tgctgtcagtgtgcagaa

SEQ ID NO: 5781 - DNA, 18 bp, Artificial Sequence
  Description of Artificial Sequence: Synthetic oligonucleotide
cttcctgctgtcagtgtg

SEQ ID NO: 5782 - DNA, 18 bp, Artificial Sequence
  Description of Artificial Sequence: Synthetic oligonucleotide
gagtccttcctgctgtca

SEQ ID NO: 5783 - DNA, 18 bp, Artificial Sequence
  Description of Artificial Sequence: Synthetic oligonucleotide
gtggtgagtccttcctgc

SEQ ID NO: 5784 - DNA, 18 bp, Artificial Sequence
  Description of Artificial Sequence: Synthetic oligonucleotide
agctggtggtgagtcctt

SEQ ID NO: 5785 - DNA, 18 bp, Artificial Sequence
  Description of Artificial Sequence: Synthetic oligonucleotide
cttccagctggtggtgag

SEQ ID NO: 5786 - DNA, 18 bp, Artificial Sequence
  Description of Artificial Sequence: Synthetic oligonucleotide
ctggacttccagctggtg

SEQ ID NO: 5787 - DNA, 18 bp, Artificial Sequence
  Description of Artificial Sequence: Synthetic oligonucleotide
tacctggacttccagctg

SEQ ID NO: 5788 - DNA, 18 bp, Artificial Sequence
  Description of Artificial Sequence: Synthetic oligonucleotide
ccaattacctggacttcc

SEQ ID NO: 5789 - DNA, 18 bp, Artificial Sequence
  Description of Artificial Sequence: Synthetic oligonucleotide
gcattccaattacctgga

SEQ ID NO: 5790 - DNA, 18 bp, Artificial Sequence
  Description of Artificial Sequence: Synthetic oligonucleotide
ttagagcattccaattac

SEQ ID NO: 5791 - DNA, 18 bp, Artificial Sequence
  Description of Artificial Sequence: Synthetic oligonucleotide
taatcttagagcattcca

SEQ ID NO: 5792 - DNA, 18 bp, Artificial Sequence
  Description of Artificial Sequence: Synthetic oligonucleotide
tttaataatcttagagca

SEQ ID NO: 5793 - DNA, 18 bp, Artificial Sequence
  Description of Artificial Sequence: Synthetic oligonucleotide
aatgctttaataatctta

SEQ ID NO: 5794 - DNA, 18 bp, Artificial Sequence
  Description of Artificial Sequence: Synthetic oligonucleotide
aacaaaatgctttaataa

SEQ ID NO: 5795 - DNA, 18 bp, Artificial Sequence
  Description of Artificial Sequence: Synthetic oligonucleotide
aaacaaacaaaatgcttt

SEQ ID NO: 5796 - DNA, 18 bp, Artificial Sequence
  Description of Artificial Sequence: Synthetic oligonucleotide
taaacaaacaaacaaaat

SEQ ID NO: 5797 - DNA, 18 bp, Artificial Sequence
  Description of Artificial Sequence: Synthetic oligonucleotide
tgcactaaacaaacaaac

SEQ ID NO: 5798 - DNA, 18 bp, Artificial Sequence
  Description of Artificial Sequence: Synthetic oligonucleotide
cagactgcactaaacaaa

SEQ ID NO: 5799 - DNA, 18 bp, Artificial Sequence
  Description of Artificial Sequence: Synthetic oligonucleotide
ccatgcagactgcactaa

SEQ ID NO: 5800 - DNA, 18 bp, Artificial Sequence
  Description of Artificial Sequence: Synthetic oligonucleotide
atgctccatgcagactgc

SEQ ID NO: 5801 - DNA, 18 bp, Artificial Sequence
  Description of Artificial Sequence: Synthetic oligonucleotide
aggccatgctccatgcag

SEQ ID NO: 5802 - DNA, 18 bp, Artificial Sequence
  Description of Artificial Sequence: Synthetic oligonucleotide
cggtgaggccatgctcca

SEQ ID NO: 5803 - DNA, 18 bp, Artificial Sequence
  Description of Artificial Sequence: Synthetic oligonucleotide
gcacccggtgaggccatg

SEQ ID NO: 5804 - DNA, 18 bp, Artificial Sequence
  Description of Artificial Sequence: Synthetic oligonucleotide
aatatgcacccggtgagg

SEQ ID NO: 5805 - DNA, 18 bp, Artificial Sequence
  Description of Artificial Sequence: Synthetic oligonucleotide
aactaaatatgcacccgg

SEQ ID NO: 5806 - DNA, 18 bp, Artificial Sequence
  Description of Artificial Sequence: Synthetic oligonucleotide
tcataaactaaatatgca

SEQ ID NO: 5807 - DNA, 18 bp, Artificial Sequence
  Description of Artificial Sequence: Synthetic oligonucleotide
acgtatcataaactaaat

SEQ ID NO: 5808 - DNA, 18 bp, Artificial Sequence
  Description of Artificial Sequence: Synthetic oligonucleotide
ggaaggaaaaacagcctc

SEQ ID NO: 5809 - DNA, 18 bp, Artificial Sequence
  Description of Artificial Sequence: Synthetic oligonucleotide
gtcaaggaaggaaaaaca

SEQ ID NO: 5810 - DNA, 18 bp, Artificial Sequence
  Description of Artificial Sequence: Synthetic oligonucleotide
gatgggtcaaggaaggaa

SEQ ID NO: 5811 - DNA, 18 bp, Artificial Sequence
  Description of Artificial Sequence: Synthetic oligonucleotide
agccagatgggtcaagga

SEQ ID NO: 5812 - DNA, 18 bp, Artificial Sequence
  Description of Artificial Sequence: Synthetic oligonucleotide
aggacagccagatgggtc

SEQ ID NO: 5813 - DNA, 18 bp, Artificial Sequence
  Description of Artificial Sequence: Synthetic oligonucleotide
aggcaaggacagccagat

SEQ ID NO: 5814 - DNA, 18 bp, Artificial Sequence
  Description of Artificial Sequence: Synthetic oligonucleotide
caagaaggcaaggacagc

SEQ ID NO: 5815 - DNA, 18 bp, Artificial Sequence
  Description of Artificial Sequence: Synthetic oligonucleotide
aagaccaagaaggcaagg

SEQ ID NO: 5816 - DNA, 18 bp, Artificial Sequence
  Description of Artificial Sequence: Synthetic oligonucleotide
gtcccaagaccaagaagg

SEQ ID NO: 5817 - DNA, 18 bp, Artificial Sequence
  Description of Artificial Sequence: Synthetic oligonucleotide
ccagggtcccaagaccaa

SEQ ID NO: 5818 - DNA, 18 bp, Artificial Sequence
  Description of Artificial Sequence: Synthetic oligonucleotide
gtaggccagggtcccaag

SEQ ID NO: 5819 - DNA, 18 bp, Artificial Sequence
  Description of Artificial Sequence: Synthetic oligonucleotide
acagggtaggccagggtc

SEQ ID NO: 5820 - DNA, 18 bp, Artificial Sequence
  Description of Artificial Sequence: Synthetic oligonucleotide
gtcaaacagggtaggcca

SEQ ID NO: 5821 - DNA, 18 bp, Artificial Sequence
  Description of Artificial Sequence: Synthetic oligonucleotide
taggggtcaaacagggta

SEQ ID NO: 5822 - DNA, 18 bp, Artificial Sequence
  Description of Artificial Sequence: Synthetic oligonucleotide
gagactaggggtcaaaca

SEQ ID NO: 5823 - DNA, 18 bp, Artificial Sequence
  Description of Artificial Sequence: Synthetic oligonucleotide
gatgagagactaggggtc

SEQ ID NO: 5824 - DNA, 18 bp, Artificial Sequence
  Description of Artificial Sequence: Synthetic oligonucleotide
aagcagatgagagactag

SEQ ID NO: 5825 - DNA, 18 bp, Artificial Sequence
  Description of Artificial Sequence: Synthetic oligonucleotide
ctagaaagcagatgagag

SEQ ID NO: 5826 - DNA, 18 bp, Artificial Sequence
  Description of Artificial Sequence: Synthetic oligonucleotide
cagtcctagaaagcagat

SEQ ID NO: 5827 - DNA, 18 bp, Artificial Sequence
  Description of Artificial Sequence: Synthetic oligonucleotide
gtggtcagtcctagaaag

SEQ ID NO: 5828 - DNA, 18 bp, Artificial Sequence
  Description of Artificial Sequence: Synthetic oligonucleotide
gctcagtggtcagtccta

SEQ ID NO: 5829 - DNA, 18 bp, Artificial Sequence
  Description of Artificial Sequence: Synthetic oligonucleotide
tctgctcagtggtcagtc

SEQ ID NO: 5830 - DNA, 18 bp, Artificial Sequence
  Description of Artificial Sequence: Synthetic oligonucleotide
cagcatctgctcagtggt

SEQ ID NO: 5831 - DNA, 18 bp, Artificial Sequence
  Description of Artificial Sequence: Synthetic oligonucleotide
tttctcagcatctgctca

SEQ ID NO: 5832 - DNA, 18 bp, Artificial Sequence
  Description of Artificial Sequence: Synthetic oligonucleotide
ggtcttttctcagcatct

SEQ ID NO: 5833 - DNA, 18 bp, Artificial Sequence
  Description of Artificial Sequence: Synthetic oligonucleotide
cttctggtcttttctcag

SEQ ID NO: 5834 - DNA, 18 bp, Artificial Sequence
  Description of Artificial Sequence: Synthetic oligonucleotide
atagtcttctggtctttt

SEQ ID NO: 5835 - DNA, 18 bp, Artificial Sequence
  Description of Artificial Sequence: Synthetic oligonucleotide
tatagatagtcttctggt

SEQ ID NO: 5836 - DNA, 18 bp, Artificial Sequence
  Description of Artificial Sequence: Synthetic oligonucleotide
ttgtctatagatagtctt

SEQ ID NO: 5837 - DNA, 18 bp, Artificial Sequence
  Description of Artificial Sequence: Synthetic oligonucleotide
acgccttgtctatagata

SEQ ID NO: 5838 - DNA, 18 bp, Artificial Sequence
  Description of Artificial Sequence: Synthetic oligonucleotide
caccttgacgccttgtct

SEQ ID NO: 5839 - DNA, 18 bp, Artificial Sequence
  Description of Artificial Sequence: Synthetic oligonucleotide
atggccaccttgacgcct

SEQ ID NO: 5840 - DNA, 18 bp, Artificial Sequence
  Description of Artificial Sequence: Synthetic oligonucleotide
cactaatggccaccttga

SEQ ID NO: 5841 - DNA, 18 bp, Artificial Sequence
  Description of Artificial Sequence: Synthetic oligonucleotide
tattgcactaatggccac

SEQ ID NO: 5842 - DNA, 18 bp, Artificial Sequence
  Description of Artificial Sequence: Synthetic oligonucleotide
atatatattgcactaatg

SEQ ID NO: 5843 - DNA, 18 bp, Artificial Sequence
  Description of Artificial Sequence: Synthetic oligonucleotide
aatccatatatattgcac

SEQ ID NO: 5844 - DNA, 18 bp, Artificial Sequence
  Description of Artificial Sequence: Synthetic oligonucleotide
ctccaaatccatatatat

SEQ ID NO: 5845 - DNA, 18 bp, Artificial Sequence
  Description of Artificial Sequence: Synthetic oligonucleotide
tacctccaaatccatata

SEQ ID NO: 5846 - DNA, 18 bp, Artificial Sequence
  Description of Artificial Sequence: Synthetic oligonucleotide
gctcttacctccaaatcc

SEQ ID NO: 5847 - DNA, 18 bp, Artificial Sequence
  Description of Artificial Sequence: Synthetic oligonucleotide
aacttgctcttacctcca

SEQ ID NO: 5848 - DNA, 18 bp, Artificial Sequence
  Description of Artificial Sequence: Synthetic oligonucleotide
gccacaacttgctcttac

SEQ ID NO: 5849 - DNA, 18 bp, Artificial Sequence
  Description of Artificial Sequence: Synthetic oligonucleotide
ccacagccacaacttgct

SEQ ID NO: 5850 - DNA, 18 bp, Artificial Sequence
  Description of Artificial Sequence: Synthetic oligonucleotide
cccacccacagccacaac

SEQ ID NO: 5851 - DNA, 18 bp, Artificial Sequence
  Description of Artificial Sequence: Synthetic oligonucleotide
ctctccccacccacagcc

SEQ ID NO: 5852 - DNA, 18 bp, Artificial Sequence
  Description of Artificial Sequence: Synthetic oligonucleotide
gctttctctccccaccca

SEQ ID NO: 5853 - DNA, 18 bp, Artificial Sequence
  Description of Artificial Sequence: Synthetic oligonucleotide
taaaggctttctctcccc

SEQ ID NO: 5854 - DNA, 18 bp, Artificial Sequence
  Description of Artificial Sequence: Synthetic oligonucleotide
atagctaaaggctttctc

SEQ ID NO: 5855 - DNA, 18 bp, Artificial Sequence
  Description of Artificial Sequence: Synthetic oligonucleotide
catgcatagctaaaggct

SEQ ID NO: 5856 - DNA, 18 bp, Artificial Sequence
  Description of Artificial Sequence: Synthetic oligonucleotide
cataacatgcatagctaa

SEQ ID NO: 5857 - DNA, 18 bp, Artificial Sequence
  Description of Artificial Sequence: Synthetic oligonucleotide
acatgcataacatgcata

SEQ ID NO: 5858 - DNA, 18 bp, Artificial Sequence
  Description of Artificial Sequence: Synthetic oligonucleotide
aggccacatgcataacat

SEQ ID NO: 5859 - DNA, 18 bp, Artificial Sequence
  Description of Artificial Sequence: Synthetic oligonucleotide
gtgcaaggccacatgcat

SEQ ID NO: 5860 - DNA, 18 bp, Artificial Sequence
  Description of Artificial Sequence: Synthetic oligonucleotide
atgaggtgcaaggccaca

SEQ ID NO: 5861 - DNA, 18 bp, Artificial Sequence
  Description of Artificial Sequence: Synthetic oligonucleotide
caggaatgaggtgcaagg

SEQ ID NO: 5862 - DNA, 18 bp, Artificial Sequence
  Description of Artificial Sequence: Synthetic oligonucleotide
tgagccaggaatgaggtg

SEQ ID NO: 5863 - DNA, 18 bp, Artificial Sequence
  Description of Artificial Sequence: Synthetic oligonucleotide
ggaggtgagccaggaatg

SEQ ID NO: 5864 - DNA, 18 bp, Artificial Sequence
  Description of Artificial Sequence: Synthetic oligonucleotide
attttggaggtgagccag

SEQ ID NO: 5865 - DNA, 18 bp, Artificial Sequence
  Description of Artificial Sequence: Synthetic oligonucleotide
gatacattttggaggtga

SEQ ID NO: 5866 - DNA, 18 bp, Artificial Sequence
  Description of Artificial Sequence: Synthetic oligonucleotide
ccctgcttcttggagaaa

SEQ ID NO: 5867 - DNA, 18 bp, Artificial Sequence
  Description of Artificial Sequence: Synthetic oligonucleotide
atttgccctgcttcttgg

SEQ ID NO: 5868 - DNA, 18 bp, Artificial Sequence
  Description of Artificial Sequence: Synthetic oligonucleotide
ttttaatttgccctgctt

SEQ ID NO: 5869 - DNA, 18 bp, Artificial Sequence
  Description of Artificial Sequence: Synthetic oligonucleotide
tatgtttttaatttgccc

SEQ ID NO: 5870 - DNA, 18 bp, Artificial Sequence
  Description of Artificial Sequence: Synthetic oligonucleotide
aaaattatgtttttaatt

SEQ ID NO: 5871 - DNA, 18 bp, Artificial Sequence
  Description of Artificial Sequence: Synthetic oligonucleotide
taaaaaaaattatgtttt

SEQ ID NO: 5872 - DNA, 18 bp, Artificial Sequence
  Description of Artificial Sequence: Synthetic oligonucleotide
agttataaaaaaaattat

SEQ ID NO: 5873 - DNA, 18 bp, Artificial Sequence
  Description of Artificial Sequence: Synthetic oligonucleotide
tgtgtagttataaaaaaa

SEQ ID NO: 5874 - DNA, 18 bp, Artificial Sequence
  Description of Artificial Sequence: Synthetic oligonucleotide
gtttctgtgtagttataa

SEQ ID NO: 5875 - DNA, 18 bp, Artificial Sequence
  Description of Artificial Sequence: Synthetic oligonucleotide
tacaggtttctgtgtagt

SEQ ID NO: 5876 - DNA, 18 bp, Artificial Sequence
  Description of Artificial Sequence: Synthetic oligonucleotide
aaacatacaggtttctgt

SEQ ID NO: 5877 - DNA, 18 bp, Artificial Sequence
  Description of Artificial Sequence: Synthetic oligonucleotide
ttaaaaaacatacaggtt

SEQ ID NO: 5878 - DNA, 18 bp, Artificial Sequence
  Description of Artificial Sequence: Synthetic oligonucleotide
attttttaaaaaacatac

SEQ ID NO: 5879 - DNA, 18 bp, Artificial Sequence
  Description of Artificial Sequence: Synthetic oligonucleotide
agataattttttaaaaaa

SEQ ID NO: 5880 - DNA, 18 bp, Artificial Sequence
  Description of Artificial Sequence: Synthetic oligonucleotide
aacaaagataatttttta

SEQ ID NO: 5881 - DNA, 18 bp, Artificial Sequence
  Description of Artificial Sequence: Synthetic oligonucleotide
aaataaacaaagataatt

SEQ ID NO: 5882 - DNA, 18 bp, Artificial Sequence
  Description of Artificial Sequence: Synthetic oligonucleotide
aaacaaaataaacaaaga

SEQ ID NO: 5883 - DNA, 18 bp, Artificial Sequence
  Description of Artificial Sequence: Synthetic oligonucleotide
ctaataaacaaaataaac

SEQ ID NO: 5884 - DNA, 18 bp, Artificial Sequence
  Description of Artificial Sequence: Synthetic oligonucleotide
ttgtcctaataaacaaaa

SEQ ID NO: 5885 - DNA, 18 bp, Artificial Sequence
  Description of Artificial Sequence: Synthetic oligonucleotide
ataatttgtcctaataaa

SEQ ID NO: 5886 - DNA, 18 bp, Artificial Sequence
  Description of Artificial Sequence: Synthetic oligonucleotide
atccaataatttgtccta

SEQ ID NO: 5887 - DNA, 18 bp, Artificial Sequence
  Description of Artificial Sequence: Synthetic oligonucleotide
ggaatccaataatttgtc

SEQ ID NO: 5888 - DNA, 18 bp, Artificial Sequence
  Description of Artificial Sequence: Synthetic oligonucleotide
gtgctggaatccaataat

SEQ ID NO: 5889 - DNA, 18 bp, Artificial Sequence
  Description of Artificial Sequence: Synthetic oligonucleotide
tcactgtgctggaatcca

SEQ ID NO: 5890 - DNA, 18 bp, Artificial Sequence
  Description of Artificial Sequence: Synthetic oligonucleotide
gtgagtcactgtgctgga

SEQ ID NO: 5891 - DNA, 18 bp, Artificial Sequence
  Description of Artificial Sequence: Synthetic oligonucleotide
aataagtgagtcactgtg

SEQ ID NO: 5892 - DNA, 18 bp, Artificial Sequence
  Description of Artificial Sequence: Synthetic oligonucleotide
tcttgaataagtgagtca

SEQ ID NO: 5893 - DNA, 18 bp, Artificial Sequence
  Description of Artificial Sequence: Synthetic oligonucleotide
agttatcttgaataagtg

SEQ ID NO: 5894 - DNA, 18 bp, Artificial Sequence
  Description of Artificial Sequence: Synthetic oligonucleotide
ttttcagttatcttgaat

SEQ ID NO: 5895 - DNA, 18 bp, Artificial Sequence
  Description of Artificial Sequence: Synthetic oligonucleotide
caaccaatgttttcagtt

SEQ ID NO: 5896 - DNA, 18 bp, Artificial Sequence
  Description of Artificial Sequence: Synthetic oligonucleotide
tcacacaaccaatgtttt

SEQ ID NO: 5897 - DNA, 18 bp, Artificial Sequence
  Description of Artificial Sequence: Synthetic oligonucleotide
ggtcatcacacaaccaat

SEQ ID NO: 5898 - DNA, 18 bp, Artificial Sequence
  Description of Artificial Sequence: Synthetic oligonucleotide
attccggtcatcacacaa

SEQ ID NO: 5899 - DNA, 18 bp, Artificial Sequence
  Description of Artificial Sequence: Synthetic oligonucleotide
ctgtcattccggtcatca

SEQ ID NO: 5900 - DNA, 18 bp, Artificial Sequence
  Description of Artificial Sequence: Synthetic oligonucleotide
tacctgtcattccggtca

SEQ ID NO: 5901 - DNA, 18 bp, Artificial Sequence
  Description of Artificial Sequence: Synthetic oligonucleotide
ttaattacctgtcattcc

SEQ ID NO: 5902 - DNA, 18 bp, Artificial Sequence
  Description of Artificial Sequence: Synthetic oligonucleotide
acagattaattacctgtc

SEQ ID NO: 5903 - DNA, 18 bp, Artificial Sequence
  Description of Artificial Sequence: Synthetic oligonucleotide
tatctacagattaattac

SEQ ID NO: 5904 - DNA, 18 bp, Artificial Sequence
  Description of Artificial Sequence: Synthetic oligonucleotide
ttgtatatctacagatta

SEQ ID NO: 5905 - DNA, 18 bp, Artificial Sequence
  Description of Artificial Sequence: Synthetic oligonucleotide
atgtcttgtatatctaca

SEQ ID NO: 5906 - DNA, 18 bp, Artificial Sequence
  Description of Artificial Sequence: Synthetic oligonucleotide
tacagatgtcttgtatat

SEQ ID NO: 5907 - DNA, 18 bp, Artificial Sequence
  Description of Artificial Sequence: Synthetic oligonucleotide
atatctacagatgtcttg

SEQ ID NO: 5908 - DNA, 18 bp, Artificial Sequence
  Description of Artificial Sequence: Synthetic oligonucleotide
cttgtatatctacagatg

SEQ ID NO: 5909 - DNA, 18 bp, Artificial Sequence
  Description of Artificial Sequence: Synthetic oligonucleotide
aaaggcttgtatatctac

SEQ ID NO: 5910 - DNA, 18 bp, Artificial Sequence
  Description of Artificial Sequence: Synthetic oligonucleotide
taacaaaaggcttgtata

SEQ ID NO: 5911 - DNA, 18 bp, Artificial Sequence
  Description of Artificial Sequence: Synthetic oligonucleotide
gaaaataacaaaaggctt

SEQ ID NO: 5912 - DNA, 18 bp, Artificial Sequence
  Description of Artificial Sequence: Synthetic oligonucleotide
ttgaagaaaataacaaaa

SEQ ID NO: 5913 - DNA, 18 bp, Artificial Sequence
  Description of Artificial Sequence: Synthetic oligonucleotide
ataatttgaagaaaataa

SEQ ID NO: 5914 - DNA, 18 bp, Artificial Sequence
  Description of Artificial Sequence: Synthetic oligonucleotide
tcaaaataatttgaagaa

SEQ ID NO: 5915 - DNA, 18 bp, Artificial Sequence
  Description of Artificial Sequence: Synthetic oligonucleotide
aaaactcaaaataatttg

SEQ ID NO: 5916 - DNA, 18 bp, Artificial Sequence
  Description of Artificial Sequence: Synthetic oligonucleotide
aatacaaaactcaaaata

SEQ ID NO: 5917 - DNA, 18 bp, Artificial Sequence
  Description of Artificial Sequence: Synthetic oligonucleotide
aaattaatacaaaactca

SEQ ID NO: 5918 - DNA, 18 bp, Artificial Sequence
  Description of Artificial Sequence: Synthetic oligonucleotide
gtttaaaattaatacaaa

SEQ ID NO: 5919 - DNA, 18 bp, Artificial Sequence
  Description of Artificial Sequence: Synthetic oligonucleotide
aataagtttaaaattaat

SEQ ID NO: 5920 - DNA, 18 bp, Artificial Sequence
  Description of Artificial Sequence: Synthetic oligonucleotide
caggcaataagtttaaaa

SEQ ID NO: 5921 - DNA, 18 bp, Artificial Sequence
  Description of Artificial Sequence: Synthetic oligonucleotide
ccttgctctggatctatc

SEQ ID NO: 5922 - DNA, 18 bp, Artificial Sequence
  Description of Artificial Sequence: Synthetic oligonucleotide
ttccaccttgctctggat

SEQ ID NO: 5923 - DNA, 18 bp, Artificial Sequence
  Description of Artificial Sequence: Synthetic oligonucleotide
aggtgttccaccttgctc

SEQ ID NO: 5924 - DNA, 18 bp, Artificial Sequence
  Description of Artificial Sequence: Synthetic oligonucleotide
ccctgaggtgttccacct

SEQ ID NO: 5925 - DNA, 18 bp, Artificial Sequence
  Description of Artificial Sequence: Synthetic oligonucleotide
gtgctccctgaggtgttc

SEQ ID NO: 5926 - DNA, 18 bp, Artificial Sequence
  Description of Artificial Sequence: Synthetic oligonucleotide
agtgggtgctccctgagg

SEQ ID NO: 5927 - DNA, 18 bp, Artificial Sequence
  Description of Artificial Sequence: Synthetic oligonucleotide
ttcccagtgggtgctccc

SEQ ID NO: 5928 - DNA, 18 bp, Artificial Sequence
  Description of Artificial Sequence: Synthetic oligonucleotide
tgtctttcccagtgggtg

SEQ ID NO: 5929 - DNA, 18 bp, Artificial Sequence
  Description of Artificial Sequence: Synthetic oligonucleotide
agttctgtctttcccagt

SEQ ID NO: 5930 - DNA, 18 bp, Artificial Sequence
  Description of Artificial Sequence: Synthetic oligonucleotide
gaaggagttctgtctttc

SEQ ID NO: 5931 - DNA, 18 bp, Artificial Sequence
  Description of Artificial Sequence: Synthetic oligonucleotide
ctgaggaaggagttctgt

SEQ ID NO: 5932 - DNA, 18 bp, Artificial Sequence
  Description of Artificial Sequence: Synthetic oligonucleotide
tacccctgaggaaggagt

SEQ ID NO: 5933 - DNA, 18 bp, Artificial Sequence
  Description of Artificial Sequence: Synthetic oligonucleotide
cttgctacccctgaggaa

SEQ ID NO: 5934 - DNA, 18 bp, Artificial Sequence
  Description of Artificial Sequence: Synthetic oligonucleotide
ggtcacttgctacccctg

SEQ ID NO: 5935 - DNA, 18 bp, Artificial Sequence
  Description of Artificial Sequence: Synthetic oligonucleotide
cctggggtcacttgctac

SEQ ID NO: 5936 - DNA, 18 bp, Artificial Sequence
  Description of Artificial Sequence: Synthetic oligonucleotide
atccgcctggggtcactt

SEQ ID NO: 5937 - DNA, 18 bp, Artificial Sequence
  Description of Artificial Sequence: Synthetic oligonucleotide
accacatccgcctggggt

SEQ ID NO: 5938 - DNA, 18 bp, Artificial Sequence
  Description of Artificial Sequence: Synthetic oligonucleotide
ctgaaaccacatccgcct

SEQ ID NO: 5939 - DNA, 18 bp, Artificial Sequence
  Description of Artificial Sequence: Synthetic oligonucleotide
gagctctgaaaccacatc

SEQ ID NO: 5940 - DNA, 18 bp, Artificial Sequence
  Description of Artificial Sequence: Synthetic oligonucleotide
tccttgagctctgaaacc

SEQ ID NO: 5941 - DNA, 18 bp, Artificial Sequence
  Description of Artificial Sequence: Synthetic oligonucleotide
ataattccttgagctctg

SEQ ID NO: 5942 - DNA, 18 bp, Artificial Sequence
  Description of Artificial Sequence: Synthetic oligonucleotide
tagataattccttgagct

SEQ ID NO: 5943 - DNA, 18 bp, Artificial Sequence
  Description of Artificial Sequence: Synthetic oligonucleotide
ggcactagataattcctt

SEQ ID NO: 5944 - DNA, 18 bp, Artificial Sequence
  Description of Artificial Sequence: Synthetic oligonucleotide
gtcagggcactagataat

SEQ ID NO: 5945 - DNA, 18 bp, Artificial Sequence
  Description of Artificial Sequence: Synthetic oligonucleotide
gtgtggtcagggcactag

SEQ ID NO: 5946 - DNA, 18 bp, Artificial Sequence
  Description of Artificial Sequence: Synthetic oligonucleotide
ctctggtgtggtcagggc

SEQ ID NO: 5947 - DNA, 18 bp, Artificial Sequence
  Description of Artificial Sequence: Synthetic oligonucleotide
tgcatctctggtgtggtc

SEQ ID NO: 5948 - DNA, 18 bp, Artificial Sequence
  Description of Artificial Sequence: Synthetic oligonucleotide
ctttctgcatctctggtg

SEQ ID NO: 5949 - DNA, 18 bp, Artificial Sequence
  Description of Artificial Sequence: Synthetic oligonucleotide
gatttctttctgcatctc

SEQ ID NO: 5950 - DNA, 18 bp, Artificial Sequence
  Description of Artificial Sequence: Synthetic oligonucleotide
tcctggatttctttctgc

SEQ ID NO: 5951 - DNA, 18 bp, Artificial Sequence
  Description of Artificial Sequence: Synthetic oligonucleotide
ttaactcctggatttctt

SEQ ID NO: 5952 - DNA, 18 bp, Artificial Sequence
  Description of Artificial Sequence: Synthetic oligonucleotide
cttctttaactcctggat

SEQ ID NO: 5953 - DNA, 18 bp, Artificial Sequence
  Description of Artificial Sequence: Synthetic oligonucleotide
cattccttctttaactcc

SEQ ID NO: 5954 - DNA, 18 bp, Artificial Sequence
  Description of Artificial Sequence: Synthetic oligonucleotide
cagcgcattccttcttta

SEQ ID NO: 5955 - DNA, 18 bp, Artificial Sequence
  Description of Artificial Sequence: Synthetic oligonucleotide
gtagccagcgcattcctt

SEQ ID NO: 5956 - DNA, 18 bp, Artificial Sequence
  Description of Artificial Sequence: Synthetic oligonucleotide
ctctctctgtagccagcg

SEQ ID NO: 5957 - DNA, 18 bp, Artificial Sequence
  Description of Artificial Sequence: Synthetic oligonucleotide
tcaatctctctctgtagc

SEQ ID NO: 5958 - DNA, 18 bp, Artificial Sequence
  Description of Artificial Sequence: Synthetic oligonucleotide
gttcttcaatctctctct

SEQ ID NO: 5959 - DNA, 18 bp, Artificial Sequence
  Description of Artificial Sequence: Synthetic oligonucleotide
ttaatgttcttcaatctc

SEQ ID NO: 5960 - DNA, 18 bp, Artificial Sequence
  Description of Artificial Sequence: Synthetic oligonucleotide
ctgctttaatgttcttca

SEQ ID NO: 5961 - DNA, 18 bp, Artificial Sequence
  Description of Artificial Sequence: Synthetic oligonucleotide
ggtagctgctttaatgtt

SEQ ID NO: 5962 - DNA, 18 bp, Artificial Sequence
  Description of Artificial Sequence: Synthetic oligonucleotide
tgattggtagctgcttta

SEQ ID NO: 5963 - DNA, 18 bp, Artificial Sequence
  Description of Artificial Sequence: Synthetic oligonucleotide
tcacatgattggtagctg

SEQ ID NO: 5964 - DNA, 18 bp, Artificial Sequence
  Description of Artificial Sequence: Synthetic oligonucleotide
tggagtcacatgattggt

SEQ ID NO: 5965 - DNA, 18 bp, Artificial Sequence
  Description of Artificial Sequence: Synthetic oligonucleotide
tcttctggagtcacatga

SEQ ID NO: 5966 - DNA, 18 bp, Artificial Sequence
  Description of Artificial Sequence: Synthetic oligonucleotide
ctttctcttctggagtca

SEQ ID NO: 5967 - DNA, 18 bp, Artificial Sequence
  Description of Artificial Sequence: Synthetic oligonucleotide
ctgctctttctcttctgg

SEQ ID NO: 5968 - DNA, 18 bp, Artificial Sequence
  Description of Artificial Sequence: Synthetic oligonucleotide
cacctgctctttctcttc

SEQ ID NO: 5969 - DNA, 18 bp, Artificial Sequence
  Description of Artificial Sequence: Synthetic oligonucleotide
cagctcacctgctctttc

SEQ ID NO: 5970 - DNA, 18 bp, Artificial Sequence
  Description of Artificial Sequence: Synthetic oligonucleotide
ccttccagctcacctgct

SEQ ID NO: 5971 - DNA, 18 bp, Artificial Sequence
  Description of Artificial Sequence: Synthetic oligonucleotide
tacagccttccagctcac

SEQ ID NO: 5972 - DNA, 18 bp, Artificial Sequence
  Description of Artificial Sequence: Synthetic oligonucleotide
ggtcctacagccttccag

SEQ ID NO: 5973 - DNA, 18 bp, Artificial Sequence
  Description of Artificial Sequence: Synthetic oligonucleotide
acagcggtcctacagcct

SEQ ID NO: 5974 - DNA, 18 bp, Artificial Sequence
  Description of Artificial Sequence: Synthetic oligonucleotide
cctgcacagcggtcctac

SEQ ID NO: 5975 - DNA, 18 bp, Artificial Sequence
  Description of Artificial Sequence: Synthetic oligonucleotide
ctggacctgcacagcggt

SEQ ID NO: 5976 - DNA, 18 bp, Artificial Sequence
  Description of Artificial Sequence: Synthetic oligonucleotide
tcactctggacctgcaca

SEQ ID NO: 5977 - DNA, 18 bp, Artificial Sequence
  Description of Artificial Sequence: Synthetic oligonucleotide
gatgttcactctggacct

SEQ ID NO: 5978 - DNA, 18 bp, Artificial Sequence
  Description of Artificial Sequence: Synthetic oligonucleotide
gccctgatgttcactctg

SEQ ID NO: 5979 - DNA, 18 bp, Artificial Sequence
  Description of Artificial Sequence: Synthetic oligonucleotide
gctcagccctgatgttca

SEQ ID NO: 5980 - DNA, 18 bp, Artificial Sequence
  Description of Artificial Sequence: Synthetic oligonucleotide
ctggggctcagccctgat

SEQ ID NO: 5981 - DNA, 18 bp, Artificial Sequence
  Description of Artificial Sequence: Synthetic oligonucleotide
gccctctggggctcagcc

SEQ ID NO: 5982 - DNA, 18 bp, Artificial Sequence
  Description of Artificial Sequence: Synthetic oligonucleotide
cagcagccctctggggct

SEQ ID NO: 5983 - DNA, 18 bp, Artificial Sequence
  Description of Artificial Sequence: Synthetic oligonucleotide
aaccacagcagccctctg

SEQ ID NO: 5984 - DNA, 18 bp, Artificial Sequence
  Description of Artificial Sequence: Synthetic oligonucleotide
ctcagaaccacagcagcc

SEQ ID NO: 5985 - DNA, 18 bp, Artificial Sequence
  Description of Artificial Sequence: Synthetic oligonucleotide
aactcctcagaaccacag

SEQ ID NO: 5986 - DNA, 18 bp, Artificial Sequence
  Description of Artificial Sequence: Synthetic oligonucleotide
cctctaactcctcagaac

SEQ ID NO: 5987 - DNA, 18 bp, Artificial Sequence
  Description of Artificial Sequence: Synthetic oligonucleotide
aagttcctctaactcctc

SEQ ID NO: 5988 - DNA, 18 bp, Artificial Sequence
  Description of Artificial Sequence: Synthetic oligonucleotide
aaagcaagttcctctaac

SEQ ID NO: 5989 - DNA, 18 bp, Artificial Sequence
  Description of Artificial Sequence: Synthetic oligonucleotide
tgagttggtggcattagt

SEQ ID NO: 5990 - DNA, 18 bp, Artificial Sequence
  Description of Artificial Sequence: Synthetic oligonucleotide
aaaggtgagttggtggca

SEQ ID NO: 5991 - DNA, 18 bp, Artificial Sequence
  Description of Artificial Sequence: Synthetic oligonucleotide
aaagcaaaggtgagttgg

SEQ ID NO: 5992 - DNA, 18 bp, Artificial Sequence
  Description of Artificial Sequence: Synthetic oligonucleotide
acagaaaagcaaaggtga

SEQ ID NO: 5993 - DNA, 18 bp, Artificial Sequence
  Description of Artificial Sequence: Synthetic oligonucleotide
accctacagaaaagcaaa

SEQ ID NO: 5994 - DNA, 18 bp, Artificial Sequence
  Description of Artificial Sequence: Synthetic oligonucleotide
tgcacaccctacagaaaa

SEQ ID NO: 5995 - DNA, 18 bp, Artificial Sequence
  Description of Artificial Sequence: Synthetic oligonucleotide
acaggtgcacaccctaca

SEQ ID NO: 5996 - DNA, 18 bp, Artificial Sequence
  Description of Artificial Sequence: Synthetic oligonucleotide
tacatacaggtgcacacc

SEQ ID NO: 5997 - DNA, 18 bp, Artificial Sequence
  Description of Artificial Sequence: Synthetic oligonucleotide
atgtgtacatacaggtgc

SEQ ID NO: 5998 - DNA, 18 bp, Artificial Sequence
  Description of Artificial Sequence: Synthetic oligonucleotide
gctgaatgtgtacataca

SEQ ID NO: 5999 - DNA, 18 bp, Artificial Sequence
  Description of Artificial Sequence: Synthetic oligonucleotide
gaaaagctgaatgtgtac

SEQ ID NO: 6000 - DNA, 18 bp, Artificial Sequence
  Description of Artificial Sequence: Synthetic oligonucleotide
tcccggaaaagctgaatg

SEQ ID NO: 6001 - DNA, 18 bp, Artificial Sequence
  Description of Artificial Sequence: Synthetic oligonucleotide
gttaatcccggaaaagct

SEQ ID NO: 6002 - DNA, 18 bp, Artificial Sequence
  Description of Artificial Sequence: Synthetic oligonucleotide
cagaggttaatcccggaa

SEQ ID NO: 6003 - DNA, 18 bp, Artificial Sequence
  Description of Artificial Sequence: Synthetic oligonucleotide
gaactcagaggttaatcc

SEQ ID NO: 6004 - DNA, 18 bp, Artificial Sequence
  Description of Artificial Sequence: Synthetic oligonucleotide
aaccagaactcagaggtt

SEQ ID NO: 6005 - DNA, 18 bp, Artificial Sequence
  Description of Artificial Sequence: Synthetic oligonucleotide
agacaaaccagaactcag

SEQ ID NO: 6006 - DNA, 18 bp, Artificial Sequence
  Description of Artificial Sequence: Synthetic oligonucleotide
ctgaaagacaaaccagaa

SEQ ID NO: 6007 - DNA, 18 bp, Artificial Sequence
  Description of Artificial Sequence: Synthetic oligonucleotide
gtcaactgaaagacaaac

SEQ ID NO: 6008 - DNA, 18 bp, Artificial Sequence
  Description of Artificial Sequence: Synthetic oligonucleotide
ctatggtcaactgaaaga

SEQ ID NO: 6009 - DNA, 18 bp, Artificial Sequence
  Description of Artificial Sequence: Synthetic oligonucleotide
tccgactatggtcaactg

SEQ ID NO: 6010 - DNA, 18 bp, Artificial Sequence
  Description of Artificial Sequence: Synthetic oligonucleotide
taatccgactatggtcaa

SEQ ID NO: 6011 - DNA, 18 bp, Artificial Sequence
  Description of Artificial Sequence: Synthetic oligonucleotide
tagtttaatccgactatg

SEQ ID NO: 6012 - DNA, 18 bp, Artificial Sequence
  Description of Artificial Sequence: Synthetic oligonucleotide
tgatgtagtttaatccga

SEQ ID NO: 6013 - DNA, 18 bp, Artificial Sequence
  Description of Artificial Sequence: Synthetic oligonucleotide
cttcttgatgtagtttaa

SEQ ID NO: 6014 - DNA, 18 bp, Artificial Sequence
  Description of Artificial Sequence: Synthetic oligonucleotide
attatcttcttgatgtag

SEQ ID NO: 6015 - DNA, 18 bp, Artificial Sequence
  Description of Artificial Sequence: Synthetic oligonucleotide
tagtcattatcttcttga

SEQ ID NO: 6016 - DNA, 18 bp, Artificial Sequence
  Description of Artificial Sequence: Synthetic oligonucleotide
tgatatagtcattatctt

SEQ ID NO: 6017 - DNA, 18 bp, Artificial Sequence
  Description of Artificial Sequence: Synthetic oligonucleotide
agcgttgatatagtcatt

SEQ ID NO: 6018 - DNA, 18 bp, Artificial Sequence
  Description of Artificial Sequence: Synthetic oligonucleotide
aaactagcgttgatatag

SEQ ID NO: 6019 - DNA, 18 bp, Artificial Sequence
  Description of Artificial Sequence: Synthetic oligonucleotide
ttatcaaactagcgttga

SEQ ID NO: 6020 - DNA, 18 bp, Artificial Sequence
  Description of Artificial Sequence: Synthetic oligonucleotide
ttccatttttatcaaact

SEQ ID NO: 6021 - DNA, 18 bp, Artificial Sequence
  Description of Artificial Sequence: Synthetic oligonucleotide
gcttcttccatttttatc

SEQ ID NO: 6022 - DNA, 18 bp, Artificial Sequence
  Description of Artificial Sequence: Synthetic oligonucleotide
tttgggcttcttccattt

SEQ ID NO: 6023 - DNA, 18 bp, Artificial Sequence
  Description of Artificial Sequence: Synthetic oligonucleotide
actcctttgggcttcttc

SEQ ID NO: 6024 - DNA, 18 bp, Artificial Sequence
  Description of Artificial Sequence: Synthetic oligonucleotide
atgtaactcctttgggct

SEQ ID NO: 6025 - DNA, 18 bp, Artificial Sequence
  Description of Artificial Sequence: Synthetic oligonucleotide
taagaatgtaactccttt

SEQ ID NO: 6026 - DNA, 18 bp, Artificial Sequence
  Description of Artificial Sequence: Synthetic oligonucleotide
ctgggtaagaatgtaact

SEQ ID NO: 6027 - DNA, 18 bp, Artificial Sequence
  Description of Artificial Sequence: Synthetic oligonucleotide
tacctgggtaagaatgta

SEQ ID NO: 6028 - DNA, 18 bp, Artificial Sequence
  Description of Artificial Sequence: Synthetic oligonucleotide
ctgcttacctgggtaaga

SEQ ID NO: 6029 - DNA, 18 bp, Artificial Sequence
  Description of Artificial Sequence: Synthetic oligonucleotide
acaatctgcttacctggg

SEQ ID NO: 6030 - DNA, 18 bp, Artificial Sequence
  Description of Artificial Sequence: Synthetic oligonucleotide
ttcagacaatctgcttac

SEQ ID NO: 6031 - DNA, 18 bp, Artificial Sequence
  Description of Artificial Sequence: Synthetic oligonucleotide
gaaaattcagacaatctg

SEQ ID NO: 6032 - DNA, 18 bp, Artificial Sequence
  Description of Artificial Sequence: Synthetic oligonucleotide
aaatagaaaattcagaca

SEQ ID NO: 6033 - DNA, 18 bp, Artificial Sequence
  Description of Artificial Sequence: Synthetic oligonucleotide
acattaaatagaaaattc

SEQ ID NO: 6034 - DNA, 18 bp, Artificial Sequence
  Description of Artificial Sequence: Synthetic oligonucleotide
aattgacattaaatagaa

SEQ ID NO: 6035 - DNA, 18 bp, Artificial Sequence
  Description of Artificial Sequence: Synthetic oligonucleotide
tcttaaattgacattaaa

SEQ ID NO: 6036 - DNA, 18 bp, Artificial Sequence
  Description of Artificial Sequence: Synthetic oligonucleotide
caaactcttaaattgaca

SEQ ID NO: 6037 - DNA, 18 bp, Artificial Sequence
  Description of Artificial Sequence: Synthetic oligonucleotide
actctcaaactcttaaat

SEQ ID NO: 6038 - DNA, 18 bp, Artificial Sequence
  Description of Artificial Sequence: Synthetic oligonucleotide
acagcactctcaaactct

SEQ ID NO: 6039 - DNA, 18 bp, Artificial Sequence
  Description of Artificial Sequence: Synthetic oligonucleotide
ggataacagcactctcaa

SEQ ID NO: 6040 - DNA, 18 bp, Artificial Sequence
  Description of Artificial Sequence: Synthetic oligonucleotide
ggtgtggataacagcact

SEQ ID NO: 6041 - DNA, 18 bp, Artificial Sequence
  Description of Artificial Sequence: Synthetic oligonucleotide
tttgaggtgtggataaca

SEQ ID NO: 6042 - DNA, 18 bp, Artificial Sequence
  Description of Artificial Sequence: Synthetic oligonucleotide
ttttatttgaggtgtgga

SEQ ID NO: 6043 - DNA, 18 bp, Artificial Sequence
  Description of Artificial Sequence: Synthetic oligonucleotide
gcagattttatttgaggt

SEQ ID NO: 6044 - DNA, 18 bp, Artificial Sequence
  Description of Artificial Sequence: Synthetic oligonucleotide
atgtggcagattttattt

SEQ ID NO: 6045 - DNA, 18 bp, Artificial Sequence
  Description of Artificial Sequence: Synthetic oligonucleotide
aaaggatgtggcagattt

SEQ ID NO: 6046 - DNA, 18 bp, Artificial Sequence
  Description of Artificial Sequence: Synthetic oligonucleotide
cttctaaaggatgtggca

SEQ ID NO: 6047 - DNA, 18 bp, Artificial Sequence
  Description of Artificial Sequence: Synthetic oligonucleotide
ctgaccttctaaaggatg

SEQ ID NO: 6048 - DNA, 18 bp, Artificial Sequence
  Description of Artificial Sequence: Synthetic oligonucleotide
agggtgggtcgtccaggg

SEQ ID NO: 6049 - DNA, 18 bp, Artificial Sequence
  Description of Artificial Sequence: Synthetic oligonucleotide
cgcccagggtgggtcgtc

SEQ ID NO: 6050 - DNA, 18 bp, Artificial Sequence
  Description of Artificial Sequence: Synthetic oligonucleotide
catcacgcccagggtggg

SEQ ID NO: 6051 - DNA, 18 bp, Artificial Sequence
  Description of Artificial Sequence: Synthetic oligonucleotide
gcacacatcacgcccagg

SEQ ID NO: 6052 - DNA, 18 bp, Artificial Sequence
  Description of Artificial Sequence: Synthetic oligonucleotide
taacagcacacatcacgc

SEQ ID NO: 6053 - DNA, 18 bp, Artificial Sequence
  Description of Artificial Sequence: Synthetic oligonucleotide
cgggataacagcacacat

SEQ ID NO: 6054 - DNA, 18 bp, Artificial Sequence
  Description of Artificial Sequence: Synthetic oligonucleotide
cctcacgggataacagca

SEQ ID NO: 6055 - DNA, 18 bp, Artificial Sequence
  Description of Artificial Sequence: Synthetic oligonucleotide
ggcagcctcacgggataa

SEQ ID NO: 6056 - DNA, 18 bp, Artificial Sequence
  Description of Artificial Sequence: Synthetic oligonucleotide
gcagcggcagcctcacgg

SEQ ID NO: 6057 - DNA, 18 bp, Artificial Sequence
  Description of Artificial Sequence: Synthetic oligonucleotide
catgggcagcggcagcct

SEQ ID NO: 6058 - DNA, 18 bp, Artificial Sequence
  Description of Artificial Sequence: Synthetic oligonucleotide
acaaccatgggcagcggc

SEQ ID NO: 6059 - DNA, 18 bp, Artificial Sequence
  Description of Artificial Sequence: Synthetic oligonucleotide
ggaggacaaccatgggca

SEQ ID NO: 6060 - DNA, 18 bp, Artificial Sequence
  Description of Artificial Sequence: Synthetic oligonucleotide
tctctggaggacaaccat

SEQ ID NO: 6061 - DNA, 18 bp, Artificial Sequence
  Description of Artificial Sequence: Synthetic oligonucleotide
gagcctctctggaggaca

SEQ ID NO: 6062 - DNA, 18 bp, Artificial Sequence
  Description of Artificial Sequence: Synthetic oligonucleotide
cccatgagcctctctgga

SEQ ID NO: 6063 - DNA, 18 bp, Artificial Sequence
  Description of Artificial Sequence: Synthetic oligonucleotide
aggggcccatgagcctct

SEQ ID NO: 6064 - DNA, 18 bp, Artificial Sequence
  Description of Artificial Sequence: Synthetic oligonucleotide
gggtcaggggcccatgag

SEQ ID NO: 6065 - DNA, 18 bp, Artificial Sequence
  Description of Artificial Sequence: Synthetic oligonucleotide
ctgcagggtcaggggccc

SEQ ID NO: 6066 - DNA, 18 bp, Artificial Sequence
  Description of Artificial Sequence: Synthetic oligonucleotide
agtacctgcagggtcagg

SEQ ID NO: 6067 - DNA, 18 bp, Artificial Sequence
  Description of Artificial Sequence: Synthetic oligonucleotide
acggtagtacctgcaggg

SEQ ID NO: 6068 - DNA, 18 bp, Artificial Sequence
  Description of Artificial Sequence: Synthetic oligonucleotide
gcaccacggtagtacctg

SEQ ID NO: 6069 - DNA, 18 bp, Artificial Sequence
  Description of Artificial Sequence: Synthetic oligonucleotide
actgcaccacggtagtac

SEQ ID NO: 6070 - DNA, 18 bp, Artificial Sequence
  Description of Artificial Sequence: Synthetic oligonucleotide
cgcccactgcaccacggt

SEQ ID NO: 6071 - DNA, 18 bp, Artificial Sequence
  Description of Artificial Sequence: Synthetic oligonucleotide
cagggcgcccactgcacc

SEQ ID NO: 6072 - DNA, 18 bp, Artificial Sequence
  Description of Artificial Sequence: Synthetic oligonucleotide
accagcagggcgcccact

SEQ ID NO: 6073 - DNA, 18 bp, Artificial Sequence
  Description of Artificial Sequence: Synthetic oligonucleotide
cgtacaccagcagggcgc

SEQ ID NO: 6074 - DNA, 18 bp, Artificial Sequence
  Description of Artificial Sequence: Synthetic oligonucleotide
gatgtcgtacaccagcag

SEQ ID NO: 6075 - DNA, 18 bp, Artificial Sequence
  Description of Artificial Sequence: Synthetic oligonucleotide
ttggcgatgtcgtacacc

SEQ ID NO: 6076 - DNA, 18 bp, Artificial Sequence
  Description of Artificial Sequence: Synthetic oligonucleotide
ggtgcttggcgatgtcgt

SEQ ID NO: 6077 - DNA, 18 bp, Artificial Sequence
  Description of Artificial Sequence: Synthetic oligonucleotide
ggtcaggtgcttggcgat

SEQ ID NO: 6078 - DNA, 18 bp, Artificial Sequence
  Description of Artificial Sequence: Synthetic oligonucleotide
tcataggtcaggtgcttg

SEQ ID NO: 6079 - DNA, 18 bp, Artificial Sequence
  Description of Artificial Sequence: Synthetic oligonucleotide
cgttctcataggtcaggt

SEQ ID NO: 6080 - DNA, 18 bp, Artificial Sequence
  Description of Artificial Sequence: Synthetic oligonucleotide
ctccacgttctcataggt

SEQ ID NO: 6081 - DNA, 18 bp, Artificial Sequence
  Description of Artificial Sequence: Synthetic oligonucleotide
cagcgctccacgttctca

SEQ ID NO: 6082 - DNA, 18 bp, Artificial Sequence
  Description of Artificial Sequence: Synthetic oligonucleotide
tcagccagcgctccacgt

SEQ ID NO: 6083 - DNA, 18 bp, Artificial Sequence
  Description of Artificial Sequence: Synthetic oligonucleotide
ctccttcagccagcgctc

SEQ ID NO: 6084 - DNA, 18 bp, Artificial Sequence
  Description of Artificial Sequence: Synthetic oligonucleotide
cgcagctccttcagccag

SEQ ID NO: 6085 - DNA, 18 bp, Artificial Sequence
  Description of Artificial Sequence: Synthetic oligonucleotide
ggtcccgcagctccttca

SEQ ID NO: 6086 - DNA, 18 bp, Artificial Sequence
  Description of Artificial Sequence: Synthetic oligonucleotide
tgcgtggtcccgcagctc

SEQ ID NO: 6087 - DNA, 18 bp, Artificial Sequence
  Description of Artificial Sequence: Synthetic oligonucleotide
ctgtctgcgtggtcccgc

SEQ ID NO: 6088 - DNA, 18 bp, Artificial Sequence
  Description of Artificial Sequence: Synthetic oligonucleotide
tgttgctgtctgcgtggt

SEQ ID NO: 6089 - DNA, 18 bp, Artificial Sequence
  Description of Artificial Sequence: Synthetic oligonucleotide
tgacgatgttgctgtctg

SEQ ID NO: 6090 - DNA, 18 bp, Artificial Sequence
  Description of Artificial Sequence: Synthetic oligonucleotide
catgatgacgatgttgct

SEQ ID NO: 6091 - DNA, 18 bp, Artificial Sequence
  Description of Artificial Sequence: Synthetic oligonucleotide
accagcatgatgacgatg

SEQ ID NO: 6092 - DNA, 18 bp, Artificial Sequence
  Description of Artificial Sequence: Synthetic oligonucleotide
tgcccaccagcatgatga

SEQ ID NO: 6093 - DNA, 18 bp, Artificial Sequence
  Description of Artificial Sequence: Synthetic oligonucleotide
cttgttgcccaccagcat

SEQ ID NO: 6094 - DNA, 18 bp, Artificial Sequence
  Description of Artificial Sequence: Synthetic oligonucleotide
tcactcttgttgcccacc

SEQ ID NO: 6095 - DNA, 18 bp, Artificial Sequence
  Description of Artificial Sequence: Synthetic oligonucleotide
gcaggtcactcttgttgc

SEQ ID NO: 6096 - DNA, 18 bp, Artificial Sequence
  Description of Artificial Sequence: Synthetic oligonucleotide
gtggcgcaggtcactctt

SEQ ID NO: 6097 - DNA, 18 bp, Artificial Sequence
  Description of Artificial Sequence: Synthetic oligonucleotide
cgcaggtggcgcaggtca

SEQ ID NO: 6098 - DNA, 18 bp, Artificial Sequence
  Description of Artificial Sequence: Synthetic oligonucleotide
cagcccgcaggtggcgca

SEQ ID NO: 6099 - DNA, 18 bp, Artificial Sequence
  Description of Artificial Sequence: Synthetic oligonucleotide
gggcacagcccgcaggtg

SEQ ID NO: 6100 - DNA, 18 bp, Artificial Sequence
  Description of Artificial Sequence: Synthetic oligonucleotide
tcagtgggcacagcccgc

SEQ ID NO: 6101 - DNA, 18 bp, Artificial Sequence
  Description of Artificial Sequence: Synthetic oligonucleotide
cctcgtcagtgggcacag

SEQ ID NO: 6102 - DNA, 18 bp, Artificial Sequence
  Description of Artificial Sequence: Synthetic oligonucleotide
gcgggcctcgtcagtggg

SEQ ID NO: 6103 - DNA, 18 bp, Artificial Sequence
  Description of Artificial Sequence: Synthetic oligonucleotide
aaggcgcgggcctcgtca

SEQ ID NO: 6104 - DNA, 18 bp, Artificial Sequence
  Description of Artificial Sequence: Synthetic oligonucleotide
ctgcgaaggcgcgggcct

SEQ ID NO: 6105 - DNA, 18 bp, Artificial Sequence
  Description of Artificial Sequence: Synthetic oligonucleotide
cacctgcgaaggcgcggg

SEQ ID NO: 6106 - DNA, 18 bp, Artificial Sequence
  Description of Artificial Sequence: Synthetic oligonucleotide
ctgctcacctgcgaaggc

SEQ ID NO: 6107 - DNA, 18 bp, Artificial Sequence
  Description of Artificial Sequence: Synthetic oligonucleotide
tccgtctgctcacctgcg

SEQ ID NO: 6108 - DNA, 18 bp, Artificial Sequence
  Description of Artificial Sequence: Synthetic oligonucleotide
gcgtctccgtctgctcac

SEQ ID NO: 6109 - DNA, 18 bp, Artificial Sequence
  Description of Artificial Sequence: Synthetic oligonucleotide
tgcctgcgtctccgtctg

SEQ ID NO: 6110 - DNA, 18 bp, Artificial Sequence
  Description of Artificial Sequence: Synthetic oligonucleotide
tctgatgcctgcgtctcc

SEQ ID NO: 6111 - DNA, 18 bp, Artificial Sequence
  Description of Artificial Sequence: Synthetic oligonucleotide
acctctctgatgcctgcg

SEQ ID NO: 6112 - DNA, 18 bp, Artificial Sequence
  Description of Artificial Sequence: Synthetic oligonucleotide
cagacacctctctgatgc

SEQ ID NO: 6113 - DNA, 18 bp, Artificial Sequence
  Description of Artificial Sequence: Synthetic oligonucleotide
ccttccagacacctctct

SEQ ID NO: 6114 - DNA, 18 bp, Artificial Sequence
  Description of Artificial Sequence: Synthetic oligonucleotide
tcctgccttccagacacc

SEQ ID NO: 6115 - DNA, 18 bp, Artificial Sequence
  Description of Artificial Sequence: Synthetic oligonucleotide
gggcctcctgccttccag

SEQ ID NO: 6116 - DNA, 18 bp, Artificial Sequence
  Description of Artificial Sequence: Synthetic oligonucleotide
gtgaggggcctcctgcct

SEQ ID NO: 6117 - DNA, 18 bp, Artificial Sequence
  Description of Artificial Sequence: Synthetic oligonucleotide
acactgtgaggggcctcc

SEQ ID NO: 6118 - DNA, 18 bp, Artificial Sequence
  Description of Artificial Sequence: Synthetic oligonucleotide
ccccaacactgtgagggg

SEQ ID NO: 6119 - DNA, 18 bp, Artificial Sequence
  Description of Artificial Sequence: Synthetic oligonucleotide
cagggccccaacactgtg

SEQ ID NO: 6120 - DNA, 18 bp, Artificial Sequence
  Description of Artificial Sequence: Synthetic oligonucleotide
gtggccagggccccaaca

SEQ ID NO: 6121 - DNA, 18 bp, Artificial Sequence
  Description of Artificial Sequence: Synthetic oligonucleotide
gggctgtggccagggccc

SEQ ID NO: 6122 - DNA, 18 bp, Artificial Sequence
  Description of Artificial Sequence: Synthetic oligonucleotide
agccagggctgtggccag

SEQ ID NO: 6123 - DNA, 18 bp, Artificial Sequence
  Description of Artificial Sequence: Synthetic oligonucleotide
agggaagccagggctgtg

SEQ ID NO: 6124 - DNA, 18 bp, Artificial Sequence
  Description of Artificial Sequence: Synthetic oligonucleotide
agggaagggaagccaggg

SEQ ID NO: 6125 - DNA, 18 bp, Artificial Sequence
  Description of Artificial Sequence: Synthetic oligonucleotide
tcctcagggaagggaagc

SEQ ID NO: 6126 - DNA, 18 bp, Artificial Sequence
  Description of Artificial Sequence: Synthetic oligonucleotide
gggaaaatgggctgcgtt

SEQ ID NO: 6127 - DNA, 18 bp, Artificial Sequence
  Description of Artificial Sequence: Synthetic oligonucleotide
gtcctgggaaaatgggct

SEQ ID NO: 6128 - DNA, 18 bp, Artificial Sequence
  Description of Artificial Sequence: Synthetic oligonucleotide
gaggggtcctgggaaaat

SEQ ID NO: 6129 - DNA, 18 bp, Artificial Sequence
  Description of Artificial Sequence: Synthetic oligonucleotide
gggaggaggggtcctggg

SEQ ID NO: 6130 - DNA, 18 bp, Artificial Sequence
  Description of Artificial Sequence: Synthetic oligonucleotide
gagaagggaggaggggtc

SEQ ID NO: 6131 - DNA, 18 bp, Artificial Sequence
  Description of Artificial Sequence: Synthetic oligonucleotide
ccgaggagaagggaggag

SEQ ID NO: 6132 - DNA, 18 bp, Artificial Sequence
  Description of Artificial Sequence: Synthetic oligonucleotide
cggggccgaggagaaggg

SEQ ID NO: 6133 - DNA, 18 bp, Artificial Sequence
  Description of Artificial Sequence: Synthetic oligonucleotide
ggaggcggggccgaggag

SEQ ID NO: 6134 - DNA, 18 bp, Artificial Sequence
  Description of Artificial Sequence: Synthetic oligonucleotide
ggtcaggaggcggggccg

SEQ ID NO: 6135 - DNA, 18 bp, Artificial Sequence
  Description of Artificial Sequence: Synthetic oligonucleotide
ggaggggtcaggaggcgg

SEQ ID NO: 6136 - DNA, 18 bp, Artificial Sequence
  Description of Artificial Sequence: Synthetic oligonucleotide
ggaatggaggggtcagga

SEQ ID NO: 6137 - DNA, 18 bp, Artificial Sequence
  Description of Artificial Sequence: Synthetic oligonucleotide
gacgaggaatggaggggt

SEQ ID NO: 6138 - DNA, 18 bp, Artificial Sequence
  Description of Artificial Sequence: Synthetic oligonucleotide
acggggacgaggaatgga

SEQ ID NO: 6139 - DNA, 18 bp, Artificial Sequence
  Description of Artificial Sequence: Synthetic oligonucleotide
ttactacggggacgagga

SEQ ID NO: 6140 - DNA, 18 bp, Artificial Sequence
  Description of Artificial Sequence: Synthetic oligonucleotide
ggggattactacggggac

SEQ ID NO: 6141 - DNA, 18 bp, Artificial Sequence
  Description of Artificial Sequence: Synthetic oligonucleotide
ccggaggggattactacg

SEQ ID NO: 6142 - DNA, 18 bp, Artificial Sequence
  Description of Artificial Sequence: Synthetic oligonucleotide
gaaaaccggaggggatta

SEQ ID NO: 6143 - DNA, 18 bp, Artificial Sequence
  Description of Artificial Sequence: Synthetic oligonucleotide
ctgaggaaaaccggaggg

SEQ ID NO: 6144 - DNA, 18 bp, Artificial Sequence
  Description of Artificial Sequence: Synthetic oligonucleotide
ggagactgaggaaaaccg

SEQ ID NO: 6145 - DNA, 18 bp, Artificial Sequence
  Description of Artificial Sequence: Synthetic oligonucleotide
tacgtggagactgaggaa

SEQ ID NO: 6146 - DNA, 18 bp, Artificial Sequence
  Description of Artificial Sequence: Synthetic oligonucleotide
ggacgtacgtggagactg

SEQ ID NO: 6147 - DNA, 18 bp, Artificial Sequence
  Description of Artificial Sequence: Synthetic oligonucleotide
gagggacgtacgtggaga

SEQ ID NO: 6148 - DNA, 18 bp, Artificial Sequence
  Description of Artificial Sequence: Synthetic oligonucleotide
gctttgagggacgtacgt

SEQ ID NO: 6149 - DNA, 18 bp, Artificial Sequence
  Description of Artificial Sequence: Synthetic oligonucleotide
gacgcgctttgagggacg

SEQ ID NO: 6150 - DNA, 18 bp, Artificial Sequence
  Description of Artificial Sequence: Synthetic oligonucleotide
tttaggacgcgctttgag

SEQ ID NO: 6151 - DNA, 18 bp, Artificial Sequence
  Description of Artificial Sequence: Synthetic oligonucleotide
cgggttttaggacgcgct

SEQ ID NO: 6152 - DNA, 18 bp, Artificial Sequence
  Description of Artificial Sequence: Synthetic oligonucleotide
ttatccgggttttaggac

SEQ ID NO: 6153 - DNA, 18 bp, Artificial Sequence
  Description of Artificial Sequence: Synthetic oligonucleotide
tccggttatccgggtttt

SEQ ID NO: 6154 - DNA, 18 bp, Artificial Sequence
  Description of Artificial Sequence: Synthetic oligonucleotide
agcgctccggttatccgg

SEQ ID NO: 6155 - DNA, 18 bp, Artificial Sequence
  Description of Artificial Sequence: Synthetic oligonucleotide
tggggagcgctccggtta

SEQ ID NO: 6156 - DNA, 18 bp, Artificial Sequence
  Description of Artificial Sequence: Synthetic oligonucleotide
gtccatggggagcgctcc

SEQ ID NO: 6157 - DNA, 18 bp, Artificial Sequence
  Description of Artificial Sequence: Synthetic oligonucleotide
gtgtggtccatggggagc

SEQ ID NO: 6158 - DNA, 18 bp, Artificial Sequence
  Description of Artificial Sequence: Synthetic oligonucleotide
agccctccgtgtggtcca

SEQ ID NO: 6159 - DNA, 18 bp, Artificial Sequence
  Description of Artificial Sequence: Synthetic oligonucleotide
gggcgagccctccgtgtg

SEQ ID NO: 6160 - DNA, 18 bp, Artificial Sequence
  Description of Artificial Sequence: Synthetic oligonucleotide
tccgcgggcgagccctcc

SEQ ID NO: 6161 - DNA, 18 bp, Artificial Sequence
  Description of Artificial Sequence: Synthetic oligonucleotide
gctcctccgcgggcgagc

SEQ ID NO: 6162 - DNA, 18 bp, Artificial Sequence
  Description of Artificial Sequence: Synthetic oligonucleotide
aggcggctcctccgcggg

SEQ ID NO: 6163 - DNA, 18 bp, Artificial Sequence
  Description of Artificial Sequence: Synthetic oligonucleotide
tgcgcaggcggctcctcc

SEQ ID NO: 6164 - DNA, 18 bp, Artificial Sequence
  Description of Artificial Sequence: Synthetic oligonucleotide
gagcatgcgcaggcggct

SEQ ID NO: 6165 - DNA, 18 bp, Artificial Sequence
  Description of Artificial Sequence: Synthetic oligonucleotide
cgatggagcatgcgcagg

SEQ ID NO: 6166 - DNA, 18 bp, Artificial Sequence
  Description of Artificial Sequence: Synthetic oligonucleotide
ccaggcgatggagcatgc

SEQ ID NO: 6167 - DNA, 18 bp, Artificial Sequence
  Description of Artificial Sequence: Synthetic oligonucleotide
tacccaggcgatggagca

SEQ ID NO: 6168 - DNA, 18 bp, Artificial Sequence
  Description of Artificial Sequence: Synthetic oligonucleotide
aaacctacccaggcgatg

SEQ ID NO: 6169 - DNA, 18 bp, Artificial Sequence
  Description of Artificial Sequence: Synthetic oligonucleotide
cctggaaacctacccagg

SEQ ID NO: 6170 - DNA, 18 bp, Artificial Sequence
  Description of Artificial Sequence: Synthetic oligonucleotide
ccttccctggaaacctac

SEQ ID NO: 6171 - DNA, 18 bp, Artificial Sequence
  Description of Artificial Sequence: Synthetic oligonucleotide
cgctgccttccctggaaa

SEQ ID NO: 6172 - DNA, 18 bp, Artificial Sequence
  Description of Artificial Sequence: Synthetic oligonucleotide
ctgctcgctgccttccct

SEQ ID NO: 6173 - DNA, 18 bp, Artificial Sequence
  Description of Artificial Sequence: Synthetic oligonucleotide
ggatcctgctcgctgcct

SEQ ID NO: 6174 - DNA, 18 bp, Artificial Sequence
  Description of Artificial Sequence: Synthetic oligonucleotide
gtaggggatcctgctcgc

SEQ ID NO: 6175 - DNA, 18 bp, Artificial Sequence
  Description of Artificial Sequence: Synthetic oligonucleotide
gcagagtaggggatcctg

SEQ ID NO: 6176 - DNA, 18 bp, Artificial Sequence
  Description of Artificial Sequence: Synthetic oligonucleotide
cgcccgcagagtagggga

SEQ ID NO: 6177 - DNA, 18 bp, Artificial Sequence
  Description of Artificial Sequence: Synthetic oligonucleotide
cgcgccgcccgcagagta

SEQ ID NO: 6178 - DNA, 18 bp, Artificial Sequence
  Description of Artificial Sequence: Synthetic oligonucleotide
cgcctcgcgccgcccgca

SEQ ID NO: 6179 - DNA, 18 bp, Artificial Sequence
  Description of Artificial Sequence: Synthetic oligonucleotide
ccagacgcctcgcgccgc

SEQ ID NO: 6180 - DNA, 18 bp, Artificial Sequence
  Description of Artificial Sequence: Synthetic oligonucleotide
aagagccagacgcctcgc

SEQ ID NO: 6181 - DNA, 18 bp, Artificial Sequence
  Description of Artificial Sequence: Synthetic oligonucleotide
ccgcgaagagccagacgc

SEQ ID NO: 6182 - DNA, 18 bp, Artificial Sequence
  Description of Artificial Sequence: Synthetic oligonucleotide
cgccgccgcgaagagcca

SEQ ID NO: 6183 - DNA, 18 bp, Artificial Sequence
  Description of Artificial Sequence: Synthetic oligonucleotide
ctcgccgccgccgcgaag

SEQ ID NO: 6184 - DNA, 18 bp, Artificial Sequence
  Description of Artificial Sequence: Synthetic oligonucleotide
ttcccctcgccgccgccg

SEQ ID NO: 6185 - DNA, 18 bp, Artificial Sequence
  Description of Artificial Sequence: Synthetic oligonucleotide
tccctttcccctcgccgc

SEQ ID NO: 6186 - DNA, 18 bp, Artificial Sequence
  Description of Artificial Sequence: Synthetic oligonucleotide
cgcgctccctttcccctc

SEQ ID NO: 6187 - DNA, 18 bp, Artificial Sequence
  Description of Artificial Sequence: Synthetic oligonucleotide
gcccccgcgctccctttc

SEQ ID NO: 6188 - DNA, 18 bp, Artificial Sequence
  Description of Artificial Sequence: Synthetic oligonucleotide
aaggcagcaagggagcac

SEQ ID NO: 6189 - DNA, 18 bp, Artificial Sequence
  Description of Artificial Sequence: Synthetic oligonucleotide
acaaaaaggcagcaaggg

SEQ ID NO: 6190 - DNA, 18 bp, Artificial Sequence
  Description of Artificial Sequence: Synthetic oligonucleotide
agcacacaaaaaggcagc

SEQ ID NO: 6191 - DNA, 18 bp, Artificial Sequence
  Description of Artificial Sequence: Synthetic oligonucleotide
agctgagcacacaaaaag

SEQ ID NO: 6192 - DNA, 18 bp, Artificial Sequence
  Description of Artificial Sequence: Synthetic oligonucleotide
tcaaaagctgagcacaca

SEQ ID NO: 6193 - DNA, 18 bp, Artificial Sequence
  Description of Artificial Sequence: Synthetic oligonucleotide
tgcagtcaaaagctgagc

SEQ ID NO: 6194 - DNA, 18 bp, Artificial Sequence
  Description of Artificial Sequence: Synthetic oligonucleotide
tactttgcagtcaaaagc

SEQ ID NO: 6195 - DNA, 18 bp, Artificial Sequence
  Description of Artificial Sequence: Synthetic oligonucleotide
aagtctactttgcagtca

SEQ ID NO: 6196 - DNA, 18 bp, Artificial Sequence
  Description of Artificial Sequence: Synthetic oligonucleotide
gcaacaagtctactttgc

SEQ ID NO: 6197 - DNA, 18 bp, Artificial Sequence
  Description of Artificial Sequence: Synthetic oligonucleotide
gcaaggcaacaagtctac

SEQ ID NO: 6198 - DNA, 18 bp, Artificial Sequence
  Description of Artificial Sequence: Synthetic oligonucleotide
aattggcaaggcaacaag

SEQ ID NO: 6199 - DNA, 18 bp, Artificial Sequence
  Description of Artificial Sequence: Synthetic oligonucleotide
gaacgaattggcaaggca

SEQ ID NO: 6200 - DNA, 18 bp, Artificial Sequence
  Description of Artificial Sequence: Synthetic oligonucleotide
agagtgaacgaattggca

SEQ ID NO: 6201 - DNA, 18 bp, Artificial Sequence
  Description of Artificial Sequence: Synthetic oligonucleotide
tttaaagagtgaacgaat

SEQ ID NO: 6202 - DNA, 18 bp, Artificial Sequence
  Description of Artificial Sequence: Synthetic oligonucleotide
aagggtttaaagagtgaa

SEQ ID NO: 6203 - DNA, 18 bp, Artificial Sequence
  Description of Artificial Sequence: Synthetic oligonucleotide
gataaaagggtttaaaga

SEQ ID NO: 6204 - DNA, 18 bp, Artificial Sequence
  Description of Artificial Sequence: Synthetic oligonucleotide
aacaagataaaagggttt

SEQ ID NO: 6205 - DNA, 18 bp, Artificial Sequence
  Description of Artificial Sequence: Synthetic oligonucleotide
ctaataacaagataaaag

SEQ ID NO: 6206 - DNA, 18 bp, Artificial Sequence
  Description of Artificial Sequence: Synthetic oligonucleotide
gcagcctaataacaagat

SEQ ID NO: 6207 - DNA, 18 bp, Artificial Sequence
  Description of Artificial Sequence: Synthetic oligonucleotide
aaagagcagcctaataac

SEQ ID NO: 6208 - DNA, 18 bp, Artificial Sequence
  Description of Artificial Sequence: Synthetic oligonucleotide
acgccaaagagcagccta

SEQ ID NO: 6209 - DNA, 18 bp, Artificial Sequence
  Description of Artificial Sequence: Synthetic oligonucleotide
tttacgccaaagagcagc

SEQ ID NO: 6210 - DNA, 18 bp, Artificial Sequence
  Description of Artificial Sequence: Synthetic oligonucleotide
tgcaatttacgccaaaga

SEQ ID NO: 6211 - DNA, 18 bp, Artificial Sequence
  Description of Artificial Sequence: Synthetic oligonucleotide
tcgattgcaatttacgcc

SEQ ID NO: 6212 - DNA, 18 bp, Artificial Sequence
  Description of Artificial Sequence: Synthetic oligonucleotide
cctaatcgattgcaattt

SEQ ID NO: 6213 - DNA, 18 bp, Artificial Sequence
  Description of Artificial Sequence: Synthetic oligonucleotide
cgatccctaatcgattgc

SEQ ID NO: 6214 - DNA, 18 bp, Artificial Sequence
  Description of Artificial Sequence: Synthetic oligonucleotide
agaaacgatccctaatcg

SEQ ID NO: 6215 - DNA, 18 bp, Artificial Sequence
  Description of Artificial Sequence: Synthetic oligonucleotide
ttctgagaaacgatccct

SEQ ID NO: 6216 - DNA, 18 bp, Artificial Sequence
  Description of Artificial Sequence: Synthetic oligonucleotide
cttgattctgagaaacga

SEQ ID NO: 6217 - DNA, 18 bp, Artificial Sequence
  Description of Artificial Sequence: Synthetic oligonucleotide
tctaacttgattctgaga

SEQ ID NO: 6218 - DNA, 18 bp, Artificial Sequence
  Description of Artificial Sequence: Synthetic oligonucleotide
tcacttctaacttgattc

SEQ ID NO: 6219 - DNA, 18 bp, Artificial Sequence
  Description of Artificial Sequence: Synthetic oligonucleotide
aactctcacttctaactt

SEQ ID NO: 6220 - DNA, 18 bp, Artificial Sequence
  Description of Artificial Sequence: Synthetic oligonucleotide
atctgaactctcacttct

SEQ ID NO: 6221 - DNA, 18 bp, Artificial Sequence
  Description of Artificial Sequence: Synthetic oligonucleotide
cacttatctgaactctca

SEQ ID NO: 6222 - DNA, 18 bp, Artificial Sequence
  Description of Artificial Sequence: Synthetic oligonucleotide
ggcctcacttatctgaac

SEQ ID NO: 6223 - DNA, 18 bp, Artificial Sequence
  Description of Artificial Sequence: Synthetic oligonucleotide
atggcggcctcacttatc

SEQ ID NO: 6224 - DNA, 18 bp, Artificial Sequence
  Description of Artificial Sequence: Synthetic oligonucleotide
cagcaatggcggcctcac

SEQ ID NO: 6225 - DNA, 18 bp, Artificial Sequence
  Description of Artificial Sequence: Synthetic oligonucleotide
caaagcagcaatggcggc

SEQ ID NO: 6226 - DNA, 18 bp, Artificial Sequence
  Description of Artificial Sequence: Synthetic oligonucleotide
gtgttcaaagcagcaatg

SEQ ID NO: 6227 - DNA, 18 bp, Artificial Sequence
  Description of Artificial Sequence: Synthetic oligonucleotide
ctgaggtgttcaaagcag

SEQ ID NO: 6228 - DNA, 18 bp, Artificial Sequence
  Description of Artificial Sequence: Synthetic oligonucleotide
cccttctgaggtgttcaa

SEQ ID NO: 6229 - DNA, 18 bp, Artificial Sequence
  Description of Artificial Sequence: Synthetic oligonucleotide
ttctccccttctgaggtg

SEQ ID NO: 6230 - DNA, 18 bp, Artificial Sequence
  Description of Artificial Sequence: Synthetic oligonucleotide
atccattctccccttctg

SEQ ID NO: 6231 - DNA, 18 bp, Artificial Sequence
  Description of Artificial Sequence: Synthetic oligonucleotide
gataaatccattctcccc

SEQ ID NO: 6232 - DNA, 18 bp, Artificial Sequence
  Description of Artificial Sequence: Synthetic oligonucleotide
ctcctgataaatccattc

SEQ ID NO: 6233 - DNA, 18 bp, Artificial Sequence
  Description of Artificial Sequence: Synthetic oligonucleotide
tttcactcctgataaatc

SEQ ID NO: 6234 - DNA, 18 bp, Artificial Sequence
  Description of Artificial Sequence: Synthetic oligonucleotide
ttctttttcactcctgat

SEQ ID NO: 6235 - DNA, 18 bp, Artificial Sequence
  Description of Artificial Sequence: Synthetic oligonucleotide
agctcttctttttcactc

SEQ ID NO: 6236 - DNA, 18 bp, Artificial Sequence
  Description of Artificial Sequence: Synthetic oligonucleotide
tagcaagctcttcttttt

SEQ ID NO: 6237 - DNA, 18 bp, Artificial Sequence
  Description of Artificial Sequence: Synthetic oligonucleotide
actcctagcaagctcttc

SEQ ID NO: 6238 - DNA, 18 bp, Artificial Sequence
  Description of Artificial Sequence: Synthetic oligonucleotide
ctttgactcctagcaagc

SEQ ID NO: 6239 - DNA, 18 bp, Artificial Sequence
  Description of Artificial Sequence: Synthetic oligonucleotide
attttctttgactcctag

SEQ ID NO: 6240 - DNA, 18 bp, Artificial Sequence
  Description of Artificial Sequence: Synthetic oligonucleotide
ttattattttctttgact

SEQ ID NO: 6241 - DNA, 18 bp, Artificial Sequence
  Description of Artificial Sequence: Synthetic oligonucleotide
actttttattattttctt

SEQ ID NO: 6242 - DNA, 18 bp, Artificial Sequence
  Description of Artificial Sequence: Synthetic oligonucleotide
gctggactttttattatt

SEQ ID NO: 6243 - DNA, 18 bp, Artificial Sequence
  Description of Artificial Sequence: Synthetic oligonucleotide
ctagtgctggacttttta

SEQ ID NO: 6244 - DNA, 18 bp, Artificial Sequence
  Description of Artificial Sequence: Synthetic oligonucleotide
tacctagtgctggacttt

SEQ ID NO: 6245 - DNA, 18 bp, Artificial Sequence
  Description of Artificial Sequence: Synthetic oligonucleotide
aggattacctagtgctgg

SEQ ID NO: 6246 - DNA, 18 bp, Artificial Sequence
  Description of Artificial Sequence: Synthetic oligonucleotide
acagaaggattacctagt

SEQ ID NO: 6247 - DNA, 18 bp, Artificial Sequence
  Description of Artificial Sequence: Synthetic oligonucleotide
atcttacagaaggattac

SEQ ID NO: 6248 - DNA, 18 bp, Artificial Sequence
  Description of Artificial Sequence: Synthetic oligonucleotide
gaaaaatcttacagaagg

SEQ ID NO: 6249 - DNA, 18 bp, Artificial Sequence
  Description of Artificial Sequence: Synthetic oligonucleotide
cactagaaaaatcttaca

SEQ ID NO: 6250 - DNA, 18 bp, Artificial Sequence
  Description of Artificial Sequence: Synthetic oligonucleotide
agtagcactagaaaaatc

SEQ ID NO: 6251 - DNA, 18 bp, Artificial Sequence
  Description of Artificial Sequence: Synthetic oligonucleotide
ccccaagtagcactagaa

SEQ ID NO: 6252 - DNA, 18 bp, Artificial Sequence
  Description of Artificial Sequence: Synthetic oligonucleotide
agcacccccaagtagcac

SEQ ID NO: 6253 - DNA, 18 bp, Artificial Sequence
  Description of Artificial Sequence: Synthetic oligonucleotide
cagtaagcacccccaagt

SEQ ID NO: 6254 - DNA, 18 bp, Artificial Sequence
  Description of Artificial Sequence: Synthetic oligonucleotide
cctagcagtaagcacccc

SEQ ID NO: 6255 - DNA, 18 bp, Artificial Sequence
  Description of Artificial Sequence: Synthetic oligonucleotide
gggtccctagcagtaagc

SEQ ID NO: 6256 - DNA, 18 bp, Artificial Sequence
  Description of Artificial Sequence: Synthetic oligonucleotide
tctgcgggtccctagcag

SEQ ID NO: 6257 - DNA, 18 bp, Artificial Sequence
  Description of Artificial Sequence: Synthetic oligonucleotide
ccctttctgcgggtccct

SEQ ID NO: 6258 - DNA, 18 bp, Artificial Sequence
  Description of Artificial Sequence: Synthetic oligonucleotide
ctttcccctttctgcggg

SEQ ID NO: 6259 - DNA, 18 bp, Artificial Sequence
  Description of Artificial Sequence: Synthetic oligonucleotide
ctcaactttcccctttct

SEQ ID NO: 6260 - DNA, 18 bp, Artificial Sequence
  Description of Artificial Sequence: Synthetic oligonucleotide
acattctcaactttcccc

SEQ ID NO: 6261 - DNA, 18 bp, Artificial Sequence
  Description of Artificial Sequence: Synthetic oligonucleotide
gcagaacattctcaactt

SEQ ID NO: 6262 - DNA, 18 bp, Artificial Sequence
  Description of Artificial Sequence: Synthetic oligonucleotide
agaatgcagaacattctc

SEQ ID NO: 6263 - DNA, 18 bp, Artificial Sequence
  Description of Artificial Sequence: Synthetic oligonucleotide
actgtagaatgcagaaca

SEQ ID NO: 6264 - DNA, 18 bp, Artificial Sequence
  Description of Artificial Sequence: Synthetic oligonucleotide
cactcactgtagaatgca

SEQ ID NO: 6265 - DNA, 18 bp, Artificial Sequence
  Description of Artificial Sequence: Synthetic oligonucleotide
cctcgtcgtcttctaaat

SEQ ID NO: 6266 - DNA, 18 bp, Artificial Sequence
  Description of Artificial Sequence: Synthetic oligonucleotide
cagtacctcgtcgtcttc

SEQ ID NO: 6267 - DNA, 18 bp, Artificial Sequence
  Description of Artificial Sequence: Synthetic oligonucleotide
ggtgacagtacctcgtcg

SEQ ID NO: 6268 - DNA, 18 bp, Artificial Sequence
  Description of Artificial Sequence: Synthetic oligonucleotide
aaaaaggtgacagtacct

SEQ ID NO: 6269 - DNA, 18 bp, Artificial Sequence
  Description of Artificial Sequence: Synthetic oligonucleotide
aacacaaaaaggtgacag

SEQ ID NO: 6270 - DNA, 18 bp, Artificial Sequence
  Description of Artificial Sequence: Synthetic oligonucleotide
ttgtaaacacaaaaaggt

SEQ ID NO: 6271 - DNA, 18 bp, Artificial Sequence
  Description of Artificial Sequence: Synthetic oligonucleotide
taatattgtaaacacaaa

SEQ ID NO: 6272 - DNA, 18 bp, Artificial Sequence
  Description of Artificial Sequence: Synthetic oligonucleotide
cagattaatattgtaaac

SEQ ID NO: 6273 - DNA, 18 bp, Artificial Sequence
  Description of Artificial Sequence: Synthetic oligonucleotide
caaagcagattaatattg

SEQ ID NO: 6274 - DNA, 18 bp, Artificial Sequence
  Description of Artificial Sequence: Synthetic oligonucleotide
atctgcaaagcagattaa

SEQ ID NO: 6275 - DNA, 18 bp, Artificial Sequence
  Description of Artificial Sequence: Synthetic oligonucleotide
actgcatctgcaaagcag

SEQ ID NO: 6276 - DNA, 18 bp, Artificial Sequence
  Description of Artificial Sequence: Synthetic oligonucleotide
actccactgcatctgcaa

SEQ ID NO: 6277 - DNA, 18 bp, Artificial Sequence
  Description of Artificial Sequence: Synthetic oligonucleotide
aggatactccactgcatc

SEQ ID NO: 6278 - DNA, 18 bp, Artificial Sequence
  Description of Artificial Sequence: Synthetic oligonucleotide
tagaaaggatactccact

SEQ ID NO: 6279 - DNA, 18 bp, Artificial Sequence
  Description of Artificial Sequence: Synthetic oligonucleotide
aattgtagaaaggatact

SEQ ID NO: 6280 - DNA, 18 bp, Artificial Sequence
  Description of Artificial Sequence: Synthetic oligonucleotide
aaaataattgtagaaagg

SEQ ID NO: 6281 - DNA, 18 bp, Artificial Sequence
  Description of Artificial Sequence: Synthetic oligonucleotide
agaaaaaaataattgtag

SEQ ID NO: 6282 - DNA, 18 bp, Artificial Sequence
  Description of Artificial Sequence: Synthetic oligonucleotide
ctgaaagaaaaaaataat

SEQ ID NO: 6283 - DNA, 18 bp, Artificial Sequence
  Description of Artificial Sequence: Synthetic oligonucleotide
accctctgaaagaaaaaa

SEQ ID NO: 6284 - DNA, 18 bp, Artificial Sequence
  Description of Artificial Sequence: Synthetic oligonucleotide
gttttaccctctgaaaga

SEQ ID NO: 6285 - DNA, 18 bp, Artificial Sequence
  Description of Artificial Sequence: Synthetic oligonucleotide
aatcagttttaccctctg

SEQ ID NO: 6286 - DNA, 18 bp, Artificial Sequence
  Description of Artificial Sequence: Synthetic oligonucleotide
aataatcagttttaccct

SEQ ID NO: 6287 - DNA, 18 bp, Artificial Sequence
  Description of Artificial Sequence: Synthetic oligonucleotide
agcataataatcagtttt

SEQ ID NO: 6288 - DNA, 18 bp, Artificial Sequence
  Description of Artificial Sequence: Synthetic oligonucleotide
ttccgagcataataatca

SEQ ID NO: 6289 - DNA, 18 bp, Artificial Sequence
  Description of Artificial Sequence: Synthetic oligonucleotide
agcgtttccgagcataat

SEQ ID NO: 6290 - DNA, 18 bp, Artificial Sequence
  Description of Artificial Sequence: Synthetic oligonucleotide
caccaagcgtttccgagc

SEQ ID NO: 6291 - DNA, 18 bp, Artificial Sequence
  Description of Artificial Sequence: Synthetic oligonucleotide
tgtatcaccaagcgtttc

SEQ ID NO: 6292 - DNA, 18 bp, Artificial Sequence
  Description of Artificial Sequence: Synthetic oligonucleotide
tatcttgtatcaccaagc

SEQ ID NO: 6293 - DNA, 18 bp, Artificial Sequence
  Description of Artificial Sequence: Synthetic oligonucleotide
atttttatcttgtatcac

SEQ ID NO: 6294 - DNA, 18 bp, Artificial Sequence
  Description of Artificial Sequence: Synthetic oligonucleotide
tatttatttttatcttgt

SEQ ID NO: 6295 - DNA, 18 bp, Artificial Sequence
  Description of Artificial Sequence: Synthetic oligonucleotide
tgttgtatttatttttat

SEQ ID NO: 6296 - DNA, 18 bp, Artificial Sequence
  Description of Artificial Sequence: Synthetic oligonucleotide
gggtgtgttgtatttatt

SEQ ID NO: 6297 - DNA, 18 bp, Artificial Sequence
  Description of Artificial Sequence: Synthetic oligonucleotide
ctgtatttgggtgtgttg

SEQ ID NO: 6298 - DNA, 18 bp, Artificial Sequence
  Description of Artificial Sequence: Synthetic oligonucleotide
tcatcctgtatttgggtg

SEQ ID NO: 6299 - DNA, 18 bp, Artificial Sequence
  Description of Artificial Sequence: Synthetic oligonucleotide
aactatcatcctgtattt

SEQ ID NO: 6300 - DNA, 18 bp, Artificial Sequence
  Description of Artificial Sequence: Synthetic oligonucleotide
acacgaactatcatcctg

SEQ ID NO: 6301 - DNA, 18 bp, Artificial Sequence
  Description of Artificial Sequence: Synthetic oligonucleotide
ttgtcacacgaactatca

SEQ ID NO: 6302 - DNA, 18 bp, Artificial Sequence
  Description of Artificial Sequence: Synthetic oligonucleotide
tctgtttgtcacacgaac

SEQ ID NO: 6303 - DNA, 18 bp, Artificial Sequence
  Description of Artificial Sequence: Synthetic oligonucleotide
atatctctgtttgtcaca

SEQ ID NO: 6304 - DNA, 18 bp, Artificial Sequence
  Description of Artificial Sequence: Synthetic oligonucleotide
aaatgatatctctgtttg

SEQ ID NO: 6305 - DNA, 18 bp, Artificial Sequence
  Description of Artificial Sequence: Synthetic oligonucleotide
ctgacaaatgatatctct

SEQ ID NO: 6306 - DNA, 18 bp, Artificial Sequence
  Description of Artificial Sequence: Synthetic oligonucleotide
tacctgacaaatgatatc

SEQ ID NO: 6307 - DNA, 18 bp, Artificial Sequence
  Description of Artificial Sequence: Synthetic oligonucleotide
caacttacctgacaaatg

SEQ ID NO: 6308 - DNA, 18 bp, Artificial Sequence
  Description of Artificial Sequence: Synthetic oligonucleotide
gaatacaacttacctgac

SEQ ID NO: 6309 - DNA, 18 bp, Artificial Sequence
  Description of Artificial Sequence: Synthetic oligonucleotide
gtctagaatacaacttac

SEQ ID NO: 6310 - DNA, 18 bp, Artificial Sequence
  Description of Artificial Sequence: Synthetic oligonucleotide
ggactgtctagaatacaa

SEQ ID NO: 6311 - DNA, 18 bp, Artificial Sequence
  Description of Artificial Sequence: Synthetic oligonucleotide
aaaggggactgtctagaa

SEQ ID NO: 6312 - DNA, 18 bp, Artificial Sequence
  Description of Artificial Sequence: Synthetic oligonucleotide
taaaaaaaggggactgtc

SEQ ID NO: 6313 - DNA, 18 bp, Artificial Sequence
  Description of Artificial Sequence: Synthetic oligonucleotide
agcaataaaaaaagggga

SEQ ID NO: 6314 - DNA, 18 bp, Artificial Sequence
  Description of Artificial Sequence: Synthetic oligonucleotide
tctctagcaataaaaaaa

SEQ ID NO: 6315 - DNA, 18 bp, Artificial Sequence
  Description of Artificial Sequence: Synthetic oligonucleotide
caatttctctagcaataa

SEQ ID NO: 6316 - DNA, 18 bp, Artificial Sequence
  Description of Artificial Sequence: Synthetic oligonucleotide
aagcacaatttctctagc

SEQ ID NO: 6317 - DNA, 18 bp, Artificial Sequence
  Description of Artificial Sequence: Synthetic oligonucleotide
ttcccaagcacaatttct

SEQ ID NO: 6318 - DNA, 18 bp, Artificial Sequence
  Description of Artificial Sequence: Synthetic oligonucleotide
tttgcttcccaagcacaa

SEQ ID NO: 6319 - DNA, 18 bp, Artificial Sequence
  Description of Artificial Sequence: Synthetic oligonucleotide
tgtgctttgcttcccaag

SEQ ID NO: 6320 - DNA, 18 bp, Artificial Sequence
  Description of Artificial Sequence: Synthetic oligonucleotide
caccatgtgctttgcttc

SEQ ID NO: 6321 - DNA, 18 bp, Artificial Sequence
  Description of Artificial Sequence: Synthetic oligonucleotide
acacacaccatgtgcttt

SEQ ID NO: 6322 - DNA, 18 bp, Artificial Sequence
  Description of Artificial Sequence: Synthetic oligonucleotide
ctaacacacacaccatgt

SEQ ID NO: 6323 - DNA, 18 bp, Artificial Sequence
  Description of Artificial Sequence: Synthetic oligonucleotide
cccttctaacacacacac

SEQ ID NO: 6324 - DNA, 18 bp, Artificial Sequence
  Description of Artificial Sequence: Synthetic oligonucleotide
gacagcccttctaacaca

SEQ ID NO: 6325 - DNA, 18 bp, Artificial Sequence
  Description of Artificial Sequence: Synthetic oligonucleotide
tgctagacagcccttcta

SEQ ID NO: 6326 - DNA, 18 bp, Artificial Sequence
  Description of Artificial Sequence: Synthetic oligonucleotide
ggaggtgctagacagccc

SEQ ID NO: 6327 - DNA, 18 bp, Artificial Sequence
  Description of Artificial Sequence: Synthetic oligonucleotide
ataaaattatcaccgtta

SEQ ID NO: 6328 - DNA, 18 bp, Artificial Sequence
  Description of Artificial Sequence: Synthetic oligonucleotide
agcgtataaaattatcac

SEQ ID NO: 6329 - DNA, 18 bp, Artificial Sequence
  Description of Artificial Sequence: Synthetic oligonucleotide
agaatagcgtataaaatt

SEQ ID NO: 6330 - DNA, 18 bp, Artificial Sequence
  Description of Artificial Sequence: Synthetic oligonucleotide
ggctcagaatagcgtata

SEQ ID NO: 6331 - DNA, 18 bp, Artificial Sequence
  Description of Artificial Sequence: Synthetic oligonucleotide
ctgctggctcagaatagc

SEQ ID NO: 6332 - DNA, 18 bp, Artificial Sequence
  Description of Artificial Sequence: Synthetic oligonucleotide
cacttctgctggctcaga

SEQ ID NO: 6333 - DNA, 18 bp, Artificial Sequence
  Description of Artificial Sequence: Synthetic oligonucleotide
gccttcacttctgctggc

SEQ ID NO: 6334 - DNA, 18 bp, Artificial Sequence
  Description of Artificial Sequence: Synthetic oligonucleotide
ttaaggccttcacttctg

SEQ ID NO: 6335 - DNA, 18 bp, Artificial Sequence
  Description of Artificial Sequence: Synthetic oligonucleotide
tcggcttaaggccttcac

SEQ ID NO: 6336 - DNA, 18 bp, Artificial Sequence
  Description of Artificial Sequence: Synthetic oligonucleotide
taaaatcggcttaaggcc

SEQ ID NO: 6337 - DNA, 18 bp, Artificial Sequence
  Description of Artificial Sequence: Synthetic oligonucleotide
acaattaaaatcggctta

SEQ ID NO: 6338 - DNA, 18 bp, Artificial Sequence
  Description of Artificial Sequence: Synthetic oligonucleotide
tcgaaacaattaaaatcg

SEQ ID NO: 6339 - DNA, 18 bp, Artificial Sequence
  Description of Artificial Sequence: Synthetic oligonucleotide
tataatcgaaacaattaa

SEQ ID NO: 6340 - DNA, 18 bp, Artificial Sequence
  Description of Artificial Sequence: Synthetic oligonucleotide
ctcagtataatcgaaaca

SEQ ID NO: 6341 - DNA, 18 bp, Artificial Sequence
  Description of Artificial Sequence: Synthetic oligonucleotide
gacctctcagtataatcg

SEQ ID NO: 6342 - DNA, 18 bp, Artificial Sequence
  Description of Artificial Sequence: Synthetic oligonucleotide
taaaagacctctcagtat

SEQ ID NO: 6343 - DNA, 18 bp, Artificial Sequence
  Description of Artificial Sequence: Synthetic oligonucleotide
ggaaataaaagacctctc

SEQ ID NO: 6344 - DNA, 18 bp, Artificial Sequence
  Description of Artificial Sequence: Synthetic oligonucleotide
ctacaggaaataaaagac

SEQ ID NO: 6345 - DNA, 18 bp, Artificial Sequence
  Description of Artificial Sequence: Synthetic oligonucleotide
acacactacaggaaataa

SEQ ID NO: 6346 - DNA, 18 bp, Artificial Sequence
  Description of Artificial Sequence: Synthetic oligonucleotide
tcagcacacactacagga

SEQ ID NO: 6347 - DNA, 18 bp, Artificial Sequence
  Description of Artificial Sequence: Synthetic oligonucleotide
tcaagtcagcacacacta

SEQ ID NO: 6348 - DNA, 18 bp, Artificial Sequence
  Description of Artificial Sequence: Synthetic oligonucleotide
ttatcaagtcagcacaca

SEQ ID NO: 6349 - DNA, 18 bp, Artificial Sequence
  Description of Artificial Sequence: Synthetic oligonucleotide
gcctcttatcaagtcagc

SEQ ID NO: 6350 - DNA, 18 bp, Artificial Sequence
  Description of Artificial Sequence: Synthetic oligonucleotide
tttgcgcctcttatcaag

SEQ ID NO: 6351 - DNA, 18 bp, Artificial Sequence
  Description of Artificial Sequence: Synthetic oligonucleotide
tttcttttgcgcctctta

SEQ ID NO: 6352 - DNA, 18 bp, Artificial Sequence
  Description of Artificial Sequence: Synthetic oligonucleotide
attcttttcttttgcgcc

SEQ ID NO: 6353 - DNA, 18 bp, Artificial Sequence
  Description of Artificial Sequence: Synthetic oligonucleotide
ttgagattcttttctttt

SEQ ID NO: 6354 - DNA, 18 bp, Artificial Sequence
  Description of Artificial Sequence: Synthetic oligonucleotide
tcactttgagattctttt

SEQ ID NO: 6355 - DNA, 18 bp, Artificial Sequence
  Description of Artificial Sequence: Synthetic oligonucleotide
tcctttcactttgagatt

SEQ ID NO: 6356 - DNA, 18 bp, Artificial Sequence
  Description of Artificial Sequence: Synthetic oligonucleotide
aactggtcctttcacttt

SEQ ID NO: 6357 - DNA, 18 bp, Artificial Sequence
  Description of Artificial Sequence: Synthetic oligonucleotide
attcgaactggtcctttc

SEQ ID NO: 6358 - DNA, 18 bp, Artificial Sequence
  Description of Artificial Sequence: Synthetic oligonucleotide
taggcattcgaactggtc

SEQ ID NO: 6359 - DNA, 18 bp, Artificial Sequence
  Description of Artificial Sequence: Synthetic oligonucleotide
cttggtaggcattcgaac

SEQ ID NO: 6360 - DNA, 18 bp, Artificial Sequence
  Description of Artificial Sequence: Synthetic oligonucleotide
taccttggtaggcattcg

SEQ ID NO: 6361 - DNA, 18 bp, Artificial Sequence
  Description of Artificial Sequence: Synthetic oligonucleotide
tactttaccttggtaggc

SEQ ID NO: 6362 - DNA, 18 bp, Artificial Sequence
  Description of Artificial Sequence: Synthetic oligonucleotide
cgatttactttaccttgg

SEQ ID NO: 6363 - DNA, 18 bp, Artificial Sequence
  Description of Artificial Sequence: Synthetic oligonucleotide
ccctccgatttactttac

SEQ ID NO: 6364 - DNA, 18 bp, Artificial Sequence
  Description of Artificial Sequence: Synthetic oligonucleotide
cctgcccctccgatttac

SEQ ID NO: 6365 - DNA, 18 bp, Artificial Sequence
  Description of Artificial Sequence: Synthetic oligonucleotide
tacttcctgcccctccga

SEQ ID NO: 6366 - DNA, 18 bp, Artificial Sequence
  Description of Artificial Sequence: Synthetic oligonucleotide
actcctacttcctgcccc

SEQ ID NO: 6367 - DNA, 18 bp, Artificial Sequence
  Description of Artificial Sequence: Synthetic oligonucleotide
aagcaactcctacttcct

SEQ ID NO: 6368 - DNA, 18 bp, Artificial Sequence
  Description of Artificial Sequence: Synthetic oligonucleotide
tccggaagcaactcctac

SEQ ID NO: 6369 - DNA, 18 bp, Artificial Sequence
  Description of Artificial Sequence: Synthetic oligonucleotide
caacatccggaagcaact

SEQ ID NO: 6370 - DNA, 18 bp, Artificial Sequence
  Description of Artificial Sequence: Synthetic oligonucleotide
ttatgcaacatccggaag

SEQ ID NO: 6371 - DNA, 18 bp, Artificial Sequence
  Description of Artificial Sequence: Synthetic oligonucleotide
tgaatttatgcaacatcc

SEQ ID NO: 6372 - DNA, 18 bp, Artificial Sequence
  Description of Artificial Sequence: Synthetic oligonucleotide
gaacctgaatttatgcaa

SEQ ID NO: 6373 - DNA, 18 bp, Artificial Sequence
  Description of Artificial Sequence: Synthetic oligonucleotide
ttaaagaacctgaattta

SEQ ID NO: 6374 - DNA, 18 bp, Artificial Sequence
  Description of Artificial Sequence: Synthetic oligonucleotide
actccttaaagaacctga

SEQ ID NO: 6375 - DNA, 18 bp, Artificial Sequence
  Description of Artificial Sequence: Synthetic oligonucleotide
gccgaactccttaaagaa

SEQ ID NO: 6376 - DNA, 18 bp, Artificial Sequence
  Description of Artificial Sequence: Synthetic oligonucleotide
tggcagccgaactcctta

SEQ ID NO: 6377 - DNA, 18 bp, Artificial Sequence
  Description of Artificial Sequence: Synthetic oligonucleotide
aattttggcagccgaact

SEQ ID NO: 6378 - DNA, 18 bp, Artificial Sequence
  Description of Artificial Sequence: Synthetic oligonucleotide
ttaacaattttggcagcc

SEQ ID NO: 6379 - DNA, 18 bp, Artificial Sequence
  Description of Artificial Sequence: Synthetic oligonucleotide
cagtgttaacaattttgg

SEQ ID NO: 6380 - DNA, 18 bp, Artificial Sequence
  Description of Artificial Sequence: Synthetic oligonucleotide
agcatcagtgttaacaat

SEQ ID NO: 6381 - DNA, 18 bp, Artificial Sequence
  Description of Artificial Sequence: Synthetic oligonucleotide
tttaatatttctgagacc

SEQ ID NO: 6382 - DNA, 18 bp, Artificial Sequence
  Description of Artificial Sequence: Synthetic oligonucleotide
gaacatttaatatttctg

SEQ ID NO: 6383 - DNA, 18 bp, Artificial Sequence
  Description of Artificial Sequence: Synthetic oligonucleotide
aaactgaacatttaatat

SEQ ID NO: 6384 - DNA, 18 bp, Artificial Sequence
  Description of Artificial Sequence: Synthetic oligonucleotide
aattcaaactgaacattt

SEQ ID NO: 6385 - DNA, 18 bp, Artificial Sequence
  Description of Artificial Sequence: Synthetic oligonucleotide
aaactaattcaaactgaa

SEQ ID NO: 6386 - DNA, 18 bp, Artificial Sequence
  Description of Artificial Sequence: Synthetic oligonucleotide
gtaataaactaattcaaa

SEQ ID NO: 6387 - DNA, 18 bp, Artificial Sequence
  Description of Artificial Sequence: Synthetic oligonucleotide
tttctgtaataaactaat

SEQ ID NO: 6388 - DNA, 18 bp, Artificial Sequence
  Description of Artificial Sequence: Synthetic oligonucleotide
aagcttttctgtaataaa

SEQ ID NO: 6389 - DNA, 18 bp, Artificial Sequence
  Description of Artificial Sequence: Synthetic oligonucleotide
ccaagaagcttttctgta

SEQ ID NO: 6390 - DNA, 18 bp, Artificial Sequence
  Description of Artificial Sequence: Synthetic oligonucleotide
gcaaaccaagaagctttt

SEQ ID NO: 6391 - DNA, 18 bp, Artificial Sequence
  Description of Artificial Sequence: Synthetic oligonucleotide
atactgcaaaccaagaag

SEQ ID NO: 6392 - DNA, 18 bp, Artificial Sequence
  Description of Artificial Sequence: Synthetic oligonucleotide
atttcatactgcaaacca

SEQ ID NO: 6393 - DNA, 18 bp, Artificial Sequence
  Description of Artificial Sequence: Synthetic oligonucleotide
tgcagatttcatactgca

SEQ ID NO: 6394 - DNA, 18 bp, Artificial Sequence
  Description of Artificial Sequence: Synthetic oligonucleotide
ttagttgcagatttcata

SEQ ID NO: 6395 - DNA, 18 bp, Artificial Sequence
  Description of Artificial Sequence: Synthetic oligonucleotide
aaactttagttgcagatt

SEQ ID NO: 6396 - DNA, 18 bp, Artificial Sequence
  Description of Artificial Sequence: Synthetic oligonucleotide
agtgtaaactttagttgc

SEQ ID NO: 6397 - DNA, 18 bp, Artificial Sequence
  Description of Artificial Sequence: Synthetic oligonucleotide
taaaaagtgtaaacttta

SEQ ID NO: 6398 - DNA, 18 bp, Artificial Sequence
  Description of Artificial Sequence: Synthetic oligonucleotide
ctaagtaaaaagtgtaaa

SEQ ID NO: 6399 - DNA, 18 bp, Artificial Sequence
  Description of Artificial Sequence: Synthetic oligonucleotide
tctgcctaagtaaaaagt

SEQ ID NO: 6400 - DNA, 18 bp, Artificial Sequence
  Description of Artificial Sequence: Synthetic oligonucleotide
tattttctgcctaagtaa

SEQ ID NO: 6401 - DNA, 18 bp, Artificial Sequence
  Description of Artificial Sequence: Synthetic oligonucleotide
gtatatattttctgccta

SEQ ID NO: 6402 - DNA, 18 bp, Artificial Sequence
  Description of Artificial Sequence: Synthetic oligonucleotide
tcagtatatattttctgc

SEQ ID NO: 6403 - DNA, 18 bp, Artificial Sequence
  Description of Artificial Sequence: Synthetic oligonucleotide
tgtcttcagtatatattt

SEQ ID NO: 6404 - DNA, 18 bp, Artificial Sequence
  Description of Artificial Sequence: Synthetic oligonucleotide
ggccatgtcttcagtata

SEQ ID NO: 6405 - DNA, 18 bp, Artificial Sequence
  Description of Artificial Sequence: Synthetic oligonucleotide
ccaaaggccatgtcttca

SEQ ID NO: 6406 - DNA, 18 bp, Artificial Sequence
  Description of Artificial Sequence: Synthetic oligonucleotide
aagctccaaaggccatgt

SEQ ID NO: 6407 - DNA, 18 bp, Artificial Sequence
  Description of Artificial Sequence: Synthetic oligonucleotide
agttgaagctccaaaggc

SEQ ID NO: 6408 - DNA, 18 bp, Artificial Sequence
  Description of Artificial Sequence: Synthetic oligonucleotide
ggaaaagttgaagctcca

SEQ ID NO: 6409 - DNA, 18 bp, Artificial Sequence
  Description of Artificial Sequence: Synthetic oligonucleotide
gaggtggaaaagttgaag

SEQ ID NO: 6410 - DNA, 18 bp, Artificial Sequence
  Description of Artificial Sequence: Synthetic oligonucleotide
atactgaggtggaaaagt

SEQ ID NO: 6411 - DNA, 18 bp, Artificial Sequence
  Description of Artificial Sequence: Synthetic oligonucleotide
gataaatactgaggtgga

SEQ ID NO: 6412 - DNA, 18 bp, Artificial Sequence
  Description of Artificial Sequence: Synthetic oligonucleotide
cagaagataaatactgag

SEQ ID NO: 6413 - DNA, 18 bp, Artificial Sequence
  Description of Artificial Sequence: Synthetic oligonucleotide
tatctcagaagataaata

SEQ ID NO: 6414 - DNA, 18 bp, Artificial Sequence
  Description of Artificial Sequence: Synthetic oligonucleotide
agagttatctcagaagat

SEQ ID NO: 6415 - DNA, 18 bp, Artificial Sequence
  Description of Artificial Sequence: Synthetic oligonucleotide
gatgaagagttatctcag

SEQ ID NO: 6416 - DNA, 18 bp, Artificial Sequence
  Description of Artificial Sequence: Synthetic oligonucleotide
atatggatgaagagttat

SEQ ID NO: 6417 - DNA, 18 bp, Artificial Sequence
  Description of Artificial Sequence: Synthetic oligonucleotide
taggcatatggatgaaga

SEQ ID NO: 6418 - DNA, 18 bp, Artificial Sequence
  Description of Artificial Sequence: Synthetic oligonucleotide
gagaataggcatatggat

SEQ ID NO: 6419 - DNA, 18 bp, Artificial Sequence
  Description of Artificial Sequence: Synthetic oligonucleotide
ataaggagaataggcata

SEQ ID NO: 6420 - DNA, 18 bp, Artificial Sequence
  Description of Artificial Sequence: Synthetic oligonucleotide
agggtataaggagaatag

SEQ ID NO: 6421 - DNA, 18 bp, Artificial Sequence
  Description of Artificial Sequence: Synthetic oligonucleotide
agtcaagggtataaggag

SEQ ID NO: 6422 - DNA, 18 bp, Artificial Sequence
  Description of Artificial Sequence: Synthetic oligonucleotide
tgtggagtcaagggtata

SEQ ID NO: 6423 - DNA, 18 bp, Artificial Sequence
  Description of Artificial Sequence: Synthetic oligonucleotide
ttctgtgtggagtcaagg

SEQ ID NO: 6424 - DNA, 18 bp, Artificial Sequence
  Description of Artificial Sequence: Synthetic oligonucleotide
aaacattctgtgtggagt

SEQ ID NO: 6425 - DNA, 18 bp, Artificial Sequence
  Description of Artificial Sequence: Synthetic oligonucleotide
tgagtaaacattctgtgt

SEQ ID NO: 6426 - DNA, 18 bp, Artificial Sequence
  Description of Artificial Sequence: Synthetic oligonucleotide
ggcactgagtaaacattc

SEQ ID NO: 6427 - DNA, 18 bp, Artificial Sequence
  Description of Artificial Sequence: Synthetic oligonucleotide
ggagccaggcactgagta

SEQ ID NO: 6428 - DNA, 18 bp, Artificial Sequence
  Description of Artificial Sequence: Synthetic oligonucleotide
tactgggagccaggcact

SEQ ID NO: 6429 - DNA, 18 bp, Artificial Sequence
  Description of Artificial Sequence: Synthetic oligonucleotide
aaagatactgggagccag

SEQ ID NO: 6430 - DNA, 18 bp, Artificial Sequence
  Description of Artificial Sequence: Synthetic oligonucleotide
gttataaagatactggga

SEQ ID NO: 6431 - DNA, 18 bp, Artificial Sequence
  Description of Artificial Sequence: Synthetic oligonucleotide
ggttggttataaagatac

SEQ ID NO: 6432 - DNA, 18 bp, Artificial Sequence
  Description of Artificial Sequence: Synthetic oligonucleotide
aactgggttggttataaa

SEQ ID NO: 6433 - DNA, 18 bp, Artificial Sequence
  Description of Artificial Sequence: Synthetic oligonucleotide
gtaacaactgggttggtt

SEQ ID NO: 6434 - DNA, 18 bp, Artificial Sequence
  Description of Artificial Sequence: Synthetic oligonucleotide
cctcggtaacaactgggt

SEQ ID NO: 6435 - DNA, 18 bp, Artificial Sequence
  Description of Artificial Sequence: Synthetic oligonucleotide
gaaaacctcggtaacaac

SEQ ID NO: 6436 - DNA, 18 bp, Artificial Sequence
  Description of Artificial Sequence: Synthetic oligonucleotide
tgtttgaaaacctcggta

SEQ ID NO: 6437 - DNA, 18 bp, Artificial Sequence
  Description of Artificial Sequence: Synthetic oligonucleotide
ttcactgtttgaaaacct

SEQ ID NO: 6438 - DNA, 18 bp, Artificial Sequence
  Description of Artificial Sequence: Synthetic oligonucleotide
gatgcttcactgtttgaa

SEQ ID NO: 6439 - DNA, 18 bp, Artificial Sequence
  Description of Artificial Sequence: Synthetic oligonucleotide
atttcgatgcttcactgt

SEQ ID NO: 6440 - DNA, 18 bp, Artificial Sequence
  Description of Artificial Sequence: Synthetic oligonucleotide
ttctcatttcgatgcttc

SEQ ID NO: 6441 - DNA, 18 bp, Artificial Sequence
  Description of Artificial Sequence: Synthetic oligonucleotide
atgtgttctcatttcgat

SEQ ID NO: 6442 - DNA, 18 bp, Artificial Sequence
  Description of Artificial Sequence: Synthetic oligonucleotide
agggcatgtgttctcatt

SEQ ID NO: 6443 - DNA, 18 bp, Artificial Sequence
  Description of Artificial Sequence: Synthetic oligonucleotide
gggagagggcatgtgttc

SEQ ID NO: 6444 - DNA, 18 bp, Artificial Sequence
  Description of Artificial Sequence: Synthetic oligonucleotide
cttgtgggagagggcatg

SEQ ID NO: 6445 - DNA, 18 bp, Artificial Sequence
  Description of Artificial Sequence: Synthetic oligonucleotide
catttcttgtgggagagg

SEQ ID NO: 6446 - DNA, 18 bp, Artificial Sequence
  Description of Artificial Sequence: Synthetic oligonucleotide
gctttcatttcttgtggg

SEQ ID NO: 6447 - DNA, 18 bp, Artificial Sequence
  Description of Artificial Sequence: Synthetic oligonucleotide
acagagctttcatttctt

SEQ ID NO: 6448 - DNA, 18 bp, Artificial Sequence
  Description of Artificial Sequence: Synthetic oligonucleotide
cttaaacagagctttcat

SEQ ID NO: 6449 - DNA, 18 bp, Artificial Sequence
  Description of Artificial Sequence: Synthetic oligonucleotide
caccttaaacagagcttt

SEQ ID NO: 6450 - DNA, 18 bp, Artificial Sequence
  Description of Artificial Sequence: Synthetic oligonucleotide
ctactcaccttaaacaga

SEQ ID NO: 6451 - DNA, 18 bp, Artificial Sequence
  Description of Artificial Sequence: Synthetic oligonucleotide
catcactactcaccttaa

SEQ ID NO: 6452 - DNA, 18 bp, Artificial Sequence
  Description of Artificial Sequence: Synthetic oligonucleotide
aacaacatcactactcac

SEQ ID NO: 6453 - DNA, 18 bp, Artificial Sequence
  Description of Artificial Sequence: Synthetic oligonucleotide
aacaaaacaacatcacta

SEQ ID NO: 6454 - DNA, 18 bp, Artificial Sequence
  Description of Artificial Sequence: Synthetic oligonucleotide
gacacaacaaaacaacat

SEQ ID NO: 6455 - DNA, 18 bp, Artificial Sequence
  Description of Artificial Sequence: Synthetic oligonucleotide
taaaggacacaacaaaac

SEQ ID NO: 6456 - DNA, 18 bp, Artificial Sequence
  Description of Artificial Sequence: Synthetic oligonucleotide
ccaactaaaggacacaac

SEQ ID NO: 6457 - DNA, 18 bp, Artificial Sequence
  Description of Artificial Sequence: Synthetic oligonucleotide
agcaaccaactaaaggac

SEQ ID NO: 6458 - DNA, 18 bp, Artificial Sequence
  Description of Artificial Sequence: Synthetic oligonucleotide
attaaagcaaccaactaa

SEQ ID NO: 6459 - DNA, 18 bp, Artificial Sequence
  Description of Artificial Sequence: Synthetic oligonucleotide
taaacattaaagcaacca

SEQ ID NO: 6460 - DNA, 18 bp, Artificial Sequence
  Description of Artificial Sequence: Synthetic oligonucleotide
cattttaaacattaaagc

SEQ ID NO: 6461 - DNA, 18 bp, Artificial Sequence
  Description of Artificial Sequence: Synthetic oligonucleotide
ctttacattttaaacatt

SEQ ID NO: 6462 - DNA, 18 bp, Artificial Sequence
  Description of Artificial Sequence: Synthetic oligonucleotide
catttctttacattttaa

SEQ ID NO: 6463 - DNA, 18 bp, Artificial Sequence
  Description of Artificial Sequence: Synthetic oligonucleotide
tttaccatttctttacat

SEQ ID NO: 6464 - DNA, 18 bp, Artificial Sequence
  Description of Artificial Sequence: Synthetic oligonucleotide
acaaatttaccatttctt

SEQ ID NO: 6465 - DNA, 18 bp, Artificial Sequence
  Description of Artificial Sequence: Synthetic oligonucleotide
gatgtacaaatttaccat

SEQ ID NO: 6466 - DNA, 18 bp, Artificial Sequence
  Description of Artificial Sequence: Synthetic oligonucleotide
aatatgatgtacaaattt

SEQ ID NO: 6467 - DNA, 18 bp, Artificial Sequence
  Description of Artificial Sequence: Synthetic oligonucleotide
acttaaatatgatgtaca

SEQ ID NO: 6468 - DNA, 18 bp, Artificial Sequence
  Description of Artificial Sequence: Synthetic oligonucleotide
atgatacttaaatatgat

SEQ ID NO: 6469 - DNA, 18 bp, Artificial Sequence
  Description of Artificial Sequence: Synthetic oligonucleotide
aatacatgatacttaaat

SEQ ID NO: 6470 - DNA, 18 bp, Artificial Sequence
  Description of Artificial Sequence: Synthetic oligonucleotide
gacacggactcggggccc

SEQ ID NO: 6471 - DNA, 18 bp, Artificial Sequence
  Description of Artificial Sequence: Synthetic oligonucleotide
aatatgacacggactcgg

SEQ ID NO: 6472 - DNA, 18 bp, Artificial Sequence
  Description of Artificial Sequence: Synthetic oligonucleotide
tagtgaatatgacacgga

SEQ ID NO: 6473 - DNA, 18 bp, Artificial Sequence
  Description of Artificial Sequence: Synthetic oligonucleotide
tggtgtagtgaatatgac

SEQ ID NO: 6474 - DNA, 18 bp, Artificial Sequence
  Description of Artificial Sequence: Synthetic oligonucleotide
tcgtgtggtgtagtgaat

SEQ ID NO: 6475 - DNA, 18 bp, Artificial Sequence
  Description of Artificial Sequence: Synthetic oligonucleotide
cggggtcgtgtggtgtag

SEQ ID NO: 6476 - DNA, 18 bp, Artificial Sequence
  Description of Artificial Sequence: Synthetic oligonucleotide
gcagccggggtcgtgtgg

SEQ ID NO: 6477 - DNA, 18 bp, Artificial Sequence
  Description of Artificial Sequence: Synthetic oligonucleotide
ctgatgcagccggggtcg

SEQ ID NO: 6478 - DNA, 18 bp, Artificial Sequence
  Description of Artificial Sequence: Synthetic oligonucleotide
gagggctgatgcagccgg

SEQ ID NO: 6479 - DNA, 18 bp, Artificial Sequence
  Description of Artificial Sequence: Synthetic oligonucleotide
gggaggagggctgatgca

SEQ ID NO: 6480 - DNA, 18 bp, Artificial Sequence
  Description of Artificial Sequence: Synthetic oligonucleotide
agggtgggaggagggctg

SEQ ID NO: 6481 - DNA, 18 bp, Artificial Sequence
  Description of Artificial Sequence: Synthetic oligonucleotide
ccgggagggtgggaggag

SEQ ID NO: 6482 - DNA, 18 bp, Artificial Sequence
  Description of Artificial Sequence: Synthetic oligonucleotide
gggccccgggagggtggg

SEQ ID NO: 6483 - DNA, 18 bp, Artificial Sequence
  Description of Artificial Sequence: Synthetic oligonucleotide
cagcagggccccgggagg

SEQ ID NO: 6484 - DNA, 18 bp, Artificial Sequence
  Description of Artificial Sequence: Synthetic oligonucleotide
cagtccagcagggccccg

SEQ ID NO: 6485 - DNA, 18 bp, Artificial Sequence
  Description of Artificial Sequence: Synthetic oligonucleotide
acagacagtccagcaggg

SEQ ID NO: 6486 - DNA, 18 bp, Artificial Sequence
  Description of Artificial Sequence: Synthetic oligonucleotide
ggtggacagacagtccag

SEQ ID NO: 6487 - DNA, 18 bp, Artificial Sequence
  Description of Artificial Sequence: Synthetic oligonucleotide
ctgaaggtggacagacag

SEQ ID NO: 6488 - DNA, 18 bp, Artificial Sequence
  Description of Artificial Sequence: Synthetic oligonucleotide
atgacctgaaggtggaca

SEQ ID NO: 6489 - DNA, 18 bp, Artificial Sequence
  Description of Artificial Sequence: Synthetic oligonucleotide
gacacatgacctgaaggt

SEQ ID NO: 6490 - DNA, 18 bp, Artificial Sequence
  Description of Artificial Sequence: Synthetic oligonucleotide
ctggagacacatgacctg

SEQ ID NO: 6491 - DNA, 18 bp, Artificial Sequence
  Description of Artificial Sequence: Synthetic oligonucleotide
gagctggagacacatgac

SEQ ID NO: 6492 - DNA, 18 bp, Artificial Sequence
  Description of Artificial Sequence: Synthetic oligonucleotide
gggaagagctggagacac

SEQ ID NO: 6493 - DNA, 18 bp, Artificial Sequence
  Description of Artificial Sequence: Synthetic oligonucleotide
gtgctgggaagagctgga

SEQ ID NO: 6494 - DNA, 18 bp, Artificial Sequence
  Description of Artificial Sequence: Synthetic oligonucleotide
aggttgtgctgggaagag

SEQ ID NO: 6495 - DNA, 18 bp, Artificial Sequence
  Description of Artificial Sequence: Synthetic oligonucleotide
gggtgaggttgtgctggg

SEQ ID NO: 6496 - DNA, 18 bp, Artificial Sequence
  Description of Artificial Sequence: Synthetic oligonucleotide
gaggagggtgaggttgtg

SEQ ID NO: 6497 - DNA, 18 bp, Artificial Sequence
  Description of Artificial Sequence: Synthetic oligonucleotide
gccctgaggagggtgagg

SEQ ID NO: 6498 - DNA, 18 bp, Artificial Sequence
  Description of Artificial Sequence: Synthetic oligonucleotide
tcagagccctgaggaggg

SEQ ID NO: 6499 - DNA, 18 bp, Artificial Sequence
  Description of Artificial Sequence: Synthetic oligonucleotide
ccccctcagagccctgag

SEQ ID NO: 6500 - DNA, 18 bp, Artificial Sequence
  Description of Artificial Sequence: Synthetic oligonucleotide
ctccgccccctcagagcc

SEQ ID NO: 6501 - DNA, 18 bp, Artificial Sequence
  Description of Artificial Sequence: Synthetic oligonucleotide
gtcctctccgccccctca

SEQ ID NO: 6502 - DNA, 18 bp, Artificial Sequence
  Description of Artificial Sequence: Synthetic oligonucleotide
ggcctgtcctctccgccc

SEQ ID NO: 6503 - DNA, 18 bp, Artificial Sequence
  Description of Artificial Sequence: Synthetic oligonucleotide
gctctggcctgtcctctc

SEQ ID NO: 6504 - DNA, 18 bp, Artificial Sequence
  Description of Artificial Sequence: Synthetic oligonucleotide
tcatcgctctggcctgtc

SEQ ID NO: 6505 - DNA, 18 bp, Artificial Sequence
  Description of Artificial Sequence: Synthetic oligonucleotide
cagcctcatcgctctggc

SEQ ID NO: 6506 - DNA, 18 bp, Artificial Sequence
  Description of Artificial Sequence: Synthetic oligonucleotide
cactccagcctcatcgct

SEQ ID NO: 6507 - DNA, 18 bp, Artificial Sequence
  Description of Artificial Sequence: Synthetic oligonucleotide
gtccccactccagcctca

SEQ ID NO: 6508 - DNA, 18 bp, Artificial Sequence
  Description of Artificial Sequence: Synthetic oligonucleotide
cctaggtccccactccag

SEQ ID NO: 6509 - DNA, 18 bp, Artificial Sequence
  Description of Artificial Sequence: Synthetic oligonucleotide
gctggcctaggtccccac

SEQ ID NO: 6510 - DNA, 18 bp, Artificial Sequence
  Description of Artificial Sequence: Synthetic oligonucleotide
gtgcggctggcctaggtc

SEQ ID NO: 6511 - DNA, 18 bp, Artificial Sequence
  Description of Artificial Sequence: Synthetic oligonucleotide
cggcagtgcggctggcct

SEQ ID NO: 6512 - DNA, 18 bp, Artificial Sequence
  Description of Artificial Sequence: Synthetic oligonucleotide
ggccacggcagtgcggct

SEQ ID NO: 6513 - DNA, 18 bp, Artificial Sequence
  Description of Artificial Sequence: Synthetic oligonucleotide
cagcgggccacggcagtg

SEQ ID NO: 6514 - DNA, 18 bp, Artificial Sequence
  Description of Artificial Sequence: Synthetic oligonucleotide
catcccagcgggccacgg

SEQ ID NO: 6515 - DNA, 18 bp, Artificial Sequence
  Description of Artificial Sequence: Synthetic oligonucleotide
gcacacatcccagcgggc

SEQ ID NO: 6516 - DNA, 18 bp, Artificial Sequence
  Description of Artificial Sequence: Synthetic oligonucleotide
ctgcagcacacatcccag

SEQ ID NO: 6517 - DNA, 18 bp, Artificial Sequence
  Description of Artificial Sequence: Synthetic oligonucleotide
cgcacgttctgcagcaca

SEQ ID NO: 6518 - DNA, 18 bp, Artificial Sequence
  Description of Artificial Sequence: Synthetic oligonucleotide
ccctccgcacgttctgca

SEQ ID NO: 6519 - DNA, 18 bp, Artificial Sequence
  Description of Artificial Sequence: Synthetic oligonucleotide
aggctccctccgcacgtt

SEQ ID NO: 6520 - DNA, 18 bp, Artificial Sequence
  Description of Artificial Sequence: Synthetic oligonucleotide
ggtgaaggctccctccgc

SEQ ID NO: 6521 - DNA, 18 bp, Artificial Sequence
  Description of Artificial Sequence: Synthetic oligonucleotide
tggagggtgaaggctccc

SEQ ID NO: 6522 - DNA, 18 bp, Artificial Sequence
  Description of Artificial Sequence: Synthetic oligonucleotide
cgctctggagggtgaagg

SEQ ID NO: 6523 - DNA, 18 bp, Artificial Sequence
  Description of Artificial Sequence: Synthetic oligonucleotide
ggccacgctctggagggt

SEQ ID NO: 6524 - DNA, 18 bp, Artificial Sequence
  Description of Artificial Sequence: Synthetic oligonucleotide
ggctgggccacgctctgg

SEQ ID NO: 6525 - DNA, 18 bp, Artificial Sequence
  Description of Artificial Sequence: Synthetic oligonucleotide
gcattggctgggccacgc

SEQ ID NO: 6526 - DNA, 18 bp, Artificial Sequence
  Description of Artificial Sequence: Synthetic oligonucleotide
ggggcgcattggctgggc

SEQ ID NO: 6527 - DNA, 18 bp, Artificial Sequence
  Description of Artificial Sequence: Synthetic oligonucleotide
gcaatggggcgcattggc

SEQ ID NO: 6528 - DNA, 18 bp, Artificial Sequence
  Description of Artificial Sequence: Synthetic oligonucleotide
tggaagcaatggggcgca

SEQ ID NO: 6529 - DNA, 18 bp, Artificial Sequence
  Description of Artificial Sequence: Synthetic oligonucleotide
agctgtggaagcaatggg

SEQ ID NO: 6530 - DNA, 18 bp, Artificial Sequence
  Description of Artificial Sequence: Synthetic oligonucleotide
ttcgtagctgtggaagca

SEQ ID NO: 6531 - DNA, 18 bp, Artificial Sequence
  Description of Artificial Sequence: Synthetic oligonucleotide
cacatttcgtagctgtgg

SEQ ID NO: 6532 - DNA, 18 bp, Artificial Sequence
  Description of Artificial Sequence: Synthetic oligonucleotide
attcccacatttcgtagc

SEQ ID NO: 6533 - DNA, 18 bp, Artificial Sequence
  Description of Artificial Sequence: Synthetic oligonucleotide
ccacaattcccacatttc

SEQ ID NO: 6534 - DNA, 18 bp, Artificial Sequence
  Description of Artificial Sequence: Synthetic oligonucleotide
cgggtccacaattcccac

SEQ ID NO: 6535 - DNA, 18 bp, Artificial Sequence
  Description of Artificial Sequence: Synthetic oligonucleotide
gtagccgggtccacaatt

SEQ ID NO: 6536 - DNA, 18 bp, Artificial Sequence
  Description of Artificial Sequence: Synthetic oligonucleotide
gtggagtagccgggtcca

SEQ ID NO: 6537 - DNA, 18 bp, Artificial Sequence
  Description of Artificial Sequence: Synthetic oligonucleotide
gaggggtggagtagccgg

SEQ ID NO: 6538 - DNA, 18 bp, Artificial Sequence
  Description of Artificial Sequence: Synthetic oligonucleotide
ctccagaggggtggagta

SEQ ID NO: 6539 - DNA, 18 bp, Artificial Sequence
  Description of Artificial Sequence: Synthetic oligonucleotide
atggcctccagaggggtg

SEQ ID NO: 6540 - DNA, 18 bp, Artificial Sequence
  Description of Artificial Sequence: Synthetic oligonucleotide
ctttcatggcctccagag

SEQ ID NO: 6541 - DNA, 18 bp, Artificial Sequence
  Description of Artificial Sequence: Synthetic oligonucleotide
tacctttcatggcctcca

SEQ ID NO: 6542 - DNA, 18 bp, Artificial Sequence
  Description of Artificial Sequence: Synthetic oligonucleotide
gcaattacctttcatggc

SEQ ID NO: 6543 - DNA, 18 bp, Artificial Sequence
  Description of Artificial Sequence: Synthetic oligonucleotide
catgggcaattacctttc

SEQ ID NO: 6544 - DNA, 18 bp, Artificial Sequence
  Description of Artificial Sequence: Synthetic oligonucleotide
cagaccatgggcaattac

SEQ ID NO: 6545 - DNA, 18 bp, Artificial Sequence
  Description of Artificial Sequence: Synthetic oligonucleotide
gctctcagaccatgggca

SEQ ID NO: 6546 - DNA, 18 bp, Artificial Sequence
  Description of Artificial Sequence: Synthetic oligonucleotide
cgctggctctcagaccat

SEQ ID NO: 6547 - DNA, 18 bp, Artificial Sequence
  Description of Artificial Sequence: Synthetic oligonucleotide
tagggcgctggctctcag

SEQ ID NO: 6548 - DNA, 18 bp, Artificial Sequence
  Description of Artificial Sequence: Synthetic oligonucleotide
agtagtagggcgctggct

SEQ ID NO: 6549 - DNA, 18 bp, Artificial Sequence
  Description of Artificial Sequence: Synthetic oligonucleotide
gaatcagtagtagggcgc

SEQ ID NO: 6550 - DNA, 18 bp, Artificial Sequence
  Description of Artificial Sequence: Synthetic oligonucleotide
ctgtggaatcagtagtag

SEQ ID NO: 6551 - DNA, 18 bp, Artificial Sequence
  Description of Artificial Sequence: Synthetic oligonucleotide
cccagctgtggaatcagt

SEQ ID NO: 6552 - DNA, 18 bp, Artificial Sequence
  Description of Artificial Sequence: Synthetic oligonucleotide
ccacccccagctgtggaa

SEQ ID NO: 6553 - DNA, 18 bp, Artificial Sequence
  Description of Artificial Sequence: Synthetic oligonucleotide
tccctccacccccagctg

SEQ ID NO: 6554 - DNA, 18 bp, Artificial Sequence
  Description of Artificial Sequence: Synthetic oligonucleotide
tgaagtccctccaccccc

SEQ ID NO: 6555 - DNA, 18 bp, Artificial Sequence
  Description of Artificial Sequence: Synthetic oligonucleotide
aggtctgaagtccctcca

SEQ ID NO: 6556 - DNA, 18 bp, Artificial Sequence
  Description of Artificial Sequence: Synthetic oligonucleotide
gggctaggtctgaagtcc

SEQ ID NO: 6557 - DNA, 18 bp, Artificial Sequence
  Description of Artificial Sequence: Synthetic oligonucleotide
ggtgggggctaggtctga

SEQ ID NO: 6558 - DNA, 18 bp, Artificial Sequence
  Description of Artificial Sequence: Synthetic oligonucleotide
cagagggtgggggctagg

SEQ ID NO: 6559 - DNA, 18 bp, Artificial Sequence
  Description of Artificial Sequence: Synthetic oligonucleotide
tgtgccagagggtggggg

SEQ ID NO: 6560 - DNA, 18 bp, Artificial Sequence
  Description of Artificial Sequence: Synthetic oligonucleotide
ctgggtgtgccagagggt

SEQ ID NO: 6561 - DNA, 18 bp, Artificial Sequence
  Description of Artificial Sequence: Synthetic oligonucleotide
aagtgctgggtgtgccag

SEQ ID NO: 6562 - DNA, 18 bp, Artificial Sequence
  Description of Artificial Sequence: Synthetic oligonucleotide
ttatataaaatggtactg

SEQ ID NO: 6563 - DNA, 18 bp, Artificial Sequence
  Description of Artificial Sequence: Synthetic oligonucleotide
tgctgttatataaaatgg

SEQ ID NO: 6564 - DNA, 18 bp, Artificial Sequence
  Description of Artificial Sequence: Synthetic oligonucleotide
atttatgctgttatataa

SEQ ID NO: 6565 - DNA, 18 bp, Artificial Sequence
  Description of Artificial Sequence: Synthetic oligonucleotide
gggtgatttatgctgtta

SEQ ID NO: 6566 - DNA, 18 bp, Artificial Sequence
  Description of Artificial Sequence: Synthetic oligonucleotide
tcactgggtgatttatgc

SEQ ID NO: 6567 - DNA, 18 bp, Artificial Sequence
  Description of Artificial Sequence: Synthetic oligonucleotide
taaaatcactgggtgatt

SEQ ID NO: 6568 - DNA, 18 bp, Artificial Sequence
  Description of Artificial Sequence: Synthetic oligonucleotide
taaagtaaaatcactggg

SEQ ID NO: 6569 - DNA, 18 bp, Artificial Sequence
  Description of Artificial Sequence: Synthetic oligonucleotide
gaagctaaagtaaaatca

SEQ ID NO: 6570 - DNA, 18 bp, Artificial Sequence
  Description of Artificial Sequence: Synthetic oligonucleotide
ggctggaagctaaagtaa

SEQ ID NO: 6571 - DNA, 18 bp, Artificial Sequence
  Description of Artificial Sequence: Synthetic oligonucleotide
gatatggctggaagctaa

SEQ ID NO: 6572 - DNA, 18 bp, Artificial Sequence
  Description of Artificial Sequence: Synthetic oligonucleotide
cataggatatggctggaa

SEQ ID NO: 6573 - DNA, 18 bp, Artificial Sequence
  Description of Artificial Sequence: Synthetic oligonucleotide
aatcacataggatatggc

SEQ ID NO: 6574 - DNA, 18 bp, Artificial Sequence
  Description of Artificial Sequence: Synthetic oligonucleotide
tttaaaatcacataggat

SEQ ID NO: 6575 - DNA, 18 bp, Artificial Sequence
  Description of Artificial Sequence: Synthetic oligonucleotide
tacattttaaaatcacat

SEQ ID NO: 6576 - DNA, 18 bp, Artificial Sequence
  Description of Artificial Sequence: Synthetic oligonucleotide
tatcatacattttaaaat

SEQ ID NO: 6577 - DNA, 18 bp, Artificial Sequence
  Description of Artificial Sequence: Synthetic oligonucleotide
gtagttatcatacatttt

SEQ ID NO: 6578 - DNA, 18 bp, Artificial Sequence
  Description of Artificial Sequence: Synthetic oligonucleotide
gtaaggtagttatcatac

SEQ ID NO: 6579 - DNA, 18 bp, Artificial Sequence
  Description of Artificial Sequence: Synthetic oligonucleotide
ctagggtaaggtagttat

SEQ ID NO: 6580 - DNA, 18 bp, Artificial Sequence
  Description of Artificial Sequence: Synthetic oligonucleotide
gtagactagggtaaggta

SEQ ID NO: 6581 - DNA, 18 bp, Artificial Sequence
  Description of Artificial Sequence: Synthetic oligonucleotide
ccgatgtagactagggta

SEQ ID NO: 6582 - DNA, 18 bp, Artificial Sequence
  Description of Artificial Sequence: Synthetic oligonucleotide
gtttaccgatgtagacta

SEQ ID NO: 6583 - DNA, 18 bp, Artificial Sequence
  Description of Artificial Sequence: Synthetic oligonucleotide
agagtttaccgatgtaga

SEQ ID NO: 6584 - DNA, 18 bp, Artificial Sequence
  Description of Artificial Sequence: Synthetic oligonucleotide
tttgcagagtttaccgat

SEQ ID NO: 6585 - DNA, 18 bp, Artificial Sequence
  Description of Artificial Sequence: Synthetic oligonucleotide
ggagttttgcagagttta

SEQ ID NO: 6586 - DNA, 18 bp, Artificial Sequence
  Description of Artificial Sequence: Synthetic oligonucleotide
ctgctggagttttgcaga

SEQ ID NO: 6587 - DNA, 18 bp, Artificial Sequence
  Description of Artificial Sequence: Synthetic oligonucleotide
tgtaactgctggagtttt

SEQ ID NO: 6588 - DNA, 18 bp, Artificial Sequence
  Description of Artificial Sequence: Synthetic oligonucleotide
ggctctgtaactgctgga

SEQ ID NO: 6589 - DNA, 18 bp, Artificial Sequence
  Description of Artificial Sequence: Synthetic oligonucleotide
gcacaggctctgtaactg

SEQ ID NO: 6590 - DNA, 18 bp, Artificial Sequence
  Description of Artificial Sequence: Synthetic oligonucleotide
tcctagcacaggctctgt

SEQ ID NO: 6591 - DNA, 18 bp, Artificial Sequence
  Description of Artificial Sequence: Synthetic oligonucleotide
gtagctcctagcacaggc

SEQ ID NO: 6592 - DNA, 18 bp, Artificial Sequence
  Description of Artificial Sequence: Synthetic oligonucleotide
accctgtagctcctagca

SEQ ID NO: 6593 - DNA, 18 bp, Artificial Sequence
  Description of Artificial Sequence: Synthetic oligonucleotide
tcttcaccctgtagctcc

SEQ ID NO: 6594 - DNA, 18 bp, Artificial Sequence
  Description of Artificial Sequence: Synthetic oligonucleotide
ccccctcttcaccctgta

SEQ ID NO: 6595 - DNA, 18 bp, Artificial Sequence
  Description of Artificial Sequence: Synthetic oligonucleotide
ttcttccccctcttcacc

SEQ ID NO: 6596 - DNA, 18 bp, Artificial Sequence
  Description of Artificial Sequence: Synthetic oligonucleotide
gagtcttcttccccctct

SEQ ID NO: 6597 - DNA, 18 bp, Artificial Sequence
  Description of Artificial Sequence: Synthetic oligonucleotide
ttcttgagtcttcttccc

SEQ ID NO: 6598 - DNA, 18 bp, Artificial Sequence
  Description of Artificial Sequence: Synthetic oligonucleotide
caggtttcttgagtcttc

SEQ ID NO: 6599 - DNA, 18 bp, Artificial Sequence
  Description of Artificial Sequence: Synthetic oligonucleotide
ttttacaggtttcttgag

SEQ ID NO: 6600 - DNA, 18 bp, Artificial Sequence
  Description of Artificial Sequence: Synthetic oligonucleotide
attagttttacaggtttc

SEQ ID NO: 6601 - DNA, 18 bp, Artificial Sequence
  Description of Artificial Sequence: Synthetic oligonucleotide
cctccattagttttacag

SEQ ID NO: 6602 - DNA, 18 bp, Artificial Sequence
  Description of Artificial Sequence: Synthetic oligonucleotide
cctctcctccattagttt

SEQ ID NO: 6603 - DNA, 18 bp, Artificial Sequence
  Description of Artificial Sequence: Synthetic oligonucleotide
ggtttcctctcctccatt

SEQ ID NO: 6604 - DNA, 18 bp, Artificial Sequence
  Description of Artificial Sequence: Synthetic oligonucleotide
gagctggtttcctctcct

SEQ ID NO: 6605 - DNA, 18 bp, Artificial Sequence
  Description of Artificial Sequence: Synthetic oligonucleotide
cacatgagctggtttcct

SEQ ID NO: 6606 - DNA, 18 bp, Artificial Sequence
  Description of Artificial Sequence: Synthetic oligonucleotide
ctcagcacatgagctggt

SEQ ID NO: 6607 - DNA, 18 bp, Artificial Sequence
  Description of Artificial Sequence: Synthetic oligonucleotide
aacttctcagcacatgag

SEQ ID NO: 6608 - DNA, 18 bp, Artificial Sequence
  Description of Artificial Sequence: Synthetic oligonucleotide
tttaaaacttctcagcac

SEQ ID NO: 6609 - DNA, 18 bp, Artificial Sequence
  Description of Artificial Sequence: Synthetic oligonucleotide
gcatatttaaaacttctc

SEQ ID NO: 6610 - DNA, 18 bp, Artificial Sequence
  Description of Artificial Sequence: Synthetic oligonucleotide
atgcagcatatttaaaac

SEQ ID NO: 6611 - DNA, 18 bp, Artificial Sequence
  Description of Artificial Sequence: Synthetic oligonucleotide
cataaatgcagcatattt

SEQ ID NO: 6612 - DNA, 18 bp, Artificial Sequence
  Description of Artificial Sequence: Synthetic oligonucleotide
taccataaatgcagcata

SEQ ID NO: 6613 - DNA, 18 bp, Artificial Sequence
  Description of Artificial Sequence: Synthetic oligonucleotide
ctacctaccataaatgca

SEQ ID NO: 6614 - DNA, 18 bp, Artificial Sequence
  Description of Artificial Sequence: Synthetic oligonucleotide
atgctctacctaccataa

SEQ ID NO: 6615 - DNA, 18 bp, Artificial Sequence
  Description of Artificial Sequence: Synthetic oligonucleotide
tgacaatgctctacctac

SEQ ID NO: 6616 - DNA, 18 bp, Artificial Sequence
  Description of Artificial Sequence: Synthetic oligonucleotide
aatgatgacaatgctcta

SEQ ID NO: 6617 - DNA, 18 bp, Artificial Sequence
  Description of Artificial Sequence: Synthetic oligonucleotide
cttacaatgatgacaatg

SEQ ID NO: 6618 - DNA, 18 bp, Artificial Sequence
  Description of Artificial Sequence: Synthetic oligonucleotide
tactccttacaatgatga

SEQ ID NO: 6619 - DNA, 18 bp, Artificial Sequence
  Description of Artificial Sequence: Synthetic oligonucleotide
attcatactccttacaat

SEQ ID NO: 6620 - DNA, 18 bp, Artificial Sequence
  Description of Artificial Sequence: Synthetic oligonucleotide
ggaggattcatactcctt

SEQ ID NO: 6621 - DNA, 18 bp, Artificial Sequence
  Description of Artificial Sequence: Synthetic oligonucleotide
acagtggaggattcatac

SEQ ID NO: 6622 - DNA, 18 bp, Artificial Sequence
  Description of Artificial Sequence: Synthetic oligonucleotide
agctcacagtggaggatt

SEQ ID NO: 6623 - DNA, 18 bp, Artificial Sequence
  Description of Artificial Sequence: Synthetic oligonucleotide
tgaaaagctcacagtgga

SEQ ID NO: 6624 - DNA, 18 bp, Artificial Sequence
  Description of Artificial Sequence: Synthetic oligonucleotide
aactttgaaaagctcaca

SEQ ID NO: 6625 - DNA, 18 bp, Artificial Sequence
  Description of Artificial Sequence: Synthetic oligonucleotide
aaaagaactttgaaaagc

SEQ ID NO: 6626 - DNA, 18 bp, Artificial Sequence
  Description of Artificial Sequence: Synthetic oligonucleotide
tacataaaagaactttga

SEQ ID NO: 6627 - DNA, 18 bp, Artificial Sequence
  Description of Artificial Sequence: Synthetic oligonucleotide
ccagatacataaaagaac

SEQ ID NO: 6628 - DNA, 18 bp, Artificial Sequence
  Description of Artificial Sequence: Synthetic oligonucleotide
ctcttccagatacataaa

SEQ ID NO: 6629 - DNA, 18 bp, Artificial Sequence
  Description of Artificial Sequence: Synthetic oligonucleotide
taacactcttccagatac

SEQ ID NO: 6630 - DNA, 18 bp, Artificial Sequence
  Description of Artificial Sequence: Synthetic oligonucleotide
atatttaacactcttcca

SEQ ID NO: 6631 - DNA, 18 bp, Artificial Sequence
  Description of Artificial Sequence: Synthetic oligonucleotide
aaaaaatatttaacactc

SEQ ID NO: 6632 - DNA, 18 bp, Artificial Sequence
  Description of Artificial Sequence: Synthetic oligonucleotide
tagtgaaaaaatatttaa

SEQ ID NO: 6633 - DNA, 18 bp, Artificial Sequence
  Description of Artificial Sequence: Synthetic oligonucleotide
gctgtggcaggaaggtgg

SEQ ID NO: 6634 - DNA, 18 bp, Artificial Sequence
  Description of Artificial Sequence: Synthetic oligonucleotide
aaaaggctgtggcaggaa

SEQ ID NO: 6635 - DNA, 18 bp, Artificial Sequence
  Description of Artificial Sequence: Synthetic oligonucleotide
tggggaaaaggctgtggc

SEQ ID NO: 6636 - DNA, 18 bp, Artificial Sequence
  Description of Artificial Sequence: Synthetic oligonucleotide
aggtttggggaaaaggct

SEQ ID NO: 6637 - DNA, 18 bp, Artificial Sequence
  Description of Artificial Sequence: Synthetic oligonucleotide
ataccaggtttggggaaa

SEQ ID NO: 6638 - DNA, 18 bp, Artificial Sequence
  Description of Artificial Sequence: Synthetic oligonucleotide
gggtgataccaggtttgg

SEQ ID NO: 6639 - DNA, 18 bp, Artificial Sequence
  Description of Artificial Sequence: Synthetic oligonucleotide
agagggggtgataccagg

SEQ ID NO: 6640 - DNA, 18 bp, Artificial Sequence
  Description of Artificial Sequence: Synthetic oligonucleotide
ggaggagagggggtgata

SEQ ID NO: 6641 - DNA, 18 bp, Artificial Sequence
  Description of Artificial Sequence: Synthetic oligonucleotide
gggagggaggagaggggg

SEQ ID NO: 6642 - DNA, 18 bp, Artificial Sequence
  Description of Artificial Sequence: Synthetic oligonucleotide
gattagggagggaggaga

SEQ ID NO: 6643 - DNA, 18 bp, Artificial Sequence
  Description of Artificial Sequence: Synthetic oligonucleotide
ggtgggattagggaggga

SEQ ID NO: 6644 - DNA, 18 bp, Artificial Sequence
  Description of Artificial Sequence: Synthetic oligonucleotide
cgagaggtgggattaggg

SEQ ID NO: 6645 - DNA, 18 bp, Artificial Sequence
  Description of Artificial Sequence: Synthetic oligonucleotide
aggcccgagaggtgggat

SEQ ID NO: 6646 - DNA, 18 bp, Artificial Sequence
  Description of Artificial Sequence: Synthetic oligonucleotide
tggccaggcccgagaggt

SEQ ID NO: 6647 - DNA, 18 bp, Artificial Sequence
  Description of Artificial Sequence: Synthetic oligonucleotide
tggagtggccaggcccga

SEQ ID NO: 6648 - DNA, 18 bp, Artificial Sequence
  Description of Artificial Sequence: Synthetic oligonucleotide
tggggtggagtggccagg

SEQ ID NO: 6649 - DNA, 18 bp, Artificial Sequence
  Description of Artificial Sequence: Synthetic oligonucleotide
aggggtggggtggagtgg

SEQ ID NO: 6650 - DNA, 18 bp, Artificial Sequence
  Description of Artificial Sequence: Synthetic oligonucleotide
ctggaaggggtggggtgg

SEQ ID NO: 6651 - DNA, 18 bp, Artificial Sequence
  Description of Artificial Sequence: Synthetic oligonucleotide
gagtcctggaaggggtgg

SEQ ID NO: 6652 - DNA, 18 bp, Artificial Sequence
  Description of Artificial Sequence: Synthetic oligonucleotide
aatctgagtcctggaagg

SEQ ID NO: 6653 - DNA, 18 bp, Artificial Sequence
  Description of Artificial Sequence: Synthetic oligonucleotide
gtctgaatctgagtcctg

SEQ ID NO: 6654 - DNA, 18 bp, Artificial Sequence
  Description of Artificial Sequence: Synthetic oligonucleotide
agagtctgaatctgagtc

SEQ ID NO: 6655 - DNA, 18 bp, Artificial Sequence
  Description of Artificial Sequence: Synthetic oligonucleotide
ccctcagagtctgaatct

SEQ ID NO: 6656 - DNA, 18 bp, Artificial Sequence
  Description of Artificial Sequence: Synthetic oligonucleotide
ctcctccctcagagtctg

SEQ ID NO: 6657 - DNA, 18 bp, Artificial Sequence
  Description of Artificial Sequence: Synthetic oligonucleotide
agcggctcctccctcaga

SEQ ID NO: 6658 - DNA, 18 bp, Artificial Sequence
  Description of Artificial Sequence: Synthetic oligonucleotide
ccaccagcggctcctccc

SEQ ID NO: 6659 - DNA, 18 bp, Artificial Sequence
  Description of Artificial Sequence: Synthetic oligonucleotide
gcttctccaccagcggct

SEQ ID NO: 6660 - DNA, 18 bp, Artificial Sequence
  Description of Artificial Sequence: Synthetic oligonucleotide
tgtctgcttctccaccag

SEQ ID NO: 6661 - DNA, 18 bp, Artificial Sequence
  Description of Artificial Sequence: Synthetic oligonucleotide
cactgtctgcttctccac

SEQ ID NO: 6662 - DNA, 18 bp, Artificial Sequence
  Description of Artificial Sequence: Synthetic oligonucleotide
atactcactgtctgcttc

SEQ ID NO: 6663 - DNA, 18 bp, Artificial Sequence
  Description of Artificial Sequence: Synthetic oligonucleotide
ggaagatactcactgtct

SEQ ID NO: 6664 - DNA, 18 bp, Artificial Sequence
  Description of Artificial Sequence: Synthetic oligonucleotide
ctccaggaagatactcac

SEQ ID NO: 6665 - DNA, 18 bp, Artificial Sequence
  Description of Artificial Sequence: Synthetic oligonucleotide
tgtccctccaggaagata

SEQ ID NO: 6666 - DNA, 18 bp, Artificial Sequence
  Description of Artificial Sequence: Synthetic oligonucleotide
ctccctgtccctccagga

SEQ ID NO: 6667 - DNA, 18 bp, Artificial Sequence
  Description of Artificial Sequence: Synthetic oligonucleotide
ccctgctccctgtccctc

SEQ ID NO: 6668 - DNA, 18 bp, Artificial Sequence
  Description of Artificial Sequence: Synthetic oligonucleotide
cagaaccctgctccctgt

SEQ ID NO: 6669 - DNA, 18 bp, Artificial Sequence
  Description of Artificial Sequence: Synthetic oligonucleotide
ccccccagaaccctgctc

SEQ ID NO: 6670 - DNA, 18 bp, Artificial Sequence
  Description of Artificial Sequence: Synthetic oligonucleotide
ccccgccccccagaaccc

SEQ ID NO: 6671 - DNA, 18 bp, Artificial Sequence
  Description of Artificial Sequence: Synthetic oligonucleotide
aatccccccgccccccag

SEQ ID NO: 6672 - DNA, 18 bp, Artificial Sequence
  Description of Artificial Sequence: Synthetic oligonucleotide
cctgaaatccccccgccc

SEQ ID NO: 6673 - DNA, 18 bp, Artificial Sequence
  Description of Artificial Sequence: Synthetic oligonucleotide
cctgccctgaaatccccc

SEQ ID NO: 6674 - DNA, 18 bp, Artificial Sequence
  Description of Artificial Sequence: Synthetic oligonucleotide
acacccctgccctgaaat

SEQ ID NO: 6675 - DNA, 18 bp, Artificial Sequence
  Description of Artificial Sequence: Synthetic oligonucleotide
cacccacacccctgccct

SEQ ID NO: 6676 - DNA, 18 bp, Artificial Sequence
  Description of Artificial Sequence: Synthetic oligonucleotide
ggtatcacccacacccct

SEQ ID NO: 6677 - DNA, 18 bp, Artificial Sequence
  Description of Artificial Sequence: Synthetic oligonucleotide
gaggaggtatcacccaca

SEQ ID NO: 6678 - DNA, 18 bp, Artificial Sequence
  Description of Artificial Sequence: Synthetic oligonucleotide
gagttgaggaggtatcac

SEQ ID NO: 6679 - DNA, 18 bp, Artificial Sequence
  Description of Artificial Sequence: Synthetic oligonucleotide
tgatggagttgaggaggt

SEQ ID NO: 6680 - DNA, 18 bp, Artificial Sequence
  Description of Artificial Sequence: Synthetic oligonucleotide
actcctgatggagttgag

SEQ ID NO: 6681 - DNA, 18 bp, Artificial Sequence
  Description of Artificial Sequence: Synthetic oligonucleotide
atgtcactcctgatggag

SEQ ID NO: 6682 - DNA, 18 bp, Artificial Sequence
  Description of Artificial Sequence: Synthetic oligonucleotide
ataattattaaattatga

SEQ ID NO: 6683 - DNA, 18 bp, Artificial Sequence
  Description of Artificial Sequence: Synthetic oligonucleotide
tgacaataattattaaat

SEQ ID NO: 6684 - DNA, 18 bp, Artificial Sequence
  Description of Artificial Sequence: Synthetic oligonucleotide
aagtatgacaataattat

SEQ ID NO: 6685 - DNA, 18 bp, Artificial Sequence
  Description of Artificial Sequence: Synthetic oligonucleotide
tcaaaaagtatgacaata

SEQ ID NO: 6686 - DNA, 18 bp, Artificial Sequence
  Description of Artificial Sequence: Synthetic oligonucleotide
gtttctcaaaaagtatga

SEQ ID NO: 6687 - DNA, 18 bp, Artificial Sequence
  Description of Artificial Sequence: Synthetic oligonucleotide
aacatgtttctcaaaaag

SEQ ID NO: 6688 - DNA, 18 bp, Artificial Sequence
  Description of Artificial Sequence: Synthetic oligonucleotide
taagaaacatgtttctca

SEQ ID NO: 6689 - DNA, 18 bp, Artificial Sequence
  Description of Artificial Sequence: Synthetic oligonucleotide
actgttaagaaacatgtt

SEQ ID NO: 6690 - DNA, 18 bp, Artificial Sequence
  Description of Artificial Sequence: Synthetic oligonucleotide
ttcacactgttaagaaac

SEQ ID NO: 6691 - DNA, 18 bp, Artificial Sequence
  Description of Artificial Sequence: Synthetic oligonucleotide
atatattcacactgttaa

SEQ ID NO: 6692 - DNA, 18 bp, Artificial Sequence
  Description of Artificial Sequence: Synthetic oligonucleotide
taaacatatattcacact

SEQ ID NO: 6693 - DNA, 18 bp, Artificial Sequence
  Description of Artificial Sequence: Synthetic oligonucleotide
aagtttaaacatatattc

SEQ ID NO: 6694 - DNA, 18 bp, Artificial Sequence
  Description of Artificial Sequence: Synthetic oligonucleotide
tcacaaagtttaaacata

SEQ ID NO: 6695 - DNA, 18 bp, Artificial Sequence
  Description of Artificial Sequence: Synthetic oligonucleotide
gtctttcacaaagtttaa

SEQ ID NO: 6696 - DNA, 18 bp, Artificial Sequence
  Description of Artificial Sequence: Synthetic oligonucleotide
agccagtctttcacaaag

SEQ ID NO: 6697 - DNA, 18 bp, Artificial Sequence
  Description of Artificial Sequence: Synthetic oligonucleotide
aaacaagccagtctttca

SEQ ID NO: 6698 - DNA, 18 bp, Artificial Sequence
  Description of Artificial Sequence: Synthetic oligonucleotide
atttaaaacaagccagtc

SEQ ID NO: 6699 - DNA, 18 bp, Artificial Sequence
  Description of Artificial Sequence: Synthetic oligonucleotide
ctgaaatttaaaacaagc

SEQ ID NO: 6700 - DNA, 18 bp, Artificial Sequence
  Description of Artificial Sequence: Synthetic oligonucleotide
agcagctgaaatttaaaa

SEQ ID NO: 6701 - DNA, 18 bp, Artificial Sequence
  Description of Artificial Sequence: Synthetic oligonucleotide
aatgcagcagctgaaatt

SEQ ID NO: 6702 - DNA, 18 bp, Artificial Sequence
  Description of Artificial Sequence: Synthetic oligonucleotide
taaaaaatgcagcagctg

SEQ ID NO: 6703 - DNA, 18 bp, Artificial Sequence
  Description of Artificial Sequence: Synthetic oligonucleotide
tgataaaaaatgcagcag

SEQ ID NO: 6704 - DNA, 18 bp, Artificial Sequence
  Description of Artificial Sequence: Synthetic oligonucleotide
ataggtgataaaaaatgc

SEQ ID NO: 6705 - DNA, 18 bp, Artificial Sequence
  Description of Artificial Sequence: Synthetic oligonucleotide
tattcataggtgataaaa

SEQ ID NO: 6706 - DNA, 18 bp, Artificial Sequence
  Description of Artificial Sequence: Synthetic oligonucleotide
tcacatattcataggtga

SEQ ID NO: 6707 - DNA, 18 bp, Artificial Sequence
  Description of Artificial Sequence: Synthetic oligonucleotide
ccacttcacatattcata

SEQ ID NO: 6708 - DNA, 18 bp, Artificial Sequence
  Description of Artificial Sequence: Synthetic oligonucleotide
aaaaaccacttcacatat

SEQ ID NO: 6709 - DNA, 18 bp, Artificial Sequence
  Description of Artificial Sequence: Synthetic oligonucleotide
catgcaaaaaccacttca

SEQ ID NO: 6710 - DNA, 18 bp, Artificial Sequence
  Description of Artificial Sequence: Synthetic oligonucleotide
atcagcatgcaaaaacca

SEQ ID NO: 6711 - DNA, 18 bp, Artificial Sequence
  Description of Artificial Sequence: Synthetic oligonucleotide
gatgaatcagcatgcaaa

SEQ ID NO: 6712 - DNA, 18 bp, Artificial Sequence
  Description of Artificial Sequence: Synthetic oligonucleotide
atgaagatgaatcagcat

SEQ ID NO: 6713 - DNA, 18 bp, Artificial Sequence
  Description of Artificial Sequence: Synthetic oligonucleotide
caaatatgaagatgaatc

SEQ ID NO: 6714 - DNA, 18 bp, Artificial Sequence
  Description of Artificial Sequence: Synthetic oligonucleotide
taggtgtcaaatatgaag

SEQ ID NO: 6715 - DNA, 18 bp, Artificial Sequence
  Description of Artificial Sequence: Synthetic oligonucleotide
tttcataggtgtcaaata

SEQ ID NO: 6716 - DNA, 18 bp, Artificial Sequence
  Description of Artificial Sequence: Synthetic oligonucleotide
atatgtttcataggtgtc

SEQ ID NO: 6717 - DNA, 18 bp, Artificial Sequence
  Description of Artificial Sequence: Synthetic oligonucleotide
ccaacatatgtttcatag

SEQ ID NO: 6718 - DNA, 18 bp, Artificial Sequence
  Description of Artificial Sequence: Synthetic oligonucleotide
ggcagccaacatatgttt

SEQ ID NO: 6719 - DNA, 18 bp, Artificial Sequence
  Description of Artificial Sequence: Synthetic oligonucleotide
gcagaggcagccaacata

SEQ ID NO: 6720 - DNA, 18 bp, Artificial Sequence
  Description of Artificial Sequence: Synthetic oligonucleotide
ctccagcagaggcagcca

SEQ ID NO: 6721 - DNA, 18 bp, Artificial Sequence
  Description of Artificial Sequence: Synthetic oligonucleotide
cacttctccagcagaggc

SEQ ID NO: 6722 - DNA, 18 bp, Artificial Sequence
  Description of Artificial Sequence: Synthetic oligonucleotide
taccacttctccagcaga

SEQ ID NO: 6723 - DNA, 18 bp, Artificial Sequence
  Description of Artificial Sequence: Synthetic oligonucleotide
ttacttaccacttctcca

SEQ ID NO: 6724 - DNA, 18 bp, Artificial Sequence
  Description of Artificial Sequence: Synthetic oligonucleotide
acttgttacttaccactt

SEQ ID NO: 6725 - DNA, 18 bp, Artificial Sequence
  Description of Artificial Sequence: Synthetic oligonucleotide
acaaaacttgttacttac

SEQ ID NO: 6726 - DNA, 18 bp, Artificial Sequence
  Description of Artificial Sequence: Synthetic oligonucleotide
tatacacaaaacttgtta

SEQ ID NO: 6727 - DNA, 18 bp, Artificial Sequence
  Description of Artificial Sequence: Synthetic oligonucleotide
tattttatacacaaaact

SEQ ID NO: 6728 - DNA, 18 bp, Artificial Sequence
  Description of Artificial Sequence: Synthetic oligonucleotide
tgaagtattttatacaca

SEQ ID NO: 6729 - DNA, 18 bp, Artificial Sequence
  Description of Artificial Sequence: Synthetic oligonucleotide
atttctgaagtattttat

SEQ ID NO: 6730 - DNA, 18 bp, Artificial Sequence
  Description of Artificial Sequence: Synthetic oligonucleotide
tgtgcatttctgaagtat

SEQ ID NO: 6731 - DNA, 18 bp, Artificial Sequence
  Description of Artificial Sequence: Synthetic oligonucleotide
catgatgtgcatttctga

SEQ ID NO: 6732 - DNA, 18 bp, Artificial Sequence
  Description of Artificial Sequence: Synthetic oligonucleotide
atatgcatgatgtgcatt

SEQ ID NO: 6733 - DNA, 18 bp, Artificial Sequence
  Description of Artificial Sequence: Synthetic oligonucleotide
aaaatatatgcatgatgt

SEQ ID NO: 6734 - DNA, 18 bp, Artificial Sequence
  Description of Artificial Sequence: Synthetic oligonucleotide
tactgaaaatatatgcat

SEQ ID NO: 6735 - DNA, 18 bp, Artificial Sequence
  Description of Artificial Sequence: Synthetic oligonucleotide
atatgtactgaaaatata

SEQ ID NO: 6736 - DNA, 18 bp, Artificial Sequence
  Description of Artificial Sequence: Synthetic oligonucleotide
aataaatatgtactgaaa

SEQ ID NO: 6737 - DNA, 18 bp, Artificial Sequence
  Description of Artificial Sequence: Synthetic oligonucleotide
aatgaaataaatatgtac

SEQ ID NO: 6738 - DNA, 18 bp, Artificial Sequence
  Description of Artificial Sequence: Synthetic oligonucleotide
taaaaaatgaaataaata

SEQ ID NO: 6739 - DNA, 18 bp, Artificial Sequence
  Description of Artificial Sequence: Synthetic oligonucleotide
atttttaaaaaatgaaat

SEQ ID NO: 6740 - DNA, 18 bp, Artificial Sequence
  Description of Artificial Sequence: Synthetic oligonucleotide
aaataatttttaaaaaat

SEQ ID NO: 6741 - DNA, 18 bp, Artificial Sequence
  Description of Artificial Sequence: Synthetic oligonucleotide
tttaaaaataatttttaa

SEQ ID NO: 6742 - DNA, 18 bp, Artificial Sequence
  Description of Artificial Sequence: Synthetic oligonucleotide
cataatttaaaaataatt

SEQ ID NO: 6743 - DNA, 18 bp, Artificial Sequence
  Description of Artificial Sequence: Synthetic oligonucleotide
ctggaattaactttagag

SEQ ID NO: 6744 - DNA, 18 bp, Artificial Sequence
  Description of Artificial Sequence: Synthetic oligonucleotide
gtctactggaattaactt

SEQ ID NO: 6745 - DNA, 18 bp, Artificial Sequence
  Description of Artificial Sequence: Synthetic oligonucleotide
ttatagtctactggaatt

SEQ ID NO: 6746 - DNA, 18 bp, Artificial Sequence
  Description of Artificial Sequence: Synthetic oligonucleotide
ggactttatagtctactg

SEQ ID NO: 6747 - DNA, 18 bp, Artificial Sequence
  Description of Artificial Sequence: Synthetic oligonucleotide
gcataggactttatagtc

SEQ ID NO: 6748 - DNA, 18 bp, Artificial Sequence
  Description of Artificial Sequence: Synthetic oligonucleotide
agcaagcataggacttta

SEQ ID NO: 6749 - DNA, 18 bp, Artificial Sequence
  Description of Artificial Sequence: Synthetic oligonucleotide
aacaaagcaagcatagga

SEQ ID NO: 6750 - DNA, 18 bp, Artificial Sequence
  Description of Artificial Sequence: Synthetic oligonucleotide
aagaaaacaaagcaagca

SEQ ID NO: 6751 - DNA, 18 bp, Artificial Sequence
  Description of Artificial Sequence: Synthetic oligonucleotide
taagaaagaaaacaaagc

SEQ ID NO: 6752 - DNA, 18 bp, Artificial Sequence
  Description of Artificial Sequence: Synthetic oligonucleotide
cgatttaagaaagaaaac

SEQ ID NO: 6753 - DNA, 18 bp, Artificial Sequence
  Description of Artificial Sequence: Synthetic oligonucleotide
ttcttcgatttaagaaag

SEQ ID NO: 6754 - DNA, 18 bp, Artificial Sequence
  Description of Artificial Sequence: Synthetic oligonucleotide
aaatgttcttcgatttaa

SEQ ID NO: 6755 - DNA, 18 bp, Artificial Sequence
  Description of Artificial Sequence: Synthetic oligonucleotide
ataacaaatgttcttcga

SEQ ID NO: 6756 - DNA, 18 bp, Artificial Sequence
  Description of Artificial Sequence: Synthetic oligonucleotide
tggtcataacaaatgttc

SEQ ID NO: 6757 - DNA, 18 bp, Artificial Sequence
  Description of Artificial Sequence: Synthetic oligonucleotide
ggagatggtcataacaaa

SEQ ID NO: 6758 - DNA, 18 bp, Artificial Sequence
  Description of Artificial Sequence: Synthetic oligonucleotide
gccatggagatggtcata

SEQ ID NO: 6759 - DNA, 18 bp, Artificial Sequence
  Description of Artificial Sequence: Synthetic oligonucleotide
agaatgccatggagatgg

SEQ ID NO: 6760 - DNA, 18 bp, Artificial Sequence
  Description of Artificial Sequence: Synthetic oligonucleotide
ctagcagaatgccatgga

SEQ ID NO: 6761 - DNA, 18 bp, Artificial Sequence
  Description of Artificial Sequence: Synthetic oligonucleotide
agccactagcagaatgcc

SEQ ID NO: 6762 - DNA, 18 bp, Artificial Sequence
  Description of Artificial Sequence: Synthetic oligonucleotide
tgtatagccactagcaga

SEQ ID NO: 6763 - DNA, 18 bp, Artificial Sequence
  Description of Artificial Sequence: Synthetic oligonucleotide
ccacctgtatagccacta

SEQ ID NO: 6764 - DNA, 18 bp, Artificial Sequence
  Description of Artificial Sequence: Synthetic oligonucleotide
gctccacctgtatagcca

SEQ ID NO: 6765 - DNA, 18 bp, Artificial Sequence
  Description of Artificial Sequence: Synthetic oligonucleotide
gttcagctccacctgtat

SEQ ID NO: 6766 - DNA, 18 bp, Artificial Sequence
  Description of Artificial Sequence: Synthetic oligonucleotide
caattgttcagctccacc

SEQ ID NO: 6767 - DNA, 18 bp, Artificial Sequence
  Description of Artificial Sequence: Synthetic oligonucleotide
aatctcaattgttcagct

SEQ ID NO: 6768 - DNA, 18 bp, Artificial Sequence
  Description of Artificial Sequence: Synthetic oligonucleotide
gtcagaatctcaattgtt

SEQ ID NO: 6769 - DNA, 18 bp, Artificial Sequence
  Description of Artificial Sequence: Synthetic oligonucleotide
ttgaggtcagaatctcaa

SEQ ID NO: 6770 - DNA, 18 bp, Artificial Sequence
  Description of Artificial Sequence: Synthetic oligonucleotide
gctctttgaggtcagaat

SEQ ID NO: 6771 - DNA, 18 bp, Artificial Sequence
  Description of Artificial Sequence: Synthetic oligonucleotide
atggttagctctttgagg

SEQ ID NO: 6772 - DNA, 18 bp, Artificial Sequence
  Description of Artificial Sequence: Synthetic oligonucleotide
agtacatggttagctctt

SEQ ID NO: 6773 - DNA, 18 bp, Artificial Sequence
  Description of Artificial Sequence: Synthetic oligonucleotide
gctgaagtacatggttag

SEQ ID NO: 6774 - DNA, 18 bp, Artificial Sequence
  Description of Artificial Sequence: Synthetic oligonucleotide
ccaaagctgaagtacatg

SEQ ID NO: 6775 - DNA, 18 bp, Artificial Sequence
  Description of Artificial Sequence: Synthetic oligonucleotide
catttccaaagctgaagt

SEQ ID NO: 6776 - DNA, 18 bp, Artificial Sequence
  Description of Artificial Sequence: Synthetic oligonucleotide
taccatttccaaagctga

SEQ ID NO: 6777 - DNA, 18 bp, Artificial Sequence
  Description of Artificial Sequence: Synthetic oligonucleotide
aattataccatttccaaa

SEQ ID NO: 6778 - DNA, 18 bp, Artificial Sequence
  Description of Artificial Sequence: Synthetic oligonucleotide
attataattataccattt

SEQ ID NO: 6779 - DNA, 18 bp, Artificial Sequence
  Description of Artificial Sequence: Synthetic oligonucleotide
aaaacattataattatac

SEQ ID NO: 6780 - DNA, 18 bp, Artificial Sequence
  Description of Artificial Sequence: Synthetic oligonucleotide
aaagcaaaacattataat

SEQ ID NO: 6781 - DNA, 18 bp, Artificial Sequence
  Description of Artificial Sequence: Synthetic oligonucleotide
aatggaaagcaaaacatt

SEQ ID NO: 6782 - DNA, 18 bp, Artificial Sequence
  Description of Artificial Sequence: Synthetic oligonucleotide
aaaaaaatggaaagcaaa

SEQ ID NO: 6783 - DNA, 18 bp, Artificial Sequence
  Description of Artificial Sequence: Synthetic oligonucleotide
aaaaaaaaaaaatggaaa

SEQ ID NO: 6784 - DNA, 18 bp, Artificial Sequence
  Description of Artificial Sequence: Synthetic oligonucleotide
aactaaaaaaaaaaaaat

SEQ ID NO: 6785 - DNA, 18 bp, Artificial Sequence
  Description of Artificial Sequence: Synthetic oligonucleotide
aagggaactaaaaaaaaa

SEQ ID NO: 6786 - DNA, 18 bp, Artificial Sequence
  Description of Artificial Sequence: Synthetic oligonucleotide
aaaataagggaactaaaa

SEQ ID NO: 6787 - DNA, 18 bp, Artificial Sequence
  Description of Artificial Sequence: Synthetic oligonucleotide
ttataaaaataagggaac

SEQ ID NO: 6788 - DNA, 18 bp, Artificial Sequence
  Description of Artificial Sequence: Synthetic oligonucleotide
taatgttataaaaataag

SEQ ID NO: 6789 - DNA, 18 bp, Artificial Sequence
  Description of Artificial Sequence: Synthetic oligonucleotide
ggcaataatgttataaaa

SEQ ID NO: 6790 - DNA, 18 bp, Artificial Sequence
  Description of Artificial Sequence: Synthetic oligonucleotide
tatgaggcaataatgtta

SEQ ID NO: 6791 - DNA, 18 bp, Artificial Sequence
  Description of Artificial Sequence: Synthetic oligonucleotide
aacattatgaggcaataa

SEQ ID NO: 6792 - DNA, 18 bp, Artificial Sequence
  Description of Artificial Sequence: Synthetic oligonucleotide
tgttcaacattatgaggc

SEQ ID NO: 6793 - DNA, 18 bp, Artificial Sequence
  Description of Artificial Sequence: Synthetic oligonucleotide
atcactgttcaacattat

SEQ ID NO: 6794 - DNA, 18 bp, Artificial Sequence
  Description of Artificial Sequence: Synthetic oligonucleotide
taagaatcactgttcaac

SEQ ID NO: 6795 - DNA, 18 bp, Artificial Sequence
  Description of Artificial Sequence: Synthetic oligonucleotide
aataataagaatcactgt

SEQ ID NO: 6796 - DNA, 18 bp, Artificial Sequence
  Description of Artificial Sequence: Synthetic oligonucleotide
gcataaataataagaatc

SEQ ID NO: 6797 - DNA, 18 bp, Artificial Sequence
  Description of Artificial Sequence: Synthetic oligonucleotide
ctgggaagccggctccgg

SEQ ID NO: 6798 - DNA, 18 bp, Artificial Sequence
  Description of Artificial Sequence: Synthetic oligonucleotide
taaggctgggaagccggc

SEQ ID NO: 6799 - DNA, 18 bp, Artificial Sequence
  Description of Artificial Sequence: Synthetic oligonucleotide
tcaagtaaggctgggaag

SEQ ID NO: 6800 - DNA, 18 bp, Artificial Sequence
  Description of Artificial Sequence: Synthetic oligonucleotide
gggggtcaagtaaggctg

SEQ ID NO: 6801 - DNA, 18 bp, Artificial Sequence
  Description of Artificial Sequence: Synthetic oligonucleotide
ccggagggggtcaagtaa

SEQ ID NO: 6802 - DNA, 18 bp, Artificial Sequence
  Description of Artificial Sequence: Synthetic oligonucleotide
attctccggagggggtca

SEQ ID NO: 6803 - DNA, 18 bp, Artificial Sequence
  Description of Artificial Sequence: Synthetic oligonucleotide
cccacattctccggaggg

SEQ ID NO: 6804 - DNA, 18 bp, Artificial Sequence
  Description of Artificial Sequence: Synthetic oligonucleotide
gcgtccccacattctccg

SEQ ID NO: 6805 - DNA, 18 bp, Artificial Sequence
  Description of Artificial Sequence: Synthetic oligonucleotide
taccagcgtccccacatt

SEQ ID NO: 6806 - DNA, 18 bp, Artificial Sequence
  Description of Artificial Sequence: Synthetic oligonucleotide
agagctaccagcgtcccc

SEQ ID NO: 6807 - DNA, 18 bp, Artificial Sequence
  Description of Artificial Sequence: Synthetic oligonucleotide
acgggagagctaccagcg

SEQ ID NO: 6808 - DNA, 18 bp, Artificial Sequence
  Description of Artificial Sequence: Synthetic oligonucleotide
aggccacgggagagctac

SEQ ID NO: 6809 - DNA, 18 bp, Artificial Sequence
  Description of Artificial Sequence: Synthetic oligonucleotide
accgaaggccacgggaga

SEQ ID NO: 6810 - DNA, 18 bp, Artificial Sequence
  Description of Artificial Sequence: Synthetic oligonucleotide
ttgggaccgaaggccacg

SEQ ID NO: 6811 - DNA, 18 bp, Artificial Sequence
  Description of Artificial Sequence: Synthetic oligonucleotide
accgtttgggaccgaagg

SEQ ID NO: 6812 - DNA, 18 bp, Artificial Sequence
  Description of Artificial Sequence: Synthetic oligonucleotide
agtgcaccgtttgggacc

SEQ ID NO: 6813 - DNA, 18 bp, Artificial Sequence
  Description of Artificial Sequence: Synthetic oligonucleotide
acagaagtgcaccgtttg

SEQ ID NO: 6814 - DNA, 18 bp, Artificial Sequence
  Description of Artificial Sequence: Synthetic oligonucleotide
ctgaaacagaagtgcacc

SEQ ID NO: 6815 - DNA, 18 bp, Artificial Sequence
  Description of Artificial Sequence: Synthetic oligonucleotide
ctgggctgaaacagaagt

SEQ ID NO: 6816 - DNA, 18 bp, Artificial Sequence
  Description of Artificial Sequence: Synthetic oligonucleotide
ggacgctgggctgaaaca

SEQ ID NO: 6817 - DNA, 18 bp, Artificial Sequence
  Description of Artificial Sequence: Synthetic oligonucleotide
agagaggacgctgggctg

SEQ ID NO: 6818 - DNA, 18 bp, Artificial Sequence
  Description of Artificial Sequence: Synthetic oligonucleotide
gcgagagaggacgctggg

SEQ ID NO: 6819 - DNA, 18 bp, Artificial Sequence
  Description of Artificial Sequence: Synthetic oligonucleotide
gcgaggcgagagaggacg

SEQ ID NO: 6820 - DNA, 18 bp, Artificial Sequence
  Description of Artificial Sequence: Synthetic oligonucleotide
ccaatgcgaggcgagaga

SEQ ID NO: 6821 - DNA, 18 bp, Artificial Sequence
  Description of Artificial Sequence: Synthetic oligonucleotide
gtgtaccaatgcgaggcg

SEQ ID NO: 6822 - DNA, 18 bp, Artificial Sequence
  Description of Artificial Sequence: Synthetic oligonucleotide
ttggagtgtaccaatgcg

SEQ ID NO: 6823 - DNA, 18 bp, Artificial Sequence
  Description of Artificial Sequence: Synthetic oligonucleotide
aggagttggagtgtacca

SEQ ID NO: 6824 - DNA, 18 bp, Artificial Sequence
  Description of Artificial Sequence: Synthetic oligonucleotide
tagaaaggagttggagtg

SEQ ID NO: 6825 - DNA, 18 bp, Artificial Sequence
  Description of Artificial Sequence: Synthetic oligonucleotide
aagagtagaaaggagttg

SEQ ID NO: 6826 - DNA, 18 bp, Artificial Sequence
  Description of Artificial Sequence: Synthetic oligonucleotide
cagagaagagtagaaagg

SEQ ID NO: 6827 - DNA, 18 bp, Artificial Sequence
  Description of Artificial Sequence: Synthetic oligonucleotide
gcctccagagaagagtag

SEQ ID NO: 6828 - DNA, 18 bp, Artificial Sequence
  Description of Artificial Sequence: Synthetic oligonucleotide
gtgccgcctccagagaag

SEQ ID NO: 6829 - DNA, 18 bp, Artificial Sequence
  Description of Artificial Sequence: Synthetic oligonucleotide
caaaagtgccgcctccag

SEQ ID NO: 6830 - DNA, 18 bp, Artificial Sequence
  Description of Artificial Sequence: Synthetic oligonucleotide
aaattcaaaagtgccgcc

SEQ ID NO: 6831 - DNA, 18 bp, Artificial Sequence
  Description of Artificial Sequence: Synthetic oligonucleotide
gtctgaaattcaaaagtg

SEQ ID NO: 6832 - DNA, 18 bp, Artificial Sequence
  Description of Artificial Sequence: Synthetic oligonucleotide
agcgctgggtctgaaatt

SEQ ID NO: 6833 - DNA, 18 bp, Artificial Sequence
  Description of Artificial Sequence: Synthetic oligonucleotide
actggagcgctgggtctg

SEQ ID NO: 6834 - DNA, 18 bp, Artificial Sequence
  Description of Artificial Sequence: Synthetic oligonucleotide
taaagactggagcgctgg

SEQ ID NO: 6835 - DNA, 18 bp, Artificial Sequence
  Description of Artificial Sequence: Synthetic oligonucleotide
cattctaaagactggagc

SEQ ID NO: 6836 - DNA, 18 bp, Artificial Sequence
  Description of Artificial Sequence: Synthetic oligonucleotide
tcaagcattctaaagact

SEQ ID NO: 6837 - DNA, 18 bp, Artificial Sequence
  Description of Artificial Sequence: Synthetic oligonucleotide
acacctcaagcattctaa

SEQ ID NO: 6838 - DNA, 18 bp, Artificial Sequence
  Description of Artificial Sequence: Synthetic oligonucleotide
gatcgacacctcaagcat

SEQ ID NO: 6839 - DNA, 18 bp, Artificial Sequence
  Description of Artificial Sequence: Synthetic oligonucleotide
gtggggatcgacacctca

SEQ ID NO: 6840 - DNA, 18 bp, Artificial Sequence
  Description of Artificial Sequence: Synthetic oligonucleotide
ggggggtggggatcgaca

SEQ ID NO: 6841 - DNA, 18 bp, Artificial Sequence
  Description of Artificial Sequence: Synthetic oligonucleotide
gcggtggggggtggggat

SEQ ID NO: 6842 - DNA, 18 bp, Artificial Sequence
  Description of Artificial Sequence: Synthetic oligonucleotide
acatagcggtggggggtg

SEQ ID NO: 6843 - DNA, 18 bp, Artificial Sequence
  Description of Artificial Sequence: Synthetic oligonucleotide
ctctgacatagcggtggg

SEQ ID NO: 6844 - DNA, 18 bp, Artificial Sequence
  Description of Artificial Sequence: Synthetic oligonucleotide
tacctctgacatagcggt

SEQ ID NO: 6845 - DNA, 18 bp, Artificial Sequence
  Description of Artificial Sequence: Synthetic oligonucleotide
gcaactacctctgacata

SEQ ID NO: 6846 - DNA, 18 bp, Artificial Sequence
  Description of Artificial Sequence: Synthetic oligonucleotide
tcgaggcaactacctctg

SEQ ID NO: 6847 - DNA, 18 bp, Artificial Sequence
  Description of Artificial Sequence: Synthetic oligonucleotide
cgagttcgaggcaactac

SEQ ID NO: 6848 - DNA, 18 bp, Artificial Sequence
  Description of Artificial Sequence: Synthetic oligonucleotide
aagggcgagttcgaggca

SEQ ID NO: 6849 - DNA, 18 bp, Artificial Sequence
  Description of Artificial Sequence: Synthetic oligonucleotide
aggaaaagggcgagttcg

SEQ ID NO: 6850 - DNA, 18 bp, Artificial Sequence
  Description of Artificial Sequence: Synthetic oligonucleotide
gtggtaggaaaagggcga

SEQ ID NO: 6851 - DNA, 18 bp, Artificial Sequence
  Description of Artificial Sequence: Synthetic oligonucleotide
tttcggtggtaggaaaag

SEQ ID NO: 6852 - DNA, 18 bp, Artificial Sequence
  Description of Artificial Sequence: Synthetic oligonucleotide
gacggtttcggtggtagg

SEQ ID NO: 6853 - DNA, 18 bp, Artificial Sequence
  Description of Artificial Sequence: Synthetic oligonucleotide
cttttgacggtttcggtg

SEQ ID NO: 6854 - DNA, 18 bp, Artificial Sequence
  Description of Artificial Sequence: Synthetic oligonucleotide
ttcggcttttgacggttt

SEQ ID NO: 6855 - DNA, 18 bp, Artificial Sequence
  Description of Artificial Sequence: Synthetic oligonucleotide
ttaatttcggcttttgac

SEQ ID NO: 6856 - DNA, 18 bp, Artificial Sequence
  Description of Artificial Sequence: Synthetic oligonucleotide
attagttaatttcggctt

SEQ ID NO: 6857 - DNA, 18 bp, Artificial Sequence
  Description of Artificial Sequence: Synthetic oligonucleotide
ggtaaattagttaatttc

SEQ ID NO: 6858 - DNA, 18 bp, Artificial Sequence
  Description of Artificial Sequence: Synthetic oligonucleotide
aatttggtaaattagtta

SEQ ID NO: 6859 - DNA, 18 bp, Artificial Sequence
  Description of Artificial Sequence: Synthetic oligonucleotide
caacaaatttggtaaatt

SEQ ID NO: 6860 - DNA, 18 bp, Artificial Sequence
  Description of Artificial Sequence: Synthetic oligonucleotide
gcattcaacaaatttggt

SEQ ID NO: 6861 - DNA, 18 bp, Artificial Sequence
  Description of Artificial Sequence: Synthetic oligonucleotide
aataagcattcaacaaat

SEQ ID NO: 6862 - DNA, 18 bp, Artificial Sequence
  Description of Artificial Sequence: Synthetic oligonucleotide
taaacaataagcattcaa

SEQ ID NO: 6863 - DNA, 18 bp, Artificial Sequence
  Description of Artificial Sequence: Synthetic oligonucleotide
cctgataaacaataagca

SEQ ID NO: 6864 - DNA, 18 bp, Artificial Sequence
  Description of Artificial Sequence: Synthetic oligonucleotide
taactcctgataaacaat

SEQ ID NO: 6865 - DNA, 18 bp, Artificial Sequence
  Description of Artificial Sequence: Synthetic oligonucleotide
taggtgcctttagttgaa

SEQ ID NO: 6866 - DNA, 18 bp, Artificial Sequence
  Description of Artificial Sequence: Synthetic oligonucleotide
tgagttaggtgcctttag

SEQ ID NO: 6867 - DNA, 18 bp, Artificial Sequence
  Description of Artificial Sequence: Synthetic oligonucleotide
attcatgagttaggtgcc

SEQ ID NO: 6868 - DNA, 18 bp, Artificial Sequence
  Description of Artificial Sequence: Synthetic oligonucleotide
atatcattcatgagttag

SEQ ID NO: 6869 - DNA, 18 bp, Artificial Sequence
  Description of Artificial Sequence: Synthetic oligonucleotide
agcaaatatcattcatga

SEQ ID NO: 6870 - DNA, 18 bp, Artificial Sequence
  Description of Artificial Sequence: Synthetic oligonucleotide
catggagcaaatatcatt

SEQ ID NO: 6871 - DNA, 18 bp, Artificial Sequence
  Description of Artificial Sequence: Synthetic oligonucleotide
tcaaacatggagcaaata

SEQ ID NO: 6872 - DNA, 18 bp, Artificial Sequence
  Description of Artificial Sequence: Synthetic oligonucleotide
gttgttcaaacatggagc

SEQ ID NO: 6873 - DNA, 18 bp, Artificial Sequence
  Description of Artificial Sequence: Synthetic oligonucleotide
catttgttgttcaaacat

SEQ ID NO: 6874 - DNA, 18 bp, Artificial Sequence
  Description of Artificial Sequence: Synthetic oligonucleotide
taaaacatttgttgttca

SEQ ID NO: 6875 - DNA, 18 bp, Artificial Sequence
  Description of Artificial Sequence: Synthetic oligonucleotide
tgggttaaaacatttgtt

SEQ ID NO: 6876 - DNA, 18 bp, Artificial Sequence
  Description of Artificial Sequence: Synthetic oligonucleotide
gacagtgggttaaaacat

SEQ ID NO: 6877 - DNA, 18 bp, Artificial Sequence
  Description of Artificial Sequence: Synthetic oligonucleotide
gtgaagacagtgggttaa

SEQ ID NO: 6878 - DNA, 18 bp, Artificial Sequence
  Description of Artificial Sequence: Synthetic oligonucleotide
tattagtgaagacagtgg

SEQ ID NO: 6879 - DNA, 18 bp, Artificial Sequence
  Description of Artificial Sequence: Synthetic oligonucleotide
tacaatattagtgaagac

SEQ ID NO: 6880 - DNA, 18 bp, Artificial Sequence
  Description of Artificial Sequence: Synthetic oligonucleotide
gtagttacaatattagtg

SEQ ID NO: 6881 - DNA, 18 bp, Artificial Sequence
  Description of Artificial Sequence: Synthetic oligonucleotide
agacagtagttacaatat

SEQ ID NO: 6882 - DNA, 18 bp, Artificial Sequence
  Description of Artificial Sequence: Synthetic oligonucleotide
ctgtaagacagtagttac

SEQ ID NO: 6883 - DNA, 18 bp, Artificial Sequence
  Description of Artificial Sequence: Synthetic oligonucleotide
tcaatctgtaagacagta

SEQ ID NO: 6884 - DNA, 18 bp, Artificial Sequence
  Description of Artificial Sequence: Synthetic oligonucleotide
tcaagtcaatctgtaaga

SEQ ID NO: 6885 - DNA, 18 bp, Artificial Sequence
  Description of Artificial Sequence: Synthetic oligonucleotide
ttgcatcaagtcaatctg

SEQ ID NO: 6886 - DNA, 18 bp, Artificial Sequence
  Description of Artificial Sequence: Synthetic oligonucleotide
gttttgcatcaagtcaat

SEQ ID NO: 6887 - DNA, 18 bp, Artificial Sequence
  Description of Artificial Sequence: Synthetic oligonucleotide
gtgatgttttgcatcaag

SEQ ID NO: 6888 - DNA, 18 bp, Artificial Sequence
  Description of Artificial Sequence: Synthetic oligonucleotide
cctttgtgatgttttgca

SEQ ID NO: 6889 - DNA, 18 bp, Artificial Sequence
  Description of Artificial Sequence: Synthetic oligonucleotide
tggagcctttgtgatgtt

SEQ ID NO: 6890 - DNA, 18 bp, Artificial Sequence
  Description of Artificial Sequence: Synthetic oligonucleotide
taatatggagcctttgtg

SEQ ID NO: 6891 - DNA, 18 bp, Artificial Sequence
  Description of Artificial Sequence: Synthetic oligonucleotide
ctgtataatatggagcct

SEQ ID NO: 6892 - DNA, 18 bp, Artificial Sequence
  Description of Artificial Sequence: Synthetic oligonucleotide
gcatactgtataatatgg

SEQ ID NO: 6893 - DNA, 18 bp, Artificial Sequence
  Description of Artificial Sequence: Synthetic oligonucleotide
aaatcgcatactgtataa

SEQ ID NO: 6894 - DNA, 18 bp, Artificial Sequence
  Description of Artificial Sequence: Synthetic oligonucleotide
ctcaaaaatcgcatactg

SEQ ID NO: 6895 - DNA, 18 bp, Artificial Sequence
  Description of Artificial Sequence: Synthetic oligonucleotide
tacctcaaaaatcgcata

SEQ ID NO: 6896 - DNA, 18 bp, Artificial Sequence
  Description of Artificial Sequence: Synthetic oligonucleotide
gctcatacctcaaaaatc

SEQ ID NO: 6897 - DNA, 18 bp, Artificial Sequence
  Description of Artificial Sequence: Synthetic oligonucleotide
ctaaagctcatacctcaa

SEQ ID NO: 6898 - DNA, 18 bp, Artificial Sequence
  Description of Artificial Sequence: Synthetic oligonucleotide
agtttctaaagctcatac

SEQ ID NO: 6899 - DNA, 18 bp, Artificial Sequence
  Description of Artificial Sequence: Synthetic oligonucleotide
aggtaagtttctaaagct

SEQ ID NO: 6900 - DNA, 18 bp, Artificial Sequence
  Description of Artificial Sequence: Synthetic oligonucleotide
atgagaggtaagtttcta

SEQ ID NO: 6901 - DNA, 18 bp, Artificial Sequence
  Description of Artificial Sequence: Synthetic oligonucleotide
gccacatgagaggtaagt

SEQ ID NO: 6902 - DNA, 18 bp, Artificial Sequence
  Description of Artificial Sequence: Synthetic oligonucleotide
tacatgccacatgagagg

SEQ ID NO: 6903 - DNA, 18 bp, Artificial Sequence
  Description of Artificial Sequence: Synthetic oligonucleotide
tgatgtacatgccacatg

SEQ ID NO: 6904 - DNA, 18 bp, Artificial Sequence
  Description of Artificial Sequence: Synthetic oligonucleotide
aagcctgatgtacatgcc

SEQ ID NO: 6905 - DNA, 18 bp, Artificial Sequence
  Description of Artificial Sequence: Synthetic oligonucleotide
agttaaagcctgatgtac

SEQ ID NO: 6906 - DNA, 18 bp, Artificial Sequence
  Description of Artificial Sequence: Synthetic oligonucleotide
actgaagttaaagcctga

SEQ ID NO: 6907 - DNA, 18 bp, Artificial Sequence
  Description of Artificial Sequence: Synthetic oligonucleotide
atcaaactgaagttaaag

SEQ ID NO: 6908 - DNA, 18 bp, Artificial Sequence
  Description of Artificial Sequence: Synthetic oligonucleotide
caacgatcaaactgaagt

SEQ ID NO: 6909 - DNA, 18 bp, Artificial Sequence
  Description of Artificial Sequence: Synthetic oligonucleotide
ccccacaacgatcaaact

SEQ ID NO: 6910 - DNA, 18 bp, Artificial Sequence
  Description of Artificial Sequence: Synthetic oligonucleotide
aatttccccacaacgatc

SEQ ID NO: 6911 - DNA, 18 bp, Artificial Sequence
  Description of Artificial Sequence: Synthetic oligonucleotide
gcataaatttccccacaa

SEQ ID NO: 6912 - DNA, 18 bp, Artificial Sequence
  Description of Artificial Sequence: Synthetic oligonucleotide
gaaatgcataaatttccc

SEQ ID NO: 6913 - DNA, 18 bp, Artificial Sequence
  Description of Artificial Sequence: Synthetic oligonucleotide
aaaaagaaatgcataaat

SEQ ID NO: 6914 - DNA, 18 bp, Artificial Sequence
  Description of Artificial Sequence: Synthetic oligonucleotide
gaaaaaaaaagaaatgca

SEQ ID NO: 6915 - DNA, 18 bp, Artificial Sequence
  Description of Artificial Sequence: Synthetic oligonucleotide
ggagagaaaaaaaaagaa

SEQ ID NO: 6916 - DNA, 18 bp, Artificial Sequence
  Description of Artificial Sequence: Synthetic oligonucleotide
gattatgactgagacagt

SEQ ID NO: 6917 - DNA, 18 bp, Artificial Sequence
  Description of Artificial Sequence: Synthetic oligonucleotide
tgcaagattatgactgag

SEQ ID NO: 6918 - DNA, 18 bp, Artificial Sequence
  Description of Artificial Sequence: Synthetic oligonucleotide
acgtttgcaagattatga

SEQ ID NO: 6919 - DNA, 18 bp, Artificial Sequence
  Description of Artificial Sequence: Synthetic oligonucleotide
aaaccacgtttgcaagat

SEQ ID NO: 6920 - DNA, 18 bp, Artificial Sequence
  Description of Artificial Sequence: Synthetic oligonucleotide
gattgaaaccacgtttgc

SEQ ID NO: 6921 - DNA, 18 bp, Artificial Sequence
  Description of Artificial Sequence: Synthetic oligonucleotide
ggagagattgaaaccacg

SEQ ID NO: 6922 - DNA, 18 bp, Artificial Sequence
  Description of Artificial Sequence: Synthetic oligonucleotide
caaagggagagattgaaa

SEQ ID NO: 6923 - DNA, 18 bp, Artificial Sequence
  Description of Artificial Sequence: Synthetic oligonucleotide
aaacccaaagggagagat

SEQ ID NO: 6924 - DNA, 18 bp, Artificial Sequence
  Description of Artificial Sequence: Synthetic oligonucleotide
ctataaaacccaaaggga

SEQ ID NO: 6925 - DNA, 18 bp, Artificial Sequence
  Description of Artificial Sequence: Synthetic oligonucleotide
aggtgctataaaacccaa

SEQ ID NO: 6926 - DNA, 18 bp, Artificial Sequence
  Description of Artificial Sequence: Synthetic oligonucleotide
gattaaggtgctataaaa

SEQ ID NO: 6927 - DNA, 18 bp, Artificial Sequence
  Description of Artificial Sequence: Synthetic oligonucleotide
aaaaagattaaggtgcta

SEQ ID NO: 6928 - DNA, 18 bp, Artificial Sequence
  Description of Artificial Sequence: Synthetic oligonucleotide
caacaaaaaagattaagg

SEQ ID NO: 6929 - DNA, 18 bp, Artificial Sequence
  Description of Artificial Sequence: Synthetic oligonucleotide
caaaacaacaaaaaagat

SEQ ID NO: 6930 - DNA, 18 bp, Artificial Sequence
  Description of Artificial Sequence: Synthetic oligonucleotide
caaaacaaaacaacaaaa

SEQ ID NO: 6931 - DNA, 18 bp, Artificial Sequence
  Description of Artificial Sequence: Synthetic oligonucleotide
caaaacaaaacaaaacaa

SEQ ID NO: 6932 - DNA, 18 bp, Artificial Sequence
  Description of Artificial Sequence: Synthetic oligonucleotide
aaaaacaaaacaaaacaa

SEQ ID NO: 6933 - DNA, 18 bp, Artificial Sequence
  Description of Artificial Sequence: Synthetic oligonucleotide
ctgtcaaaaacaaaacaa

SEQ ID NO: 6934 - DNA, 18 bp, Artificial Sequence
  Description of Artificial Sequence: Synthetic oligonucleotide
agactctgtcaaaaacaa

SEQ ID NO: 6935 - DNA, 18 bp, Artificial Sequence
  Description of Artificial Sequence: Synthetic oligonucleotide
gagtgagactctgtcaaa

SEQ ID NO: 6936 - DNA, 18 bp, Artificial Sequence
  Description of Artificial Sequence: Synthetic oligonucleotide
caacagagtgagactctg

SEQ ID NO: 6937 - DNA, 18 bp, Artificial Sequence
  Description of Artificial Sequence: Synthetic oligonucleotide
tggcaacagagtgagact

SEQ ID NO: 6938 - DNA, 18 bp, Artificial Sequence
  Description of Artificial Sequence: Synthetic oligonucleotide
cagtctggcaacagagtg

SEQ ID NO: 6939 - DNA, 18 bp, Artificial Sequence
  Description of Artificial Sequence: Synthetic oligonucleotide
cactccagtctggcaaca

SEQ ID NO: 6940 - DNA, 18 bp, Artificial Sequence
  Description of Artificial Sequence: Synthetic oligonucleotide
ctctgcactccagtctgg

SEQ ID NO: 6941 - DNA, 18 bp, Artificial Sequence
  Description of Artificial Sequence: Synthetic oligonucleotide
ggcgcctctgcactccag

SEQ ID NO: 6942 - DNA, 18 bp, Artificial Sequence
  Description of Artificial Sequence: Synthetic oligonucleotide
cgagaggcgcctctgcac

SEQ ID NO: 6943 - DNA, 18 bp, Artificial Sequence
  Description of Artificial Sequence: Synthetic oligonucleotide
gaaatcgagaggcgcctc

SEQ ID NO: 6944 - DNA, 18 bp, Artificial Sequence
  Description of Artificial Sequence: Synthetic oligonucleotide
gtcaagaaatcgagaggc

SEQ ID NO: 6945 - DNA, 18 bp, Artificial Sequence
  Description of Artificial Sequence: Synthetic oligonucleotide
atgaggtcaagaaatcga

SEQ ID NO: 6946 - DNA, 18 bp, Artificial Sequence
  Description of Artificial Sequence: Synthetic oligonucleotide
ggaccatgaggtcaagaa

SEQ ID NO: 6947 - DNA, 18 bp, Artificial Sequence
  Description of Artificial Sequence: Synthetic oligonucleotide
cgggcggaccatgaggtc

SEQ ID NO: 6948 - DNA, 18 bp, Artificial Sequence
  Description of Artificial Sequence: Synthetic oligonucleotide
tgaggcgggcggaccatg

SEQ ID NO: 6949 - DNA, 18 bp, Artificial Sequence
  Description of Artificial Sequence: Synthetic oligonucleotide
gaggctgaggcgggcgga

SEQ ID NO: 6950 - DNA, 18 bp, Artificial Sequence
  Description of Artificial Sequence: Synthetic oligonucleotide
tttgggaggctgaggcgg

SEQ ID NO: 6951 - DNA, 18 bp, Artificial Sequence
  Description of Artificial Sequence: Synthetic oligonucleotide
agcactttgggaggctga

SEQ ID NO: 6952 - DNA, 18 bp, Artificial Sequence
  Description of Artificial Sequence: Synthetic oligonucleotide
gtcccagcactttgggag

SEQ ID NO: 6953 - DNA, 18 bp, Artificial Sequence
  Description of Artificial Sequence: Synthetic oligonucleotide
ctgtagtcccagcacttt

SEQ ID NO: 6954 - DNA, 18 bp, Artificial Sequence
  Description of Artificial Sequence: Synthetic oligonucleotide
catgcctgtagtcccagc

SEQ ID NO: 6955 - DNA, 18 bp, Artificial Sequence
  Description of Artificial Sequence: Synthetic oligonucleotide
tggctcatgcctgtagtc

SEQ ID NO: 6956 - DNA, 18 bp, Artificial Sequence
  Description of Artificial Sequence: Synthetic oligonucleotide
cacggtggctcatgcctg

SEQ ID NO: 6957 - DNA, 18 bp, Artificial Sequence
  Description of Artificial Sequence: Synthetic oligonucleotide
ccaggcacggtggctcat

SEQ ID NO: 6958 - DNA, 18 bp, Artificial Sequence
  Description of Artificial Sequence: Synthetic oligonucleotide
attggccaggcacggtgg

SEQ ID NO: 6959 - DNA, 18 bp, Artificial Sequence
  Description of Artificial Sequence: Synthetic oligonucleotide
gtgttattggccaggcac

SEQ ID NO: 6960 - DNA, 18 bp, Artificial Sequence
  Description of Artificial Sequence: Synthetic oligonucleotide
gattaaggtgttattggc

SEQ ID NO: 6961 - DNA, 18 bp, Artificial Sequence
  Description of Artificial Sequence: Synthetic oligonucleotide
ctgaagattaaggtgtta

SEQ ID NO: 6962 - DNA, 18 bp, Artificial Sequence
  Description of Artificial Sequence: Synthetic oligonucleotide
tgcacctgaagattaagg

SEQ ID NO: 6963 - DNA, 18 bp, Artificial Sequence
  Description of Artificial Sequence: Synthetic oligonucleotide
cagcctgcacctgaagat

SEQ ID NO: 6964 - DNA, 18 bp, Artificial Sequence
  Description of Artificial Sequence: Synthetic oligonucleotide
cttcacagcctgcacctg

SEQ ID NO: 6965 - DNA, 18 bp, Artificial Sequence
  Description of Artificial Sequence: Synthetic oligonucleotide
cccatcttcacagcctgc

SEQ ID NO: 6966 - DNA, 18 bp, Artificial Sequence
  Description of Artificial Sequence: Synthetic oligonucleotide
cttttcccatcttcacag

SEQ ID NO: 6967 - DNA, 18 bp, Artificial Sequence
  Description of Artificial Sequence: Synthetic oligonucleotide
acagccttttcccatctt

SEQ ID NO: 6968 - DNA, 18 bp, Artificial Sequence
  Description of Artificial Sequence: Synthetic oligonucleotide
cattgacagccttttccc

SEQ ID NO: 6969 - DNA, 18 bp, Artificial Sequence
  Description of Artificial Sequence: Synthetic oligonucleotide
cagagcattgacagcctt

SEQ ID NO: 6970 - DNA, 18 bp, Artificial Sequence
  Description of Artificial Sequence: Synthetic oligonucleotide
gaagccagagcattgaca

SEQ ID NO: 6971 - DNA, 18 bp, Artificial Sequence
  Description of Artificial Sequence: Synthetic oligonucleotide
gggaagaagccagagcat

SEQ ID NO: 6972 - DNA, 18 bp, Artificial Sequence
  Description of Artificial Sequence: Synthetic oligonucleotide
tcagtgggaagaagccag

SEQ ID NO: 6973 - DNA, 18 bp, Artificial Sequence
  Description of Artificial Sequence: Synthetic oligonucleotide
ccctgtcagtgggaagaa

SEQ ID NO: 6974 - DNA, 18 bp, Artificial Sequence
  Description of Artificial Sequence: Synthetic oligonucleotide
acgtcccctgtcagtggg

SEQ ID NO: 6975 - DNA, 18 bp, Artificial Sequence
  Description of Artificial Sequence: Synthetic oligonucleotide
ccactacgtcccctgtca

SEQ ID NO: 6976 - DNA, 18 bp, Artificial Sequence
  Description of Artificial Sequence: Synthetic oligonucleotide
cattcccactacgtcccc

SEQ ID NO: 6977 - DNA, 18 bp, Artificial Sequence
  Description of Artificial Sequence: Synthetic oligonucleotide
attcccattcccactacg

SEQ ID NO: 6978 - DNA, 18 bp, Artificial Sequence
  Description of Artificial Sequence: Synthetic oligonucleotide
ggttcattcccattccca

SEQ ID NO: 6979 - DNA, 18 bp, Artificial Sequence
  Description of Artificial Sequence: Synthetic oligonucleotide
cttggggttcattcccat

SEQ ID NO: 6980 - DNA, 18 bp, Artificial Sequence
  Description of Artificial Sequence: Synthetic oligonucleotide
caccttggggttcattcc

SEQ ID NO: 6981 - DNA, 18 bp, Artificial Sequence
  Description of Artificial Sequence: Synthetic oligonucleotide
gttctcaccttggggttc

SEQ ID NO: 6982 - DNA, 18 bp, Artificial Sequence
  Description of Artificial Sequence: Synthetic oligonucleotide
ccactgttctcaccttgg

SEQ ID NO: 6983 - DNA, 18 bp, Artificial Sequence
  Description of Artificial Sequence: Synthetic oligonucleotide
cggttccactgttctcac

SEQ ID NO: 6984 - DNA, 18 bp, Artificial Sequence
  Description of Artificial Sequence: Synthetic oligonucleotide
caaaacggttccactgtt

SEQ ID NO: 6985 - DNA, 18 bp, Artificial Sequence
  Description of Artificial Sequence: Synthetic oligonucleotide
agttgcaaaacggttcca

SEQ ID NO: 6986 - DNA, 18 bp, Artificial Sequence
  Description of Artificial Sequence: Synthetic oligonucleotide
cagatagttgcaaaacgg

SEQ ID NO: 6987 - DNA, 18 bp, Artificial Sequence
  Description of Artificial Sequence: Synthetic oligonucleotide
tcgcccagatagttgcaa

SEQ ID NO: 6988 - DNA, 18 bp, Artificial Sequence
  Description of Artificial Sequence: Synthetic oligonucleotide
atgtgtcgcccagatagt

SEQ ID NO: 6989 - DNA, 18 bp, Artificial Sequence
  Description of Artificial Sequence: Synthetic oligonucleotide
cctgcatgtgtcgcccag

SEQ ID NO: 6990 - DNA, 18 bp, Artificial Sequence
  Description of Artificial Sequence: Synthetic oligonucleotide
ccaggcctgcatgtgtcg

SEQ ID NO: 6991 - DNA, 18 bp, Artificial Sequence
  Description of Artificial Sequence: Synthetic oligonucleotide
cccagccaggcctgcatg

SEQ ID NO: 6992 - DNA, 18 bp, Artificial Sequence
  Description of Artificial Sequence: Synthetic oligonucleotide
ggaagcccagccaggcct

SEQ ID NO: 6993 - DNA, 18 bp, Artificial Sequence
  Description of Artificial Sequence: Synthetic oligonucleotide
gccttggaagcccagcca

SEQ ID NO: 6994 - DNA, 18 bp, Artificial Sequence
  Description of Artificial Sequence: Synthetic oligonucleotide
cacaagccttggaagccc

SEQ ID NO: 6995 - DNA, 18 bp, Artificial Sequence
  Description of Artificial Sequence: Synthetic oligonucleotide
taccacacaagccttgga

SEQ ID NO: 6996 - DNA, 18 bp, Artificial Sequence
  Description of Artificial Sequence: Synthetic oligonucleotide
gtttttaccacacaagcc

SEQ ID NO: 6997 - DNA, 18 bp, Artificial Sequence
  Description of Artificial Sequence: Synthetic oligonucleotide
ataatgtttttaccacac

SEQ ID NO: 6998 - DNA, 18 bp, Artificial Sequence
  Description of Artificial Sequence: Synthetic oligonucleotide
aggtaataatgtttttac

SEQ ID NO: 6999 - DNA, 18 bp, Artificial Sequence
  Description of Artificial Sequence: Synthetic oligonucleotide
gataaaggtaataatgtt

SEQ ID NO: 7000 - DNA, 18 bp, Artificial Sequence
  Description of Artificial Sequence: Synthetic oligonucleotide
ctatagataaaggtaata

SEQ ID NO: 7001 - DNA, 18 bp, Artificial Sequence
  Description of Artificial Sequence: Synthetic oligonucleotide
cacattagttaacatgtg

SEQ ID NO: 7002 - DNA, 18 bp, Artificial Sequence
  Description of Artificial Sequence: Synthetic oligonucleotide
aagaacacattagttaac

SEQ ID NO: 7003 - DNA, 18 bp, Artificial Sequence
  Description of Artificial Sequence: Synthetic oligonucleotide
aaccaaagaacacattag

SEQ ID NO: 7004 - DNA, 18 bp, Artificial Sequence
  Description of Artificial Sequence: Synthetic oligonucleotide
tgagaaaccaaagaacac

SEQ ID NO: 7005 - DNA, 18 bp, Artificial Sequence
  Description of Artificial Sequence: Synthetic oligonucleotide
ttgtttgagaaaccaaag

SEQ ID NO: 7006 - DNA, 18 bp, Artificial Sequence
  Description of Artificial Sequence: Synthetic oligonucleotide
cagtcttgtttgagaaac

SEQ ID NO: 7007 - DNA, 18 bp, Artificial Sequence
  Description of Artificial Sequence: Synthetic oligonucleotide
gccatcagtcttgtttga

SEQ ID NO: 7008 - DNA, 18 bp, Artificial Sequence
  Description of Artificial Sequence: Synthetic oligonucleotide
gccaagccatcagtcttg

SEQ ID NO: 7009 - DNA, 18 bp, Artificial Sequence
  Description of Artificial Sequence: Synthetic oligonucleotide
aaacagccaagccatcag

SEQ ID NO: 7010 - DNA, 18 bp, Artificial Sequence
  Description of Artificial Sequence: Synthetic oligonucleotide
acaaaaaacagccaagcc

SEQ ID NO: 7011 - DNA, 18 bp, Artificial Sequence
  Description of Artificial Sequence: Synthetic oligonucleotide
cataaacaaaaaacagcc

SEQ ID NO: 7012 - DNA, 18 bp, Artificial Sequence
  Description of Artificial Sequence: Synthetic oligonucleotide
ttttccataaacaaaaaa

SEQ ID NO: 7013 - DNA, 18 bp, Artificial Sequence
  Description of Artificial Sequence: Synthetic oligonucleotide
ttagcttttccataaaca

SEQ ID NO: 7014 - DNA, 18 bp, Artificial Sequence
  Description of Artificial Sequence: Synthetic oligonucleotide
aggaattagcttttccat

SEQ ID NO: 7015 - DNA, 18 bp, Artificial Sequence
  Description of Artificial Sequence: Synthetic oligonucleotide
agatcaggaattagcttt

SEQ ID NO: 7016 - DNA, 18 bp, Artificial Sequence
  Description of Artificial Sequence: Synthetic oligonucleotide
tgcaaagatcaggaatta

SEQ ID NO: 7017 - DNA, 18 bp, Artificial Sequence
  Description of Artificial Sequence: Synthetic oligonucleotide
atagatgcaaagatcagg

SEQ ID NO: 7018 - DNA, 18 bp, Artificial Sequence
  Description of Artificial Sequence: Synthetic oligonucleotide
ctaaaatagatgcaaaga

SEQ ID NO: 7019 - DNA, 18 bp, Artificial Sequence
  Description of Artificial Sequence: Synthetic oligonucleotide
tattactaaaatagatgc

SEQ ID NO: 7020 - DNA, 18 bp, Artificial Sequence
  Description of Artificial Sequence: Synthetic oligonucleotide
ataactattactaaaata

SEQ ID NO: 7021 - DNA, 18 bp, Artificial Sequence
  Description of Artificial Sequence: Synthetic oligonucleotide
cgtgcataactattacta

SEQ ID NO: 7022 - DNA, 18 bp, Artificial Sequence
  Description of Artificial Sequence: Synthetic oligonucleotide
actcgtgcataactatta

SEQ ID NO: 7023 - DNA, 18 bp, Artificial Sequence
  Description of Artificial Sequence: Synthetic oligonucleotide
ctcgcactcgtgcataac

SEQ ID NO: 7024 - DNA, 18 bp, Artificial Sequence
  Description of Artificial Sequence: Synthetic oligonucleotide
cacagctcgcactcgtgc

SEQ ID NO: 7025 - DNA, 18 bp, Artificial Sequence
  Description of Artificial Sequence: Synthetic oligonucleotide
atcaccacagctcgcact

SEQ ID NO: 7026 - DNA, 18 bp, Artificial Sequence
  Description of Artificial Sequence: Synthetic oligonucleotide
gggtcatcaccacagctc

SEQ ID NO: 7027 - DNA, 18 bp, Artificial Sequence
  Description of Artificial Sequence: Synthetic oligonucleotide
atctcgggtcatcaccac

SEQ ID NO: 7028 - DNA, 18 bp, Artificial Sequence
  Description of Artificial Sequence: Synthetic oligonucleotide
gagtcatctcgggtcatc

SEQ ID NO: 7029 - DNA, 18 bp, Artificial Sequence
  Description of Artificial Sequence: Synthetic oligonucleotide
cacttgagtcatctcggg

SEQ ID NO: 7030 - DNA, 18 bp, Artificial Sequence
  Description of Artificial Sequence: Synthetic oligonucleotide
tccaccacttgagtcatc

SEQ ID NO: 7031 - DNA, 18 bp, Artificial Sequence
  Description of Artificial Sequence: Synthetic oligonucleotide
aaccatccaccacttgag

SEQ ID NO: 7032 - DNA, 18 bp, Artificial Sequence
  Description of Artificial Sequence: Synthetic oligonucleotide
gtggtaaccatccaccac

SEQ ID NO: 7033 - DNA, 18 bp, Artificial Sequence
  Description of Artificial Sequence: Synthetic oligonucleotide
tccaagtggtaaccatcc

SEQ ID NO: 7034 - DNA, 18 bp, Artificial Sequence
  Description of Artificial Sequence: Synthetic oligonucleotide
ctccctccaagtggtaac

SEQ ID NO: 7035 - DNA, 18 bp, Artificial Sequence
  Description of Artificial Sequence: Synthetic oligonucleotide
gtccactccctccaagtg

SEQ ID NO: 7036 - DNA, 18 bp, Artificial Sequence
  Description of Artificial Sequence: Synthetic oligonucleotide
gcttagtccactccctcc

SEQ ID NO: 7037 - DNA, 18 bp, Artificial Sequence
  Description of Artificial Sequence: Synthetic oligonucleotide
acgctgcttagtccactc

SEQ ID NO: 7038 - DNA, 18 bp, Artificial Sequence
  Description of Artificial Sequence: Synthetic oligonucleotide
cagtgacgctgcttagtc

SEQ ID NO: 7039 - DNA, 18 bp, Artificial Sequence
  Description of Artificial Sequence: Synthetic oligonucleotide
ttgaagacagtgacgctg

SEQ ID NO: 7040 - DNA, 18 bp, Artificial Sequence
  Description of Artificial Sequence: Synthetic oligonucleotide
ggactttgaagacagtga

SEQ ID NO: 7041 - DNA, 18 bp, Artificial Sequence
  Description of Artificial Sequence: Synthetic oligonucleotide
atgagggactttgaagac

SEQ ID NO: 7042 - DNA, 18 bp, Artificial Sequence
  Description of Artificial Sequence: Synthetic oligonucleotide
tcctgatgagggactttg

SEQ ID NO: 7043 - DNA, 18 bp, Artificial Sequence
  Description of Artificial Sequence: Synthetic oligonucleotide
tctcttcctgatgaggga

SEQ ID NO: 7044 - DNA, 18 bp, Artificial Sequence
  Description of Artificial Sequence: Synthetic oligonucleotide
gccattctcttcctgatg

SEQ ID NO: 7045 - DNA, 18 bp, Artificial Sequence
  Description of Artificial Sequence: Synthetic oligonucleotide
gcacagccattctcttcc

SEQ ID NO: 7046 - DNA, 18 bp, Artificial Sequence
  Description of Artificial Sequence: Synthetic oligonucleotide
agtcagcacagccattct

SEQ ID NO: 7047 - DNA, 18 bp, Artificial Sequence
  Description of Artificial Sequence: Synthetic oligonucleotide
aaaaaagtcagcacagcc

SEQ ID NO: 7048 - DNA, 18 bp, Artificial Sequence
  Description of Artificial Sequence: Synthetic oligonucleotide
cggataaaaaagtcagca

SEQ ID NO: 7049 - DNA, 18 bp, Artificial Sequence
  Description of Artificial Sequence: Synthetic oligonucleotide
ctccacggataaaaaagt

SEQ ID NO: 7050 - DNA, 18 bp, Artificial Sequence
  Description of Artificial Sequence: Synthetic oligonucleotide
tcgctctccacggataaa

SEQ ID NO: 7051 - DNA, 18 bp, Artificial Sequence
  Description of Artificial Sequence: Synthetic oligonucleotide
ctgagtcgctctccacgg

SEQ ID NO: 7052 - DNA, 18 bp, Artificial Sequence
  Description of Artificial Sequence: Synthetic oligonucleotide
tgtccctgagtcgctctc

SEQ ID NO: 7053 - DNA, 18 bp, Artificial Sequence
  Description of Artificial Sequence: Synthetic oligonucleotide
cattttgtccctgagtcg

SEQ ID NO: 7054 - DNA, 18 bp, Artificial Sequence
  Description of Artificial Sequence: Synthetic oligonucleotide
taccattttgtccctgag

SEQ ID NO: 7055 - DNA, 18 bp, Artificial Sequence
  Description of Artificial Sequence: Synthetic oligonucleotide
ttcattaccattttgtcc

SEQ ID NO: 7056 - DNA, 18 bp, Artificial Sequence
  Description of Artificial Sequence: Synthetic oligonucleotide
cattattcattaccattt

SEQ ID NO: 7057 - DNA, 18 bp, Artificial Sequence
  Description of Artificial Sequence: Synthetic oligonucleotide
agatacattattcattac

SEQ ID NO: 7058 - DNA, 18 bp, Artificial Sequence
  Description of Artificial Sequence: Synthetic oligonucleotide
gtattagatacattattc

SEQ ID NO: 7059 - DNA, 18 bp, Artificial Sequence
  Description of Artificial Sequence: Synthetic oligonucleotide
ttatagtattagatacat

SEQ ID NO: 7060 - DNA, 18 bp, Artificial Sequence
  Description of Artificial Sequence: Synthetic oligonucleotide
taaaattatagtattaga

SEQ ID NO: 7061 - DNA, 18 bp, Artificial Sequence
  Description of Artificial Sequence: Synthetic oligonucleotide
ttatctaaaattatagta

SEQ ID NO: 7062 - DNA, 18 bp, Artificial Sequence
  Description of Artificial Sequence: Synthetic oligonucleotide
attcattatctaaaatta

SEQ ID NO: 7063 - DNA, 18 bp, Artificial Sequence
  Description of Artificial Sequence: Synthetic oligonucleotide
agataattcattatctaa

SEQ ID NO: 7064 - DNA, 18 bp, Artificial Sequence
  Description of Artificial Sequence: Synthetic oligonucleotide
taaacagataattcatta

SEQ ID NO: 7065 - DNA, 18 bp, Artificial Sequence
  Description of Artificial Sequence: Synthetic oligonucleotide
aactttaaacagataatt

SEQ ID NO: 7066 - DNA, 18 bp, Artificial Sequence
  Description of Artificial Sequence: Synthetic oligonucleotide
atcataactttaaacaga

SEQ ID NO: 7067 - DNA, 18 bp, Artificial Sequence
  Description of Artificial Sequence: Synthetic oligonucleotide
tactaatcataactttaa

SEQ ID NO: 7068 - DNA, 18 bp, Artificial Sequence
  Description of Artificial Sequence: Synthetic oligonucleotide
cagtatactaatcataac

SEQ ID NO: 7069 - DNA, 18 bp, Artificial Sequence
  Description of Artificial Sequence: Synthetic oligonucleotide
cacaacagtatactaatc

SEQ ID NO: 7070 - DNA, 18 bp, Artificial Sequence
  Description of Artificial Sequence: Synthetic oligonucleotide
aaactcacaacagtatac

SEQ ID NO: 7071 - DNA, 18 bp, Artificial Sequence
  Description of Artificial Sequence: Synthetic oligonucleotide
gaaaaaaactcacaacag

SEQ ID NO: 7072 - DNA, 18 bp, Artificial Sequence
  Description of Artificial Sequence: Synthetic oligonucleotide
caggtgaaaaaaactcac

SEQ ID NO: 7073 - DNA, 18 bp, Artificial Sequence
  Description of Artificial Sequence: Synthetic oligonucleotide
attcacaggtgaaaaaaa

SEQ ID NO: 7074 - DNA, 18 bp, Artificial Sequence
  Description of Artificial Sequence: Synthetic oligonucleotide
tactgattcacaggtgaa

SEQ ID NO: 7075 - DNA, 18 bp, Artificial Sequence
  Description of Artificial Sequence: Synthetic oligonucleotide
tgtacaacattcagtcat

SEQ ID NO: 7076 - DNA, 18 bp, Artificial Sequence
  Description of Artificial Sequence: Synthetic oligonucleotide
aagaatgtacaacattca

SEQ ID NO: 7077 - DNA, 18 bp, Artificial Sequence
  Description of Artificial Sequence: Synthetic oligonucleotide
ctccaaagaatgtacaac

SEQ ID NO: 7078 - DNA, 18 bp, Artificial Sequence
  Description of Artificial Sequence: Synthetic oligonucleotide
ttctgctccaaagaatgt

SEQ ID NO: 7079 - DNA, 18 bp, Artificial Sequence
  Description of Artificial Sequence: Synthetic oligonucleotide
gaagcttctgctccaaag

SEQ ID NO: 7080 - DNA, 18 bp, Artificial Sequence
  Description of Artificial Sequence: Synthetic oligonucleotide
aaaaagaagcttctgctc

SEQ ID NO: 7081 - DNA, 18 bp, Artificial Sequence
  Description of Artificial Sequence: Synthetic oligonucleotide
ctaagaaaaagaagcttc

SEQ ID NO: 7082 - DNA, 18 bp, Artificial Sequence
  Description of Artificial Sequence: Synthetic oligonucleotide
aaactctaagaaaaagaa

SEQ ID NO: 7083 - DNA, 18 bp, Artificial Sequence
  Description of Artificial Sequence: Synthetic oligonucleotide
ttaagaaactctaagaaa

SEQ ID NO: 7084 - DNA, 18 bp, Artificial Sequence
  Description of Artificial Sequence: Synthetic oligonucleotide
atcagttaagaaactcta

SEQ ID NO: 7085 - DNA, 18 bp, Artificial Sequence
  Description of Artificial Sequence: Synthetic oligonucleotide
agaaaatcagttaagaaa

SEQ ID NO: 7086 - DNA, 18 bp, Artificial Sequence
  Description of Artificial Sequence: Synthetic oligonucleotide
ggaggagaaaatcagtta

SEQ ID NO: 7087 - DNA, 18 bp, Artificial Sequence
  Description of Artificial Sequence: Synthetic oligonucleotide
ggtggggaggagaaaatc

SEQ ID NO: 7088 - DNA, 18 bp, Artificial Sequence
  Description of Artificial Sequence: Synthetic oligonucleotide
attggggtggggaggaga

SEQ ID NO: 7089 - DNA, 18 bp, Artificial Sequence
  Description of Artificial Sequence: Synthetic oligonucleotide
tggtgattggggtgggga

SEQ ID NO: 7090 - DNA, 18 bp, Artificial Sequence
  Description of Artificial Sequence: Synthetic oligonucleotide
gtggttggtgattggggt

SEQ ID NO: 7091 - DNA, 18 bp, Artificial Sequence
  Description of Artificial Sequence: Synthetic oligonucleotide
tgatggtggttggtgatt

SEQ ID NO: 7092 - DNA, 18 bp, Artificial Sequence
  Description of Artificial Sequence: Synthetic oligonucleotide
ctttatgatggtggttgg

SEQ ID NO: 7093 - DNA, 18 bp, Artificial Sequence
  Description of Artificial Sequence: Synthetic oligonucleotide
cagacctttatgatggtg

SEQ ID NO: 7094 - DNA, 18 bp, Artificial Sequence
  Description of Artificial Sequence: Synthetic oligonucleotide
aatagcagacctttatga

SEQ ID NO: 7095 - DNA, 18 bp, Artificial Sequence
  Description of Artificial Sequence: Synthetic oligonucleotide
agatcaatagcagacctt

SEQ ID NO: 7096 - DNA, 18 bp, Artificial Sequence
  Description of Artificial Sequence: Synthetic oligonucleotide
tcaagatcaatagcagac

SEQ ID NO: 7097 - DNA, 18 bp, Artificial Sequence
  Description of Artificial Sequence: Synthetic oligonucleotide
tctcttcaagatcaatag

SEQ ID NO: 7098 - DNA, 18 bp, Artificial Sequence
  Description of Artificial Sequence: Synthetic oligonucleotide
tgccatctcttcaagatc

SEQ ID NO: 7099 - DNA, 18 bp, Artificial Sequence
  Description of Artificial Sequence: Synthetic oligonucleotide
ccagatgccatctcttca

SEQ ID NO: 7100 - DNA, 18 bp, Artificial Sequence
  Description of Artificial Sequence: Synthetic oligonucleotide
taagaccagatgccatct

SEQ ID NO: 7101 - DNA, 18 bp, Artificial Sequence
  Description of Artificial Sequence: Synthetic oligonucleotide
tttgttaagaccagatgc

SEQ ID NO: 7102 - DNA, 18 bp, Artificial Sequence
  Description of Artificial Sequence: Synthetic oligonucleotide
tttcttttgttaagacca

SEQ ID NO: 7103 - DNA, 18 bp, Artificial Sequence
  Description of Artificial Sequence: Synthetic oligonucleotide
tcatttttcttttgttaa

SEQ ID NO: 7104 - DNA, 18 bp, Artificial Sequence
  Description of Artificial Sequence: Synthetic oligonucleotide
tgctgaatcatttttctt

SEQ ID NO: 7105 - DNA, 18 bp, Artificial Sequence
  Description of Artificial Sequence: Synthetic oligonucleotide
cagcatgctgaatcattt

SEQ ID NO: 7106 - DNA, 18 bp, Artificial Sequence
  Description of Artificial Sequence: Synthetic oligonucleotide
aaatacagcatgctgaat

SEQ ID NO: 7107 - DNA, 18 bp, Artificial Sequence
  Description of Artificial Sequence: Synthetic oligonucleotide
tctttaaatacagcatgc

SEQ ID NO: 7108 - DNA, 18 bp, Artificial Sequence
  Description of Artificial Sequence: Synthetic oligonucleotide
caagttctttaaatacag

SEQ ID NO: 7109 - DNA, 18 bp, Artificial Sequence
  Description of Artificial Sequence: Synthetic oligonucleotide
cttcacaagttctttaaa

SEQ ID NO: 7110 - DNA, 18 bp, Artificial Sequence
  Description of Artificial Sequence: Synthetic oligonucleotide
taccttcacaagttcttt

SEQ ID NO: 7111 - DNA, 18 bp, Artificial Sequence
  Description of Artificial Sequence: Synthetic oligonucleotide
acttttaccttcacaagt

SEQ ID NO: 7112 - DNA, 18 bp, Artificial Sequence
  Description of Artificial Sequence: Synthetic oligonucleotide
catatacttttaccttca

SEQ ID NO: 7113 - DNA, 18 bp, Artificial Sequence
  Description of Artificial Sequence: Synthetic oligonucleotide
atcttcatatacttttac

SEQ ID NO: 7114 - DNA, 18 bp, Artificial Sequence
  Description of Artificial Sequence: Synthetic oligonucleotide
gcataatcttcatatact

SEQ ID NO: 7115 - DNA, 18 bp, Artificial Sequence
  Description of Artificial Sequence: Synthetic oligonucleotide
tcacagcataatcttcat

SEQ ID NO: 7116 - DNA, 18 bp, Artificial Sequence
  Description of Artificial Sequence: Synthetic oligonucleotide
tagaatcacagcataatc

SEQ ID NO: 7117 - DNA, 18 bp, Artificial Sequence
  Description of Artificial Sequence: Synthetic oligonucleotide
gagtatagaatcacagca

SEQ ID NO: 7118 - DNA, 18 bp, Artificial Sequence
  Description of Artificial Sequence: Synthetic oligonucleotide
ccactgagtatagaatca

SEQ ID NO: 7119 - DNA, 18 bp, Artificial Sequence
  Description of Artificial Sequence: Synthetic oligonucleotide
tttatccactgagtatag

SEQ ID NO: 7120 - DNA, 18 bp, Artificial Sequence
  Description of Artificial Sequence: Synthetic oligonucleotide
gcttttttatccactgag

SEQ ID NO: 7121 - DNA, 18 bp, Artificial Sequence
  Description of Artificial Sequence: Synthetic oligonucleotide
ctaacgcttttttatcca

SEQ ID NO: 7122 - DNA, 18 bp, Artificial Sequence
  Description of Artificial Sequence: Synthetic oligonucleotide
tagtgctaacgctttttt

SEQ ID NO: 7123 - DNA, 18 bp, Artificial Sequence
  Description of Artificial Sequence: Synthetic oligonucleotide
atttgtagtgctaacgct

SEQ ID NO: 7124 - DNA, 18 bp, Artificial Sequence
  Description of Artificial Sequence: Synthetic oligonucleotide
gaaatatttgtagtgcta

SEQ ID NO: 7125 - DNA, 18 bp, Artificial Sequence
  Description of Artificial Sequence: Synthetic oligonucleotide
attctgaaatatttgtag

SEQ ID NO: 7126 - DNA, 18 bp, Artificial Sequence
  Description of Artificial Sequence: Synthetic oligonucleotide
taaaaattctgaaatatt

SEQ ID NO: 7127 - DNA, 18 bp, Artificial Sequence
  Description of Artificial Sequence: Synthetic oligonucleotide
atatttaaaaattctgaa

SEQ ID NO: 7128 - DNA, 18 bp, Artificial Sequence
  Description of Artificial Sequence: Synthetic oligonucleotide
aaaacatatttaaaaatt

SEQ ID NO: 7129 - DNA, 18 bp, Artificial Sequence
  Description of Artificial Sequence: Synthetic oligonucleotide
cataaaaaacatatttaa

SEQ ID NO: 7130 - DNA, 18 bp, Artificial Sequence
  Description of Artificial Sequence: Synthetic oligonucleotide
tattccataaaaaacata

SEQ ID NO: 7131 - DNA, 18 bp, Artificial Sequence
  Description of Artificial Sequence: Synthetic oligonucleotide
cttttgttcagaatgagg

SEQ ID NO: 7132 - DNA, 18 bp, Artificial Sequence
  Description of Artificial Sequence: Synthetic oligonucleotide
aatcccttttgttcagaa

SEQ ID NO: 7133 - DNA, 18 bp, Artificial Sequence
  Description of Artificial Sequence: Synthetic oligonucleotide
tctctaatcccttttgtt

SEQ ID NO: 7134 - DNA, 18 bp, Artificial Sequence
  Description of Artificial Sequence: Synthetic oligonucleotide
tttcttctctaatccctt

SEQ ID NO: 7135 - DNA, 18 bp, Artificial Sequence
  Description of Artificial Sequence: Synthetic oligonucleotide
agatttttcttctctaat

SEQ ID NO: 7136 - DNA, 18 bp, Artificial Sequence
  Description of Artificial Sequence: Synthetic oligonucleotide
tcaagagatttttcttct

SEQ ID NO: 7137 - DNA, 18 bp, Artificial Sequence
  Description of Artificial Sequence: Synthetic oligonucleotide
ttatatcaagagattttt

SEQ ID NO: 7138 - DNA, 18 bp, Artificial Sequence
  Description of Artificial Sequence: Synthetic oligonucleotide
aagccttatatcaagaga

SEQ ID NO: 7139 - DNA, 18 bp, Artificial Sequence
  Description of Artificial Sequence: Synthetic oligonucleotide
ctttcaagccttatatca

SEQ ID NO: 7140 - DNA, 18 bp, Artificial Sequence
  Description of Artificial Sequence: Synthetic oligonucleotide
ccttgctttcaagcctta

SEQ ID NO: 7141 - DNA, 18 bp, Artificial Sequence
  Description of Artificial Sequence: Synthetic oligonucleotide
cctgcccttgctttcaag

SEQ ID NO: 7142 - DNA, 18 bp, Artificial Sequence
  Description of Artificial Sequence: Synthetic oligonucleotide
gattgcctgcccttgctt

SEQ ID NO: 7143 - DNA, 18 bp, Artificial Sequence
  Description of Artificial Sequence: Synthetic oligonucleotide
accaagattgcctgccct

SEQ ID NO: 7144 - DNA, 18 bp, Artificial Sequence
  Description of Artificial Sequence: Synthetic oligonucleotide
tcacaaccaagattgcct

SEQ ID NO: 7145 - DNA, 18 bp, Artificial Sequence
  Description of Artificial Sequence: Synthetic oligonucleotide
aatattcacaaccaagat

SEQ ID NO: 7146 - DNA, 18 bp, Artificial Sequence
  Description of Artificial Sequence: Synthetic oligonucleotide
cagaaaatattcacaacc

SEQ ID NO: 7147 - DNA, 18 bp, Artificial Sequence
  Description of Artificial Sequence: Synthetic oligonucleotide
aaaatcagaaaatattca

SEQ ID NO: 7148 - DNA, 18 bp, Artificial Sequence
  Description of Artificial Sequence: Synthetic oligonucleotide
ctggaaaaatcagaaaat

SEQ ID NO: 7149 - DNA, 18 bp, Artificial Sequence
  Description of Artificial Sequence: Synthetic oligonucleotide
gatttctggaaaaatcag

SEQ ID NO: 7150 - DNA, 18 bp, Artificial Sequence
  Description of Artificial Sequence: Synthetic oligonucleotide
tgcttgatttctggaaaa

SEQ ID NO: 7151 - DNA, 18 bp, Artificial Sequence
  Description of Artificial Sequence: Synthetic oligonucleotide
tcttctgcttgatttctg

SEQ ID NO: 7152 - DNA, 18 bp, Artificial Sequence
  Description of Artificial Sequence: Synthetic oligonucleotide
caatcttctgcttgattt

SEQ ID NO: 7153 - DNA, 18 bp, Artificial Sequence
  Description of Artificial Sequence: Synthetic oligonucleotide
cagctcaatcttctgctt

SEQ ID NO: 7154 - DNA, 18 bp, Artificial Sequence
  Description of Artificial Sequence: Synthetic oligonucleotide
atcagcagctcaatcttc

SEQ ID NO: 7155 - DNA, 18 bp, Artificial Sequence
  Description of Artificial Sequence: Synthetic oligonucleotide
ctgacatcagcagctcaa

SEQ ID NO: 7156 - DNA, 18 bp, Artificial Sequence
  Description of Artificial Sequence: Synthetic oligonucleotide
gttaactgacatcagcag

SEQ ID NO: 7157 - DNA, 18 bp, Artificial Sequence
  Description of Artificial Sequence: Synthetic oligonucleotide
tcagagttaactgacatc

SEQ ID NO: 7158 - DNA, 18 bp, Artificial Sequence
  Description of Artificial Sequence: Synthetic oligonucleotide
acttctcagagttaactg

SEQ ID NO: 7159 - DNA, 18 bp, Artificial Sequence
  Description of Artificial Sequence: Synthetic oligonucleotide
aggacgacttctcagagt

SEQ ID NO: 7160 - DNA, 18 bp, Artificial Sequence
  Description of Artificial Sequence: Synthetic oligonucleotide
tgaagaggacgacttctc

SEQ ID NO: 7161 - DNA, 18 bp, Artificial Sequence
  Description of Artificial Sequence: Synthetic oligonucleotide
ctttctgaagaggacgac

SEQ ID NO: 7162 - DNA, 18 bp, Artificial Sequence
  Description of Artificial Sequence: Synthetic oligonucleotide
tacctttctgaagaggac

SEQ ID NO: 7163 - DNA, 18 bp, Artificial Sequence
  Description of Artificial Sequence: Synthetic oligonucleotide
agctgtacctttctgaag

SEQ ID NO: 7164 - DNA, 18 bp, Artificial Sequence
  Description of Artificial Sequence: Synthetic oligonucleotide
gatgtagctgtacctttc

SEQ ID NO: 7165 - DNA, 18 bp, Artificial Sequence
  Description of Artificial Sequence: Synthetic oligonucleotide
caagagatgtagctgtac

SEQ ID NO: 7166 - DNA, 18 bp, Artificial Sequence
  Description of Artificial Sequence: Synthetic oligonucleotide
tcatgcaagagatgtagc

SEQ ID NO: 7167 - DNA, 18 bp, Artificial Sequence
  Description of Artificial Sequence: Synthetic oligonucleotide
attgttcatgcaagagat

SEQ ID NO: 7168 - DNA, 18 bp, Artificial Sequence
  Description of Artificial Sequence: Synthetic oligonucleotide
cattaattgttcatgcaa

SEQ ID NO: 7169 - DNA, 18 bp, Artificial Sequence
  Description of Artificial Sequence: Synthetic oligonucleotide
tacaccattaattgttca

SEQ ID NO: 7170 - DNA, 18 bp, Artificial Sequence
  Description of Artificial Sequence: Synthetic oligonucleotide
aatgctacaccattaatt

SEQ ID NO: 7171 - DNA, 18 bp, Artificial Sequence
  Description of Artificial Sequence: Synthetic oligonucleotide
ttagcaatgctacaccat

SEQ ID NO: 7172 - DNA, 18 bp, Artificial Sequence
  Description of Artificial Sequence: Synthetic oligonucleotide
gtttcttagcaatgctac

SEQ ID NO: 7173 - DNA, 18 bp, Artificial Sequence
  Description of Artificial Sequence: Synthetic oligonucleotide
ggtttgtttcttagcaat

SEQ ID NO: 7174 - DNA, 18 bp, Artificial Sequence
  Description of Artificial Sequence: Synthetic oligonucleotide
gtcctggtttgtttctta

SEQ ID NO: 7175 - DNA, 18 bp, Artificial Sequence
  Description of Artificial Sequence: Synthetic oligonucleotide
aatatgtcctggtttgtt

SEQ ID NO: 7176 - DNA, 18 bp, Artificial Sequence
  Description of Artificial Sequence: Synthetic oligonucleotide
aaaaaaatatgtcctggt

SEQ ID NO: 7177 - DNA, 18 bp, Artificial Sequence
  Description of Artificial Sequence: Synthetic oligonucleotide
aagaaaaaaaaatatgtc

SEQ ID NO: 7178 - DNA, 18 bp, Artificial Sequence
  Description of Artificial Sequence: Synthetic oligonucleotide
ttgacaagaaaaaaaaat

SEQ ID NO: 7179 - DNA, 18 bp, Artificial Sequence
  Description of Artificial Sequence: Synthetic oligonucleotide
caaacttgacaagaaaaa

SEQ ID NO: 7180 - DNA, 18 bp, Artificial Sequence
  Description of Artificial Sequence: Synthetic oligonucleotide
tatagcaaacttgacaag

SEQ ID NO: 7181 - DNA, 18 bp, Artificial Sequence
  Description of Artificial Sequence: Synthetic oligonucleotide
cgttatatagcaaacttg

SEQ ID NO: 7182 - DNA, 18 bp, Artificial Sequence
  Description of Artificial Sequence: Synthetic oligonucleotide
caatacgttatatagcaa

SEQ ID NO: 7183 - DNA, 18 bp, Artificial Sequence
  Description of Artificial Sequence: Synthetic oligonucleotide
aaagatctagaatttcag

SEQ ID NO: 7184 - DNA, 18 bp, Artificial Sequence
  Description of Artificial Sequence: Synthetic oligonucleotide
actgaaaagatctagaat

SEQ ID NO: 7185 - DNA, 18 bp, Artificial Sequence
  Description of Artificial Sequence: Synthetic oligonucleotide
acactactgaaaagatct

SEQ ID NO: 7186 - DNA, 18 bp, Artificial Sequence
  Description of Artificial Sequence: Synthetic oligonucleotide
taatcacactactgaaaa

SEQ ID NO: 7187 - DNA, 18 bp, Artificial Sequence
  Description of Artificial Sequence: Synthetic oligonucleotide
acgcctaatcacactact

SEQ ID NO: 7188 - DNA, 18 bp, Artificial Sequence
  Description of Artificial Sequence: Synthetic oligonucleotide
agttaacgcctaatcaca

SEQ ID NO: 7189 - DNA, 18 bp, Artificial Sequence
  Description of Artificial Sequence: Synthetic oligonucleotide
tgaaaagttaacgcctaa

SEQ ID NO: 7190 - DNA, 18 bp, Artificial Sequence
  Description of Artificial Sequence: Synthetic oligonucleotide
taaggtgaaaagttaacg

SEQ ID NO: 7191 - DNA, 18 bp, Artificial Sequence
  Description of Artificial Sequence: Synthetic oligonucleotide
agtggtaaggtgaaaagt

SEQ ID NO: 7192 - DNA, 18 bp, Artificial Sequence
  Description of Artificial Sequence: Synthetic oligonucleotide
ctgtcagtggtaaggtga

SEQ ID NO: 7193 - DNA, 18 bp, Artificial Sequence
  Description of Artificial Sequence: Synthetic oligonucleotide
acgacctgtcagtggtaa

SEQ ID NO: 7194 - DNA, 18 bp, Artificial Sequence
  Description of Artificial Sequence: Synthetic oligonucleotide
gggccacgacctgtcagt

SEQ ID NO: 7195 - DNA, 18 bp, Artificial Sequence
  Description of Artificial Sequence: Synthetic oligonucleotide
cttcagggccacgacctg

SEQ ID NO: 7196 - DNA, 18 bp, Artificial Sequence
  Description of Artificial Sequence: Synthetic oligonucleotide
atgaacttcagggccacg

SEQ ID NO: 7197 - DNA, 18 bp, Artificial Sequence
  Description of Artificial Sequence: Synthetic oligonucleotide
ttgggatgaacttcaggg

SEQ ID NO: 7198 - DNA, 18 bp, Artificial Sequence
  Description of Artificial Sequence: Synthetic oligonucleotide
caattttgggatgaactt

SEQ ID NO: 7199 - DNA, 18 bp, Artificial Sequence
  Description of Artificial Sequence: Synthetic oligonucleotide
cgccccaattttgggatg

SEQ ID NO: 7200 - DNA, 18 bp, Artificial Sequence
  Description of Artificial Sequence: Synthetic oligonucleotide
ctgagcgccccaattttg

SEQ ID NO: 7201 - DNA, 18 bp, Artificial Sequence
  Description of Artificial Sequence: Synthetic oligonucleotide
cttctctgagcgccccaa

SEQ ID NO: 7202 - DNA, 18 bp, Artificial Sequence
  Description of Artificial Sequence: Synthetic oligonucleotide
agctccttctctgagcgc

SEQ ID NO: 7203 - DNA, 18 bp, Artificial Sequence
  Description of Artificial Sequence: Synthetic oligonucleotide
tcctcagctccttctctg

SEQ ID NO: 7204 - DNA, 18 bp, Artificial Sequence
  Description of Artificial Sequence: Synthetic oligonucleotide
aattcctcagctccttct

SEQ ID NO: 7205 - DNA, 18 bp, Artificial Sequence
  Description of Artificial Sequence: Synthetic oligonucleotide
ttgcaaattcctcagctc

SEQ ID NO: 7206 - DNA, 18 bp, Artificial Sequence
  Description of Artificial Sequence: Synthetic oligonucleotide
tctcgttgcaaattcctc

SEQ ID NO: 7207 - DNA, 18 bp, Artificial Sequence
  Description of Artificial Sequence: Synthetic oligonucleotide
caatctctcgttgcaaat

SEQ ID NO: 7208 - DNA, 18 bp, Artificial Sequence
  Description of Artificial Sequence: Synthetic oligonucleotide
tatttcaatctctcgttg

SEQ ID NO: 7209 - DNA, 18 bp, Artificial Sequence
  Description of Artificial Sequence: Synthetic oligonucleotide
cgcattatttcaatctct

SEQ ID NO: 7210 - DNA, 18 bp, Artificial Sequence
  Description of Artificial Sequence: Synthetic oligonucleotide
gaccccgcattatttcaa

SEQ ID NO: 7211 - DNA, 18 bp, Artificial Sequence
  Description of Artificial Sequence: Synthetic oligonucleotide
ccgcagaccccgcattat

SEQ ID NO: 7212 - DNA, 18 bp, Artificial Sequence
  Description of Artificial Sequence: Synthetic oligonucleotide
ggatgccgcagaccccgc

SEQ ID NO: 7213 - DNA, 18 bp, Artificial Sequence
  Description of Artificial Sequence: Synthetic oligonucleotide
tgttgggatgccgcagac

SEQ ID NO: 7214 - DNA, 18 bp, Artificial Sequence
  Description of Artificial Sequence: Synthetic oligonucleotide
atgcacaatgttgggatg

SEQ ID NO: 7215 - DNA, 18 bp, Artificial Sequence
  Description of Artificial Sequence: Synthetic oligonucleotide
agcatatgcacaatgttg

SEQ ID NO: 7216 - DNA, 18 bp, Artificial Sequence
  Description of Artificial Sequence: Synthetic oligonucleotide
tgtcaagcatatgcacaa

SEQ ID NO: 7217 - DNA, 18 bp, Artificial Sequence
  Description of Artificial Sequence: Synthetic oligonucleotide
aaagctgtcaagcatatg

SEQ ID NO: 7218 - DNA, 18 bp, Artificial Sequence
  Description of Artificial Sequence: Synthetic oligonucleotide
gtttcaaagctgtcaagc

SEQ ID NO: 7219 - DNA, 18 bp, Artificial Sequence
  Description of Artificial Sequence: Synthetic oligonucleotide
tatcagtttcaaagctgt

SEQ ID NO: 7220 - DNA, 18 bp, Artificial Sequence
  Description of Artificial Sequence: Synthetic oligonucleotide
ctctttatcagtttcaaa

SEQ ID NO: 7221 - DNA, 18 bp, Artificial Sequence
  Description of Artificial Sequence: Synthetic oligonucleotide
cacctctttatcagtttc

SEQ ID NO: 7222 - DNA, 18 bp, Artificial Sequence
  Description of Artificial Sequence: Synthetic oligonucleotide
aagcacacctctttatca

SEQ ID NO: 7223 - DNA, 18 bp, Artificial Sequence
  Description of Artificial Sequence: Synthetic oligonucleotide
tgtcaaagcacacctctt

SEQ ID NO: 7224 - DNA, 18 bp, Artificial Sequence
  Description of Artificial Sequence: Synthetic oligonucleotide
aaaactgtcaaagcacac

SEQ ID NO: 7225 - DNA, 18 bp, Artificial Sequence
  Description of Artificial Sequence: Synthetic oligonucleotide
ggcccaaaactgtcaaag

SEQ ID NO: 7226 - DNA, 18 bp, Artificial Sequence
  Description of Artificial Sequence: Synthetic oligonucleotide
gacagggcccaaaactgt

SEQ ID NO: 7227 - DNA, 18 bp, Artificial Sequence
  Description of Artificial Sequence: Synthetic oligonucleotide
ggggagacagggcccaaa

SEQ ID NO: 7228 - DNA, 18 bp, Artificial Sequence
  Description of Artificial Sequence: Synthetic oligonucleotide
tgcttggggagacagggc

SEQ ID NO: 7229 - DNA, 18 bp, Artificial Sequence
  Description of Artificial Sequence: Synthetic oligonucleotide
ccttgtgcttggggagac

SEQ ID NO: 7230 - DNA, 18 bp, Artificial Sequence
  Description of Artificial Sequence: Synthetic oligonucleotide
ggaacccttgtgcttggg

SEQ ID NO: 7231 - DNA, 18 bp, Artificial Sequence
  Description of Artificial Sequence: Synthetic oligonucleotide
ttcctggaacccttgtgc

SEQ ID NO: 7232 - DNA, 18 bp, Artificial Sequence
  Description of Artificial Sequence: Synthetic oligonucleotide
ggaaattcctggaaccct

SEQ ID NO: 7233 - DNA, 18 bp, Artificial Sequence
  Description of Artificial Sequence: Synthetic oligonucleotide
ggttgggaaattcctgga

SEQ ID NO: 7234 - DNA, 18 bp, Artificial Sequence
  Description of Artificial Sequence: Synthetic oligonucleotide
tctgaggttgggaaattc

SEQ ID NO: 7235 - DNA, 18 bp, Artificial Sequence
  Description of Artificial Sequence: Synthetic oligonucleotide
tgcattctgaggttggga

SEQ ID NO: 7236 - DNA, 18 bp, Artificial Sequence
  Description of Artificial Sequence: Synthetic oligonucleotide
attcatgcattctgaggt

SEQ ID NO: 7237 - DNA, 18 bp, Artificial Sequence
  Description of Artificial Sequence: Synthetic oligonucleotide
tccagattcatgcattct

SEQ ID NO: 7238 - DNA, 18 bp, Artificial Sequence
  Description of Artificial Sequence: Synthetic oligonucleotide
atggctccagattcatgc

SEQ ID NO: 7239 - DNA, 18 bp, Artificial Sequence
  Description of Artificial Sequence: Synthetic oligonucleotide
cactgatggctccagatt

SEQ ID NO: 7240 - DNA, 18 bp, Artificial Sequence
  Description of Artificial Sequence: Synthetic oligonucleotide
agtggcactgatggctcc

SEQ ID NO: 7241 - DNA, 18 bp, Artificial Sequence
  Description of Artificial Sequence: Synthetic oligonucleotide
aaggcagtggcactgatg

SEQ ID NO: 7242 - DNA, 18 bp, Artificial Sequence
  Description of Artificial Sequence: Synthetic oligonucleotide
ggagactggcatctaaac

SEQ ID NO: 7243 - DNA, 18 bp, Artificial Sequence
  Description of Artificial Sequence: Synthetic oligonucleotide
cacgaggagactggcatc

SEQ ID NO: 7244 - DNA, 18 bp, Artificial Sequence
  Description of Artificial Sequence: Synthetic oligonucleotide
agacccacgaggagactg

SEQ ID NO: 7245 - DNA, 18 bp, Artificial Sequence
  Description of Artificial Sequence: Synthetic oligonucleotide
aattcagacccacgagga

SEQ ID NO: 7246 - DNA, 18 bp, Artificial Sequence
  Description of Artificial Sequence: Synthetic oligonucleotide
gtggtaattcagacccac

SEQ ID NO: 7247 - DNA, 18 bp, Artificial Sequence
  Description of Artificial Sequence: Synthetic oligonucleotide
tgaaggtggtaattcaga

SEQ ID NO: 7248 - DNA, 18 bp, Artificial Sequence
  Description of Artificial Sequence: Synthetic oligonucleotide
tggggtgaaggtggtaat

SEQ ID NO: 7249 - DNA, 18 bp, Artificial Sequence
  Description of Artificial Sequence: Synthetic oligonucleotide
gggagtggggtgaaggtg

SEQ ID NO: 7250 - DNA, 18 bp, Artificial Sequence
  Description of Artificial Sequence: Synthetic oligonucleotide
gggatgggagtggggtga

SEQ ID NO: 7251 - DNA, 18 bp, Artificial Sequence
  Description of Artificial Sequence: Synthetic oligonucleotide
ggggtgggatgggagtgg

SEQ ID NO: 7252 - DNA, 18 bp, Artificial Sequence
  Description of Artificial Sequence: Synthetic oligonucleotide
aactgggggtgggatggg

SEQ ID NO: 7253 - DNA, 18 bp, Artificial Sequence
  Description of Artificial Sequence: Synthetic oligonucleotide
gagaaaactgggggtggg

SEQ ID NO: 7254 - DNA, 18 bp, Artificial Sequence
  Description of Artificial Sequence: Synthetic oligonucleotide
tagtagagaaaactgggg

SEQ ID NO: 7255 - DNA, 18 bp, Artificial Sequence
  Description of Artificial Sequence: Synthetic oligonucleotide
taggttagtagagaaaac

SEQ ID NO: 7256 - DNA, 18 bp, Artificial Sequence
  Description of Artificial Sequence: Synthetic oligonucleotide
aaaaataggttagtagag

SEQ ID NO: 7257 - DNA, 18 bp, Artificial Sequence
  Description of Artificial Sequence: Synthetic oligonucleotide
aaaagaaaaataggttag

SEQ ID NO: 7258 - DNA, 18 bp, Artificial Sequence
  Description of Artificial Sequence: Synthetic oligonucleotide
aaagaaaaagaaaaatag

SEQ ID NO: 7259 - DNA, 18 bp, Artificial Sequence
  Description of Artificial Sequence: Synthetic oligonucleotide
ctaaaaaagaaaaagaaa

SEQ ID NO: 7260 - DNA, 18 bp, Artificial Sequence
  Description of Artificial Sequence: Synthetic oligonucleotide
ttggtctaaaaaagaaaa

SEQ ID NO: 7261 - DNA, 18 bp, Artificial Sequence
  Description of Artificial Sequence: Synthetic oligonucleotide
catcattggtctaaaaaa

SEQ ID NO: 7262 - DNA, 18 bp, Artificial Sequence
  Description of Artificial Sequence: Synthetic oligonucleotide
gctcgcatcattggtcta

SEQ ID NO: 7263 - DNA, 18 bp, Artificial Sequence
  Description of Artificial Sequence: Synthetic oligonucleotide
tgagctcgcatcattggt

SEQ ID NO: 7264 - DNA, 18 bp, Artificial Sequence
  Description of Artificial Sequence: Synthetic oligonucleotide
gactctgagctcgcatca

SEQ ID NO: 7265 - DNA, 18 bp, Artificial Sequence
  Description of Artificial Sequence: Synthetic oligonucleotide
ctattgactctgagctcg

SEQ ID NO: 7266 - DNA, 18 bp, Artificial Sequence
  Description of Artificial Sequence: Synthetic oligonucleotide
ggatgctattgactctga

SEQ ID NO: 7267 - DNA, 18 bp, Artificial Sequence
  Description of Artificial Sequence: Synthetic oligonucleotide
gagaaggatgctattgac

SEQ ID NO: 7268 - DNA, 18 bp, Artificial Sequence
  Description of Artificial Sequence: Synthetic oligonucleotide
gtttagagaaggatgcta

SEQ ID NO: 7269 - DNA, 18 bp, Artificial Sequence
  Description of Artificial Sequence: Synthetic oligonucleotide
ctcctgtttagagaagga

SEQ ID NO: 7270 - DNA, 18 bp, Artificial Sequence
  Description of Artificial Sequence: Synthetic oligonucleotide
atgacctcctgtttagag

SEQ ID NO: 7271 - DNA, 18 bp, Artificial Sequence
  Description of Artificial Sequence: Synthetic oligonucleotide
tactcatgacctcctgtt

SEQ ID NO: 7272 - DNA, 18 bp, Artificial Sequence
  Description of Artificial Sequence: Synthetic oligonucleotide
aaagctactcatgacctc

SEQ ID NO: 7273 - DNA, 18 bp, Artificial Sequence
  Description of Artificial Sequence: Synthetic oligonucleotide
ggcagaaagctactcatg

SEQ ID NO: 7274 - DNA, 18 bp, Artificial Sequence
  Description of Artificial Sequence: Synthetic oligonucleotide
cctctggcagaaagctac

SEQ ID NO: 7275 - DNA, 18 bp, Artificial Sequence
  Description of Artificial Sequence: Synthetic oligonucleotide
ccctccctctggcagaaa

SEQ ID NO: 7276 - DNA, 18 bp, Artificial Sequence
  Description of Artificial Sequence: Synthetic oligonucleotide
taacaccctccctctggc

SEQ ID NO: 7277 - DNA, 18 bp, Artificial Sequence
  Description of Artificial Sequence: Synthetic oligonucleotide
gctcgtaacaccctccct

SEQ ID NO: 7278 - DNA, 18 bp, Artificial Sequence
  Description of Artificial Sequence: Synthetic oligonucleotide
gagcagctcgtaacaccc

SEQ ID NO: 7279 - DNA, 18 bp, Artificial Sequence
  Description of Artificial Sequence: Synthetic oligonucleotide
acagtgagcagctcgtaa

SEQ ID NO: 7280 - DNA, 18 bp, Artificial Sequence
  Description of Artificial Sequence: Synthetic oligonucleotide
ctatcacagtgagcagct

SEQ ID NO: 7281 - DNA, 18 bp, Artificial Sequence
  Description of Artificial Sequence: Synthetic oligonucleotide
tacctatcacagtgagca

SEQ ID NO: 7282 - DNA, 18 bp, Artificial Sequence
  Description of Artificial Sequence: Synthetic oligonucleotide
gcacatacctatcacagt

SEQ ID NO: 7283 - DNA, 18 bp, Artificial Sequence
  Description of Artificial Sequence: Synthetic oligonucleotide
cccctgcacatacctatc

SEQ ID NO: 7284 - DNA, 18 bp, Artificial Sequence
  Description of Artificial Sequence: Synthetic oligonucleotide
gacggcccctgcacatac

SEQ ID NO: 7285 - DNA, 18 bp, Artificial Sequence
  Description of Artificial Sequence: Synthetic oligonucleotide
gtaaggacggcccctgca

SEQ ID NO: 7286 - DNA, 18 bp, Artificial Sequence
  Description of Artificial Sequence: Synthetic oligonucleotide
ggagagtaaggacggccc

SEQ ID NO: 7287 - DNA, 18 bp, Artificial Sequence
  Description of Artificial Sequence: Synthetic oligonucleotide
aagcaggagagtaaggac

SEQ ID NO: 7288 - DNA, 18 bp, Artificial Sequence
  Description of Artificial Sequence: Synthetic oligonucleotide
gcagaaagcaggagagta

SEQ ID NO: 7289 - DNA, 18 bp, Artificial Sequence
  Description of Artificial Sequence: Synthetic oligonucleotide
ctggagcagaaagcagga

SEQ ID NO: 7290 - DNA, 18 bp, Artificial Sequence
  Description of Artificial Sequence: Synthetic oligonucleotide
agcccctggagcagaaag

SEQ ID NO: 7291 - DNA, 18 bp, Artificial Sequence
  Description of Artificial Sequence: Synthetic oligonucleotide
gcagcagcccctggagca

SEQ ID NO: 7292 - DNA, 18 bp, Artificial Sequence
  Description of Artificial Sequence: Synthetic oligonucleotide
aagctgcagcagcccctg

SEQ ID NO: 7293 - DNA, 18 bp, Artificial Sequence
  Description of Artificial Sequence: Synthetic oligonucleotide
tgagaaagctgcagcagc

SEQ ID NO: 7294 - DNA, 18 bp, Artificial Sequence
  Description of Artificial Sequence: Synthetic oligonucleotide
gctgctgagaaagctgca

SEQ ID NO: 7295 - DNA, 18 bp, Artificial Sequence
  Description of Artificial Sequence: Synthetic oligonucleotide
ctggggctgctgagaaag

SEQ ID NO: 7296 - DNA, 18 bp, Artificial Sequence
  Description of Artificial Sequence: Synthetic oligonucleotide
cacatctggggctgctga

SEQ ID NO: 7297 - DNA, 18 bp, Artificial Sequence
  Description of Artificial Sequence: Synthetic oligonucleotide
gtacacacatctggggct

SEQ ID NO: 7298 - DNA, 18 bp, Artificial Sequence
  Description of Artificial Sequence: Synthetic oligonucleotide
ctgctgtacacacatctg

SEQ ID NO: 7299 - DNA, 18 bp, Artificial Sequence
  Description of Artificial Sequence: Synthetic oligonucleotide
ggcctctgctgtacacac

SEQ ID NO: 7300 - DNA, 18 bp, Artificial Sequence
  Description of Artificial Sequence: Synthetic oligonucleotide
tggatggcctctgctgta

SEQ ID NO: 7301 - DNA, 18 bp, Artificial Sequence
  Description of Artificial Sequence: Synthetic oligonucleotide
actagtggatggcctctg

SEQ ID NO: 7302 - DNA, 18 bp, Artificial Sequence
  Description of Artificial Sequence: Synthetic oligonucleotide
atatagtgcaaatagaaa

SEQ ID NO: 7303 - DNA, 18 bp, Artificial Sequence
  Description of Artificial Sequence: Synthetic oligonucleotide
tacacatatagtgcaaat

SEQ ID NO: 7304 - DNA, 18 bp, Artificial Sequence
  Description of Artificial Sequence: Synthetic oligonucleotide
ttaattacacatatagtg

SEQ ID NO: 7305 - DNA, 18 bp, Artificial Sequence
  Description of Artificial Sequence: Synthetic oligonucleotide
actatttaattacacata

SEQ ID NO: 7306 - DNA, 18 bp, Artificial Sequence
  Description of Artificial Sequence: Synthetic oligonucleotide
accaaactatttaattac

SEQ ID NO: 7307 - DNA, 18 bp, Artificial Sequence
  Description of Artificial Sequence: Synthetic oligonucleotide
cttgaaccaaactattta

SEQ ID NO: 7308 - DNA, 18 bp, Artificial Sequence
  Description of Artificial Sequence: Synthetic oligonucleotide
ctttacttgaaccaaact

SEQ ID NO: 7309 - DNA, 18 bp, Artificial Sequence
  Description of Artificial Sequence: Synthetic oligonucleotide
atttgctttacttgaacc

SEQ ID NO: 7310 - DNA, 18 bp, Artificial Sequence
  Description of Artificial Sequence: Synthetic oligonucleotide
aaatcatttgctttactt

SEQ ID NO: 7311 - DNA, 18 bp, Artificial Sequence
  Description of Artificial Sequence: Synthetic oligonucleotide
tgtataaatcatttgctt

SEQ ID NO: 7312 - DNA, 18 bp, Artificial Sequence
  Description of Artificial Sequence: Synthetic oligonucleotide
ctctttgtataaatcatt

SEQ ID NO: 7313 - DNA, 18 bp, Artificial Sequence
  Description of Artificial Sequence: Synthetic oligonucleotide
tatccctctttgtataaa

SEQ ID NO: 7314 - DNA, 18 bp, Artificial Sequence
  Description of Artificial Sequence: Synthetic oligonucleotide
aaaattatccctctttgt

SEQ ID NO: 7315 - DNA, 18 bp, Artificial Sequence
  Description of Artificial Sequence: Synthetic oligonucleotide
agaaaaaaattatccctc

SEQ ID NO: 7316 - DNA, 18 bp, Artificial Sequence
  Description of Artificial Sequence: Synthetic oligonucleotide
aaaaaagaaaaaaattat

SEQ ID NO: 7317 - DNA, 18 bp, Artificial Sequence
  Description of Artificial Sequence: Synthetic oligonucleotide
gagataaaaaagaaaaaa

SEQ ID NO: 7318 - DNA, 18 bp, Artificial Sequence
  Description of Artificial Sequence: Synthetic oligonucleotide
ctaaggagataaaaaaga

SEQ ID NO: 7319 - DNA, 18 bp, Artificial Sequence
  Description of Artificial Sequence: Synthetic oligonucleotide
ctatcctaaggagataaa

SEQ ID NO: 7320 - DNA, 18 bp, Artificial Sequence
  Description of Artificial Sequence: Synthetic oligonucleotide
cactgctatcctaaggag

SEQ ID NO: 7321 - DNA, 18 bp, Artificial Sequence
  Description of Artificial Sequence: Synthetic oligonucleotide
aatctcactgctatccta

SEQ ID NO: 7322 - DNA, 18 bp, Artificial Sequence
  Description of Artificial Sequence: Synthetic oligonucleotide
aagtgaatctcactgcta

SEQ ID NO: 7323 - DNA, 18 bp, Artificial Sequence
  Description of Artificial Sequence: Synthetic oligonucleotide
ttgaagtgaatctcactg

SEQ ID NO: 7324 - DNA, 18 bp, Artificial Sequence
  Description of Artificial Sequence: Synthetic oligonucleotide
tcactttgaagtgaatct

SEQ ID NO: 7325 - DNA, 18 bp, Artificial Sequence
  Description of Artificial Sequence: Synthetic oligonucleotide
cattttcactttgaagtg

SEQ ID NO: 7326 - DNA, 18 bp, Artificial Sequence
  Description of Artificial Sequence: Synthetic oligonucleotide
gttgtcattttcactttg

SEQ ID NO: 7327 - DNA, 18 bp, Artificial Sequence
  Description of Artificial Sequence: Synthetic oligonucleotide
gatgtgttgtcattttca

SEQ ID NO: 7328 - DNA, 18 bp, Artificial Sequence
  Description of Artificial Sequence: Synthetic oligonucleotide
cttgagatgtgttgtcat

SEQ ID NO: 7329 - DNA, 18 bp, Artificial Sequence
  Description of Artificial Sequence: Synthetic oligonucleotide
agtttcttgagatgtgtt

SEQ ID NO: 7330 - DNA, 18 bp, Artificial Sequence
  Description of Artificial Sequence: Synthetic oligonucleotide
ctttgagtttcttgagat

SEQ ID NO: 7331 - DNA, 18 bp, Artificial Sequence
  Description of Artificial Sequence: Synthetic oligonucleotide
tgattctttgagtttctt

SEQ ID NO: 7332 - DNA, 18 bp, Artificial Sequence
  Description of Artificial Sequence: Synthetic oligonucleotide
cagtatgattctttgagt

SEQ ID NO: 7333 - DNA, 18 bp, Artificial Sequence
  Description of Artificial Sequence: Synthetic oligonucleotide
tttgacagtatgattctt

SEQ ID NO: 7334 - DNA, 18 bp, Artificial Sequence
  Description of Artificial Sequence: Synthetic oligonucleotide
ctgtctttgacagtatga

SEQ ID NO: 7335 - DNA, 18 bp, Artificial Sequence
  Description of Artificial Sequence: Synthetic oligonucleotide
aacctgtctttgacagta

SEQ ID NO: 7336 - DNA, 18 bp, Artificial Sequence
  Description of Artificial Sequence: Synthetic oligonucleotide
ggacgaacctgtctttga

SEQ ID NO: 7337 - DNA, 18 bp, Artificial Sequence
  Description of Artificial Sequence: Synthetic oligonucleotide
aaaatggacgaacctgtc

SEQ ID NO: 7338 - DNA, 18 bp, Artificial Sequence
  Description of Artificial Sequence: Synthetic oligonucleotide
ataccaaaatggacgaac

SEQ ID NO: 7339 - DNA, 18 bp, Artificial Sequence
  Description of Artificial Sequence: Synthetic oligonucleotide
acttaataccaaaatgga

SEQ ID NO: 7340 - DNA, 18 bp, Artificial Sequence
  Description of Artificial Sequence: Synthetic oligonucleotide
attgtacttaataccaaa

SEQ ID NO: 7341 - DNA, 18 bp, Artificial Sequence
  Description of Artificial Sequence: Synthetic oligonucleotide
aaagcattgtacttaata

SEQ ID NO: 7342 - DNA, 18 bp, Artificial Sequence
  Description of Artificial Sequence: Synthetic oligonucleotide
acgacaaagcattgtact

SEQ ID NO: 7343 - DNA, 18 bp, Artificial Sequence
  Description of Artificial Sequence: Synthetic oligonucleotide
aattaacgacaaagcatt

SEQ ID NO: 7344 - DNA, 18 bp, Artificial Sequence
  Description of Artificial Sequence: Synthetic oligonucleotide
aaaaaaattaacgacaaa

SEQ ID NO: 7345 - DNA, 18 bp, Artificial Sequence
  Description of Artificial Sequence: Synthetic oligonucleotide
aaaaaaaaaaaattaacg

SEQ ID NO: 7346 - DNA, 18 bp, Artificial Sequence
  Description of Artificial Sequence: Synthetic oligonucleotide
ctataaaaaaaaaaaaat

SEQ ID NO: 7347 - DNA, 18 bp, Artificial Sequence
  Description of Artificial Sequence: Synthetic oligonucleotide
atcttctataaaaaaaaa

SEQ ID NO: 7348 - DNA, 18 bp, Artificial Sequence
  Description of Artificial Sequence: Synthetic oligonucleotide
tgacaatcttctataaaa

SEQ ID NO: 7349 - DNA, 18 bp, Artificial Sequence
  Description of Artificial Sequence: Synthetic oligonucleotide
tcttctgacaatcttcta

SEQ ID NO: 7350 - DNA, 18 bp, Artificial Sequence
  Description of Artificial Sequence: Synthetic oligonucleotide
atttttcttctgacaatc

SEQ ID NO: 7351 - DNA, 18 bp, Artificial Sequence
  Description of Artificial Sequence: Synthetic oligonucleotide
acaggatttttcttctga

SEQ ID NO: 7352 - DNA, 18 bp, Artificial Sequence
  Description of Artificial Sequence: Synthetic oligonucleotide
ataaaacaggatttttct

SEQ ID NO: 7353 - DNA, 18 bp, Artificial Sequence
  Description of Artificial Sequence: Synthetic oligonucleotide
aaataataaaacaggatt

SEQ ID NO: 7354 - DNA, 18 bp, Artificial Sequence
  Description of Artificial Sequence: Synthetic oligonucleotide
ggtgaaaataataaaaca

SEQ ID NO: 7355 - DNA, 18 bp, Artificial Sequence
  Description of Artificial Sequence: Synthetic oligonucleotide
ctaatggtgaaaataata

SEQ ID NO: 7356 - DNA, 18 bp, Artificial Sequence
  Description of Artificial Sequence: Synthetic oligonucleotide
attaaatgatgtaaaacg

SEQ ID NO: 7357 - DNA, 18 bp, Artificial Sequence
  Description of Artificial Sequence: Synthetic oligonucleotide
attttattaaatgatgta

SEQ ID NO: 7358 - DNA, 18 bp, Artificial Sequence
  Description of Artificial Sequence: Synthetic oligonucleotide
atttgattttattaaatg

SEQ ID NO: 7359 - DNA, 18 bp, Artificial Sequence
  Description of Artificial Sequence: Synthetic oligonucleotide
aaaccatttgattttatt

SEQ ID NO: 7360 - DNA, 18 bp, Artificial Sequence
  Description of Artificial Sequence: Synthetic oligonucleotide
tgtaaaaaccatttgatt

SEQ ID NO: 7361 - DNA, 18 bp, Artificial Sequence
  Description of Artificial Sequence: Synthetic oligonucleotide
aatgttgtaaaaaccatt

SEQ ID NO: 7362 - DNA, 18 bp, Artificial Sequence
  Description of Artificial Sequence: Synthetic oligonucleotide
taaacaatgttgtaaaaa

SEQ ID NO: 7363 - DNA, 18 bp, Artificial Sequence
  Description of Artificial Sequence: Synthetic oligonucleotide
agatgtaaacaatgttgt

SEQ ID NO: 7364 - DNA, 18 bp, Artificial Sequence
  Description of Artificial Sequence: Synthetic oligonucleotide
aaacaagatgtaaacaat

SEQ ID NO: 7365 - DNA, 18 bp, Artificial Sequence
  Description of Artificial Sequence: Synthetic oligonucleotide
tttttaaacaagatgtaa

SEQ ID NO: 7366 - DNA, 18 bp, Artificial Sequence
  Description of Artificial Sequence: Synthetic oligonucleotide
aaatatttttaaacaaga

SEQ ID NO: 7367 - DNA, 18 bp, Artificial Sequence
  Description of Artificial Sequence: Synthetic oligonucleotide
cagtaaaatatttttaaa

SEQ ID NO: 7368 - DNA, 18 bp, Artificial Sequence
  Description of Artificial Sequence: Synthetic oligonucleotide
tttctcagtaaaatattt

SEQ ID NO: 7369 - DNA, 18 bp, Artificial Sequence
  Description of Artificial Sequence: Synthetic oligonucleotide
attattttctcagtaaaa

SEQ ID NO: 7370 - DNA, 18 bp, Artificial Sequence
  Description of Artificial Sequence: Synthetic oligonucleotide
agttaattattttctcag

SEQ ID NO: 7371 - DNA, 18 bp, Artificial Sequence
  Description of Artificial Sequence: Synthetic oligonucleotide
aacaaagttaattatttt

SEQ ID NO: 7372 - DNA, 18 bp, Artificial Sequence
  Description of Artificial Sequence: Synthetic oligonucleotide
aataaaacaaagttaatt

SEQ ID NO: 7373 - DNA, 18 bp, Artificial Sequence
  Description of Artificial Sequence: Synthetic oligonucleotide
ctaaaaataaaacaaagt

SEQ ID NO: 7374 - DNA, 18 bp, Artificial Sequence
  Description of Artificial Sequence: Synthetic oligonucleotide
taaccctaaaaataaaac

SEQ ID NO: 7375 - DNA, 18 bp, Artificial Sequence
  Description of Artificial Sequence: Synthetic oligonucleotide
ggatataaccctaaaaat

SEQ ID NO: 7376 - DNA, 18 bp, Artificial Sequence
  Description of Artificial Sequence: Synthetic oligonucleotide
acacaggatataacccta

SEQ ID NO: 7377 - DNA, 18 bp, Artificial Sequence
  Description of Artificial Sequence: Synthetic oligonucleotide
acaacacaggatataacc

SEQ ID NO: 7378 - DNA, 18 bp, Artificial Sequence
  Description of Artificial Sequence: Synthetic oligonucleotide
aggtcacaacacaggata

SEQ ID NO: 7379 - DNA, 18 bp, Artificial Sequence
  Description of Artificial Sequence: Synthetic oligonucleotide
ccatgaggtcacaacaca

SEQ ID NO: 7380 - DNA, 18 bp, Artificial Sequence
  Description of Artificial Sequence: Synthetic oligonucleotide
ttaaaccatgaggtcaca

SEQ ID NO: 7381 - DNA, 18 bp, Artificial Sequence
  Description of Artificial Sequence: Synthetic oligonucleotide
cccacttaaaccatgagg

SEQ ID NO: 7382 - DNA, 18 bp, Artificial Sequence
  Description of Artificial Sequence: Synthetic oligonucleotide
ttattcccacttaaacca

SEQ ID NO: 7383 - DNA, 18 bp, Artificial Sequence
  Description of Artificial Sequence: Synthetic oligonucleotide
catctttattcccactta

SEQ ID NO: 7384 - DNA, 18 bp, Artificial Sequence
  Description of Artificial Sequence: Synthetic oligonucleotide
atactcatctttattccc

SEQ ID NO: 7385 - DNA, 18 bp, Artificial Sequence
  Description of Artificial Sequence: Synthetic oligonucleotide
tgcttatactcatcttta

SEQ ID NO: 7386 - DNA, 18 bp, Artificial Sequence
  Description of Artificial Sequence: Synthetic oligonucleotide
atcactgcttatactcat

SEQ ID NO: 7387 - DNA, 18 bp, Artificial Sequence
  Description of Artificial Sequence: Synthetic oligonucleotide
acctcatcactgcttata

SEQ ID NO: 7388 - DNA, 18 bp, Artificial Sequence
  Description of Artificial Sequence: Synthetic oligonucleotide
agttgacctcatcactgc

SEQ ID NO: 7389 - DNA, 18 bp, Artificial Sequence
  Description of Artificial Sequence: Synthetic oligonucleotide
caagaagttgacctcatc

SEQ ID NO: 7390 - DNA, 18 bp, Artificial Sequence
  Description of Artificial Sequence: Synthetic oligonucleotide
tataccaagaagttgacc

SEQ ID NO: 7391 - DNA, 18 bp, Artificial Sequence
  Description of Artificial Sequence: Synthetic oligonucleotide
atctatataccaagaagt

SEQ ID NO: 7392 - DNA, 18 bp, Artificial Sequence
  Description of Artificial Sequence: Synthetic oligonucleotide
caagtatctatataccaa

SEQ ID NO: 7393 - DNA, 18 bp, Artificial Sequence
  Description of Artificial Sequence: Synthetic oligonucleotide
tcttgcaagtatctatat

SEQ ID NO: 7394 - DNA, 18 bp, Artificial Sequence
  Description of Artificial Sequence: Synthetic oligonucleotide
ctgactcttgcaagtatc

SEQ ID NO: 7395 - DNA, 18 bp, Artificial Sequence
  Description of Artificial Sequence: Synthetic oligonucleotide
cacctgactcttgcaagt

SEQ ID NO: 7396 - DNA, 18 bp, Artificial Sequence
  Description of Artificial Sequence: Synthetic oligonucleotide
gtactcacctgactcttg

SEQ ID NO: 7397 - DNA, 18 bp, Artificial Sequence
  Description of Artificial Sequence: Synthetic oligonucleotide
taaaagtactcacctgac

SEQ ID NO: 7398 - DNA, 18 bp, Artificial Sequence
  Description of Artificial Sequence: Synthetic oligonucleotide
ctttataaaagtactcac

SEQ ID NO: 7399 - DNA, 18 bp, Artificial Sequence
  Description of Artificial Sequence: Synthetic oligonucleotide
atttactttataaaagta

SEQ ID NO: 7400 - DNA, 18 bp, Artificial Sequence
  Description of Artificial Sequence: Synthetic oligonucleotide
ggcctatttactttataa

SEQ ID NO: 7401 - DNA, 18 bp, Artificial Sequence
  Description of Artificial Sequence: Synthetic oligonucleotide
tttgaggcctatttactt

SEQ ID NO: 7402 - DNA, 18 bp, Artificial Sequence
  Description of Artificial Sequence: Synthetic oligonucleotide
aataatttgaggcctatt

SEQ ID NO: 7403 - DNA, 18 bp, Artificial Sequence
  Description of Artificial Sequence: Synthetic oligonucleotide
attaaaataatttgaggc

SEQ ID NO: 7404 - DNA, 18 bp, Artificial Sequence
  Description of Artificial Sequence: Synthetic oligonucleotide
agaatattaaaataattt

SEQ ID NO: 7405 - DNA, 18 bp, Artificial Sequence
  Description of Artificial Sequence: Synthetic oligonucleotide
ttttgagaatattaaaat

SEQ ID NO: 7406 - DNA, 18 bp, Artificial Sequence
  Description of Artificial Sequence: Synthetic oligonucleotide
gattattttgagaatatt

SEQ ID NO: 7407 - DNA, 18 bp, Artificial Sequence
  Description of Artificial Sequence: Synthetic oligonucleotide
taaaagattattttgaga

SEQ ID NO: 7408 - DNA, 18 bp, Artificial Sequence
  Description of Artificial Sequence: Synthetic oligonucleotide
atgcataaaagattattt

SEQ ID NO: 7409 - DNA, 18 bp, Artificial Sequence
  Description of Artificial Sequence: Synthetic oligonucleotide
ttcaaatgcataaaagat

SEQ ID NO: 7410 - DNA, 18 bp, Artificial Sequence
  Description of Artificial Sequence: Synthetic oligonucleotide
caaatttcaaatgcataa

SEQ ID NO: 7411 - DNA, 18 bp, Artificial Sequence
  Description of Artificial Sequence: Synthetic oligonucleotide
tgatacaaatttcaaatg

SEQ ID NO: 7412 - DNA, 18 bp, Artificial Sequence
  Description of Artificial Sequence: Synthetic oligonucleotide
tggactgatacaaatttc

SEQ ID NO: 7413 - DNA, 18 bp, Artificial Sequence
  Description of Artificial Sequence: Synthetic oligonucleotide
cggtttggactgatacaa

SEQ ID NO: 7414 - DNA, 18 bp, Artificial Sequence
  Description of Artificial Sequence: Synthetic oligonucleotide
ttcaacggtttggactga

SEQ ID NO: 7415 - DNA, 18 bp, Artificial Sequence
  Description of Artificial Sequence: Synthetic oligonucleotide
caaagttcaacggtttgg

SEQ ID NO: 7416 - DNA, 18 bp, Artificial Sequence
  Description of Artificial Sequence: Synthetic oligonucleotide
ttttgccagactggaaat

SEQ ID NO: 7417 - DNA, 18 bp, Artificial Sequence
  Description of Artificial Sequence: Synthetic oligonucleotide
tgaatttttgccagactg

SEQ ID NO: 7418 - DNA, 18 bp, Artificial Sequence
  Description of Artificial Sequence: Synthetic oligonucleotide
agagctgaatttttgcca

SEQ ID NO: 7419 - DNA, 18 bp, Artificial Sequence
  Description of Artificial Sequence: Synthetic oligonucleotide
caaccagagctgaatttt

SEQ ID NO: 7420 - DNA, 18 bp, Artificial Sequence
  Description of Artificial Sequence: Synthetic oligonucleotide
ggattcaaccagagctga

SEQ ID NO: 7421 - DNA, 18 bp, Artificial Sequence
  Description of Artificial Sequence: Synthetic oligonucleotide
tgtttggattcaaccaga

SEQ ID NO: 7422 - DNA, 18 bp, Artificial Sequence
  Description of Artificial Sequence: Synthetic oligonucleotide
cacaatgtttggattcaa

SEQ ID NO: 7423 - DNA, 18 bp, Artificial Sequence
  Description of Artificial Sequence: Synthetic oligonucleotide
ttcagcacaatgtttgga

SEQ ID NO: 7424 - DNA, 18 bp, Artificial Sequence
  Description of Artificial Sequence: Synthetic oligonucleotide
gctgcttcagcacaatgt

SEQ ID NO: 7425 - DNA, 18 bp, Artificial Sequence
  Description of Artificial Sequence: Synthetic oligonucleotide
acttagctgcttcagcac

SEQ ID NO: 7426 - DNA, 18 bp, Artificial Sequence
  Description of Artificial Sequence: Synthetic oligonucleotide
gaattacttagctgcttc

SEQ ID NO: 7427 - DNA, 18 bp, Artificial Sequence
  Description of Artificial Sequence: Synthetic oligonucleotide
cagttgaattacttagct

SEQ ID NO: 7428 - DNA, 18 bp, Artificial Sequence
  Description of Artificial Sequence: Synthetic oligonucleotide
ctcctcagttgaattact

SEQ ID NO: 7429 - DNA, 18 bp, Artificial Sequence
  Description of Artificial Sequence: Synthetic oligonucleotide
ttaatctcctcagttgaa

SEQ ID NO: 7430 - DNA, 18 bp, Artificial Sequence
  Description of Artificial Sequence: Synthetic oligonucleotide
tgtaattaatctcctcag

SEQ ID NO: 7431 - DNA, 18 bp, Artificial Sequence
  Description of Artificial Sequence: Synthetic oligonucleotide
taacatgtaattaatctc

SEQ ID NO: 7432 - DNA, 18 bp, Artificial Sequence
  Description of Artificial Sequence: Synthetic oligonucleotide
gattataacatgtaatta

SEQ ID NO: 7433 - DNA, 18 bp, Artificial Sequence
  Description of Artificial Sequence: Synthetic oligonucleotide
ctattgattataacatgt

SEQ ID NO: 7434 - DNA, 18 bp, Artificial Sequence
  Description of Artificial Sequence: Synthetic oligonucleotide
agaacctattgattataa

SEQ ID NO: 7435 - DNA, 18 bp, Artificial Sequence
  Description of Artificial Sequence: Synthetic oligonucleotide
tcaagagaacctattgat

SEQ ID NO: 7436 - DNA, 18 bp, Artificial Sequence
  Description of Artificial Sequence: Synthetic oligonucleotide
aagtgtcaagagaaccta

SEQ ID NO: 7437 - DNA, 18 bp, Artificial Sequence
  Description of Artificial Sequence: Synthetic oligonucleotide
ctgaagtgtcaagagaac

SEQ ID NO: 7438 - DNA, 18 bp, Artificial Sequence
  Description of Artificial Sequence: Synthetic oligonucleotide
taacactgaagtgtcaag

SEQ ID NO: 7439 - DNA, 18 bp, Artificial Sequence
  Description of Artificial Sequence: Synthetic oligonucleotide
ttccctaacactgaagtg

SEQ ID NO: 7440 - DNA, 18 bp, Artificial Sequence
  Description of Artificial Sequence: Synthetic oligonucleotide
tgatgttccctaacactg

SEQ ID NO: 7441 - DNA, 18 bp, Artificial Sequence
  Description of Artificial Sequence: Synthetic oligonucleotide
cttgctgatgttccctaa

SEQ ID NO: 7442 - DNA, 18 bp, Artificial Sequence
  Description of Artificial Sequence: Synthetic oligonucleotide
tgggtcttgctgatgttc

SEQ ID NO: 7443 - DNA, 18 bp, Artificial Sequence
  Description of Artificial Sequence: Synthetic oligonucleotide
tgggatgggtcttgctga

SEQ ID NO: 7444 - DNA, 18 bp, Artificial Sequence
  Description of Artificial Sequence: Synthetic oligonucleotide
tctcctgggatgggtctt

SEQ ID NO: 7445 - DNA, 18 bp, Artificial Sequence
  Description of Artificial Sequence: Synthetic oligonucleotide
caaggtctcctgggatgg

SEQ ID NO: 7446 - DNA, 18 bp, Artificial Sequence
  Description of Artificial Sequence: Synthetic oligonucleotide
tccttcaaggtctcctgg

SEQ ID NO: 7447 - DNA, 18 bp, Artificial Sequence
  Description of Artificial Sequence: Synthetic oligonucleotide
aggcttccttcaaggtct

SEQ ID NO: 7448 - DNA, 18 bp, Artificial Sequence
  Description of Artificial Sequence: Synthetic oligonucleotide
ttcaaaggcttccttcaa

SEQ ID NO: 7449 - DNA, 18 bp, Artificial Sequence
  Description of Artificial Sequence: Synthetic oligonucleotide
tccctttcaaaggcttcc

SEQ ID NO: 7450 - DNA, 18 bp, Artificial Sequence
  Description of Artificial Sequence: Synthetic oligonucleotide
ccttcattctccctttca

SEQ ID NO: 7451 - DNA, 18 bp, Artificial Sequence
  Description of Artificial Sequence: Synthetic oligonucleotide
tgactccttcattctccc

SEQ ID NO: 7452 - DNA, 18 bp, Artificial Sequence
  Description of Artificial Sequence: Synthetic oligonucleotide
aaagatgactccttcatt

SEQ ID NO: 7453 - DNA, 18 bp, Artificial Sequence
  Description of Artificial Sequence: Synthetic oligonucleotide
tttgcaaagatgactcct

SEQ ID NO: 7454 - DNA, 18 bp, Artificial Sequence
  Description of Artificial Sequence: Synthetic oligonucleotide
gctattttgcaaagatga

SEQ ID NO: 7455 - DNA, 18 bp, Artificial Sequence
  Description of Artificial Sequence: Synthetic oligonucleotide
caggagctattttgcaaa

SEQ ID NO: 7456 - DNA, 18 bp, Artificial Sequence
  Description of Artificial Sequence: Synthetic oligonucleotide
ggctgcaggagctatttt

SEQ ID NO: 7457 - DNA, 18 bp, Artificial Sequence
  Description of Artificial Sequence: Synthetic oligonucleotide
tcccaggctgcaggagct

SEQ ID NO: 7458 - DNA, 18 bp, Artificial Sequence
  Description of Artificial Sequence: Synthetic oligonucleotide
tcctttcccaggctgcag

SEQ ID NO: 7459 - DNA, 18 bp, Artificial Sequence
  Description of Artificial Sequence: Synthetic oligonucleotide
tagtctcctttcccaggc

SEQ ID NO: 7460 - DNA, 18 bp, Artificial Sequence
  Description of Artificial Sequence: Synthetic oligonucleotide
ctttttagtctcctttcc

SEQ ID NO: 7461 - DNA, 18 bp, Artificial Sequence
  Description of Artificial Sequence: Synthetic oligonucleotide
tacctttttagtctcctt

SEQ ID NO: 7462 - DNA, 18 bp, Artificial Sequence
  Description of Artificial Sequence: Synthetic oligonucleotide
ctttttacctttttagtc

SEQ ID NO: 7463 - DNA, 18 bp, Artificial Sequence
  Description of Artificial Sequence: Synthetic oligonucleotide
aacagctttttacctttt

SEQ ID NO: 7464 - DNA, 18 bp, Artificial Sequence
  Description of Artificial Sequence: Synthetic oligonucleotide
gaattaacagctttttac

SEQ ID NO: 7465 - DNA, 18 bp, Artificial Sequence
  Description of Artificial Sequence: Synthetic oligonucleotide
tcctggaattaacagctt

SEQ ID NO: 7466 - DNA, 18 bp, Artificial Sequence
  Description of Artificial Sequence: Synthetic oligonucleotide
tgtcttcctggaattaac

SEQ ID NO: 7467 - DNA, 18 bp, Artificial Sequence
  Description of Artificial Sequence: Synthetic oligonucleotide
aaagctgtcttcctggaa

SEQ ID NO: 7468 - DNA, 18 bp, Artificial Sequence
  Description of Artificial Sequence: Synthetic oligonucleotide
ggcgtaaagctgtcttcc

SEQ ID NO: 7469 - DNA, 18 bp, Artificial Sequence
  Description of Artificial Sequence: Synthetic oligonucleotide
ggaggggcgtaaagctgt

SEQ ID NO: 7470 - DNA, 18 bp, Artificial Sequence
  Description of Artificial Sequence: Synthetic oligonucleotide
gtctgggaggggcgtaaa

SEQ ID NO: 7471 - DNA, 18 bp, Artificial Sequence
  Description of Artificial Sequence: Synthetic oligonucleotide
aggtggtctgggaggggc

SEQ ID NO: 7472 - DNA, 18 bp, Artificial Sequence
  Description of Artificial Sequence: Synthetic oligonucleotide
agtgcaggtggtctggga

SEQ ID NO: 7473 - DNA, 18 bp, Artificial Sequence
  Description of Artificial Sequence: Synthetic oligonucleotide
tgtgcagtgcaggtggtc

SEQ ID NO: 7474 - DNA, 18 bp, Artificial Sequence
  Description of Artificial Sequence: Synthetic oligonucleotide
cgtagtgtgcagtgcagg

SEQ ID NO: 7475 - DNA, 18 bp, Artificial Sequence
  Description of Artificial Sequence: Synthetic oligonucleotide
ttccacgtagtgtgcagt

SEQ ID NO: 7476 - DNA, 18 bp, Artificial Sequence
  Description of Artificial Sequence: Synthetic oligonucleotide
ataaattccacgtagtgt

SEQ ID NO: 7477 - DNA, 18 bp, Artificial Sequence
  Description of Artificial Sequence: Synthetic oligonucleotide
ctaaaataaattccacgt

SEQ ID NO: 7478 - DNA, 18 bp, Artificial Sequence
  Description of Artificial Sequence: Synthetic oligonucleotide
tgagactaaaataaattc

SEQ ID NO: 7479 - DNA, 18 bp, Artificial Sequence
  Description of Artificial Sequence: Synthetic oligonucleotide
ccatgtgagactaaaata

SEQ ID NO: 7480 - DNA, 18 bp, Artificial Sequence
  Description of Artificial Sequence: Synthetic oligonucleotide
cgctgccatgtgagacta

SEQ ID NO: 7481 - DNA, 18 bp, Artificial Sequence
  Description of Artificial Sequence: Synthetic oligonucleotide
agggacgctgccatgtga

SEQ ID NO: 7482 - DNA, 18 bp, Artificial Sequence
  Description of Artificial Sequence: Synthetic oligonucleotide
ctgacctcggagggctgc

SEQ ID NO: 7483 - DNA, 18 bp, Artificial Sequence
  Description of Artificial Sequence: Synthetic oligonucleotide
cattgctgacctcggagg

SEQ ID NO: 7484 - DNA, 18 bp, Artificial Sequence
  Description of Artificial Sequence: Synthetic oligonucleotide
ctgcacattgctgacctc

SEQ ID NO: 7485 - DNA, 18 bp, Artificial Sequence
  Description of Artificial Sequence: Synthetic oligonucleotide
cccttctgcacattgctg

SEQ ID NO: 7486 - DNA, 18 bp, Artificial Sequence
  Description of Artificial Sequence: Synthetic oligonucleotide
caaaccccttctgcacat

SEQ ID NO: 7487 - DNA, 18 bp, Artificial Sequence
  Description of Artificial Sequence: Synthetic oligonucleotide
ctctccaaaccccttctg

SEQ ID NO: 7488 - DNA, 18 bp, Artificial Sequence
  Description of Artificial Sequence: Synthetic oligonucleotide
gccttctctccaaacccc

SEQ ID NO: 7489 - DNA, 18 bp, Artificial Sequence
  Description of Artificial Sequence: Synthetic oligonucleotide
ctcaagccttctctccaa

SEQ ID NO: 7490 - DNA, 18 bp, Artificial Sequence
  Description of Artificial Sequence: Synthetic oligonucleotide
acatgctcaagccttctc

SEQ ID NO: 7491 - DNA, 18 bp, Artificial Sequence
  Description of Artificial Sequence: Synthetic oligonucleotide
ccctcacatgctcaagcc

SEQ ID NO: 7492 - DNA, 18 bp, Artificial Sequence
  Description of Artificial Sequence: Synthetic oligonucleotide
tgccaccctcacatgctc

SEQ ID NO: 7493 - DNA, 18 bp, Artificial Sequence
  Description of Artificial Sequence: Synthetic oligonucleotide
ggccgtgccaccctcaca

SEQ ID NO: 7494 - DNA, 18 bp, Artificial Sequence
  Description of Artificial Sequence: Synthetic oligonucleotide
aggctggccgtgccaccc

SEQ ID NO: 7495 - DNA, 18 bp, Artificial Sequence
  Description of Artificial Sequence: Synthetic oligonucleotide
tgatgaggctggccgtgc

SEQ ID NO: 7496 - DNA, 18 bp, Artificial Sequence
  Description of Artificial Sequence: Synthetic oligonucleotide
gctgctgatgaggctggc

SEQ ID NO: 7497 - DNA, 18 bp, Artificial Sequence
  Description of Artificial Sequence: Synthetic oligonucleotide
agtccgctgctgatgagg

SEQ ID NO: 7498 - DNA, 18 bp, Artificial Sequence
  Description of Artificial Sequence: Synthetic oligonucleotide
aaaggagtccgctgctga

SEQ ID NO: 7499 - DNA, 18 bp, Artificial Sequence
  Description of Artificial Sequence: Synthetic oligonucleotide
ctgggaaaggagtccgct

SEQ ID NO: 7500 - DNA, 18 bp, Artificial Sequence
  Description of Artificial Sequence: Synthetic oligonucleotide
ctgccctgggaaaggagt

SEQ ID NO: 7501 - DNA, 18 bp, Artificial Sequence
  Description of Artificial Sequence: Synthetic oligonucleotide
ccactctgccctgggaaa

SEQ ID NO: 7502 - DNA, 18 bp, Artificial Sequence
  Description of Artificial Sequence: Synthetic oligonucleotide
gccctccactctgccctg

SEQ ID NO: 7503 - DNA, 18 bp, Artificial Sequence
  Description of Artificial Sequence: Synthetic oligonucleotide
gctgccctccactctgcc

SEQ ID NO: 7504 - DNA, 18 bp, Artificial Sequence
  Description of Artificial Sequence: Synthetic oligonucleotide
tgtttgctgccctccact

SEQ ID NO: 7505 - DNA, 18 bp, Artificial Sequence
  Description of Artificial Sequence: Synthetic oligonucleotide
tctcctgtttgctgccct

SEQ ID NO: 7506 - DNA, 18 bp, Artificial Sequence
  Description of Artificial Sequence: Synthetic oligonucleotide
ctcattctcctgtttgct

SEQ ID NO: 7507 - DNA, 18 bp, Artificial Sequence
  Description of Artificial Sequence: Synthetic oligonucleotide
ggttgctcattctcctgt

SEQ ID NO: 7508 - DNA, 18 bp, Artificial Sequence
  Description of Artificial Sequence: Synthetic oligonucleotide
aggtaggttgctcattct

SEQ ID NO: 7509 - DNA, 18 bp, Artificial Sequence
  Description of Artificial Sequence: Synthetic oligonucleotide
gacctaggtaggttgctc

SEQ ID NO: 7510 - DNA, 18 bp, Artificial Sequence
  Description of Artificial Sequence: Synthetic oligonucleotide
ccaaggacctaggtaggt

SEQ ID NO: 7511 - DNA, 18 bp, Artificial Sequence
  Description of Artificial Sequence: Synthetic oligonucleotide
gcatcccaaggacctagg

SEQ ID NO: 7512 - DNA, 18 bp, Artificial Sequence
  Description of Artificial Sequence: Synthetic oligonucleotide
ctgaggggcatcccaagg

SEQ ID NO: 7513 - DNA, 18 bp, Artificial Sequence
  Description of Artificial Sequence: Synthetic oligonucleotide
tcctcctgaggggcatcc

SEQ ID NO: 7514 - DNA, 18 bp, Artificial Sequence
  Description of Artificial Sequence: Synthetic oligonucleotide
gctcgtcctcctgagggg

SEQ ID NO: 7515 - DNA, 18 bp, Artificial Sequence
  Description of Artificial Sequence: Synthetic oligonucleotide
ctagagctcgtcctcctg

SEQ ID NO: 7516 - DNA, 18 bp, Artificial Sequence
  Description of Artificial Sequence: Synthetic oligonucleotide
tccccctagagctcgtcc

SEQ ID NO: 7517 - DNA, 18 bp, Artificial Sequence
  Description of Artificial Sequence: Synthetic oligonucleotide
agcattccccctagagct

SEQ ID NO: 7518 - DNA, 18 bp, Artificial Sequence
  Description of Artificial Sequence: Synthetic oligonucleotide
tacagcattccccctaga

SEQ ID NO: 7519 - DNA, 18 bp, Artificial Sequence
  Description of Artificial Sequence: Synthetic oligonucleotide
tgacgtacagcattcccc

SEQ ID NO: 7520 - DNA, 18 bp, Artificial Sequence
  Description of Artificial Sequence: Synthetic oligonucleotide
catggtgacgtacagcat

SEQ ID NO: 7521 - DNA, 18 bp, Artificial Sequence
  Description of Artificial Sequence: Synthetic oligonucleotide
ccgagcatggtgacgtac

SEQ ID NO: 7522 - DNA, 18 bp, Artificial Sequence
  Description of Artificial Sequence: Synthetic oligonucleotide
tggcaccgagcatggtga

SEQ ID NO: 7523 - DNA, 18 bp, Artificial Sequence
  Description of Artificial Sequence: Synthetic oligonucleotide
aacactggcaccgagcat

SEQ ID NO: 7524 - DNA, 18 bp, Artificial Sequence
  Description of Artificial Sequence: Synthetic oligonucleotide
tccccaacactggcaccg

SEQ ID NO: 7525 - DNA, 18 bp, Artificial Sequence
  Description of Artificial Sequence: Synthetic oligonucleotide
gaaaatccccaacactgg

SEQ ID NO: 7526 - DNA, 18 bp, Artificial Sequence
  Description of Artificial Sequence: Synthetic oligonucleotide
ctttagaaaatccccaac

SEQ ID NO: 7527 - DNA, 18 bp, Artificial Sequence
  Description of Artificial Sequence: Synthetic oligonucleotide
tctccctttagaaaatcc

SEQ ID NO: 7528 - DNA, 18 bp, Artificial Sequence
  Description of Artificial Sequence: Synthetic oligonucleotide
gggcatctccctttagaa

SEQ ID NO: 7529 - DNA, 18 bp, Artificial Sequence
  Description of Artificial Sequence: Synthetic oligonucleotide
cgagtgggcatctccctt

SEQ ID NO: 7530 - DNA, 18 bp, Artificial Sequence
  Description of Artificial Sequence: Synthetic oligonucleotide
ccctccgagtgggcatct

SEQ ID NO: 7531 - DNA, 18 bp, Artificial Sequence
  Description of Artificial Sequence: Synthetic oligonucleotide
ctttgccctccgagtggg

SEQ ID NO: 7532 - DNA, 18 bp, Artificial Sequence
  Description of Artificial Sequence: Synthetic oligonucleotide
tcaccctttgccctccga

SEQ ID NO: 7533 - DNA, 18 bp, Artificial Sequence
  Description of Artificial Sequence: Synthetic oligonucleotide
tgccatcaccctttgccc

SEQ ID NO: 7534 - DNA, 18 bp, Artificial Sequence
  Description of Artificial Sequence: Synthetic oligonucleotide
ccctatgccatcaccctt

SEQ ID NO: 7535 - DNA, 18 bp, Artificial Sequence
  Description of Artificial Sequence: Synthetic oligonucleotide
gcagcccctatgccatca

SEQ ID NO: 7536 - DNA, 18 bp, Artificial Sequence
  Description of Artificial Sequence: Synthetic oligonucleotide
tatatgcagcccctatgc

SEQ ID NO: 7537 - DNA, 18 bp, Artificial Sequence
  Description of Artificial Sequence: Synthetic oligonucleotide
ggggttatatgcagcccc

SEQ ID NO: 7538 - DNA, 18 bp, Artificial Sequence
  Description of Artificial Sequence: Synthetic oligonucleotide
tgtccggggttatatgca

SEQ ID NO: 7539 - DNA, 18 bp, Artificial Sequence
  Description of Artificial Sequence: Synthetic oligonucleotide
catactttaaaatgcata

SEQ ID NO: 7540 - DNA, 18 bp, Artificial Sequence
  Description of Artificial Sequence: Synthetic oligonucleotide
aaaggcatactttaaaat

SEQ ID NO: 7541 - DNA, 18 bp, Artificial Sequence
  Description of Artificial Sequence: Synthetic oligonucleotide
acataaaaggcatacttt

SEQ ID NO: 7542 - DNA, 18 bp, Artificial Sequence
  Description of Artificial Sequence: Synthetic oligonucleotide
tcaccacataaaaggcat

SEQ ID NO: 7543 - DNA, 18 bp, Artificial Sequence
  Description of Artificial Sequence: Synthetic oligonucleotide
aacgttcaccacataaaa

SEQ ID NO: 7544 - DNA, 18 bp, Artificial Sequence
  Description of Artificial Sequence: Synthetic oligonucleotide
gttaaaacgttcaccaca

SEQ ID NO: 7545 - DNA, 18 bp, Artificial Sequence
  Description of Artificial Sequence: Synthetic oligonucleotide
gtttagttaaaacgttca

SEQ ID NO: 7546 - DNA, 18 bp, Artificial Sequence
  Description of Artificial Sequence: Synthetic oligonucleotide
gaaatgtttagttaaaac

SEQ ID NO: 7547 - DNA, 18 bp, Artificial Sequence
  Description of Artificial Sequence: Synthetic oligonucleotide
ctagagaaatgtttagtt

SEQ ID NO: 7548 - DNA, 18 bp, Artificial Sequence
  Description of Artificial Sequence: Synthetic oligonucleotide
aacttctagagaaatgtt

SEQ ID NO: 7549 - DNA, 18 bp, Artificial Sequence
  Description of Artificial Sequence: Synthetic oligonucleotide
ataaaaacttctagagaa

SEQ ID NO: 7550 - DNA, 18 bp, Artificial Sequence
  Description of Artificial Sequence: Synthetic oligonucleotide
atgttataaaaacttcta

SEQ ID NO: 7551 - DNA, 18 bp, Artificial Sequence
  Description of Artificial Sequence: Synthetic oligonucleotide
tattaatgttataaaaac

SEQ ID NO: 7552 - DNA, 18 bp, Artificial Sequence
  Description of Artificial Sequence: Synthetic oligonucleotide
agttttattaatgttata

SEQ ID NO: 7553 - DNA, 18 bp, Artificial Sequence
  Description of Artificial Sequence: Synthetic oligonucleotide
atactagttttattaatg

SEQ ID NO: 7554 - DNA, 18 bp, Artificial Sequence
  Description of Artificial Sequence: Synthetic oligonucleotide
aaagtatactagttttat

SEQ ID NO: 7555 - DNA, 18 bp, Artificial Sequence
  Description of Artificial Sequence: Synthetic oligonucleotide
agagaaaagtatactagt

SEQ ID NO: 7556 - DNA, 18 bp, Artificial Sequence
  Description of Artificial Sequence: Synthetic oligonucleotide
ctaggagagaaaagtata

SEQ ID NO: 7557 - DNA, 18 bp, Artificial Sequence
  Description of Artificial Sequence: Synthetic oligonucleotide
actctctaggagagaaaa

SEQ ID NO: 7558 - DNA, 18 bp, Artificial Sequence
  Description of Artificial Sequence: Synthetic oligonucleotide
ctgtaactctctaggaga

SEQ ID NO: 7559 - DNA, 18 bp, Artificial Sequence
  Description of Artificial Sequence: Synthetic oligonucleotide
ctccactgtaactctcta

SEQ ID NO: 7560 - DNA, 18 bp, Artificial Sequence
  Description of Artificial Sequence: Synthetic oligonucleotide
tacctccactgtaactct

SEQ ID NO: 7561 - DNA, 18 bp, Artificial Sequence
  Description of Artificial Sequence: Synthetic oligonucleotide
ccttttacctccactgta

SEQ ID NO: 7562 - DNA, 18 bp, Artificial Sequence
  Description of Artificial Sequence: Synthetic oligonucleotide
ccactccttttacctcca

SEQ ID NO: 7563 - DNA, 18 bp, Artificial Sequence
  Description of Artificial Sequence: Synthetic oligonucleotide
gcaagccactccttttac

SEQ ID NO: 7564 - DNA, 18 bp, Artificial Sequence
  Description of Artificial Sequence: Synthetic oligonucleotide
atcctgcaagccactcct

SEQ ID NO: 7565 - DNA, 18 bp, Artificial Sequence
  Description of Artificial Sequence: Synthetic oligonucleotide
tctccatcctgcaagcca

SEQ ID NO: 7566 - DNA, 18 bp, Artificial Sequence
  Description of Artificial Sequence: Synthetic oligonucleotide
tgcagcttctccatcctg

SEQ ID NO: 7567 - DNA, 18 bp, Artificial Sequence
  Description of Artificial Sequence: Synthetic oligonucleotide
actggtgcagcttctcca

SEQ ID NO: 7568 - DNA, 18 bp, Artificial Sequence
  Description of Artificial Sequence: Synthetic oligonucleotide
ataacactggtgcagctt

SEQ ID NO: 7569 - DNA, 18 bp, Artificial Sequence
  Description of Artificial Sequence: Synthetic oligonucleotide
ttccaataacactggtgc

SEQ ID NO: 7570 - DNA, 18 bp, Artificial Sequence
  Description of Artificial Sequence: Synthetic oligonucleotide
cacttccaataacactgg

SEQ ID NO: 7571 - DNA, 18 bp, Artificial Sequence
  Description of Artificial Sequence: Synthetic oligonucleotide
tggctcacttccaataac

SEQ ID NO: 7572 - DNA, 18 bp, Artificial Sequence
  Description of Artificial Sequence: Synthetic oligonucleotide
aatggtggctcacttcca

SEQ ID NO: 7573 - DNA, 18 bp, Artificial Sequence
  Description of Artificial Sequence: Synthetic oligonucleotide
attcaaatggtggctcac

SEQ ID NO: 7574 - DNA, 18 bp, Artificial Sequence
  Description of Artificial Sequence: Synthetic oligonucleotide
agcaaattcaaatggtgg

SEQ ID NO: 7575 - DNA, 18 bp, Artificial Sequence
  Description of Artificial Sequence: Synthetic oligonucleotide
gagctagcaaattcaaat

SEQ ID NO: 7576 - DNA, 18 bp, Artificial Sequence
  Description of Artificial Sequence: Synthetic oligonucleotide
agcatgagctagcaaatt

SEQ ID NO: 7577 - DNA, 18 bp, Artificial Sequence
  Description of Artificial Sequence: Synthetic oligonucleotide
actgcagcatgagctagc

SEQ ID NO: 7578 - DNA, 18 bp, Artificial Sequence
  Description of Artificial Sequence: Synthetic oligonucleotide
tgaatactgcagcatgag

SEQ ID NO: 7579 - DNA, 18 bp, Artificial Sequence
  Description of Artificial Sequence: Synthetic oligonucleotide
taatctgaatactgcagc

SEQ ID NO: 7580 - DNA, 18 bp, Artificial Sequence
  Description of Artificial Sequence: Synthetic oligonucleotide
cccactaatctgaatact

SEQ ID NO: 7581 - DNA, 18 bp, Artificial Sequence
  Description of Artificial Sequence: Synthetic oligonucleotide
aaacacccactaatctga

SEQ ID NO: 7582 - DNA, 18 bp, Artificial Sequence
  Description of Artificial Sequence: Synthetic oligonucleotide
tcacaaaacacccactaa

SEQ ID NO: 7583 - DNA, 18 bp, Artificial Sequence
  Description of Artificial Sequence: Synthetic oligonucleotide
tatgatcacaaaacaccc

SEQ ID NO: 7584 - DNA, 18 bp, Artificial Sequence
  Description of Artificial Sequence: Synthetic oligonucleotide
gaaaatatgatcacaaaa

SEQ ID NO: 7585 - DNA, 18 bp, Artificial Sequence
  Description of Artificial Sequence: Synthetic oligonucleotide
tcgcagaaaatatgatca

SEQ ID NO: 7586 - DNA, 18 bp, Artificial Sequence
  Description of Artificial Sequence: Synthetic oligonucleotide
ttgaatcgcagaaaatat

SEQ ID NO: 7587 - DNA, 18 bp, Artificial Sequence
  Description of Artificial Sequence: Synthetic oligonucleotide
ttgatttgaatcgcagaa

SEQ ID NO: 7588 - DNA, 18 bp, Artificial Sequence
  Description of Artificial Sequence: Synthetic oligonucleotide
aggtcttgatttgaatcg

SEQ ID NO: 7589 - DNA, 18 bp, Artificial Sequence
  Description of Artificial Sequence: Synthetic oligonucleotide
attttaggtcttgatttg

SEQ ID NO: 7590 - DNA, 18 bp, Artificial Sequence
  Description of Artificial Sequence: Synthetic oligonucleotide
aatcaattttaggtcttg

SEQ ID NO: 7591 - DNA, 18 bp, Artificial Sequence
  Description of Artificial Sequence: Synthetic oligonucleotide
gccggaatgaatccagaa

SEQ ID NO: 7592 - DNA, 18 bp, Artificial Sequence
  Description of Artificial Sequence: Synthetic oligonucleotide
gtggtgccggaatgaatc

SEQ ID NO: 7593 - DNA, 18 bp, Artificial Sequence
  Description of Artificial Sequence: Synthetic oligonucleotide
acatggtggtgccggaat

SEQ ID NO: 7594 - DNA, 18 bp, Artificial Sequence
  Description of Artificial Sequence: Synthetic oligonucleotide
cacttacatggtggtgcc

SEQ ID NO: 7595 - DNA, 18 bp, Artificial Sequence
  Description of Artificial Sequence: Synthetic oligonucleotide
gcaaacacttacatggtg

SEQ ID NO: 7596 - DNA, 18 bp, Artificial Sequence
  Description of Artificial Sequence: Synthetic oligonucleotide
ggtaagcaaacacttaca

SEQ ID NO: 7597 - DNA, 18 bp, Artificial Sequence
  Description of Artificial Sequence: Synthetic oligonucleotide
cagtcggtaagcaaacac

SEQ ID NO: 7598 - DNA, 18 bp, Artificial Sequence
  Description of Artificial Sequence: Synthetic oligonucleotide
tatggcagtcggtaagca

SEQ ID NO: 7599 - DNA, 18 bp, Artificial Sequence
  Description of Artificial Sequence: Synthetic oligonucleotide
ggaattatggcagtcggt

SEQ ID NO: 7600 - DNA, 18 bp, Artificial Sequence
  Description of Artificial Sequence: Synthetic oligonucleotide
gaccaggaattatggcag

SEQ ID NO: 7601 - DNA, 18 bp, Artificial Sequence
  Description of Artificial Sequence: Synthetic oligonucleotide
agctggaccaggaattat

SEQ ID NO: 7602 - DNA, 18 bp, Artificial Sequence
  Description of Artificial Sequence: Synthetic oligonucleotide
cgggcagctggaccagga

SEQ ID NO: 7603 - DNA, 18 bp, Artificial Sequence
  Description of Artificial Sequence: Synthetic oligonucleotide
agggtcgggcagctggac

SEQ ID NO: 7604 - DNA, 18 bp, Artificial Sequence
  Description of Artificial Sequence: Synthetic oligonucleotide
gagtcagggtcgggcagc

SEQ ID NO: 7605 - DNA, 18 bp, Artificial Sequence
  Description of Artificial Sequence: Synthetic oligonucleotide
ggagagagtcagggtcgg

SEQ ID NO: 7606 - DNA, 18 bp, Artificial Sequence
  Description of Artificial Sequence: Synthetic oligonucleotide
gagcgggagagagtcagg

SEQ ID NO: 7607 - DNA, 18 bp, Artificial Sequence
  Description of Artificial Sequence: Synthetic oligonucleotide
gaaaagagcgggagagag

SEQ ID NO: 7608 - DNA, 18 bp, Artificial Sequence
  Description of Artificial Sequence: Synthetic oligonucleotide
ctgaggaaaagagcggga

SEQ ID NO: 7609 - DNA, 18 bp, Artificial Sequence
  Description of Artificial Sequence: Synthetic oligonucleotide
tcgacctgaggaaaagag

SEQ ID NO: 7610 - DNA, 18 bp, Artificial Sequence
  Description of Artificial Sequence: Synthetic oligonucleotide
aaccttcgacctgaggaa

SEQ ID NO: 7611 - DNA, 18 bp, Artificial Sequence
  Description of Artificial Sequence: Synthetic oligonucleotide
aaggaaaccttcgacctg

SEQ ID NO: 7612 - DNA, 18 bp, Artificial Sequence
  Description of Artificial Sequence: Synthetic oligonucleotide
ttaaaggaaaccttcgac

SEQ ID NO: 7613 - DNA, 18 bp, Artificial Sequence
  Description of Artificial Sequence: Synthetic oligonucleotide
tgatcttaaaggaaacct

SEQ ID NO: 7614 - DNA, 18 bp, Artificial Sequence
  Description of Artificial Sequence: Synthetic oligonucleotide
cagcgtgatcttaaagga

SEQ ID NO: 7615 - DNA, 18 bp, Artificial Sequence
  Description of Artificial Sequence: Synthetic oligonucleotide
gacgtcagcgtgatctta

SEQ ID NO: 7616 - DNA, 18 bp, Artificial Sequence
  Description of Artificial Sequence: Synthetic oligonucleotide
ggtccgacgtcagcgtga

SEQ ID NO: 7617 - DNA, 18 bp, Artificial Sequence
  Description of Artificial Sequence: Synthetic oligonucleotide
ccgtgggtccgacgtcag

SEQ ID NO: 7618 - DNA, 18 bp, Artificial Sequence
  Description of Artificial Sequence: Synthetic oligonucleotide
ggcagccgtgggtccgac

SEQ ID NO: 7619 - DNA, 18 bp, Artificial Sequence
  Description of Artificial Sequence: Synthetic oligonucleotide
tgtacggcagccgtgggt

SEQ ID NO: 7620 - DNA, 18 bp, Artificial Sequence
  Description of Artificial Sequence: Synthetic oligonucleotide
cactttgtacggcagccg

SEQ ID NO: 7621 - DNA, 18 bp, Artificial Sequence
  Description of Artificial Sequence: Synthetic oligonucleotide
actcacactttgtacggc

SEQ ID NO: 7622 - DNA, 18 bp, Artificial Sequence
  Description of Artificial Sequence: Synthetic oligonucleotide
gagctactcacactttgt

SEQ ID NO: 7623 - DNA, 18 bp, Artificial Sequence
  Description of Artificial Sequence: Synthetic oligonucleotide
cggccgagctactcacac

SEQ ID NO: 7624 - DNA, 18 bp, Artificial Sequence
  Description of Artificial Sequence: Synthetic oligonucleotide
catctcggccgagctact

SEQ ID NO: 7625 - DNA, 18 bp, Artificial Sequence
  Description of Artificial Sequence: Synthetic oligonucleotide
aggcccatctcggccgag

SEQ ID NO: 7626 - DNA, 18 bp, Artificial Sequence
  Description of Artificial Sequence: Synthetic oligonucleotide
ccaaaaggcccatctcgg

SEQ ID NO: 7627 - DNA, 18 bp, Artificial Sequence
  Description of Artificial Sequence: Synthetic oligonucleotide
cggccccaaaaggcccat

SEQ ID NO: 7628 - DNA, 18 bp, Artificial Sequence
  Description of Artificial Sequence: Synthetic oligonucleotide
ttgtccggccccaaaagg

SEQ ID NO: 7629 - DNA, 18 bp, Artificial Sequence
  Description of Artificial Sequence: Synthetic oligonucleotide
ccgtcttgtccggcccca

SEQ ID NO: 7630 - DNA, 18 bp, Artificial Sequence
  Description of Artificial Sequence: Synthetic oligonucleotide
cagccccgtcttgtccgg

SEQ ID NO: 7631 - DNA, 18 bp, Artificial Sequence
  Description of Artificial Sequence: Synthetic oligonucleotide
caacccagccccgtcttg

SEQ ID NO: 7632 - DNA, 18 bp, Artificial Sequence
  Description of Artificial Sequence: Synthetic oligonucleotide
atccccaacccagccccg

SEQ ID NO: 7633 - DNA, 18 bp, Artificial Sequence
  Description of Artificial Sequence: Synthetic oligonucleotide
ggatcatccccaacccag

SEQ ID NO: 7634 - DNA, 18 bp, Artificial Sequence
  Description of Artificial Sequence: Synthetic oligonucleotide
agctcggatcatccccaa

SEQ ID NO: 7635 - DNA, 18 bp, Artificial Sequence
  Description of Artificial Sequence: Synthetic oligonucleotide
tggaaaagctcggatcat

SEQ ID NO: 7636 - DNA, 18 bp, Artificial Sequence
  Description of Artificial Sequence: Synthetic oligonucleotide
gttgttggaaaagctcgg

SEQ ID NO: 7637 - DNA, 18 bp, Artificial Sequence
  Description of Artificial Sequence: Synthetic oligonucleotide
gggtagttgttggaaaag

SEQ ID NO: 7638 - DNA, 18 bp, Artificial Sequence
  Description of Artificial Sequence: Synthetic oligonucleotide
gcgtggggtagttgttgg

SEQ ID NO: 7639 - DNA, 18 bp, Artificial Sequence
  Description of Artificial Sequence: Synthetic oligonucleotide
agactgcgtggggtagtt

SEQ ID NO: 7640 - DNA, 18 bp, Artificial Sequence
  Description of Artificial Sequence: Synthetic oligonucleotide
gatgaagactgcgtgggg

SEQ ID NO: 7641 - DNA, 18 bp, Artificial Sequence
  Description of Artificial Sequence: Synthetic oligonucleotide
gaagagatgaagactgcg

SEQ ID NO: 7642 - DNA, 18 bp, Artificial Sequence
  Description of Artificial Sequence: Synthetic oligonucleotide
gaagtgaagagatgaaga

SEQ ID NO: 7643 - DNA, 18 bp, Artificial Sequence
  Description of Artificial Sequence: Synthetic oligonucleotide
tagatgaagtgaagagat

SEQ ID NO: 7644 - DNA, 18 bp, Artificial Sequence
  Description of Artificial Sequence: Synthetic oligonucleotide
gaaagtagatgaagtgaa

SEQ ID NO: 7645 - DNA, 18 bp, Artificial Sequence
  Description of Artificial Sequence: Synthetic oligonucleotide
gccaggaaagtagatgaa

SEQ ID NO: 7646 - DNA, 18 bp, Artificial Sequence
  Description of Artificial Sequence: Synthetic oligonucleotide
cgcgagccaggaaagtag

SEQ ID NO: 7647 - DNA, 18 bp, Artificial Sequence
  Description of Artificial Sequence: Synthetic oligonucleotide
aagggcgcgagccaggaa

SEQ ID NO: 7648 - DNA, 18 bp, Artificial Sequence
  Description of Artificial Sequence: Synthetic oligonucleotide
cctggaagggcgcgagcc

SEQ ID NO: 7649 - DNA, 18 bp, Artificial Sequence
  Description of Artificial Sequence: Synthetic oligonucleotide
aggctcctggaagggcgc

SEQ ID NO: 7650 - DNA, 18 bp, Artificial Sequence
  Description of Artificial Sequence: Synthetic oligonucleotide
gggaaaggctcctggaag

SEQ ID NO: 7651 - DNA, 18 bp, Artificial Sequence
  Description of Artificial Sequence: Synthetic oligonucleotide
ccggtgggaaaggctcct

SEQ ID NO: 7652 - DNA, 18 bp, Artificial Sequence
  Description of Artificial Sequence: Synthetic oligonucleotide
aggctccggtgggaaagg

SEQ ID NO: 7653 - DNA, 18 bp, Artificial Sequence
  Description of Artificial Sequence: Synthetic oligonucleotide
ctcgcaggctccggtggg

SEQ ID NO: 7654 - DNA, 18 bp, Artificial Sequence
  Description of Artificial Sequence: Synthetic oligonucleotide
ctctcctcgcaggctccg

SEQ ID NO: 7655 - DNA, 18 bp, Artificial Sequence
  Description of Artificial Sequence: Synthetic oligonucleotide
gacctctcctcgcaggct

SEQ ID NO: 7656 - DNA, 18 bp, Artificial Sequence
  Description of Artificial Sequence: Synthetic oligonucleotide
gtacggacctctcctcgc

SEQ ID NO: 7657 - DNA, 18 bp, Artificial Sequence
  Description of Artificial Sequence: Synthetic oligonucleotide
agcaagtacggacctctc

SEQ ID NO: 7658 - DNA, 18 bp, Artificial Sequence
  Description of Artificial Sequence: Synthetic oligonucleotide
tagcgagcaagtacggac

SEQ ID NO: 7659 - DNA, 18 bp, Artificial Sequence
  Description of Artificial Sequence: Synthetic oligonucleotide
acacttagcgagcaagta

SEQ ID NO: 7660 - DNA, 18 bp, Artificial Sequence
  Description of Artificial Sequence: Synthetic oligonucleotide
agctgacacttagcgagc

SEQ ID NO: 7661 - DNA, 18 bp, Artificial Sequence
  Description of Artificial Sequence: Synthetic oligonucleotide
tgccaagctgacacttag

SEQ ID NO: 7662 - DNA, 18 bp, Artificial Sequence
  Description of Artificial Sequence: Synthetic oligonucleotide
caagctgccaagctgaca

SEQ ID NO: 7663 - DNA, 18 bp, Artificial Sequence
  Description of Artificial Sequence: Synthetic oligonucleotide
ggggccaagctgccaagc

SEQ ID NO: 7664 - DNA, 18 bp, Artificial Sequence
  Description of Artificial Sequence: Synthetic oligonucleotide
gtgacggggccaagctgc

SEQ ID NO: 7665 - DNA, 18 bp, Artificial Sequence
  Description of Artificial Sequence: Synthetic oligonucleotide
ccctcgtgacggggccaa

SEQ ID NO: 7666 - DNA, 18 bp, Artificial Sequence
  Description of Artificial Sequence: Synthetic oligonucleotide
ccacaccctcgtgacggg

SEQ ID NO: 7667 - DNA, 18 bp, Artificial Sequence
  Description of Artificial Sequence: Synthetic oligonucleotide
cacacccacaccctcgtg

SEQ ID NO: 7668 - DNA, 18 bp, Artificial Sequence
  Description of Artificial Sequence: Synthetic oligonucleotide
agaaacacacccacaccc

SEQ ID NO: 7669 - DNA, 18 bp, Artificial Sequence
  Description of Artificial Sequence: Synthetic oligonucleotide
taatcagaaacacaccca

SEQ ID NO: 7670 - DNA, 18 bp, Artificial Sequence
  Description of Artificial Sequence: Synthetic oligonucleotide
gtcactaatcagaaacac

SEQ ID NO: 7671 - DNA, 18 bp, Artificial Sequence
  Description of Artificial Sequence: Synthetic oligonucleotide
gggaggtcactaatcaga

SEQ ID NO: 7672 - DNA, 18 bp, Artificial Sequence
  Description of Artificial Sequence: Synthetic oligonucleotide
ccgaggggaggtcactaa

SEQ ID NO: 7673 - DNA, 18 bp, Artificial Sequence
  Description of Artificial Sequence: Synthetic oligonucleotide
gaattccgaggggaggtc

SEQ ID NO: 7674 - DNA, 18 bp, Artificial Sequence
  Description of Artificial Sequence: Synthetic oligonucleotide
caaatgaattccgagggg

SEQ ID NO: 7675 - DNA, 18 bp, Artificial Sequence
  Description of Artificial Sequence: Synthetic oligonucleotide
cccaccaaatgaattccg

SEQ ID NO: 7676 - DNA, 18 bp, Artificial Sequence
  Description of Artificial Sequence: Synthetic oligonucleotide
cattaaattttatgaact

SEQ ID NO: 7677 - DNA, 18 bp, Artificial Sequence
  Description of Artificial Sequence: Synthetic oligonucleotide
attatcattaaattttat

SEQ ID NO: 7678 - DNA, 18 bp, Artificial Sequence
  Description of Artificial Sequence: Synthetic oligonucleotide
ggtgtattatcattaaat

SEQ ID NO: 7679 - DNA, 18 bp, Artificial Sequence
  Description of Artificial Sequence: Synthetic oligonucleotide
actttggtgtattatcat

SEQ ID NO: 7680 - DNA, 18 bp, Artificial Sequence
  Description of Artificial Sequence: Synthetic oligonucleotide
cataaactttggtgtatt

SEQ ID NO: 7681 - DNA, 18 bp, Artificial Sequence
  Description of Artificial Sequence: Synthetic oligonucleotide
ttaaacataaactttggt

SEQ ID NO: 7682 - DNA, 18 bp, Artificial Sequence
  Description of Artificial Sequence: Synthetic oligonucleotide
ctaatttaaacataaact

SEQ ID NO: 7683 - DNA, 18 bp, Artificial Sequence
  Description of Artificial Sequence: Synthetic oligonucleotide
actccctaatttaaacat

SEQ ID NO: 7684 - DNA, 18 bp, Artificial Sequence
  Description of Artificial Sequence: Synthetic oligonucleotide
cttaaactccctaattta

SEQ ID NO: 7685 - DNA, 18 bp, Artificial Sequence
  Description of Artificial Sequence: Synthetic oligonucleotide
gaaaccttaaactcccta

SEQ ID NO: 7686 - DNA, 18 bp, Artificial Sequence
  Description of Artificial Sequence: Synthetic oligonucleotide
gaattgaaaccttaaact

SEQ ID NO: 7687 - DNA, 18 bp, Artificial Sequence
  Description of Artificial Sequence: Synthetic oligonucleotide
agaaagaattgaaacctt

SEQ ID NO: 7688 - DNA, 18 bp, Artificial Sequence
  Description of Artificial Sequence: Synthetic oligonucleotide
aagagagaaagaattgaa

SEQ ID NO: 7689 - DNA, 18 bp, Artificial Sequence
  Description of Artificial Sequence: Synthetic oligonucleotide
aaaaaaagagagaaagaa

SEQ ID NO: 7690 - DNA, 18 bp, Artificial Sequence
  Description of Artificial Sequence: Synthetic oligonucleotide
cccccaaaaaaagagaga

SEQ ID NO: 7691 - DNA, 18 bp, Artificial Sequence
  Description of Artificial Sequence: Synthetic oligonucleotide
tcacccccccaaaaaaag

SEQ ID NO: 7692 - DNA, 18 bp, Artificial Sequence
  Description of Artificial Sequence: Synthetic oligonucleotide
aaacatcacccccccaaa

SEQ ID NO: 7693 - DNA, 18 bp, Artificial Sequence
  Description of Artificial Sequence: Synthetic oligonucleotide
ctgtaaaacatcaccccc

SEQ ID NO: 7694 - DNA, 18 bp, Artificial Sequence
  Description of Artificial Sequence: Synthetic oligonucleotide
agtgcctgtaaaacatca

SEQ ID NO: 7695 - DNA, 18 bp, Artificial Sequence
  Description of Artificial Sequence: Synthetic oligonucleotide
acttaagtgcctgtaaaa

SEQ ID NO: 7696 - DNA, 18 bp, Artificial Sequence
  Description of Artificial Sequence: Synthetic oligonucleotide
tgaatacttaagtgcctg

SEQ ID NO: 7697 - DNA, 18 bp, Artificial Sequence
  Description of Artificial Sequence: Synthetic oligonucleotide
cgatgaatacttaagtgc

SEQ ID NO: 7698 - DNA, 18 bp, Artificial Sequence
  Description of Artificial Sequence: Synthetic oligonucleotide
ctcttcgatgaatactta

SEQ ID NO: 7699 - DNA, 18 bp, Artificial Sequence
  Description of Artificial Sequence: Synthetic oligonucleotide
ggtgactcttcgatgaat

SEQ ID NO: 7700 - DNA, 18 bp, Artificial Sequence
  Description of Artificial Sequence: Synthetic oligonucleotide
actggggtgactcttcga

SEQ ID NO: 7701 - DNA, 18 bp, Artificial Sequence
  Description of Artificial Sequence: Synthetic oligonucleotide
ccgctactggggtgactc

SEQ ID NO: 7702 - DNA, 18 bp, Artificial Sequence
  Description of Artificial Sequence: Synthetic oligonucleotide
gatcaccgctactggggt

SEQ ID NO: 7703 - DNA, 18 bp, Artificial Sequence
  Description of Artificial Sequence: Synthetic oligonucleotide
tctgtgatcaccgctact

SEQ ID NO: 7704 - DNA, 18 bp, Artificial Sequence
  Description of Artificial Sequence: Synthetic oligonucleotide
tcatgtctgtgatcaccg

SEQ ID NO: 7705 - DNA, 18 bp, Artificial Sequence
  Description of Artificial Sequence: Synthetic oligonucleotide
tcttttcatgtctgtgat

SEQ ID NO: 7706 - DNA, 18 bp, Artificial Sequence
  Description of Artificial Sequence: Synthetic oligonucleotide
tcgcatcttttcatgtct

SEQ ID NO: 7707 - DNA, 18 bp, Artificial Sequence
  Description of Artificial Sequence: Synthetic oligonucleotide
gcgtctcgcatcttttca

SEQ ID NO: 7708 - DNA, 18 bp, Artificial Sequence
  Description of Artificial Sequence: Synthetic oligonucleotide
ctccggcgtctcgcatct

SEQ ID NO: 7709 - DNA, 18 bp, Artificial Sequence
  Description of Artificial Sequence: Synthetic oligonucleotide
aggatctccggcgtctcg

SEQ ID NO: 7710 - DNA, 18 bp, Artificial Sequence
  Description of Artificial Sequence: Synthetic oligonucleotide
ggtgaaggatctccggcg

SEQ ID NO: 7711 - DNA, 18 bp, Artificial Sequence
  Description of Artificial Sequence: Synthetic oligonucleotide
ttggtggtgaaggatctc

SEQ ID NO: 7712 - DNA, 18 bp, Artificial Sequence
  Description of Artificial Sequence: Synthetic oligonucleotide
tttatttggtggtgaagg

SEQ ID NO: 7713 - DNA, 18 bp, Artificial Sequence
  Description of Artificial Sequence: Synthetic oligonucleotide
aacattttatttggtggt

SEQ ID NO: 7714 - DNA, 18 bp, Artificial Sequence
  Description of Artificial Sequence: Synthetic oligonucleotide
tccgcaacattttatttg

SEQ ID NO: 7715 - DNA, 18 bp, Artificial Sequence
  Description of Artificial Sequence: Synthetic oligonucleotide
agatctccgcaacatttt

SEQ ID NO: 7716 - DNA, 18 bp, Artificial Sequence
  Description of Artificial Sequence: Synthetic oligonucleotide
ggactatcagatctccgc

SEQ ID NO: 7717 - DNA, 18 bp, Artificial Sequence
  Description of Artificial Sequence: Synthetic oligonucleotide
tttcaggactatcagatc

SEQ ID NO: 7718 - DNA, 18 bp, Artificial Sequence
  Description of Artificial Sequence: Synthetic oligonucleotide
tttgttttcaggactatc

SEQ ID NO: 7719 - DNA, 18 bp, Artificial Sequence
  Description of Artificial Sequence: Synthetic oligonucleotide
ctgtatttgttttcagga

SEQ ID NO: 7720 - DNA, 18 bp, Artificial Sequence
  Description of Artificial Sequence: Synthetic oligonucleotide
tgtcactgtatttgtttt

SEQ ID NO: 7721 - DNA, 18 bp, Artificial Sequence
  Description of Artificial Sequence: Synthetic oligonucleotide
tgtgctgtcactgtattt

SEQ ID NO: 7722 - DNA, 18 bp, Artificial Sequence
  Description of Artificial Sequence: Synthetic oligonucleotide
tgacctgtgctgtcactg

SEQ ID NO: 7723 - DNA, 18 bp, Artificial Sequence
  Description of Artificial Sequence: Synthetic oligonucleotide
tactgtgacctgtgctgt

SEQ ID NO: 7724 - DNA, 18 bp, Artificial Sequence
  Description of Artificial Sequence: Synthetic oligonucleotide
ggccttactgtgacctgt

SEQ ID NO: 7725 - DNA, 18 bp, Artificial Sequence
  Description of Artificial Sequence: Synthetic oligonucleotide
tttttggccttactgtga

SEQ ID NO: 7726 - DNA, 18 bp, Artificial Sequence
  Description of Artificial Sequence: Synthetic oligonucleotide
gcacatttttggccttac

SEQ ID NO: 7727 - DNA, 18 bp, Artificial Sequence
  Description of Artificial Sequence: Synthetic oligonucleotide
agtatgcacatttttggc

SEQ ID NO: 7728 - DNA, 18 bp, Artificial Sequence
  Description of Artificial Sequence: Synthetic oligonucleotide
ctgtgagtatgcacattt

SEQ ID NO: 7729 - DNA, 18 bp, Artificial Sequence
  Description of Artificial Sequence: Synthetic oligonucleotide
taactctgtgagtatgca

SEQ ID NO: 7730 - DNA, 18 bp, Artificial Sequence
  Description of Artificial Sequence: Synthetic oligonucleotide
ctctctaactctgtgagt

SEQ ID NO: 7731 - DNA, 18 bp, Artificial Sequence
  Description of Artificial Sequence: Synthetic oligonucleotide
tccctctctctaactctg

SEQ ID NO: 7732 - DNA, 18 bp, Artificial Sequence
  Description of Artificial Sequence: Synthetic oligonucleotide
caccatccctctctctaa

SEQ ID NO: 7733 - DNA, 18 bp, Artificial Sequence
  Description of Artificial Sequence: Synthetic oligonucleotide
caccaccatccctctctc

SEQ ID NO: 7734 - DNA, 18 bp, Artificial Sequence
  Description of Artificial Sequence: Synthetic oligonucleotide
atactcaccaccatccct

SEQ ID NO: 7735 - DNA, 18 bp, Artificial Sequence
  Description of Artificial Sequence: Synthetic oligonucleotide
gaaagatactcaccacca

SEQ ID NO: 7736 - DNA, 18 bp, Artificial Sequence
  Description of Artificial Sequence: Synthetic oligonucleotide
aacaagaaagatactcac

SEQ ID NO: 7737 - DNA, 18 bp, Artificial Sequence
  Description of Artificial Sequence: Synthetic oligonucleotide
gtttcaacaagaaagata

SEQ ID NO: 7738 - DNA, 18 bp, Artificial Sequence
  Description of Artificial Sequence: Synthetic oligonucleotide
tcaaagtttcaacaagaa

SEQ ID NO: 7739 - DNA, 18 bp, Artificial Sequence
  Description of Artificial Sequence: Synthetic oligonucleotide
gtatgtcaaagtttcaac

SEQ ID NO: 7740 - DNA, 18 bp, Artificial Sequence
  Description of Artificial Sequence: Synthetic oligonucleotide
aaactgtatgtcaaagtt

SEQ ID NO: 7741 - DNA, 18 bp, Artificial Sequence
  Description of Artificial Sequence: Synthetic oligonucleotide
tgttaaaactgtatgtca

SEQ ID NO: 7742 - DNA, 18 bp, Artificial Sequence
  Description of Artificial Sequence: Synthetic oligonucleotide
gctattgttaaaactgta

SEQ ID NO: 7743 - DNA, 18 bp, Artificial Sequence
  Description of Artificial Sequence: Synthetic oligonucleotide
atagagctattgttaaaa

SEQ ID NO: 7744 - DNA, 18 bp, Artificial Sequence
  Description of Artificial Sequence: Synthetic oligonucleotide
tttatatagagctattgt

SEQ ID NO: 7745 - DNA, 18 bp, Artificial Sequence
  Description of Artificial Sequence: Synthetic oligonucleotide
cgccttttatatagagct

SEQ ID NO: 7746 - DNA, 18 bp, Artificial Sequence
  Description of Artificial Sequence: Synthetic oligonucleotide
actgccgccttttatata

SEQ ID NO: 7747 - DNA, 18 bp, Artificial Sequence
  Description of Artificial Sequence: Synthetic oligonucleotide
atactactgccgcctttt

SEQ ID NO: 7748 - DNA, 18 bp, Artificial Sequence
  Description of Artificial Sequence: Synthetic oligonucleotide
tagaaatactactgccgc

SEQ ID NO: 7749 - DNA, 18 bp, Artificial Sequence
  Description of Artificial Sequence: Synthetic oligonucleotide
caagctagaaatactact

SEQ ID NO: 7750 - DNA, 18 bp, Artificial Sequence
  Description of Artificial Sequence: Synthetic oligonucleotide
ttcttcaagctagaaata

SEQ ID NO: 7751 - DNA, 18 bp, Artificial Sequence
  Description of Artificial Sequence: Synthetic oligonucleotide
gtaacttcttcaagctag

SEQ ID NO: 7752 - DNA, 18 bp, Artificial Sequence
  Description of Artificial Sequence: Synthetic oligonucleotide
gaacagtaacttcttcaa

SEQ ID NO: 7753 - DNA, 18 bp, Artificial Sequence
  Description of Artificial Sequence: Synthetic oligonucleotide
taactgaacagtaacttc

SEQ ID NO: 7754 - DNA, 18 bp, Artificial Sequence
  Description of Artificial Sequence: Synthetic oligonucleotide
aggtagaagcggccgtgt

SEQ ID NO: 7755 - DNA, 18 bp, Artificial Sequence
  Description of Artificial Sequence: Synthetic oligonucleotide
tgtacaggtagaagcggc

SEQ ID NO: 7756 - DNA, 18 bp, Artificial Sequence
  Description of Artificial Sequence: Synthetic oligonucleotide
gtccgtgtacaggtagaa

SEQ ID NO: 7757 - DNA, 18 bp, Artificial Sequence
  Description of Artificial Sequence: Synthetic oligonucleotide
aagcagtccgtgtacagg

SEQ ID NO: 7758 - DNA, 18 bp, Artificial Sequence
  Description of Artificial Sequence: Synthetic oligonucleotide
ccacaaagcagtccgtgt

SEQ ID NO: 7759 - DNA, 18 bp, Artificial Sequence
  Description of Artificial Sequence: Synthetic oligonucleotide
ctgggccacaaagcagtc

SEQ ID NO: 7760 - DNA, 18 bp, Artificial Sequence
  Description of Artificial Sequence: Synthetic oligonucleotide
atcagctgggccacaaag

SEQ ID NO: 7761 - DNA, 18 bp, Artificial Sequence
  Description of Artificial Sequence: Synthetic oligonucleotide
gcaccatcagctgggcca

SEQ ID NO: 7762 - DNA, 18 bp, Artificial Sequence
  Description of Artificial Sequence: Synthetic oligonucleotide
cagccgcaccatcagctg

SEQ ID NO: 7763 - DNA, 18 bp, Artificial Sequence
  Description of Artificial Sequence: Synthetic oligonucleotide
aggcccagccgcaccatc

SEQ ID NO: 7764 - DNA, 18 bp, Artificial Sequence
  Description of Artificial Sequence: Synthetic oligonucleotide
cctgcaggcccagccgca

SEQ ID NO: 7765 - DNA, 18 bp, Artificial Sequence
  Description of Artificial Sequence: Synthetic oligonucleotide
aaatgcctgcaggcccag

SEQ ID NO: 7766 - DNA, 18 bp, Artificial Sequence
  Description of Artificial Sequence: Synthetic oligonucleotide
gtgagaaatgcctgcagg

SEQ ID NO: 7767 - DNA, 18 bp, Artificial Sequence
  Description of Artificial Sequence: Synthetic oligonucleotide
ggtgagtgagaaatgcct

SEQ ID NO: 7768 - DNA, 18 bp, Artificial Sequence
  Description of Artificial Sequence: Synthetic oligonucleotide
cagcaggtgagtgagaaa

SEQ ID NO: 7769 - DNA, 18 bp, Artificial Sequence
  Description of Artificial Sequence: Synthetic oligonucleotide
tggggcagcaggtgagtg

SEQ ID NO: 7770 - DNA, 18 bp, Artificial Sequence
  Description of Artificial Sequence: Synthetic oligonucleotide
ggacatggggcagcaggt

SEQ ID NO: 7771 - DNA, 18 bp, Artificial Sequence
  Description of Artificial Sequence: Synthetic oligonucleotide
ctgcaggacatggggcag

SEQ ID NO: 7772 - DNA, 18 bp, Artificial Sequence
  Description of Artificial Sequence: Synthetic oligonucleotide
agcacctgcaggacatgg

SEQ ID NO: 7773 - DNA, 18 bp, Artificial Sequence
  Description of Artificial Sequence: Synthetic oligonucleotide
ccgccagcacctgcagga

SEQ ID NO: 7774 - DNA, 18 bp, Artificial Sequence
  Description of Artificial Sequence: Synthetic oligonucleotide
tgcgcccgccagcacctg

SEQ ID NO: 7775 - DNA, 18 bp, Artificial Sequence
  Description of Artificial Sequence: Synthetic oligonucleotide
ctctgcgcccgccagcac

SEQ ID NO: 7776 - DNA, 18 bp, Artificial Sequence
  Description of Artificial Sequence: Synthetic oligonucleotide
gaggcctctgcgcccgcc

SEQ ID NO: 7777 - DNA, 18 bp, Artificial Sequence
  Description of Artificial Sequence: Synthetic oligonucleotide
cctgggaggcctctgcgc

SEQ ID NO: 7778 - DNA, 18 bp, Artificial Sequence
  Description of Artificial Sequence: Synthetic oligonucleotide
ctcctcctgggaggcctc

SEQ ID NO: 7779 - DNA, 18 bp, Artificial Sequence
  Description of Artificial Sequence: Synthetic oligonucleotide
ttgctctcctcctgggag

SEQ ID NO: 7780 - DNA, 18 bp, Artificial Sequence
  Description of Artificial Sequence: Synthetic oligonucleotide
ggtccttgctctcctcct

SEQ ID NO: 7781 - DNA, 18 bp, Artificial Sequence
  Description of Artificial Sequence: Synthetic oligonucleotide
tgccaggtccttgctctc

SEQ ID NO: 7782 - DNA, 18 bp, Artificial Sequence
  Description of Artificial Sequence: Synthetic oligonucleotide
gcccctgccaggtccttg

SEQ ID NO: 7783 - DNA, 18 bp, Artificial Sequence
  Description of Artificial Sequence: Synthetic oligonucleotide
cagcagcccctgccaggt

SEQ ID NO: 7784 - DNA, 18 bp, Artificial Sequence
  Description of Artificial Sequence: Synthetic oligonucleotide
ctcctcagcagcccctgc

SEQ ID NO: 7785 - DNA, 18 bp, Artificial Sequence
  Description of Artificial Sequence: Synthetic oligonucleotide
tcctcctcctcagcagcc

SEQ ID NO: 7786 - DNA, 18 bp, Artificial Sequence
  Description of Artificial Sequence: Synthetic oligonucleotide
cgctctcctcctcctcag

SEQ ID NO: 7787 - DNA, 18 bp, Artificial Sequence
  Description of Artificial Sequence: Synthetic oligonucleotide
cagcccgctctcctcctc

SEQ ID NO: 7788 - DNA, 18 bp, Artificial Sequence
  Description of Artificial Sequence: Synthetic oligonucleotide
ccgggcagcccgctctcc

SEQ ID NO: 7789 - DNA, 18 bp, Artificial Sequence
  Description of Artificial Sequence: Synthetic oligonucleotide
cggccccgggcagcccgc

SEQ ID NO: 7790 - DNA, 18 bp, Artificial Sequence
  Description of Artificial Sequence: Synthetic oligonucleotide
aggcccggccccgggcag

SEQ ID NO: 7791 - DNA, 18 bp, Artificial Sequence
  Description of Artificial Sequence: Synthetic oligonucleotide
gagccaggcccggccccg

SEQ ID NO: 7792 - DNA, 18 bp, Artificial Sequence
  Description of Artificial Sequence: Synthetic oligonucleotide
cacaggagccaggcccgg

SEQ ID NO: 7793 - DNA, 18 bp, Artificial Sequence
  Description of Artificial Sequence: Synthetic oligonucleotide
aaaagcacaggagccagg

SEQ ID NO: 7794 - DNA, 18 bp, Artificial Sequence
  Description of Artificial Sequence: Synthetic oligonucleotide
tccccaaaagcacaggag

SEQ ID NO: 7795 - DNA, 18 bp, Artificial Sequence
  Description of Artificial Sequence: Synthetic oligonucleotide
tctcctccccaaaagcac

SEQ ID NO: 7796 - DNA, 18 bp, Artificial Sequence
  Description of Artificial Sequence: Synthetic oligonucleotide
gggaatctcctccccaaa

SEQ ID NO: 7797 - DNA, 18 bp, Artificial Sequence
  Description of Artificial Sequence: Synthetic oligonucleotide
tccatgggaatctcctcc

SEQ ID NO: 7798 - DNA, 18 bp, Artificial Sequence
  Description of Artificial Sequence: Synthetic oligonucleotide
ccccatccatgggaatct

SEQ ID NO: 7799 - DNA, 18 bp, Artificial Sequence
  Description of Artificial Sequence: Synthetic oligonucleotide
aggctccccatccatggg

SEQ ID NO: 7800 - DNA, 18 bp, Artificial Sequence
  Description of Artificial Sequence: Synthetic oligonucleotide
gcaggaggctccccatcc

SEQ ID NO: 7801 - DNA, 18 bp, Artificial Sequence
  Description of Artificial Sequence: Synthetic oligonucleotide
aggaggcaggaggctccc

SEQ ID NO: 7802 - DNA, 18 bp, Artificial Sequence
  Description of Artificial Sequence: Synthetic oligonucleotide
gcccgaggaggcaggagg

SEQ ID NO: 7803 - DNA, 18 bp, Artificial Sequence
  Description of Artificial Sequence: Synthetic oligonucleotide
cccaggcccgaggaggca

SEQ ID NO: 7804 - DNA, 18 bp, Artificial Sequence
  Description of Artificial Sequence: Synthetic oligonucleotide
ggagccccaggcccgagg

SEQ ID NO: 7805 - DNA, 18 bp, Artificial Sequence
  Description of Artificial Sequence: Synthetic oligonucleotide
gtctgggagccccaggcc

SEQ ID NO: 7806 - DNA, 18 bp, Artificial Sequence
  Description of Artificial Sequence: Synthetic oligonucleotide
gtgtagtctgggagcccc

SEQ ID NO: 7807 - DNA, 18 bp, Artificial Sequence
  Description of Artificial Sequence: Synthetic oligonucleotide
cagacgtgtagtctggga

SEQ ID NO: 7808 - DNA, 18 bp, Artificial Sequence
  Description of Artificial Sequence: Synthetic oligonucleotide
gacgccagacgtgtagtc

SEQ ID NO: 7809 - DNA, 18 bp, Artificial Sequence
  Description of Artificial Sequence: Synthetic oligonucleotide
aagctgacgccagacgtg

SEQ ID NO: 7810 - DNA, 18 bp, Artificial Sequence
  Description of Artificial Sequence: Synthetic oligonucleotide
cgtggaagctgacgccag

SEQ ID NO: 7811 - DNA, 18 bp, Artificial Sequence
  Description of Artificial Sequence: Synthetic oligonucleotide
ctggtcgtggaagctgac

SEQ ID NO: 7812 - DNA, 18 bp, Artificial Sequence
  Description of Artificial Sequence: Synthetic oligonucleotide
tcagcctggtcgtggaag

SEQ ID NO: 7813 - DNA, 18 bp, Artificial Sequence
  Description of Artificial Sequence: Synthetic oligonucleotide
ggaggtcagcctggtcgt

SEQ ID NO: 7814 - DNA, 18 bp, Artificial Sequence
  Description of Artificial Sequence: Synthetic oligonucleotide
ctcagggaggtcagcctg

SEQ ID NO: 7815 - DNA, 18 bp, Artificial Sequence
  Description of Artificial Sequence: Synthetic oligonucleotide
tctgtctcagggaggtca

SEQ ID NO: 7816 - DNA, 18 bp, Artificial Sequence
  Description of Artificial Sequence: Synthetic oligonucleotide
agtcctctgtctcaggga

SEQ ID NO: 7817 - DNA, 18 bp, Artificial Sequence
  Description of Artificial Sequence: Synthetic oligonucleotide
ttggaagtcctctgtctc

SEQ ID NO: 7818 - DNA, 18 bp, Artificial Sequence
  Description of Artificial Sequence: Synthetic oligonucleotide
ccggcttggaagtcctct

SEQ ID NO: 7819 - DNA, 18 bp, Artificial Sequence
  Description of Artificial Sequence: Synthetic oligonucleotide
agagcccggcttggaagt

SEQ ID NO: 7820 - DNA, 18 bp, Artificial Sequence
  Description of Artificial Sequence: Synthetic oligonucleotide
cacatagagcccggcttg

SEQ ID NO: 7821 - DNA, 18 bp, Artificial Sequence
  Description of Artificial Sequence: Synthetic oligonucleotide
tcagtcacatagagcccg

SEQ ID NO: 7822 - DNA, 18 bp, Artificial Sequence
  Description of Artificial Sequence: Synthetic oligonucleotide
gagactcagtcacataga

SEQ ID NO: 7823 - DNA, 18 bp, Artificial Sequence
  Description of Artificial Sequence: Synthetic oligonucleotide
ctggggagactcagtcac

SEQ ID NO: 7824 - DNA, 18 bp, Artificial Sequence
  Description of Artificial Sequence: Synthetic oligonucleotide
tggggctggggagactca

SEQ ID NO: 7825 - DNA, 18 bp, Artificial Sequence
  Description of Artificial Sequence: Synthetic oligonucleotide
cctcctggggctggggag

SEQ ID NO: 7826 - DNA, 18 bp, Artificial Sequence
  Description of Artificial Sequence: Synthetic oligonucleotide
ctcagcctcctggggctg

SEQ ID NO: 7827 - DNA, 18 bp, Artificial Sequence
  Description of Artificial Sequence: Synthetic oligonucleotide
acagcctcagcctcctgg

SEQ ID NO: 7828 - DNA, 18 bp, Artificial Sequence
  Description of Artificial Sequence: Synthetic oligonucleotide
ggctcacagcctcagcct

SEQ ID NO: 7829 - DNA, 18 bp, Artificial Sequence
  Description of Artificial Sequence: Synthetic oligonucleotide
gcccaggctcacagcctc

SEQ ID NO: 7830 - DNA, 18 bp, Artificial Sequence
  Description of Artificial Sequence: Synthetic oligonucleotide
agccggcccaggctcaca

SEQ ID NO: 7831 - DNA, 18 bp, Artificial Sequence
  Description of Artificial Sequence: Synthetic oligonucleotide
cactcagccggcccaggc

SEQ ID NO: 7832 - DNA, 18 bp, Artificial Sequence
  Description of Artificial Sequence: Synthetic oligonucleotide
cttgtcactcagccggcc

SEQ ID NO: 7833 - DNA, 18 bp, Artificial Sequence
  Description of Artificial Sequence: Synthetic oligonucleotide
ctgctcttgtcactcagc

SEQ ID NO: 7834 - DNA, 18 bp, Artificial Sequence
  Description of Artificial Sequence: Synthetic oligonucleotide
tggtgctgctcttgtcac

SEQ ID NO: 7835 - DNA, 18 bp, Artificial Sequence
  Description of Artificial Sequence: Synthetic oligonucleotide
ctcgctggtgctgctctt

SEQ ID NO: 7836 - DNA, 18 bp, Artificial Sequence
  Description of Artificial Sequence: Synthetic oligonucleotide
gaggtctcgctggtgctg

SEQ ID NO: 7837 - DNA, 18 bp, Artificial Sequence
  Description of Artificial Sequence: Synthetic oligonucleotide
ccagggaggtctcgctgg

SEQ ID NO: 7838 - DNA, 18 bp, Artificial Sequence
  Description of Artificial Sequence: Synthetic oligonucleotide
gctcctcacccagggagg

SEQ ID NO: 7839 - DNA, 18 bp, Artificial Sequence
  Description of Artificial Sequence: Synthetic oligonucleotide
agcccgctcctcacccag

SEQ ID NO: 7840 - DNA, 18 bp, Artificial Sequence
  Description of Artificial Sequence: Synthetic oligonucleotide
tctggagcccgctcctca

SEQ ID NO: 7841 - DNA, 18 bp, Artificial Sequence
  Description of Artificial Sequence: Synthetic oligonucleotide
cctcgtctggagcccgct

SEQ ID NO: 7842 - DNA, 18 bp, Artificial Sequence
  Description of Artificial Sequence: Synthetic oligonucleotide
acccccctcgtctggagc

SEQ ID NO: 7843 - DNA, 18 bp, Artificial Sequence
  Description of Artificial Sequence: Synthetic oligonucleotide
ggggcacccccctcgtct

SEQ ID NO: 7844 - DNA, 18 bp, Artificial Sequence
  Description of Artificial Sequence: Synthetic oligonucleotide
ccacgggggcacccccct

SEQ ID NO: 7845 - DNA, 18 bp, Artificial Sequence
  Description of Artificial Sequence: Synthetic oligonucleotide
cttgtccacgggggcacc

SEQ ID NO: 7846 - DNA, 18 bp, Artificial Sequence
  Description of Artificial Sequence: Synthetic oligonucleotide
ctgctcttgtccacgggg

SEQ ID NO: 7847 - DNA, 18 bp, Artificial Sequence
  Description of Artificial Sequence: Synthetic oligonucleotide
gaaggctgctcttgtcca

SEQ ID NO: 7848 - DNA, 18 bp, Artificial Sequence
  Description of Artificial Sequence: Synthetic oligonucleotide
tgatcgaaggctgctctt

SEQ ID NO: 7849 - DNA, 18 bp, Artificial Sequence
  Description of Artificial Sequence: Synthetic oligonucleotide
tcacctgatcgaaggctg

SEQ ID NO: 7850 - DNA, 18 bp, Artificial Sequence
  Description of Artificial Sequence: Synthetic oligonucleotide
tgctgtcacctgatcgaa

SEQ ID NO: 7851 - DNA, 18 bp, Artificial Sequence
  Description of Artificial Sequence: Synthetic oligonucleotide
ctggctgctgtcacctga

SEQ ID NO: 7852 - DNA, 18 bp, Artificial Sequence
  Description of Artificial Sequence: Synthetic oligonucleotide
aagtcctggctgctgtca

SEQ ID NO: 7853 - DNA, 18 bp, Artificial Sequence
  Description of Artificial Sequence: Synthetic oligonucleotide
gcttcaagtcctggctgc

SEQ ID NO: 7854 - DNA, 18 bp, Artificial Sequence
  Description of Artificial Sequence: Synthetic oligonucleotide
gctttgcttcaagtcctg

SEQ ID NO: 7855 - DNA, 18 bp, Artificial Sequence
  Description of Artificial Sequence: Synthetic oligonucleotide
ccctcgctttgcttcaag

SEQ ID NO: 7856 - DNA, 18 bp, Artificial Sequence
  Description of Artificial Sequence: Synthetic oligonucleotide
cggagccctcgctttgct

SEQ ID NO: 7857 - DNA, 18 bp, Artificial Sequence
  Description of Artificial Sequence: Synthetic oligonucleotide
ctcctcggagccctcgct

SEQ ID NO: 7858 - DNA, 18 bp, Artificial Sequence
  Description of Artificial Sequence: Synthetic oligonucleotide
tcttcctcctcggagccc

SEQ ID NO: 7859 - DNA, 18 bp, Artificial Sequence
  Description of Artificial Sequence: Synthetic oligonucleotide
cctcctcttcctcctcgg

SEQ ID NO: 7860 - DNA, 18 bp, Artificial Sequence
  Description of Artificial Sequence: Synthetic oligonucleotide
ctcctcctcctcttcctc

SEQ ID NO: 7861 - DNA, 18 bp, Artificial Sequence
  Description of Artificial Sequence: Synthetic oligonucleotide
ctgtcctcctcctcctct

SEQ ID NO: 7862 - DNA, 18 bp, Artificial Sequence
  Description of Artificial Sequence: Synthetic oligonucleotide
cgcagctgtcctcctcct

SEQ ID NO: 7863 - DNA, 18 bp, Artificial Sequence
  Description of Artificial Sequence: Synthetic oligonucleotide
caccacgcagctgtcctc

SEQ ID NO: 7864 - DNA, 18 bp, Artificial Sequence
  Description of Artificial Sequence: Synthetic oligonucleotide
tctagcaccacgcagctg

SEQ ID NO: 7865 - DNA, 18 bp, Artificial Sequence
  Description of Artificial Sequence: Synthetic oligonucleotide
cctcctctagcaccacgc

SEQ ID NO: 7866 - DNA, 18 bp, Artificial Sequence
  Description of Artificial Sequence: Synthetic oligonucleotide
ctcctcctcctctagcac

SEQ ID NO: 7867 - DNA, 18 bp, Artificial Sequence
  Description of Artificial Sequence: Synthetic oligonucleotide
tccccctcctcctcctct

SEQ ID NO: 7868 - DNA, 18 bp, Artificial Sequence
  Description of Artificial Sequence: Synthetic oligonucleotide
cctgctccccctcctcct

SEQ ID NO: 7869 - DNA, 18 bp, Artificial Sequence
  Description of Artificial Sequence: Synthetic oligonucleotide
ctcctcctgctccccctc

SEQ ID NO: 7870 - DNA, 18 bp, Artificial Sequence
  Description of Artificial Sequence: Synthetic oligonucleotide
gtgacctcctcctgctcc

SEQ ID NO: 7871 - DNA, 18 bp, Artificial Sequence
  Description of Artificial Sequence: Synthetic oligonucleotide
ccccggtgacctcctcct

SEQ ID NO: 7872 - DNA, 18 bp, Artificial Sequence
  Description of Artificial Sequence: Synthetic oligonucleotide
agatgccccggtgacctc

SEQ ID NO: 7873 - DNA, 18 bp, Artificial Sequence
  Description of Artificial Sequence: Synthetic oligonucleotide
agctcagatgccccggtg

SEQ ID NO: 7874 - DNA, 18 bp, Artificial Sequence
  Description of Artificial Sequence: Synthetic oligonucleotide
gagtgagctcagatgccc

SEQ ID NO: 7875 - DNA, 18 bp, Artificial Sequence
  Description of Artificial Sequence: Synthetic oligonucleotide
agacagagtgagctcaga

SEQ ID NO: 7876 - DNA, 18 bp, Artificial Sequence
  Description of Artificial Sequence: Synthetic oligonucleotide
gtgtcagacagagtgagc

SEQ ID NO: 7877 - DNA, 18 bp, Artificial Sequence
  Description of Artificial Sequence: Synthetic oligonucleotide
gcaccgtgtcagacagag

SEQ ID NO: 7878 - DNA, 18 bp, Artificial Sequence
  Description of Artificial Sequence: Synthetic oligonucleotide
ggacagcaccgtgtcaga

SEQ ID NO: 7879 - DNA, 18 bp, Artificial Sequence
  Description of Artificial Sequence: Synthetic oligonucleotide
tccatggacagcaccgtg

SEQ ID NO: 7880 - DNA, 18 bp, Artificial Sequence
  Description of Artificial Sequence: Synthetic oligonucleotide
ccgtctccatggacagca

SEQ ID NO: 7881 - DNA, 18 bp, Artificial Sequence
  Description of Artificial Sequence: Synthetic oligonucleotide
cacaaccgtctccatgga

SEQ ID NO: 7882 - DNA, 18 bp, Artificial Sequence
  Description of Artificial Sequence: Synthetic oligonucleotide
ccggccacaaccgtctcc

SEQ ID NO: 7883 - DNA, 18 bp, Artificial Sequence
  Description of Artificial Sequence: Synthetic oligonucleotide
tgccgccggccacaaccg

SEQ ID NO: 7884 - DNA, 18 bp, Artificial Sequence
  Description of Artificial Sequence: Synthetic oligonucleotide
cccactgccgccggccac

SEQ ID NO: 7885 - DNA, 18 bp, Artificial Sequence
  Description of Artificial Sequence: Synthetic oligonucleotide
tctcccccactgccgccg

SEQ ID NO: 7886 - DNA, 18 bp, Artificial Sequence
  Description of Artificial Sequence: Synthetic oligonucleotide
ctccatctcccccactgc

SEQ ID NO: 7887 - DNA, 18 bp, Artificial Sequence
  Description of Artificial Sequence: Synthetic oligonucleotide
ttcttctccatctccccc

SEQ ID NO: 7888 - DNA, 18 bp, Artificial Sequence
  Description of Artificial Sequence: Synthetic oligonucleotide
tcctcttcttctccatct

SEQ ID NO: 7889 - DNA, 18 bp, Artificial Sequence
  Description of Artificial Sequence: Synthetic oligonucleotide
cctcctcctcttcttctc

SEQ ID NO: 7890 - DNA, 18 bp, Artificial Sequence
  Description of Artificial Sequence: Synthetic oligonucleotide
cagtgcctcctcctcttc

SEQ ID NO: 7891 - DNA, 18 bp, Artificial Sequence
  Description of Artificial Sequence: Synthetic oligonucleotide
tcaggcagtgcctcctcc

SEQ ID NO: 7892 - DNA, 18 bp, Artificial Sequence
  Description of Artificial Sequence: Synthetic oligonucleotide
actgctcaggcagtgcct

SEQ ID NO: 7893 - DNA, 18 bp, Artificial Sequence
  Description of Artificial Sequence: Synthetic oligonucleotide
ttctgactgctcaggcag

SEQ ID NO: 7894 - DNA, 18 bp, Artificial Sequence
  Description of Artificial Sequence: Synthetic oligonucleotide
ttgccttctgactgctca

SEQ ID NO: 7895 - DNA, 18 bp, Artificial Sequence
  Description of Artificial Sequence: Synthetic oligonucleotide
gttctttgccttctgact

SEQ ID NO: 7896 - DNA, 18 bp, Artificial Sequence
  Description of Artificial Sequence: Synthetic oligonucleotide
cttctgttctttgccttc

SEQ ID NO: 7897 - DNA, 18 bp, Artificial Sequence
  Description of Artificial Sequence: Synthetic oligonucleotide
aggatcttctgttctttg

SEQ ID NO: 7898 - DNA, 18 bp, Artificial Sequence
  Description of Artificial Sequence: Synthetic oligonucleotide
caaggaggatcttctgtt

SEQ ID NO: 7899 - DNA, 18 bp, Artificial Sequence
  Description of Artificial Sequence: Synthetic oligonucleotide
taccaaggaggatcttct

SEQ ID NO: 7900 - DNA, 18 bp, Artificial Sequence
  Description of Artificial Sequence: Synthetic oligonucleotide
gaacttaccaaggaggat

SEQ ID NO: 7901 - DNA, 18 bp, Artificial Sequence
  Description of Artificial Sequence: Synthetic oligonucleotide
cctgggaacttaccaagg

SEQ ID NO: 7902 - DNA, 18 bp, Artificial Sequence
  Description of Artificial Sequence: Synthetic oligonucleotide
ccagacctgggaacttac

SEQ ID NO: 7903 - DNA, 18 bp, Artificial Sequence
  Description of Artificial Sequence: Synthetic oligonucleotide
acctcccagacctgggaa

SEQ ID NO: 7904 - DNA, 18 bp, Artificial Sequence
  Description of Artificial Sequence: Synthetic oligonucleotide
ccaacacctcccagacct

SEQ ID NO: 7905 - DNA, 18 bp, Artificial Sequence
  Description of Artificial Sequence: Synthetic oligonucleotide
tttgaccaacacctccca

SEQ ID NO: 7906 - DNA, 18 bp, Artificial Sequence
  Description of Artificial Sequence: Synthetic oligonucleotide
gtgtttttgaccaacacc

SEQ ID NO: 7907 - DNA, 18 bp, Artificial Sequence
  Description of Artificial Sequence: Synthetic oligonucleotide
aggaggtgtttttgacca

SEQ ID NO: 7908 - DNA, 18 bp, Artificial Sequence
  Description of Artificial Sequence: Synthetic oligonucleotide
ccagcaggaggtgttttt

SEQ ID NO: 7909 - DNA, 18 bp, Artificial Sequence
  Description of Artificial Sequence: Synthetic oligonucleotide
ctcggccagcaggaggtg

SEQ ID NO: 7910 - DNA, 18 bp, Artificial Sequence
  Description of Artificial Sequence: Synthetic oligonucleotide
ctgtgctcggccagcagg

SEQ ID NO: 7911 - DNA, 18 bp, Artificial Sequence
  Description of Artificial Sequence: Synthetic oligonucleotide
aaccactgtgctcggcca

SEQ ID NO: 7912 - DNA, 18 bp, Artificial Sequence
  Description of Artificial Sequence: Synthetic oligonucleotide
gcgtgaaccactgtgctc

SEQ ID NO: 7913 - DNA, 18 bp, Artificial Sequence
  Description of Artificial Sequence: Synthetic oligonucleotide
tacaggcgtgaaccactg

SEQ ID NO: 7914 - DNA, 18 bp, Artificial Sequence
  Description of Artificial Sequence: Synthetic oligonucleotide
gggaatacaggcgtgaac

SEQ ID NO: 7915 - DNA, 18 bp, Artificial Sequence
  Description of Artificial Sequence: Synthetic oligonucleotide
gtgctgggaatacaggcg

SEQ ID NO: 7916 - DNA, 18 bp, Artificial Sequence
  Description of Artificial Sequence: Synthetic oligonucleotide
ccaaagtgctgggaatac

SEQ ID NO: 7917 - DNA, 18 bp, Artificial Sequence
  Description of Artificial Sequence: Synthetic oligonucleotide
gcctcccaaagtgctggg

SEQ ID NO: 7918 - DNA, 18 bp, Artificial Sequence
  Description of Artificial Sequence: Synthetic oligonucleotide
cctcagcctcccaaagtg

SEQ ID NO: 7919 - DNA, 18 bp, Artificial Sequence
  Description of Artificial Sequence: Synthetic oligonucleotide
gcccgcctcagcctccca

SEQ ID NO: 7920 - DNA, 18 bp, Artificial Sequence
  Description of Artificial Sequence: Synthetic oligonucleotide
taagagtgtcgattttct

SEQ ID NO: 7921 - DNA, 18 bp, Artificial Sequence
  Description of Artificial Sequence: Synthetic oligonucleotide
gaacctaagagtgtcgat

SEQ ID NO: 7922 - DNA, 18 bp, Artificial Sequence
  Description of Artificial Sequence: Synthetic oligonucleotide
atcaagaacctaagagtg

SEQ ID NO: 7923 - DNA, 18 bp, Artificial Sequence
  Description of Artificial Sequence: Synthetic oligonucleotide
cttaaatcaagaacctaa

SEQ ID NO: 7924 - DNA, 18 bp, Artificial Sequence
  Description of Artificial Sequence: Synthetic oligonucleotide
atatgcttaaatcaagaa

SEQ ID NO: 7925 - DNA, 18 bp, Artificial Sequence
  Description of Artificial Sequence: Synthetic oligonucleotide
caatcatatgcttaaatc

SEQ ID NO: 7926 - DNA, 18 bp, Artificial Sequence
  Description of Artificial Sequence: Synthetic oligonucleotide
gaacacaatcatatgctt

SEQ ID NO: 7927 - DNA, 18 bp, Artificial Sequence
  Description of Artificial Sequence: Synthetic oligonucleotide
caaaggaacacaatcata

SEQ ID NO: 7928 - DNA, 18 bp, Artificial Sequence
  Description of Artificial Sequence: Synthetic oligonucleotide
ttacacaaaggaacacaa

SEQ ID NO: 7929 - DNA, 18 bp, Artificial Sequence
  Description of Artificial Sequence: Synthetic oligonucleotide
aaaagttacacaaaggaa

SEQ ID NO: 7930 - DNA, 18 bp, Artificial Sequence
  Description of Artificial Sequence: Synthetic oligonucleotide
ggagtaaaagttacacaa

SEQ ID NO: 7931 - DNA, 18 bp, Artificial Sequence
  Description of Artificial Sequence: Synthetic oligonucleotide
gagggggagtaaaagtta

SEQ ID NO: 7932 - DNA, 18 bp, Artificial Sequence
  Description of Artificial Sequence: Synthetic oligonucleotide
aaaatgagggggagtaaa

SEQ ID NO: 7933 - DNA, 18 bp, Artificial Sequence
  Description of Artificial Sequence: Synthetic oligonucleotide
ttcttaaaatgaggggga

SEQ ID NO: 7934 - DNA, 18 bp, Artificial Sequence
  Description of Artificial Sequence: Synthetic oligonucleotide
aaaaattcttaaaatgag

SEQ ID NO: 7935 - DNA, 18 bp, Artificial Sequence
  Description of Artificial Sequence: Synthetic oligonucleotide
aaattaaaaattcttaaa

SEQ ID NO: 7936 - DNA, 18 bp, Artificial Sequence
  Description of Artificial Sequence: Synthetic oligonucleotide
acaaaaaattaaaaattc

SEQ ID NO: 7937 - DNA, 18 bp, Artificial Sequence
  Description of Artificial Sequence: Synthetic oligonucleotide
ctagcacaaaaaattaaa

SEQ ID NO: 7938 - DNA, 18 bp, Artificial Sequence
  Description of Artificial Sequence: Synthetic oligonucleotide
cagtactagcacaaaaaa

SEQ ID NO: 7939 - DNA, 18 bp, Artificial Sequence
  Description of Artificial Sequence: Synthetic oligonucleotide
ttagccagtactagcaca

SEQ ID NO: 7940 - DNA, 18 bp, Artificial Sequence
  Description of Artificial Sequence: Synthetic oligonucleotide
gtttgttagccagtacta

SEQ ID NO: 7941 - DNA, 18 bp, Artificial Sequence
  Description of Artificial Sequence: Synthetic oligonucleotide
tcagtttgttagccagta

SEQ ID NO: 7942 - DNA, 18 bp, Artificial Sequence
  Description of Artificial Sequence: Synthetic oligonucleotide
ctgcttcagtttgttagc

SEQ ID NO: 7943 - DNA, 18 bp, Artificial Sequence
  Description of Artificial Sequence: Synthetic oligonucleotide
agcagctgcttcagtttg

SEQ ID NO: 7944 - DNA, 18 bp, Artificial Sequence
  Description of Artificial Sequence: Synthetic oligonucleotide
taacaagcagctgcttca

SEQ ID NO: 7945 - DNA, 18 bp, Artificial Sequence
  Description of Artificial Sequence: Synthetic oligonucleotide
cccaataacaagcagctg

SEQ ID NO: 7946 - DNA, 18 bp, Artificial Sequence
  Description of Artificial Sequence: Synthetic oligonucleotide
actgatgcccaataacaa

SEQ ID NO: 7947 - DNA, 18 bp, Artificial Sequence
  Description of Artificial Sequence: Synthetic oligonucleotide
acataactgatgcccaat

SEQ ID NO: 7948 - DNA, 18 bp, Artificial Sequence
  Description of Artificial Sequence: Synthetic oligonucleotide
ctggtacataactgatgc

SEQ ID NO: 7949 - DNA, 18 bp, Artificial Sequence
  Description of Artificial Sequence: Synthetic oligonucleotide
cacctggtacataactga

SEQ ID NO: 7950 - DNA, 18 bp, Artificial Sequence
  Description of Artificial Sequence: Synthetic oligonucleotide
ttgctcacctggtacata

SEQ ID NO: 7951 - DNA, 18 bp, Artificial Sequence
  Description of Artificial Sequence: Synthetic oligonucleotide
ttgctttgctcacctggt

SEQ ID NO: 7952 - DNA, 18 bp, Artificial Sequence
  Description of Artificial Sequence: Synthetic oligonucleotide
cacatttgctttgctcac

SEQ ID NO: 7953 - DNA, 18 bp, Artificial Sequence
  Description of Artificial Sequence: Synthetic oligonucleotide
gattccacatttgctttg

SEQ ID NO: 7954 - DNA, 18 bp, Artificial Sequence
  Description of Artificial Sequence: Synthetic oligonucleotide
gagaagattccacatttg

SEQ ID NO: 7955 - DNA, 18 bp, Artificial Sequence
  Description of Artificial Sequence: Synthetic oligonucleotide
attaagagaagattccac

SEQ ID NO: 7956 - DNA, 18 bp, Artificial Sequence
  Description of Artificial Sequence: Synthetic oligonucleotide
tcaatattaagagaagat

SEQ ID NO: 7957 - DNA, 18 bp, Artificial Sequence
  Description of Artificial Sequence: Synthetic oligonucleotide
tcatatcaatattaagag

SEQ ID NO: 7958 - DNA, 18 bp, Artificial Sequence
  Description of Artificial Sequence: Synthetic oligonucleotide
ttacttcatatcaatatt

SEQ ID NO: 7959 - DNA, 18 bp, Artificial Sequence
  Description of Artificial Sequence: Synthetic oligonucleotide
catatttacttcatatca

SEQ ID NO: 7960 - DNA, 18 bp, Artificial Sequence
  Description of Artificial Sequence: Synthetic oligonucleotide
ctactcatatttacttca

SEQ ID NO: 7961 - DNA, 18 bp, Artificial Sequence
  Description of Artificial Sequence: Synthetic oligonucleotide
aagtcctactcatattta

SEQ ID NO: 7962 - DNA, 18 bp, Artificial Sequence
  Description of Artificial Sequence: Synthetic oligonucleotide
ttgctaagtcctactcat

SEQ ID NO: 7963 - DNA, 18 bp, Artificial Sequence
  Description of Artificial Sequence: Synthetic oligonucleotide
tcaccttgctaagtccta

SEQ ID NO: 7964 - DNA, 18 bp, Artificial Sequence
  Description of Artificial Sequence: Synthetic oligonucleotide
actcttcaccttgctaag

SEQ ID NO: 7965 - DNA, 18 bp, Artificial Sequence
  Description of Artificial Sequence: Synthetic oligonucleotide
tgttcactcttcaccttg

SEQ ID NO: 7966 - DNA, 18 bp, Artificial Sequence
  Description of Artificial Sequence: Synthetic oligonucleotide
atacctgttcactcttca

SEQ ID NO: 7967 - DNA, 18 bp, Artificial Sequence
  Description of Artificial Sequence: Synthetic oligonucleotide
ctgtgatacctgttcact

SEQ ID NO: 7968 - DNA, 18 bp, Artificial Sequence
  Description of Artificial Sequence: Synthetic oligonucleotide
tatgcctgtgatacctgt

SEQ ID NO: 7969 - DNA, 18 bp, Artificial Sequence
  Description of Artificial Sequence: Synthetic oligonucleotide
ttctgtatgcctgtgata

SEQ ID NO: 7970 - DNA, 18 bp, Artificial Sequence
  Description of Artificial Sequence: Synthetic oligonucleotide
atcctgaggggacacagg

SEQ ID NO: 7971 - DNA, 18 bp, Artificial Sequence
  Description of Artificial Sequence: Synthetic oligonucleotide
acctgatcctgaggggac

SEQ ID NO: 7972 - DNA, 18 bp, Artificial Sequence
  Description of Artificial Sequence: Synthetic oligonucleotide
gcctaacctgatcctgag

SEQ ID NO: 7973 - DNA, 18 bp, Artificial Sequence
  Description of Artificial Sequence: Synthetic oligonucleotide
ctgaagcctaacctgatc

SEQ ID NO: 7974 - DNA, 18 bp, Artificial Sequence
  Description of Artificial Sequence: Synthetic oligonucleotide
tcctactgaagcctaacc

SEQ ID NO: 7975 - DNA, 18 bp, Artificial Sequence
  Description of Artificial Sequence: Synthetic oligonucleotide
ctggatcctactgaagcc

SEQ ID NO: 7976 - DNA, 18 bp, Artificial Sequence
  Description of Artificial Sequence: Synthetic oligonucleotide
gggggctggatcctactg

SEQ ID NO: 7977 - DNA, 18 bp, Artificial Sequence
  Description of Artificial Sequence: Synthetic oligonucleotide
gggatgggggctggatcc

SEQ ID NO: 7978 - DNA, 18 bp, Artificial Sequence
  Description of Artificial Sequence: Synthetic oligonucleotide
gagtggggatgggggctg

SEQ ID NO: 7979 - DNA, 18 bp, Artificial Sequence
  Description of Artificial Sequence: Synthetic oligonucleotide
attaggagtggggatggg

SEQ ID NO: 7980 - DNA, 18 bp, Artificial Sequence
  Description of Artificial Sequence: Synthetic oligonucleotide
tgtgcattaggagtgggg

SEQ ID NO: 7981 - DNA, 18 bp, Artificial Sequence
  Description of Artificial Sequence: Synthetic oligonucleotide
acgtgtgtgcattaggag

SEQ ID NO: 7982 - DNA, 18 bp, Artificial Sequence
  Description of Artificial Sequence: Synthetic oligonucleotide
cgtccacgtgtgtgcatt

SEQ ID NO: 7983 - DNA, 18 bp, Artificial Sequence
  Description of Artificial Sequence: Synthetic oligonucleotide
atgtgcgtccacgtgtgt

SEQ ID NO: 7984 - DNA, 18 bp, Artificial Sequence
  Description of Artificial Sequence: Synthetic oligonucleotide
agtgcatgtgcgtccacg

SEQ ID NO: 7985 - DNA, 18 bp, Artificial Sequence
  Description of Artificial Sequence: Synthetic oligonucleotide
gggtaagtgcatgtgcgt

SEQ ID NO: 7986 - DNA, 18 bp, Artificial Sequence
  Description of Artificial Sequence: Synthetic oligonucleotide
tcagagggtaagtgcatg

SEQ ID NO: 7987 - DNA, 18 bp, Artificial Sequence
  Description of Artificial Sequence: Synthetic oligonucleotide
ctgcctcagagggtaagt

SEQ ID NO: 7988 - DNA, 18 bp, Artificial Sequence
  Description of Artificial Sequence: Synthetic oligonucleotide
tccacctgcctcagaggg

SEQ ID NO: 7989 - DNA, 18 bp, Artificial Sequence
  Description of Artificial Sequence: Synthetic oligonucleotide
ctggttccacctgcctca

SEQ ID NO: 7990 - DNA, 18 bp, Artificial Sequence
  Description of Artificial Sequence: Synthetic oligonucleotide
tgctgctggttccacctg

SEQ ID NO: 7991 - DNA, 18 bp, Artificial Sequence
  Description of Artificial Sequence: Synthetic oligonucleotide
tcatgctgctggttccac

SEQ ID NO: 7992 - DNA, 18 bp, Artificial Sequence
  Description of Artificial Sequence: Synthetic oligonucleotide
ggttctcatgctgctggt

SEQ ID NO: 7993 - DNA, 18 bp, Artificial Sequence
  Description of Artificial Sequence: Synthetic oligonucleotide
ctccaggttctcatgctg

SEQ ID NO: 7994 - DNA, 18 bp, Artificial Sequence
  Description of Artificial Sequence: Synthetic oligonucleotide
agcttctccaggttctca

SEQ ID NO: 7995 - DNA, 18 bp, Artificial Sequence
  Description of Artificial Sequence: Synthetic oligonucleotide
tgttcagcttctccaggt

SEQ ID NO: 7996 - DNA, 18 bp, Artificial Sequence
  Description of Artificial Sequence: Synthetic oligonucleotide
ttgcatgttcagcttctc

SEQ ID NO: 7997 - DNA, 18 bp, Artificial Sequence
  Description of Artificial Sequence: Synthetic oligonucleotide
atggcttgcatgttcagc

SEQ ID NO: 7998 - DNA, 18 bp, Artificial Sequence
  Description of Artificial Sequence: Synthetic oligonucleotide
cgaggatggcttgcatgt

SEQ ID NO: 7999 - DNA, 18 bp, Artificial Sequence
  Description of Artificial Sequence: Synthetic oligonucleotide
ggcatcgaggatggcttg

SEQ ID NO: 8000 - DNA, 18 bp, Artificial Sequence
  Description of Artificial Sequence: Synthetic oligonucleotide
actgtggcatcgaggatg

SEQ ID NO: 8001 - DNA, 18 bp, Artificial Sequence
  Description of Artificial Sequence: Synthetic oligonucleotide
ggctgactgtggcatcga

SEQ ID NO: 8002 - DNA, 18 bp, Artificial Sequence
  Description of Artificial Sequence: Synthetic oligonucleotide
cgccctggctgactgtgg

SEQ ID NO: 8003 - DNA, 18 bp, Artificial Sequence
  Description of Artificial Sequence: Synthetic oligonucleotide
gggctcgccctggctgac

SEQ ID NO: 8004 - DNA, 18 bp, Artificial Sequence
  Description of Artificial Sequence: Synthetic oligonucleotide
tgaatgggctcgccctgg

SEQ ID NO: 8005 - DNA, 18 bp, Artificial Sequence
  Description of Artificial Sequence: Synthetic oligonucleotide
gctcctgaatgggctcgc

SEQ ID NO: 8006 - DNA, 18 bp, Artificial Sequence
  Description of Artificial Sequence: Synthetic oligonucleotide
cagcagctcctgaatggg

SEQ ID NO: 8007 - DNA, 18 bp, Artificial Sequence
  Description of Artificial Sequence: Synthetic oligonucleotide
gtgaccagcagctcctga

SEQ ID NO: 8008 - DNA, 18 bp, Artificial Sequence
  Description of Artificial Sequence: Synthetic oligonucleotide
catgggtgaccagcagct

SEQ ID NO: 8009 - DNA, 18 bp, Artificial Sequence
  Description of Artificial Sequence: Synthetic oligonucleotide
cttcccatgggtgaccag

SEQ ID NO: 8010 - DNA, 18 bp, Artificial Sequence
  Description of Artificial Sequence: Synthetic oligonucleotide
taccttcccatgggtgac

SEQ ID NO: 8011 - DNA, 18 bp, Artificial Sequence
  Description of Artificial Sequence: Synthetic oligonucleotide
cggggtaccttcccatgg

SEQ ID NO: 8012 - DNA, 18 bp, Artificial Sequence
  Description of Artificial Sequence: Synthetic oligonucleotide
gacctcggggtaccttcc

SEQ ID NO: 8013 - DNA, 18 bp, Artificial Sequence
  Description of Artificial Sequence: Synthetic oligonucleotide
cctgtgacctcggggtac

SEQ ID NO: 8014 - DNA, 18 bp, Artificial Sequence
  Description of Artificial Sequence: Synthetic oligonucleotide
ccctgcctgtgacctcgg

SEQ ID NO: 8015 - DNA, 18 bp, Artificial Sequence
  Description of Artificial Sequence: Synthetic oligonucleotide
aggaaccctgcctgtgac

SEQ ID NO: 8016 - DNA, 18 bp, Artificial Sequence
  Description of Artificial Sequence: Synthetic oligonucleotide
aaggcaggaaccctgcct

SEQ ID NO: 8017 - DNA, 18 bp, Artificial Sequence
  Description of Artificial Sequence: Synthetic oligonucleotide
gggggaaggcaggaaccc

SEQ ID NO: 8018 - DNA, 18 bp, Artificial Sequence
  Description of Artificial Sequence: Synthetic oligonucleotide
ggtatgggggaaggcagg

SEQ ID NO: 8019 - DNA, 18 bp, Artificial Sequence
  Description of Artificial Sequence: Synthetic oligonucleotide
ggtgaggtatgggggaag

SEQ ID NO: 8020 - DNA, 18 bp, Artificial Sequence
  Description of Artificial Sequence: Synthetic oligonucleotide
gagtaggtgaggtatggg

SEQ ID NO: 8021 - DNA, 18 bp, Artificial Sequence
  Description of Artificial Sequence: Synthetic oligonucleotide
gggtagagtaggtgaggt

SEQ ID NO: 8022 - DNA, 18 bp, Artificial Sequence
  Description of Artificial Sequence: Synthetic oligonucleotide
cggaggggtagagtaggt

SEQ ID NO: 8023 - DNA, 18 bp, Artificial Sequence
  Description of Artificial Sequence: Synthetic oligonucleotide
gactccggaggggtagag

SEQ ID NO: 8024 - DNA, 18 bp, Artificial Sequence
  Description of Artificial Sequence: Synthetic oligonucleotide
caggggactccggagggg

SEQ ID NO: 8025 - DNA, 18 bp, Artificial Sequence
  Description of Artificial Sequence: Synthetic oligonucleotide
gcacacaggggactccgg

SEQ ID NO: 8026 - DNA, 18 bp, Artificial Sequence
  Description of Artificial Sequence: Synthetic oligonucleotide
gaagggcacacaggggac

SEQ ID NO: 8027 - DNA, 18 bp, Artificial Sequence
  Description of Artificial Sequence: Synthetic oligonucleotide
gaggggaagggcacacag

SEQ ID NO: 8028 - DNA, 18 bp, Artificial Sequence
  Description of Artificial Sequence: Synthetic oligonucleotide
ggccagaggggaagggca

SEQ ID NO: 8029 - DNA, 18 bp, Artificial Sequence
  Description of Artificial Sequence: Synthetic oligonucleotide
taccaggccagaggggaa

SEQ ID NO: 8030 - DNA, 18 bp, Artificial Sequence
  Description of Artificial Sequence: Synthetic oligonucleotide
aggtgtaccaggccagag

SEQ ID NO: 8031 - DNA, 18 bp, Artificial Sequence
  Description of Artificial Sequence: Synthetic oligonucleotide
ggtcagacttccagaacg

SEQ ID NO: 8032 - DNA, 18 bp, Artificial Sequence
  Description of Artificial Sequence: Synthetic oligonucleotide
ctaagggtcagacttcca

SEQ ID NO: 8033 - DNA, 18 bp, Artificial Sequence
  Description of Artificial Sequence: Synthetic oligonucleotide
tttccctaagggtcagac

SEQ ID NO: 8034 - DNA, 18 bp, Artificial Sequence
  Description of Artificial Sequence: Synthetic oligonucleotide
ccctctttccctaagggt

SEQ ID NO: 8035 - DNA, 18 bp, Artificial Sequence
  Description of Artificial Sequence: Synthetic oligonucleotide
tgactccctctttcccta

SEQ ID NO: 8036 - DNA, 18 bp, Artificial Sequence
  Description of Artificial Sequence: Synthetic oligonucleotide
gggcttgactccctcttt

SEQ ID NO: 8037 - DNA, 18 bp, Artificial Sequence
  Description of Artificial Sequence: Synthetic oligonucleotide
gccatgggcttgactccc

SEQ ID NO: 8038 - DNA, 18 bp, Artificial Sequence
  Description of Artificial Sequence: Synthetic oligonucleotide
cagtggccatgggcttga

SEQ ID NO: 8039 - DNA, 18 bp, Artificial Sequence
  Description of Artificial Sequence: Synthetic oligonucleotide
gatcccagtggccatggg

SEQ ID NO: 8040 - DNA, 18 bp, Artificial Sequence
  Description of Artificial Sequence: Synthetic oligonucleotide
tgagtgatcccagtggcc

SEQ ID NO: 8041 - DNA, 18 bp, Artificial Sequence
  Description of Artificial Sequence: Synthetic oligonucleotide
acttgtgagtgatcccag

SEQ ID NO: 8042 - DNA, 18 bp, Artificial Sequence
  Description of Artificial Sequence: Synthetic oligonucleotide
gttacacttgtgagtgat

SEQ ID NO: 8043 - DNA, 18 bp, Artificial Sequence
  Description of Artificial Sequence: Synthetic oligonucleotide
ggagagttacacttgtga

SEQ ID NO: 8044 - DNA, 18 bp, Artificial Sequence
  Description of Artificial Sequence: Synthetic oligonucleotide
gaggtggagagttacact

SEQ ID NO: 8045 - DNA, 18 bp, Artificial Sequence
  Description of Artificial Sequence: Synthetic oligonucleotide
gttttgaggtggagagtt

SEQ ID NO: 8046 - DNA, 18 bp, Artificial Sequence
  Description of Artificial Sequence: Synthetic oligonucleotide
gaagggttttgaggtgga

SEQ ID NO: 8047 - DNA, 18 bp, Artificial Sequence
  Description of Artificial Sequence: Synthetic oligonucleotide
agttggaagggttttgag

SEQ ID NO: 8048 - DNA, 18 bp, Artificial Sequence
  Description of Artificial Sequence: Synthetic oligonucleotide
ctgggagttggaagggtt

SEQ ID NO: 8049 - DNA, 18 bp, Artificial Sequence
  Description of Artificial Sequence: Synthetic oligonucleotide
aggctctgggagttggaa

SEQ ID NO: 8050 - DNA, 18 bp, Artificial Sequence
  Description of Artificial Sequence: Synthetic oligonucleotide
ggcacaggctctgggagt

SEQ ID NO: 8051 - DNA, 18 bp, Artificial Sequence
  Description of Artificial Sequence: Synthetic oligonucleotide
ccagaggcacaggctctg

SEQ ID NO: 8052 - DNA, 18 bp, Artificial Sequence
  Description of Artificial Sequence: Synthetic oligonucleotide
cctccagaggcacaggct

SEQ ID NO: 8053 - DNA, 18 bp, Artificial Sequence
  Description of Artificial Sequence: Synthetic oligonucleotide
gacctcctccagaggcac

SEQ ID NO: 8054 - DNA, 18 bp, Artificial Sequence
  Description of Artificial Sequence: Synthetic oligonucleotide
aattggacctcctccaga

SEQ ID NO: 8055 - DNA, 18 bp, Artificial Sequence
  Description of Artificial Sequence: Synthetic oligonucleotide
ccaccaattggacctcct

SEQ ID NO: 8056 - DNA, 18 bp, Artificial Sequence
  Description of Artificial Sequence: Synthetic oligonucleotide
ctccaccaccaattggac

SEQ ID NO: 8057 - DNA, 18 bp, Artificial Sequence
  Description of Artificial Sequence: Synthetic oligonucleotide
tctggctccaccaccaat

SEQ ID NO: 8058 - DNA, 18 bp, Artificial Sequence
  Description of Artificial Sequence: Synthetic oligonucleotide
caccttctggctccacca

SEQ ID NO: 8059 - DNA, 18 bp, Artificial Sequence
  Description of Artificial Sequence: Synthetic oligonucleotide
tgctccaccttctggctc

SEQ ID NO: 8060 - DNA, 18 bp, Artificial Sequence
  Description of Artificial Sequence: Synthetic oligonucleotide
gctactgctccaccttct

SEQ ID NO: 8061 - DNA, 18 bp, Artificial Sequence
  Description of Artificial Sequence: Synthetic oligonucleotide
caggagctactgctccac

SEQ ID NO: 8062 - DNA, 18 bp, Artificial Sequence
  Description of Artificial Sequence: Synthetic oligonucleotide
tccaccaggagctactgc

SEQ ID NO: 8063 - DNA, 18 bp, Artificial Sequence
  Description of Artificial Sequence: Synthetic oligonucleotide
acggttccaccaggagct

SEQ ID NO: 8064 - DNA, 18 bp, Artificial Sequence
  Description of Artificial Sequence: Synthetic oligonucleotide
gggttacggttccaccag

SEQ ID NO: 8065 - DNA, 18 bp, Artificial Sequence
  Description of Artificial Sequence: Synthetic oligonucleotide
acaggtcagggttacggt

SEQ ID NO: 8066 - DNA, 18 bp, Artificial Sequence
  Description of Artificial Sequence: Synthetic oligonucleotide
acttcacaggtcagggtt

SEQ ID NO: 8067 - DNA, 18 bp, Artificial Sequence
  Description of Artificial Sequence: Synthetic oligonucleotide
cagggacttcacaggtca

SEQ ID NO: 8068 - DNA, 18 bp, Artificial Sequence
  Description of Artificial Sequence: Synthetic oligonucleotide
ctgggcagggacttcaca

SEQ ID NO: 8069 - DNA, 18 bp, Artificial Sequence
  Description of Artificial Sequence: Synthetic oligonucleotide
gagggctgggcagggact

SEQ ID NO: 8070 - DNA, 18 bp, Artificial Sequence
  Description of Artificial Sequence: Synthetic oligonucleotide
gaggagagggctgggcag

SEQ ID NO: 8071 - DNA, 18 bp, Artificial Sequence
  Description of Artificial Sequence: Synthetic oligonucleotide
gatttgaggagagggctg

SEQ ID NO: 8072 - DNA, 18 bp, Artificial Sequence
  Description of Artificial Sequence: Synthetic oligonucleotide
cagtggatttgaggagag

SEQ ID NO: 8073 - DNA, 18 bp, Artificial Sequence
  Description of Artificial Sequence: Synthetic oligonucleotide
tcatccagtggatttgag

SEQ ID NO: 8074 - DNA, 18 bp, Artificial Sequence
  Description of Artificial Sequence: Synthetic oligonucleotide
atccttcatccagtggat

SEQ ID NO: 8075 - DNA, 18 bp, Artificial Sequence
  Description of Artificial Sequence: Synthetic oligonucleotide
cacatccttcatccagtg

SEQ ID NO: 8076 - DNA, 18 bp, Artificial Sequence
  Description of Artificial Sequence: Synthetic oligonucleotide
tcactcacatccttcatc

SEQ ID NO: 8077 - DNA, 18 bp, Artificial Sequence
  Description of Artificial Sequence: Synthetic oligonucleotide
ccaggtcactcacatcct

SEQ ID NO: 8078 - DNA, 18 bp, Artificial Sequence
  Description of Artificial Sequence: Synthetic oligonucleotide
tctctccaggtcactcac

SEQ ID NO: 8079 - DNA, 18 bp, Artificial Sequence
  Description of Artificial Sequence: Synthetic oligonucleotide
gcccctctctccaggtca

SEQ ID NO: 8080 - DNA, 18 bp, Artificial Sequence
  Description of Artificial Sequence: Synthetic oligonucleotide
tcccagcccctctctcca

SEQ ID NO: 8081 - DNA, 18 bp, Artificial Sequence
  Description of Artificial Sequence: Synthetic oligonucleotide
ctacctcccagcccctct

SEQ ID NO: 8082 - DNA, 18 bp, Artificial Sequence
  Description of Artificial Sequence: Synthetic oligonucleotide
tcaccctacctcccagcc

SEQ ID NO: 8083 - DNA, 18 bp, Artificial Sequence
  Description of Artificial Sequence: Synthetic oligonucleotide
atggttcaccctacctcc

SEQ ID NO: 8084 - DNA, 18 bp, Artificial Sequence
  Description of Artificial Sequence: Synthetic oligonucleotide
tagttatggttcacccta

SEQ ID NO: 8085 - DNA, 18 bp, Artificial Sequence
  Description of Artificial Sequence: Synthetic oligonucleotide
gttgctagttatggttca

SEQ ID NO: 8086 - DNA, 18 bp, Artificial Sequence
  Description of Artificial Sequence: Synthetic oligonucleotide
tccctgttgctagttatg

SEQ ID NO: 8087 - DNA, 18 bp, Artificial Sequence
  Description of Artificial Sequence: Synthetic oligonucleotide
tgccctccctgttgctag

SEQ ID NO: 8088 - DNA, 18 bp, Artificial Sequence
  Description of Artificial Sequence: Synthetic oligonucleotide
ccctctgccctccctgtt

SEQ ID NO: 8089 - DNA, 18 bp, Artificial Sequence
  Description of Artificial Sequence: Synthetic oligonucleotide
gttagccctctgccctcc

SEQ ID NO: 8090 - DNA, 18 bp, Artificial Sequence
  Description of Artificial Sequence: Synthetic oligonucleotide
ccctcgttagccctctgc

SEQ ID NO: 8091 - DNA, 18 bp, Artificial Sequence
  Description of Artificial Sequence: Synthetic oligonucleotide
cctttccctcgttagccc

SEQ ID NO: 8092 - DNA, 18 bp, Artificial Sequence
  Description of Artificial Sequence: Synthetic oligonucleotide
gcctgcctttccctcgtt

SEQ ID NO: 8093 - DNA, 18 bp, Artificial Sequence
  Description of Artificial Sequence: Synthetic oligonucleotide
tcctagcctgcctttccc

SEQ ID NO: 8094 - DNA, 18 bp, Artificial Sequence
  Description of Artificial Sequence: Synthetic oligonucleotide
tcagctcctagcctgcct

SEQ ID NO: 8095 - DNA, 18 bp, Artificial Sequence
  Description of Artificial Sequence: Synthetic oligonucleotide
cctcctcagctcctagcc

SEQ ID NO: 8096 - protein, 614 aa, Homo sapiens
MSPADRCRSANTIEPATTSSLALFLLLQRDQSSRTRGLPEEKEEVTMDTSENRPENDVPEPPMPIADQVSNDDRPEGSVEDEEKKESSLPKSFKRKISVVSATKGVPAGNSDTEGGQPGRKRRWGASTATTQKKPSISITTESLKSLIPDIKPLAGQEAVVDLHADDSRISEDETERNGDDGTHDKGLKICRTVTQVVPAEGQENGQREEEEEEKEPEAEPPVPPQVSVEVALPPPAEHEVKKVTLGDTLTRRSISQQKSGVSITIDDPVRTAQVPSPPRGKISNIVHISNLVRPFTLGQLKELLGRTGTLVEEAFWIDKIKSHCFVTYSTVEEAVATRTALHGVKWPQSNPKFLCADYAEQDELDYHRGLLVDRPSETKTEEQGIPRPLHPPPPPPVQPPQHPRAEQREQERAVREQWAEREREMERRERTRSEREWDRDKVREGPRSRSRSRDRRRKERAKSKEKKSEKKEKAQEEPPAKLLDDLFRKTKAAPCIYWLPLTDSQIVQKEAERAERAKEREKRRKEQEEEEQKEREKEAERERNRQLEREKRREHSRERDRERERERERDRGDRDRDRERDRERGRERDRRDTKRHSRSRSRSTPVRDRGGRR

SEQ ID NO: 8097 - protein, 257 aa, Homo sapiens
MGLRYVLPLRPPGKVGSSVRVEGLQNEGERLAKPERGKMRVHKISNVNKALDFIASKGVKLVSIGAEEIVDGNVKMTLGMIWTIILRFAIQDISVEETSAKEGLLLWCQRKTAPYKNVNIQNFHISWKDGLGFCALIHRHRPELIDYGKLRKDDPLTNLNTAFDVAEKYLDIPKMLDAEDIVGTARPDEKAIMTYVSSFYHAFSGAQKAETAANRICKVLAVNQENEQLMEDYEKLASDLLEWIRRTIPWLENRVPE

SEQ ID NO: 8098 - protein, 931 aa, Homo sapiens
MNQIEPGVQYNYVYDEDEYMIQEEEWDRDLLLDPAWEKQQRKTFTAWCNSHLRKAGTQIENIEEDFRNGLKLMLLLEVISGERLPKPDRGKMRFHKIANVNKALDYIASKGVKLVSIGAEEIVDGNVKMTLGMIWTIILRFAIQDISVEETSAKEGLLLWCQRKTAPYRNVNIQNFHTSWKDGLGLCALIHRHRPDLIDYSKLNKDDPIGNINLAMEIAEKHLDIPKMLDAEDLVYTARPDERAIMTYVSCYYHAFAGAQKVRQSLKAHSALWKDPPPESSTCSYQEMRRSSVNSSAMAETAANRICKVLAVNQENERLMEEYERLASELLEWIRRTIPWLENRTPEKTMQAMQKKLEDFRDYRRKHKPPKVQEKCQLEINFNTLQTKLRISNRPAFMPSEGKMVSDIAGAWQRLEQAEKGYEEWLLNEIRRLERLEHLAEKFRQKASTHETWAYGKEQILLQKDYESASLTEVRALLRKHEAFESDLAAHQDRVEQIAAIAQELNELDYHDAVNVNDRCQKICDQWDRLGTLTQKRREALERMEKLLETIDQLHLEFAKRAAPFNNWMEGAMEDLQDMFIVHSIEEIQSLITAHEQFKATLPEADGERQSIMAIQNEVEKVIQSYNIRISSSNPYSTVTMDELRTKWDKVKQLVPIRDQSLQEELARQHANERLRRQFAAQANAIGPWIQNKMEEIARSSIQITGALEDQMNQLKQYEHNIINYKNNIDKLEGDHQLIQEALVFDNKHTNYTMEHIRVGWELLLTTIARTINEVETQILTRDAKGITQEQMNEFRASFNHFDRRKNGLMDHEDFRACLISMGYDLGEAEFARIMTLVDPNGQGTVTFQSFIDFMTRETADTDTAEQVIASFRILASDKPYILAEELRRELPPDQAQYCIKRMPAYSGPGSVPGALDYAAFSSALYGESDL

SEQ ID NO: 8099 - protein, 17 aa, Homo sapiens
MGTKGKREKLETLYQGY

SEQ ID NO: 8100 - protein, 380 aa, Homo sapiens
MGTKGKVIKCKAAIAWEAGKPLCIEEVEVAPPKAHEVRIQIIATSLCHTDATVIDSKFEGLAFPVIVGHEAAGIVESIGPGVTNVKPGDKVIPLYAPLCRKCKFCLSPLTNLCGKISNLKSPASDQQLMEDKTSRFTCKGKPVYHFFGTSTFSQYTVVSDINLAKIDDDANLERVCLLGCGFSTGYGAAINNAKVTPGSTCAVFGLGGVGLSAVMGCKAAGASRIIGIDINSEKFVKAKALGATDCLNPRDLHKPIQEVIIELTKGGVDFALDCAGGSETMKAALDCTTAGWGSCTFIGVAAGSKGLTIFPEELIIGRTINGTFFGGWKSVDSIPKLVTDYKNKKFNLDALVTHTLPFDKISEAFDLMNQGKSVRTILIF

SEQ ID NO: 8101 - protein, 177 aa, Homo sapiens
MAAGTAVGAWVLVLSLWGAVVGAQNITAQAFPDTGPCAQPPSSPVSGGVPLPLPPSPVLILPEIGPQDQGTYSCVATHSSHGPQESRAVSISIIEPGEEGPTAGSVGGSGLGTLALALGILGGLGTAALLIGVILWQRRQRRGEERKAPENQEEEEERAELNQSEEPEAGESSTGGP

SEQ ID NO: 8102 - protein, 178 aa, Homo sapiens
MDSKHQCLKLNDGHFMPVLGFGTYAPPEVPRSKALEVTKLAIEAGFRHIDSAHLYNNEEQVGLAIRSKIADGSVKREDIFYTSKLWSTFHRPELVRPALENSLKKAQLDYVDLYLIHSPMSLKPGEELSPTDENGKVIFDIVDLCTTWEAMEKCKDAGLAKSIGVSNFNRRQLEMILN

SEQ ID NO: 8103 - protein, 518 aa, Homo sapiens
MTSSKIEMPGEVKADPAALMASLHLLPSPTPNLEIKYTKIFINNEWQNSESGRVFPVYNPATGEQVCEVQEADKADIDKAVQAARLAFSLGSVWRRMDASERGRLLDKLADLVERDRAVLATMESLNGGKPFLQAFYVDLQGVIKTFRYYAGWADKIHGMTIPVDGDYFTFTRHEPIGVCGQIIPWNFPLLMFAWKIAPALCCGNTVVIKPAEQTPLSALYMGALIKEAGFPPGVINILPGYGPTAGAAIASHIGIDKIAFTGSTEVGKLIQEAAGRSNLKRVTLELGGKSPNIIFADADLDYAVEQAHQGVFFNQGQCCTAGSRIFVEESIYEEFVRRSVERAKRRVVGSPFDPTTEQGPQIDKKQYNKILELIQSGVAEGAKLECGGKGLGRKGFFIEPTVFSNVTDDMRIAKEEIFGPVQEILRFKTMDEVIERANNSDFGLVAAVFTNDINKALTVSSAMQAGTVWINCYNALNAQSPFGGFKMSGNGREMGEFGLREYSEVKTVTVKIPQKNS

SEQ ID NO: 8104 - protein, 122 aa, Homo sapiens
MAALTIATGTGNWFSALALGVTLLKCLLIPTYHSTDFEVHRNWLAITHSLPISQWYYEATSEWTLDYPPFFAWFEYILSHVAKYFDQEMLNVHNLNYSSSRTLLFQRFSVIFMDVLFVYAVR

SEQ ID NO: 8105 - protein, 798 aa, Homo sapiens
MASEARGGLGAPPLQSARSLPGPAPCLKHFPLDLRTSMDGKCKEIAEELFTRSLAESELRSAPYEFPEESPIEQLEERRQRLERQISQDVKLEPDILLRAKQDFLKTDSDSDLQLYKEQGEGQGDRSLRERDVLEREFQRVTISGEEKCGVPFTDLLDAAKSVVRALFIREKYMALSLQSFCPTTRRYLQQLAEKPLETRTYEQGPDTPVSADAPVHPPALEQHPYEHCEPSTMPGDLGLGLRMVRGVVHVYTRREPDEHCSEVELPYPDLQEFVADVNVLMALIINGPIKSFCYRRLQYLSSKFQMHVLLNEMKELAAQKKVPHRDFYNIRKVDTHIHASSCMNQKHLLRFIKRAMKRHLEEIVHVEQGREQTLREVFESMNLTAYDLSVDTLDVHADRNTFHRFDKFNAKYNPIGESVLREIFIKTDNRVSGKYFAHIIKEVMSDLEESKYQNAELRLSIYGRSRDEWDKLARWAVMHRVHSPNVRWLVQVPRLFDVYRTKGQLANFQEMLENIFLPLFEATVHPASHPELHLFLEHVDGFDSVDDESKPENHVFNLESPLPEAWVEEDNPPYAYYLYYTFANMAMLNHLRRQRGFHTFVLRPHCGEAGPIHHLVSAFMLAENISHGLLLRKAPVLQYLYYLAQIGIAMSPLSNNSLFLSYHRNPLPEYLSRGLMVSLSTDDPLQFHFTKEPLMEEYSIATQVWKLSSCDMCELARNSVLMSGFSHKVKSHWLGPNYTKEGPEGNDIRRTNVPDIRVGYRYETLCQELALITQAVQSEMLETIPEEAGITMSPGPQ

SEQ ID NO: 8106 - protein, 347 aa, Homo sapiens
MQRAVSVVARLGFRLQAFPPALCRPLSCAQTKILGSDRVKLMESLVVGDIAELRPNQGTLSLFTNEAGGILDDLIVTNTSEGHLYVVSNAGCWEKDLALMQDKVRELQNQGRDVGLEVLDNALLALQGPTAAQVLQAGVADDLRKLPFMTSAVMEVFGVSGCRVTRCGYTGEDGVEISVPVAGAVHLATAILKNPEVKLAGLAARDSLRLEAGLCLYGNDIDEHTTPVEGSLSWTLGKRRRAAMDFPGAKVIVPQLKGRVQRRRVGLMCEGAPMRAHSPILNMEGTKIGTVTSGCPSPSLKKNVAMGYVPCEYSRPGTMLLVEVRRKQQMAVVSKMPFVPTNYYTLK

SEQ ID NO: 8107 - protein, 330 aa, Homo sapiens
MQRAVSVVARLGFRLQAFPPALCRPLSCAQTKILGSDRVKLMESLVVGDIAELRPNQGTLSLFTNEAGGILDDLIVTNTSEGHLYVVSNAGCWEKDLALMQDKVRELQNQGRDVGLEVLDNALLALQGPTAAQVLQAGVADDLRKLPFMTSAVMEVFGVSGCRVTRCGYTGEDGVEISVPVAGAVHLATAILKNPEVKLAGLAARDSLRLEAGLCLYGNDIDEHTTPVEGSLSWTLGKRRRAAMDFPGAKVIVPQLKGRVQRRRVGLMCEGAPMRAHSPILNMEGTKIGTVTSGCPSPSLKKNVAMGYVPCEYSRPGTMLLVELPSGPCF

SEQ ID NO: 8108 - protein, 343 aa, Homo sapiens
MQRAVSVVARLGFRLQAFPPALCRPLSCAQTKILGSDRVKLMESLVVGDIAELRPNQGTLSLFTNEAGGILDDLIVTNTSEGHLYVVSNAGCWEKDLALMQDKVRELQNQGRDVGLEVLDNALLALQAQVLQAGVADDLRKLPFMTSAVMEVFGVSGCRVTRCGYTGEDGVEISVPVAGAVHLATAILKNPEVKLAGLAARDSLRLEAGLCLYGNDIDEHTTPVEGSLSWTLGKRRRAAMDFPGAKVIVPQLKGRVQRRRVGLMCEGAPMRAHSPILNMEGTKIGTVTSGCPSPSLKKNVAMGYVPCEYSRPGTMLLVEVRRKQQMAVVSKMPFVPTNYYTLK

SEQ ID NO: 8109 - protein, 918 aa, Homo sapiens
MESDKDKVSLTKTPKLERGDGGKEVRERASKRKLPFTAGANGEQKDSDTGWTALHEACNRGYYDVAKQLLAAGAEVNTKGLDDDTPLHDAANNGHYKVVKLLLRYGGNPQQSNRKGETPLKVANSPTMVNLLLGKGTYTSSEESSTESSEEEDAPSFAPSSSVDGNNTDSEFEKGLKHKAKNPEPQKATAPVKDEYEFDEDDEQDRVPPVDDKHLLKKDYRKETKSNSFISIPKMEVKSYTKNNTIAPKKASHRILSDTSDEEDASVTVGTGEKLRLSAHTILPGSKTREPSNAKQQKEKNKVKKKRKKETKGREVRFGKRSDKFCSSESESESSESGEDDRDSLGSSGCLKGSPLVLKDPSLFSSLSASSTSSHGSSAAQKQNPSHTDQHTKHWRTDNWKTISSPAWSEVSSLSDSTRTRLTSESDYSSEGSSVESLKPVRKRQEHRKRASLSEKKSPFLSSAEGAVPKLDKEGKVVKKHKTKHKHKNKEKGQCSISQELKLKSFTYEYEDSKQKSDKAILLENDLSTENKLKVLKHDRDHFKKEEKLSKMKLEEKEWLFKDEKSLKRIKDTNKDISRSFREEKDRSNKAEKERSLKEKSPKEEKLRLYKEERKKKSKDRPSKLEKKNDLKEDKISKEKEKIFKEDKEKLKKEKVYREDSAFDEYCNKNQFLENEDTKFSLSDDQRDRWFSDLSDSSFDFKGEDSWDSPVTDYRDMKSDSVAKLILETVKEDSKERRRDSRAREKRDYREPFFRKKDRDYLDKNSEKRKEQTEKHKSVPGYLSEKDKKRRESAEAGRDRKDALESCKERRDGRAKPEEAHREELKECGCESGFKDKSDGDFGKGLEPWERHHPAREKEKKDGPDKERKEKTKPERYKEKSSDKDKSEKSILEKCQKDKEFDKCFKEKKDTKEKHKDT

SEQ ID NO: 8110 - protein, 2637 aa, Homo sapiens
MESDKDKVSLTKTPKLERGDGGKEVRERASKRKLPFTAGANGEQKDSDTEKQGPERKRIKKEPVTRKAGLLFGMGLSGIRAGYPLSERQQVALLMQMTAEESANSPVDTTPKHPSQSTVCQKGTPNSASKTKDKVNKRNERGETRLHRAAIRGDARRIKELISEGADVNVKDFAGWTALHEACNRGYYDVAKQLLAAGAEVNTKGLDDDTPLHDAANNGHYKVVKLLLRYGGNPQQSNRKGETPLKVANSPTMVNLLLGKGTYTSSEESSTESSEEEDAPSFAPSSSVDGNNTDSEFEKGLKHKAKNPEPQKATAPVKDEYEFDEDDEQDRVPPVDDKHLLKKDYRKETKSNSFISIPKMEVKSYTKNNTIAPKKASHRILSDTSDEEDASVTVGTGEKLRLSAHTILPGSKTREPSNAKQQKEKNKVKKKRKKETKGREVRFGKRSDKFCSSESESESSESGEDDRDSLGSSGCLKGSPLVLKDPSLFSSLSASSTSSHGSSAAQKQNPSHTDQHTKHWRTDNWKTISSPAWSEVSSLSDSTRTRLTSESDYSSEGSSVESLKPVRKRQEHRKRASLSEKKSPFLSSAEGAVPKLDKEGKVVKKHKTKHKHKNKEKGQCSISQELKLKSFTYEYEDSKQKSDKAILLENDLSTENKLKVLKHDRDHFKKEEKLSKMKLEEKEWLFKDEKSLKRIKDTNKDISRSFREEKDRSNKAEKERSLKEKSPKEEKLRLYKEERKKKSKDRPSKLEKKNDLKEDKISKEKEKIFKEDKEKLKKEKVYREDSAFDEYCNKNQFLENEDTKFSLSDDQRDRWFSDLSDSSFDFKGEDSWDSPVTDYRDMKSDSVAKLILETVKEDSKERRRDSRAREKRDYREPFFRKKDRDYLDKNSEKRKEQTEKHKSVPGYLSEKDKKRRESAEAGRDRKDALESCKERRDGRAKPEEAHREELKECGCESGFKDKSDGDFGKGLEPWERHHPAREKEKKDGPDKERKEKTKPERYKEKSSDKDKSEKSILEKCQKDKEFDKCFKEKKDTKEKHKDTHGKDKERKASLDQGKEKKEKAFPGIISEDFSEKKDDKKGKEKSWYIADIFTDESEDDRDSCMGSGFKMGEASDLPRTDGLQEKEEGREAYASDRHRKSSDKQHPERQKDKEPRDRRKDRGAADAGRDKKEKVFEKHKEKKDKESTEKYKDRKDRASVDSTQDKKNKQKLPEKAEKKHAAEDKAKSKHKEKSDKEHSKERKSSRSADAEKSLLEKLEEEALHEYREDSNDKISEVSSDSFTDRGQEPGLTAFLEVSFTEPPGDDKPRESACLPEKLKEKERHRHSSSSSKKSHDRERAKKEKAEKKEKGEDYKEGGSRKDSGQYEKDFLEADAYGVSYNMKADIEDELDKTIELFSTEKKDKNDSEREPSKKIEKELKPYGSSAINILKEKKKREKHREKWRDEKERHRDRHADGLLRHHRDELLRHHRDEQKPATRDKDSPPRVLKDKSRDEGPRLGDAKLKEKFKDGAEKEKGDPVKMSNGNDKVAPSKDPGKKDARPREKLLGDGDLMMTSFERMLSQKDLEIEERHKRHKERMKQMEKLRHRSGDPKLKEKAKPADDGRKKGLDIPAKKPPGLDPPFKDKKLKESTPIPPAAENKLHPASGADSKDWLAGPHMKEVLPASPRPDQSRPTGVPTPTSVLSCPSYEEVMHTPRTPSCSADDYADLVFDCADSQHSTPVPTAPTSACSPSFFDRFSVASSGLSENASQAPARPLSTNLYRSVSVDIRRTPEEEFSVGDKLFRQQSVPAASSYDSPMPPSMEDRAPLPPVPAEKFACLSPGYYSPDYGLPSPKVDALHCPPAAVVTVTPSPEGVFSSLQAKPSPSPRAELLVPSLEGALPPDLDTSEDQQATAAIIPPEPSYLEPLDEGPFSAVITEEPVEWAHPSEQALASSLIGGTSENPVSWPVGSDLLLKSPQRFPESPKRFCPADPLHSAAPGPFSASEAPYPAPPASPAPYALPVAEPGLEDVKDGVDAVPAAISTSEAAPYAPPSGLESFFSNCKSLPEAPLDVAPEPACVAAVAQVEALGPLENSFLDGSRGLSHLGQVEPVPWADAFAGPEDDLDLGPFSLPELPLQTKDAADGEAEPVEESLAPPEEMPPGAPGVINGGDVSTVVAEEPPALPPDQASTRLPAELEPEPSGEPKLDVALEAAVEAETVPEERARGDPDSSVEPAPVPPEQRPLGSGDQGAEAEGPPAASLCAPDGPAPNTVAQAQAADGAGPEDDTEASRAAAPAEGPPGGIQPEAAEPKPTAEAPKAPRVEEIPQRMTRNRAQMLANQSKQGPPPSEKECAPTPAPVTRAKARGSEDDDAQAQHPRKRRFQRSTQQLQQQLNTSTQQTREVIQQTLAAIVDAIKLDAIEPYHSDRANPYFEYLQIRKKIEEKRKILCCITPQAPQCYAEYVTYTGSYLLDGKPLSKLHIPVIAPPPSLAEPLKELFRQQEAVRGKLRLQHSIEREKLIVSCEQEILRVHCRAARTIANQAVPFSACTMLLDSEVYNMPLESQGDENKSVRDRFNARQFISWLQDVDDKYDRMKTCLLMRQQHEAAALNAVQRMEWQLKVQELDPAGHKSLCVNEVPSFYVPMVDVNDDFVLLPA

SEQ ID NO: 8111 - protein, 136 aa, Homo sapiens
MESDKDKVSLTKTPKLERGDGGKEVRERASKRKLPFTAGANGEQKDSDTVLCVDAFRCLQPSPCCGAARLVRSSKHHGMRWRFLEARRKRSRALSGRGLRRSLSPGRPGCCLAWGCLESEPATPSPSASRWPFSCR

SEQ ID NO: 8112 - protein, 71 aa, Homo sapiens
MESDKDKVSLTKTPKLERGDGGKEVRERASKRKLPFTAGANGEQKDSDTDASSPVPVVVLQGWYAPRSTMA

SEQ ID NO: 8113 - protein, 340 aa, Homo sapiens
MESDKDKVSLTKTPKLERGDGGKEVRERASKRKLPFTAGANGEQKDSDTEKQGPERKRIKKEPVTRKAGLLFGMGLSGIRAGYPLSERQQVALLMQMTAEESANSPVDTTPKHPSQSTVCQKGTPNSASKTKDKVNKRNERGETRLHRAAIRGDARRIKELISEGADVNVKDFAGWTALHEACNRGYYDVAKQLLAAGAEVNTKGLDDDTPLHDAANNGHYKVVKLLLRYGGNPQQSNRKGETPLKVANSPTMVNLLLGKGTYTSSEESSTESSEEEDAPSFAPSSSVDGNNTDSEFEKGSSTRPRTQSHRRPRPPSRTSMSLMRTTSRTGFLRWTTSTY

SEQ ID NO: 8114 - protein, 246 aa, Homo sapiens
MESDKDKVSLTKTPKLERGDGGKEVRERASKRKLPFTAGANGEQKDSDTEKQGPERKRIKKEPVTRKAGLLFGMGLSGIRAGYPLSERQQVALLMQMTAEESANSPVDTTPKHPSQSTVCQKGTPNSASKTKDKVNKRNERGETRLHRAAIRGDARRIKELISEGADVNVKDFAGWTALHEACNRGYYDVAKQLLAAGAEVNTKGLDDDTPLHDAANNGHYKVKDYTKWKEACRSCCRSPSPLWDC

SEQ ID NO: 8115 - protein, 2637 aa, Homo sapiens; identical to SEQ ID NO: 8110

SEQ ID NO: 8116 - protein, 71 aa, Homo sapiens; identical to SEQ ID NO: 8112

SEQ ID NO: 8117 - protein, 62 aa, Homo sapiens
MESDKDKVSLTKTPKLERGDGGKEVRERASKRKLPFTAGANGEQKDSDTERWARARPRTRPL

SEQ ID NO: 8118 - protein, 241 aa, Homo sapiens
MESDKDKVSLTKTPKLERGDGGKEVRERASKRKLPFTAGANGEQKDSDTEKQGPERKRIKKEPVTRKAGLLFGMGLSGIRAGYPLSERQQVALLMQMTAEESANSPVDTTPKHPSQSTVCQKGTPNSASKTKDKVNKRNERGETRLHRAAIRGDARRIKELISEGADVNVKDFAGWTALHEACNRGYYDVAKQLLAAGAEVNTKGLDDDTPLHDAANNGHYKVGIPPFFTHPACPGIWVVL

SEQ ID NO: 8119 - protein, 241 aa, Homo sapiens; identical to SEQ ID NO: 8118

SEQ ID NO: 8120 - protein, 71 aa, Homo sapiens; identical to SEQ ID NO: 8112

SEQ ID NO: 8121 - protein, 98 aa, Homo sapiens
MESDKDKVSLTKTPKLERGDGGKEVRERASKRKLPFTAGANGEQKDSDTGPPGSCLSWGSHEGALVRSAMGRSCLPSARGCFFGTRGKIMIFLFCFDL

SEQ ID NO: 8122 - protein, 2637 aa, Homo sapiens; identical to SEQ ID NO: 8110

SEQ ID NO: 8123 - protein, 549 aa, Homo sapiens
MSELSDEASEPELLNRSLSMWHGLGTQVSGEELDVPLDLHTAASIGQYEVVKECVQREPICGFTPLMEAAAAGHEIIVQYFLNHGVKVDARDHSGATARMLAKQYGHMKIVALMDTYSPSLPKSLYRSPEKYEDLSSSDESCPAPQRQRPCRKKGVSIHEGPRALARITGIGLGGRAPRPRYEQAPPRGYVTFNSSGENPLEEEGLCCRDVTSPINERDVESSSSSSSREEHAFCANLGPVQSSSSSEGLARAQGLSSEASVESNEDSDHACKSSARKQAKSYMKTKNPDSQWPPRAATDREGFLAESSPQTQRAPYSGPQDLAALLEQIGCLKYLQVFEEQDVDLRIFLTLTESDLKEIGITLFGPKRKMTSAIARWHSSARPPGDALELAYADRLEAEMQELAIQLHKRCEEVEATRGQVCQEQELRAVVESCLLEQDRAREDLQARLRETWALARDAALVLDQLRACQAELSSRVRQDQPPGAATLGLAVPPADSKGWQASLQAMSLPELSGALEDRVREMGQALCLVTQSLEKLQVLNGKKWRET

SEQ ID NO: 8124 - protein, 75 aa, Homo sapiens
MEGAALLKIFVVCIWVQQNHPGWTVAGQFQEKKRFTEEVIEYFQKKVSPVHLKILLTSDEAWKRFVRVAELPREE

SEQ ID NO: 8125 - protein, 150 aa, Homo sapiens
MPGIDKLPIEETLEDSPQTRSLLGVFEEDATAISNYMNQLYQAMHRIYDAQNELSAATHLTSKLLKEYEKQRFPLGGDDEVMSSTLQQFSKVIDELSSCHAVLSTQLADAMMFPITQFKERDLKEILTLKEVFQIASNDHDAAINRYSRL

SEQ ID NO: 8126 - protein, 511 aa, Homo sapiens
MVLLAAAVCTKAGKAIVSRQFVEMTRTRIEGLLAAFPKLMNTGKQHTFVETESVRYVYQPMEKLYMVLITTKNSNILEDLETLRLFSRVIPEYCRALEENEISEHCFDLIFAFDEIVALGYRENVNLAQIRTFTEMDSHEEKVFRAVRETQEREAKAEMRRKAKELQQARRDAERQGKKAPGFGGFGSSAVSGGSTAAMITETIIETDKPKVAPAPARPSGPSKALKLGAKGKEVDNFVDKLKSEGETIMSSSMGKRTSEATKMHAPPINMESVHMKIEEKITLTCGRDGGLQNMELHGMIMLRISDDKYGRIRLHVENEDKKGVQLQTHPNVDKKLFTAESLIGLKNPEKSFPVNSDVGVLKWRLQTTEESFIPLTINCWPSESGNGCDVNIEYELQEDNLELNDVVITIPLPSGVGAPVIGEIDGEYRHDSRRNTLEWCLPVIDAKNKSGSLEFSIAGQPNDFFPVQVSFVSKKNYCNIQVTKVTQVDGNSPVRFSTETTFLVDKYEIL

SEQ ID NO: 8127 - protein, 673 aa, Homo sapiens
MACLLETPIRMSVLSEVTASSRHYVDRLFDPDPQKVLQGVIDMKNAVIGNNKQKANLIVLGAVPRLLYLLQQETSSTELKTECAVVLGSLAMGTENNVKSLLDCHIIPALLQGLLSPDLKFIEACLRCLRTIFTSPVTPEELLYTDATVIPHLMALLSRSRYTQEYICQIFSHCCKGPDHQTILFNHGAVQNIAHLLTSLSYKVRMQALKCFSVLAFENPQVSMTLVNVLVDGELLPQIFVKMLQRDKPIEMQLTSAKCLTYMCRAGAIRTDDNCIVLKTLPCLVRMCSKERLLEERVEGAETLAYLIEPDVELQRIASITDHLIAMLADYFKYPSSVSAITDIKRLDHDLKHAHELRQAAFKLYASLGANDEDIRKKIIETENMMDRIVTGLSESSVKVRLAAVRCLHSLSRSVQQLRTSFQDHAVWKPLMKVLQNAPDEILVVASSMLCNLLLEFSPSKEPILESGAVELLCGLTQSENPALRVNGIWALMNMAFQAEQKIKADILRSLSTEQLFRLLSDSDLNVLMKTLGLLRNLLSTRPHIDKIMSTHGKQIMQAVTLILEGEHNIEVKEQTLCILANIADGTTAKDLIMTNDDILQKIKYYMGHSHVKLQLAAMFCISNLIWNEEEGSQERQDKLRDMGIVDILHKLSQSPDSNLCDKAKMALQQYLA

SEQ ID NO: 8128 - protein, 399 aa, Homo sapiens
MACLLETPIRMSVLSEVTASSRHYVDRLFDPDPQKVLQGVIDMKNAVIGNNKQKANLIVLGAVPRLLYLLQQETSSTELKTECAVVLGSLAMGTENNVKSLLDCHIIPALLQGLLSPDLKFIEACLRCLRTIFTSPVTPEELLYTDATVIPHLMALLSRSRYTQEYICQIFSHCCKGPDHQTILFNHGAVQNIAHLLTSLSYKVRMQALKCFSVLAFENPQVSMTLVNVLVDGELLPQIFVKMLQRDKPIEMQLTSAKCLTYMCRAGAIRTDDNCIVLKTLPCLVRMCSKERLLEERVEGAETLAYLIEPDVELQRIASITDHLIAMLADYFKYPSSVSAITDIKRLDHDLKHAHELRQAAFKLYASLGANDEDIRKKVSLGEGRPPVLTASRQGVTST

SEQ ID NO: 8129 - protein, 625 aa, Homo sapiens
MADQRMDISSTISDFMSPGPTDLLSSSLGTSGVDCNRKRKGSSTDYQESMDTDKDDPHGRLEYTEHQGRIKNAREAHSQIEKRRRDKMNSFIDELASLVPTCNAMSRKLDKLTVLRMAVQHMKTLRGATNPYTEANYKPTFLSDDELKHLILRAADGFLFVVGCDRGKILFVSESVFKILNYSQNDLIGQSLFDYLHPKDIAKVKEQLSSSDTAPRERLIDAKTGLPVKTDITPGPSRLCSGARRSFFCRMKCNRPSVKVEDKDFPSTCSKKKDRKSFCTIHSTGYLKSWPPTKMGLDEDNEPDNEGCNLSCLVAIGRLHSHVVPQPVNGEIRVKSMEYVSRHAIDGKFVFVDQRATAILAYLPQELLGTSCYEYFHQDDIGHLAECHRQVLQTREKITTNCYKFKIKDGSFITLRSRWFSFMNPWTKEVEYIVSTNTVVLANVLEGGDPTFPQLTASPHSMDSMLPSGEGGPKRTHPTVPGIPGGTRAGAGKIGRMIAEEIMEIHRIRGSSPSSCGSSPLNITSTPPPDASSPGGKKILNGGTPDIPSSGLLSGQAQENPGYPYSDSSSILGENPHIGIDMIDNDQGSSSPSNDEAAMAVIMSLLEADAGLGGPVDFSDLPWPL

SEQ ID NO: 8130 - protein, 184 aa, Homo sapiens
MADQRMDISSTISDFMSPGPTDLLSSSLGTSGVDCNRKRKGSSTDYQESMDTDKDDPHGRLEYTEHQGRIKNAREAHSQIEKRRRDKMNSFIDELASLVPTCNAMSRKLDKLTVLRMAVQHMKTLRGATNPYTEANYKPTFLSDDELKHLILRAADGFLFVVGCDRGKILFVSESVFKILNYSQ

SEQ ID NO: 8131 - protein, 74 aa, Homo sapiens
MTHEVLSTFIPSEGSSSKVEEVDEVPQVTVQPASTVQKPGGTVILGCVVEPPRMNVTWRLNGKELNGSDDALGV

SEQ ID NO: 8132 - protein, 1105 aa, Homo sapiens
MTHEVLSTFIPSEGSSSKVEEVDEVPQVTVQPASTVQKPGGTVILGCVVEPPRMNVTWRLNGKELNGSDDALGVLITHGTLVITALNNHTVGRYQCVARMPAGAVASVPATVTLANLQDFKLDVQHVIEVDEGNTAVIACHLPESHPKAQVRYSVKQEWLEASRGNYLIMPSGNLQIVNASQEDEGMYKCAAYNPVTQEVKTSGSSDRLRVRRSTAEAARIIYPPEAQTIIVTKGQSLILECVASGIPPPRVTWAKDGSSVTGYNKTRFLLSNLLIDTTSEEDSGTYRCMADNGVGQPGAAVILYNVQVFEPPEVTMELSQLVIPWGQSAKLTCEVRGNPPPSVLWLRNAVPLISSQRLRLSRRALRVLSMGPEDEGVYQCMAENEVGSAHAVVQLRTSRPSITPRLWQDAELATGTPPVSPSKLGNPEQMLRGQPALPRPPTSVGPASPQCPGEKGQGAPAEAPIILSSPRTSKTDSYELVWRPRHEGSGRAPILYYVVKHRKQVTNSSDDWTISGIPANQHRLTLTRLDPGSLYEVEMAAYNCAGEGQTAMVTFRTGRRPKPEIMASKEQQIQRDDPGASPQSSSQPDHGRLSPPEAPDRPTISTASETSVYVTWIPRGNGGFPIQSFRVEYKKLKKVGDWILATSAIPPSRLSVEITGLEKGTSYKFRVRALNMLGESEPSAPSRPYVVSGYSGRVYERPVAGPYITFTDAVNETTIMLKWMYIPASNNNTPIHGFYIYYRPTDSDNDSDYKKDMVEGDKYWHSISHLQPETSYDIKMQCFNEGGESEFSNVMICETKARKSSGQPGRLPPPTLAPPQPPLPETIERPVGTGAMVARSSDLPYLIVGVVLGSIVLIIVTFIPFCLWRAWSKQKHTTDLGFPRSALPPSCPYTMVPLGGLPGHQASGQPYLSGISGRACANGIHMNRGCPSAAVGYPGMKPQQHCPGELQQQSDTSSLLRQTHLGNGYDPQSHQITRGPKSSPDEGSFLYTLPDDSTHQLLQPHHDCCQRQEQPAAVGQSGVRRAPDSPVLEAVWDPPFHSGPPCCLGLVPVEEVDSPDSCQVSGGDWCPQHPVGAYVGQEPGMQLSPGPLVRVSFETPPLTI

SEQ ID NO: 8133 - protein, 147 aa, Homo sapiens
MTHEVLSTFIPSEGSSSKVEEVDEVPQVTVQPASTVQKPGGTVILGCVVEPPRMNVTWRLNGKELNGSDDALGVLITHGTLVITALNNHTVGRYQCVARMPAGAVASVPATVTLASESAPLPPCHGAVPPHLSHPEAPTIHAASCYS

SEQ ID NO: 8134 - protein, 1104 aa, Homo sapiens
MTHEVLSTFIPSEGSSSKVEEVDEVPQVTVQPASTVQKPGGTVILGCVVEPPRMNVTWRLNGKELNGSDDALGVLITHGTLVITALNNHTVGRYQCVARMPAGAVASVPATVTLANLQDFKLDVQHVIEVDEGNTAVIACHLPESHPKAQVRYSVKQEWLEASRGNYLIMPSGNLQIVNASQEDEGMYKCAAYNPVTQEVKTSGSSDRLRVRRSTAEAARIIYPPEAQTIIVTKGQSLILECVASGIPPPRVTWAKDGSSVTGYNKTRFLLSNLLIDTTSEEDSGTYRCMADNGVGQPGAAVILYNVQVFEPPEVTMELSQLVIPWGQSAKLTCEVRGNPPPSVLWLRNAVPLISSQRLRLSRRALRVLSMGPEDEGVYQCMAENEVGSAHAVVQLRTSRPSITPRLWQDAELATGTPPVSPSKLGNPEQMLRGQPALPRPPTSVGPASPQCPGEKGQGAPAEAPIILSSPRTSKTDSYELVWRPRHEGSGRAPILYYVVKHRKVTNSSDDWTISGIPANQHRLTLTRLDPGSLYEVEMAAYNCAGEGQTAMVTFRTGRRPKPEIMASKEQQIQRDDPGASPQSSSQPDHGRLSPPEAPDRPTISTASETSVYVTWIPRGNGGFPIQSFRVEYKKLKKVGDWILATSAIPPSRLSVEITGLEKGTSYKFRVRALNMLGESEPSAPSRPYVVSGYSGRVYERPVAGPYITFTDAVNETTIMLKWMYIPASNNNTPIHGFYIYYRPTDSDNDSDYKKDMVEGDKYWHSISHLQPETSYDIKMQCFNEGGESEFSNVMICETKARKSSGQPGRLPPPTLAPPQPPLPETIERPVGTGAMVARSSDLPYLIVGVVLGSIVLIIVTFIPFCLWRAWSKQKHTTDLGFPRSALPPSCPYTMVPLGGLPGHQASGQPYLSGISGRACANGIHMNRGCPSAAVGYPGMKPQQHCPGELQQQSDTSSLLRQTHLGNGYDPQSHQITRGPKSSPDEGSFLYTLPDDSTHQLLQPHHDCCQRQEQPAAVGQSGVRRAPDSPVLEAVWDPPFHSGPPCCLGLVPVEEVDSPDSCQVSGGDWCPQHPVGAYVGQEPGMQLSPGPLVRVSFETPPLTI

SEQ ID NO: 8135 - protein, 1819 aa, Homo sapiens
MDLSALRVEEVQNVINAMQKILECPIWSLQESTRFSQLVEELLKIICAFQLDTGLEYANSYNFAKKENNSPEHLKDEVSIIQSMGYRNRAKRLLQSEPENPSLQETSLSVQLSNLGTVRTLRTKQRIQPQKTSVYIELGSDSSEDTVNKATYCSVGDQELLQITPQGTRDEISLDSAKKAACEFSETDVTNTEHHQPSNNDLNTTEKRAAERHPEKYQGSSVSNLHVEPCGTNTHASSLQHENSSLLLTKDRMNVEKAEFCNKSKQPGLARSQHNRWAGSKETCNDRRTPSTEKKVDLNADPLCERKEWNKQKLPCSENPRDTEDVPWITLNSSIQKVNEWFSRSDELLGSDDSHDGESESNAKVADVLDVLNEVDEYSGSSEKIDLLASDPHEALICKSERVHSKSVESNIEDKIFGKTYRKKASLPNLSHVTENLIIGAFVTEPQIIQERPLTNKLKRKRRPTSGLHPEDFIKKADLAVQKTPEMINQGTNQTEQNGQVMNITNSGHENKTKGDSIQNEKNPNPIESLEKESAFKTKAEPISSSISNMELELNIHNSKAPKKNRLRRKSSTRHIHALELVVSRNLSPPNCTELQIDSCSSSEEIKKKKYNQMPVRHSRNLQLMEGKEPATGAKKSNKPNEQTSKRHDSDTFPELKLTNAPGSFTKCSNTSELKEFVNPSLPREEKEEKLETVKVSNNAEDPKDLMLSGERVLQTERSVESSSISLVPGTDYGTQESISLLEVSTLGKAKTEPNKCVSQCAAFENPKGLIHGCSKDNRNDTEGFKYPLGHEVNHSRETSIEMEESELDAQYLQNTFKVSKRQSFAPFSNPGNAEEECATFSAHSGSLKKQSPKVTFECEQKEENQGKNESNIKPVQTVNITAGFPVVGQKDKPVDNAKCSIKGGSRFCLSSQFRGNETGLITPNKHGLLQNPYRIPPLFPIKSFVKTKCKKNLLEENFEEHSMSPEREMGNENIPSTVSTISRNNIRENVFKEASSSNINEVGSSTNEVGSSINEIGSSDENIQAELGRNRGPKLNAMLRLGVLQPEVYKQSLPGSNCKHPEIKKQEYEEVVQTVNTDFSPYLISDNLEQPMGSSHASQVCSETPDDLLDDGEIKEDTSFAENDIKESSAVFSKSVQKGELSRSPSPFTHTHLAQGYRRGAKKLESSEENLSSEDEELPCFQHLLFGKVNNIPSQSTRHSTVATECLSKNTEENLLSLKNSLNDCSNQVILAKASQEHHLSEETKCSASLFSSQCSELEDLTANTNTQDPFLIGSSKQMRHQSESQGVGLSDKELVSDDEERGTGLEENNQEEQSMDSNLGEAASGCESETSVSEDCSGLSSQSDILTTQQRDTMQHNLIKLQQEMAELEAVLEQHGSQPSNSYPSIISDSSALEDLRNPEQSTSEKAVLTSQKSSEYPISQNPEGLSADKFEVSADSSTSKNKEPGVERSSPSKCPSLDDRWYMHSCSGSLQNRNYPSQEELIKVVDVEEQQLEESGPHDLTETSYLPRQDLEGTPYLESGISLFSDDPESDPSEDRAPESARVGNIPSSTSALKVPQLKVAESAQSPAAAHTTDTAGYNAMEESVSREKPELTASTERVNKRMSMVVSGLTPEEFMLVYKFARKHHITLTNLITEETTHVVMKTDAEFVCERTLKYFLGIAGGKWVVSYFWVTQSIKERKMLNEHDFEVRGDVVNGRNHQGPKRARESQDRKIFRGLEICCYGPFTNMPTDQLEWMVQLCGASVVKELSSFTLGTGVHPIVVVQPDAWTEDNGFHAIGQMCEAPVVTREWVLDSVALYQCQELDTYLIPQIPHSHY

SEQ ID NO: 8136 - protein, 575 aa, Homo sapiens
MDLSALRVEEVQNVINAMQKILECPIWSLQESTRFSQLVEELLKIICAFQLDTGLEYANSYNFAKKENNSPEHLKDEVSIIQSMGYRNRAKRLLQSEPENPSLQETSLSVQLSNLGTVRTLRTKQRIQPQKTSVYIELGSDSSEDTVNKATYCSVGDQELLQITPQGTRDEISLDSAKKAACEFSETDVTNTEHHQPSNNDLNTTEKRAAERHPEKYQGEAASGCESETSVSEDCSGLSSQSDILTTQQRDTMQHNLIKLQQEMAELEAVLEQHGSQPSNSYPSIISDSSALEDLRNPEQSTSEKAVLTSQKSSEYPISQNPEGLSADKFEVSADSSTSKNKEPGVERSSPSKCPSLDDRWYMHSCSGSLQNRNYPSQEELIKVVDVEEQQLEESGPHDLTETSYLPRQDLEGTPYLESGISLFSDDPESDPSEDRAPESARVGNIPSSTSALKVPQLKVAESAQSPAAAHTTDTAGYNAMEESVSREKPELTASTERVNKRMSMVVSGLTPEEFMLVYKFARKHHITLTNLITEETTHVVMKTDAEFVCERTLKYFLGIAGGKWVVSYFWVTQS

SEQ ID NO: 8137 - protein, 591 aa, Homo sapiens
MKNSRTWAWRAPVELFLLCAALGCLSLPGSRGERPHSFGSNAVNKSFAKSRQMRSVDVTLMPIDCELSSWSSWTTCDPCQKKRYRYAYLLQPSQFHGEPCNFSDKEVEDCVTNRPCGSQVRCEGFVCAQTGRCVNRRLLCNGDNDCGDQSDEANCRRIYKKCQHEMDQYWGIGSLASGINLFTNSFEGPVLDHRYYAGGCSPHYILNTRFRKPYNVESYTPQTQGKYEFILKEYESYSDFERNVTEKMASKSGFSFGFKIPGIFELGISSQSDRGKHYIRRTKRFSHTKSVFLHARSDLEVAHYKLKPRSLMLHYEFLQRVKRLPLEYSYGEYRDLFRDFGTHYITEAVLGGIYEYTLVMNKEAMERGDYTLNNVHACAKNDFKIGGAIEEVYVSLGVSVGKCRGILNEIKDRNKRDTMVEDLVVLVRGGASEHITTLAYQELPTADLMQEWGDAVQYNPAIIKVKVEPLYELVTATDFAYSSTVRQNMKQALEEFQKEVSSCHCAPCQGNGVPVLKGSRCDCICPVGSQGLACEVSYRKNTPIDGKWNCWSNWSSCSGRRKTRQRQCNNPPPQNGGSPCSGPASETLDCS

SEQ ID NO: 8138 - protein, 539 aa, Homo sapiens
MRSVDVTLMPIDCELSSWSSWTTCDPCQKKRYRYAYLLQPSQFHGEPCNFSDKEVEDCVTNRPCGSQVRCEGFVCAQTGRCVNRRLLCNGDNDCGDQSDEANCRRIYKKCQHEMDQYWGIGSLASGINLFTNSFEGPVLDHRYYAGGCSPHYILNTRFRKPYNVESYTPQTQGKYEFILKEYESYSDFERNVTEKMASKSGFSFGFKIPGIFELGISSQSDRGKHYIRRTKRFSHTKSVFLHARSDLEVAHYKLKPRSLMLHYEFLQRVKRLPLEYSYGEYRDLFRDFGTHYITEAVLGGIYEYTLVMNKEAMERGDYTLNNVHACAKNDFKIGGAIEEVYVSLGVSVGKCRGILNEIKDRNKRDTMVEDLVVLVRGGASEHITTLAYQELPTADLMQEWGDAVQYNPAIIKVKVEPLYELVTATDFAYSSTVRQNMKQALEEFQKEVSSCHCAPCQGNGVPVLKGSRCDCICPVGSQGLACEVSYRKNTPIDGKWNCWSNWSSCSGRRKTRQRQCNNPPPQNGGSPCSGPASETLDCS

SEQ ID NO: 8139 - protein, 149 aa, Homo sapiens [sequence omitted]

SEQ ID NO: 8140 - protein, 101 aa, Homo sapiens
MADQLTEEQIAGNGTIDFPEFLTMMARKMKDTDSEEEIREAFRVFDKDGNGYISAAELRHVMTNLGEKLTDEEVDEMIREADIDGDGQVNYEEFVQMMTAK

SEQ ID NO: 8141 - protein, 123 aa, Homo sapiens
MAEDNHKKKTVKMLEYLGKDVLHGVFNYLAKHDVLTLKEEEKKKYYDTKIEDKALILVDSLRKNRVAHQMFTQTLLNMDQKITSVKPLLQIEAGPPESAESTNILKLCPREEFLRLCKKNHDE

SEQ ID NO: 8142 - protein, 685 aa, Homo sapiens
MNPTETKAVKTEPEKKSQSTKLSVVHEKKSQEGKPKEHTEPKSLPKQASDTGSNDAHNKKAVSRSAEQQPSEKSTEPKTKPQDMISAGGESVAGITAISGKPGDKKKEKKSLTPAVPVESKPDKPSGKSGMDAALDDLIDTLGGPEETEEENTTYTGPEVSDPMSSTYIEELGKREVTIPPKYRELLAKKEGITGPPADSSKPIGPDDAIDALSSDFTCGSPTAAGKKTEKEESTEVLKAQSAGTVRSAAPPQEKKRKVEKDTMSDQALEALSASLGTRQAEPELDLRSIKEVDEAKAKEEKLEKCGEDDETIPSEYRLKPATDKDGKPLLPEPEEKPKPRSESELIDELSEDFDRSECKEKPSKPTEKTEESKAAAPAPVSEAVCRTSMCSIQSAPPEPATLKGTVPDDAVEALADSLGKKEADPEDGKPVMDKVKEKAKEEDREKLGEKEETIPPDYRLEEVKDKDGKPLLPKESKEQLPPMSEDFLLDALSEDFSGPQNASSLKFEDAKLAAAISEVVSQTPASTTQAGAPPRDTSSDKDLDDALDKLSDSLGQRQPDPDENKPMEDKVKEKAKAEHRDKLGERDDTIPPEYRHLLDDNGQDKPVKPPTKKSEDSKKPADDQDPIDALSGDLDSCPSTTETSQNTAKDKCKKAASSSKAPKNGGKAKDSAKTTEETSKPKDD

SEQ ID NO: 8143 - protein, 128 aa, Homo sapiens
MSFLYSSKDCTRAAEQLKNNPRHKSYLEQVSLRQLEKLFSFLRGYLSGQSLAETMEQIQRETTIDPEEDLNKLDDKELAKRKSIMDELFEKNQKKKDDPNFVYDIEVEFPQDDQLQSCGWDTESADEF

SEQ ID NO: 8144 - protein, 207 aa, Homo sapiens
MAAASVSAASGSHLSNSFAEPSRSNGSMVRHSSSPYVVYPSDKPFLNSDLRRSPSKPTLAYPESNSRAIFSALKNLQDKIRRLELERIQAEESVKTLSRETIEYKKVLDEQIQERENSKNEESKHNQELTSQLLAAENKCNLLEKQLEYMRNMIKHAEMERTSVLEKQVSLERERQHDQTHVQSQLEKLDLLEQEYNKLTTMQALAE

SEQ ID NO: 8145 - protein, 72 aa, Homo sapiens
MAVPFVEDWDLVQTLGEEPDIGMPEPDAQRFFHQLMAGVVYLHGIGITHRDIKPENLLLDERDNLKISDFGL

SEQ ID NO: 8146 - protein, 138 aa, Homo sapiens
MGNKQTIFTEEQLDNYQENPFKERIVAAFSEDGEGNLTFNDFVDMFSVLCESAPRELKANYAFKIYDFNTDNFICKEDLELTLARLTKSELDEEEVVLVCDKVIEEADLDGDGKLGFADFEDMIAKAPDFLSTFHIRI

SEQ ID NO: 8147 - protein, 161 aa, Homo sapiens
MGNKQTIFTEEQLDNYQENPFKERIVAAFSEDGEGNLTFNDFVDMFSVLCESAPRELKANYAFKIYDFNTDNFICKEDLELTLARLTKSELDEEEVVLVCDKVIEEADLDGDGKLGFADFEDMIAKAPDFLRCCHYRGRAWAGQSRAGRDVGAEAPITRYL

SEQ ID NO: 8148 - protein, 90 aa, Homo sapiens
MLATRVFSLVGKRAISTSVCVRAHVYRIKFKESFAEMNRGSNEWKTVVGGAMFFIGFTALVIMWQKHYVYGPLPQSFDKEWVAKQTKRML

SEQ ID NO: 8149 - protein, 625 aa, Homo sapiens
MSSFEGQMAEYPTISIDRFDRENLRARAYFLSHCHKDHMKGLRAPTLKRRLECRFLFQGNNGTVLYTGDFRLAQGEAARMELLHSGGRVKDIQSVYLDTTFCDPRFYQIPSREECLSGVLELVRSWITRSPYHVVWLNCKAAYGYEYLFTNLSEELGVQVHVNKLDMFRNMPEILHHLTTDRNTQIHACRHPKAEEYFQWSKLPCGITSRNRIPLHIISIKPSTMWFGERSRKTNVIVRTGESSYRACFSFHSSYSEIKDFLSYLCPVNAYPNVIPVGTTMDKVVEILKPLCRSSQSTEPKYKPLGKLKRARTVHRDSEEEDDYLFDDPLPIPLRHKVPYPETFHPEVFSMTAVSEKQPEKLRQTPGCCRAECMQSSRFTNFVDCEESNSESEEEVGIPASLQGDLGSVLHLQKADGDVPQWEVFFKRNDEITDESLENFPSSTVAGGSQSPKLFSDSDGESTHISSQNSSQSTHITEQGSQGWDSQSDTVLLSSQERNSGDITSLDKADYRPTIKENIPASLMEQNVICPKDTYSDLKSRDKDVTIVPSTGEPTTLSSETHIPEEKSLLNLSTNADSQSSSDFEVPSTPEAELPKREHLQYLYEKLATGESIAVKKRKCSLLDT

SEQ ID NO: 8150 - protein, 203 aa, Homo sapiens
MKLPARVFFTLGSRLPCGLAPRRFFSYGTKILYQNTEALQSKFFSPLQKAMLPPNSFQGKVAFITGGGTGLGKGMTTLLSSLGAQCVIASRKMDVLKATAEQISSQTGNKVHAIQCDVRDPDMVQNTVSELIKVAGHPNIVINNAAGNFISPTERLSPNAWKTITDIVLNGTAFVTLEIGKQLIKAQKGAAFLSITTIYAETG

SEQ ID NO: 8151 - protein, 214 aa, Homo sapiens
MKLPARVFFTLGSRLPCGLAPRRFFSYGTKILYQNTEALQSKFFSPLQKAMLPPNSFQGKVAFITGGGTGLGKGMTTLLSSLGAQCVIASRKMDVLKATAEQISSQTGNKVHAIQCDVRDPDMVQNTVSELIKVAGHPNIVINNAAGNFISPTERLSPNAWKTITDIVLNGTAFVTLEIGKQLIKAQKGAAFLSITTIYAETGSGFVVPSASAK

SEQ ID NO: 8152 - protein, 135 aa, Homo sapiens
MVGSLNCIVAVSQNMGIGKNGDLPWPPLREPPQGAHFLSRSLDDALKLTEQPELANKVDMVWIVGGSSVYKEAMNHPGHLKLFVTRIMQDFESDTFFPEIDLEKYKLLPEYPGVLSDVQEEKGIKYKFEVYEKND

SEQ ID NO: 8153 - protein, 140 aa, Homo sapiens
MTLRIGICIPVTESILTPHIPALDGTRHRDRNHGHYSNHDLGWQNLGRPHTKMSHIKGHEGDPCLRSSDCIEGFCCARHFWTKICKPVLHQGEVCTKQRKKGSHGLEIFQRCDCAKGLSCKVWKDATYSSKARLHVCQKI

SEQ ID NO: 8154 - protein, 106 aa, Homo sapiens
MLKTPGNLLKSCDYARFEAKIHDLREQMMNHSMSSGSGSLRTNQKRSLYVRAMFDYDKSKDSGLPSQGLSFKYGDILHVINASDDEWWQARRVMLEGDSEEMGVIP

SEQ ID NO: 8155 - protein, 120 aa, Homo sapiens
MGDGAVKQGFLYLQQQQTFGKVTFSFEAGRRCVSGEGNFEFETRQGNEIFLALEEAISAQKNAAPATPQPQPATIPASLPRPDSPYSRPHDSLPPPSPTTPVPAPRPRGQEGEYAVPFDA

SEQ ID NO: 8156 - protein, 357 aa, Homo sapiens
MATVIHNPLKALGDQFYKEAIEHCRSYNSRLCAERSVRLPFLDSQTGVAQNNCYIWMEKRHRGPGLAPGQLYTYPARCWRKKRRLHPPEDPKLRLLEIKPEVELPLKKDGFTSESTTLEALLRGEGVEKKVDAREEESIQEIQRVLENDENVEEGNEEEDLEEDIPKRKNRTRGRARGSAGGRRRHDAASQEDHDKPYVCDICGKRYKNRPGLSYHYAHTHLASEEGDEAQDQETRSPPNHRNENHRPQKGPDGTVIPNNYCDFCLGGSNMNKKSGRPEELVSCADCGRSAHLGGEGRKEKEAAAAARTTEDLFGSTSESDTSTFHGFDEDDLEEPRSCRGRRSGRGSPTADKKGSC

SEQ ID NO: 8157 - protein, 357 aa, Homo sapiens; identical to SEQ ID NO: 8156

SEQ ID NO: 8158 - protein, 99 aa, Homo sapiens
MIEDSGKRGNTMAERRQLFAEMRAQDLDRIRLSTYRTACKLRFVQKKCNLHLVDIWNVIEALRENALNNLDPNTELNVSRLEAVLSTIFYQLNKRMPTT

SEQ ID NO: 8159 - protein, 88 aa, Homo sapiens
MAERRQLFAEMRAQDLDRIRLSTYRTACKLRFVQKKCNLHLVDIWNVIEALRENALNNLDPNTELNVSRLEAVLSTIFYQLNKRMPTT

SEQ ID NO: 8160 - protein, 512 aa, Homo sapiens
MHTGGETSACKPSSVRLAPSFSFHAAGLQMAGQMPHSHQYSDRRQPNISDQQVSALSYSDQIQQPLTNQVMPDIVMLQRRMPQTFRDPATAPLRKLSVDLIKTYKHINEVYYAKKKRRHQQGQGDDSSHKKERKVYNDGYDDDNYDYIVKNGEKWMDRYEIDSLIGKGSFGQVVKAYDRVEQEWVAIKIIKNKKAFLNQAQIEVRLLELMNKHDTEMKYYIVHLKRHFMFRNHLCLVFEMLSYNLYDLLRNTNFRGVSLNLTRKFAQQMCTALLFLATPELSIIHCDLKPENILLCNPKRSAIKIVDFGSSCQLGQRIYQYIQSRFYRSPEVLLGMPYDLAIDMWSLGCILVEMHTGEPLFSGANEVLLFLFLIQVDQMNKIVEVLGIPPAHILDQAPKARKFFEKLPDGTWNLKKTKDGKREYKPPGTRKLHNILGVETGGPGGRRAGESGHTVADYLKFKDLILRMLDYDPKTRIQPYYALQHSFFKKTADEGTNTSNSVSTSPAMEQSQ

SEQ ID NO: 8161 - protein, 750 aa, Homo sapiens
MWNLLHETDSAVATARRPRWLCAGALVLAGGFFLLGFLFGWFIKSSNEATNITPKHNMKAFLDELKAENIKKFLYNFTQIPHLAGTEQNFQLAKQIQSQWKEFGLDSVELAHYDVLLSYPNKTHPNYISIINEDGNEIFNTSLFEPPPPGYENVSDIVPPFSAFSPQGMPEGDLVYVNYARTEDFFKLERDMKINCSGKIVIARYGKVFRGNKVKNAQLAGAKGVILYSDPADYFAPGVKSYPDGWNLPGGGVQRGNILNLNGAGDPLTPGYPANEYAYRRGIAEAVGLPSIPVHPIGYYDAQKLLEKMGGSAPPDSSWRGSLKVPYNVGPGFTGNFSTQKVKMHIHSTNEVTRIYNVIGTLRGAVEPDRYVILGGHRDSWVFGGIDPQSGAAVVHEIVRSFGTLKKEGWRPRRTILFASWDAEEFGLLGSTEWAEENSRLLQERGVAYINADSSIEGNYTLRVDCTPLMYSLVHNLTKELKSPDEGFEGKSLYESWTKKSPSPEFSGMPRISKLGSGNDFEVFFQRLGIASGRARYTKNWETNKFSGYPLYHSVYETYELVEKFYDPMFKYHLTVAQVRGGMVFELANSIVLPFDCRDYAVVLRKYADKIYSISMKHPQEMKTYSVSFDSLFSAVKNFTEIASKFSERLQDFDKSNPIVLRMMNDQLMFLERAFIDPLGLPDRPFYRHVIYAPSSHNKYAGESFPGIYDALFDIESKVDPSKAWGEVKRQIYVAAFTVQAAAETLSEVA

SEQ ID NO: 8162 - protein, 72 aa, Homo sapiens
MFGQNLEVQLSSARTENTTVVLLVGLEELTNIRNVERLKKDLRASYCLIDSFLGDSELIGDLTQCVDCVIPP

SEQ ID NO: 8163 - protein, 865 aa, Homo sapiens
MAAVAAVAARRRRSWASLVLAFLGVCLGITLAVDRSNFKTCEESSFCKLSVSGRDENSVELTMAEGPYKIILTARPFRLDLLEDRSLLLSVNARGLLEFEHQRAPRVSQGSKDPAEGDGAQPEETPRDGDKPEETQGKAEKDEPGAWEETFKTHSDSKPYGPMSVGLDFSLPGMEHVYGIPEHADNLRLKVTEGGEPYRLYNLDVFQYELYNPMALYGSVPVLLAHNPHRDLGIFWLNAAETWVDISSNTAGKTLFGKMMDYLQGSGETPQTDVRWMSETGIIDVFLLLGPSISDVFRQYASLTGTQALPPLFSLGYHQSRWNYRDEADVLEVDQGFDDHNLPCDVIWLDIEHADGKRYFTWDPSRFPQPRTMLERLASKRRKLVAIVDPHIKVDSGYRVHEELRNLGLYVKTRDGSDYEGWCWPGSAGYPDFTNPTMRAWWANMFSYDNYEGSAPNLFVWNDMNEPSVFNGPEVTMLKDAQHYGGWEHRDVHNIYGLYVHMATADGLRQRSGGMERPFVLARAFFAGSQRFGAVWTGDNTAEWDHLKISIPMCLSLGLVGLSFCGADVGGFFKNPEPELLVRWYQMGAYQPFFRAHAHLDTGRREPWLLPSQHNDIIRDALGQRYSLLPFWYTLLYQAHREGIPVMRPLWVQYPQDVTTFNIDDQYLLGDALLVHPVSDSGAHGVQVYLPGQGEVWYDIQSYQKHHGPQTLYLPVTLSSIPVFQRGGTIVPRWMRVRRSSECMKDDPITLFVALSPQGTAQGELFLDDGHTFNYQTRQEFLLRRFSFSGNTLVSSSADPEGHFETPIWIERVVIIGAGKPAAVVLQTKGSPESRLSFQHDPETSVLVLRKPGINVASDWSIHLR

SEQ ID NO: 8164 - protein, 292 aa, Homo sapiens
MDLGPLNICEEMTILHGGFLLAEQLFHPKALAELTKSDWERVGRPIVEALREISSAAAHSQPFAWKKKALIIIWAKVLQPHPVTPSDTETRWQEDLFFSVGNMIPTINHTILFELLKSLEASGLFIQLLMALPTTICHAELERFLEHVTVDTSAEDVAFFLDVWWEVMKHKGHPQDPLLSQFSAMAHKYLPALDEFPHPPKRLRSDPDACPTMPLLAMLLRGLTQIQSRILGPGRKCCALANLADMLTVFALTEDDPQEVSATVYLDKLATVISVWNSDTQNPYHQQALAEK

SEQ ID NO: 8165 - protein, 130 aa, Homo sapiens
MAEAEGESLESWLSIVQSDPPIPVDRTLIPSPPPRPKNPVFDDEEKSKLLAKLLKSKNPDDLQEANKLIKSMVKEDEARIQKVTKRLHTLEEVNNNVRLLSEMLLHYSQEDSSDGDRELMKELFDQCENK

SEQ ID NO: 8166 - protein, 160 aa, Homo sapiens
MDPLFQQTHKQVHEIQSCMGRLETADKQSVHIVENEIQASIDQIFSRLERLEILSSKEPPNKRQNARLRVDQLKYDVQHLQTALRNFQHRRHAREQQERQREELLSRTFTTNDSDTTIPMDESLQFNSSLQKVHNGMDDLILDGHNILDGLRTQRLTLKG

SEQ ID NO: 8167 - protein, 267 aa, Homo sapiens
MGCFECCIKCLGGIPYASLIATILLYAGVALFCGCGHEALSGTVNILQTYFEMARTAGDTLDVFTMIDIFKYVIYGIAAAFFVYGILLMVEGFFTTGAIKDLYGDFKITTCGRCVSAWFIMLTYLFMLAWLGVTAFTSLPVYMYFNLWTICRNTTLVEGANLCLDLRQFGIVTIGEEKKICTVSENFLRMCESTELNMTFHLFIVALAGAGAAVIAMVHYLMVLSANWAYVKDACRMQKYEDIKSKEEQELHDIHSTRSKERLNAYT

SEQ ID NO: 8168 - protein, 594 aa, Homo sapiens
MALAGCPDSFLHHPYYQDKVEQTPRSQQDPAGPGLPAQSDRLANHQEDDVDLEALVNDMNASLESLYSACSMQSDTVPLLQNGQHARSQPRASGPPRSIQPQVSPRQRVQRSQPVHILAVRRLQEEDQQFRTSSLPAIPNPFPELCGPGSPPVLTPGSLPPSQAAAKQDVKVFSEDGTSKVVEILADMTARDLCQLLVYKSHCVDDNSWTLVEHHPHLGLERCLEDHELVVQVESTMASESKFLFRKNYAKYEFFKNPMNFFPEQMVTWCQQSNGSQTQLLQNFLNSSSCPEIQGFLHVKELGKKSWKKLYVCLRRSGLYCSTKGTSKEPRHLQLLADLEDSNIFSLIAGRKQYNAPTDHGLCIKPNKVRNETKELRLLCAEDEQTRTCWMTAFRLLKYGMLLYQNYRIPQQRKALLSPFSTPVRSVSENSLVAMDFSGQTGRVIENPAEAQSAALEEGHAWRKRSTRMNILGSQSPLHPSTLSTVIHRTQHWFHGRISREESHRIIKQQGLVDGLFLLRDSQSNPKAFVLTLCHHQKIKNFQILPCEDDGQTFFSLDDGNTKFSDLIQLVDFYQLNKGVLPCKLKHHCIRVAL

SEQ ID NO: 8169 - protein, 238 aa, Homo sapiens
MAEEEALRGNSDPWPNSMVVEHPEFLKAGKEPGLQIWRVEKFDLVPVPTNLYGDFFTGDAYVILKTVQLRNGNLQYDLHYWLGNECSQDESGAAAIFTVQLDDYLNGRAVQHREVQGFESATFLGYFKSGLKYKKGGVASGFKHVVPNEVVVQRLFQVKGRRVVRATEVPVSWESFNNGDCFILDLGNNIHQWCGSNSNRYERLKATQVSKGIRDNERSGRARVHVSEEGTEPEAMLQ

(The sequence listing continues in the following parts.)

1-83. (canceled)

84. A method of modulating expression of a target peptide sequence by a cell having a pre-mRNA that encodes the target peptide sequence and that comprises an inefficient translation region, the method comprising contacting the cell with a therapeutic agent or a vector encoding the therapeutic agent,
wherein the therapeutic agent binds to a targeted region of the pre-mRNA encoding the target peptide sequence, whereby splicing of the inefficient translation region from the pre-mRNA is modulated, thereby modulating a level of a first processed mRNA that is devoid of the inefficient translation region and that encodes a first protein comprising the target peptide sequence, and thereby modulating the expression of the target peptide sequence in the cell,
wherein the first processed mRNA has a higher translation efficiency for producing the first protein in the cell as compared to a translation efficiency of a second processed mRNA for producing a second protein in the cell, and wherein the second protein comprises the target peptide sequence and the second processed mRNA comprises the inefficient translation region.

85. The method of claim 84, wherein the pre-mRNA encoding the target peptide sequence comprises a first start codon, a second start codon, and a premature termination codon (PTC) located downstream of the first start codon and upstream of the second start codon, and wherein the inefficient translation region comprises the premature termination codon (PTC) and the second start codon.

86. The method of claim 85, wherein the first protein comprising the target peptide sequence is translated starting from the first start codon on the first processed mRNA, and the second protein is translated starting from the second start codon on the second processed mRNA.

87. The method of claim 85, wherein at least a portion of the targeted region of the pre-mRNA is upstream or downstream of the inefficient translation region or an exon comprising the PTC and the second start codon.

88. The method of claim 85, wherein at least a portion of the targeted region of the pre-mRNA is within the inefficient translation region or an exon comprising the PTC and the second start codon.

89. The method of claim 84, wherein the inefficient translation region comprises a region that encodes a proline-rich peptide sequence.

90. The method of claim 84, wherein the therapeutic agent increases splicing of the inefficient translation region from the pre-mRNA, thereby increasing a level of the first processed mRNA and increasing expression of the target peptide sequence in the cell.

91. The method of claim 84, wherein the target peptide sequence has at least 100 amino acids.

92. The method of claim 84, wherein the method comprises contacting the cell with the vector encoding the therapeutic agent, and wherein the vector is a viral vector.

93. The method of claim 84, wherein the method comprises contacting the cell with the therapeutic agent, and wherein the therapeutic agent is an antisense oligomer (ASO).

94. The method of claim 93, wherein the antisense oligomer comprises a backbone modification, a modified sugar moiety, or both.

95. The method of claim 93, wherein the antisense oligomer has a sequence that is complementary to a sequence with at least 80% sequence identity to a sequence selected from the group consisting of SEQ ID NOs: 28-31.

96. The method of claim 93, wherein the antisense oligomer has a sequence with at least about 80% sequence identity to a sequence selected from the group consisting of SEQ ID NOs: 35-129 or 4548-4611.

97. The method of claim 84, wherein the pre-mRNA is an MeCP2 pre-mRNA.

98. The method of claim 97, wherein the MeCP2 pre-mRNA comprises a sequence with at least 80% sequence identity to a sequence selected from the group consisting of SEQ ID NOs: 2-27.

99. The method of claim 84, wherein the target peptide sequence is a portion of an MeCP2 protein isoform.

100. The method of claim 84, wherein the targeted region is within a sequence with at least 80% sequence identity to a sequence selected from the group consisting of SEQ ID NOs: 28-31.

101. The method of claim 84, wherein the target peptide sequence is translated from a sequence selected from the group consisting of SEQ ID NOs: 32-34.

102. The method of claim 84, wherein the therapeutic agent decreases a level of an e2 isoform of MeCP2 mRNA and increases a level of an e1 isoform of MeCP2 mRNA in the cell.

103. The method of claim 90, wherein the first processed mRNA encodes a protein having at least 80% sequence identity to SEQ ID NO: 8204 or 8205.

104. The method of claim 84, wherein the therapeutic agent decreases a level of a second processed mRNA encoding a protein having at least 80% sequence identity to SEQ ID NO: 440 or 441.

105. The method of claim 97, wherein the targeted region of the pre-mRNA
(a) comprises at least 10 contiguous nucleobases of SEQ ID NO: 238;
(b) is within a sequence between a pair of genomic sites selected from the group consisting of GRCh38/hg38: chrX 154092307 and GRCh38/hg38: chrX 154092184;
(c) is at least 50 nucleotides downstream of genomic site GRCh38/hg38: chrX 154092184;
(d) is at most 1500 nucleotides downstream of genomic site GRCh38/hg38: chrX 154092184;
(e) is at least 50 nucleotides upstream of genomic site GRCh38/hg38: chrX 154092307; or
(f) is at most 1500 nucleotides upstream of genomic site GRCh38/hg38: chrX 154092307.

106. The method of claim 84, wherein the target peptide sequence is a portion of a full-length protein.

107. The method of claim 84, wherein the target peptide sequence produced is a fully functional protein.

108. The method of claim 84, wherein the target peptide sequence is an N-terminal portion of a full-length protein.

109. The method of claim 84, wherein the target peptide sequence is a C-terminal portion of a full-length protein.

110. The method of claim 84, wherein the target peptide sequence is coded by a portion of the pre-mRNA upstream of the inefficient translation region.

111. The method of claim 84, wherein the target peptide sequence is coded by a portion of the pre-mRNA downstream of the inefficient translation region or the PTC.

112. The method of claim 84, wherein the inefficient translation region is in a 3′ untranslated region (3′ UTR) of the second processed mRNA.

113. The method of claim 84, wherein the method treats a subject suffering from a disease or condition that comprises Rett Syndrome; Rett Syndrome, Preserved Speech Variant; Rett Syndrome, Atypical; or Rett Syndrome, Zappella Variant.

114. A method of treating a disease or a condition in a subject in need thereof by modulating expression of a target peptide sequence in a cell of the subject, the cell having a pre-mRNA that encodes the target peptide sequence and that comprises an inefficient translation region, the method comprising administering to the subject a therapeutically effective amount of the therapeutic agent or a vector encoding the therapeutic agent,
wherein the therapeutic agent binds to a targeted region of the pre-mRNA and modulates splicing of the inefficient translation region from the pre-mRNA, thereby modulating a level of a first processed mRNA that (i) is a splicing product of the pre-mRNA, (ii) is devoid of the inefficient translation region and (iii) encodes a first protein comprising the target peptide sequence, and thereby modulating expression of the target peptide sequence in the cell of the subject,
wherein the first processed mRNA has a higher translation efficiency for producing the first protein in the cell as compared to a translation efficiency of a second processed mRNA for producing a second protein in the cell, and wherein the second protein comprises the target peptide sequence and the second processed mRNA is a splicing product of the pre-mRNA and is otherwise identical to the first processed mRNA but comprises the inefficient translation region.

115. A composition comprising a modified antisense oligonucleotide sequence or a vector encoding a polynucleotide comprising an antisense oligonucleotide sequence, wherein the antisense oligomer sequence has at least about 80% sequence identity to a sequence selected from the group consisting of SEQ ID NOs: 35-129 and 534-8095.
